United States Patent Application Publication US 2014/0004565 A1 - sequence listing, part 58

SEQ ID NO: 1385597 - RNA, 19 nt, Artificial Sequence
  Description of Artificial Sequence: Synthetic oligonucleotide
cuaacauauaagaugcuga

SEQ ID NO: 1385598 - RNA, 19 nt, Artificial Sequence
  Description of Artificial Sequence: Synthetic oligonucleotide
uguauuggcccacguuucg

SEQ ID NO: 1385599 - RNA, 19 nt, Artificial Sequence
  Description of Artificial Sequence: Synthetic oligonucleotide
uaugccagaacaaacuauu

SEQ ID NO: 1385600 - RNA, 19 nt, Artificial Sequence
  Description of Artificial Sequence: Synthetic oligonucleotide
auauaucuaaucucaggga

SEQ ID NO: 1385601 - RNA, 19 nt, Artificial Sequence
  Description of Artificial Sequence: Synthetic oligonucleotide
aaugcauagucucguugug

SEQ ID NO: 1385602 - RNA, 19 nt, Artificial Sequence
  Description of Artificial Sequence: Synthetic oligonucleotide
ugccaccaaaauuaacugg

SEQ ID NO: 1385603 - RNA, 19 nt, Artificial Sequence
  Description of Artificial Sequence: Synthetic oligonucleotide
ucuauuaugccagaacaaa

SEQ ID NO: 1385604 - RNA, 19 nt, Artificial Sequence
  Description of Artificial Sequence: Synthetic oligonucleotide
ucuagcaguagcauagcaa

SEQ ID NO: 1385605 - RNA, 19 nt, Artificial Sequence
  Description of Artificial Sequence: Synthetic oligonucleotide
caguuuuccgaccauagug

SEQ ID NO: 1385606 - RNA, 19 nt, Artificial Sequence
  Description of Artificial Sequence: Synthetic oligonucleotide
ucgguaucugacauaaaac

SEQ ID NO: 1385607 - RNA, 19 nt, Artificial Sequence
  Description of Artificial Sequence: Synthetic oligonucleotide
ucgacaacauauuugggau

SEQ ID NO: 1385608 - RNA, 19 nt, Artificial Sequence
  Description of Artificial Sequence: Synthetic oligonucleotide
uccuguuucaaugcuauca

SEQ ID NO: 1385609 - RNA, 19 nt, Artificial Sequence
  Description of Artificial Sequence: Synthetic oligonucleotide
ucugacauuacuuccguuu

SEQ ID NO: 1385610 - RNA, 19 nt, Artificial Sequence
  Description of Artificial Sequence: Synthetic oligonucleotide
uaacauauaagaugcugau

SEQ ID NO: 1385611 - RNA, 19 nt, Artificial Sequence
  Description of Artificial Sequence: Synthetic oligonucleotide
agcgaucaauauuacaucu

SEQ ID NO: 1385612 - RNA, 19 nt, Artificial Sequence
  Description of Artificial Sequence: Synthetic oligonucleotide
ugacauaugaguacagguu

SEQ ID NO: 1385613 - RNA, 19 nt, Artificial Sequence
  Description of Artificial Sequence: Synthetic oligonucleotide
aaguacuuagcuaguguuc

SEQ ID NO: 1385614 - RNA, 19 nt, Artificial Sequence
  Description of Artificial Sequence: Synthetic oligonucleotide
gaaucagauagcccaacac

SEQ ID NO: 1385615 - RNA, 19 nt, Artificial Sequence
  Description of Artificial Sequence: Synthetic oligonucleotide
cuauuauuacauguucucc

SEQ ID NO: 1385616 - RNA, 19 nt, Artificial Sequence
  Description of Artificial Sequence: Synthetic oligonucleotide
uggaucaagagcacuuccc

SEQ ID NO: 1385617 - RNA, 19 nt, Artificial Sequence
  Description of Artificial Sequence: Synthetic oligonucleotide
cugccgaugaugcaagucg

SEQ ID NO: 1385618 - RNA, 19 nt, Artificial Sequence
  Description of Artificial Sequence: Synthetic oligonucleotide
uauuaaccacaucaacugu

SEQ ID NO: 1385619 - RNA, 19 nt, Artificial Sequence
  Description of Artificial Sequence: Synthetic oligonucleotide
aaucuagcaguagcauagc

SEQ ID NO: 1385620 - RNA, 19 nt, Artificial Sequence
  Description of Artificial Sequence: Synthetic oligonucleotide
uagaauaauucaucucaca

SEQ ID NO: 1385621 - RNA, 19 nt, Artificial Sequence
  Description of Artificial Sequence: Synthetic oligonucleotide
gccuuuaagaugcaaagcc

SEQ ID NO: 1385622 - RNA, 19 nt, Artificial Sequence
  Description of Artificial Sequence: Synthetic oligonucleotide
uacaugacauaugaguaca

SEQ ID NO: 1385623 - RNA, 19 nt, Artificial Sequence
  Description of Artificial Sequence: Synthetic oligonucleotide
uggaagacuacugaugaac

SEQ ID NO: 1385624 - RNA, 19 nt, Artificial Sequence
  Description of Artificial Sequence: Synthetic oligonucleotide
gaugcaagucgcuuccuug

SEQ ID NO: 1385625 - RNA, 19 nt, Artificial Sequence
  Description of Artificial Sequence: Synthetic oligonucleotide
ucaagcugaacaccaagau

SEQ ID NO: 1385626 - RNA, 19 nt, Artificial Sequence
  Description of Artificial Sequence: Synthetic oligonucleotide
aaauaccguuagcccacgc

SEQ ID NO: 1385627 - RNA, 19 nt, Artificial Sequence
  Description of Artificial Sequence: Synthetic oligonucleotide
acaaauaccguuagcccac

SEQ ID NO: 1385628 - RNA, 19 nt, Artificial Sequence
  Description of Artificial Sequence: Synthetic oligonucleotide
uuagcuaguguucgcggug

SEQ ID NO: 1385629 - RNA, 19 nt, Artificial Sequence
  Description of Artificial Sequence: Synthetic oligonucleotide
gacgcagcuguagugaagg

SEQ ID NO: 1385630 - RNA, 19 nt, Artificial Sequence
  Description of Artificial Sequence: Synthetic oligonucleotide
agaacuuuaucagcaagug

SEQ ID NO: 1385631 - RNA, 19 nt, Artificial Sequence
  Description of Artificial Sequence: Synthetic oligonucleotide
uacuuagcuaguguucgcg

SEQ ID NO: 1385632 - RNA, 19 nt, Artificial Sequence
  Description of Artificial Sequence: Synthetic oligonucleotide
aaaagacaauaacuagaau

SEQ ID NO: 1385633 - RNA, 19 nt, Artificial Sequence
  Description of Artificial Sequence: Synthetic oligonucleotide
uguacgguauauaucuaau

SEQ ID NO: 1385634 - RNA, 19 nt, Artificial Sequence
  Description of Artificial Sequence: Synthetic oligonucleotide
aagaaucagauagcccaac

SEQ ID NO: 1385635 - RNA, 19 nt, Artificial Sequence
  Description of Artificial Sequence: Synthetic oligonucleotide
gaugcaaagccuauuauua

SEQ ID NO: 1385636 - RNA, 19 nt, Artificial Sequence
  Description of Artificial Sequence: Synthetic oligonucleotide
auagucucguuguguacgg

SEQ ID NO: 1385637 - RNA, 19 nt, Artificial Sequence
  Description of Artificial Sequence: Synthetic oligonucleotide
ugauguaauucucugccuu

SEQ ID NO: 1385638 - RNA, 19 nt, Artificial Sequence
  Description of Artificial Sequence: Synthetic oligonucleotide
uaugaguacagguuccaau

SEQ ID NO: 1385639 - RNA, 19 nt, Artificial Sequence
  Description of Artificial Sequence: Synthetic oligonucleotide
caaacuauuugguaccuga

SEQ ID NO: 1385640 - RNA, 19 nt, Artificial Sequence
  Description of Artificial Sequence: Synthetic oligonucleotide
ucaccugaacaguuuuccg

SEQ ID NO: 1385641 - RNA, 19 nt, Artificial Sequence
  Description of Artificial Sequence: Synthetic oligonucleotide
uuaugccagaacaaacuau

SEQ ID NO: 1385642 - RNA, 19 nt, Artificial Sequence
  Description of Artificial Sequence: Synthetic oligonucleotide
cugaacaccaagaugggga

SEQ ID NO: 1385643 - RNA, 19 nt, Artificial Sequence
  Description of Artificial Sequence: Synthetic oligonucleotide
aguacagguuccaauauca

SEQ ID NO: 1385644 - RNA, 19 nt, Artificial Sequence
  Description of Artificial Sequence: Synthetic oligonucleotide
cuugucaucgacaacauau

SEQ ID NO: 1385645 - RNA, 19 nt, Artificial Sequence
  Description of Artificial Sequence: Synthetic oligonucleotide
caauaacuagaauaauuca

SEQ ID NO: 1385646 - RNA, 19 nt, Artificial Sequence
  Description of Artificial Sequence: Synthetic oligonucleotide
cacgcuagagcaaaacaac

SEQ ID NO: 1385647 - RNA, 19 nt, Artificial Sequence
  Description of Artificial Sequence: Synthetic oligonucleotide
ucuacauuauaguuuuauu

SEQ ID NO: 1385648 - RNA, 19 nt, Artificial Sequence
  Description of Artificial Sequence: Synthetic oligonucleotide
caugacauaugaguacagg

SEQ ID NO: 1385649 - RNA, 19 nt, Artificial Sequence
  Description of Artificial Sequence: Synthetic oligonucleotide
uuuaaucuagcaguagcau

SEQ ID NO: 1385650 - RNA, 19 nt, Artificial Sequence
  Description of Artificial Sequence: Synthetic oligonucleotide
aaacuauuugguaccugag

SEQ ID NO: 1385651 - RNA, 19 nt, Artificial Sequence
  Description of Artificial Sequence: Synthetic oligonucleotide
ggauuuucauacgagcugg

SEQ ID NO: 1385652 - RNA, 19 nt, Artificial Sequence
  Description of Artificial Sequence: Synthetic oligonucleotide
ucauguaagugagugggac

SEQ ID NO: 1385653 - RNA, 19 nt, Artificial Sequence
  Description of Artificial Sequence: Synthetic oligonucleotide
gaaacaguaggaaggcaug

SEQ ID NO: 1385654 - RNA, 19 nt, Artificial Sequence
  Description of Artificial Sequence: Synthetic oligonucleotide
uagcaauaaauaccaucca

SEQ ID NO: 1385655 - RNA, 19 nt, Artificial Sequence
  Description of Artificial Sequence: Synthetic oligonucleotide
uguauuuaccuugcugaug

SEQ ID NO: 1385656 - RNA, 19 nt, Artificial Sequence
  Description of Artificial Sequence: Synthetic oligonucleotide
uaucuaaucucagggaauc

SEQ ID NO: 1385657 - RNA, 19 nt, Artificial Sequence
  Description of Artificial Sequence: Synthetic oligonucleotide
caagucgcuuccuugcugc

SEQ ID NO: 1385658 - RNA, 19 nt, Artificial Sequence
  Description of Artificial Sequence: Synthetic oligonucleotide
auuauuacauguucuccua

SEQ ID NO: 1385659 - RNA, 19 nt, Artificial Sequence
  Description of Artificial Sequence: Synthetic oligonucleotide
auuuucauacgagcuggcg

SEQ ID NO: 1385660 - RNA, 19 nt, Artificial Sequence
  Description of Artificial Sequence: Synthetic oligonucleotide
acaccucuacccuacccac

SEQ ID NO: 1385661 - RNA, 19 nt, Artificial Sequence
  Description of Artificial Sequence: Synthetic oligonucleotide
auguaagugagugggacug

SEQ ID NO: 1385662 - RNA, 19 nt, Artificial Sequence
  Description of Artificial Sequence: Synthetic oligonucleotide
auuaugccagaacaaacua

SEQ ID NO: 1385663 - RNA, 19 nt, Artificial Sequence
  Description of Artificial Sequence: Synthetic oligonucleotide
acauaaaacacugcagcga

SEQ ID NO: 1385664 - RNA, 19 nt, Artificial Sequence
  Description of Artificial Sequence: Synthetic oligonucleotide
auauuugggauuguccaug

SEQ ID NO: 1385665 - RNA, 19 nt, Artificial Sequence
  Description of Artificial Sequence: Synthetic oligonucleotide
uugggauuguccauggauu

SEQ ID NO: 1385666 - RNA, 19 nt, Artificial Sequence
  Description of Artificial Sequence: Synthetic oligonucleotide
acgcuagagcaaaacaacc

SEQ ID NO: 1385667 - RNA, 19 nt, Artificial Sequence
  Description of Artificial Sequence: Synthetic oligonucleotide
acugcagcgaucaauauua

SEQ ID NO: 1385668 - RNA, 19 nt, Artificial Sequence
  Description of Artificial Sequence: Synthetic oligonucleotide
cagauagcccaacacuggg

SEQ ID NO: 1385669 - RNA, 19 nt, Artificial Sequence
  Description of Artificial Sequence: Synthetic oligonucleotide
gucaucgacaacauauuug

SEQ ID NO: 1385670 - RNA, 19 nt, Artificial Sequence
  Description of Artificial Sequence: Synthetic oligonucleotide
uuuuguauuggcccacguu

SEQ ID NO: 1385671 - RNA, 19 nt, Artificial Sequence
  Description of Artificial Sequence: Synthetic oligonucleotide
cacagcuaaguuuacuguc

SEQ ID NO: 1385672 - RNA, 19 nt, Artificial Sequence
  Description of Artificial Sequence: Synthetic oligonucleotide
acuucaagaccaucuauuu

SEQ ID NO: 1385673 - RNA, 19 nt, Artificial Sequence
  Description of Artificial Sequence: Synthetic oligonucleotide
uucuaaacuuacugcauuu

SEQ ID NO: 1385674 - RNA, 19 nt, Artificial Sequence
  Description of Artificial Sequence: Synthetic oligonucleotide
agaaucagauagcccaaca

SEQ ID NO: 1385675 - RNA, 19 nt, Artificial Sequence
  Description of Artificial Sequence: Synthetic oligonucleotide
guguugucuauuaugccag

SEQ ID NO: 1385676 - RNA, 19 nt, Artificial Sequence
  Description of Artificial Sequence: Synthetic oligonucleotide
auccaacaaauaccguuag

SEQ ID NO: 1385677 - RNA, 19 nt, Artificial Sequence
  Description of Artificial Sequence: Synthetic oligonucleotide
caucuauuuuauuugaccu

SEQ ID NO: 1385678 - RNA, 19 nt, Artificial Sequence
  Description of Artificial Sequence: Synthetic oligonucleotide
guuagcccacgcuagagca

SEQ ID NO: 1385679 - RNA, 19 nt, Artificial Sequence
  Description of Artificial Sequence: Synthetic oligonucleotide
uaccguuagcccacgcuag

SEQ ID NO: 1385680 - RNA, 19 nt, Artificial Sequence
  Description of Artificial Sequence: Synthetic oligonucleotide
aguucgguaucugacauaa

SEQ ID NO: 1385681 - RNA, 19 nt, Artificial Sequence
  Description of Artificial Sequence: Synthetic oligonucleotide
aucuaaucucagggaaucc

SEQ ID NO: 1385682 - RNA, 19 nt, Artificial Sequence
  Description of Artificial Sequence: Synthetic oligonucleotide
auggauuuucauacgagcu

SEQ ID NO: 1385683 - RNA, 19 nt, Artificial Sequence
  Description of Artificial Sequence: Synthetic oligonucleotide
uuaacuggacugcuguauu

SEQ ID NO: 1385684 - RNA, 19 nt, Artificial Sequence
  Description of Artificial Sequence: Synthetic oligonucleotide
uuguauuggcccacguuuc

SEQ ID NO: 1385685 - RNA, 19 nt, Artificial Sequence
  Description of Artificial Sequence: Synthetic oligonucleotide
ucaaugcuaucaacuauuu

SEQ ID NO: 1385686 - RNA, 19 nt, Artificial Sequence
  Description of Artificial Sequence: Synthetic oligonucleotide
aagaucugcauaggucaag

SEQ ID NO: 1385687 - RNA, 19 nt, Artificial Sequence
  Description of Artificial Sequence: Synthetic oligonucleotide
aguuuuccgaccauaguga

SEQ ID NO: 1385688 - RNA, 19 nt, Artificial Sequence
  Description of Artificial Sequence: Synthetic oligonucleotide
aaccaauucuugucaucga

SEQ ID NO: 1385689 - RNA, 19 nt, Artificial Sequence
  Description of Artificial Sequence: Synthetic oligonucleotide
ccgaccauagugauaauag

SEQ ID NO: 1385690 - RNA, 19 nt, Artificial Sequence
  Description of Artificial Sequence: Synthetic oligonucleotide
acuggaaauucugacauua

SEQ ID NO: 1385691 - RNA, 19 nt, Artificial Sequence
  Description of Artificial Sequence: Synthetic oligonucleotide
ugucaucgacaacauauuu

SEQ ID NO: 1385692 - RNA, 19 nt, Artificial Sequence
  Description of Artificial Sequence: Synthetic oligonucleotide
agaguucgguaucugacau

SEQ ID NO: 1385693 - RNA, 19 nt, Artificial Sequence
  Description of Artificial Sequence: Synthetic oligonucleotide
ugccgaugaugcaagucgc

SEQ ID NO: 1385694 - RNA, 19 nt, Artificial Sequence
  Description of Artificial Sequence: Synthetic oligonucleotide
aguggaucaagagcacuuc

SEQ ID NO: 1385695 - RNA, 19 nt, Artificial Sequence
  Description of Artificial Sequence: Synthetic oligonucleotide
uaagaucugcauaggucaa

SEQ ID NO: 1385696 - RNA, 19 nt, Artificial Sequence
  Description of Artificial Sequence: Synthetic oligonucleotide
gaauaagaucugcauaggu

SEQ ID NO: 1385697 - RNA, 19 nt, Artificial Sequence
  Description of Artificial Sequence: Synthetic oligonucleotide
uaauagcuguaugcugacg

SEQ ID NO: 1385698 - RNA, 19 nt, Artificial Sequence
  Description of Artificial Sequence: Synthetic oligonucleotide
auuggcccacguuucguag

SEQ ID NO: 1385699 - RNA, 19 nt, Artificial Sequence
  Description of Artificial Sequence: Synthetic oligonucleotide
auagcuguaugcugacgca

SEQ ID NO: 1385700 - RNA, 19 nt, Artificial Sequence
  Description of Artificial Sequence: Synthetic oligonucleotide
cugaagauaaaugcuguca

SEQ ID NO: 1385701 - RNA, 19 nt, Artificial Sequence
  Description of Artificial Sequence: Synthetic oligonucleotide
aacaaccuagugcaacauu

SEQ ID NO: 1385702 - RNA, 19 nt, Artificial Sequence
  Description of Artificial Sequence: Synthetic oligonucleotide
ccuauuauuacauguucuc

SEQ ID NO: 1385703 - RNA, 19 nt, Artificial Sequence
  Description of Artificial Sequence: Synthetic oligonucleotide
augauguaauucucugccu

SEQ ID NO: 1385704 - RNA, 19 nt, Artificial Sequence
  Description of Artificial Sequence: Synthetic oligonucleotide
uagcaaggauugaaguacu

SEQ ID NO: 1385705 - RNA, 19 nt, Artificial Sequence
  Description of Artificial Sequence: Synthetic oligonucleotide
uguagcuuucgcuggcgcu

SEQ ID NO: 1385706 - RNA, 19 nt, Artificial Sequence
  Description of Artificial Sequence: Synthetic oligonucleotide
gguaucugacauaaaacac

SEQ ID NO: 1385707 - RNA, 19 nt, Artificial Sequence
  Description of Artificial Sequence: Synthetic oligonucleotide
caucgacaacauauuuggg

SEQ ID NO: 1385708 - RNA, 19 nt, Artificial Sequence
  Description of Artificial Sequence: Synthetic oligonucleotide
guacgguauauaucuaauc

SEQ ID NO: 1385709 - RNA, 19 nt, Artificial Sequence
  Description of Artificial Sequence: Synthetic oligonucleotide
uacugucaguuucucaaau

SEQ ID NO: 1385710 - RNA, 19 nt, Artificial Sequence
  Description of Artificial Sequence: Synthetic oligonucleotide
auaccguuagcccacgcua

SEQ ID NO: 1385711 - RNA, 19 nt, Artificial Sequence
  Description of Artificial Sequence: Synthetic oligonucleotide
gaccauagugauaauagcu

SEQ ID NO: 1385712 - RNA, 19 nt, Artificial Sequence
  Description of Artificial Sequence: Synthetic oligonucleotide
uugucaucgacaacauauu

SEQ ID NO: 1385713 - RNA, 19 nt, Artificial Sequence
  Description of Artificial Sequence: Synthetic oligonucleotide
gcuaacauauaagaugcug

SEQ ID NO: 1385714 - RNA, 19 nt, Artificial Sequence
  Description of Artificial Sequence: Synthetic oligonucleotide
cauagcaaggauugaagua

SEQ ID NO: 1385715 - RNA, 19 nt, Artificial Sequence
  Description of Artificial Sequence: Synthetic oligonucleotide
gaaguacuuagcuaguguu

SEQ ID NO: 1385716 - RNA, 19 nt, Artificial Sequence
  Description of Artificial Sequence: Synthetic oligonucleotide
guguucgcgguguuggcag

SEQ ID NO: 1385717 - RNA, 19 nt, Artificial Sequence
  Description of Artificial Sequence: Synthetic oligonucleotide
acaaccuagugcaacauua

SEQ ID NO: 1385718 - RNA, 19 nt, Artificial Sequence
  Description of Artificial Sequence: Synthetic oligonucleotide
cucaagcugaacaccaaga

SEQ ID NO: 1385719 - RNA, 19 nt, Artificial Sequence
  Description of Artificial Sequence: Synthetic oligonucleotide
uuacugucaguuucucaaa

SEQ ID NO: 1385720 - RNA, 19 nt, Artificial Sequence
  Description of Artificial Sequence: Synthetic oligonucleotide
cagcgaucaauauuacauc

SEQ ID NO: 1385721 - RNA, 19 nt, Artificial Sequence
  Description of Artificial Sequence: Synthetic oligonucleotide
cauuauaguuuuauuugua

SEQ ID NO: 1385722 - RNA, 19 nt, Artificial Sequence
  Description of Artificial Sequence: Synthetic oligonucleotide
cucgccgggacccaccggg

SEQ ID NO: 1385723 - RNA, 19 nt, Artificial Sequence
  Description of Artificial Sequence: Synthetic oligonucleotide
aucuagcaguagcauagca

SEQ ID NO: 1385724 - RNA, 19 nt, Artificial Sequence
  Description of Artificial Sequence: Synthetic oligonucleotide
agggaaucccucuugcuuu

SEQ ID NO: 1385725 - RNA, 19 nt, Artificial Sequence
  Description of Artificial Sequence: Synthetic oligonucleotide
gguauauaucuaaucucag

SEQ ID NO: 1385726 - RNA, 19 nt, Artificial Sequence
  Description of Artificial Sequence: Synthetic oligonucleotide
uagcuguaugcugacgcag

SEQ ID NO: 1385727 - RNA, 19 nt, Artificial Sequence
  Description of Artificial Sequence: Synthetic oligonucleotide
ccaaaauuaacuggacugc

SEQ ID NO: 1385728 - RNA, 19 nt, Artificial Sequence
  Description of Artificial Sequence: Synthetic oligonucleotide
uccuguagcuuucgcuggc

SEQ ID NO: 1385729 - RNA, 19 nt, Artificial Sequence
  Description of Artificial Sequence: Synthetic oligonucleotide
ugacgcagcuguagugaag

SEQ ID NO: 1385730 - RNA, 19 nt, Artificial Sequence
  Description of Artificial Sequence: Synthetic oligonucleotide
aguaggaaggcaugaugua

SEQ ID NO: 1385731 - RNA, 19 nt, Artificial Sequence
  Description of Artificial Sequence: Synthetic oligonucleotide
ugggauuguccauggauuu

SEQ ID NO: 1385732 - RNA, 19 nt, Artificial Sequence
  Description of Artificial Sequence: Synthetic oligonucleotide
aaguggaucaagagcacuu

SEQ ID NO: 1385733 - RNA, 19 nt, Artificial Sequence
  Description of Artificial Sequence: Synthetic oligonucleotide
ggaauaagaucugcauagg

SEQ ID NO: 1385734 - RNA, 19 nt, Artificial Sequence
  Description of Artificial Sequence: Synthetic oligonucleotide
ggagcucucucauuugccc

SEQ ID NO: 1385735 - RNA, 19 nt, Artificial Sequence
  Description of Artificial Sequence: Synthetic oligonucleotide
uguacaccucuacccuacc

SEQ ID NO: 1385736 - RNA, 19 nt, Artificial Sequence
  Description of Artificial Sequence: Synthetic oligonucleotide
ugaacaguuuuccgaccau

SEQ ID NO: 1385737 - RNA, 19 nt, Artificial Sequence
  Description of Artificial Sequence: Synthetic oligonucleotide
guuguguacgguauauauc

SEQ ID NO: 1385738 - RNA, 19 nt, Artificial Sequence
  Description of Artificial Sequence: Synthetic oligonucleotide
ucagggaaucccucuugcu

SEQ ID NO: 1385739 - RNA, 19 nt, Artificial Sequence
  Description of Artificial Sequence: Synthetic oligonucleotide
aaacaaccuagugcaacau

SEQ ID NO: 1385740 - RNA, 19 nt, Artificial Sequence
  Description of Artificial Sequence: Synthetic oligonucleotide
cagcuaaguuuacugucag

SEQ ID NO: 1385741 - RNA, 19 nt, Artificial Sequence
  Description of Artificial Sequence: Synthetic oligonucleotide
uuuuccgaccauagugaua

SEQ ID NO: 1385742 - RNA, 19 nt, Artificial Sequence
  Description of Artificial Sequence: Synthetic oligonucleotide
caccugaacaguuuuccga

SEQ ID NO: 1385743 - RNA, 19 nt, Artificial Sequence
  Description of Artificial Sequence: Synthetic oligonucleotide
uucauacgagcuggcggcg

SEQ ID NO: 1385744 - RNA, 19 nt, Artificial Sequence
  Description of Artificial Sequence: Synthetic oligonucleotide
guguacgguauauaucuaa

SEQ ID NO: 1385745 - RNA, 19 nt, Artificial Sequence
  Description of Artificial Sequence: Synthetic oligonucleotide
uucucaagcugaacaccaa

SEQ ID NO: 1385746 - RNA, 19 nt, Artificial Sequence
  Description of Artificial Sequence: Synthetic oligonucleotide
auaaaacacugcagcgauc

SEQ ID NO: 1385747 - RNA, 19 nt, Artificial Sequence
  Description of Artificial Sequence: Synthetic oligonucleotide
gugauaauagcuguaugcu

SEQ ID NO: 1385748 - RNA, 19 nt, Artificial Sequence
  Description of Artificial Sequence: Synthetic oligonucleotide
aacuggacugcuguauuua

SEQ ID NO: 1385749 - RNA, 19 nt, Artificial Sequence
  Description of Artificial Sequence: Synthetic oligonucleotide
agguuccaauaucaaacau

SEQ ID NO: 1385750 - RNA, 19 nt, Artificial Sequence
  Description of Artificial Sequence: Synthetic oligonucleotide
uuggcccacguuucguagc

SEQ ID NO: 1385751 - RNA, 19 nt, Artificial Sequence
  Description of Artificial Sequence: Synthetic oligonucleotide
guacaccucuacccuaccc

SEQ ID NO: 1385752 - RNA, 19 nt, Artificial Sequence
  Description of Artificial Sequence: Synthetic oligonucleotide
guacuuagcuaguguucgc

SEQ ID NO: 1385753 - RNA, 19 nt, Artificial Sequence
  Description of Artificial Sequence: Synthetic oligonucleotide
auaucuaaucucagggaau

SEQ ID NO: 1385754 - RNA, 19 nt, Artificial Sequence
  Description of Artificial Sequence: Synthetic oligonucleotide
uguguacgguauauaucua

SEQ ID NO: 1385755 - RNA, 19 nt, Artificial Sequence
  Description of Artificial Sequence: Synthetic oligonucleotide
gugggacuggaauaagauc

SEQ ID NO: 1385756 - RNA, 19 nt, Artificial Sequence
  Description of Artificial Sequence: Synthetic oligonucleotide
caugguuugucugacaagu

SEQ ID NO: 1385757 - RNA, 19 nt, Artificial Sequence
  Description of Artificial Sequence: Synthetic oligonucleotide
cauaaaacacugcagcgau

SEQ ID NO: 1385758 - RNA, 19 nt, Artificial Sequence
  Description of Artificial Sequence: Synthetic oligonucleotide
cuggaauaagaucugcaua

SEQ ID NO: 1385759 - RNA, 19 nt, Artificial Sequence
  Description of Artificial Sequence: Synthetic oligonucleotide
agcuaaguuuacugucagu

SEQ ID NO: 1385760 - RNA, 19 nt, Artificial Sequence
  Description of Artificial Sequence: Synthetic oligonucleotide
acgcagcuguagugaaggc

SEQ ID NO: 1385761 - RNA, 19 nt, Artificial Sequence
  Description of Artificial Sequence: Synthetic oligonucleotide
cagaguucgguaucugaca

SEQ ID NO: 1385762 - RNA, 19 nt, Artificial Sequence
  Description of Artificial Sequence: Synthetic oligonucleotide
aucaacuguuaauguguau

SEQ ID NO: 1385763 - RNA, 19 nt, Artificial Sequence
  Description of Artificial Sequence: Synthetic oligonucleotide
uuagcccacgcuagagcaa

SEQ ID NO: 1385764 - RNA, 19 nt, Artificial Sequence
  Description of Artificial Sequence: Synthetic oligonucleotide
acucugacuccuguguugu

SEQ ID NO: 1385765 - RNA, 19 nt, Artificial Sequence
  Description of Artificial Sequence: Synthetic oligonucleotide
ucuugucaucgacaacaua

SEQ ID NO: 1385766 - RNA, 19 nt, Artificial Sequence
  Description of Artificial Sequence: Synthetic oligonucleotide
uccgaccauagugauaaua

SEQ ID NO: 1385767 - RNA, 19 nt, Artificial Sequence
  Description of Artificial Sequence: Synthetic oligonucleotide
ugcauaggucaagcuaaca

SEQ ID NO: 1385768 - RNA, 19 nt, Artificial Sequence
  Description of Artificial Sequence: Synthetic oligonucleotide
gccaccaaaauuaacugga

SEQ ID NO: 1385769 - RNA, 19 nt, Artificial Sequence
  Description of Artificial Sequence: Synthetic oligonucleotide
ucuacccuacccacagcua

SEQ ID NO: 1385770 - RNA, 19 nt, Artificial Sequence
  Description of Artificial Sequence: Synthetic oligonucleotide
augguuugucugacaaguc

SEQ ID NO: 1385771 - RNA, 19 nt, Artificial Sequence
  Description of Artificial Sequence: Synthetic oligonucleotide
cuaaucucagggaaucccu

SEQ ID NO: 1385772 - RNA, 19 nt, Artificial Sequence
  Description of Artificial Sequence: Synthetic oligonucleotide
acaugacauaugaguacag

SEQ ID NO: 1385773 - RNA, 19 nt, Artificial Sequence
  Description of Artificial Sequence: Synthetic oligonucleotide
uggggccaaaccaauucuu

SEQ ID NO: 1385774 - RNA, 19 nt, Artificial Sequence
  Description of Artificial Sequence: Synthetic oligonucleotide
ggcuguguacaccucuacc

SEQ ID NO: 1385775 - RNA, 19 nt, Artificial Sequence
  Description of Artificial Sequence: Synthetic oligonucleotide
caagaaucagauagcccaa

SEQ ID NO: 1385776 - RNA, 19 nt, Artificial Sequence
  Description of Artificial Sequence: Synthetic oligonucleotide
auuugggauuguccaugga

SEQ ID NO: 1385777 - RNA, 19 nt, Artificial Sequence
  Description of Artificial Sequence: Synthetic oligonucleotide
gauguaauucucugccuuu

SEQ ID NO: 1385778 - RNA, 19 nt, Artificial Sequence
  Description of Artificial Sequence: Synthetic oligonucleotide
ucucguuguguacgguaua

SEQ ID NO: 1385779 - RNA, 19 nt, Artificial Sequence
  Description of Artificial Sequence: Synthetic oligonucleotide
uaguguucgcgguguuggc

SEQ ID NO: 1385780 - RNA, 19 nt, Artificial Sequence
  Description of Artificial Sequence: Synthetic oligonucleotide
augcauagucucguugugu

SEQ ID NO: 1385781 - RNA, 19 nt, Artificial Sequence
  Description of Artificial Sequence: Synthetic oligonucleotide
cgguauauaucuaaucuca

SEQ ID NO: 1385782 - RNA, 19 nt, Artificial Sequence
  Description of Artificial Sequence: Synthetic oligonucleotide
auuuaucauguaagugagu

SEQ ID NO: 1385783 - RNA, 19 nt, Artificial Sequence
  Description of Artificial Sequence: Synthetic oligonucleotide
uagcuaguguucgcggugu

SEQ ID NO: 1385784 - RNA, 19 nt, Artificial Sequence
  Description of Artificial Sequence: Synthetic oligonucleotide
aggaaggcaugauguaauu

SEQ ID NO: 1385785 - RNA, 19 nt, Artificial Sequence
  Description of Artificial Sequence: Synthetic oligonucleotide
aguguucgcgguguuggca

SEQ ID NO: 1385786 - RNA, 19 nt, Artificial Sequence
  Description of Artificial Sequence: Synthetic oligonucleotide
ggauugaaguacuuagcua

SEQ ID NO: 1385787 - RNA, 19 nt, Artificial Sequence
  Description of Artificial Sequence: Synthetic oligonucleotide
caaauaccguuagcccacg

SEQ ID NO: 1385788 - RNA, 19 nt, Artificial Sequence
  Description of Artificial Sequence: Synthetic oligonucleotide
guucuccuacucugacucc

SEQ ID NO: 1385789 - RNA, 19 nt, Artificial Sequence
  Description of Artificial Sequence: Synthetic oligonucleotide
cgguaucugacauaaaaca

SEQ ID NO: 1385790 - RNA, 19 nt, Artificial Sequence
  Description of Artificial Sequence: Synthetic oligonucleotide
ugcgcgguagcuccuccuc

SEQ ID NO: 1385791 - RNA, 19 nt, Artificial Sequence
  Description of Artificial Sequence: Synthetic oligonucleotide
ucauacgagcuggcggcgc

SEQ ID NO: 1385792 - RNA, 19 nt, Artificial Sequence
  Description of Artificial Sequence: Synthetic oligonucleotide
caguuucucaaauggucaa

SEQ ID NO: 1385793 - RNA, 19 nt, Artificial Sequence
  Description of Artificial Sequence: Synthetic oligonucleotide
cauaugaguacagguucca

SEQ ID NO: 1385794 - RNA, 19 nt, Artificial Sequence
  Description of Artificial Sequence: Synthetic oligonucleotide
gugagugggacuggaauaa

SEQ ID NO: 1385795 - RNA, 19 nt, Artificial Sequence
  Description of Artificial Sequence: Synthetic oligonucleotide
ucguagcaauaaauaccau

SEQ ID NO: 1385796 - RNA, 19 nt, Artificial Sequence
  Description of Artificial Sequence: Synthetic oligonucleotide
gaagacuacugaugaacuu

SEQ ID NO: 1385797 - RNA, 19 nt, Artificial Sequence
  Description of Artificial Sequence: Synthetic oligonucleotide
caaccuagugcaacauuaa

SEQ ID NO: 1385798 - RNA, 19 nt, Artificial Sequence
  Description of Artificial Sequence: Synthetic oligonucleotide
caucaacuguuaaugugua

SEQ ID NO: 1385799 - RNA, 19 nt, Artificial Sequence
  Description of Artificial Sequence: Synthetic oligonucleotide
agcucucucauuugcccuu

SEQ ID NO: 1385800 - RNA, 19 nt, Artificial Sequence
  Description of Artificial Sequence: Synthetic oligonucleotide
agcugccaccaaaauuaac

SEQ ID NO: 1385801 - RNA, 19 nt, Artificial Sequence
  Description of Artificial Sequence: Synthetic oligonucleotide
gcccuuuaucaccugaaca

SEQ ID NO: 1385802 - RNA, 19 nt, Artificial Sequence
  Description of Artificial Sequence: Synthetic oligonucleotide
accguuagcccacgcuaga

SEQ ID NO: 1385803 - RNA, 19 nt, Artificial Sequence
  Description of Artificial Sequence: Synthetic oligonucleotide
uagcccacgcuagagcaaa

SEQ ID NO: 1385804 - RNA, 19 nt, Artificial Sequence
  Description of Artificial Sequence: Synthetic oligonucleotide
auaugaguacagguuccaa

SEQ ID NO: 1385805 - RNA, 19 nt, Artificial Sequence
  Description of Artificial Sequence: Synthetic oligonucleotide
auguaauucucugccuuua

SEQ ID NO: 1385806 - RNA, 19 nt, Artificial Sequence
  Description of Artificial Sequence: Synthetic oligonucleotide
caaaauuaacuggacugcu

SEQ ID NO: 1385807 - RNA, 19 nt, Artificial Sequence
  Description of Artificial Sequence: Synthetic oligonucleotide
cauguaagugagugggacu

SEQ ID NO: 1385808 - RNA, 19 nt, Artificial Sequence
  Description of Artificial Sequence: Synthetic oligonucleotide
aucauguaagugaguggga

SEQ ID NO: 1385809 - RNA, 19 nt, Artificial Sequence
  Description of Artificial Sequence: Synthetic oligonucleotide
cuuuaucaccugaacaguu

SEQ ID NO: 1385810 - RNA, 19 nt, Artificial Sequence
  Description of Artificial Sequence: Synthetic oligonucleotide
uguucgcgguguuggcaga

SEQ ID NO: 1385811 - RNA, 19 nt, Artificial Sequence
  Description of Artificial Sequence: Synthetic oligonucleotide
caccaaaauuaacuggacu

SEQ ID NO: 1385812 - RNA, 19 nt, Artificial Sequence
  Description of Artificial Sequence: Synthetic oligonucleotide
gcugucagcauaauugaaa

SEQ ID NO: 1385813 - RNA, 19 nt, Artificial Sequence
  Description of Artificial Sequence: Synthetic oligonucleotide
uucugacauuacuuccguu

SEQ ID NO: 1385814 - RNA, 19 nt, Artificial Sequence
  Description of Artificial Sequence: Synthetic oligonucleotide
agauggggaaaguccugua

SEQ ID NO: 1385815 - RNA, 19 nt, Artificial Sequence
  Description of Artificial Sequence: Synthetic oligonucleotide
cgaccauagugauaauagc

SEQ ID NO: 1385816 - RNA, 19 nt, Artificial Sequence
  Description of Artificial Sequence: Synthetic oligonucleotide
ccaccaaaauuaacuggac

SEQ ID NO: 1385817 - RNA, 19 nt, Artificial Sequence
  Description of Artificial Sequence: Synthetic oligonucleotide
cacguuucguagcaauaaa

SEQ ID NO: 1385818 - RNA, 19 nt, Artificial Sequence
  Description of Artificial Sequence: Synthetic oligonucleotide
gagcucucucauuugcccu

SEQ ID NO: 1385819 - RNA, 19 nt, Artificial Sequence
  Description of Artificial Sequence: Synthetic oligonucleotide
ucgcgguguuggcagaguu

SEQ ID NO: 1385820 - RNA, 19 nt, Artificial Sequence
  Description of Artificial Sequence: Synthetic oligonucleotide
ggaaggcaugauguaauuc

SEQ ID NO: 1385821 - RNA, 19 nt, Artificial Sequence
  Description of Artificial Sequence: Synthetic oligonucleotide
gcauagcaaggauugaagu

SEQ ID NO: 1385822 - RNA, 19 nt, Artificial Sequence
  Description of Artificial Sequence: Synthetic oligonucleotide
ccacgcuagagcaaaacaa

SEQ ID NO: 1385823 - RNA, 19 nt, Artificial Sequence
  Description of Artificial Sequence: Synthetic oligonucleotide
cuguguacaccucuacccu

SEQ ID NO: 1385824 - RNA, 19 nt, Artificial Sequence
  Description of Artificial Sequence: Synthetic oligonucleotide
gcaagucgcuuccuugcug

SEQ ID NO: 1385825 - RNA, 19 nt, Artificial Sequence
  Description of Artificial Sequence: Synthetic oligonucleotide
agcuaacauauaagaugcu

SEQ ID NO: 1385826 - RNA, 19 nt, Artificial Sequence
  Description of Artificial Sequence: Synthetic oligonucleotide
gggccugcgcgguagcucc

SEQ ID NO: 1385827 - RNA, 19 nt, Artificial Sequence
  Description of Artificial Sequence: Synthetic oligonucleotide
ucguuguguacgguauaua

SEQ ID NO: 1385828 - RNA, 19 nt, Artificial Sequence
  Description of Artificial Sequence: Synthetic oligonucleotide
guuuuccgaccauagugau

SEQ ID NO: 1385829 - RNA, 19 nt, Artificial Sequence
  Description of Artificial Sequence: Synthetic oligonucleotide
gcauagucucguuguguac

SEQ ID NO: 1385830 - RNA, 19 nt, Artificial Sequence
  Description of Artificial Sequence: Synthetic oligonucleotide
gaguucgguaucugacaua

SEQ ID NO: 1385831 - RNA, 19 nt, Artificial Sequence
  Description of Artificial Sequence: Synthetic oligonucleotide
gaaucccucuugcuuuccu

SEQ ID NO: 1385832 - RNA, 19 nt, Artificial Sequence
  Description of Artificial Sequence: Synthetic oligonucleotide
auacgagcuggcggcgcuc

SEQ ID NO: 1385833 - RNA, 19 nt, Artificial Sequence
  Description of Artificial Sequence: Synthetic oligonucleotide
acccacagcuaaguuuacu

SEQ ID NO: 1385834 - RNA, 19 nt, Artificial Sequence
  Description of Artificial Sequence: Synthetic oligonucleotide
ggaagacuacugaugaacu

SEQ ID NO: 1385835 - RNA, 19 nt, Artificial Sequence
  Description of Artificial Sequence: Synthetic oligonucleotide
gcgaucaauauuacaucuc

SEQ ID NO: 1385836 - RNA, 19 nt, Artificial Sequence
  Description of Artificial Sequence: Synthetic oligonucleotide
cugacauuacuuccguuuu

SEQ ID NO: 1385837 - RNA, 19 nt, Artificial Sequence
  Description of Artificial Sequence: Synthetic oligonucleotide
ccuuuaagaugcaaagccu

SEQ ID NO: 1385838 - RNA, 19 nt, Artificial Sequence
  Description of Artificial Sequence: Synthetic oligonucleotide
gggaaaguccuguagcuuu

SEQ ID NO: 1385839 - RNA, 19 nt, Artificial Sequence
  Description of Artificial Sequence: Synthetic oligonucleotide
cugacgcagcuguagugaa

SEQ ID NO: 1385840 - RNA, 19 nt, Artificial Sequence
  Description of Artificial Sequence: Synthetic oligonucleotide
ucgccgggacccaccgggc

SEQ ID NO: 1385841 - RNA, 19 nt, Artificial Sequence
  Description of Artificial Sequence: Synthetic oligonucleotide
uagucucguuguguacggu

SEQ ID NO: 1385842 - RNA, 19 nt, Artificial Sequence
  Description of Artificial Sequence: Synthetic oligonucleotide
ccauagugauaauagcugu

SEQ ID NO: 1385843 - RNA, 19 nt, Artificial Sequence
  Description of Artificial Sequence: Synthetic oligonucleotide
uucgcgguguuggcagagu

SEQ ID NO: 1385844 - RNA, 19 nt, Artificial Sequence
  Description of Artificial Sequence: Synthetic oligonucleotide
cguuagcccacgcuagagc

SEQ ID NO: 1385845 - RNA, 19 nt, Artificial Sequence
  Description of Artificial Sequence: Synthetic oligonucleotide
gcuaguguucgcgguguug

SEQ ID NO: 1385846 - RNA, 19 nt, Artificial Sequence
  Description of Artificial Sequence: Synthetic oligonucleotide
gccuauuauuacauguucu

SEQ ID NO: 1385847 - RNA, 19 nt, Artificial Sequence
  Description of Artificial Sequence: Synthetic oligonucleotide
agcaaggauugaaguacuu

SEQ ID NO: 1385848 - RNA, 19 nt, Artificial Sequence
  Description of Artificial Sequence: Synthetic oligonucleotide
ggguuuuaaucuagcagua

SEQ ID NO: 1385849 - RNA, 19 nt, Artificial Sequence
  Description of Artificial Sequence: Synthetic oligonucleotide
cccacgcuagagcaaaaca

SEQ ID NO: 1385850 - RNA, 19 nt, Artificial Sequence
  Description of Artificial Sequence: Synthetic oligonucleotide
ccuacucugacuccugugu

SEQ ID NO: 1385851 - RNA, 19 nt, Artificial Sequence
  Description of Artificial Sequence: Synthetic oligonucleotide
ggacccaccgggcgcccgg

SEQ ID NO: 1385852 - RNA, 19 nt, Artificial Sequence
  Description of Artificial Sequence: Synthetic oligonucleotide
cugcauuuuaaggcugugu

SEQ ID NO: 1385853 - RNA, 19 nt, Artificial Sequence
  Description of Artificial Sequence: Synthetic oligonucleotide
agcuaguguucgcgguguu

SEQ ID NO: 1385854 - RNA, 19 nt, Artificial Sequence
  Description of Artificial Sequence: Synthetic oligonucleotide
cacugcagcgaucaauauu

SEQ ID NO: 1385855 - RNA, 19 nt, Artificial Sequence
  Description of Artificial Sequence: Synthetic oligonucleotide
guauuggcccacguuucgu

SEQ ID NO: 1385856 - RNA, 19 nt, Artificial Sequence
  Description of Artificial Sequence: Synthetic oligonucleotide
ggaaucccucuugcuuucc

SEQ ID NO: 1385857 - RNA, 19 nt, Artificial Sequence
  Description of Artificial Sequence: Synthetic oligonucleotide
cucguuguguacgguauau

SEQ ID NO: 1385858 - RNA, 19 nt, Artificial Sequence
  Description of Artificial Sequence: Synthetic oligonucleotide
gacccaccgggcgcccggg

SEQ ID NO: 1385859 - RNA, 19 nt, Artificial Sequence
  Description of Artificial Sequence: Synthetic oligonucleotide
cauacgagcuggcggcgcu

SEQ ID NO: 1385860 - RNA, 19 nt, Artificial Sequence
  Description of Artificial Sequence: Synthetic oligonucleotide
cguuguguacgguauauau

SEQ ID NO: 1385861 - RNA, 19 nt, Artificial Sequence
  Description of Artificial Sequence: Synthetic oligonucleotide
gcgcgguagcuccuccucc

SEQ ID NO: 1385862 - RNA, 19 nt, Artificial Sequence
  Description of Artificial Sequence: Synthetic oligonucleotide
uuccgaccauagugauaau

SEQ ID NO: 1385863 - RNA, 19 nt, Artificial Sequence
  Description of Artificial Sequence: Synthetic oligonucleotide
cuacucugacuccuguguu

SEQ ID NO: 1385864 - RNA, 19 nt, Artificial Sequence
  Description of Artificial Sequence: Synthetic oligonucleotide
gcaguagcauagcaaggau

SEQ ID NO: 1385865 - RNA, 19 nt, Artificial Sequence
  Description of Artificial Sequence: Synthetic oligonucleotide
ccacguuucguagcaauaa

SEQ ID NO: 1385866 - RNA, 19 nt, Artificial Sequence
  Description of Artificial Sequence: Synthetic oligonucleotide
ccguuagcccacgcuagag

SEQ ID NO: 1385867 - RNA, 19 nt, Artificial Sequence
  Description of Artificial Sequence: Synthetic oligonucleotide
cccaacacuggggccaaac

SEQ ID NO: 1385868 - RNA, 19 nt, Artificial Sequence
  Description of Artificial Sequence: Synthetic oligonucleotide
ccacagcuaaguuuacugu

SEQ ID NO: 1385869 - RNA, 19 nt, Artificial Sequence
  Description of Artificial Sequence: Synthetic oligonucleotide
cgcuagagcaaaacaaccu

SEQ ID NO: 1385870 - RNA, 19 nt, Artificial Sequence
  Description of Artificial Sequence: Synthetic oligonucleotide
gacuccuguguugucuauu

SEQ ID NO: 1385871 - RNA, 19 nt, Artificial Sequence
  Description of Artificial Sequence: Synthetic oligonucleotide
gcccacgcuagagcaaaac

SEQ ID NO: 1385872 - RNA, 19 nt, Artificial Sequence
  Description of Artificial Sequence: Synthetic oligonucleotide
ccugcgcgguagcuccucc

SEQ ID NO: 1385873 - RNA, 19 nt, Artificial Sequence
  Description of Artificial Sequence: Synthetic oligonucleotide
guucgguaucugacauaaa

SEQ ID NO: 1385874 - RNA, 19 nt, Artificial Sequence
  Description of Artificial Sequence: Synthetic oligonucleotide
guaugcugacgcagcugua

SEQ ID NO: 1385875 - RNA, 19 nt, Artificial Sequence
  Description of Artificial Sequence: Synthetic oligonucleotide
cccacguuucguagcaaua

SEQ ID NO: 1385876 - RNA, 19 nt, Artificial Sequence
  Description of Artificial Sequence: Synthetic oligonucleotide
cuccuguguugucuauuau

SEQ ID NO: 1385877 - RNA, 19 nt, Artificial Sequence
  Description of Artificial Sequence: Synthetic oligonucleotide
gcucgccgggacccaccgg

SEQ ID NO: 1385878 - RNA, 19 nt, Artificial Sequence
  Description of Artificial Sequence: Synthetic oligonucleotide
cugcuguauuuaccuugcu

SEQ ID NO: 1385879 - RNA, 19 nt, Artificial Sequence
  Description of Artificial Sequence: Synthetic oligonucleotide
gcccacguuucguagcaau

SEQ ID NO: 1385880 - RNA, 19 nt, Artificial Sequence
  Description of Artificial Sequence: Synthetic oligonucleotide
ggggccugcgcgguagcuc

SEQ ID NO: 1385881 - RNA, 19 nt, Artificial Sequence
  Description of Artificial Sequence: Synthetic oligonucleotide
ggggaaaguccuguagcuu

SEQ ID NO: 1385882 - RNA, 19 nt, Artificial Sequence
  Description of Artificial Sequence: Synthetic oligonucleotide
gccgaugaugcaagucgcu

SEQ ID NO: 1385883 - RNA, 19 nt, Artificial Sequence
  Description of Artificial Sequence: Synthetic oligonucleotide
gccugcgcgguagcuccuc

SEQ ID NO: 1385884 - RNA, 19 nt, Artificial Sequence
  Description of Artificial Sequence: Synthetic oligonucleotide
ccggggccugcgcgguagc

SEQ ID NO: 1385885 - RNA, 19 nt, Artificial Sequence
  Description of Artificial Sequence: Synthetic oligonucleotide
ggcccacguuucguagcaa

SEQ ID NO: 1385886 - RNA, 19 nt, Artificial Sequence
  Description of Artificial Sequence: Synthetic oligonucleotide
ccgggcgcccggggccugc

SEQ ID NO: 1385887 - RNA, 19 nt, Artificial Sequence
  Description of Artificial Sequence: Synthetic oligonucleotide
ggccugcgcgguagcuccu

SEQ ID NO: 1385888 - RNA, 19 nt, Artificial Sequence
  Description of Artificial Sequence: Synthetic oligonucleotide
aaaauaauaauguaacugc

SEQ ID NO: 1385889 - RNA, 19 nt, Artificial Sequence
  Description of Artificial Sequence: Synthetic oligonucleotide
auuuguuccaccucgaagg

SEQ ID NO: 1385890 - RNA, 19 nt, Artificial Sequence
  Description of Artificial Sequence: Synthetic oligonucleotide
uguauuauugauauauuca

SEQ ID NO: 1385891 - RNA, 19 nt, Artificial Sequence
  Description of Artificial Sequence: Synthetic oligonucleotide
aauaauaauguaacugccc

SEQ ID NO: 1385892 - RNA, 19 nt, Artificial Sequence
  Description of Artificial Sequence: Synthetic oligonucleotide
aaauaauaauguaacugcc

SEQ ID NO: 1385893 - RNA, 19 nt, Artificial Sequence
  Description of Artificial Sequence: Synthetic oligonucleotide
aauucgaacaagcugguca

SEQ ID NO: 1385894 - RNA, 19 nt, Artificial Sequence
  Description of Artificial Sequence: Synthetic oligonucleotide
uuucggaauaucaugcucg

SEQ ID NO: 1385895 - RNA, 19 nt, Artificial Sequence
  Description of Artificial Sequence: Synthetic oligonucleotide
agcuuaaugauauuuguuc

SEQ ID NO: 1385896 - RNA, 19 nt, Artificial Sequence
  Description of Artificial Sequence: Synthetic oligonucleotide
uccuacuucuuuuaaaacg

SEQ ID NO: 1385897 - RNA, 19 nt, Artificial Sequence
  Description of Artificial Sequence: Synthetic oligonucleotide
aauaauguaacugcccauc

SEQ ID NO: 1385898 - RNA, 19 nt, Artificial Sequence
  Description of Artificial Sequence: Synthetic oligonucleotide
uuuacauucggaagugagg

SEQ ID NO: 1385899 - RNA, 19 nt, Artificial Sequence
  Description of Artificial Sequence: Synthetic oligonucleotide
augugaaccuuuuacauuc

SEQ ID NO: 1385900 - RNA, 19 nt, Artificial Sequence
  Description of Artificial Sequence: Synthetic oligonucleotide
uauauucaaauaccaaagc

SEQ ID NO: 1385901 - RNA, 19 nt, Artificial Sequence
  Description of Artificial Sequence: Synthetic oligonucleotide
uugauauauucaaauacca

SEQ ID NO: 1385902 - RNA, 19 nt, Artificial Sequence
  Description of Artificial Sequence: Synthetic oligonucleotide
uauaaaaccggauaucaaa

SEQ ID NO: 1385903 - RNA, 19 nt, Artificial Sequence
  Description of Artificial Sequence: Synthetic oligonucleotide
aaaaguaugaggaaccgca

SEQ ID NO: 1385904 - RNA, 19 nt, Artificial Sequence
  Description of Artificial Sequence: Synthetic oligonucleotide
auaauaauguaacugccca

SEQ ID NO: 1385905 - RNA, 19 nt, Artificial Sequence
  Description of Artificial Sequence: Synthetic oligonucleotide
uggaucuaggucuaugugg

SEQ ID NO: 1385906 - RNA, 19 nt, Artificial Sequence
  Description of Artificial Sequence: Synthetic oligonucleotide
aggaugauagaacuccgcc

SEQ ID NO: 1385907 - RNA, 19 nt, Artificial Sequence
  Description of Artificial Sequence: Synthetic oligonucleotide
auauucaaauaccaaagcu

SEQ ID NO: 1385908 - RNA, 19 nt, Artificial Sequence
  Description of Artificial Sequence: Synthetic oligonucleotide
cuucagguggucuaguucg

SEQ ID NO: 1385909 - RNA, 19 nt, Artificial Sequence
  Description of Artificial Sequence: Synthetic oligonucleotide
agugaggucugauuuacgg

SEQ ID NO: 1385910 - RNA, 19 nt, Artificial Sequence
  Description of Artificial Sequence: Synthetic oligonucleotide
auauauucaaauaccaaag

SEQ ID NO: 1385911 - RNA, 19 nt, Artificial Sequence
  Description of Artificial Sequence: Synthetic oligonucleotide
ucauacauauaaaaccgga

SEQ ID NO: 1385912 - RNA, 19 nt, Artificial Sequence
  Description of Artificial Sequence: Synthetic oligonucleotide
aaguaugaggaaccgcaac

SEQ ID NO: 1385913 - RNA, 19 nt, Artificial Sequence
  Description of Artificial Sequence: Synthetic oligonucleotide
acuucacuauacuugcccc

SEQ ID NO: 1385914 - RNA, 19 nt, Artificial Sequence
  Description of Artificial Sequence: Synthetic oligonucleotide
aaccuuggcaauucgaaca

SEQ ID NO: 1385915 - RNA, 19 nt, Artificial Sequence
  Description of Artificial Sequence: Synthetic oligonucleotide
aaauaccaaagcugguguc

SEQ ID NO: 1385916 - RNA, 19 nt, Artificial Sequence
  Description of Artificial Sequence: Synthetic oligonucleotide
ugaucuaucaugacauugu

SEQ ID NO: 1385917 - RNA, 19 nt, Artificial Sequence
  Description of Artificial Sequence: Synthetic oligonucleotide
ucuguugauggucguaccg

SEQ ID NO: 1385918 - RNA, 19 nt, Artificial Sequence
  Description of Artificial Sequence: Synthetic oligonucleotide
uucagauauccauacagcu

SEQ ID NO: 1385919 - RNA, 19 nt, Artificial Sequence
  Description of Artificial Sequence: Synthetic oligonucleotide
aggcaugugaaccuuuuac

SEQ ID NO: 1385920 - RNA, 19 nt, Artificial Sequence
  Description of Artificial Sequence: Synthetic oligonucleotide
uccuuucggaauaucaugc

SEQ ID NO: 1385921 - RNA, 19 nt, Artificial Sequence
  Description of Artificial Sequence: Synthetic oligonucleotide
uuggugaucuaucaugaca

SEQ ID NO: 1385922 - RNA, 19 nt, Artificial Sequence
  Description of Artificial Sequence: Synthetic oligonucleotide
aaccucucguuuuaucuuc

SEQ ID NO: 1385923 - RNA, 19 nt, Artificial Sequence
  Description of Artificial Sequence: Synthetic oligonucleotide
guuaagacguuugauuugg

SEQ ID NO: 1385924 - RNA, 19 nt, Artificial Sequence
  Description of Artificial Sequence: Synthetic oligonucleotide
cuugcuguggcaguaaucc

SEQ ID NO: 1385925 - RNA, 19 nt, Artificial Sequence
  Description of Artificial Sequence: Synthetic oligonucleotide
auauccauacagcucaucu

SEQ ID NO: 1385926 - RNA, 19 nt, Artificial Sequence
  Description of Artificial Sequence: Synthetic oligonucleotide
ugaaguguggaucuagguc

SEQ ID NO: 1385927 - RNA, 19 nt, Artificial Sequence
  Description of Artificial Sequence: Synthetic oligonucleotide
auaguuguccugcccaugg

SEQ ID NO: 1385928 - RNA, 19 nt, Artificial Sequence
  Description of Artificial Sequence: Synthetic oligonucleotide
aucuguauuauugauauau

SEQ ID NO: 1385929 - RNA, 19 nt, Artificial Sequence
  Description of Artificial Sequence: Synthetic oligonucleotide
ggcaauucgaacaagcugg

SEQ ID NO: 1385930 - RNA, 19 nt, Artificial Sequence
  Description of Artificial Sequence: Synthetic oligonucleotide
cuuggcaauucgaacaagc

SEQ ID NO: 1385931 - RNA, 19 nt, Artificial Sequence
  Description of Artificial Sequence: Synthetic oligonucleotide
ucugauuuacggugguggg

SEQ ID NO: 1385932 - RNA, 19 nt, Artificial Sequence
  Description of Artificial Sequence: Synthetic oligonucleotide
uaaaacguuuuauucaaua

SEQ ID NO: 1385933 - RNA, 19 nt, Artificial Sequence
  Description of Artificial Sequence: Synthetic oligonucleotide
uuacauucggaagugaggu

SEQ ID NO: 1385934 - RNA, 19 nt, Artificial Sequence
  Description of Artificial Sequence: Synthetic oligonucleotide
gaggaagucaacaggaagc

SEQ ID NO: 1385935 - RNA, 19 nt, Artificial Sequence
  Description of Artificial Sequence: Synthetic oligonucleotide
uggugaucuaucaugacau

SEQ ID NO: 1385936 - RNA, 19 nt, Artificial Sequence
  Description of Artificial Sequence: Synthetic oligonucleotide
ucugcuuauggaaaaguau

SEQ ID NO: 1385937 - RNA, 19 nt, Artificial Sequence
  Description of Artificial Sequence: Synthetic oligonucleotide
uguuaacggccucaaauac

SEQ ID NO: 1385938 - RNA, 19 nt, Artificial Sequence
  Description of Artificial Sequence: Synthetic oligonucleotide
aguaugaggaaccgcaaca

SEQ ID NO: 1385939 - RNA, 19 nt, Artificial Sequence
  Description of Artificial Sequence: Synthetic oligonucleotide
uugauggucguaccgcagg

SEQ ID NO: 1385940 - RNA, 19 nt, Artificial Sequence
  Description of Artificial Sequence: Synthetic oligonucleotide
aacggccucaaauacuuca

SEQ ID NO: 1385941 - RNA, 19 nt, Artificial Sequence
  Description of Artificial Sequence: Synthetic oligonucleotide
auaaaaccggauaucaaag

SEQ ID NO: 1385942 - RNA, 19 nt, Artificial Sequence
  Description of Artificial Sequence: Synthetic oligonucleotide
ucacuauggauaaaguuuu

SEQ ID NO: 1385943 - RNA, 19 nt, Artificial Sequence
  Description of Artificial Sequence: Synthetic oligonucleotide
accauuuugugucugcucu

SEQ ID NO: 1385944 - RNA, 19 nt, Artificial Sequence
  Description of Artificial Sequence: Synthetic oligonucleotide
ugaauguugucccaagaua

SEQ ID NO: 1385945 - RNA, 19 nt, Artificial Sequence
  Description of Artificial Sequence: Synthetic oligonucleotide
uuaacggccucaaauacuu

SEQ ID NO: 1385946 - RNA, 19 nt, Artificial Sequence
  Description of Artificial Sequence: Synthetic oligonucleotide
ucgaagguucuccagaauc

SEQ ID NO: 1385947 - RNA, 19 nt, Artificial Sequence
  Description of Artificial Sequence: Synthetic oligonucleotide
auacccuucacauuuccca

SEQ ID NO: 1385948 - RNA, 19 nt, Artificial Sequence
  Description of Artificial Sequence: Synthetic oligonucleotide
ugucaaucagcuuaaugau

SEQ ID NO: 1385949 - RNA, 19 nt, Artificial Sequence
  Description of Artificial Sequence: Synthetic oligonucleotide
uuuaaguaguucauacaua

SEQ ID NO: 1385950 - RNA, 19 nt, Artificial Sequence
  Description of Artificial Sequence: Synthetic oligonucleotide
ucaagaagaucuagggccu

SEQ ID NO: 1385951 - RNA, 19 nt, Artificial Sequence
  Description of Artificial Sequence: Synthetic oligonucleotide
uauacuugccccgaccaag

SEQ ID NO: 1385952 - RNA, 19 nt, Artificial Sequence
  Description of Artificial Sequence: Synthetic oligonucleotide
auguaacugcccaucaugc

SEQ ID NO: 1385953 - RNA, 19 nt, Artificial Sequence
  Description of Artificial Sequence: Synthetic oligonucleotide
augaggaaccgcaacagac

SEQ ID NO: 1385954 - RNA, 19 nt, Artificial Sequence
  Description of Artificial Sequence: Synthetic oligonucleotide
aggguagaaguacgggugc

SEQ ID NO: 1385955 - RNA, 19 nt, Artificial Sequence
  Description of Artificial Sequence: Synthetic oligonucleotide
augauauuuguuccaccuc

SEQ ID NO: 1385956 - RNA, 19 nt, Artificial Sequence
  Description of Artificial Sequence: Synthetic oligonucleotide
gaaagcacgguguucucug

SEQ ID NO: 1385957 - RNA, 19 nt, Artificial Sequence
  Description of Artificial Sequence: Synthetic oligonucleotide
uaaaaccggauaucaaagu

SEQ ID NO: 1385958 - RNA, 19 nt, Artificial Sequence
  Description of Artificial Sequence: Synthetic oligonucleotide
uauccauacagcucaucug

SEQ ID NO: 1385959 - RNA, 19 nt, Artificial Sequence
  Description of Artificial Sequence: Synthetic oligonucleotide
aacccugccuuccuacuuc

SEQ ID NO: 1385960 - RNA, 19 nt, Artificial Sequence
  Description of Artificial Sequence: Synthetic oligonucleotide
caugggacaggucaagggc

SEQ ID NO: 1385961 - RNA, 19 nt, Artificial Sequence
  Description of Artificial Sequence: Synthetic oligonucleotide
aaccggauaucaaagucag

SEQ ID NO: 1385962 - RNA, 19 nt, Artificial Sequence
  Description of Artificial Sequence: Synthetic oligonucleotide
gucugauuuacgguggugg

SEQ ID NO: 1385963 - RNA, 19 nt, Artificial Sequence
  Description of Artificial Sequence: Synthetic oligonucleotide
aguaccucgaggccacucg

SEQ ID NO: 1385964 - RNA, 19 nt, Artificial Sequence
  Description of Artificial Sequence: Synthetic oligonucleotide
cuacgcacgcguuaagacg

SEQ ID NO: 1385965 - RNA, 19 nt, Artificial Sequence
  Description of Artificial Sequence: Synthetic oligonucleotide
uaaugauauuuguuccacc

SEQ ID NO: 1385966 - RNA, 19 nt, Artificial Sequence
  Description of Artificial Sequence: Synthetic oligonucleotide
uacgcacgcguuaagacgu

SEQ ID NO: 1385967 - RNA, 19 nt, Artificial Sequence
  Description of Artificial Sequence: Synthetic oligonucleotide
aauguugucccaagauauc

SEQ ID NO: 1385968 - RNA, 19 nt, Artificial Sequence
  Description of Artificial Sequence: Synthetic oligonucleotide
uguacuccugggcaggaug

SEQ ID NO: 1385969 - RNA, 19 nt, Artificial Sequence
  Description of Artificial Sequence: Synthetic oligonucleotide
aguucgugcucgccaagcc

SEQ ID NO: 1385970 - RNA, 19 nt, Artificial Sequence
  Description of Artificial Sequence: Synthetic oligonucleotide
aguugcuuaaaaucuguau

SEQ ID NO: 1385971 - RNA, 19 nt, Artificial Sequence
  Description of Artificial Sequence: Synthetic oligonucleotide
cuuccgugaauguuguccc

SEQ ID NO: 1385972 - RNA, 19 nt, Artificial Sequence
  Description of Artificial Sequence: Synthetic oligonucleotide
ucucguuuuaucuucuuuu

SEQ ID NO: 1385973 - RNA, 19 nt, Artificial Sequence
  Description of Artificial Sequence: Synthetic oligonucleotide
gauguuaacggccucaaau

SEQ ID NO: 1385974 - RNA, 19 nt, Artificial Sequence
  Description of Artificial Sequence: Synthetic oligonucleotide
ugugaaccuuuuacauucg

SEQ ID NO: 1385975 - RNA, 19 nt, Artificial Sequence
  Description of Artificial Sequence: Synthetic oligonucleotide
cuucacuauacuugccccg

SEQ ID NO: 1385976 - RNA, 19 nt, Artificial Sequence
  Description of Artificial Sequence: Synthetic oligonucleotide
ugggcaggaugauagaacu

SEQ ID NO: 1385977 - RNA, 19 nt, Artificial Sequence
  Description of Artificial Sequence: Synthetic oligonucleotide
ggucccuugaaguaccucg

SEQ ID NO: 1385978 - RNA, 19 nt, Artificial Sequence
  Description of Artificial Sequence: Synthetic oligonucleotide
ugauuuacgguggugggcu

SEQ ID NO: 1385979 - RNA, 19 nt, Artificial Sequence
  Description of Artificial Sequence: Synthetic oligonucleotide
accacccucucauuguugg

SEQ ID NO: 1385980 - RNA, 19 nt, Artificial Sequence
  Description of Artificial Sequence: Synthetic oligonucleotide
gcuuaaugauauuuguucc

SEQ ID NO: 1385981 - RNA, 19 nt, Artificial Sequence
  Description of Artificial Sequence: Synthetic oligonucleotide
uaguccuugggauuugcug

SEQ ID NO: 1385982 - RNA, 19 nt, Artificial Sequence
  Description of Artificial Sequence: Synthetic oligonucleotide
uaucaugcucgcuaacaug

SEQ ID NO: 1385983 - RNA, 19 nt, Artificial Sequence
  Description of Artificial Sequence: Synthetic oligonucleotide
auaauguaacugcccauca

SEQ ID NO: 1385984 - RNA, 19 nt, Artificial Sequence
  Description of Artificial Sequence: Synthetic oligonucleotide
cuaucaugacauugugagg

SEQ ID NO: 1385985 - RNA, 19 nt, Artificial Sequence
  Description of Artificial Sequence: Synthetic oligonucleotide
ucgaacaagcuggucauag

SEQ ID NO: 1385986 - RNA, 19 nt, Artificial Sequence
  Description of Artificial Sequence: Synthetic oligonucleotide
agaaucuuaaccucucguu

SEQ ID NO: 1385987 - RNA, 19 nt, Artificial Sequence
  Description of Artificial Sequence: Synthetic oligonucleotide
guggcaguaauccagagcu

SEQ ID NO: 1385988 - RNA, 19 nt, Artificial Sequence
  Description of Artificial Sequence: Synthetic oligonucleotide
uguaacugcccaucaugcc

SEQ ID NO: 1385989 - RNA, 19 nt, Artificial Sequence
  Description of Artificial Sequence: Synthetic oligonucleotide
uugaaguaccucgaggcca

SEQ ID NO: 1385990 - RNA, 19 nt, Artificial Sequence
  Description of Artificial Sequence: Synthetic oligonucleotide
cagagcuuuaaguaguuca

SEQ ID NO: 1385991 - RNA, 19 nt, Artificial Sequence
  Description of Artificial Sequence: Synthetic oligonucleotide
guaacugcccaucaugcca

SEQ ID NO: 1385992 - RNA, 19 nt, Artificial Sequence
  Description of Artificial Sequence: Synthetic oligonucleotide
cacucgaacauuguacucc

SEQ ID NO: 1385993 - RNA, 19 nt, Artificial Sequence
  Description of Artificial Sequence: Synthetic oligonucleotide
uucggaauaucaugcucgc

SEQ ID NO: 1385994 - RNA, 19 nt, Artificial Sequence
  Description of Artificial Sequence: Synthetic oligonucleotide
uuucccagcgcuuccguga

SEQ ID NO: 1385995 - RNA, 19 nt, Artificial Sequence
  Description of Artificial Sequence: Synthetic oligonucleotide
acauucggaagugaggucu

SEQ ID NO: 1385996 - RNA, 19 nt, Artificial Sequence
  Description of Artificial Sequence: Synthetic oligonucleotide
caucgugcugcgcugaggc

SEQ ID NO: 1385997 - RNA, 19 nt, Artificial Sequence
  Description of Artificial Sequence: Synthetic oligonucleotide
ugucuaagcuguaaucaua

SEQ ID NO: 1385998 - RNA, 19 nt, Artificial Sequence
  Description of Artificial Sequence: Synthetic oligonucleotide
acgugaucucgcuacgcac

SEQ ID NO: 1385999 - RNA, 19 nt, Artificial Sequence
  Description of Artificial Sequence: Synthetic oligonucleotide
ugcucgcuaacaugcagcc

SEQ ID NO: 1386000 - RNA, 19 nt, Artificial Sequence
  Description of Artificial Sequence: Synthetic oligonucleotide
uugaaguguggaucuaggu

SEQ ID NO: 1386001 - RNA, 19 nt, Artificial Sequence
  Description of Artificial Sequence: Synthetic oligonucleotide
gaaccuuggcaauucgaac

SEQ ID NO: 1386002 - RNA, 19 nt, Artificial Sequence
  Description of Artificial Sequence: Synthetic oligonucleotide
cuccuuucggaauaucaug

SEQ ID NO: 1386003 - RNA, 19 nt, Artificial Sequence
  Description of Artificial Sequence: Synthetic oligonucleotide
auguuaacggccucaaaua

SEQ ID NO: 1386004 - RNA, 19 nt, Artificial Sequence
  Description of Artificial Sequence: Synthetic oligonucleotide
cucgcuaacaugcagccca

SEQ ID NO: 1386005 - RNA, 19 nt, Artificial Sequence
  Description of Artificial Sequence: Synthetic oligonucleotide
uaauaauguaacugcccau

SEQ ID NO: 1386006 - RNA, 19 nt, Artificial Sequence
  Description of Artificial Sequence: Synthetic oligonucleotide
agcacgguguucucugcac

SEQ ID NO: 1386007 - RNA, 19 nt, Artificial Sequence
  Description of Artificial Sequence: Synthetic oligonucleotide
caggacgugaucucgcuac

SEQ ID NO: 1386008 - RNA, 19 nt, Artificial Sequence
  Description of Artificial Sequence: Synthetic oligonucleotide
acaucccugugcaugauuc

SEQ ID NO: 1386009 - RNA, 19 nt, Artificial Sequence
  Description of Artificial Sequence: Synthetic oligonucleotide
uuccuacuucuuuuaaaac

SEQ ID NO: 1386010 - RNA, 19 nt, Artificial Sequence
  Description of Artificial Sequence: Synthetic oligonucleotide
caugucuaagcuguaauca

SEQ ID NO: 1386011 - RNA, 19 nt, Artificial Sequence
  Description of Artificial Sequence: Synthetic oligonucleotide
ugauagaacuccgccagac

SEQ ID NO: 1386012 - RNA, 19 nt, Artificial Sequence
  Description of Artificial Sequence: Synthetic oligonucleotide
augcucgcuaacaugcagc

SEQ ID NO: 1386013 - RNA, 19 nt, Artificial Sequence
  Description of Artificial Sequence: Synthetic oligonucleotide
acgugggcuucguaguccc

SEQ ID NO: 1386014 - RNA, 19 nt, Artificial Sequence
  Description of Artificial Sequence: Synthetic oligonucleotide
cuuucggaauaucaugcuc

SEQ ID NO: 1386015 - RNA, 19 nt, Artificial Sequence
  Description of Artificial Sequence: Synthetic oligonucleotide
guaugaggaaccgcaacag

SEQ ID NO: 1386016 - RNA, 19 nt, Artificial Sequence
  Description of Artificial Sequence: Synthetic oligonucleotide
ucucaggacgugaucucgc

SEQ ID NO: 1386017 - RNA, 19 nt, Artificial Sequence
  Description of Artificial Sequence: Synthetic oligonucleotide
ucucuguugauggucguac

SEQ ID NO: 1386018 - RNA, 19 nt, Artificial Sequence
  Description of Artificial Sequence: Synthetic oligonucleotide
gaggucugauuuacggugg

SEQ ID NO: 1386019 - RNA, 19 nt, Artificial Sequence
  Description of Artificial Sequence: Synthetic oligonucleotide
ugguagaguugcuuaaaau

SEQ ID NO: 1386020 - RNA, 19 nt, Artificial Sequence
  Description of Artificial Sequence: Synthetic oligonucleotide
cuugggauuugcuggagca

SEQ ID NO: 1386021 - RNA, 19 nt, Artificial Sequence
  Description of Artificial Sequence: Synthetic oligonucleotide
gucgggaggaagucaacag

SEQ ID NO: 1386022 - RNA, 19 nt, Artificial Sequence
  Description of Artificial Sequence: Synthetic oligonucleotide
ugguaaucaucuugauuac

SEQ ID NO: 1386023 - RNA, 19 nt, Artificial Sequence
  Description of Artificial Sequence: Synthetic oligonucleotide
auuuacgguggugggcugc

SEQ ID NO: 1386024 - RNA, 19 nt, Artificial Sequence
  Description of Artificial Sequence: Synthetic oligonucleotide
augucuaagcuguaaucau

SEQ ID NO: 1386025 - RNA, 19 nt, Artificial Sequence
  Description of Artificial Sequence: Synthetic oligonucleotide
uucacuauacuugccccga

SEQ ID NO: 1386026 - RNA, 19 nt, Artificial Sequence
  Description of Artificial Sequence: Synthetic oligonucleotide
uaagacguuugauuugguu

SEQ ID NO: 1386027 - RNA, 19 nt, Artificial Sequence
  Description of Artificial Sequence: Synthetic oligonucleotide
uguugucccaagauaucau

SEQ ID NO: 1386028 - RNA, 19 nt, Artificial Sequence
  Description of Artificial Sequence: Synthetic oligonucleotide
ugauggucguaccgcagga

SEQ ID NO: 1386029 - RNA, 19 nt, Artificial Sequence
  Description of Artificial Sequence: Synthetic oligonucleotide
uccaccucgaagguucucc

SEQ ID NO: 1386030 - RNA, 19 nt, Artificial Sequence
  Description of Artificial Sequence: Synthetic oligonucleotide
caggaugauagaacuccgc

SEQ ID NO: 1386031 - RNA, 19 nt, Artificial Sequence
  Description of Artificial Sequence: Synthetic oligonucleotide
caggcuguucaccucggcg

SEQ ID NO: 1386032 - RNA, 19 nt, Artificial Sequence
  Description of Artificial Sequence: Synthetic oligonucleotide
guagucccaguacucgcgg

SEQ ID NO: 1386033 - RNA, 19 nt, Artificial Sequence
  Description of Artificial Sequence: Synthetic oligonucleotide
cuuaaccucucguuuuauc

SEQ ID NO: 1386034 - RNA, 19 nt, Artificial Sequence
  Description of Artificial Sequence: Synthetic oligonucleotide
aggcuguucaccucggcgu

SEQ ID NO: 1386035 - RNA, 19 nt, Artificial Sequence
  Description of Artificial Sequence: Synthetic oligonucleotide
gaauguugucccaagauau

SEQ ID NO: 1386036 - RNA, 19 nt, Artificial Sequence
  Description of Artificial Sequence: Synthetic oligonucleotide
uuugcauacccuucacauu

SEQ ID NO: 1386037 - RNA, 19 nt, Artificial Sequence
  Description of Artificial Sequence: Synthetic oligonucleotide
guggaucuaggucuaugug

SEQ ID NO: 1386038 - RNA, 19 nt, Artificial Sequence
  Description of Artificial Sequence: Synthetic oligonucleotide
cuguugauggucguaccgc

SEQ ID NO: 1386039 - RNA, 19 nt, Artificial Sequence
  Description of Artificial Sequence: Synthetic oligonucleotide
caugcucgcuaacaugcag

SEQ ID NO: 1386040 - RNA, 19 nt, Artificial Sequence
  Description of Artificial Sequence: Synthetic oligonucleotide
uggucguaccgcaggagcu

SEQ ID NO: 1386041 - RNA, 19 nt, Artificial Sequence
  Description of Artificial Sequence: Synthetic oligonucleotide
cacuauacuugccccgacc

SEQ ID NO: 1386042 - RNA, 19 nt, Artificial Sequence
  Description of Artificial Sequence: Synthetic oligonucleotide
auacuucacuauacuugcc

SEQ ID NO: 1386043 - RNA, 19 nt, Artificial Sequence
  Description of Artificial Sequence: Synthetic oligonucleotide
uaaccucucguuuuaucuu

SEQ ID NO: 1386044 - RNA, 19 nt, Artificial Sequence
  Description of Artificial Sequence: Synthetic oligonucleotide
aguacucgcggcuccucag

SEQ ID NO: 1386045 - RNA, 19 nt, Artificial Sequence
  Description of Artificial Sequence: Synthetic oligonucleotide
agaaccuuggcaauucgaa

SEQ ID NO: 1386046 - RNA, 19 nt, Artificial Sequence
  Description of Artificial Sequence: Synthetic oligonucleotide
cuaagcuguaaucauacau

SEQ ID NO: 1386047 - RNA, 19 nt, Artificial Sequence
  Description of Artificial Sequence: Synthetic oligonucleotide
ccgaccaaguuuucgaacc

SEQ ID NO: 1386048 - RNA, 19 nt, Artificial Sequence
  Description of Artificial Sequence: Synthetic oligonucleotide
gacgugaucucgcuacgca

SEQ ID NO: 1386049 - RNA, 19 nt, Artificial Sequence
  Description of Artificial Sequence: Synthetic oligonucleotide
uuaagacguuugauuuggu

SEQ ID NO: 1386050 - RNA, 19 nt, Artificial Sequence
  Description of Artificial Sequence: Synthetic oligonucleotide
aaguaccucgaggccacuc

SEQ ID NO: 1386051 - RNA, 19 nt, Artificial Sequence
  Description of Artificial Sequence: Synthetic oligonucleotide
gaccaaguuuucgaaccag

SEQ ID NO: 1386052 - RNA, 19 nt, Artificial Sequence
  Description of Artificial Sequence: Synthetic oligonucleotide
acguuuuauucaauaauau

SEQ ID NO: 1386053 - RNA, 19 nt, Artificial Sequence
  Description of Artificial Sequence: Synthetic oligonucleotide
cacaggguagaaguacggg

SEQ ID NO: 1386054 - RNA, 19 nt, Artificial Sequence
  Description of Artificial Sequence: Synthetic oligonucleotide
aaaguaugaggaaccgcaa

SEQ ID NO: 1386055 - RNA, 19 nt, Artificial Sequence
  Description of Artificial Sequence: Synthetic oligonucleotide
gcuuccgugaauguugucc

SEQ ID NO: 1386056 - RNA, 19 nt, Artificial Sequence
  Description of Artificial Sequence: Synthetic oligonucleotide
cuaacaugcagcccaagcu

SEQ ID NO: 1386057 - RNA, 19 nt, Artificial Sequence
  Description of Artificial Sequence: Synthetic oligonucleotide
aaucuguauuauugauaua

SEQ ID NO: 1386058 - RNA, 19 nt, Artificial Sequence
  Description of Artificial Sequence: Synthetic oligonucleotide
cugauuuacgguggugggc

SEQ ID NO: 1386059 - RNA, 19 nt, Artificial Sequence
  Description of Artificial Sequence: Synthetic oligonucleotide
gcuuauggaaaaguaugag

SEQ ID NO: 1386060 - RNA, 19 nt, Artificial Sequence
  Description of Artificial Sequence: Synthetic oligonucleotide
aagugaggucugauuuacg

SEQ ID NO: 1386061 - RNA, 19 nt, Artificial Sequence
  Description of Artificial Sequence: Synthetic oligonucleotide
aaacccugccuuccuacuu

SEQ ID NO: 1386062 - RNA, 19 nt, Artificial Sequence
  Description of Artificial Sequence: Synthetic oligonucleotide
ugauuaccccagcucggga

SEQ ID NO: 1386063 - RNA, 19 nt, Artificial Sequence
  Description of Artificial Sequence: Synthetic oligonucleotide
cuucguagucccaguacuc

SEQ ID NO: 1386064 - RNA, 19 nt, Artificial Sequence
  Description of Artificial Sequence: Synthetic oligonucleotide
aucgugcugcgcugaggcc

SEQ ID NO: 1386065 - RNA, 19 nt, Artificial Sequence
  Description of Artificial Sequence: Synthetic oligonucleotide
guccccagaaccuuggcaa

SEQ ID NO: 1386066 - RNA, 19 nt, Artificial Sequence
  Description of Artificial Sequence: Synthetic oligonucleotide
cucuguugauggucguacc

SEQ ID NO: 1386067 - RNA, 19 nt, Artificial Sequence
  Description of Artificial Sequence: Synthetic oligonucleotide
cucucaggacgugaucucg

SEQ ID NO: 1386068 - RNA, 19 nt, Artificial Sequence
  Description of Artificial Sequence: Synthetic oligonucleotide
uccgccagaccccaaucaa

SEQ ID NO: 1386069 - RNA, 19 nt, Artificial Sequence
  Description of Artificial Sequence: Synthetic oligonucleotide
uacucgcggcuccucaggc

SEQ ID NO: 1386070 - RNA, 19 nt, Artificial Sequence
  Description of Artificial Sequence: Synthetic oligonucleotide
ggaugauagaacuccgcca

SEQ ID NO: 1386071 - RNA, 19 nt, Artificial Sequence
  Description of Artificial Sequence: Synthetic oligonucleotide
cauuguuggugauguuaac

SEQ ID NO: 1386072 - RNA, 19 nt, Artificial Sequence
  Description of Artificial Sequence: Synthetic oligonucleotide
uuuacgguggugggcugcc

SEQ ID NO: 1386073 - RNA, 19 nt, Artificial Sequence
  Description of Artificial Sequence: Synthetic oligonucleotide
ucgugcugcgcugaggcca

SEQ ID NO: 1386074 - RNA, 19 nt, Artificial Sequence
  Description of Artificial Sequence: Synthetic oligonucleotide
acggccucaaauacuucac

SEQ ID NO: 1386075 - RNA, 19 nt, Artificial Sequence
  Description of Artificial Sequence: Synthetic oligonucleotide
uccauacagcucaucuguc

SEQ ID NO: 1386076 - RNA, 19 nt, Artificial Sequence
  Description of Artificial Sequence: Synthetic oligonucleotide
gucuaguucgugcucgcca

SEQ ID NO: 1386077 - RNA, 19 nt, Artificial Sequence
  Description of Artificial Sequence: Synthetic oligonucleotide
uaucaaagucagucaggau

SEQ ID NO: 1386078 - RNA, 19 nt, Artificial Sequence
  Description of Artificial Sequence: Synthetic oligonucleotide
aguugguaaucaucuugau

SEQ ID NO: 1386079 - RNA, 19 nt, Artificial Sequence
  Description of Artificial Sequence: Synthetic oligonucleotide
gugaucucgcuacgcacgc

SEQ ID NO: 1386080 - RNA, 19 nt, Artificial Sequence
  Description of Artificial Sequence: Synthetic oligonucleotide
guacucgcggcuccucagg

SEQ ID NO: 1386081 - RNA, 19 nt, Artificial Sequence
  Description of Artificial Sequence: Synthetic oligonucleotide
cauucggaagugaggucug

SEQ ID NO: 1386082 - RNA, 19 nt, Artificial Sequence
  Description of Artificial Sequence: Synthetic oligonucleotide
uaguucgugcucgccaagc

SEQ ID NO: 1386083 - RNA, 19 nt, Artificial Sequence
  Description of Artificial Sequence: Synthetic oligonucleotide
gggagcaacaguaaccaac

SEQ ID NO: 1386084 - RNA, 19 nt, Artificial Sequence
  Description of Artificial Sequence: Synthetic oligonucleotide
agauaucauugaagugugg

SEQ ID NO: 1386085 - RNA, 19 nt, Artificial Sequence
  Description of Artificial Sequence: Synthetic oligonucleotide
uacauucggaagugagguc

SEQ ID NO: 1386086 - RNA, 19 nt, Artificial Sequence
  Description of Artificial Sequence: Synthetic oligonucleotide
aaaggcaugugaaccuuuu

SEQ ID NO: 1386087 - RNA, 19 nt, Artificial Sequence
  Description of Artificial Sequence: Synthetic oligonucleotide
gauggucguaccgcaggag

SEQ ID NO: 1386088 - RNA, 19 nt, Artificial Sequence
  Description of Artificial Sequence: Synthetic oligonucleotide
agucaacaggaagccaaag

SEQ ID NO: 1386089 - RNA, 19 nt, Artificial Sequence
  Description of Artificial Sequence: Synthetic oligonucleotide
uucagguggucuaguucgu

SEQ ID NO: 1386090 - RNA, 19 nt, Artificial Sequence
  Description of Artificial Sequence: Synthetic oligonucleotide
ucaucgugcugcgcugagg

SEQ ID NO: 1386091 - RNA, 19 nt, Artificial Sequence
  Description of Artificial Sequence: Synthetic oligonucleotide
ucacuauacuugccccgac

SEQ ID NO: 1386092 - RNA, 19 nt, Artificial Sequence
  Description of Artificial Sequence: Synthetic oligonucleotide
ucgaaccaguugguaauca

SEQ ID NO: 1386093 - RNA, 19 nt, Artificial Sequence
  Description of Artificial Sequence: Synthetic oligonucleotide
uuucugggucgggaggaag

SEQ ID NO: 1386094 - RNA, 19 nt, Artificial Sequence
  Description of Artificial Sequence: Synthetic oligonucleotide
gauuuacgguggugggcug

SEQ ID NO: 1386095 - RNA, 19 nt, Artificial Sequence
  Description of Artificial Sequence: Synthetic oligonucleotide
augauagaacuccgccaga

SEQ ID NO: 1386096 - RNA, 19 nt, Artificial Sequence
  Description of Artificial Sequence: Synthetic oligonucleotide
ggagcaacaguaaccaaca

SEQ ID NO: 1386097 - RNA, 19 nt, Artificial Sequence
  Description of Artificial Sequence: Synthetic oligonucleotide
ccaugggacaggucaaggg

SEQ ID NO: 1386098 - RNA, 19 nt, Artificial Sequence
  Description of Artificial Sequence: Synthetic oligonucleotide
caccacaggguagaaguac

SEQ ID NO: 1386099 - RNA, 19 nt, Artificial Sequence
  Description of Artificial Sequence: Synthetic oligonucleotide
gacgugggcuucguagucc

SEQ ID NO: 1386100 - RNA, 19 nt, Artificial Sequence
  Description of Artificial Sequence: Synthetic oligonucleotide
ugccccgaccaaguuuucg

SEQ ID NO: 1386101 - RNA, 19 nt, Artificial Sequence
  Description of Artificial Sequence: Synthetic oligonucleotide
ucccaguacucgcggcucc

SEQ ID NO: 1386102 - RNA, 19 nt, Artificial Sequence
  Description of Artificial Sequence: Synthetic oligonucleotide
caccauuuugugucugcuc

SEQ ID NO: 1386103 - RNA, 19 nt, Artificial Sequence
  Description of Artificial Sequence: Synthetic oligonucleotide
ccaaucaaucagucggagc

SEQ ID NO: 1386104 - RNA, 19 nt, Artificial Sequence
  Description of Artificial Sequence: Synthetic oligonucleotide
gugaauguugucccaagau

SEQ ID NO: 1386105 - RNA, 19 nt, Artificial Sequence
  Description of Artificial Sequence: Synthetic oligonucleotide
gcuacgcacgcguuaagac

SEQ ID NO: 1386106 - RNA, 19 nt, Artificial Sequence
  Description of Artificial Sequence: Synthetic oligonucleotide
uuccgugaauguuguccca

SEQ ID NO: 1386107 - RNA, 19 nt, Artificial Sequence
  Description of Artificial Sequence: Synthetic oligonucleotide
cacccucucauuguuggug

SEQ ID NO: 1386108 - RNA, 19 nt, Artificial Sequence
  Description of Artificial Sequence: Synthetic oligonucleotide
ugaucucgcuacgcacgcg

SEQ ID NO: 1386109 - RNA, 19 nt, Artificial Sequence
  Description of Artificial Sequence: Synthetic oligonucleotide
cgugaucucgcuacgcacg

SEQ ID NO: 1386110 - RNA, 19 nt, Artificial Sequence
  Description of Artificial Sequence: Synthetic oligonucleotide
uagucccaguacucgcggc

SEQ ID NO: 1386111 - RNA, 19 nt, Artificial Sequence
  Description of Artificial Sequence: Synthetic oligonucleotide
uccgugaauguugucccaa

SEQ ID NO: 1386112 - RNA, 19 nt, Artificial Sequence
  Description of Artificial Sequence: Synthetic oligonucleotide
ucaggacgugaucucgcua

SEQ ID NO: 1386113 - RNA, 19 nt, Artificial Sequence
  Description of Artificial Sequence: Synthetic oligonucleotide
gaucucgcuacgcacgcgu

SEQ ID NO: 1386114 - RNA, 19 nt, Artificial Sequence
  Description of Artificial Sequence: Synthetic oligonucleotide
cagaaccuuggcaauucga

SEQ ID NO: 1386115 - RNA, 19 nt, Artificial Sequence
  Description of Artificial Sequence: Synthetic oligonucleotide
aggucugauuuacgguggu

SEQ ID NO: 1386116 - RNA, 19 nt, Artificial Sequence
  Description of Artificial Sequence: Synthetic oligonucleotide
ucgugcucgccaagccugc

SEQ ID NO: 1386117 - RNA, 19 nt, Artificial Sequence
  Description of Artificial Sequence: Synthetic oligonucleotide
aguuuucgaaccaguuggu

SEQ ID NO: 1386118 - RNA, 19 nt, Artificial Sequence
  Description of Artificial Sequence: Synthetic oligonucleotide
ccagaccccaaucaaucag

SEQ ID NO: 1386119 - RNA, 19 nt, Artificial Sequence
  Description of Artificial Sequence: Synthetic oligonucleotide
agaacuccgccagacccca

SEQ ID NO: 1386120 - RNA, 19 nt, Artificial Sequence
  Description of Artificial Sequence: Synthetic oligonucleotide
uugggauuugcuggagcaa

SEQ ID NO: 1386121 - RNA, 19 nt, Artificial Sequence
  Description of Artificial Sequence: Synthetic oligonucleotide
accgcaacagaccgucgau

SEQ ID NO: 1386122 - RNA, 19 nt, Artificial Sequence
  Description of Artificial Sequence: Synthetic oligonucleotide
ggaaccgcaacagaccguc

SEQ ID NO: 1386123 - RNA, 19 nt, Artificial Sequence
  Description of Artificial Sequence: Synthetic oligonucleotide
gucagcuaguccuugggau

SEQ ID NO: 1386124 - RNA, 19 nt, Artificial Sequence
  Description of Artificial Sequence: Synthetic oligonucleotide
aguaaccaacaaccauuuu

SEQ ID NO: 1386125 - RNA, 19 nt, Artificial Sequence
  Description of Artificial Sequence: Synthetic oligonucleotide
aaccacccucucauuguug

SEQ ID NO: 1386126 - RNA, 19 nt, Artificial Sequence
  Description of Artificial Sequence: Synthetic oligonucleotide
ugggcuucguagucccagu

SEQ ID NO: 1386127 - RNA, 19 nt, Artificial Sequence
  Description of Artificial Sequence: Synthetic oligonucleotide
cacgcguuaagacguuuga

SEQ ID NO: 1386128 - RNA, 19 nt, Artificial Sequence
  Description of Artificial Sequence: Synthetic oligonucleotide
uaccucgaggccacucgaa

SEQ ID NO: 1386129 - RNA, 19 nt, Artificial Sequence
  Description of Artificial Sequence: Synthetic oligonucleotide
auacuugccccgaccaagu

SEQ ID NO: 1386130 - RNA, 19 nt, Artificial Sequence
  Description of Artificial Sequence: Synthetic oligonucleotide
guuaacggccucaaauacu

SEQ ID NO: 1386131 - RNA, 19 nt, Artificial Sequence
  Description of Artificial Sequence: Synthetic oligonucleotide
guccuugggauuugcugga

SEQ ID NO: 1386132 - RNA, 19 nt, Artificial Sequence
  Description of Artificial Sequence: Synthetic oligonucleotide
uaacggccucaaauacuuc

SEQ ID NO: 1386133 - RNA, 19 nt, Artificial Sequence
  Description of Artificial Sequence: Synthetic oligonucleotide
gcauacccuucacauuucc

SEQ ID NO: 1386134 - RNA, 19 nt, Artificial Sequence
  Description of Artificial Sequence: Synthetic oligonucleotide
cagaaucuuaaccucucgu

SEQ ID NO: 1386135 - RNA, 19 nt, Artificial Sequence
  Description of Artificial Sequence: Synthetic oligonucleotide
ucgcuaacaugcagcccaa

SEQ ID NO: 1386136 - RNA, 19 nt, Artificial Sequence
  Description of Artificial Sequence: Synthetic oligonucleotide
uccuugggauuugcuggag

SEQ ID NO: 1386137 - RNA, 19 nt, Artificial Sequence
  Description of Artificial Sequence: Synthetic oligonucleotide
ccacaggguagaaguacgg

SEQ ID NO: 1386138 - RNA, 19 nt, Artificial Sequence
  Description of Artificial Sequence: Synthetic oligonucleotide
uccacaugucuaagcugua

SEQ ID NO: 1386139 - RNA, 19 nt, Artificial Sequence
  Description of Artificial Sequence: Synthetic oligonucleotide
cguagucccaguacucgcg

SEQ ID NO: 1386140 - RNA, 19 nt, Artificial Sequence
  Description of Artificial Sequence: Synthetic oligonucleotide
gaaccgcaacagaccgucg

SEQ ID NO: 1386141 - RNA, 19 nt, Artificial Sequence
  Description of Artificial Sequence: Synthetic oligonucleotide
acgguguucucugcacaag

SEQ ID NO: 1386142 - RNA, 19 nt, Artificial Sequence
  Description of Artificial Sequence: Synthetic oligonucleotide
cguuaagacguuugauuug

SEQ ID NO: 1386143 - RNA, 19 nt, Artificial Sequence
  Description of Artificial Sequence: Synthetic oligonucleotide
ucgcuacgcacgcguuaag

SEQ ID NO: 1386144 - RNA, 19 nt, Artificial Sequence
  Description of Artificial Sequence: Synthetic oligonucleotide
ccuuuacagugucaaucag

SEQ ID NO: 1386145 - RNA, 19 nt, Artificial Sequence
  Description of Artificial Sequence: Synthetic oligonucleotide
guacuccugggcaggauga

SEQ ID NO: 1386146 - RNA, 19 nt, Artificial Sequence
  Description of Artificial Sequence: Synthetic oligonucleotide
ggcuucguagucccaguac

SEQ ID NO: 1386147 - RNA, 19 nt, Artificial Sequence
  Description of Artificial Sequence: Synthetic oligonucleotide
gagcuuuaaguaguucaua

SEQ ID NO: 1386148 - RNA, 19 nt, Artificial Sequence
  Description of Artificial Sequence: Synthetic oligonucleotide
uuacaaccacccucucauu

SEQ ID NO: 1386149 - RNA, 19 nt, Artificial Sequence
  Description of Artificial Sequence: Synthetic oligonucleotide
ucauugaaguguggaucua

SEQ ID NO: 1386150 - RNA, 19 nt, Artificial Sequence
  Description of Artificial Sequence: Synthetic oligonucleotide
ggaucuaggucuauguggu

SEQ ID NO: 1386151 - RNA, 19 nt, Artificial Sequence
  Description of Artificial Sequence: Synthetic oligonucleotide
guaccucgaggccacucga

SEQ ID NO: 1386152 - RNA, 19 nt, Artificial Sequence
  Description of Artificial Sequence: Synthetic oligonucleotide
uccucaggcuguucaccuc

SEQ ID NO: 1386153 - RNA, 19 nt, Artificial Sequence
  Description of Artificial Sequence: Synthetic oligonucleotide
gaguugcuuaaaaucugua

SEQ ID NO: 1386154 - RNA, 19 nt, Artificial Sequence
  Description of Artificial Sequence: Synthetic oligonucleotide
gcaugugaaccuuuuacau

SEQ ID NO: 1386155 - RNA, 19 nt, Artificial Sequence
  Description of Artificial Sequence: Synthetic oligonucleotide
ggccucaaauacuucacua

SEQ ID NO: 1386156 - RNA, 19 nt, Artificial Sequence
  Description of Artificial Sequence: Synthetic oligonucleotide
acagaccgucgauucccca

SEQ ID NO: 1386157 - RNA, 19 nt, Artificial Sequence
  Description of Artificial Sequence: Synthetic oligonucleotide
acaaggagcucuggucccu

SEQ ID NO: 1386158 - RNA, 19 nt, Artificial Sequence
  Description of Artificial Sequence: Synthetic oligonucleotide
acucgcggcuccucaggcu

SEQ ID NO: 1386159 - RNA, 19 nt, Artificial Sequence
  Description of Artificial Sequence: Synthetic oligonucleotide
cuauacuugccccgaccaa

SEQ ID NO: 1386160 - RNA, 19 nt, Artificial Sequence
  Description of Artificial Sequence: Synthetic oligonucleotide
ggagcaacaggcagccaug

SEQ ID NO: 1386161 - RNA, 19 nt, Artificial Sequence
  Description of Artificial Sequence: Synthetic oligonucleotide
gccaccauuuugugucugc

SEQ ID NO: 1386162 - RNA, 19 nt, Artificial Sequence
  Description of Artificial Sequence: Synthetic oligonucleotide
caauucgaacaagcugguc

SEQ ID NO: 1386163 - RNA, 19 nt, Artificial Sequence
  Description of Artificial Sequence: Synthetic oligonucleotide
ggucagcuaguccuuggga

SEQ ID NO: 1386164 - RNA, 19 nt, Artificial Sequence
  Description of Artificial Sequence: Synthetic oligonucleotide
cacgguguucucugcacaa

SEQ ID NO: 1386165 - RNA, 19 nt, Artificial Sequence
  Description of Artificial Sequence: Synthetic oligonucleotide
gcguuaagacguuugauuu

SEQ ID NO: 1386166 - RNA, 19 nt, Artificial Sequence
  Description of Artificial Sequence: Synthetic oligonucleotide
ucguaccgcaggagcuugu

SEQ ID NO: 1386167 - RNA, 19 nt, Artificial Sequence
  Description of Artificial Sequence: Synthetic oligonucleotide
gcuucguagucccaguacu

SEQ ID NO: 1386168 - RNA, 19 nt, Artificial Sequence
  Description of Artificial Sequence: Synthetic oligonucleotide
gaucuaggucuauguggua

SEQ ID NO: 1386169 - RNA, 19 nt, Artificial Sequence
  Description of Artificial Sequence: Synthetic oligonucleotide
acgcguuaagacguuugau

SEQ ID NO: 1386170 - RNA, 19 nt, Artificial Sequence
  Description of Artificial Sequence: Synthetic oligonucleotide
agggagcaacaguaaccaa

SEQ ID NO: 1386171 - RNA, 19 nt, Artificial Sequence
  Description of Artificial Sequence: Synthetic oligonucleotide
uacuugccccgaccaaguu

SEQ ID NO: 1386172 - RNA, 19 nt, Artificial Sequence
  Description of Artificial Sequence: Synthetic oligonucleotide
gugauguuaacggccucaa

SEQ ID NO: 1386173 - RNA, 19 nt, Artificial Sequence
  Description of Artificial Sequence: Synthetic oligonucleotide
gucguaccgcaggagcuug

SEQ ID NO: 1386174 - RNA, 19 nt, Artificial Sequence
  Description of Artificial Sequence: Synthetic oligonucleotide
cgguguucucugcacaagg

SEQ ID NO: 1386175 - RNA, 19 nt, Artificial Sequence
  Description of Artificial Sequence: Synthetic oligonucleotide
ggcuucaucgugcugcgcu

SEQ ID NO: 1386176 - RNA, 19 nt, Artificial Sequence
  Description of Artificial Sequence: Synthetic oligonucleotide
caguaaccaacaaccauuu

SEQ ID NO: 1386177 - RNA, 19 nt, Artificial Sequence
  Description of Artificial Sequence: Synthetic oligonucleotide
gucuuugacacaggguccu

SEQ ID NO: 1386178 - RNA, 19 nt, Artificial Sequence
  Description of Artificial Sequence: Synthetic oligonucleotide
gguggucuaguucgugcuc

SEQ ID NO: 1386179 - RNA, 19 nt, Artificial Sequence
  Description of Artificial Sequence: Synthetic oligonucleotide
cuccgccagaccccaauca

SEQ ID NO: 1386180 - RNA, 19 nt, Artificial Sequence
  Description of Artificial Sequence: Synthetic oligonucleotide
uucccuugcuguggcagua

SEQ ID NO: 1386181 - RNA, 19 nt, Artificial Sequence
  Description of Artificial Sequence: Synthetic oligonucleotide
cucgccaagccugccacca

SEQ ID NO: 1386182 - RNA, 19 nt, Artificial Sequence
  Description of Artificial Sequence: Synthetic oligonucleotide
cgcaacagaccgucgauuc

SEQ ID NO: 1386183 - RNA, 19 nt, Artificial Sequence
  Description of Artificial Sequence: Synthetic oligonucleotide
cccgaccaaguuuucgaac

SEQ ID NO: 1386184 - RNA, 19 nt, Artificial Sequence
  Description of Artificial Sequence: Synthetic oligonucleotide
ccgugaauguugucccaag

SEQ ID NO: 1386185 - RNA, 19 nt, Artificial Sequence
  Description of Artificial Sequence: Synthetic oligonucleotide
cugcucucaggacgugauc

SEQ ID NO: 1386186 - RNA, 19 nt, Artificial Sequence
  Description of Artificial Sequence: Synthetic oligonucleotide
cucgcuacgcacgcguuaa

SEQ ID NO: 1386187 - RNA, 19 nt, Artificial Sequence
  Description of Artificial Sequence: Synthetic oligonucleotide
ggucugauuuacgguggug

SEQ ID NO: 1386188 - RNA, 19 nt, Artificial Sequence
  Description of Artificial Sequence: Synthetic oligonucleotide
cucgaggccacucgaacau

SEQ ID NO: 1386189 - RNA, 19 nt, Artificial Sequence
  Description of Artificial Sequence: Synthetic oligonucleotide
uuacgguggugggcugccc

SEQ ID NO: 1386190 - RNA, 19 nt, Artificial Sequence
  Description of Artificial Sequence: Synthetic oligonucleotide
gccccgaccaaguuuucga

SEQ ID NO: 1386191 - RNA, 19 nt, Artificial Sequence
  Description of Artificial Sequence: Synthetic oligonucleotide
agauauccauacagcucau

SEQ ID NO: 1386192 - RNA, 19 nt, Artificial Sequence
  Description of Artificial Sequence: Synthetic oligonucleotide
ggacugcuccuucaccaca

SEQ ID NO: 1386193 - RNA, 19 nt, Artificial Sequence
  Description of Artificial Sequence: Synthetic oligonucleotide
cccaaucaaucagucggag

SEQ ID NO: 1386194 - RNA, 19 nt, Artificial Sequence
  Description of Artificial Sequence: Synthetic oligonucleotide
ucgcggcuccucaggcugu

SEQ ID NO: 1386195 - RNA, 19 nt, Artificial Sequence
  Description of Artificial Sequence: Synthetic oligonucleotide
ggacgugaucucgcuacgc

SEQ ID NO: 1386196 - RNA, 19 nt, Artificial Sequence
  Description of Artificial Sequence: Synthetic oligonucleotide
gcacgcguuaagacguuug

SEQ ID NO: 1386197 - RNA, 19 nt, Artificial Sequence
  Description of Artificial Sequence: Synthetic oligonucleotide
ggaagucaacaggaagcca

SEQ ID NO: 1386198 - RNA, 19 nt, Artificial Sequence
  Description of Artificial Sequence: Synthetic oligonucleotide
gcucucaggacgugaucuc

SEQ ID NO: 1386199 - RNA, 19 nt, Artificial Sequence
  Description of Artificial Sequence: Synthetic oligonucleotide
ucgccaagccugccaccau

SEQ ID NO: 1386200 - RNA, 19 nt, Artificial Sequence
  Description of Artificial Sequence: Synthetic oligonucleotide
ggacgugggcuucguaguc

SEQ ID NO: 1386201 - RNA, 19 nt, Artificial Sequence
  Description of Artificial Sequence: Synthetic oligonucleotide
aggaaccgcaacagaccgu

SEQ ID NO: 1386202 - RNA, 19 nt, Artificial Sequence
  Description of Artificial Sequence: Synthetic oligonucleotide
ucccuugcuguggcaguaa

SEQ ID NO: 1386203 - RNA, 19 nt, Artificial Sequence
  Description of Artificial Sequence: Synthetic oligonucleotide
ggucuaguucgugcucgcc

SEQ ID NO: 1386204 - RNA, 19 nt, Artificial Sequence
  Description of Artificial Sequence: Synthetic oligonucleotide
gggauuugcuggagcaaca

SEQ ID NO: 1386205 - RNA, 19 nt, Artificial Sequence
  Description of Artificial Sequence: Synthetic oligonucleotide
gugucugcucucaggacgu

SEQ ID NO: 1386206 - RNA, 19 nt, Artificial Sequence
  Description of Artificial Sequence: Synthetic oligonucleotide
gcacgguguucucugcaca

SEQ ID NO: 1386207 - RNA, 19 nt, Artificial Sequence
  Description of Artificial Sequence: Synthetic oligonucleotide
accggauaucaaagucagu

SEQ ID NO: 1386208 - RNA, 19 nt, Artificial Sequence
  Description of Artificial Sequence: Synthetic oligonucleotide
ccucgaggccacucgaaca

SEQ ID NO: 1386209 - RNA, 19 nt, Artificial Sequence
  Description of Artificial Sequence: Synthetic oligonucleotide
uugccccgaccaaguuuuc

SEQ ID NO: 1386210 - RNA, 19 nt, Artificial Sequence
  Description of Artificial Sequence: Synthetic oligonucleotide
cgucgauuccccaggcuuc

SEQ ID NO: 1386211 - RNA, 19 nt, Artificial Sequence
  Description of Artificial Sequence: Synthetic oligonucleotide
gggacgugggcuucguagu

SEQ ID NO: 1386212 - RNA, 19 nt, Artificial Sequence
  Description of Artificial Sequence: Synthetic oligonucleotide
ucgggacgugggcuucgua

SEQ ID NO: 1386213 - RNA, 19 nt, Artificial Sequence
  Description of Artificial Sequence: Synthetic oligonucleotide
ucgaggccacucgaacauu

SEQ ID NO: 1386214 - RNA, 19 nt, Artificial Sequence
  Description of Artificial Sequence: Synthetic oligonucleotide
gcucgcuaacaugcagccc

SEQ ID NO: 1386215 - RNA, 19 nt, Artificial Sequence
  Description of Artificial Sequence: Synthetic oligonucleotide
gccuuccuacuucuuuuaa

SEQ ID NO: 1386216 - RNA, 19 nt, Artificial Sequence
  Description of Artificial Sequence: Synthetic oligonucleotide
ggcuguucaccucggcgua

SEQ ID NO: 1386217 - RNA, 19 nt, Artificial Sequence
  Description of Artificial Sequence: Synthetic oligonucleotide
gggcaggaugauagaacuc

SEQ ID NO: 1386218 - RNA, 19 nt, Artificial Sequence
  Description of Artificial Sequence: Synthetic oligonucleotide
ccuuucggaauaucaugcu

SEQ ID NO: 1386219 - RNA, 19 nt, Artificial Sequence
  Description of Artificial Sequence: Synthetic oligonucleotide
ggugaucuaucaugacauu

SEQ ID NO: 1386220 - RNA, 19 nt, Artificial Sequence
  Description of Artificial Sequence: Synthetic oligonucleotide
aucucgcuacgcacgcguu

SEQ ID NO: 1386221 - RNA, 19 nt, Artificial Sequence
  Description of Artificial Sequence: Synthetic oligonucleotide
cucgaagguucuccagaau

SEQ ID NO: 1386222 - RNA, 19 nt, Artificial Sequence
  Description of Artificial Sequence: Synthetic oligonucleotide
gcucgggacgugggcuucg

SEQ ID NO: 1386223 - RNA, 19 nt, Artificial Sequence
  Description of Artificial Sequence: Synthetic oligonucleotide
cgcguuaagacguuugauu

SEQ ID NO: 1386224 - RNA, 19 nt, Artificial Sequence
  Description of Artificial Sequence: Synthetic oligonucleotide
cccaugcuuucugggucgg

SEQ ID NO: 1386225 - RNA, 19 nt, Artificial Sequence
  Description of Artificial Sequence: Synthetic oligonucleotide
cgugcugcgcugaggccac

SEQ ID NO: 1386226 - RNA, 19 nt, Artificial Sequence
  Description of Artificial Sequence: Synthetic oligonucleotide
gggcuucguagucccagua

SEQ ID NO: 1386227 - RNA, 19 nt, Artificial Sequence
  Description of Artificial Sequence: Synthetic oligonucleotide
ccaugcuuucugggucggg

SEQ ID NO: 1386228 - RNA, 19 nt, Artificial Sequence
  Description of Artificial Sequence: Synthetic oligonucleotide
cgauuccccaggcuucauc

SEQ ID NO: 1386229 - RNA, 19 nt, Artificial Sequence
  Description of Artificial Sequence: Synthetic oligonucleotide
gcacagggagcaacaguaa

SEQ ID NO: 1386230 - RNA, 19 nt, Artificial Sequence
  Description of Artificial Sequence: Synthetic oligonucleotide
cuggucccuugaaguaccu

SEQ ID NO: 1386231 - RNA, 19 nt, Artificial Sequence
  Description of Artificial Sequence: Synthetic oligonucleotide
ccccgaccaaguuuucgaa

SEQ ID NO: 1386232 - RNA, 19 nt, Artificial Sequence
  Description of Artificial Sequence: Synthetic oligonucleotide
caggacugacaaggugucu

SEQ ID NO: 1386233 - RNA, 19 nt, Artificial Sequence
  Description of Artificial Sequence: Synthetic oligonucleotide
ccgucgauuccccaggcuu

SEQ ID NO: 1386234 - RNA, 19 nt, Artificial Sequence
  Description of Artificial Sequence: Synthetic oligonucleotide
gaacuccgccagaccccaa

SEQ ID NO: 1386235 - RNA, 19 nt, Artificial Sequence
  Description of Artificial Sequence: Synthetic oligonucleotide
ccaguacucgcggcuccuc

SEQ ID NO: 1386236 - RNA, 19 nt, Artificial Sequence
  Description of Artificial Sequence: Synthetic oligonucleotide
cgaacaagcuggucauagu

SEQ ID NO: 1386237 - RNA, 19 nt, Artificial Sequence
  Description of Artificial Sequence: Synthetic oligonucleotide
cgcuacgcacgcguuaaga

SEQ ID NO: 1386238 - RNA, 19 nt, Artificial Sequence
  Description of Artificial Sequence: Synthetic oligonucleotide
acgcacgcguuaagacguu

SEQ ID NO: 1386239 - RNA, 19 nt, Artificial Sequence
  Description of Artificial Sequence: Synthetic oligonucleotide
cgaaccaguugguaaucau

SEQ ID NO: 1386240 - RNA, 19 nt, Artificial Sequence
  Description of Artificial Sequence: Synthetic oligonucleotide
ccaccauuuugugucugcu

SEQ ID NO: 1386241 - RNA, 19 nt, Artificial Sequence
  Description of Artificial Sequence: Synthetic oligonucleotide
cagcgcuuccgugaauguu

SEQ ID NO: 1386242 - RNA, 19 nt, Artificial Sequence
  Description of Artificial Sequence: Synthetic oligonucleotide
gcgcuuccgugaauguugu

SEQ ID NO: 1386243 - RNA, 19 nt, Artificial Sequence
  Description of Artificial Sequence: Synthetic oligonucleotide
ccaaaggcaugugaaccuu

SEQ ID NO: 1386244 - RNA, 19 nt, Artificial Sequence
  Description of Artificial Sequence: Synthetic oligonucleotide
ccagcgcuuccgugaaugu

SEQ ID NO: 1386245 - RNA, 19 nt, Artificial Sequence
  Description of Artificial Sequence: Synthetic oligonucleotide
ccgccagaccccaaucaau

SEQ ID NO: 1386246 - RNA, 19 nt, Artificial Sequence
  Description of Artificial Sequence: Synthetic oligonucleotide
ccacccucucauuguuggu

SEQ ID NO: 1386247 - RNA, 19 nt, Artificial Sequence
  Description of Artificial Sequence: Synthetic oligonucleotide
cgcuuccgugaauguuguc

SEQ ID NO: 1386248 - RNA, 19 nt, Artificial Sequence
  Description of Artificial Sequence: Synthetic oligonucleotide
ccgcaacagaccgucgauu

SEQ ID NO: 1386249 - RNA, 19 nt, Artificial Sequence
  Description of Artificial Sequence: Synthetic oligonucleotide
cgcacgcguuaagacguuu

SEQ ID NO: 1386250 - RNA, 19 nt, Artificial Sequence
  Description of Artificial Sequence: Synthetic oligonucleotide
aaugaguuguccccgcucc

SEQ ID NO: 1386251 - RNA, 19 nt, Artificial Sequence
  Description of Artificial Sequence: Synthetic oligonucleotide
accguggugaacuugauac

SEQ ID NO: 1386252 - RNA, 19 nt, Artificial Sequence
  Description of Artificial Sequence: Synthetic oligonucleotide
uuuauagaggcgcucauug

SEQ ID NO: 1386253 - RNA, 19 nt, Artificial Sequence
  Description of Artificial Sequence: Synthetic oligonucleotide
uuugcauucucaaucuggg

SEQ ID NO: 1386254 - RNA, 19 nt, Artificial Sequence
  Description of Artificial Sequence: Synthetic oligonucleotide
ucuaucgucaucuugcagc

SEQ ID NO: 1386255 - RNA, 19 nt, Artificial Sequence
  Description of Artificial Sequence: Synthetic oligonucleotide
ugggucaucacucacacug

SEQ ID NO: 1386256 - RNA, 19 nt, Artificial Sequence
  Description of Artificial Sequence: Synthetic oligonucleotide
aaucuguaggccccggucc

SEQ ID NO: 1386257 - RNA, 19 nt, Artificial Sequence
  Description of Artificial Sequence: Synthetic oligonucleotide
aaggggagagcaucuaucg

SEQ ID NO: 1386258 - RNA, 19 nt, Artificial Sequence
  Description of Artificial Sequence: Synthetic oligonucleotide
uguaguguacaucacuggc

SEQ ID NO: 1386259 - RNA, 19 nt, Artificial Sequence
  Description of Artificial Sequence: Synthetic oligonucleotide
aagauuaugccaagacucc

SEQ ID NO: 1386260 - RNA, 19 nt, Artificial Sequence
  Description of Artificial Sequence: Synthetic oligonucleotide
uagacuuuaucacucaggu

SEQ ID NO: 1386261 - RNA, 19 nt, Artificial Sequence
  Description of Artificial Sequence: Synthetic oligonucleotide
ucuuuagauccucaggcag

SEQ ID NO: 1386262 - RNA, 19 nt, Artificial Sequence
  Description of Artificial Sequence: Synthetic oligonucleotide
aucgcauuaagucuugcuc

SEQ ID NO: 1386263 - RNA, 19 nt, Artificial Sequence
  Description of Artificial Sequence: Synthetic oligonucleotide
aacucaugguacugugucc

SEQ ID NO: 1386264 - RNA, 19 nt, Artificial Sequence
  Description of Artificial Sequence: Synthetic oligonucleotide
aggugcaucgcauuaaguc

SEQ ID NO: 1386265 - RNA, 19 nt, Artificial Sequence
  Description of Artificial Sequence: Synthetic oligonucleotide
uguaccggaaaucacuggc

SEQ ID NO: 1386266 - RNA, 19 nt, Artificial Sequence
  Description of Artificial Sequence: Synthetic oligonucleotide
ugaaacucacucuguaggg

SEQ ID NO: 1386267 - RNA, 19 nt, Artificial Sequence
  Description of Artificial Sequence: Synthetic oligonucleotide
uuggcuuucgcucggauga

SEQ ID NO: 1386268 - RNA, 19 nt, Artificial Sequence
  Description of Artificial Sequence: Synthetic oligonucleotide
aggaacgccucuuuguacc

SEQ ID NO: 1386269 - RNA, 19 nt, Artificial Sequence
  Description of Artificial Sequence: Synthetic oligonucleotide
ucuacuuuguaggagccgg

SEQ ID NO: 1386270 - RNA, 19 nt, Artificial Sequence
  Description of Artificial Sequence: Synthetic oligonucleotide
uuaagucuugcucuggcga

SEQ ID NO: 1386271 - RNA, 19 nt, Artificial Sequence
  Description of Artificial Sequence: Synthetic oligonucleotide
uuuguaccggaaaucacug

SEQ ID NO: 1386272 - RNA, 19 nt, Artificial Sequence
  Description of Artificial Sequence: Synthetic oligonucleotide
uaugcauggagucugcauc

SEQ ID NO: 1386273 - RNA, 19 nt, Artificial Sequence
  Description of Artificial Sequence: Synthetic oligonucleotide
ucaucacucacacugcgga

SEQ ID NO: 1386274 - RNA, 19 nt, Artificial Sequence
  Description of Artificial Sequence: Synthetic oligonucleotide
uucaugcccaucaagucug

SEQ ID NO: 1386275 - RNA, 19 nt, Artificial Sequence
  Description of Artificial Sequence: Synthetic oligonucleotide
augcauggagucugcaucc

SEQ ID NO: 1386276 - RNA, 19 nt, Artificial Sequence
  Description of Artificial Sequence: Synthetic oligonucleotide
auuaagucuugcucuggcg

SEQ ID NO: 1386277 - RNA, 19 nt, Artificial Sequence
  Description of Artificial Sequence: Synthetic oligonucleotide
gaaucuccgaggcaucugg

SEQ ID NO: 1386278 - RNA, 19 nt, Artificial Sequence
  Description of Artificial Sequence: Synthetic oligonucleotide
uguccgguagucaugguca

SEQ ID NO: 1386279 - RNA, 19 nt, Artificial Sequence
  Description of Artificial Sequence: Synthetic oligonucleotide
cuuuguaggagccgggagg

SEQ ID NO: 1386280 - RNA, 19 nt, Artificial Sequence
  Description of Artificial Sequence: Synthetic oligonucleotide
gccauuucuacuuuguagg

SEQ ID NO: 1386281 - RNA, 19 nt, Artificial Sequence
  Description of Artificial Sequence: Synthetic oligonucleotide
augcccaucaagucugacc

SEQ ID NO: 1386282 - RNA, 19 nt, Artificial Sequence
  Description of Artificial Sequence: Synthetic oligonucleotide
agauuuguacuugacauca

SEQ ID NO: 1386283 - RNA, 19 nt, Artificial Sequence
  Description of Artificial Sequence: Synthetic oligonucleotide
auuacagugcauguaacug

SEQ ID NO: 1386284 - RNA, 19 nt, Artificial Sequence
  Description of Artificial Sequence: Synthetic oligonucleotide
uguaucgauucucacucug

SEQ ID NO: 1386285 - RNA, 19 nt, Artificial Sequence
  Description of Artificial Sequence: Synthetic oligonucleotide
accccaaugaguugucccc

SEQ ID NO: 1386286 - RNA, 19 nt, Artificial Sequence
  Description of Artificial Sequence: Synthetic oligonucleotide
ugaccuguagugaaacuca

SEQ ID NO: 1386287 - RNA, 19 nt, Artificial Sequence
  Description of Artificial Sequence: Synthetic oligonucleotide
aagacuccuuauauuuugc

SEQ ID NO: 1386288 - RNA, 19 nt, Artificial Sequence
  Description of Artificial Sequence: Synthetic oligonucleotide
ucuaccaccguggugaacu

SEQ ID NO: 1386289 - RNA, 19 nt, Artificial Sequence
  Description of Artificial Sequence: Synthetic oligonucleotide
uguaccuaugcauggaguc

SEQ ID NO: 1386290 - RNA, 19 nt, Artificial Sequence
  Description of Artificial Sequence: Synthetic oligonucleotide
uuacagugcauguaacugu

SEQ ID NO: 1386291 - RNA, 19 nt, Artificial Sequence
  Description of Artificial Sequence: Synthetic oligonucleotide
cuugcucuggcgaaauccg

SEQ ID NO: 1386292 - RNA, 19 nt, Artificial Sequence
  Description of Artificial Sequence: Synthetic oligonucleotide
ucgcauuaagucuugcucu

SEQ ID NO: 1386293 - RNA, 19 nt, Artificial Sequence
  Description of Artificial Sequence: Synthetic oligonucleotide
uucuguagacuuuaucacu

SEQ ID NO: 1386294 - RNA, 19 nt, Artificial Sequence
  Description of Artificial Sequence: Synthetic oligonucleotide
ucgccagcugcuuuuauag

SEQ ID NO: 1386295 - RNA, 19 nt, Artificial Sequence
  Description of Artificial Sequence: Synthetic oligonucleotide
caucuugcagccuugagca

SEQ ID NO: 1386296 - RNA, 19 nt, Artificial Sequence
  Description of Artificial Sequence: Synthetic oligonucleotide
uuucuacuuuguaggagcc

SEQ ID NO: 1386297 - RNA, 19 nt, Artificial Sequence
  Description of Artificial Sequence: Synthetic oligonucleotide
ucuugcucuggcgaaaucc

SEQ ID NO: 1386298 - RNA, 19 nt, Artificial Sequence
  Description of Artificial Sequence: Synthetic oligonucleotide
gaugugcagaaucuccgag

SEQ ID NO: 1386299 - RNA, 19 nt, Artificial Sequence
  Description of Artificial Sequence: Synthetic oligonucleotide
agagcaucuaucgucaucu

SEQ ID NO: 1386300 - RNA, 19 nt, Artificial Sequence
  Description of Artificial Sequence: Synthetic oligonucleotide
cuaucgucaucuugcagcc

SEQ ID NO: 1386301 - RNA, 19 nt, Artificial Sequence
  Description of Artificial Sequence: Synthetic oligonucleotide
gagucuaccaccgugguga

SEQ ID NO: 1386302 - RNA, 19 nt, Artificial Sequence
  Description of Artificial Sequence: Synthetic oligonucleotide
aagucgugccuguagagaa

SEQ ID NO: 1386303 - RNA, 19 nt, Artificial Sequence
  Description of Artificial Sequence: Synthetic oligonucleotide
ucaggugcaucgcauuaag

SEQ ID NO: 1386304 - RNA, 19 nt, Artificial Sequence
  Description of Artificial Sequence: Synthetic oligonucleotide
ugccuguagagaaagucac

SEQ ID NO: 1386305 - RNA, 19 nt, Artificial Sequence
  Description of Artificial Sequence: Synthetic oligonucleotide
guagacuuuaucacucagg

SEQ ID NO: 1386306 - RNA, 19 nt, Artificial Sequence
  Description of Artificial Sequence: Synthetic oligonucleotide
cauuaagucuugcucuggc

SEQ ID NO: 1386307 - RNA, 19 nt, Artificial Sequence
  Description of Artificial Sequence: Synthetic oligonucleotide
uguguagcggugucucgcg

SEQ ID NO: 1386308 - RNA, 19 nt, Artificial Sequence
  Description of Artificial Sequence: Synthetic oligonucleotide
acaggcgcucauuacagug

SEQ ID NO: 1386309 - RNA, 19 nt, Artificial Sequence
  Description of Artificial Sequence: Synthetic oligonucleotide
uuuuacgguacuuggucuc

SEQ ID NO: 1386310 - RNA, 19 nt, Artificial Sequence
  Description of Artificial Sequence: Synthetic oligonucleotide
agugccguagucguggguc

SEQ ID NO: 1386311 - RNA, 19 nt, Artificial Sequence
  Description of Artificial Sequence: Synthetic oligonucleotide
acucuguagggcgaugggc

SEQ ID NO: 1386312 - RNA, 19 nt, Artificial Sequence
  Description of Artificial Sequence: Synthetic oligonucleotide
uucgcucggaugaacucag

SEQ ID NO: 1386313 - RNA, 19 nt, Artificial Sequence
  Description of Artificial Sequence: Synthetic oligonucleotide
uugcauucucaaucugggg

SEQ ID NO: 1386314 - RNA, 19 nt, Artificial Sequence
  Description of Artificial Sequence: Synthetic oligonucleotide
ggaaaugccucauccuugg

SEQ ID NO: 1386315 - RNA, 19 nt, Artificial Sequence
  Description of Artificial Sequence: Synthetic oligonucleotide
uacccaaucuguaggcccc

SEQ ID NO: 1386316 - RNA, 19 nt, Artificial Sequence
  Description of Artificial Sequence: Synthetic oligonucleotide
ucuuuguaccggaaaucac

SEQ ID NO: 1386317 - RNA, 19 nt, Artificial Sequence
  Description of Artificial Sequence: Synthetic oligonucleotide
gauaucccuggacaccuug

SEQ ID NO: 1386318 - RNA, 19 nt, Artificial Sequence
  Description of Artificial Sequence: Synthetic oligonucleotide
gaugcugcgguacccaauc

SEQ ID NO: 1386319 - RNA, 19 nt, Artificial Sequence
  Description of Artificial Sequence: Synthetic oligonucleotide
guacccaaucuguaggccc

SEQ ID NO: 1386320 - RNA, 19 nt, Artificial Sequence
  Description of Artificial Sequence: Synthetic oligonucleotide
aacuguucuuggcgugaac

SEQ ID NO: 1386321 - RNA, 19 nt, Artificial Sequence
  Description of Artificial Sequence: Synthetic oligonucleotide
auguaacuguucuuggcgu

SEQ ID NO: 1386322 - RNA, 19 nt, Artificial Sequence
  Description of Artificial Sequence: Synthetic oligonucleotide
agaucucagagccagccau

SEQ ID NO: 1386323 - RNA, 19 nt, Artificial Sequence
  Description of Artificial Sequence: Synthetic oligonucleotide
uuguaccggaaaucacugg

SEQ ID NO: 1386324 - RNA, 19 nt, Artificial Sequence
  Description of Artificial Sequence: Synthetic oligonucleotide
uaccggaaaucacuggcga

SEQ ID NO: 1386325 - RNA, 19 nt, Artificial Sequence
  Description of Artificial Sequence: Synthetic oligonucleotide
uagucgugggucaucacuc

SEQ ID NO: 1386326 - RNA, 19 nt, Artificial Sequence
  Description of Artificial Sequence: Synthetic oligonucleotide
uuggcgugaacaaggucug

SEQ ID NO: 1386327 - RNA, 19 nt, Artificial Sequence
  Description of Artificial Sequence: Synthetic oligonucleotide
ucacucacacugcggaccc

SEQ ID NO: 1386328 - RNA, 19 nt, Artificial Sequence
  Description of Artificial Sequence: Synthetic oligonucleotide
guaguguacaucacuggcc

SEQ ID NO: 1386329 - RNA, 19 nt, Artificial Sequence
  Description of Artificial Sequence: Synthetic oligonucleotide
ucacucuguagggcgaugg

SEQ ID NO: 1386330 - RNA, 19 nt, Artificial Sequence
  Description of Artificial Sequence: Synthetic oligonucleotide
aacugggagcaacccuugg

SEQ ID NO: 1386331 - RNA, 19 nt, Artificial Sequence
  Description of Artificial Sequence: Synthetic oligonucleotide
caagggucgguguguagcg

SEQ ID NO: 1386332 - RNA, 19 nt, Artificial Sequence
  Description of Artificial Sequence: Synthetic oligonucleotide
gucagauuuguacuugaca

SEQ ID NO: 1386333 - RNA, 19 nt, Artificial Sequence
  Description of Artificial Sequence: Synthetic oligonucleotide
caggguguaccuaugcaug

SEQ ID NO: 1386334 - RNA, 19 nt, Artificial Sequence
  Description of Artificial Sequence: Synthetic oligonucleotide
gagaccaagggucggugug

SEQ ID NO: 1386335 - RNA, 19 nt, Artificial Sequence
  Description of Artificial Sequence: Synthetic oligonucleotide
uucuacuuuguaggagccg

SEQ ID NO: 1386336 - RNA, 19 nt, Artificial Sequence
  Description of Artificial Sequence: Synthetic oligonucleotide
uugcucuggcgaaauccgg

SEQ ID NO: 1386337 - RNA, 19 nt, Artificial Sequence
  Description of Artificial Sequence: Synthetic oligonucleotide
uagugaaacucacucugua

SEQ ID NO: 1386338 - RNA, 19 nt, Artificial Sequence
  Description of Artificial Sequence: Synthetic oligonucleotide
ucuuccuauugaugugcag

SEQ ID NO: 1386339 - RNA, 19 nt, Artificial Sequence
  Description of Artificial Sequence: Synthetic oligonucleotide
aacgccucuuuguaccgga

SEQ ID NO: 1386340 - RNA, 19 nt, Artificial Sequence
  Description of Artificial Sequence: Synthetic oligonucleotide
ccuauugaugugcagaauc

SEQ ID NO: 1386341 - RNA, 19 nt, Artificial Sequence
  Description of Artificial Sequence: Synthetic oligonucleotide
aacuugauacugucugguu

SEQ ID NO: 1386342 - RNA, 19 nt, Artificial Sequence
  Description of Artificial Sequence: Synthetic oligonucleotide
cuuguacucauugucgcuc

SEQ ID NO: 1386343 - RNA, 19 nt, Artificial Sequence
  Description of Artificial Sequence: Synthetic oligonucleotide
agcaacccuuggcaaaguc

SEQ ID NO: 1386344 - RNA, 19 nt, Artificial Sequence
  Description of Artificial Sequence: Synthetic oligonucleotide
ucgugggucaucacucaca

SEQ ID NO: 1386345 - RNA, 19 nt, Artificial Sequence
  Description of Artificial Sequence: Synthetic oligonucleotide
cugaccuguagugaaacuc

SEQ ID NO: 1386346 - RNA, 19 nt, Artificial Sequence
  Description of Artificial Sequence: Synthetic oligonucleotide
cuuuguaccggaaaucacu

SEQ ID NO: 1386347 - RNA, 19 nt, Artificial Sequence
  Description of Artificial Sequence: Synthetic oligonucleotide
guaccggaaaucacuggcg

SEQ ID NO: 1386348 - RNA, 19 nt, Artificial Sequence
  Description of Artificial Sequence: Synthetic oligonucleotide
cuuccuauugaugugcaga

SEQ ID NO: 1386349 - RNA, 19 nt, Artificial Sequence
  Description of Artificial Sequence: Synthetic oligonucleotide
aggaaaccagguuggucag

SEQ ID NO: 1386350 - RNA, 19 nt, Artificial Sequence
  Description of Artificial Sequence: Synthetic oligonucleotide
cuacuuuguaggagccggg

SEQ ID NO: 1386351 - RNA, 19 nt, Artificial Sequence
  Description of Artificial Sequence: Synthetic oligonucleotide
uuuacgguacuuggucuca

SEQ ID NO: 1386352 - RNA, 19 nt, Artificial Sequence
  Description of Artificial Sequence: Synthetic oligonucleotide
uuguacucauugucgcucu

SEQ ID NO: 1386353 - RNA, 19 nt, Artificial Sequence
  Description of Artificial Sequence: Synthetic oligonucleotide
ccuguaguguacaucacug

SEQ ID NO: 1386354 - RNA, 19 nt, Artificial Sequence
  Description of Artificial Sequence: Synthetic oligonucleotide
guuggcuuucgcucggaug

SEQ ID NO: 1386355 - RNA, 19 nt, Artificial Sequence
  Description of Artificial Sequence: Synthetic oligonucleotide
aucuaucgucaucuugcag

SEQ ID NO: 1386356 - RNA, 19 nt, Artificial Sequence
  Description of Artificial Sequence: Synthetic oligonucleotide
gcucgugcagccuggaagg

SEQ ID NO: 1386357 - RNA, 19 nt, Artificial Sequence
  Description of Artificial Sequence: Synthetic oligonucleotide
uagaggcgcucauugguga

SEQ ID NO: 1386358 - RNA, 19 nt, Artificial Sequence
  Description of Artificial Sequence: Synthetic oligonucleotide
ucccaggaguuucuguaga

SEQ ID NO: 1386359 - RNA, 19 nt, Artificial Sequence
  Description of Artificial Sequence: Synthetic oligonucleotide
gacuccuuauauuuugccu

SEQ ID NO: 1386360 - RNA, 19 nt, Artificial Sequence
  Description of Artificial Sequence: Synthetic oligonucleotide
aucacucaggugcaucgca

SEQ ID NO: 1386361 - RNA, 19 nt, Artificial Sequence
  Description of Artificial Sequence: Synthetic oligonucleotide
guacucauugucgcucugg

SEQ ID NO: 1386362 - RNA, 19 nt, Artificial Sequence
  Description of Artificial Sequence: Synthetic oligonucleotide
caggcgcucauuacagugc

SEQ ID NO: 1386363 - RNA, 19 nt, Artificial Sequence
  Description of Artificial Sequence: Synthetic oligonucleotide
ugcaucgcauuaagucuug

SEQ ID NO: 1386364 - RNA, 19 nt, Artificial Sequence
  Description of Artificial Sequence: Synthetic oligonucleotide
ugucucgcguccucgccag

SEQ ID NO: 1386365 - RNA, 19 nt, Artificial Sequence
  Description of Artificial Sequence: Synthetic oligonucleotide
auccggguggucugggauc

SEQ ID NO: 1386366 - RNA, 19 nt, Artificial Sequence
  Description of Artificial Sequence: Synthetic oligonucleotide
gaaggggagagcaucuauc

SEQ ID NO: 1386367 - RNA, 19 nt, Artificial Sequence
  Description of Artificial Sequence: Synthetic oligonucleotide
caaucuguaggccccgguc

SEQ ID NO: 1386368 - RNA, 19 nt, Artificial Sequence
  Description of Artificial Sequence: Synthetic oligonucleotide
guuggugggccuucugggc

SEQ ID NO: 1386369 - RNA, 19 nt, Artificial Sequence
  Description of Artificial Sequence: Synthetic oligonucleotide
ucuccgaggcaucuggguu

SEQ ID NO: 1386370 - RNA, 19 nt, Artificial Sequence
  Description of Artificial Sequence: Synthetic oligonucleotide
uggcuauguccccggaggc

SEQ ID NO: 1386371 - RNA, 19 nt, Artificial Sequence
  Description of Artificial Sequence: Synthetic oligonucleotide
gguguaccuaugcauggag

SEQ ID NO: 1386372 - RNA, 19 nt, Artificial Sequence
  Description of Artificial Sequence: Synthetic oligonucleotide
guaucgauucucacucugc

SEQ ID NO: 1386373 - RNA, 19 nt, Artificial Sequence
  Description of Artificial Sequence: Synthetic oligonucleotide
cuauugaugugcagaaucu

SEQ ID NO: 1386374 - RNA, 19 nt, Artificial Sequence
  Description of Artificial Sequence: Synthetic oligonucleotide
aaauccggguggucuggga

SEQ ID NO: 1386375 - RNA, 19 nt, Artificial Sequence
  Description of Artificial Sequence: Synthetic oligonucleotide
uuuuauagaggcgcucauu

SEQ ID NO: 1386376 - RNA, 19 nt, Artificial Sequence
  Description of Artificial Sequence: Synthetic oligonucleotide
aggucuggagagucuacca

SEQ ID NO: 1386377 - RNA, 19 nt, Artificial Sequence
  Description of Artificial Sequence: Synthetic oligonucleotide
cuuucgcucggaugaacuc

SEQ ID NO: 1386378 - RNA, 19 nt, Artificial Sequence
  Description of Artificial Sequence: Synthetic oligonucleotide
gaacaaggucuggagaguc

SEQ ID NO: 1386379 - RNA, 19 nt, Artificial Sequence
  Description of Artificial Sequence: Synthetic oligonucleotide
agagucuaccaccguggug

SEQ ID NO: 1386380 - RNA, 19 nt, Artificial Sequence
  Description of Artificial Sequence: Synthetic oligonucleotide
agauuaugccaagacuccu

SEQ ID NO: 1386381 - RNA, 19 nt, Artificial Sequence
  Description of Artificial Sequence: Synthetic oligonucleotide
uacuuuguaggagccggga

SEQ ID NO: 1386382 - RNA, 19 nt, Artificial Sequence
  Description of Artificial Sequence: Synthetic oligonucleotide
cucccaggaguuucuguag

SEQ ID NO: 1386383 - RNA, 19 nt, Artificial Sequence
  Description of Artificial Sequence: Synthetic oligonucleotide
ggcucgugcagccuggaag

SEQ ID NO: 1386384 - RNA, 19 nt, Artificial Sequence
  Description of Artificial Sequence: Synthetic oligonucleotide
acacggaggaaaugccuca

SEQ ID NO: 1386385 - RNA, 19 nt, Artificial Sequence
  Description of Artificial Sequence: Synthetic oligonucleotide
cagagucuucuuccuauug

SEQ ID NO: 1386386 - RNA, 19 nt, Artificial Sequence
  Description of Artificial Sequence: Synthetic oligonucleotide
gccaacacggaggaaaugc

SEQ ID NO: 1386387 - RNA, 19 nt, Artificial Sequence
  Description of Artificial Sequence: Synthetic oligonucleotide
gacaccuuggcagucugga

SEQ ID NO: 1386388 - RNA, 19 nt, Artificial Sequence
  Description of Artificial Sequence: Synthetic oligonucleotide
uguagcggugucucgcguc

SEQ ID NO: 1386389 - RNA, 19 nt, Artificial Sequence
  Description of Artificial Sequence: Synthetic oligonucleotide
agguucaagucagauuugu

SEQ ID NO: 1386390 - RNA, 19 nt, Artificial Sequence
  Description of Artificial Sequence: Synthetic oligonucleotide
uggacaccuuggcagucug

SEQ ID NO: 1386391 - RNA, 19 nt, Artificial Sequence
  Description of Artificial Sequence: Synthetic oligonucleotide
uaucacucaggugcaucgc

SEQ ID NO: 1386392 - RNA, 19 nt, Artificial Sequence
  Description of Artificial Sequence: Synthetic oligonucleotide
gucgugccuguagagaaag

SEQ ID NO: 1386393 - RNA, 19 nt, Artificial Sequence
  Description of Artificial Sequence: Synthetic oligonucleotide
gaaauccggguggucuggg

SEQ ID NO: 1386394 - RNA, 19 nt, Artificial Sequence
  Description of Artificial Sequence: Synthetic oligonucleotide
auugaugcugcgguaccca

SEQ ID NO: 1386395 - RNA, 19 nt, Artificial Sequence
  Description of Artificial Sequence: Synthetic oligonucleotide
cauugaugcugcgguaccc

SEQ ID NO: 1386396 - RNA, 19 nt, Artificial Sequence
  Description of Artificial Sequence: Synthetic oligonucleotide
ucuuggcgugaacaagguc

SEQ ID NO: 1386397 - RNA, 19 nt, Artificial Sequence
  Description of Artificial Sequence: Synthetic oligonucleotide
cuugagcacgaagauuaug

SEQ ID NO: 1386398 - RNA, 19 nt, Artificial Sequence
  Description of Artificial Sequence: Synthetic oligonucleotide
uguccccggaggcucgugc

SEQ ID NO: 1386399 - RNA, 19 nt, Artificial Sequence
  Description of Artificial Sequence: Synthetic oligonucleotide
gaggaaaugccucauccuu

SEQ ID NO: 1386400 - RNA, 19 nt, Artificial Sequence
  Description of Artificial Sequence: Synthetic oligonucleotide
uucugggucgcuggugugc

SEQ ID NO: 1386401 - RNA, 19 nt, Artificial Sequence
  Description of Artificial Sequence: Synthetic oligonucleotide
ucgucaucuugcagccuug

SEQ ID NO: 1386402 - RNA, 19 nt, Artificial Sequence
  Description of Artificial Sequence: Synthetic oligonucleotide
cuauguccccggaggcucg

SEQ ID NO: 1386403 - RNA, 19 nt, Artificial Sequence
  Description of Artificial Sequence: Synthetic oligonucleotide
aggcgcucauuacagugca

SEQ ID NO: 1386404 - RNA, 19 nt, Artificial Sequence
  Description of Artificial Sequence: Synthetic oligonucleotide
acacugcggaccccaauga

SEQ ID NO: 1386405 - RNA, 19 nt, Artificial Sequence
  Description of Artificial Sequence: Synthetic oligonucleotide
guagucgugggucaucacu

SEQ ID NO: 1386406 - RNA, 19 nt, Artificial Sequence
  Description of Artificial Sequence: Synthetic oligonucleotide
guguccgguagucaugguc

SEQ ID NO: 1386407 - RNA, 19 nt, Artificial Sequence
  Description of Artificial Sequence: Synthetic oligonucleotide
caggaacgccucuuuguac

SEQ ID NO: 1386408 - RNA, 19 nt, Artificial Sequence
  Description of Artificial Sequence: Synthetic oligonucleotide
ggugcaucgcauuaagucu

SEQ ID NO: 1386409 - RNA, 19 nt, Artificial Sequence
  Description of Artificial Sequence: Synthetic oligonucleotide
cucgcucagguugucugcg

SEQ ID NO: 1386410 - RNA, 19 nt, Artificial Sequence
  Description of Artificial Sequence: Synthetic oligonucleotide
guguguagcggugucucgc

SEQ ID NO: 1386411 - RNA, 19 nt, Artificial Sequence
  Description of Artificial Sequence: Synthetic oligonucleotide
auccaugggcagguggcac

SEQ ID NO: 1386412 - RNA, 19 nt, Artificial Sequence
  Description of Artificial Sequence: Synthetic oligonucleotide
ggagccugccaacacggag

SEQ ID NO: 1386413 - RNA, 19 nt, Artificial Sequence
  Description of Artificial Sequence: Synthetic oligonucleotide
ggaacgccucuuuguaccg

SEQ ID NO: 1386414 - RNA, 19 nt, Artificial Sequence
  Description of Artificial Sequence: Synthetic oligonucleotide
ugggagcaacccuuggcaa

SEQ ID NO: 1386415 - RNA, 19 nt, Artificial Sequence
  Description of Artificial Sequence: Synthetic oligonucleotide
ucaugguacuguguccggu

SEQ ID NO: 1386416 - RNA, 19 nt, Artificial Sequence
  Description of Artificial Sequence: Synthetic oligonucleotide
gaacgccucuuuguaccgg

SEQ ID NO: 1386417 - RNA, 19 nt, Artificial Sequence
  Description of Artificial Sequence: Synthetic oligonucleotide
uacgguacuuggucucacu

SEQ ID NO: 1386418 - RNA, 19 nt, Artificial Sequence
  Description of Artificial Sequence: Synthetic oligonucleotide
ugaugcugcgguacccaau

SEQ ID NO: 1386419 - RNA, 19 nt, Artificial Sequence
  Description of Artificial Sequence: Synthetic oligonucleotide
ugacaucacucugcaguug

SEQ ID NO: 1386420 - RNA, 19 nt, Artificial Sequence
  Description of Artificial Sequence: Synthetic oligonucleotide
aggggagagcaucuaucgu

SEQ ID NO: 1386421 - RNA, 19 nt, Artificial Sequence
  Description of Artificial Sequence: Synthetic oligonucleotide
acugcggaccccaaugagu

SEQ ID NO: 1386422 - RNA, 19 nt, Artificial Sequence
  Description of Artificial Sequence: Synthetic oligonucleotide
agggucgguguguagcggu

SEQ ID NO: 1386423 - RNA, 19 nt, Artificial Sequence
  Description of Artificial Sequence: Synthetic oligonucleotide
accuaugcauggagucugc

SEQ ID NO: 1386424 - RNA, 19 nt, Artificial Sequence
  Description of Artificial Sequence: Synthetic oligonucleotide
aacucacucuguagggcga

SEQ ID NO: 1386425 - RNA, 19 nt, Artificial Sequence
  Description of Artificial Sequence: Synthetic oligonucleotide
uccuugggucaucauugau

SEQ ID NO: 1386426 - RNA, 19 nt, Artificial Sequence
  Description of Artificial Sequence: Synthetic oligonucleotide
ccaacacggaggaaaugcc

SEQ ID NO: 1386427 - RNA, 19 nt, Artificial Sequence
  Description of Artificial Sequence: Synthetic oligonucleotide
ggagcaacccuuggcaaag

SEQ ID NO: 1386428 - RNA, 19 nt, Artificial Sequence
  Description of Artificial Sequence: Synthetic oligonucleotide
caucuaucgucaucuugca

SEQ ID NO: 1386429 - RNA, 19 nt, Artificial Sequence
  Description of Artificial Sequence: Synthetic oligonucleotide
cuugauacugucugguuuu

SEQ ID NO: 1386430 - RNA, 19 nt, Artificial Sequence
  Description of Artificial Sequence: Synthetic oligonucleotide
uugaugcugcgguacccaa

SEQ ID NO: 1386431 - RNA, 19 nt, Artificial Sequence
  Description of Artificial Sequence: Synthetic oligonucleotide
uacaggcgcucauuacagu

SEQ ID NO: 1386432 - RNA, 19 nt, Artificial Sequence
  Description of Artificial Sequence: Synthetic oligonucleotide
guaacuguucuuggcguga

SEQ ID NO: 1386433 - RNA, 19 nt, Artificial Sequence
  Description of Artificial Sequence: Synthetic oligonucleotide
gaccuguagugaaacucac

SEQ ID NO: 1386434 - RNA, 19 nt, Artificial Sequence
  Description of Artificial Sequence: Synthetic oligonucleotide
ucgcguccucgccagcugc

SEQ ID NO: 1386435 - RNA, 19 nt, Artificial Sequence
  Description of Artificial Sequence: Synthetic oligonucleotide
ugcauggagucugcauccc

SEQ ID NO: 1386436 - RNA, 19 nt, Artificial Sequence
  Description of Artificial Sequence: Synthetic oligonucleotide
cacugcggaccccaaugag

SEQ ID NO: 1386437 - RNA, 19 nt, Artificial Sequence
  Description of Artificial Sequence: Synthetic oligonucleotide
uuagauccucaggcagugc

SEQ ID NO: 1386438 - RNA, 19 nt, Artificial Sequence
  Description of Artificial Sequence: Synthetic oligonucleotide
agaaucuccgaggcaucug

SEQ ID NO: 1386439 - RNA, 19 nt, Artificial Sequence
  Description of Artificial Sequence: Synthetic oligonucleotide
ucaugcccaucaagucuga

SEQ ID NO: 1386440 - RNA, 19 nt, Artificial Sequence
  Description of Artificial Sequence: Synthetic oligonucleotide
agcggugucucgcguccuc

SEQ ID NO: 1386441 - RNA, 19 nt, Artificial Sequence
  Description of Artificial Sequence: Synthetic oligonucleotide
gguguguagcggugucucg

SEQ ID NO: 1386442 - RNA, 19 nt, Artificial Sequence
  Description of Artificial Sequence: Synthetic oligonucleotide
ucgcucggaugaacucagg

SEQ ID NO: 1386443 - RNA, 19 nt, Artificial Sequence
  Description of Artificial Sequence: Synthetic oligonucleotide
uggggagaucucagagcca

SEQ ID NO: 1386444 - RNA, 19 nt, Artificial Sequence
  Description of Artificial Sequence: Synthetic oligonucleotide
aagucuugcucuggcgaaa

SEQ ID NO: 1386445 - RNA, 19 nt, Artificial Sequence
  Description of Artificial Sequence: Synthetic oligonucleotide
accggaaaucacuggcgau

SEQ ID NO: 1386446 - RNA, 19 nt, Artificial Sequence
  Description of Artificial Sequence: Synthetic oligonucleotide
ugccuguaguguacaucac

SEQ ID NO: 1386447 - RNA, 19 nt, Artificial Sequence
  Description of Artificial Sequence: Synthetic oligonucleotide
agcccgccgagccauuucu

SEQ ID NO: 1386448 - RNA, 19 nt, Artificial Sequence
  Description of Artificial Sequence: Synthetic oligonucleotide
uggcccauccgcuggcagu

SEQ ID NO: 1386449 - RNA, 19 nt, Artificial Sequence
  Description of Artificial Sequence: Synthetic oligonucleotide
ggugcaccauauccauggg

SEQ ID NO: 1386450 - RNA, 19 nt, Artificial Sequence
  Description of Artificial Sequence: Synthetic oligonucleotide
uccgaggcaucuggguuca

SEQ ID NO: 1386451 - RNA, 19 nt, Artificial Sequence
  Description of Artificial Sequence: Synthetic oligonucleotide
ccaagggucgguguguagc

SEQ ID NO: 1386452 - RNA, 19 nt, Artificial Sequence
  Description of Artificial Sequence: Synthetic oligonucleotide
uggguucaccucccggcuc

SEQ ID NO: 1386453 - RNA, 19 nt, Artificial Sequence
  Description of Artificial Sequence: Synthetic oligonucleotide
uuacgguacuuggucucac

SEQ ID NO: 1386454 - RNA, 19 nt, Artificial Sequence
  Description of Artificial Sequence: Synthetic oligonucleotide
ucucgcguccucgccagcu

SEQ ID NO: 1386455 - RNA, 19 nt, Artificial Sequence
  Description of Artificial Sequence: Synthetic oligonucleotide
gcauuaagucuugcucugg

SEQ ID NO: 1386456 - RNA, 19 nt, Artificial Sequence
  Description of Artificial Sequence: Synthetic oligonucleotide
agaccaagggucggugugu

SEQ ID NO: 1386457 - RNA, 19 nt, Artificial Sequence
  Description of Artificial Sequence: Synthetic oligonucleotide
auucucaaucuggggagau

SEQ ID NO: 1386458 - RNA, 19 nt, Artificial Sequence
  Description of Artificial Sequence: Synthetic oligonucleotide
gguacccaaucuguaggcc

SEQ ID NO: 1386459 - RNA, 19 nt, Artificial Sequence
  Description of Artificial Sequence: Synthetic oligonucleotide
caucuggguucaccucccg

SEQ ID NO: 1386460 - RNA, 19 nt, Artificial Sequence
  Description of Artificial Sequence: Synthetic oligonucleotide
uggagccugccaacacgga

SEQ ID NO: 1386461 - RNA, 19 nt, Artificial Sequence
  Description of Artificial Sequence: Synthetic oligonucleotide
gucgugggucaucacucac

SEQ ID NO: 1386462 - RNA, 19 nt, Artificial Sequence
  Description of Artificial Sequence: Synthetic oligonucleotide
caugguacuguguccggua

SEQ ID NO: 1386463 - RNA, 19 nt, Artificial Sequence
  Description of Artificial Sequence: Synthetic oligonucleotide
ucgugccuguagagaaagu

SEQ ID NO: 1386464 - RNA, 19 nt, Artificial Sequence
  Description of Artificial Sequence: Synthetic oligonucleotide
gcgcucauuacagugcaug

SEQ ID NO: 1386465 - RNA, 19 nt, Artificial Sequence
  Description of Artificial Sequence: Synthetic oligonucleotide
uugucgcucuggagccugc

SEQ ID NO: 1386466 - RNA, 19 nt, Artificial Sequence
  Description of Artificial Sequence: Synthetic oligonucleotide
ugccaacacggaggaaaug

SEQ ID NO: 1386467 - RNA, 19 nt, Artificial Sequence
  Description of Artificial Sequence: Synthetic oligonucleotide
ucgguguguagcggugucu

SEQ ID NO: 1386468 - RNA, 19 nt, Artificial Sequence
  Description of Artificial Sequence: Synthetic oligonucleotide
caucgcauuaagucuugcu

SEQ ID NO: 1386469 - RNA, 19 nt, Artificial Sequence
  Description of Artificial Sequence: Synthetic oligonucleotide
accuguagugaaacucacu

SEQ ID NO: 1386470 - RNA, 19 nt, Artificial Sequence
  Description of Artificial Sequence: Synthetic oligonucleotide
gcgaaauccggguggucug

SEQ ID NO: 1386471 - RNA, 19 nt, Artificial Sequence
  Description of Artificial Sequence: Synthetic oligonucleotide
gauuaugccaagacuccuu

SEQ ID NO: 1386472 - RNA, 19 nt, Artificial Sequence
  Description of Artificial Sequence: Synthetic oligonucleotide
gugucucgcguccucgcca

SEQ ID NO: 1386473 - RNA, 19 nt, Artificial Sequence
  Description of Artificial Sequence: Synthetic oligonucleotide
guucugggucgcuggugug

SEQ ID NO: 1386474 - RNA, 19 nt, Artificial Sequence
  Description of Artificial Sequence: Synthetic oligonucleotide
ugucugcguuggcuuucgc

SEQ ID NO: 1386475 - RNA, 19 nt, Artificial Sequence
  Description of Artificial Sequence: Synthetic oligonucleotide
caacacggaggaaaugccu

SEQ ID NO: 1386476 - RNA, 19 nt, Artificial Sequence
  Description of Artificial Sequence: Synthetic oligonucleotide
uaccaccguggugaacuug

SEQ ID NO: 1386477 - RNA, 19 nt, Artificial Sequence
  Description of Artificial Sequence: Synthetic oligonucleotide
ggugucucgcguccucgcc

SEQ ID NO: 1386478 - RNA, 19 nt, Artificial Sequence
  Description of Artificial Sequence: Synthetic oligonucleotide
agucuugcucuggcgaaau

SEQ ID NO: 1386479 - RNA, 19 nt, Artificial Sequence
  Description of Artificial Sequence: Synthetic oligonucleotide
cguggugaacuugauacug

SEQ ID NO: 1386480 - RNA, 19 nt, Artificial Sequence
  Description of Artificial Sequence: Synthetic oligonucleotide
caguucugcagcccgccga

SEQ ID NO: 1386481 - RNA, 19 nt, Artificial Sequence
  Description of Artificial Sequence: Synthetic oligonucleotide
gcacgaagauuaugccaag

SEQ ID NO: 1386482 - RNA, 19 nt, Artificial Sequence
  Description of Artificial Sequence: Synthetic oligonucleotide
guccgguagucauggucac

SEQ ID NO: 1386483 - RNA, 19 nt, Artificial Sequence
  Description of Artificial Sequence: Synthetic oligonucleotide
augcugcgguacccaaucu

SEQ ID NO: 1386484 - RNA, 19 nt, Artificial Sequence
  Description of Artificial Sequence: Synthetic oligonucleotide
gcauggagucugcaucccc

SEQ ID NO: 1386485 - RNA, 19 nt, Artificial Sequence
  Description of Artificial Sequence: Synthetic oligonucleotide
gucagguucaagucagauu

SEQ ID NO: 1386486 - RNA, 19 nt, Artificial Sequence
  Description of Artificial Sequence: Synthetic oligonucleotide
guaccuaugcauggagucu

SEQ ID NO: 1386487 - RNA, 19 nt, Artificial Sequence
  Description of Artificial Sequence: Synthetic oligonucleotide
aggccccuccuguuggcca

SEQ ID NO: 1386488 - RNA, 19 nt, Artificial Sequence
  Description of Artificial Sequence: Synthetic oligonucleotide
cacgaagauuaugccaaga

SEQ ID NO: 1386489 - RNA, 19 nt, Artificial Sequence
  Description of Artificial Sequence: Synthetic oligonucleotide
gucgguguguagcgguguc

SEQ ID NO: 1386490 - RNA, 19 nt, Artificial Sequence
  Description of Artificial Sequence: Synthetic oligonucleotide
ucgcucagguugucugcgu

SEQ ID NO: 1386491 - RNA, 19 nt, Artificial Sequence
  Description of Artificial Sequence: Synthetic oligonucleotide
gucugcguuggcuuucgcu

SEQ ID NO: 1386492 - RNA, 19 nt, Artificial Sequence
  Description of Artificial Sequence: Synthetic oligonucleotide
cauucucaaucuggggaga

SEQ ID NO: 1386493 - RNA, 19 nt, Artificial Sequence
  Description of Artificial Sequence: Synthetic oligonucleotide
cucgccagcugcuuuuaua

SEQ ID NO: 1386494 - RNA, 19 nt, Artificial Sequence
  Description of Artificial Sequence: Synthetic oligonucleotide
cgcauuaagucuugcucug

SEQ ID NO: 1386495 - RNA, 19 nt, Artificial Sequence
  Description of Artificial Sequence: Synthetic oligonucleotide
uccgguagucauggucacu

SEQ ID NO: 1386496 - RNA, 19 nt, Artificial Sequence
  Description of Artificial Sequence: Synthetic oligonucleotide
gcucccaggaguuucugua

SEQ ID NO: 1386497 - RNA, 19 nt, Artificial Sequence
  Description of Artificial Sequence: Synthetic oligonucleotide
caccuuggcagucuggaau

SEQ ID NO: 1386498 - RNA, 19 nt, Artificial Sequence
  Description of Artificial Sequence: Synthetic oligonucleotide
agucuaccaccguggugaa

SEQ ID NO: 1386499 - RNA, 19 nt, Artificial Sequence
  Description of Artificial Sequence: Synthetic oligonucleotide
gugccguagucguggguca

SEQ ID NO: 1386500 - RNA, 19 nt, Artificial Sequence
  Description of Artificial Sequence: Synthetic oligonucleotide
guaggagccgggagggguc

SEQ ID NO: 1386501 - RNA, 19 nt, Artificial Sequence
  Description of Artificial Sequence: Synthetic oligonucleotide
cccaaugaguuguccccgc

SEQ ID NO: 1386502 - RNA, 19 nt, Artificial Sequence
  Description of Artificial Sequence: Synthetic oligonucleotide
cucgcguccucgccagcug

SEQ ID NO: 1386503 - RNA, 19 nt, Artificial Sequence
  Description of Artificial Sequence: Synthetic oligonucleotide
ggcgugaacaaggucugga

SEQ ID NO: 1386504 - RNA, 19 nt, Artificial Sequence
  Description of Artificial Sequence: Synthetic oligonucleotide
ggcauggaccaggugcacc

SEQ ID NO: 1386505 - RNA, 19 nt, Artificial Sequence
  Description of Artificial Sequence: Synthetic oligonucleotide
ccggcucugaugaucucug

SEQ ID NO: 1386506 - RNA, 19 nt, Artificial Sequence
  Description of Artificial Sequence: Synthetic oligonucleotide
cgugccuguagagaaaguc

SEQ ID NO: 1386507 - RNA, 19 nt, Artificial Sequence
  Description of Artificial Sequence: Synthetic oligonucleotide
gggagcaacccuuggcaaa

SEQ ID NO: 1386508 - RNA, 19 nt, Artificial Sequence
  Description of Artificial Sequence: Synthetic oligonucleotide
ccucgcucagguugucugc

SEQ ID NO: 1386509 - RNA, 19 nt, Artificial Sequence
  Description of Artificial Sequence: Synthetic oligonucleotide
cugcggaccccaaugaguu

SEQ ID NO: 1386510 - RNA, 19 nt, Artificial Sequence
  Description of Artificial Sequence: Synthetic oligonucleotide
cucaggugcaucgcauuaa

SEQ ID NO: 1386511 - RNA, 19 nt, Artificial Sequence
  Description of Artificial Sequence: Synthetic oligonucleotide
ggaggcucgugcagccugg

SEQ ID NO: 1386512 - RNA, 19 nt, Artificial Sequence
  Description of Artificial Sequence: Synthetic oligonucleotide
gucuugcucuggcgaaauc

SEQ ID NO: 1386513 - RNA, 19 nt, Artificial Sequence
  Description of Artificial Sequence: Synthetic oligonucleotide
gcagugaacucaugguacu

SEQ ID NO: 1386514 - RNA, 19 nt, Artificial Sequence
  Description of Artificial Sequence: Synthetic oligonucleotide
ccccaaugaguuguccccg

SEQ ID NO: 1386515 - RNA, 19 nt, Artificial Sequence
  Description of Artificial Sequence: Synthetic oligonucleotide
gcucacaucagcagagucu

SEQ ID NO: 1386516 - RNA, 19 nt, Artificial Sequence
  Description of Artificial Sequence: Synthetic oligonucleotide
uauguccccggaggcucgu

SEQ ID NO: 1386517 - RNA, 19 nt, Artificial Sequence
  Description of Artificial Sequence: Synthetic oligonucleotide
cucacucuguagggcgaug

SEQ ID NO: 1386518 - RNA, 19 nt, Artificial Sequence
  Description of Artificial Sequence: Synthetic oligonucleotide
augaacucagggagaccaa

SEQ ID NO: 1386519 - RNA, 19 nt, Artificial Sequence
  Description of Artificial Sequence: Synthetic oligonucleotide
guguaccuaugcauggagu

SEQ ID NO: 1386520 - RNA, 19 nt, Artificial Sequence
  Description of Artificial Sequence: Synthetic oligonucleotide
ggcgaaauccggguggucu

SEQ ID NO: 1386521 - RNA, 19 nt, Artificial Sequence
  Description of Artificial Sequence: Synthetic oligonucleotide
agucgugccuguagagaaa

SEQ ID NO: 1386522 - RNA, 19 nt, Artificial Sequence
  Description of Artificial Sequence: Synthetic oligonucleotide
gccuguaguguacaucacu

SEQ ID NO: 1386523 - RNA, 19 nt, Artificial Sequence
  Description of Artificial Sequence: Synthetic oligonucleotide
ggacaccuuggcagucugg

SEQ ID NO: 1386524 - RNA, 19 nt, Artificial Sequence
  Description of Artificial Sequence: Synthetic oligonucleotide
uggcauggaccaggugcac

SEQ ID NO: 1386525 - RNA, 19 nt, Artificial Sequence
  Description of Artificial Sequence: Synthetic oligonucleotide
ggaaaucacuggcgauauc

SEQ ID NO: 1386526 - RNA, 19 nt, Artificial Sequence
  Description of Artificial Sequence: Synthetic oligonucleotide
ggccccuccuguuggccag

SEQ ID NO: 1386527 - RNA, 19 nt, Artificial Sequence
  Description of Artificial Sequence: Synthetic oligonucleotide
ccaguucugcagcccgccg

SEQ ID NO: 1386528 - RNA, 19 nt, Artificial Sequence
  Description of Artificial Sequence: Synthetic oligonucleotide
guuggucagugcggcugug

SEQ ID NO: 1386529 - RNA, 19 nt, Artificial Sequence
  Description of Artificial Sequence: Synthetic oligonucleotide
ugugcccuucaugcccauc

SEQ ID NO: 1386530 - RNA, 19 nt, Artificial Sequence
  Description of Artificial Sequence: Synthetic oligonucleotide
uggcuuucgcucggaugaa

SEQ ID NO: 1386531 - RNA, 19 nt, Artificial Sequence
  Description of Artificial Sequence: Synthetic oligonucleotide
ccuccuguuggccaguucu

SEQ ID NO: 1386532 - RNA, 19 nt, Artificial Sequence
  Description of Artificial Sequence: Synthetic oligonucleotide
gugcaucgcauuaagucuu

SEQ ID NO: 1386533 - RNA, 19 nt, Artificial Sequence
  Description of Artificial Sequence: Synthetic oligonucleotide
ggaccccaaugaguugucc

SEQ ID NO: 1386534 - RNA, 19 nt, Artificial Sequence
  Description of Artificial Sequence: Synthetic oligonucleotide
cugcgguacccaaucugua

SEQ ID NO: 1386535 - RNA, 19 nt, Artificial Sequence
  Description of Artificial Sequence: Synthetic oligonucleotide
cugccaacacggaggaaau

SEQ ID NO: 1386536 - RNA, 19 nt, Artificial Sequence
  Description of Artificial Sequence: Synthetic oligonucleotide
ggucgcuggugugcugggg

SEQ ID NO: 1386537 - RNA, 19 nt, Artificial Sequence
  Description of Artificial Sequence: Synthetic oligonucleotide
caggugcaucgcauuaagu

SEQ ID NO: 1386538 - RNA, 19 nt, Artificial Sequence
  Description of Artificial Sequence: Synthetic oligonucleotide
ugccguagucgugggucau

SEQ ID NO: 1386539 - RNA, 19 nt, Artificial Sequence
  Description of Artificial Sequence: Synthetic oligonucleotide
gcaucgcauuaagucuugc

SEQ ID NO: 1386540 - RNA, 19 nt, Artificial Sequence
  Description of Artificial Sequence: Synthetic oligonucleotide
cacucacacugcggacccc

SEQ ID NO: 1386541 - RNA, 19 nt, Artificial Sequence
  Description of Artificial Sequence: Synthetic oligonucleotide
cccggaggcucgugcagcc

SEQ ID NO: 1386542 - RNA, 19 nt, Artificial Sequence
  Description of Artificial Sequence: Synthetic oligonucleotide
uccucgccagcugcuuuua

SEQ ID NO: 1386543 - RNA, 19 nt, Artificial Sequence
  Description of Artificial Sequence: Synthetic oligonucleotide
gcgauaucccuggacaccu

SEQ ID NO: 1386544 - RNA, 19 nt, Artificial Sequence
  Description of Artificial Sequence: Synthetic oligonucleotide
uagcggugucucgcguccu

SEQ ID NO: 1386545 - RNA, 19 nt, Artificial Sequence
  Description of Artificial Sequence: Synthetic oligonucleotide
uggcgaaauccgggugguc

SEQ ID NO: 1386546 - RNA, 19 nt, Artificial Sequence
  Description of Artificial Sequence: Synthetic oligonucleotide
cagcccgccgagccauuuc

SEQ ID NO: 1386547 - RNA, 19 nt, Artificial Sequence
  Description of Artificial Sequence: Synthetic oligonucleotide
gcucuggcgaaauccgggu

SEQ ID NO: 1386548 - RNA, 19 nt, Artificial Sequence
  Description of Artificial Sequence: Synthetic oligonucleotide
gaccuguacaggcgcucau

SEQ ID NO: 1386549 - RNA, 19 nt, Artificial Sequence
  Description of Artificial Sequence: Synthetic oligonucleotide
gggucgguguguagcggug

SEQ ID NO: 1386550 - RNA, 19 nt, Artificial Sequence
  Description of Artificial Sequence: Synthetic oligonucleotide
gucuaccaccguggugaac

SEQ ID NO: 1386551 - RNA, 19 nt, Artificial Sequence
  Description of Artificial Sequence: Synthetic oligonucleotide
gucucgcguccucgccagc

SEQ ID NO: 1386552 - RNA, 19 nt, Artificial Sequence
  Description of Artificial Sequence: Synthetic oligonucleotide
gggagaucucagagccagc

SEQ ID NO: 1386553 - RNA, 19 nt, Artificial Sequence
  Description of Artificial Sequence: Synthetic oligonucleotide
ccggaaaucacuggcgaua

SEQ ID NO: 1386554 - RNA, 19 nt, Artificial Sequence
  Description of Artificial Sequence: Synthetic oligonucleotide
guccccgcuccuucacaaa

SEQ ID NO: 1386555 - RNA, 19 nt, Artificial Sequence
  Description of Artificial Sequence: Synthetic oligonucleotide
guguagcggugucucgcgu

SEQ ID NO: 1386556 - RNA, 19 nt, Artificial Sequence
  Description of Artificial Sequence: Synthetic oligonucleotide
cacuggcuauguccccgga

SEQ ID NO: 1386557 - RNA, 19 nt, Artificial Sequence
  Description of Artificial Sequence: Synthetic oligonucleotide
gugggucaucacucacacu

SEQ ID NO: 1386558 - RNA, 19 nt, Artificial Sequence
  Description of Artificial Sequence: Synthetic oligonucleotide
auguccccggaggcucgug

SEQ ID NO: 1386559 - RNA, 19 nt, Artificial Sequence
  Description of Artificial Sequence: Synthetic oligonucleotide
guccucgccagcugcuuuu

SEQ ID NO: 1386560 - RNA, 19 nt, Artificial Sequence
  Description of Artificial Sequence: Synthetic oligonucleotide
gcaccucgagucagguuca

SEQ ID NO: 1386561 - RNA, 19 nt, Artificial Sequence
  Description of Artificial Sequence: Synthetic oligonucleotide
ccguagucgugggucauca

SEQ ID NO: 1386562 - RNA, 19 nt, Artificial Sequence
  Description of Artificial Sequence: Synthetic oligonucleotide
acgccucuuuguaccggaa

SEQ ID NO: 1386563 - RNA, 19 nt, Artificial Sequence
  Description of Artificial Sequence: Synthetic oligonucleotide
gagcaacccuuggcaaagu

SEQ ID NO: 1386564 - RNA, 19 nt, Artificial Sequence
  Description of Artificial Sequence: Synthetic oligonucleotide
cguagucgugggucaucac

SEQ ID NO: 1386565 - RNA, 19 nt, Artificial Sequence
  Description of Artificial Sequence: Synthetic oligonucleotide
ggcuauguccccggaggcu

SEQ ID NO: 1386566 - RNA, 19 nt, Artificial Sequence
  Description of Artificial Sequence: Synthetic oligonucleotide
aggagccgggaggggucca

SEQ ID NO: 1386567 - RNA, 19 nt, Artificial Sequence
  Description of Artificial Sequence: Synthetic oligonucleotide
gccuguagagaaagucacu

SEQ ID NO: 1386568 - RNA, 19 nt, Artificial Sequence
  Description of Artificial Sequence: Synthetic oligonucleotide
cgcucauuacagugcaugu

SEQ ID NO: 1386569 - RNA, 19 nt, Artificial Sequence
  Description of Artificial Sequence: Synthetic oligonucleotide
cauugucgcucuggagccu

SEQ ID NO: 1386570 - RNA, 19 nt, Artificial Sequence
  Description of Artificial Sequence: Synthetic oligonucleotide
cccggucccucaggaacgc

SEQ ID NO: 1386571 - RNA, 19 nt, Artificial Sequence
  Description of Artificial Sequence: Synthetic oligonucleotide
ggaaaccagguuggucagu

SEQ ID NO: 1386572 - RNA, 19 nt, Artificial Sequence
  Description of Artificial Sequence: Synthetic oligonucleotide
ccguggugaacuugauacu

SEQ ID NO: 1386573 - RNA, 19 nt, Artificial Sequence
  Description of Artificial Sequence: Synthetic oligonucleotide
cuaccaccguggugaacuu

SEQ ID NO: 1386574 - RNA, 19 nt, Artificial Sequence
  Description of Artificial Sequence: Synthetic oligonucleotide
ggucgguguguagcggugu

SEQ ID NO: 1386575 - RNA, 19 nt, Artificial Sequence
  Description of Artificial Sequence: Synthetic oligonucleotide
cggaccccaaugaguuguc

SEQ ID NO: 1386576 - RNA, 19 nt, Artificial Sequence
  Description of Artificial Sequence: Synthetic oligonucleotide
ccaaucuguaggccccggu

SEQ ID NO: 1386577 - RNA, 19 nt, Artificial Sequence
  Description of Artificial Sequence: Synthetic oligonucleotide
cagugccguagucgugggu

SEQ ID NO: 1386578 - RNA, 19 nt, Artificial Sequence
  Description of Artificial Sequence: Synthetic oligonucleotide
cgccagcugcuuuuauaga

SEQ ID NO: 1386579 - RNA, 19 nt, Artificial Sequence
  Description of Artificial Sequence: Synthetic oligonucleotide
cccuccuguuggccaguuc

SEQ ID NO: 1386580 - RNA, 19 nt, Artificial Sequence
  Description of Artificial Sequence: Synthetic oligonucleotide
caccucgagucagguucaa

SEQ ID NO: 1386581 - RNA, 19 nt, Artificial Sequence
  Description of Artificial Sequence: Synthetic oligonucleotide
cagcaccucgagucagguu

SEQ ID NO: 1386582 - RNA, 19 nt, Artificial Sequence
  Description of Artificial Sequence: Synthetic oligonucleotide
gcccauccgcuggcagugc

SEQ ID NO: 1386583 - RNA, 19 nt, Artificial Sequence
  Description of Artificial Sequence: Synthetic oligonucleotide
cgaccuguacaggcgcuca

SEQ ID NO: 1386584 - RNA, 19 nt, Artificial Sequence
  Description of Artificial Sequence: Synthetic oligonucleotide
cagcccgguucugcuccca

SEQ ID NO: 1386585 - RNA, 19 nt, Artificial Sequence
  Description of Artificial Sequence: Synthetic oligonucleotide
cggaaaucacuggcgauau

SEQ ID NO: 1386586 - RNA, 19 nt, Artificial Sequence
  Description of Artificial Sequence: Synthetic oligonucleotide
gcguuggcuuucgcucgga

SEQ ID NO: 1386587 - RNA, 19 nt, Artificial Sequence
  Description of Artificial Sequence: Synthetic oligonucleotide
ccagcaccucgagucaggu

SEQ ID NO: 1386588 - RNA, 19 nt, Artificial Sequence
  Description of Artificial Sequence: Synthetic oligonucleotide
cccgaccuguacaggcgcu

SEQ ID NO: 1386589 - RNA, 19 nt, Artificial Sequence
  Description of Artificial Sequence: Synthetic oligonucleotide
ggcgcucauuacagugcau

SEQ ID NO: 1386590 - RNA, 19 nt, Artificial Sequence
  Description of Artificial Sequence: Synthetic oligonucleotide
ccggguggucugggaucag

SEQ ID NO: 1386591 - RNA, 19 nt, Artificial Sequence
  Description of Artificial Sequence: Synthetic oligonucleotide
ccgcuggcagugccguagu

SEQ ID NO: 1386592 - RNA, 19 nt, Artificial Sequence
  Description of Artificial Sequence: Synthetic oligonucleotide
cguuggcuuucgcucggau

SEQ ID NO: 1386593 - RNA, 19 nt, Artificial Sequence
  Description of Artificial Sequence: Synthetic oligonucleotide
ccucgccagcugcuuuuau

SEQ ID NO: 1386594 - RNA, 19 nt, Artificial Sequence
  Description of Artificial Sequence: Synthetic oligonucleotide
gcguccucgccagcugcuu

SEQ ID NO: 1386595 - RNA, 19 nt, Artificial Sequence
  Description of Artificial Sequence: Synthetic oligonucleotide
cgauaucccuggacaccuu

SEQ ID NO: 1386596 - RNA, 19 nt, Artificial Sequence
  Description of Artificial Sequence: Synthetic oligonucleotide
cguccucgccagcugcuuu

SEQ ID NO: 1386597 - RNA, 19 nt, Artificial Sequence
  Description of Artificial Sequence: Synthetic oligonucleotide
gccccuccuguuggccagu

SEQ ID NO: 1386598 - RNA, 19 nt, Artificial Sequence
  Description of Artificial Sequence: Synthetic oligonucleotide
ccggaggcucgugcagccu

SEQ ID NO: 1386599 - RNA, 19 nt, Artificial Sequence
  Description of Artificial Sequence: Synthetic oligonucleotide
ccccuccuguuggccaguu

SEQ ID NO: 1386600 - RNA, 19 nt, Artificial Sequence
  Description of Artificial Sequence: Synthetic oligonucleotide
ugcuacaacaauaagaagg

SEQ ID NO: 1386601 - RNA, 19 nt, Artificial Sequence
  Description of Artificial Sequence: Synthetic oligonucleotide
uaucuuaucauauuucucg

SEQ ID NO: 1386602 - RNA, 19 nt, Artificial Sequence
  Description of Artificial Sequence: Synthetic oligonucleotide
cuucauaucaaacacaugc

SEQ ID NO: 1386603 - RNA, 19 nt, Artificial Sequence
  Description of Artificial Sequence: Synthetic oligonucleotide
aagacuacgcaucucauuc

SEQ ID NO: 1386604 - RNA, 19 nt, Artificial Sequence
  Description of Artificial Sequence: Synthetic oligonucleotide
agguuuaucaguuuucagc

SEQ ID NO: 1386605 - RNA, 19 nt, Artificial Sequence
  Description of Artificial Sequence: Synthetic oligonucleotide
aaaggaugauccaaaaucc

SEQ ID NO: 1386606 - RNA, 19 nt, Artificial Sequence
  Description of Artificial Sequence: Synthetic oligonucleotide
auaaucagcaacauuaugg

SEQ ID NO: 1386607 - RNA, 19 nt, Artificial Sequence
  Description of Artificial Sequence: Synthetic oligonucleotide
uaucuaacaaaccugccag

SEQ ID NO: 1386608 - RNA, 19 nt, Artificial Sequence
  Description of Artificial Sequence: Synthetic oligonucleotide
guacuuauaauccaugugc

SEQ ID NO: 1386609 - RNA, 19 nt, Artificial Sequence
  Description of Artificial Sequence: Synthetic oligonucleotide
agcgcaaguacuuauaauc

SEQ ID NO: 1386610 - RNA, 19 nt, Artificial Sequence
  Description of Artificial Sequence: Synthetic oligonucleotide
ucuggaagaguucuaauug

SEQ ID NO: 1386611 - RNA, 19 nt, Artificial Sequence
  Description of Artificial Sequence: Synthetic oligonucleotide
aagggcaucauaccauacc

SEQ ID NO: 1386612 - RNA, 19 nt, Artificial Sequence
  Description of Artificial Sequence: Synthetic oligonucleotide
gacucgaugagccaaaagc

SEQ ID NO: 1386613 - RNA, 19 nt, Artificial Sequence
  Description of Artificial Sequence: Synthetic oligonucleotide
aacaacuccgacuccgggc

SEQ ID NO: 1386614 - RNA, 19 nt, Artificial Sequence
  Description of Artificial Sequence: Synthetic oligonucleotide
uaucauauuucucggauga

SEQ ID NO: 1386615 - RNA, 19 nt, Artificial Sequence
  Description of Artificial Sequence: Synthetic oligonucleotide
aauucauuaagucccagua

SEQ ID NO: 1386616 - RNA, 19 nt, Artificial Sequence
  Description of Artificial Sequence: Synthetic oligonucleotide
caaaacagagauuugguug

SEQ ID NO: 1386617 - RNA, 19 nt, Artificial Sequence
  Description of Artificial Sequence: Synthetic oligonucleotide
gaauccuucagccugcaag

SEQ ID NO: 1386618 - RNA, 19 nt, Artificial Sequence
  Description of Artificial Sequence: Synthetic oligonucleotide
uccuccuaaaggaugaucc

SEQ ID NO: 1386619 - RNA, 19 nt, Artificial Sequence
  Description of Artificial Sequence: Synthetic oligonucleotide
uucaaugguguuccgaucc

SEQ ID NO: 1386620 - RNA, 19 nt, Artificial Sequence
  Description of Artificial Sequence: Synthetic oligonucleotide
uguguauucuuuucuuugg

SEQ ID NO: 1386621 - RNA, 19 nt, Artificial Sequence
  Description of Artificial Sequence: Synthetic oligonucleotide
uccaaguuauauaaagggc

SEQ ID NO: 1386622 - RNA, 19 nt, Artificial Sequence
  Description of Artificial Sequence: Synthetic oligonucleotide
ucuuguuuggcacagcuaa

SEQ ID NO: 1386623 - RNA, 19 nt, Artificial Sequence
  Description of Artificial Sequence: Synthetic oligonucleotide
uuuguuucgacucgaugag

SEQ ID NO: 1386624 - RNA, 19 nt, Artificial Sequence
  Description of Artificial Sequence: Synthetic oligonucleotide
acaagccucuguuuuaacc

SEQ ID NO: 1386625 - RNA, 19 nt, Artificial Sequence
  Description of Artificial Sequence: Synthetic oligonucleotide
aagcacaccaacugaagag

SEQ ID NO: 1386626 - RNA, 19 nt, Artificial Sequence
  Description of Artificial Sequence: Synthetic oligonucleotide
ugccuaaucagguuuauca

SEQ ID NO: 1386627 - RNA, 19 nt, Artificial Sequence
  Description of Artificial Sequence: Synthetic oligonucleotide
acuuauaauccaugugccc

SEQ ID NO: 1386628 - RNA, 19 nt, Artificial Sequence
  Description of Artificial Sequence: Synthetic oligonucleotide
uguuuuaaccugaaugaca

SEQ ID NO: 1386629 - RNA, 19 nt, Artificial Sequence
  Description of Artificial Sequence: Synthetic oligonucleotide
uguugauaaacagaggucu

SEQ ID NO: 1386630 - RNA, 19 nt, Artificial Sequence
  Description of Artificial Sequence: Synthetic oligonucleotide
uuuaaccugaaugacaccu

SEQ ID NO: 1386631 - RNA, 19 nt, Artificial Sequence
  Description of Artificial Sequence: Synthetic oligonucleotide
uacuuauaauccaugugcc

SEQ ID NO: 1386632 - RNA, 19 nt, Artificial Sequence
  Description of Artificial Sequence: Synthetic oligonucleotide
acaauaagaaggcuuguug

SEQ ID NO: 1386633 - RNA, 19 nt, Artificial Sequence
  Description of Artificial Sequence: Synthetic oligonucleotide
ucggauuuccaucauuucc

SEQ ID NO: 1386634 - RNA, 19 nt, Artificial Sequence
  Description of Artificial Sequence: Synthetic oligonucleotide
ugaagagaacacuaucucc

SEQ ID NO: 1386635 - RNA, 19 nt, Artificial Sequence
  Description of Artificial Sequence: Synthetic oligonucleotide
uguuucgacucgaugagcc

SEQ ID NO: 1386636 - RNA, 19 nt, Artificial Sequence
  Description of Artificial Sequence: Synthetic oligonucleotide
ugggguaucuaacaaaccu

SEQ ID NO: 1386637 - RNA, 19 nt, Artificial Sequence
  Description of Artificial Sequence: Synthetic oligonucleotide
aacaccaagacuacgcauc

SEQ ID NO: 1386638 - RNA, 19 nt, Artificial Sequence
  Description of Artificial Sequence: Synthetic oligonucleotide
ucgagaacaacuccgacuc

SEQ ID NO: 1386639 - RNA, 19 nt, Artificial Sequence
  Description of Artificial Sequence: Synthetic oligonucleotide
cuucuuagcaguucggggc

SEQ ID NO: 1386640 - RNA, 19 nt, Artificial Sequence
  Description of Artificial Sequence: Synthetic oligonucleotide
uuaagucccaguauuucug

SEQ ID NO: 1386641 - RNA, 19 nt, Artificial Sequence
  Description of Artificial Sequence: Synthetic oligonucleotide
cucuaauuuguuuugccag

SEQ ID NO: 1386642 - RNA, 19 nt, Artificial Sequence
  Description of Artificial Sequence: Synthetic oligonucleotide
uaacaaaccugccagcgca

SEQ ID NO: 1386643 - RNA, 19 nt, Artificial Sequence
  Description of Artificial Sequence: Synthetic oligonucleotide
agaaacaucacguggaguu

SEQ ID NO: 1386644 - RNA, 19 nt, Artificial Sequence
  Description of Artificial Sequence: Synthetic oligonucleotide
aauccuucagccugcaagu

SEQ ID NO: 1386645 - RNA, 19 nt, Artificial Sequence
  Description of Artificial Sequence: Synthetic oligonucleotide
ucuacaaucuccauucuuu

SEQ ID NO: 1386646 - RNA, 19 nt, Artificial Sequence
  Description of Artificial Sequence: Synthetic oligonucleotide
ugaagauccaaaauauaau

SEQ ID NO: 1386647 - RNA, 19 nt, Artificial Sequence
  Description of Artificial Sequence: Synthetic oligonucleotide
aaugguguuccgauccucc

SEQ ID NO: 1386648 - RNA, 19 nt, Artificial Sequence
  Description of Artificial Sequence: Synthetic oligonucleotide
uuuccuucgagcuaccacu

SEQ ID NO: 1386649 - RNA, 19 nt, Artificial Sequence
  Description of Artificial Sequence: Synthetic oligonucleotide
aaggaugauccaaaauccc

SEQ ID NO: 1386650 - RNA, 19 nt, Artificial Sequence
  Description of Artificial Sequence: Synthetic oligonucleotide
gaaccuucuuagcaguucg

SEQ ID NO: 1386651 - RNA, 19 nt, Artificial Sequence
  Description of Artificial Sequence: Synthetic oligonucleotide
acucgaugagccaaaagcc

SEQ ID NO: 1386652 - RNA, 19 nt, Artificial Sequence
  Description of Artificial Sequence: Synthetic oligonucleotide
uccaaguuaacagauggug

SEQ ID NO: 1386653 - RNA, 19 nt, Artificial Sequence
  Description of Artificial Sequence: Synthetic oligonucleotide
aagugcuugggcuucauau

SEQ ID NO: 1386654 - RNA, 19 nt, Artificial Sequence
  Description of Artificial Sequence: Synthetic oligonucleotide
ucauaccauacccagaaau

SEQ ID NO: 1386655 - RNA, 19 nt, Artificial Sequence
  Description of Artificial Sequence: Synthetic oligonucleotide
aguuaacagauggugauuc

SEQ ID NO: 1386656 - RNA, 19 nt, Artificial Sequence
  Description of Artificial Sequence: Synthetic oligonucleotide
uucaucauagucuuggcuu

SEQ ID NO: 1386657 - RNA, 19 nt, Artificial Sequence
  Description of Artificial Sequence: Synthetic oligonucleotide
uuuucuaacucuuccaauu

SEQ ID NO: 1386658 - RNA, 19 nt, Artificial Sequence
  Description of Artificial Sequence: Synthetic oligonucleotide
uaagaaggcuuguugauaa

SEQ ID NO: 1386659 - RNA, 19 nt, Artificial Sequence
  Description of Artificial Sequence: Synthetic oligonucleotide
ugcauuucaaugguguucc

SEQ ID NO: 1386660 - RNA, 19 nt, Artificial Sequence
  Description of Artificial Sequence: Synthetic oligonucleotide
aaacaucacguggaguucg

SEQ ID NO: 1386661 - RNA, 19 nt, Artificial Sequence
  Description of Artificial Sequence: Synthetic oligonucleotide
ugagccaaaagccuaucac

SEQ ID NO: 1386662 - RNA, 19 nt, Artificial Sequence
  Description of Artificial Sequence: Synthetic oligonucleotide
ugcucagacaaauccauca

SEQ ID NO: 1386663 - RNA, 19 nt, Artificial Sequence
  Description of Artificial Sequence: Synthetic oligonucleotide
auuaagucccaguauuucu

SEQ ID NO: 1386664 - RNA, 19 nt, Artificial Sequence
  Description of Artificial Sequence: Synthetic oligonucleotide
gauagcaggaucgauauaa

SEQ ID NO: 1386665 - RNA, 19 nt, Artificial Sequence
  Description of Artificial Sequence: Synthetic oligonucleotide
uuaucauauuucucggaug

SEQ ID NO: 1386666 - RNA, 19 nt, Artificial Sequence
  Description of Artificial Sequence: Synthetic oligonucleotide
ugugcccaacaaaacagag

SEQ ID NO: 1386667 - RNA, 19 nt, Artificial Sequence
  Description of Artificial Sequence: Synthetic oligonucleotide
aaagccuaucacaagccuc

SEQ ID NO: 1386668 - RNA, 19 nt, Artificial Sequence
  Description of Artificial Sequence: Synthetic oligonucleotide
ucggaugaauucauuaagu

SEQ ID NO: 1386669 - RNA, 19 nt, Artificial Sequence
  Description of Artificial Sequence: Synthetic oligonucleotide
acaacaauaagaaggcuug

SEQ ID NO: 1386670 - RNA, 19 nt, Artificial Sequence
  Description of Artificial Sequence: Synthetic oligonucleotide
uuuaagucauuuccauugu

SEQ ID NO: 1386671 - RNA, 19 nt, Artificial Sequence
  Description of Artificial Sequence: Synthetic oligonucleotide
ucaaagcacaccaacugaa

SEQ ID NO: 1386672 - RNA, 19 nt, Artificial Sequence
  Description of Artificial Sequence: Synthetic oligonucleotide
accauacccagaaauaaac

SEQ ID NO: 1386673 - RNA, 19 nt, Artificial Sequence
  Description of Artificial Sequence: Synthetic oligonucleotide
uucccagagagcaagugcu

SEQ ID NO: 1386674 - RNA, 19 nt, Artificial Sequence
  Description of Artificial Sequence: Synthetic oligonucleotide
aucgauauaaucagcaaca

SEQ ID NO: 1386675 - RNA, 19 nt, Artificial Sequence
  Description of Artificial Sequence: Synthetic oligonucleotide
ugaaugacaccuuccucag

SEQ ID NO: 1386676 - RNA, 19 nt, Artificial Sequence
  Description of Artificial Sequence: Synthetic oligonucleotide
uaaacaguaagaguccagu

SEQ ID NO: 1386677 - RNA, 19 nt, Artificial Sequence
  Description of Artificial Sequence: Synthetic oligonucleotide
aucuaacaaaccugccagc

SEQ ID NO: 1386678 - RNA, 19 nt, Artificial Sequence
  Description of Artificial Sequence: Synthetic oligonucleotide
ucaacccauguccacacug

SEQ ID NO: 1386679 - RNA, 19 nt, Artificial Sequence
  Description of Artificial Sequence: Synthetic oligonucleotide
gaguucgagaacaacuccg

SEQ ID NO: 1386680 - RNA, 19 nt, Artificial Sequence
  Description of Artificial Sequence: Synthetic oligonucleotide
gagaacaacuccgacuccg

SEQ ID NO: 1386681 - RNA, 19 nt, Artificial Sequence
  Description of Artificial Sequence: Synthetic oligonucleotide
aacucggcaugccuaauca

SEQ ID NO: 1386682 - RNA, 19 nt, Artificial Sequence
  Description of Artificial Sequence: Synthetic oligonucleotide
aagucgguaaauauuuucu

SEQ ID NO: 1386683 - RNA, 19 nt, Artificial Sequence
  Description of Artificial Sequence: Synthetic oligonucleotide
uuauggccuucccagaucu

SEQ ID NO: 1386684 - RNA, 19 nt, Artificial Sequence
  Description of Artificial Sequence: Synthetic oligonucleotide
aacaaaacagagauuuggu

SEQ ID NO: 1386685 - RNA, 19 nt, Artificial Sequence
  Description of Artificial Sequence: Synthetic oligonucleotide
uaucaucucucuuguuugg

SEQ ID NO: 1386686 - RNA, 19 nt, Artificial Sequence
  Description of Artificial Sequence: Synthetic oligonucleotide
uucgagaacaacuccgacu

SEQ ID NO: 1386687 - RNA, 19 nt, Artificial Sequence
  Description of Artificial Sequence: Synthetic oligonucleotide
uauuucucggaugaauuca

SEQ ID NO: 1386688 - RNA, 19 nt, Artificial Sequence
  Description of Artificial Sequence: Synthetic oligonucleotide
agcaggaucgauauaauca

SEQ ID NO: 1386689 - RNA, 19 nt, Artificial Sequence
  Description of Artificial Sequence: Synthetic oligonucleotide
ucaacaccaagacuacgca

SEQ ID NO: 1386690 - RNA, 19 nt, Artificial Sequence
  Description of Artificial Sequence: Synthetic oligonucleotide
uccgggcuauagaagaggg

SEQ ID NO: 1386691 - RNA, 19 nt, Artificial Sequence
  Description of Artificial Sequence: Synthetic oligonucleotide
cuccuuaucaucucucuug

SEQ ID NO: 1386692 - RNA, 19 nt, Artificial Sequence
  Description of Artificial Sequence: Synthetic oligonucleotide
uuuuccuucgagcuaccac

SEQ ID NO: 1386693 - RNA, 19 nt, Artificial Sequence
  Description of Artificial Sequence: Synthetic oligonucleotide
ucgguaaauauuuucugau

SEQ ID NO: 1386694 - RNA, 19 nt, Artificial Sequence
  Description of Artificial Sequence: Synthetic oligonucleotide
acaguaagaguccagucaa

SEQ ID NO: 1386695 - RNA, 19 nt, Artificial Sequence
  Description of Artificial Sequence: Synthetic oligonucleotide
uuccuagugacgcuccgag

SEQ ID NO: 1386696 - RNA, 19 nt, Artificial Sequence
  Description of Artificial Sequence: Synthetic oligonucleotide
cuuguugauaaacagaggu

SEQ ID NO: 1386697 - RNA, 19 nt, Artificial Sequence
  Description of Artificial Sequence: Synthetic oligonucleotide
agcaacauuauggccuucc

SEQ ID NO: 1386698 - RNA, 19 nt, Artificial Sequence
  Description of Artificial Sequence: Synthetic oligonucleotide
uggaguucgagaacaacuc

SEQ ID NO: 1386699 - RNA, 19 nt, Artificial Sequence
  Description of Artificial Sequence: Synthetic oligonucleotide
accaagacuacgcaucuca

SEQ ID NO: 1386700 - RNA, 19 nt, Artificial Sequence
  Description of Artificial Sequence: Synthetic oligonucleotide
agucgguaaauauuuucug

SEQ ID NO: 1386701 - RNA, 19 nt, Artificial Sequence
  Description of Artificial Sequence: Synthetic oligonucleotide
augauagcaggaucgauau

SEQ ID NO: 1386702 - RNA, 19 nt, Artificial Sequence
  Description of Artificial Sequence: Synthetic oligonucleotide
aguaagaguccagucaaag

SEQ ID NO: 1386703 - RNA, 19 nt, Artificial Sequence
  Description of Artificial Sequence: Synthetic oligonucleotide
uuaacagauggugauucca

SEQ ID NO: 1386704 - RNA, 19 nt, Artificial Sequence
  Description of Artificial Sequence: Synthetic oligonucleotide
uucagcaaagcaacaagua

SEQ ID NO: 1386705 - RNA, 19 nt, Artificial Sequence
  Description of Artificial Sequence: Synthetic oligonucleotide
uggacuguagaauuuucaa

SEQ ID NO: 1386706 - RNA, 19 nt, Artificial Sequence
  Description of Artificial Sequence: Synthetic oligonucleotide
aaacacaugccuaucugcu

SEQ ID NO: 1386707 - RNA, 19 nt, Artificial Sequence
  Description of Artificial Sequence: Synthetic oligonucleotide
aauccaugugcccaacaaa

SEQ ID NO: 1386708 - RNA, 19 nt, Artificial Sequence
  Description of Artificial Sequence: Synthetic oligonucleotide
aacacuaucuccuguccuu

SEQ ID NO: 1386709 - RNA, 19 nt, Artificial Sequence
  Description of Artificial Sequence: Synthetic oligonucleotide
ugguaucuuaucauauuuc

SEQ ID NO: 1386710 - RNA, 19 nt, Artificial Sequence
  Description of Artificial Sequence: Synthetic oligonucleotide
aucacguggaguucgagaa

SEQ ID NO: 1386711 - RNA, 19 nt, Artificial Sequence
  Description of Artificial Sequence: Synthetic oligonucleotide
uguuuugccagcugucgga

SEQ ID NO: 1386712 - RNA, 19 nt, Artificial Sequence
  Description of Artificial Sequence: Synthetic oligonucleotide
auuauggccuucccagauc

SEQ ID NO: 1386713 - RNA, 19 nt, Artificial Sequence
  Description of Artificial Sequence: Synthetic oligonucleotide
ucugauauucuggaagagu

SEQ ID NO: 1386714 - RNA, 19 nt, Artificial Sequence
  Description of Artificial Sequence: Synthetic oligonucleotide
agucccaguauuucugaag

SEQ ID NO: 1386715 - RNA, 19 nt, Artificial Sequence
  Description of Artificial Sequence: Synthetic oligonucleotide
uaacagauggugauuccaa

SEQ ID NO: 1386716 - RNA, 19 nt, Artificial Sequence
  Description of Artificial Sequence: Synthetic oligonucleotide
gagccaaaagccuaucaca

SEQ ID NO: 1386717 - RNA, 19 nt, Artificial Sequence
  Description of Artificial Sequence: Synthetic oligonucleotide
aaccugccagcgcaaguac

SEQ ID NO: 1386718 - RNA, 19 nt, Artificial Sequence
  Description of Artificial Sequence: Synthetic oligonucleotide
caagucgguaaauauuuuc

SEQ ID NO: 1386719 - RNA, 19 nt, Artificial Sequence
  Description of Artificial Sequence: Synthetic oligonucleotide
acagagauuugguugguaa

SEQ ID NO: 1386720 - RNA, 19 nt, Artificial Sequence
  Description of Artificial Sequence: Synthetic oligonucleotide
uuucuaacucuuccaauuu

SEQ ID NO: 1386721 - RNA, 19 nt, Artificial Sequence
  Description of Artificial Sequence: Synthetic oligonucleotide
acaaaacagagauuugguu

SEQ ID NO: 1386722 - RNA, 19 nt, Artificial Sequence
  Description of Artificial Sequence: Synthetic oligonucleotide
gucaacaccaagacuacgc

SEQ ID NO: 1386723 - RNA, 19 nt, Artificial Sequence
  Description of Artificial Sequence: Synthetic oligonucleotide
acaacuccgacuccgggcu

SEQ ID NO: 1386724 - RNA, 19 nt, Artificial Sequence
  Description of Artificial Sequence: Synthetic oligonucleotide
gcaggaucgauauaaucag

SEQ ID NO: 1386725 - RNA, 19 nt, Artificial Sequence
  Description of Artificial Sequence: Synthetic oligonucleotide
caaagcacaccaacugaag

SEQ ID NO: 1386726 - RNA, 19 nt, Artificial Sequence
  Description of Artificial Sequence: Synthetic oligonucleotide
uuugccagcugucggauuu

SEQ ID NO: 1386727 - RNA, 19 nt, Artificial Sequence
  Description of Artificial Sequence: Synthetic oligonucleotide
uucucggaugaauucauua

SEQ ID NO: 1386728 - RNA, 19 nt, Artificial Sequence
  Description of Artificial Sequence: Synthetic oligonucleotide
cuaacaaaccugccagcgc

SEQ ID NO: 1386729 - RNA, 19 nt, Artificial Sequence
  Description of Artificial Sequence: Synthetic oligonucleotide
caucuugacaucccgaaga

SEQ ID NO: 1386730 - RNA, 19 nt, Artificial Sequence
  Description of Artificial Sequence: Synthetic oligonucleotide
ucauuaagucccaguauuu

SEQ ID NO: 1386731 - RNA, 19 nt, Artificial Sequence
  Description of Artificial Sequence: Synthetic oligonucleotide
gaacaacuccgacuccggg

SEQ ID NO: 1386732 - RNA, 19 nt, Artificial Sequence
  Description of Artificial Sequence: Synthetic oligonucleotide
aaagggcaucauaccauac

SEQ ID NO: 1386733 - RNA, 19 nt, Artificial Sequence
  Description of Artificial Sequence: Synthetic oligonucleotide
gacuccgggcuauagaaga

SEQ ID NO: 1386734 - RNA, 19 nt, Artificial Sequence
  Description of Artificial Sequence: Synthetic oligonucleotide
ggcucuacaaucuccauuc

SEQ ID NO: 1386735 - RNA, 19 nt, Artificial Sequence
  Description of Artificial Sequence: Synthetic oligonucleotide
guuaacagauggugauucc

SEQ ID NO: 1386736 - RNA, 19 nt, Artificial Sequence
  Description of Artificial Sequence: Synthetic oligonucleotide
acgcaucucauucuccaag

SEQ ID NO: 1386737 - RNA, 19 nt, Artificial Sequence
  Description of Artificial Sequence: Synthetic oligonucleotide
caucauaccauacccagaa

SEQ ID NO: 1386738 - RNA, 19 nt, Artificial Sequence
  Description of Artificial Sequence: Synthetic oligonucleotide
uaaagggcaucauaccaua

SEQ ID NO: 1386739 - RNA, 19 nt, Artificial Sequence
  Description of Artificial Sequence: Synthetic oligonucleotide
cucaagaucucguucccuc

SEQ ID NO: 1386740 - RNA, 19 nt, Artificial Sequence
  Description of Artificial Sequence: Synthetic oligonucleotide
cacagcuaaaugcaaucug

SEQ ID NO: 1386741 - RNA, 19 nt, Artificial Sequence
  Description of Artificial Sequence: Synthetic oligonucleotide
ucgaugagccaaaagccua

SEQ ID NO: 1386742 - RNA, 19 nt, Artificial Sequence
  Description of Artificial Sequence: Synthetic oligonucleotide
aaagcucaguuauucucuu

SEQ ID NO: 1386743 - RNA, 19 nt, Artificial Sequence
  Description of Artificial Sequence: Synthetic oligonucleotide
caucucucuuguuuggcac

SEQ ID NO: 1386744 - RNA, 19 nt, Artificial Sequence
  Description of Artificial Sequence: Synthetic oligonucleotide
caacccauguccacacugc

SEQ ID NO: 1386745 - RNA, 19 nt, Artificial Sequence
  Description of Artificial Sequence: Synthetic oligonucleotide
uccaaaaucccugggguau

SEQ ID NO: 1386746 - RNA, 19 nt, Artificial Sequence
  Description of Artificial Sequence: Synthetic oligonucleotide
ugucaacaccaagacuacg

SEQ ID NO: 1386747 - RNA, 19 nt, Artificial Sequence
  Description of Artificial Sequence: Synthetic oligonucleotide
cauuuguuugcuacaacaa

SEQ ID NO: 1386748 - RNA, 19 nt, Artificial Sequence
  Description of Artificial Sequence: Synthetic oligonucleotide
caugauagcaggaucgaua

SEQ ID NO: 1386749 - RNA, 19 nt, Artificial Sequence
  Description of Artificial Sequence: Synthetic oligonucleotide
agagaacacuaucuccugu

SEQ ID NO: 1386750 - RNA, 19 nt, Artificial Sequence
  Description of Artificial Sequence: Synthetic oligonucleotide
auaaacaguaagaguccag

SEQ ID NO: 1386751 - RNA, 19 nt, Artificial Sequence
  Description of Artificial Sequence: Synthetic oligonucleotide
agcaguucggggcauccug

SEQ ID NO: 1386752 - RNA, 19 nt, Artificial Sequence
  Description of Artificial Sequence: Synthetic oligonucleotide
acuacgcaucucauucucc

SEQ ID NO: 1386753 - RNA, 19 nt, Artificial Sequence
  Description of Artificial Sequence: Synthetic oligonucleotide
uggugauuccaaguuauau

SEQ ID NO: 1386754 - RNA, 19 nt, Artificial Sequence
  Description of Artificial Sequence: Synthetic oligonucleotide
cauuaagucccaguauuuc

SEQ ID NO: 1386755 - RNA, 19 nt, Artificial Sequence
  Description of Artificial Sequence: Synthetic oligonucleotide
ugcccguugaaccuucuua

SEQ ID NO: 1386756 - RNA, 19 nt, Artificial Sequence
  Description of Artificial Sequence: Synthetic oligonucleotide
uucaugauagcaggaucga

SEQ ID NO: 1386757 - RNA, 19 nt, Artificial Sequence
  Description of Artificial Sequence: Synthetic oligonucleotide
uuaaccugaaugacaccuu

SEQ ID NO: 1386758 - RNA, 19 nt, Artificial Sequence
  Description of Artificial Sequence: Synthetic oligonucleotide
ucucucuuguuuggcacag

SEQ ID NO: 1386759 - RNA, 19 nt, Artificial Sequence
  Description of Artificial Sequence: Synthetic oligonucleotide
uucuucaugauagcaggau

SEQ ID NO: 1386760 - RNA, 19 nt, Artificial Sequence
  Description of Artificial Sequence: Synthetic oligonucleotide
gacuacgcaucucauucuc

SEQ ID NO: 1386761 - RNA, 19 nt, Artificial Sequence
  Description of Artificial Sequence: Synthetic oligonucleotide
agugagcacaacucggcau

SEQ ID NO: 1386762 - RNA, 19 nt, Artificial Sequence
  Description of Artificial Sequence: Synthetic oligonucleotide
uuucaaugguguuccgauc

SEQ ID NO: 1386763 - RNA, 19 nt, Artificial Sequence
  Description of Artificial Sequence: Synthetic oligonucleotide
caaucuguucagaaccuca

SEQ ID NO: 1386764 - RNA, 19 nt, Artificial Sequence
  Description of Artificial Sequence: Synthetic oligonucleotide
acaccaagacuacgcaucu

SEQ ID NO: 1386765 - RNA, 19 nt, Artificial Sequence
  Description of Artificial Sequence: Synthetic oligonucleotide
aaaccugccagcgcaagua

SEQ ID NO: 1386766 - RNA, 19 nt, Artificial Sequence
  Description of Artificial Sequence: Synthetic oligonucleotide
cagguuuaucaguuuucag

SEQ ID NO: 1386767 - RNA, 19 nt, Artificial Sequence
  Description of Artificial Sequence: Synthetic oligonucleotide
aggaugauccaaaaucccu

SEQ ID NO: 1386768 - RNA, 19 nt, Artificial Sequence
  Description of Artificial Sequence: Synthetic oligonucleotide
uagcaggaucgauauaauc

SEQ ID NO: 1386769 - RNA, 19 nt, Artificial Sequence
  Description of Artificial Sequence: Synthetic oligonucleotide
gucucgaugacagggaauc

SEQ ID NO: 1386770 - RNA, 19 nt, Artificial Sequence
  Description of Artificial Sequence: Synthetic oligonucleotide
ugacgcuccgagaucuucu

SEQ ID NO: 1386771 - RNA, 19 nt, Artificial Sequence
  Description of Artificial Sequence: Synthetic oligonucleotide
uuguuuggcacagcuaaau

SEQ ID NO: 1386772 - RNA, 19 nt, Artificial Sequence
  Description of Artificial Sequence: Synthetic oligonucleotide
uagugacgcuccgagaucu

SEQ ID NO: 1386773 - RNA, 19 nt, Artificial Sequence
  Description of Artificial Sequence: Synthetic oligonucleotide
accaacugaagagaacacu

SEQ ID NO: 1386774 - RNA, 19 nt, Artificial Sequence
  Description of Artificial Sequence: Synthetic oligonucleotide
uuucgacucgaugagccaa

SEQ ID NO: 1386775 - RNA, 19 nt, Artificial Sequence
  Description of Artificial Sequence: Synthetic oligonucleotide
ccuucagccugcaagucgg

SEQ ID NO: 1386776 - RNA, 19 nt, Artificial Sequence
  Description of Artificial Sequence: Synthetic oligonucleotide
auccaugugcccaacaaaa

SEQ ID NO: 1386777 - RNA, 19 nt, Artificial Sequence
  Description of Artificial Sequence: Synthetic oligonucleotide
guaucuuaucauauuucuc

SEQ ID NO: 1386778 - RNA, 19 nt, Artificial Sequence
  Description of Artificial Sequence: Synthetic oligonucleotide
ugaaccuucuuagcaguuc

SEQ ID NO: 1386779 - RNA, 19 nt, Artificial Sequence
  Description of Artificial Sequence: Synthetic oligonucleotide
cuacgcaucucauucucca

SEQ ID NO: 1386780 - RNA, 19 nt, Artificial Sequence
  Description of Artificial Sequence: Synthetic oligonucleotide
acauuauggccuucccaga

SEQ ID NO: 1386781 - RNA, 19 nt, Artificial Sequence
  Description of Artificial Sequence: Synthetic oligonucleotide
aucucucuuguuuggcaca

SEQ ID NO: 1386782 - RNA, 19 nt, Artificial Sequence
  Description of Artificial Sequence: Synthetic oligonucleotide
ggaugauccaaaaucccug

SEQ ID NO: 1386783 - RNA, 19 nt, Artificial Sequence
  Description of Artificial Sequence: Synthetic oligonucleotide
agaacaacuccgacuccgg

SEQ ID NO: 1386784 - RNA, 19 nt, Artificial Sequence
  Description of Artificial Sequence: Synthetic oligonucleotide
uccgacuccgggcuauaga

SEQ ID NO: 1386785 - RNA, 19 nt, Artificial Sequence
  Description of Artificial Sequence: Synthetic oligonucleotide
agggaauccuucagccugc

SEQ ID NO: 1386786 - RNA, 19 nt, Artificial Sequence
  Description of Artificial Sequence: Synthetic oligonucleotide
aagucccaguauuucugaa

SEQ ID NO: 1386787 - RNA, 19 nt, Artificial Sequence
  Description of Artificial Sequence: Synthetic oligonucleotide
aaguuaacagauggugauu

SEQ ID NO: 1386788 - RNA, 19 nt, Artificial Sequence
  Description of Artificial Sequence: Synthetic oligonucleotide
agacuacgcaucucauucu

SEQ ID NO: 1386789 - RNA, 19 nt, Artificial Sequence
  Description of Artificial Sequence: Synthetic oligonucleotide
ggugauuccaaguuauaua

SEQ ID NO: 1386790 - RNA, 19 nt, Artificial Sequence
  Description of Artificial Sequence: Synthetic oligonucleotide
uccagucaaagcacaccaa

SEQ ID NO: 1386791 - RNA, 19 nt, Artificial Sequence
  Description of Artificial Sequence: Synthetic oligonucleotide
agugggcauugucuuuauc

SEQ ID NO: 1386792 - RNA, 19 nt, Artificial Sequence
  Description of Artificial Sequence: Synthetic oligonucleotide
uggucucgaugacagggaa

SEQ ID NO: 1386793 - RNA, 19 nt, Artificial Sequence
  Description of Artificial Sequence: Synthetic oligonucleotide
uucgagcuaccacuccuuc

SEQ ID NO: 1386794 - RNA, 19 nt, Artificial Sequence
  Description of Artificial Sequence: Synthetic oligonucleotide
agccaaaagccuaucacaa

SEQ ID NO: 1386795 - RNA, 19 nt, Artificial Sequence
  Description of Artificial Sequence: Synthetic oligonucleotide
ucacguggaguucgagaac

SEQ ID NO: 1386796 - RNA, 19 nt, Artificial Sequence
  Description of Artificial Sequence: Synthetic oligonucleotide
uucgacucgaugagccaaa

SEQ ID NO: 1386797 - RNA, 19 nt, Artificial Sequence
  Description of Artificial Sequence: Synthetic oligonucleotide
aguucgagaacaacuccga

SEQ ID NO: 1386798 - RNA, 19 nt, Artificial Sequence
  Description of Artificial Sequence: Synthetic oligonucleotide
cuuuaucauccaugucaac

SEQ ID NO: 1386799 - RNA, 19 nt, Artificial Sequence
  Description of Artificial Sequence: Synthetic oligonucleotide
uuguuucgacucgaugagc

SEQ ID NO: 1386800 - RNA, 19 nt, Artificial Sequence
  Description of Artificial Sequence: Synthetic oligonucleotide
auccuccuaaaggaugauc

SEQ ID NO: 1386801 - RNA, 19 nt, Artificial Sequence
  Description of Artificial Sequence: Synthetic oligonucleotide
uccuucgagcuaccacucc

SEQ ID NO: 1386802 - RNA, 19 nt, Artificial Sequence
  Description of Artificial Sequence: Synthetic oligonucleotide
gcccguugaaccuucuuag

SEQ ID NO: 1386803 - RNA, 19 nt, Artificial Sequence
  Description of Artificial Sequence: Synthetic oligonucleotide
aaacagagauuugguuggu

SEQ ID NO: 1386804 - RNA, 19 nt, Artificial Sequence
  Description of Artificial Sequence: Synthetic oligonucleotide
gauggugauuccaaguuau

SEQ ID NO: 1386805 - RNA, 19 nt, Artificial Sequence
  Description of Artificial Sequence: Synthetic oligonucleotide
auacagaacugcagcucgg

SEQ ID NO: 1386806 - RNA, 19 nt, Artificial Sequence
  Description of Artificial Sequence: Synthetic oligonucleotide
uuuccuagugacgcuccga

SEQ ID NO: 1386807 - RNA, 19 nt, Artificial Sequence
  Description of Artificial Sequence: Synthetic oligonucleotide
caucacguggaguucgaga

SEQ ID NO: 1386808 - RNA, 19 nt, Artificial Sequence
  Description of Artificial Sequence: Synthetic oligonucleotide
cauauuucucggaugaauu

SEQ ID NO: 1386809 - RNA, 19 nt, Artificial Sequence
  Description of Artificial Sequence: Synthetic oligonucleotide
guucgagaacaacuccgac

SEQ ID NO: 1386810 - RNA, 19 nt, Artificial Sequence
  Description of Artificial Sequence: Synthetic oligonucleotide
gcgcaaguacuuauaaucc

SEQ ID NO: 1386811 - RNA, 19 nt, Artificial Sequence
  Description of Artificial Sequence: Synthetic oligonucleotide
caaguuauauaaagggcau

SEQ ID NO: 1386812 - RNA, 19 nt, Artificial Sequence
  Description of Artificial Sequence: Synthetic oligonucleotide
cuccgggcuauagaagagg

SEQ ID NO: 1386813 - RNA, 19 nt, Artificial Sequence
  Description of Artificial Sequence: Synthetic oligonucleotide
auagugggcauugucuuua

SEQ ID NO: 1386814 - RNA, 19 nt, Artificial Sequence
  Description of Artificial Sequence: Synthetic oligonucleotide
uccagcucaagaucucguu

SEQ ID NO: 1386815 - RNA, 19 nt, Artificial Sequence
  Description of Artificial Sequence: Synthetic oligonucleotide
cguugaaccuucuuagcag

SEQ ID NO: 1386816 - RNA, 19 nt, Artificial Sequence
  Description of Artificial Sequence: Synthetic oligonucleotide
acaugccuaucugcuuccc

SEQ ID NO: 1386817 - RNA, 19 nt, Artificial Sequence
  Description of Artificial Sequence: Synthetic oligonucleotide
ucccgaagaccagaaacau

SEQ ID NO: 1386818 - RNA, 19 nt, Artificial Sequence
  Description of Artificial Sequence: Synthetic oligonucleotide
caguucggggcauccuggg

SEQ ID NO: 1386819 - RNA, 19 nt, Artificial Sequence
  Description of Artificial Sequence: Synthetic oligonucleotide
gaacacuaucuccuguccu

SEQ ID NO: 1386820 - RNA, 19 nt, Artificial Sequence
  Description of Artificial Sequence: Synthetic oligonucleotide
uacgcaucucauucuccaa

SEQ ID NO: 1386821 - RNA, 19 nt, Artificial Sequence
  Description of Artificial Sequence: Synthetic oligonucleotide
augccuaaucagguuuauc

SEQ ID NO: 1386822 - RNA, 19 nt, Artificial Sequence
  Description of Artificial Sequence: Synthetic oligonucleotide
ucaugauagcaggaucgau

SEQ ID NO: 1386823 - RNA, 19 nt, Artificial Sequence
  Description of Artificial Sequence: Synthetic oligonucleotide
ugguguuccgauccuccua

SEQ ID NO: 1386824 - RNA, 19 nt, Artificial Sequence
  Description of Artificial Sequence: Synthetic oligonucleotide
ccaaguuaacagaugguga

SEQ ID NO: 1386825 - RNA, 19 nt, Artificial Sequence
  Description of Artificial Sequence: Synthetic oligonucleotide
ugcuggucucgaugacagg

SEQ ID NO: 1386826 - RNA, 19 nt, Artificial Sequence
  Description of Artificial Sequence: Synthetic oligonucleotide
guggaguucgagaacaacu

SEQ ID NO: 1386827 - RNA, 19 nt, Artificial Sequence
  Description of Artificial Sequence: Synthetic oligonucleotide
uccuagugacgcuccgaga

SEQ ID NO: 1386828 - RNA, 19 nt, Artificial Sequence
  Description of Artificial Sequence: Synthetic oligonucleotide
caacucggcaugccuaauc

SEQ ID NO: 1386829 - RNA, 19 nt, Artificial Sequence
  Description of Artificial Sequence: Synthetic oligonucleotide
agaguccagucaaagcaca

SEQ ID NO: 1386830 - RNA, 19 nt, Artificial Sequence
  Description of Artificial Sequence: Synthetic oligonucleotide
cacguggaguucgagaaca

SEQ ID NO: 1386831 - RNA, 19 nt, Artificial Sequence
  Description of Artificial Sequence: Synthetic oligonucleotide
gcgauucaucuucuucugg

SEQ ID NO: 1386832 - RNA, 19 nt, Artificial Sequence
  Description of Artificial Sequence: Synthetic oligonucleotide
guuucgacucgaugagcca

SEQ ID NO: 1386833 - RNA, 19 nt, Artificial Sequence
  Description of Artificial Sequence: Synthetic oligonucleotide
acaaaccugccagcgcaag

SEQ ID NO: 1386834 - RNA, 19 nt, Artificial Sequence
  Description of Artificial Sequence: Synthetic oligonucleotide
gguaucuaacaaaccugcc

SEQ ID NO: 1386835 - RNA, 19 nt, Artificial Sequence
  Description of Artificial Sequence: Synthetic oligonucleotide
aacagagauuugguuggua

SEQ ID NO: 1386836 - RNA, 19 nt, Artificial Sequence
  Description of Artificial Sequence: Synthetic oligonucleotide
cucgaugagccaaaagccu

SEQ ID NO: 1386837 - RNA, 19 nt, Artificial Sequence
  Description of Artificial Sequence: Synthetic oligonucleotide
uugcuccuucaacccaugu

SEQ ID NO: 1386838 - RNA, 19 nt, Artificial Sequence
  Description of Artificial Sequence: Synthetic oligonucleotide
aucauaccauacccagaaa

SEQ ID NO: 1386839 - RNA, 19 nt, Artificial Sequence
  Description of Artificial Sequence: Synthetic oligonucleotide
ugccagcgcaaguacuuau

SEQ ID NO: 1386840 - RNA, 19 nt, Artificial Sequence
  Description of Artificial Sequence: Synthetic oligonucleotide
cggaugaauucauuaaguc

SEQ ID NO: 1386841 - RNA, 19 nt, Artificial Sequence
  Description of Artificial Sequence: Synthetic oligonucleotide
ccugggcucuacaaucucc

SEQ ID NO: 1386842 - RNA, 19 nt, Artificial Sequence
  Description of Artificial Sequence: Synthetic oligonucleotide
gguguuccgauccuccuaa

SEQ ID NO: 1386843 - RNA, 19 nt, Artificial Sequence
  Description of Artificial Sequence: Synthetic oligonucleotide
uccccaagcgauucaucuu

SEQ ID NO: 1386844 - RNA, 19 nt, Artificial Sequence
  Description of Artificial Sequence: Synthetic oligonucleotide
cugguaucuuaucauauuu

SEQ ID NO: 1386845 - RNA, 19 nt, Artificial Sequence
  Description of Artificial Sequence: Synthetic oligonucleotide
aacaaaccugccagcgcaa

SEQ ID NO: 1386846 - RNA, 19 nt, Artificial Sequence
  Description of Artificial Sequence: Synthetic oligonucleotide
cuuguuuggcacagcuaaa

SEQ ID NO: 1386847 - RNA, 19 nt, Artificial Sequence
  Description of Artificial Sequence: Synthetic oligonucleotide
cuccuaaaggaugauccaa

SEQ ID NO: 1386848 - RNA, 19 nt, Artificial Sequence
  Description of Artificial Sequence: Synthetic oligonucleotide
gugcccaacaaaacagaga

SEQ ID NO: 1386849 - RNA, 19 nt, Artificial Sequence
  Description of Artificial Sequence: Synthetic oligonucleotide
cacaacucggcaugccuaa

SEQ ID NO: 1386850 - RNA, 19 nt, Artificial Sequence
  Description of Artificial Sequence: Synthetic oligonucleotide
cuucccagaucucugguau

SEQ ID NO: 1386851 - RNA, 19 nt, Artificial Sequence
  Description of Artificial Sequence: Synthetic oligonucleotide
acaucacguggaguucgag

SEQ ID NO: 1386852 - RNA, 19 nt, Artificial Sequence
  Description of Artificial Sequence: Synthetic oligonucleotide
auagcaggaucgauauaau

SEQ ID NO: 1386853 - RNA, 19 nt, Artificial Sequence
  Description of Artificial Sequence: Synthetic oligonucleotide
cgggcuauagaagagggug

SEQ ID NO: 1386854 - RNA, 19 nt, Artificial Sequence
  Description of Artificial Sequence: Synthetic oligonucleotide
aucauauuucucggaugaa

SEQ ID NO: 1386855 - RNA, 19 nt, Artificial Sequence
  Description of Artificial Sequence: Synthetic oligonucleotide
gacaucccgaagaccagaa

SEQ ID NO: 1386856 - RNA, 19 nt, Artificial Sequence
  Description of Artificial Sequence: Synthetic oligonucleotide
ccgauccuccuaaaggaug

SEQ ID NO: 1386857 - RNA, 19 nt, Artificial Sequence
  Description of Artificial Sequence: Synthetic oligonucleotide
acaucccgaagaccagaaa

SEQ ID NO: 1386858 - RNA, 19 nt, Artificial Sequence
  Description of Artificial Sequence: Synthetic oligonucleotide
aaaaucccugggguaucua

SEQ ID NO: 1386859 - RNA, 19 nt, Artificial Sequence
  Description of Artificial Sequence: Synthetic oligonucleotide
ccccaagcgauucaucuuc

SEQ ID NO: 1386860 - RNA, 19 nt, Artificial Sequence
  Description of Artificial Sequence: Synthetic oligonucleotide
gcaguucggggcauccugg

SEQ ID NO: 1386861 - RNA, 19 nt, Artificial Sequence
  Description of Artificial Sequence: Synthetic oligonucleotide
ccgagaucuucuugccugg

SEQ ID NO: 1386862 - RNA, 19 nt, Artificial Sequence
  Description of Artificial Sequence: Synthetic oligonucleotide
ggcuauagaagagggugga

SEQ ID NO: 1386863 - RNA, 19 nt, Artificial Sequence
  Description of Artificial Sequence: Synthetic oligonucleotide
auugcuccuucaacccaug

SEQ ID NO: 1386864 - RNA, 19 nt, Artificial Sequence
  Description of Artificial Sequence: Synthetic oligonucleotide
ccguugaaccuucuuagca

SEQ ID NO: 1386865 - RNA, 19 nt, Artificial Sequence
  Description of Artificial Sequence: Synthetic oligonucleotide
cauuauggccuucccagau

SEQ ID NO: 1386866 - RNA, 19 nt, Artificial Sequence
  Description of Artificial Sequence: Synthetic oligonucleotide
cccguugaaccuucuuagc

SEQ ID NO: 1386867 - RNA, 19 nt, Artificial Sequence
  Description of Artificial Sequence: Synthetic oligonucleotide
gcuugcauuucaauggugu

SEQ ID NO: 1386868 - RNA, 19 nt, Artificial Sequence
  Description of Artificial Sequence: Synthetic oligonucleotide
cuuagcaguucggggcauc

SEQ ID NO: 1386869 - RNA, 19 nt, Artificial Sequence
  Description of Artificial Sequence: Synthetic oligonucleotide
ccuaaaggaugauccaaaa

SEQ ID NO: 1386870 - RNA, 19 nt, Artificial Sequence
  Description of Artificial Sequence: Synthetic oligonucleotide
ucgacucgaugagccaaaa

SEQ ID NO: 1386871 - RNA, 19 nt, Artificial Sequence
  Description of Artificial Sequence: Synthetic oligonucleotide
caguaagaguccagucaaa

SEQ ID NO: 1386872 - RNA, 19 nt, Artificial Sequence
  Description of Artificial Sequence: Synthetic oligonucleotide
uagcaguucggggcauccu

SEQ ID NO: 1386873 - RNA, 19 nt, Artificial Sequence
  Description of Artificial Sequence: Synthetic oligonucleotide
gucgcuccuuaucaucucu

SEQ ID NO: 1386874 - RNA, 19 nt, Artificial Sequence
  Description of Artificial Sequence: Synthetic oligonucleotide
ggggucgcuccuuaucauc

SEQ ID NO: 1386875 - RNA, 19 nt, Artificial Sequence
  Description of Artificial Sequence: Synthetic oligonucleotide
gugacgcuccgagaucuuc

SEQ ID NO: 1386876 - RNA, 19 nt, Artificial Sequence
  Description of Artificial Sequence: Synthetic oligonucleotide
ccuggacugcauagugggc

SEQ ID NO: 1386877 - RNA, 19 nt, Artificial Sequence
  Description of Artificial Sequence: Synthetic oligonucleotide
cgcaaguacuuauaaucca

SEQ ID NO: 1386878 - RNA, 19 nt, Artificial Sequence
  Description of Artificial Sequence: Synthetic oligonucleotide
caacaccaagacuacgcau

SEQ ID NO: 1386879 - RNA, 19 nt, Artificial Sequence
  Description of Artificial Sequence: Synthetic oligonucleotide
caagacuacgcaucucauu

SEQ ID NO: 1386880 - RNA, 19 nt, Artificial Sequence
  Description of Artificial Sequence: Synthetic oligonucleotide
cuuuggacuguagaauuuu

SEQ ID NO: 1386881 - RNA, 19 nt, Artificial Sequence
  Description of Artificial Sequence: Synthetic oligonucleotide
ccgacuccgggcuauagaa

SEQ ID NO: 1386882 - RNA, 19 nt, Artificial Sequence
  Description of Artificial Sequence: Synthetic oligonucleotide
ccuccuaaaggaugaucca

SEQ ID NO: 1386883 - RNA, 19 nt, Artificial Sequence
  Description of Artificial Sequence: Synthetic oligonucleotide
cccgaagaccagaaacauc

SEQ ID NO: 1386884 - RNA, 19 nt, Artificial Sequence
  Description of Artificial Sequence: Synthetic oligonucleotide
ggcaugccuaaucagguuu

SEQ ID NO: 1386885 - RNA, 19 nt, Artificial Sequence
  Description of Artificial Sequence: Synthetic oligonucleotide
cuaccacuccuucugggau

SEQ ID NO: 1386886 - RNA, 19 nt, Artificial Sequence
  Description of Artificial Sequence: Synthetic oligonucleotide
cgauccuccuaaaggauga

SEQ ID NO: 1386887 - RNA, 19 nt, Artificial Sequence
  Description of Artificial Sequence: Synthetic oligonucleotide
ccuagugacgcuccgagau

SEQ ID NO: 1386888 - RNA, 19 nt, Artificial Sequence
  Description of Artificial Sequence: Synthetic oligonucleotide
cuacaacaauaagaaggcu

SEQ ID NO: 1386889 - RNA, 19 nt, Artificial Sequence
  Description of Artificial Sequence: Synthetic oligonucleotide
gcauagugggcauugucuu

SEQ ID NO: 1386890 - RNA, 19 nt, Artificial Sequence
  Description of Artificial Sequence: Synthetic oligonucleotide
gcaucauaccauacccaga

SEQ ID NO: 1386891 - RNA, 19 nt, Artificial Sequence
  Description of Artificial Sequence: Synthetic oligonucleotide
agucugcccguugaaccuu

SEQ ID NO: 1386892 - RNA, 19 nt, Artificial Sequence
  Description of Artificial Sequence: Synthetic oligonucleotide
ccagcgcaaguacuuauaa

SEQ ID NO: 1386893 - RNA, 19 nt, Artificial Sequence
  Description of Artificial Sequence: Synthetic oligonucleotide
cagcgcaaguacuuauaau

SEQ ID NO: 1386894 - RNA, 19 nt, Artificial Sequence
  Description of Artificial Sequence: Synthetic oligonucleotide
gcacaccaacugaagagaa

SEQ ID NO: 1386895 - RNA, 19 nt, Artificial Sequence
  Description of Artificial Sequence: Synthetic oligonucleotide
gcacagcuaaaugcaaucu

SEQ ID NO: 1386896 - RNA, 19 nt, Artificial Sequence
  Description of Artificial Sequence: Synthetic oligonucleotide
ccaaaaucccugggguauc

SEQ ID NO: 1386897 - RNA, 19 nt, Artificial Sequence
  Description of Artificial Sequence: Synthetic oligonucleotide
cgacuccgggcuauagaag

SEQ ID NO: 1386898 - RNA, 19 nt, Artificial Sequence
  Description of Artificial Sequence: Synthetic oligonucleotide
gcuauagaagaggguggaa

SEQ ID NO: 1386899 - RNA, 19 nt, Artificial Sequence
  Description of Artificial Sequence: Synthetic oligonucleotide
cgacucgaugagccaaaag

SEQ ID NO: 1386900 - RNA, 19 nt, Artificial Sequence
  Description of Artificial Sequence: Synthetic oligonucleotide
cgagaacaacuccgacucc

SEQ ID NO: 1386901 - RNA, 19 nt, Artificial Sequence
  Description of Artificial Sequence: Synthetic oligonucleotide
gggucgcuccuuaucaucu

SEQ ID NO: 1386902 - RNA, 19 nt, Artificial Sequence
  Description of Artificial Sequence: Synthetic oligonucleotide
auacuccccagcagcuguu

SEQ ID NO: 1386903 - RNA, 19 nt, Artificial Sequence
  Description of Artificial Sequence: Synthetic oligonucleotide
cguggaguucgagaacaac

SEQ ID NO: 1386904 - RNA, 19 nt, Artificial Sequence
  Description of Artificial Sequence: Synthetic oligonucleotide
cccugggguaucuaacaaa

SEQ ID NO: 1386905 - RNA, 19 nt, Artificial Sequence
  Description of Artificial Sequence: Synthetic oligonucleotide
gcaugccuaaucagguuua

SEQ ID NO: 1386906 - RNA, 19 nt, Artificial Sequence
  Description of Artificial Sequence: Synthetic oligonucleotide
gauccuccuaaaggaugau

SEQ ID NO: 1386907 - RNA, 19 nt, Artificial Sequence
  Description of Artificial Sequence: Synthetic oligonucleotide
gggcucuacaaucuccauu

SEQ ID NO: 1386908 - RNA, 19 nt, Artificial Sequence
  Description of Artificial Sequence: Synthetic oligonucleotide
ccuucgagcuaccacuccu

SEQ ID NO: 1386909 - RNA, 19 nt, Artificial Sequence
  Description of Artificial Sequence: Synthetic oligonucleotide
gcauccugggucccugugu

SEQ ID NO: 1386910 - RNA, 19 nt, Artificial Sequence
  Description of Artificial Sequence: Synthetic oligonucleotide
gcuguucuuagcucuucuu

SEQ ID NO: 1386911 - RNA, 19 nt, Artificial Sequence
  Description of Artificial Sequence: Synthetic oligonucleotide
ggaauccuucagccugcaa

SEQ ID NO: 1386912 - RNA, 19 nt, Artificial Sequence
  Description of Artificial Sequence: Synthetic oligonucleotide
agugacgcuccgagaucuu

SEQ ID NO: 1386913 - RNA, 19 nt, Artificial Sequence
  Description of Artificial Sequence: Synthetic oligonucleotide
caugccuaaucagguuuau

SEQ ID NO: 1386914 - RNA, 19 nt, Artificial Sequence
  Description of Artificial Sequence: Synthetic oligonucleotide
gccagcgcaaguacuuaua

SEQ ID NO: 1386915 - RNA, 19 nt, Artificial Sequence
  Description of Artificial Sequence: Synthetic oligonucleotide
gggaauccuucagccugca

SEQ ID NO: 1386916 - RNA, 19 nt, Artificial Sequence
  Description of Artificial Sequence: Synthetic oligonucleotide
ccugccagcgcaaguacuu

SEQ ID NO: 1386917 - RNA, 19 nt, Artificial Sequence
  Description of Artificial Sequence: Synthetic oligonucleotide
acuccgacuccgggcuaua

SEQ ID NO: 1386918 - RNA, 19 nt, Artificial Sequence
  Description of Artificial Sequence: Synthetic oligonucleotide
gcucaagaucucguucccu

SEQ ID NO: 1386919 - RNA, 19 nt, Artificial Sequence
  Description of Artificial Sequence: Synthetic oligonucleotide
ggucucgaugacagggaau

SEQ ID NO: 1386920 - RNA, 19 nt, Artificial Sequence
  Description of Artificial Sequence: Synthetic oligonucleotide
cccaagcgauucaucuucu

SEQ ID NO: 1386921 - RNA, 19 nt, Artificial Sequence
  Description of Artificial Sequence: Synthetic oligonucleotide
gcugucggauuuccaucau

SEQ ID NO: 1386922 - RNA, 19 nt, Artificial Sequence
  Description of Artificial Sequence: Synthetic oligonucleotide
cgaugagccaaaagccuau

SEQ ID NO: 1386923 - RNA, 19 nt, Artificial Sequence
  Description of Artificial Sequence: Synthetic oligonucleotide
gcaaagcaacaaguauuuu

SEQ ID NO: 1386924 - RNA, 19 nt, Artificial Sequence
  Description of Artificial Sequence: Synthetic oligonucleotide
cgcuccuuaucaucucucu

SEQ ID NO: 1386925 - RNA, 19 nt, Artificial Sequence
  Description of Artificial Sequence: Synthetic oligonucleotide
ccgggcuauagaagagggu

SEQ ID NO: 1386926 - RNA, 19 nt, Artificial Sequence
  Description of Artificial Sequence: Synthetic oligonucleotide
cugcccguugaaccuucuu

SEQ ID NO: 1386927 - RNA, 19 nt, Artificial Sequence
  Description of Artificial Sequence: Synthetic oligonucleotide
ccaagcgauucaucuucuu

SEQ ID NO: 1386928 - RNA, 19 nt, Artificial Sequence
  Description of Artificial Sequence: Synthetic oligonucleotide
gggcauccugggucccugu

SEQ ID NO: 1386929 - RNA, 19 nt, Artificial Sequence
  Description of Artificial Sequence: Synthetic oligonucleotide
aaauauuagcuccagcugc

SEQ ID NO: 1386930 - RNA, 19 nt, Artificial Sequence
  Description of Artificial Sequence: Synthetic oligonucleotide
auuauuauuacaaagacuc

SEQ ID NO: 1386931 - RNA, 19 nt, Artificial Sequence
  Description of Artificial Sequence: Synthetic oligonucleotide
agucauaaauauuagcucc

SEQ ID NO: 1386932 - RNA, 19 nt, Artificial Sequence
  Description of Artificial Sequence: Synthetic oligonucleotide
aaucacaugaaauaauuug

SEQ ID NO: 1386933 - RNA, 19 nt, Artificial Sequence
  Description of Artificial Sequence: Synthetic oligonucleotide
aucguuuucacucuuacac

SEQ ID NO: 1386934 - RNA, 19 nt, Artificial Sequence
  Description of Artificial Sequence: Synthetic oligonucleotide
ugaguuucuauauugacag

SEQ ID NO: 1386935 - RNA, 19 nt, Artificial Sequence
  Description of Artificial Sequence: Synthetic oligonucleotide
aauccaagauaccucauac

SEQ ID NO: 1386936 - RNA, 19 nt, Artificial Sequence
  Description of Artificial Sequence: Synthetic oligonucleotide
aaguaggucacuuaauuag

SEQ ID NO: 1386937 - RNA, 19 nt, Artificial Sequence
  Description of Artificial Sequence: Synthetic oligonucleotide
acaacuaaaggcuagggag

SEQ ID NO: 1386938 - RNA, 19 nt, Artificial Sequence
  Description of Artificial Sequence: Synthetic oligonucleotide
aaagucauaaauauuagcu

SEQ ID NO: 1386939 - RNA, 19 nt, Artificial Sequence
  Description of Artificial Sequence: Synthetic oligonucleotide
auuaguucaagaaauauuc

SEQ ID NO: 1386940 - RNA, 19 nt, Artificial Sequence
  Description of Artificial Sequence: Synthetic oligonucleotide
aagucauaaauauuagcuc

SEQ ID NO: 1386941 - RNA, 19 nt, Artificial Sequence
  Description of Artificial Sequence: Synthetic oligonucleotide
uaugcuauuuucaaugugc

SEQ ID NO: 1386942 - RNA, 19 nt, Artificial Sequence
  Description of Artificial Sequence: Synthetic oligonucleotide
auuaagauuaaacauuaug

SEQ ID NO: 1386943 - RNA, 19 nt, Artificial Sequence
  Description of Artificial Sequence: Synthetic oligonucleotide
uuucauauaggguaguaag

SEQ ID NO: 1386944 - RNA, 19 nt, Artificial Sequence
  Description of Artificial Sequence: Synthetic oligonucleotide
caagauaccucauacauag

SEQ ID NO: 1386945 - RNA, 19 nt, Artificial Sequence
  Description of Artificial Sequence: Synthetic oligonucleotide
uucacucuuacacagcugg

SEQ ID NO: 1386946 - RNA, 19 nt, Artificial Sequence
  Description of Artificial Sequence: Synthetic oligonucleotide
cauauuaauaaccugugag

SEQ ID NO: 1386947 - RNA, 19 nt, Artificial Sequence
  Description of Artificial Sequence: Synthetic oligonucleotide
aaagcuauuuuaagaaacc

SEQ ID NO: 1386948 - RNA, 19 nt, Artificial Sequence
  Description of Artificial Sequence: Synthetic oligonucleotide
aaguaaaacgaaaaguagg

SEQ ID NO: 1386949 - RNA, 19 nt, Artificial Sequence
  Description of Artificial Sequence: Synthetic oligonucleotide
uuuuaagaaaccaaagguc

SEQ ID NO: 1386950 - RNA, 19 nt, Artificial Sequence
  Description of Artificial Sequence: Synthetic oligonucleotide
ucaccaaacagucaaaaga

SEQ ID NO: 1386951 - RNA, 19 nt, Artificial Sequence
  Description of Artificial Sequence: Synthetic oligonucleotide
cauuaacuuaguauuaacg

SEQ ID NO: 1386952 - RNA, 19 nt, Artificial Sequence
  Description of Artificial Sequence: Synthetic oligonucleotide
ucuaguaguaaacuguaug

SEQ ID NO: 1386953 - RNA, 19 nt, Artificial Sequence
  Description of Artificial Sequence: Synthetic oligonucleotide
aguuccuaauauuaaaguc

SEQ ID NO: 1386954 - RNA, 19 nt, Artificial Sequence
  Description of Artificial Sequence: Synthetic oligonucleotide
aggucuacauauuugaauc

SEQ ID NO: 1386955 - RNA, 19 nt, Artificial Sequence
  Description of Artificial Sequence: Synthetic oligonucleotide
agaugaaagugccaggucg

SEQ ID NO: 1386956 - RNA, 19 nt, Artificial Sequence
  Description of Artificial Sequence: Synthetic oligonucleotide
aagcugucuaaguacaacg

SEQ ID NO: 1386957 - RNA, 19 nt, Artificial Sequence
  Description of Artificial Sequence: Synthetic oligonucleotide
uucgaagaauccaagauac

SEQ ID NO: 1386958 - RNA, 19 nt, Artificial Sequence
  Description of Artificial Sequence: Synthetic oligonucleotide
aaaacgaaaaguaggucac

SEQ ID NO: 1386959 - RNA, 19 nt, Artificial Sequence
  Description of Artificial Sequence: Synthetic oligonucleotide
ucauacauaggucaguacu

SEQ ID NO: 1386960 - RNA, 19 nt, Artificial Sequence
  Description of Artificial Sequence: Synthetic oligonucleotide
uuugaauccccugagaacc

SEQ ID NO: 1386961 - RNA, 19 nt, Artificial Sequence
  Description of Artificial Sequence: Synthetic oligonucleotide
cauuaugcuauuuucaaug

SEQ ID NO: 1386962 - RNA, 19 nt, Artificial Sequence
  Description of Artificial Sequence: Synthetic oligonucleotide
ucaaaagacccuuuguaag

SEQ ID NO: 1386963 - RNA, 19 nt, Artificial Sequence
  Description of Artificial Sequence: Synthetic oligonucleotide
ugaguuacaaaguuuacaa

SEQ ID NO: 1386964 - RNA, 19 nt, Artificial Sequence
  Description of Artificial Sequence: Synthetic oligonucleotide
uuaacuuaguauuaacgga

SEQ ID NO: 1386965 - RNA, 19 nt, Artificial Sequence
  Description of Artificial Sequence: Synthetic oligonucleotide
aauuaggccuguuugucag

SEQ ID NO: 1386966 - RNA, 19 nt, Artificial Sequence
  Description of Artificial Sequence: Synthetic oligonucleotide
ucuugaaugcgccucagcc

SEQ ID NO: 1386967 - RNA, 19 nt, Artificial Sequence
  Description of Artificial Sequence: Synthetic oligonucleotide
uuggacaaggcuuaaaacu

SEQ ID NO: 1386968 - RNA, 19 nt, Artificial Sequence
  Description of Artificial Sequence: Synthetic oligonucleotide
aguaagauuaucauuaacu

SEQ ID NO: 1386969 - RNA, 19 nt, Artificial Sequence
  Description of Artificial Sequence: Synthetic oligonucleotide
aagauuaaacauuaugcua

SEQ ID NO: 1386970 - RNA, 19 nt, Artificial Sequence
  Description of Artificial Sequence: Synthetic oligonucleotide
aaaaguaggucacuuaauu

SEQ ID NO: 1386971 - RNA, 19 nt, Artificial Sequence
  Description of Artificial Sequence: Synthetic oligonucleotide
aaguacaacggcuucugag

SEQ ID NO: 1386972 - RNA, 19 nt, Artificial Sequence
  Description of Artificial Sequence: Synthetic oligonucleotide
auaaagaucacauguaaua

SEQ ID NO: 1386973 - RNA, 19 nt, Artificial Sequence
  Description of Artificial Sequence: Synthetic oligonucleotide
uuaauuuggccaucaaagc

SEQ ID NO: 1386974 - RNA, 19 nt, Artificial Sequence
  Description of Artificial Sequence: Synthetic oligonucleotide
aacauuaugcuauuuucaa

SEQ ID NO: 1386975 - RNA, 19 nt, Artificial Sequence
  Description of Artificial Sequence: Synthetic oligonucleotide
aaguuccuaauauuaaagu

SEQ ID NO: 1386976 - RNA, 19 nt, Artificial Sequence
  Description of Artificial Sequence: Synthetic oligonucleotide
aaggcaaccuaauuaauaa

SEQ ID NO: 1386977 - RNA, 19 nt, Artificial Sequence
  Description of Artificial Sequence: Synthetic oligonucleotide
uaacuuaguauuaacggaa

SEQ ID NO: 1386978 - RNA, 19 nt, Artificial Sequence
  Description of Artificial Sequence: Synthetic oligonucleotide
uggacaaggcuuaaaacug

SEQ ID NO: 1386979 - RNA, 19 nt, Artificial Sequence
  Description of Artificial Sequence: Synthetic oligonucleotide
aguaaacuguaugacgucc

SEQ ID NO: 1386980 - RNA, 19 nt, Artificial Sequence
  Description of Artificial Sequence: Synthetic oligonucleotide
uauuauuacaaagacuccu

SEQ ID NO: 1386981 - RNA, 19 nt, Artificial Sequence
  Description of Artificial Sequence: Synthetic oligonucleotide
aacagcucuaccauuagag

SEQ ID NO: 1386982 - RNA, 19 nt, Artificial Sequence
  Description of Artificial Sequence: Synthetic oligonucleotide
  modified_base (8)..(8): a, c, u, g, unknown or other
aaaagggnguguuuuaaaa

SEQ ID NO: 1386983 - RNA, 19 nt, Artificial Sequence
  Description of Artificial Sequence: Synthetic oligonucleotide
uccaagauaccucauacau

SEQ ID NO: 1386984 - RNA, 19 nt, Artificial Sequence
  Description of Artificial Sequence: Synthetic oligonucleotide
uguauuuguucccuuguca

SEQ ID NO: 1386985 - RNA, 19 nt, Artificial Sequence
  Description of Artificial Sequence: Synthetic oligonucleotide
uguucaauccccagcgggg

SEQ ID NO: 1386986 - RNA, 19 nt, Artificial Sequence
  Description of Artificial Sequence: Synthetic oligonucleotide
cuaucuuccaaaaguagac

SEQ ID NO: 1386987 - RNA, 19 nt, Artificial Sequence
  Description of Artificial Sequence: Synthetic oligonucleotide
acaaagacuccuuugggug

SEQ ID NO: 1386988 - RNA, 19 nt, Artificial Sequence
  Description of Artificial Sequence: Synthetic oligonucleotide
uuaccauaacuccucaaug

SEQ ID NO: 1386989 - RNA, 19 nt, Artificial Sequence
  Description of Artificial Sequence: Synthetic oligonucleotide
uuucuauauugacagaaau

SEQ ID NO: 1386990 - RNA, 19 nt, Artificial Sequence
  Description of Artificial Sequence: Synthetic oligonucleotide
agauaccucauacauaggu

SEQ ID NO: 1386991 - RNA, 19 nt, Artificial Sequence
  Description of Artificial Sequence: Synthetic oligonucleotide
accggcuuaaaucacauga

SEQ ID NO: 1386992 - RNA, 19 nt, Artificial Sequence
  Description of Artificial Sequence: Synthetic oligonucleotide
uaccauaacuccucaaugc

SEQ ID NO: 1386993 - RNA, 19 nt, Artificial Sequence
  Description of Artificial Sequence: Synthetic oligonucleotide
uucugaguuacaaaguuua

SEQ ID NO: 1386994 - RNA, 19 nt, Artificial Sequence
  Description of Artificial Sequence: Synthetic oligonucleotide
ugugagugaaacuaucuuc

SEQ ID NO: 1386995 - RNA, 19 nt, Artificial Sequence
  Description of Artificial Sequence: Synthetic oligonucleotide
uucauauaggguaguaaga

SEQ ID NO: 1386996 - RNA, 19 nt, Artificial Sequence
  Description of Artificial Sequence: Synthetic oligonucleotide
guugagaugaaagugccag

SEQ ID NO: 1386997 - RNA, 19 nt, Artificial Sequence
  Description of Artificial Sequence: Synthetic oligonucleotide
aaaagacccuuuguaaguc

SEQ ID NO: 1386998 - RNA, 19 nt, Artificial Sequence
  Description of Artificial Sequence: Synthetic oligonucleotide
ucuaaguuccuaauauuaa

SEQ ID NO: 1386999 - RNA, 19 nt, Artificial Sequence
  Description of Artificial Sequence: Synthetic oligonucleotide
aaggucuacauauuugaau

SEQ ID NO: 1387000 - RNA, 19 nt, Artificial Sequence
  Description of Artificial Sequence: Synthetic oligonucleotide
uuaacuagcgcaucauacu

SEQ ID NO: 1387001 - RNA, 19 nt, Artificial Sequence
  Description of Artificial Sequence: Synthetic oligonucleotide
auaccucauacauagguca

SEQ ID NO: 1387002 - RNA, 19 nt, Artificial Sequence
  Description of Artificial Sequence: Synthetic oligonucleotide
cauuagaguuccaaagacc

SEQ ID NO: 1387003 - RNA, 19 nt, Artificial Sequence
  Description of Artificial Sequence: Synthetic oligonucleotide
aaaggggaaggagagaugu

SEQ ID NO: 1387004 - RNA, 19 nt, Artificial Sequence
  Description of Artificial Sequence: Synthetic oligonucleotide
aucugaugaggacugacag

SEQ ID NO: 1387005 - RNA, 19 nt, Artificial Sequence
  Description of Artificial Sequence: Synthetic oligonucleotide
auuagaguuccaaagacca

SEQ ID NO: 1387006 - RNA, 19 nt, Artificial Sequence
  Description of Artificial Sequence: Synthetic oligonucleotide
ucaguacugggauaagaag

SEQ ID NO: 1387007 - RNA, 19 nt, Artificial Sequence
  Description of Artificial Sequence: Synthetic oligonucleotide
uacugggauaagaagacac

SEQ ID NO: 1387008 - RNA, 19 nt, Artificial Sequence
  Description of Artificial Sequence: Synthetic oligonucleotide
uuaauaaccugugagugaa

SEQ ID NO: 1387009 - RNA, 19 nt, Artificial Sequence
  Description of Artificial Sequence: Synthetic oligonucleotide
gauacgcagagccaacucc

SEQ ID NO: 1387010 - RNA, 19 nt, Artificial Sequence
  Description of Artificial Sequence: Synthetic oligonucleotide
aguaaaacgaaaaguaggu

SEQ ID NO: 1387011 - RNA, 19 nt, Artificial Sequence
  Description of Artificial Sequence: Synthetic oligonucleotide
aaaacuucgaagaauccaa

SEQ ID NO: 1387012 - RNA, 19 nt, Artificial Sequence
  Description of Artificial Sequence: Synthetic oligonucleotide
uacaaaacagcucuaccau

SEQ ID NO: 1387013 - RNA, 19 nt, Artificial Sequence
  Description of Artificial Sequence: Synthetic oligonucleotide
aaaguaggucacuuaauua

SEQ ID NO: 1387014 - RNA, 19 nt, Artificial Sequence
  Description of Artificial Sequence: Synthetic oligonucleotide
caacuaaaggcuagggagg

SEQ ID NO: 1387015 - RNA, 19 nt, Artificial Sequence
  Description of Artificial Sequence: Synthetic oligonucleotide
agaaguaaaacgaaaagua

SEQ ID NO: 1387016 - RNA, 19 nt, Artificial Sequence
  Description of Artificial Sequence: Synthetic oligonucleotide
aacuaaaggcuagggaggg

SEQ ID NO: 1387017 - RNA, 19 nt, Artificial Sequence
  Description of Artificial Sequence: Synthetic oligonucleotide
cauacauaggucaguacug

SEQ ID NO: 1387018 - RNA, 19 nt, Artificial Sequence
  Description of Artificial Sequence: Synthetic oligonucleotide
aguacaacggcuucugagu

SEQ ID NO: 1387019 - RNA, 19 nt, Artificial Sequence
  Description of Artificial Sequence: Synthetic oligonucleotide
uuaugcuauuuucaaugug

SEQ ID NO: 1387020 - RNA, 19 nt, Artificial Sequence
  Description of Artificial Sequence: Synthetic oligonucleotide
uguaugacgucccugguuu

SEQ ID NO: 1387021 - RNA, 19 nt, Artificial Sequence
  Description of Artificial Sequence: Synthetic oligonucleotide
uuuggacaaggcuuaaaac

SEQ ID NO: 1387022 - RNA, 19 nt, Artificial Sequence
  Description of Artificial Sequence: Synthetic oligonucleotide
auuuggacaaggcuuaaaa

SEQ ID NO: 1387023 - RNA, 19 nt, Artificial Sequence
  Description of Artificial Sequence: Synthetic oligonucleotide
guauuaacggaaugauuag

SEQ ID NO: 1387024 - RNA, 19 nt, Artificial Sequence
  Description of Artificial Sequence: Synthetic oligonucleotide
cucaaugcaguuuugucuc

SEQ ID NO: 1387025 - RNA, 19 nt, Artificial Sequence
  Description of Artificial Sequence: Synthetic oligonucleotide
agcacaccggcuuaaauca

SEQ ID NO: 1387026 - RNA, 19 nt, Artificial Sequence
  Description of Artificial Sequence: Synthetic oligonucleotide
agaaccauauuaauaaccu

SEQ ID NO: 1387027 - RNA, 19 nt, Artificial Sequence
  Description of Artificial Sequence: Synthetic oligonucleotide
uacaaagacuccuuugggu

SEQ ID NO: 1387028 - RNA, 19 nt, Artificial Sequence
  Description of Artificial Sequence: Synthetic oligonucleotide
uuccgagucuuuuaacuag

SEQ ID NO: 1387029 - RNA, 19 nt, Artificial Sequence
  Description of Artificial Sequence: Synthetic oligonucleotide
auuaugcuauuuucaaugu

SEQ ID NO: 1387030 - RNA, 19 nt, Artificial Sequence
  Description of Artificial Sequence: Synthetic oligonucleotide
ugcgccucaucacugauga

SEQ ID NO: 1387031 - RNA, 19 nt, Artificial Sequence
  Description of Artificial Sequence: Synthetic oligonucleotide
gucagacucguucugggcg

SEQ ID NO: 1387032 - RNA, 19 nt, Artificial Sequence
  Description of Artificial Sequence: Synthetic oligonucleotide
uuaguauuaacggaaugau

SEQ ID NO: 1387033 - RNA, 19 nt, Artificial Sequence
  Description of Artificial Sequence: Synthetic oligonucleotide
uggguguuaccauaacucc

SEQ ID NO: 1387034 - RNA, 19 nt, Artificial Sequence
  Description of Artificial Sequence: Synthetic oligonucleotide
uccccugagaaccauauua

SEQ ID NO: 1387035 - RNA, 19 nt, Artificial Sequence
  Description of Artificial Sequence: Synthetic oligonucleotide
uaacuagcgcaucauacuc

SEQ ID NO: 1387036 - RNA, 19 nt, Artificial Sequence
  Description of Artificial Sequence: Synthetic oligonucleotide
aggucacuuaauuaggccu

SEQ ID NO: 1387037 - RNA, 19 nt, Artificial Sequence
  Description of Artificial Sequence: Synthetic oligonucleotide
aauaaagaucacauguaau

SEQ ID NO: 1387038 - RNA, 19 nt, Artificial Sequence
  Description of Artificial Sequence: Synthetic oligonucleotide
uugaaugcgccucagccuc

SEQ ID NO: 1387039 - RNA, 19 nt, Artificial Sequence
  Description of Artificial Sequence: Synthetic oligonucleotide
ucacaguugagaugaaagu

SEQ ID NO: 1387040 - RNA, 19 nt, Artificial Sequence
  Description of Artificial Sequence: Synthetic oligonucleotide
uuuccagaaguaaaacgaa

SEQ ID NO: 1387041 - RNA, 19 nt, Artificial Sequence
  Description of Artificial Sequence: Synthetic oligonucleotide
uaaccugugagugaaacua

SEQ ID NO: 1387042 - RNA, 19 nt, Artificial Sequence
  Description of Artificial Sequence: Synthetic oligonucleotide
ggugacuuuaauuuggcca

SEQ ID NO: 1387043 - RNA, 19 nt, Artificial Sequence
  Description of Artificial Sequence: Synthetic oligonucleotide
ccaaacagucaaaagaccc

SEQ ID NO: 1387044 - RNA, 19 nt, Artificial Sequence
  Description of Artificial Sequence: Synthetic oligonucleotide
ugagaugaaagugccaggu

SEQ ID NO: 1387045 - RNA, 19 nt, Artificial Sequence
  Description of Artificial Sequence: Synthetic oligonucleotide
uaguaagauuaucauuaac

SEQ ID NO: 1387046 - RNA, 19 nt, Artificial Sequence
  Description of Artificial Sequence: Synthetic oligonucleotide
uaauuaggccuguuuguca

SEQ ID NO: 1387047 - RNA, 19 nt, Artificial Sequence
  Description of Artificial Sequence: Synthetic oligonucleotide
cuaauugucuccuggaaaa

SEQ ID NO: 1387048 - RNA, 19 nt, Artificial Sequence
  Description of Artificial Sequence: Synthetic oligonucleotide
guguucaauccccagcggg

SEQ ID NO: 1387049 - RNA, 19 nt, Artificial Sequence
  Description of Artificial Sequence: Synthetic oligonucleotide
aauauuagcuccagcugcu

SEQ ID NO: 1387050 - RNA, 19 nt, Artificial Sequence
  Description of Artificial Sequence: Synthetic oligonucleotide
aguaggucacuuaauuagg

SEQ ID NO: 1387051 - RNA, 19 nt, Artificial Sequence
  Description of Artificial Sequence: Synthetic oligonucleotide
ucugaugaggacugacagc

SEQ ID NO: 1387052 - RNA, 19 nt, Artificial Sequence
  Description of Artificial Sequence: Synthetic oligonucleotide
aaagacccuuuguaagucu

SEQ ID NO: 1387053 - RNA, 19 nt, Artificial Sequence
  Description of Artificial Sequence: Synthetic oligonucleotide
uagacaacuaaaggcuagg

SEQ ID NO: 1387054 - RNA, 19 nt, Artificial Sequence
  Description of Artificial Sequence: Synthetic oligonucleotide
auauaggguaguaagauua

SEQ ID NO: 1387055 - RNA, 19 nt, Artificial Sequence
  Description of Artificial Sequence: Synthetic oligonucleotide
uuaauuaggccuguuuguc

SEQ ID NO: 1387056 - RNA, 19 nt, Artificial Sequence
  Description of Artificial Sequence: Synthetic oligonucleotide
accauaacuccucaaugca

SEQ ID NO: 1387057 - RNA, 19 nt, Artificial Sequence
  Description of Artificial Sequence: Synthetic oligonucleotide
gguaguaagauuaucauua

SEQ ID NO: 1387058 - RNA, 19 nt, Artificial Sequence
  Description of Artificial Sequence: Synthetic oligonucleotide
gacaacuaaaggcuaggga

SEQ ID NO: 1387059 - RNA, 19 nt, Artificial Sequence
  Description of Artificial Sequence: Synthetic oligonucleotide
ggcaaccuaauuaauaaag

SEQ ID NO: 1387060 - RNA, 19 nt, Artificial Sequence
  Description of Artificial Sequence: Synthetic oligonucleotide
ugucccugcacuccugugc

SEQ ID NO: 1387061 - RNA, 19 nt, Artificial Sequence
  Description of Artificial Sequence: Synthetic oligonucleotide
acuaucuuccaaaaguaga

SEQ ID NO: 1387062 - RNA, 19 nt, Artificial Sequence
  Description of Artificial Sequence: Synthetic oligonucleotide
uagcgcaucauacucuuuc

SEQ ID NO: 1387063 - RNA, 19 nt, Artificial Sequence
  Description of Artificial Sequence: Synthetic oligonucleotide
caguacugggauaagaaga

SEQ ID NO: 1387064 - RNA, 19 nt, Artificial Sequence
  Description of Artificial Sequence: Synthetic oligonucleotide
uaaacuguaugacgucccu

SEQ ID NO: 1387065 - RNA, 19 nt, Artificial Sequence
  Description of Artificial Sequence: Synthetic oligonucleotide
uaccucauacauaggucag

SEQ ID NO: 1387066 - RNA, 19 nt, Artificial Sequence
  Description of Artificial Sequence: Synthetic oligonucleotide
uccgagucuuuuaacuagc

SEQ ID NO: 1387067 - RNA, 19 nt, Artificial Sequence
  Description of Artificial Sequence: Synthetic oligonucleotide
uguaagucucucgggauug

SEQ ID NO: 1387068 - RNA, 19 nt, Artificial Sequence
  Description of Artificial Sequence: Synthetic oligonucleotide
ucugaguuacaaaguuuac

SEQ ID NO: 1387069 - RNA, 19 nt, Artificial Sequence
  Description of Artificial Sequence: Synthetic oligonucleotide
gaugaaagugccaggucgc

SEQ ID NO: 1387070 - RNA, 19 nt, Artificial Sequence
  Description of Artificial Sequence: Synthetic oligonucleotide
gaagaauccaagauaccuc

SEQ ID NO: 1387071 - RNA, 19 nt, Artificial Sequence
  Description of Artificial Sequence: Synthetic oligonucleotide
cauuuauaucuccuuggug

SEQ ID NO: 1387072 - RNA, 19 nt, Artificial Sequence
  Description of Artificial Sequence: Synthetic oligonucleotide
uauuaacggaaugauuagu

SEQ ID NO: 1387073 - RNA, 19 nt, Artificial Sequence
  Description of Artificial Sequence: Synthetic oligonucleotide
ugccaggucgcucugcgcc

SEQ ID NO: 1387074 - RNA, 19 nt, Artificial Sequence
  Description of Artificial Sequence: Synthetic oligonucleotide
uuuguaagucucucgggau

SEQ ID NO: 1387075 - RNA, 19 nt, Artificial Sequence
  Description of Artificial Sequence: Synthetic oligonucleotide
ggaaugauuaguucaagaa

SEQ ID NO: 1387076 - RNA, 19 nt, Artificial Sequence
  Description of Artificial Sequence: Synthetic oligonucleotide
aaacuucgaagaauccaag

SEQ ID NO: 1387077 - RNA, 19 nt, Artificial Sequence
  Description of Artificial Sequence: Synthetic oligonucleotide
uauaggguaguaagauuau

SEQ ID NO: 1387078 - RNA, 19 nt, Artificial Sequence
  Description of Artificial Sequence: Synthetic oligonucleotide
aagacccuuuguaagucuc

SEQ ID NO: 1387079 - RNA, 19 nt, Artificial Sequence
  Description of Artificial Sequence: Synthetic oligonucleotide
agaauagggaaaggggaag

SEQ ID NO: 1387080 - RNA, 19 nt, Artificial Sequence
  Description of Artificial Sequence: Synthetic oligonucleotide
aaugcaguuuugucucuaa

SEQ ID NO: 1387081 - RNA, 19 nt, Artificial Sequence
  Description of Artificial Sequence: Synthetic oligonucleotide
aggguaguaagauuaucau

SEQ ID NO: 1387082 - RNA, 19 nt, Artificial Sequence
  Description of Artificial Sequence: Synthetic oligonucleotide
gauaccucauacauagguc

SEQ ID NO: 1387083 - RNA, 19 nt, Artificial Sequence
  Description of Artificial Sequence: Synthetic oligonucleotide
guggucuaguaguaaacug

SEQ ID NO: 1387084 - RNA, 19 nt, Artificial Sequence
  Description of Artificial Sequence: Synthetic oligonucleotide
ucccugguuuucuacaacu

SEQ ID NO: 1387085 - RNA, 19 nt, Artificial Sequence
  Description of Artificial Sequence: Synthetic oligonucleotide
cucuaaguuccuaauauua

SEQ ID NO: 1387086 - RNA, 19 nt, Artificial Sequence
  Description of Artificial Sequence: Synthetic oligonucleotide
ugucucuaaguuccuaaua

SEQ ID NO: 1387087 - RNA, 19 nt, Artificial Sequence
  Description of Artificial Sequence: Synthetic oligonucleotide
auggugacuuuaauuuggc

SEQ ID NO: 1387088 - RNA, 19 nt, Artificial Sequence
  Description of Artificial Sequence: Synthetic oligonucleotide
ucgaagaauccaagauacc

SEQ ID NO: 1387089 - RNA, 19 nt, Artificial Sequence
  Description of Artificial Sequence: Synthetic oligonucleotide
acauuaugcuauuuucaau

SEQ ID NO: 1387090 - RNA, 19 nt, Artificial Sequence
  Description of Artificial Sequence: Synthetic oligonucleotide
aucuuccgagucuuuuaac

SEQ ID NO: 1387091 - RNA, 19 nt, Artificial Sequence
  Description of Artificial Sequence: Synthetic oligonucleotide
uccuaauugucuccuggaa

SEQ ID NO: 1387092 - RNA, 19 nt, Artificial Sequence
  Description of Artificial Sequence: Synthetic oligonucleotide
guagacaacuaaaggcuag

SEQ ID NO: 1387093 - RNA, 19 nt, Artificial Sequence
  Description of Artificial Sequence: Synthetic oligonucleotide
auuaacggaaugauuaguu

SEQ ID NO: 1387094 - RNA, 19 nt, Artificial Sequence
  Description of Artificial Sequence: Synthetic oligonucleotide
agcugucuaaguacaacgg

SEQ ID NO: 1387095 - RNA, 19 nt, Artificial Sequence
  Description of Artificial Sequence: Synthetic oligonucleotide
uauuuguucccuugucauc

SEQ ID NO: 1387096 - RNA, 19 nt, Artificial Sequence
  Description of Artificial Sequence: Synthetic oligonucleotide
accauauuaauaaccugug

SEQ ID NO: 1387097 - RNA, 19 nt, Artificial Sequence
  Description of Artificial Sequence: Synthetic oligonucleotide
aaacagucaaaagacccuu

SEQ ID NO: 1387098 - RNA, 19 nt, Artificial Sequence
  Description of Artificial Sequence: Synthetic oligonucleotide
agacaacuaaaggcuaggg

SEQ ID NO: 1387099 - RNA, 19 nt, Artificial Sequence
  Description of Artificial Sequence: Synthetic oligonucleotide
uaaaggcuagggaggggcc

SEQ ID NO: 1387100 - RNA, 19 nt, Artificial Sequence
  Description of Artificial Sequence: Synthetic oligonucleotide
aacggaaugauuaguucaa

SEQ ID NO: 1387101 - RNA, 19 nt, Artificial Sequence
  Description of Artificial Sequence: Synthetic oligonucleotide
ugguggucuaguaguaaac

SEQ ID NO: 1387102 - RNA, 19 nt, Artificial Sequence
  Description of Artificial Sequence: Synthetic oligonucleotide
aacucccugucccugcacu

SEQ ID NO: 1387103 - RNA, 19 nt, Artificial Sequence
  Description of Artificial Sequence: Synthetic oligonucleotide
caugaaacaagcugucuaa

SEQ ID NO: 1387104 - RNA, 19 nt, Artificial Sequence
  Description of Artificial Sequence: Synthetic oligonucleotide
acagcucuaccauuagagu

SEQ ID NO: 1387105 - RNA, 19 nt, Artificial Sequence
  Description of Artificial Sequence: Synthetic oligonucleotide
caaacaaagcaucguuuuc

SEQ ID NO: 1387106 - RNA, 19 nt, Artificial Sequence
  Description of Artificial Sequence: Synthetic oligonucleotide
acccuuuguaagucucucg

SEQ ID NO: 1387107 - RNA, 19 nt, Artificial Sequence
  Description of Artificial Sequence: Synthetic oligonucleotide
cagcacaccggcuuaaauc

SEQ ID NO: 1387108 - RNA, 19 nt, Artificial Sequence
  Description of Artificial Sequence: Synthetic oligonucleotide
  modified_base (10)..(10): a, c, u, g, unknown or other
acaaaagggnguguuuuaa

SEQ ID NO: 1387109 - RNA, 19 nt, Artificial Sequence
  Description of Artificial Sequence: Synthetic oligonucleotide
cuaaguacaacggcuucug

SEQ ID NO: 1387110 - RNA, 19 nt, Artificial Sequence
  Description of Artificial Sequence: Synthetic oligonucleotide
ucagacucguucugggcga

SEQ ID NO: 1387111 - RNA, 19 nt, Artificial Sequence
  Description of Artificial Sequence: Synthetic oligonucleotide
guaggucacuuaauuaggc

SEQ ID NO: 1387112 - RNA, 19 nt, Artificial Sequence
  Description of Artificial Sequence: Synthetic oligonucleotide
ucucuaaguuccuaauauu

SEQ ID NO: 1387113 - RNA, 19 nt, Artificial Sequence
  Description of Artificial Sequence: Synthetic oligonucleotide
ccagaaguaaaacgaaaag

SEQ ID NO: 1387114 - RNA, 19 nt, Artificial Sequence
  Description of Artificial Sequence: Synthetic oligonucleotide
auaauuuggacaaggcuua

SEQ ID NO: 1387115 - RNA, 19 nt, Artificial Sequence
  Description of Artificial Sequence: Synthetic oligonucleotide
uggugacuuuaauuuggcc

SEQ ID NO: 1387116 - RNA, 19 nt, Artificial Sequence
  Description of Artificial Sequence: Synthetic oligonucleotide
uccgcgguagugccuagcc

SEQ ID NO: 1387117 - RNA, 19 nt, Artificial Sequence
  Description of Artificial Sequence: Synthetic oligonucleotide
cucguucugggcgauacgc

SEQ ID NO: 1387118 - RNA, 19 nt, Artificial Sequence
  Description of Artificial Sequence: Synthetic oligonucleotide
augcucagaauagggaaag

SEQ ID NO: 1387119 - RNA, 19 nt, Artificial Sequence
  Description of Artificial Sequence: Synthetic oligonucleotide
ucucaaguuucauccgccu

SEQ ID NO: 1387120 - RNA, 19 nt, Artificial Sequence
  Description of Artificial Sequence: Synthetic oligonucleotide
cuauauugacagaaauuaa

SEQ ID NO: 1387121 - RNA, 19 nt, Artificial Sequence
  Description of Artificial Sequence: Synthetic oligonucleotide
auccaagauaccucauaca

SEQ ID NO: 1387122 - RNA, 19 nt, Artificial Sequence
  Description of Artificial Sequence: Synthetic oligonucleotide
uuguaagucucucgggauu

SEQ ID NO: 1387123 - RNA, 19 nt, Artificial Sequence
  Description of Artificial Sequence: Synthetic oligonucleotide
ggucuacauauuugaaucc

SEQ ID NO: 1387124 - RNA, 19 nt, Artificial Sequence
  Description of Artificial Sequence: Synthetic oligonucleotide
ugacagaaauuaagauuaa

SEQ ID NO: 1387125 - RNA, 19 nt, Artificial Sequence
  Description of Artificial Sequence: Synthetic oligonucleotide
uaguaaacuguaugacguc

SEQ ID NO: 1387126 - RNA, 19 nt, Artificial Sequence
  Description of Artificial Sequence: Synthetic oligonucleotide
ucgggauuggcugagcaaa

SEQ ID NO: 1387127 - RNA, 19 nt, Artificial Sequence
  Description of Artificial Sequence: Synthetic oligonucleotide
gaggucagacucguucugg

SEQ ID NO: 1387128 - RNA, 19 nt, Artificial Sequence
  Description of Artificial Sequence: Synthetic oligonucleotide
uccucuugaaugcgccuca

SEQ ID NO: 1387129 - RNA, 19 nt, Artificial Sequence
  Description of Artificial Sequence: Synthetic oligonucleotide
uugaauccccugagaacca

SEQ ID NO: 1387130 - RNA, 19 nt, Artificial Sequence
  Description of Artificial Sequence: Synthetic oligonucleotide
aguugaguuucuauauuga

SEQ ID NO: 1387131 - RNA, 19 nt, Artificial Sequence
  Description of Artificial Sequence: Synthetic oligonucleotide
cuuugcucguccucuucgc

SEQ ID NO: 1387132 - RNA, 19 nt, Artificial Sequence
  Description of Artificial Sequence: Synthetic oligonucleotide
gaauccaagauaccucaua

SEQ ID NO: 1387133 - RNA, 19 nt, Artificial Sequence
  Description of Artificial Sequence: Synthetic oligonucleotide
cuuaauuaggccuguuugu

SEQ ID NO: 1387134 - RNA, 19 nt, Artificial Sequence
  Description of Artificial Sequence: Synthetic oligonucleotide
aacuagcgcaucauacucu

SEQ ID NO: 1387135 - RNA, 19 nt, Artificial Sequence
  Description of Artificial Sequence: Synthetic oligonucleotide
aacggcuucugaguuacaa

SEQ ID NO: 1387136 - RNA, 19 nt, Artificial Sequence
  Description of Artificial Sequence: Synthetic oligonucleotide
guuaccauaacuccucaau

SEQ ID NO: 1387137 - RNA, 19 nt, Artificial Sequence
  Description of Artificial Sequence: Synthetic oligonucleotide
cacucuuacacagcuggag

SEQ ID NO: 1387138 - RNA, 19 nt, Artificial Sequence
  Description of Artificial Sequence: Synthetic oligonucleotide
guagugccuagccugugug

SEQ ID NO: 1387139 - RNA, 19 nt, Artificial Sequence
  Description of Artificial Sequence: Synthetic oligonucleotide
gagugaaacuaucuuccaa

SEQ ID NO: 1387140 - RNA, 19 nt, Artificial Sequence
  Description of Artificial Sequence: Synthetic oligonucleotide
guaaaacgaaaaguagguc

SEQ ID NO: 1387141 - RNA, 19 nt, Artificial Sequence
  Description of Artificial Sequence: Synthetic oligonucleotide
gacacugcugugaauuuuc

SEQ ID NO: 1387142 - RNA, 19 nt, Artificial Sequence
  Description of Artificial Sequence: Synthetic oligonucleotide
cugaguuacaaaguuuaca

SEQ ID NO: 1387143 - RNA, 19 nt, Artificial Sequence
  Description of Artificial Sequence: Synthetic oligonucleotide
gagaugaaagugccagguc

SEQ ID NO: 1387144 - RNA, 19 nt, Artificial Sequence
  Description of Artificial Sequence: Synthetic oligonucleotide
acaaaacagcucuaccauu

SEQ ID NO: 1387145 - RNA, 19 nt, Artificial Sequence
  Description of Artificial Sequence: Synthetic oligonucleotide
gcugucuaaguacaacggc

SEQ ID NO: 1387146 - RNA, 19 nt, Artificial Sequence
  Description of Artificial Sequence: Synthetic oligonucleotide
aagauaccucauacauagg

SEQ ID NO: 1387147 - RNA, 19 nt, Artificial Sequence
  Description of Artificial Sequence: Synthetic oligonucleotide
agucuuuuaacuagcgcau

SEQ ID NO: 1387148 - RNA, 19 nt, Artificial Sequence
  Description of Artificial Sequence: Synthetic oligonucleotide
  modified_base (16)..(16): a, c, u, g, unknown or other
cagcacacaaaagggngug

SEQ ID NO: 1387149 - RNA, 19 nt, Artificial Sequence
  Description of Artificial Sequence: Synthetic oligonucleotide
gucucuaaguuccuaauau

SEQ ID NO: 1387150 - RNA, 19 nt, Artificial Sequence
  Description of Artificial Sequence: Synthetic oligonucleotide
caagcugucuaaguacaac

SEQ ID NO: 1387151 - RNA, 19 nt, Artificial Sequence
  Description of Artificial Sequence: Synthetic oligonucleotide
ugcuauuuucaaugugcau

SEQ ID NO: 1387152 - RNA, 19 nt, Artificial Sequence
  Description of Artificial Sequence: Synthetic oligonucleotide
aauuuggacaaggcuuaaa

SEQ ID NO: 1387153 - RNA, 19 nt, Artificial Sequence
  Description of Artificial Sequence: Synthetic oligonucleotide
acuagcgcaucauacucuu

SEQ ID NO: 1387154 - RNA, 19 nt, Artificial Sequence
  Description of Artificial Sequence: Synthetic oligonucleotide
ucacucuuacacagcugga

SEQ ID NO: 1387155 - RNA, 19 nt, Artificial Sequence
  Description of Artificial Sequence: Synthetic oligonucleotide
guaguaagauuaucauuaa

SEQ ID NO: 1387156 - RNA, 19 nt, Artificial Sequence
  Description of Artificial Sequence: Synthetic oligonucleotide
agcgcaucauacucuuucu

SEQ ID NO: 1387157 - RNA, 19 nt, Artificial Sequence
  Description of Artificial Sequence: Synthetic oligonucleotide
aaagugccaggucgcucug

SEQ ID NO: 1387158 - RNA, 19 nt, Artificial Sequence
  Description of Artificial Sequence: Synthetic oligonucleotide
uguuaccauaacuccucaa

SEQ ID NO: 1387159 - RNA, 19 nt, Artificial Sequence
  Description of Artificial Sequence: Synthetic oligonucleotide
cauaacuccucaaugcagu

SEQ ID NO: 1387160 - RNA, 19 nt, Artificial Sequence
  Description of Artificial Sequence: Synthetic oligonucleotide
ucguucugggcgauacgca

SEQ ID NO: 1387161 - RNA, 19 nt, Artificial Sequence
  Description of Artificial Sequence: Synthetic oligonucleotide
ccaaaggucuacauauuug

SEQ ID NO: 1387162 - RNA, 19 nt, Artificial Sequence
  Description of Artificial Sequence: Synthetic oligonucleotide
uucucgucgucuucccucu

SEQ ID NO: 1387163 - RNA, 19 nt, Artificial Sequence
  Description of Artificial Sequence: Synthetic oligonucleotide
aaaggcuagggaggggccu

SEQ ID NO: 1387164 - RNA, 19 nt, Artificial Sequence
  Description of Artificial Sequence: Synthetic oligonucleotide
ucaaugcaguuuugucucu

SEQ ID NO: 1387165 - RNA, 19 nt, Artificial Sequence
  Description of Artificial Sequence: Synthetic oligonucleotide
caaaagacccuuuguaagu

SEQ ID NO: 1387166 - RNA, 19 nt, Artificial Sequence
  Description of Artificial Sequence: Synthetic oligonucleotide
ugggcgauacgcagagcca

SEQ ID NO: 1387167 - RNA, 19 nt, Artificial Sequence
  Description of Artificial Sequence: Synthetic oligonucleotide
augcuauuuucaaugugca

SEQ ID NO: 1387168 - RNA, 19 nt, Artificial Sequence
  Description of Artificial Sequence: Synthetic oligonucleotide
uccuuuggguguuaccaua

SEQ ID NO: 1387169 - RNA, 19 nt, Artificial Sequence
  Description of Artificial Sequence: Synthetic oligonucleotide
aggcaaccuaauuaauaaa

SEQ ID NO: 1387170 - RNA, 19 nt, Artificial Sequence
  Description of Artificial Sequence: Synthetic oligonucleotide
guauuuguucccuugucau

SEQ ID NO: 1387171 - RNA, 19 nt, Artificial Sequence
  Description of Artificial Sequence: Synthetic oligonucleotide
cucaaguuucauccgccuc

SEQ ID NO: 1387172 - RNA, 19 nt, Artificial Sequence
  Description of Artificial Sequence: Synthetic oligonucleotide
guuuucacucuuacacagc

SEQ ID NO: 1387173 - RNA, 19 nt, Artificial Sequence
  Description of Artificial Sequence: Synthetic oligonucleotide
uaagucucucgggauuggc

SEQ ID NO: 1387174 - RNA, 19 nt, Artificial Sequence
  Description of Artificial Sequence: Synthetic oligonucleotide
gucaguacugggauaagaa

SEQ ID NO: 1387175 - RNA, 19 nt, Artificial Sequence
  Description of Artificial Sequence: Synthetic oligonucleotide
cuaccauuagaguuccaaa

SEQ ID NO: 1387176 - RNA, 19 nt, Artificial Sequence
  Description of Artificial Sequence: Synthetic oligonucleotide
accugugagugaaacuauc

SEQ ID NO: 1387177 - RNA, 19 nt, Artificial Sequence
  Description of Artificial Sequence: Synthetic oligonucleotide
caaacagucaaaagacccu

SEQ ID NO: 1387178 - RNA, 19 nt, Artificial Sequence
  Description of Artificial Sequence: Synthetic oligonucleotide
auaacuccucaaugcaguu

SEQ ID NO: 1387179 - RNA, 19 nt, Artificial Sequence
  Description of Artificial Sequence: Synthetic oligonucleotide
gacucguucugggcgauac

SEQ ID NO: 1387180 - RNA, 19 nt, Artificial Sequence
  Description of Artificial Sequence: Synthetic oligonucleotide
acucguucugggcgauacg

SEQ ID NO: 1387181 - RNA, 19 nt, Artificial Sequence
  Description of Artificial Sequence: Synthetic oligonucleotide
gucuaaguacaacggcuuc

SEQ ID NO: 1387182 - RNA, 19 nt, Artificial Sequence
  Description of Artificial Sequence: Synthetic oligonucleotide
ggucacuuaauuaggccug

SEQ ID NO: 1387183 - RNA, 19 nt, Artificial Sequence
  Description of Artificial Sequence: Synthetic oligonucleotide
gaggacugacagcacacaa

SEQ ID NO: 1387184 - RNA, 19 nt, Artificial Sequence
  Description of Artificial Sequence: Synthetic oligonucleotide
cuuuggguguuaccauaac

SEQ ID NO: 1387185 - RNA, 19 nt, Artificial Sequence
  Description of Artificial Sequence: Synthetic oligonucleotide
ccuuuguaagucucucggg

SEQ ID NO: 1387186 - RNA, 19 nt, Artificial Sequence
  Description of Artificial Sequence: Synthetic oligonucleotide
  modified_base (9)..(9): a, c, u, g, unknown or other
caaaagggnguguuuuaaa

SEQ ID NO: 1387187 - RNA, 19 nt, Artificial Sequence
  Description of Artificial Sequence: Synthetic oligonucleotide
aaagacuccuuuggguguu

SEQ ID NO: 1387188 - RNA, 19 nt, Artificial Sequence
  Description of Artificial Sequence: Synthetic oligonucleotide
uacgcagagccaacucccu

SEQ ID NO: 1387189 - RNA, 19 nt, Artificial Sequence
  Description of Artificial Sequence: Synthetic oligonucleotide
gacgucccugguuuucuac

SEQ ID NO: 1387190 - RNA, 19 nt, Artificial Sequence
  Description of Artificial Sequence: Synthetic oligonucleotide
uagugccuagccuguguga

SEQ ID NO: 1387191 - RNA, 19 nt, Artificial Sequence
  Description of Artificial Sequence: Synthetic oligonucleotide
acgucccugguuuucuaca

SEQ ID NO: 1387192 - RNA, 19 nt, Artificial Sequence
  Description of Artificial Sequence: Synthetic oligonucleotide
ggaaaacuucgaagaaucc

SEQ ID NO: 1387193 - RNA, 19 nt, Artificial Sequence
  Description of Artificial Sequence: Synthetic oligonucleotide
agauuaucauuaacuuagu

SEQ ID NO: 1387194 - RNA, 19 nt, Artificial Sequence
  Description of Artificial Sequence: Synthetic oligonucleotide
uaugacgucccugguuuuc

SEQ ID NO: 1387195 - RNA, 19 nt, Artificial Sequence
  Description of Artificial Sequence: Synthetic oligonucleotide
gcaaccuaauuaauaaaga

SEQ ID NO: 1387196 - RNA, 19 nt, Artificial Sequence
  Description of Artificial Sequence: Synthetic oligonucleotide
uccuaauauuaaagucaua

SEQ ID NO: 1387197 - RNA, 19 nt, Artificial Sequence
  Description of Artificial Sequence: Synthetic oligonucleotide
cuuccgagucuuuuaacua

SEQ ID NO: 1387198 - RNA, 19 nt, Artificial Sequence
  Description of Artificial Sequence: Synthetic oligonucleotide
aguagacaacuaaaggcua

SEQ ID NO: 1387199 - RNA, 19 nt, Artificial Sequence
  Description of Artificial Sequence: Synthetic oligonucleotide
uacaacggcuucugaguua

SEQ ID NO: 1387200 - RNA, 19 nt, Artificial Sequence
  Description of Artificial Sequence: Synthetic oligonucleotide
acggcuucugaguuacaaa

SEQ ID NO: 1387201 - RNA, 19 nt, Artificial Sequence
  Description of Artificial Sequence: Synthetic oligonucleotide
ggauaagaagacacugcug

SEQ ID NO: 1387202 - RNA, 19 nt, Artificial Sequence
  Description of Artificial Sequence: Synthetic oligonucleotide
agugccuagccugugugaa

SEQ ID NO: 1387203 - RNA, 19 nt, Artificial Sequence
  Description of Artificial Sequence: Synthetic oligonucleotide
ugucgggccagcugcgccu

SEQ ID NO: 1387204 - RNA, 19 nt, Artificial Sequence
  Description of Artificial Sequence: Synthetic oligonucleotide
caucguuuucacucuuaca

SEQ ID NO: 1387205 - RNA, 19 nt, Artificial Sequence
  Description of Artificial Sequence: Synthetic oligonucleotide
uuaggccuguuugucaguu

SEQ ID NO: 1387206 - RNA, 19 nt, Artificial Sequence
  Description of Artificial Sequence: Synthetic oligonucleotide
aaccugugagugaaacuau

SEQ ID NO: 1387207 - RNA, 19 nt, Artificial Sequence
  Description of Artificial Sequence: Synthetic oligonucleotide
ugaaagugccaggucgcuc

SEQ ID NO: 1387208 - RNA, 19 nt, Artificial Sequence
  Description of Artificial Sequence: Synthetic oligonucleotide
cugcagugcacugaggaga

SEQ ID NO: 1387209 - RNA, 19 nt, Artificial Sequence
  Description of Artificial Sequence: Synthetic oligonucleotide
ucucucgggauuggcugag

SEQ ID NO: 1387210 - RNA, 19 nt, Artificial Sequence
  Description of Artificial Sequence: Synthetic oligonucleotide
cuugaaugcgccucagccu

SEQ ID NO: 1387211 - RNA, 19 nt, Artificial Sequence
  Description of Artificial Sequence: Synthetic oligonucleotide
auaggucaguacugggaua

SEQ ID NO: 1387212 - RNA, 19 nt, Artificial Sequence
  Description of Artificial Sequence: Synthetic oligonucleotide
ucugcgccucaucacugau

SEQ ID NO: 1387213 - RNA, 19 nt, Artificial Sequence
  Description of Artificial Sequence: Synthetic oligonucleotide
cauaggucaguacugggau

SEQ ID NO: 1387214 - RNA, 19 nt, Artificial Sequence
  Description of Artificial Sequence: Synthetic oligonucleotide
cacaccggcuuaaaucaca

SEQ ID NO: 1387215 - RNA, 19 nt, Artificial Sequence
  Description of Artificial Sequence: Synthetic oligonucleotide
ugaaugcgccucagccucu

SEQ ID NO: 1387216 - RNA, 19 nt, Artificial Sequence
  Description of Artificial Sequence: Synthetic oligonucleotide
gacccuuuguaagucucuc

SEQ ID NO: 1387217 - RNA, 19 nt, Artificial Sequence
  Description of Artificial Sequence: Synthetic oligonucleotide
ucaauccccagcggggaaa

SEQ ID NO: 1387218 - RNA, 19 nt, Artificial Sequence
  Description of Artificial Sequence: Synthetic oligonucleotide
agacuccuuuggguguuac

SEQ ID NO: 1387219 - RNA, 19 nt, Artificial Sequence
  Description of Artificial Sequence: Synthetic oligonucleotide
gaagcagcacaccggcuua

SEQ ID NO: 1387220 - RNA, 19 nt, Artificial Sequence
  Description of Artificial Sequence: Synthetic oligonucleotide
gcuauuuucaaugugcauu

SEQ ID NO: 1387221 - RNA, 19 nt, Artificial Sequence
  Description of Artificial Sequence: Synthetic oligonucleotide
aaugcgccucagccucucu

SEQ ID NO: 1387222 - RNA, 19 nt, Artificial Sequence
  Description of Artificial Sequence: Synthetic oligonucleotide
ccgagucuuuuaacuagcg

SEQ ID NO: 1387223 - RNA, 19 nt, Artificial Sequence
  Description of Artificial Sequence: Synthetic oligonucleotide
cuccucuugaaugcgccuc

SEQ ID NO: 1387224 - RNA, 19 nt, Artificial Sequence
  Description of Artificial Sequence: Synthetic oligonucleotide
augaaagugccaggucgcu

SEQ ID NO: 1387225 - RNA, 19 nt, Artificial Sequence
  Description of Artificial Sequence: Synthetic oligonucleotide
gugccuagccugugugaag

SEQ ID NO: 1387226 - RNA, 19 nt, Artificial Sequence
  Description of Artificial Sequence: Synthetic oligonucleotide
uucgcgccucuuccuuucc

SEQ ID NO: 1387227 - RNA, 19 nt, Artificial Sequence
  Description of Artificial Sequence: Synthetic oligonucleotide
guguuaccauaacuccuca

SEQ ID NO: 1387228 - RNA, 19 nt, Artificial Sequence
  Description of Artificial Sequence: Synthetic oligonucleotide
  modified_base (11)..(11): a, c, u, g, unknown or other
cacaaaagggnguguuuua

SEQ ID NO: 1387229 - RNA, 19 nt, Artificial Sequence
  Description of Artificial Sequence: Synthetic oligonucleotide
cugcgccucaucacugaug

SEQ ID NO: 1387230 - RNA, 19 nt, Artificial Sequence
  Description of Artificial Sequence: Synthetic oligonucleotide
ugaauccccugagaaccau

SEQ ID NO: 1387231 - RNA, 19 nt, Artificial Sequence
  Description of Artificial Sequence: Synthetic oligonucleotide
ucgcucugcgccucaucac

SEQ ID NO: 1387232 - RNA, 19 nt, Artificial Sequence
  Description of Artificial Sequence: Synthetic oligonucleotide
ucuucgcgccucuuccuuu

SEQ ID NO: 1387233 - RNA, 19 nt, Artificial Sequence
  Description of Artificial Sequence: Synthetic oligonucleotide
  modified_base (15)..(15): a, c, u, g, unknown or other
agcacacaaaagggngugu

SEQ ID NO: 1387234 - RNA, 19 nt, Artificial Sequence
  Description of Artificial Sequence: Synthetic oligonucleotide
gcauuuauaucuccuuggu

SEQ ID NO: 1387235 - RNA, 19 nt, Artificial Sequence
  Description of Artificial Sequence: Synthetic oligonucleotide
agcggggaaaaggcaaccu

SEQ ID NO: 1387236 - RNA, 19 nt, Artificial Sequence
  Description of Artificial Sequence: Synthetic oligonucleotide
agacccuuuguaagucucu

SEQ ID NO: 1387237 - RNA, 19 nt, Artificial Sequence
  Description of Artificial Sequence: Synthetic oligonucleotide
ccaaaacagaugcucagaa

SEQ ID NO: 1387238 - RNA, 19 nt, Artificial Sequence
  Description of Artificial Sequence: Synthetic oligonucleotide
acggccugcugcugggacu

SEQ ID NO: 1387239 - RNA, 19 nt, Artificial Sequence
  Description of Artificial Sequence: Synthetic oligonucleotide
ccuaauugucuccuggaaa

SEQ ID NO: 1387240 - RNA, 19 nt, Artificial Sequence
  Description of Artificial Sequence: Synthetic oligonucleotide
ccucaaugcaguuuugucu

SEQ ID NO: 1387241 - RNA, 19 nt, Artificial Sequence
  Description of Artificial Sequence: Synthetic oligonucleotide
gcucuaccauuagaguucc

SEQ ID NO: 1387242 - RNA, 19 nt, Artificial Sequence
  Description of Artificial Sequence: Synthetic oligonucleotide
ucgcgccucuuccuuuccu

SEQ ID NO: 1387243 - RNA, 19 nt, Artificial Sequence
  Description of Artificial Sequence: Synthetic oligonucleotide
caccggcuuaaaucacaug

SEQ ID NO: 1387244 - RNA, 19 nt, Artificial Sequence
  Description of Artificial Sequence: Synthetic oligonucleotide
ggacaaggcuuaaaacuga

SEQ ID NO: 1387245 - RNA, 19 nt, Artificial Sequence
  Description of Artificial Sequence: Synthetic oligonucleotide
ggucaguacugggauaaga

SEQ ID NO: 1387246 - RNA, 19 nt, Artificial Sequence
  Description of Artificial Sequence: Synthetic oligonucleotide
guucccuugucaucauggu

SEQ ID NO: 1387247 - RNA, 19 nt, Artificial Sequence
  Description of Artificial Sequence: Synthetic oligonucleotide
agaauccaagauaccucau

SEQ ID NO: 1387248 - RNA, 19 nt, Artificial Sequence
  Description of Artificial Sequence: Synthetic oligonucleotide
cucgggauuggcugagcaa

SEQ ID NO: 1387249 - RNA, 19 nt, Artificial Sequence
  Description of Artificial Sequence: Synthetic oligonucleotide
cugugagugaaacuaucuu

SEQ ID NO: 1387250 - RNA, 19 nt, Artificial Sequence
  Description of Artificial Sequence: Synthetic oligonucleotide
gguggucuaguaguaaacu

SEQ ID NO: 1387251 - RNA, 19 nt, Artificial Sequence
  Description of Artificial Sequence: Synthetic oligonucleotide
guacaacggcuucugaguu

SEQ ID NO: 1387252 - RNA, 19 nt, Artificial Sequence
  Description of Artificial Sequence: Synthetic oligonucleotide
caccugaggcaugaaacaa

SEQ ID NO: 1387253 - RNA, 19 nt, Artificial Sequence
  Description of Artificial Sequence: Synthetic oligonucleotide
ccagcggggaaaaggcaac

SEQ ID NO: 1387254 - RNA, 19 nt, Artificial Sequence
  Description of Artificial Sequence: Synthetic oligonucleotide
cucugcgccucaucacuga

SEQ ID NO: 1387255 - RNA, 19 nt, Artificial Sequence
  Description of Artificial Sequence: Synthetic oligonucleotide
gaaugcgccucagccucuc

SEQ ID NO: 1387256 - RNA, 19 nt, Artificial Sequence
  Description of Artificial Sequence: Synthetic oligonucleotide
acuccucaaugcaguuuug

SEQ ID NO: 1387257 - RNA, 19 nt, Artificial Sequence
  Description of Artificial Sequence: Synthetic oligonucleotide
ccaagauaccucauacaua

SEQ ID NO: 1387258 - RNA, 19 nt, Artificial Sequence
  Description of Artificial Sequence: Synthetic oligonucleotide
ccaucugaugaggacugac

SEQ ID NO: 1387259 - RNA, 19 nt, Artificial Sequence
  Description of Artificial Sequence: Synthetic oligonucleotide
auccccugagaaccauauu

SEQ ID NO: 1387260 - RNA, 19 nt, Artificial Sequence
  Description of Artificial Sequence: Synthetic oligonucleotide
gaauccccugagaaccaua

SEQ ID NO: 1387261 - RNA, 19 nt, Artificial Sequence
  Description of Artificial Sequence: Synthetic oligonucleotide
agcaucguuuucacucuua

SEQ ID NO: 1387262 - RNA, 19 nt, Artificial Sequence
  Description of Artificial Sequence: Synthetic oligonucleotide
gagccaacucccugucccu

SEQ ID NO: 1387263 - RNA, 19 nt, Artificial Sequence
  Description of Artificial Sequence: Synthetic oligonucleotide
gggauuggcugagcaaaca

SEQ ID NO: 1387264 - RNA, 19 nt, Artificial Sequence
  Description of Artificial Sequence: Synthetic oligonucleotide
ggggccuccgcgguagugc

SEQ ID NO: 1387265 - RNA, 19 nt, Artificial Sequence
  Description of Artificial Sequence: Synthetic oligonucleotide
gggccuccgcgguagugcc

SEQ ID NO: 1387266 - RNA, 19 nt, Artificial Sequence
  Description of Artificial Sequence: Synthetic oligonucleotide
gguagugccuagccugugu

SEQ ID NO: 1387267 - RNA, 19 nt, Artificial Sequence
  Description of Artificial Sequence: Synthetic oligonucleotide
gcuagggaggggccuccgc

SEQ ID NO: 1387268 - RNA, 19 nt, Artificial Sequence
  Description of Artificial Sequence: Synthetic oligonucleotide
cucucgggauuggcugagc

SEQ ID NO: 1387269 - RNA, 19 nt, Artificial Sequence
  Description of Artificial Sequence: Synthetic oligonucleotide
ggguguuaccauaacuccu

SEQ ID NO: 1387270 - RNA, 19 nt, Artificial Sequence
  Description of Artificial Sequence: Synthetic oligonucleotide
cuccucaaugcaguuuugu

SEQ ID NO: 1387271 - RNA, 19 nt, Artificial Sequence
  Description of Artificial Sequence: Synthetic oligonucleotide
cuccgcgguagugccuagc

SEQ ID NO: 1387272 - RNA, 19 nt, Artificial Sequence
  Description of Artificial Sequence: Synthetic oligonucleotide
gucuaguaguaaacuguau

SEQ ID NO: 1387273 - RNA, 19 nt, Artificial Sequence
  Description of Artificial Sequence: Synthetic oligonucleotide
gcggggaaaaggcaaccua

SEQ ID NO: 1387274 - RNA, 19 nt, Artificial Sequence
  Description of Artificial Sequence: Synthetic oligonucleotide
ucucgucgucuucccucuu

SEQ ID NO: 1387275 - RNA, 19 nt, Artificial Sequence
  Description of Artificial Sequence: Synthetic oligonucleotide
gugaaguccuguguucaau

SEQ ID NO: 1387276 - RNA, 19 nt, Artificial Sequence
  Description of Artificial Sequence: Synthetic oligonucleotide
gggcgauacgcagagccaa

SEQ ID NO: 1387277 - RNA, 19 nt, Artificial Sequence
  Description of Artificial Sequence: Synthetic oligonucleotide
cgauacgcagagccaacuc

SEQ ID NO: 1387278 - RNA, 19 nt, Artificial Sequence
  Description of Artificial Sequence: Synthetic oligonucleotide
ccucauacauaggucagua

SEQ ID NO: 1387279 - RNA, 19 nt, Artificial Sequence
  Description of Artificial Sequence: Synthetic oligonucleotide
ggcgauacgcagagccaac

SEQ ID NO: 1387280 - RNA, 19 nt, Artificial Sequence
  Description of Artificial Sequence: Synthetic oligonucleotide
gcucugcgccucaucacug

SEQ ID NO: 1387281 - RNA, 19 nt, Artificial Sequence
  Description of Artificial Sequence: Synthetic oligonucleotide
cgcaucauacucuuucugu

SEQ ID NO: 1387282 - RNA, 19 nt, Artificial Sequence
  Description of Artificial Sequence: Synthetic oligonucleotide
caauccccagcggggaaaa

SEQ ID NO: 1387283 - RNA, 19 nt, Artificial Sequence
  Description of Artificial Sequence: Synthetic oligonucleotide
ggcaugaaacaagcugucu

SEQ ID NO: 1387284 - RNA, 19 nt, Artificial Sequence
  Description of Artificial Sequence: Synthetic oligonucleotide
uuccgccgccuuugcucgu

SEQ ID NO: 1387285 - RNA, 19 nt, Artificial Sequence
  Description of Artificial Sequence: Synthetic oligonucleotide
cgggauuggcugagcaaac

SEQ ID NO: 1387286 - RNA, 19 nt, Artificial Sequence
  Description of Artificial Sequence: Synthetic oligonucleotide
guaugacgucccugguuuu

SEQ ID NO: 1387287 - RNA, 19 nt, Artificial Sequence
  Description of Artificial Sequence: Synthetic oligonucleotide
gcacaccggcuuaaaucac

SEQ ID NO: 1387288 - RNA, 19 nt, Artificial Sequence
  Description of Artificial Sequence: Synthetic oligonucleotide
ggucgcucugcgccucauc

SEQ ID NO: 1387289 - RNA, 19 nt, Artificial Sequence
  Description of Artificial Sequence: Synthetic oligonucleotide
gccuagccugugugaaguc

SEQ ID NO: 1387290 - RNA, 19 nt, Artificial Sequence
  Description of Artificial Sequence: Synthetic oligonucleotide
caacggcuucugaguuaca

SEQ ID NO: 1387291 - RNA, 19 nt, Artificial Sequence
  Description of Artificial Sequence: Synthetic oligonucleotide
gcgccucaucacugaugag

SEQ ID NO: 1387292 - RNA, 19 nt, Artificial Sequence
  Description of Artificial Sequence: Synthetic oligonucleotide
cucuucgcgccucuuccuu

SEQ ID NO: 1387293 - RNA, 19 nt, Artificial Sequence
  Description of Artificial Sequence: Synthetic oligonucleotide
agacucguucugggcgaua

SEQ ID NO: 1387294 - RNA, 19 nt, Artificial Sequence
  Description of Artificial Sequence: Synthetic oligonucleotide
caggucgcucugcgccuca

SEQ ID NO: 1387295 - RNA, 19 nt, Artificial Sequence
  Description of Artificial Sequence: Synthetic oligonucleotide
cuagcgcaucauacucuuu

SEQ ID NO: 1387296 - RNA, 19 nt, Artificial Sequence
  Description of Artificial Sequence: Synthetic oligonucleotide
gcuucucgucgucuucccu

SEQ ID NO: 1387297 - RNA, 19 nt, Artificial Sequence
  Description of Artificial Sequence: Synthetic oligonucleotide
gcgauacgcagagccaacu

SEQ ID NO: 1387298 - RNA, 19 nt, Artificial Sequence
  Description of Artificial Sequence: Synthetic oligonucleotide
gccaucugaugaggacuga

SEQ ID NO: 1387299 - RNA, 19 nt, Artificial Sequence
  Description of Artificial Sequence: Synthetic oligonucleotide
ccccagcggggaaaaggca

SEQ ID NO: 1387300 - RNA, 19 nt, Artificial Sequence
  Description of Artificial Sequence: Synthetic oligonucleotide
gccaggucgcucugcgccu

SEQ ID NO: 1387301 - RNA, 19 nt, Artificial Sequence
  Description of Artificial Sequence: Synthetic oligonucleotide
gccuccgcgguagugccua

SEQ ID NO: 1387302 - RNA, 19 nt, Artificial Sequence
  Description of Artificial Sequence: Synthetic oligonucleotide
ccuccgcgguagugccuag

SEQ ID NO: 1387303 - RNA, 19 nt, Artificial Sequence
  Description of Artificial Sequence: Synthetic oligonucleotide
gcagugcacugaggagauc

SEQ ID NO: 1387304 - RNA, 19 nt, Artificial Sequence
  Description of Artificial Sequence: Synthetic oligonucleotide
ggacggccugcugcuggga

SEQ ID NO: 1387305 - RNA, 19 nt, Artificial Sequence
  Description of Artificial Sequence: Synthetic oligonucleotide
ccgccuuugcucguccucu

SEQ ID NO: 1387306 - RNA, 19 nt, Artificial Sequence
  Description of Artificial Sequence: Synthetic oligonucleotide
ccgcgguagugccuagccu

SEQ ID NO: 1387307 - RNA, 19 nt, Artificial Sequence
  Description of Artificial Sequence: Synthetic oligonucleotide
ggccuccgcgguagugccu

SEQ ID NO: 1387308 - RNA, 19 nt, Artificial Sequence
  Description of Artificial Sequence: Synthetic oligonucleotide
cgccgccuuugcucguccu

SEQ ID NO: 1387309 - RNA, 19 nt, Artificial Sequence
  Description of Artificial Sequence: Synthetic oligonucleotide
uuaaguguuacuaagagcu

SEQ ID NO: 1387310 - RNA, 19 nt, Artificial Sequence
  Description of Artificial Sequence: Synthetic oligonucleotide
uuuauuagagacaagagcu

SEQ ID NO: 1387311 - RNA, 19 nt, Artificial Sequence
  Description of Artificial Sequence: Synthetic oligonucleotide
agaacaguaguucucaacc

SEQ ID NO: 1387312 - RNA, 19 nt, Artificial Sequence
  Description of Artificial Sequence: Synthetic oligonucleotide
aaucaguauuuucacaagc

SEQ ID NO: 1387313 - RNA, 19 nt, Artificial Sequence
  Description of Artificial Sequence: Synthetic oligonucleotide
uuuuauuagagacaagagc

SEQ ID NO: 1387314 - RNA, 19 nt, Artificial Sequence
  Description of Artificial Sequence: Synthetic oligonucleotide
gucuuaauaaauaagagcc

SEQ ID NO: 1387315 - RNA, 19 nt, Artificial Sequence
  Description of Artificial Sequence: Synthetic oligonucleotide
uaauuaucugcuaugcagg

SEQ ID NO: 1387316 - RNA, 19 nt, Artificial Sequence
  Description of Artificial Sequence: Synthetic oligonucleotide
uaugaaaaccacuagauua

SEQ ID NO: 1387317 - RNA, 19 nt, Artificial Sequence
  Description of Artificial Sequence: Synthetic oligonucleotide
guaauuaucugcuaugcag

SEQ ID NO: 1387318 - RNA, 19 nt, Artificial Sequence
  Description of Artificial Sequence: Synthetic oligonucleotide
aaaacuuggucuucggaag

SEQ ID NO: 1387319 - RNA, 19 nt, Artificial Sequence
  Description of Artificial Sequence: Synthetic oligonucleotide
aguacaacacuccggacgc

SEQ ID NO: 1387320 - RNA, 19 nt, Artificial Sequence
  Description of Artificial Sequence: Synthetic oligonucleotide
aauaagagcccauuaagaa

SEQ ID NO: 1387321 - RNA, 19 nt, Artificial Sequence
  Description of Artificial Sequence: Synthetic oligonucleotide
aaugaucccaguucgagca

SEQ ID NO: 1387322 - RNA, 19 nt, Artificial Sequence
  Description of Artificial Sequence: Synthetic oligonucleotide
aacaccauagaaaacuugg

SEQ ID NO: 1387323 - RNA, 19 nt, Artificial Sequence
  Description of Artificial Sequence: Synthetic oligonucleotide
aaaacuucaccagagggag

SEQ ID NO: 1387324 - RNA, 19 nt, Artificial Sequence
  Description of Artificial Sequence: Synthetic oligonucleotide
gauccuauacuuuggagag

SEQ ID NO: 1387325 - RNA, 19 nt, Artificial Sequence
  Description of Artificial Sequence: Synthetic oligonucleotide
uucacuaguggucacaaug

SEQ ID NO: 1387326 - RNA, 19 nt, Artificial Sequence
  Description of Artificial Sequence: Synthetic oligonucleotide
uguuaagucgauuucuugc

SEQ ID NO: 1387327 - RNA, 19 nt, Artificial Sequence
  Description of Artificial Sequence: Synthetic oligonucleotide
uaagagcccauuaagaaac

SEQ ID NO: 1387328 - RNA, 19 nt, Artificial Sequence
  Description of Artificial Sequence: Synthetic oligonucleotide
aagagcaaacauccugucc

SEQ ID NO: 1387329 - RNA, 19 nt, Artificial Sequence
  Description of Artificial Sequence: Synthetic oligonucleotide
aaguguuacuaagagcugc

SEQ ID NO: 1387330 - RNA, 19 nt, Artificial Sequence
  Description of Artificial Sequence: Synthetic oligonucleotide
aguuaaguguuacuaagag

SEQ ID NO: 1387331 - RNA, 19 nt, Artificial Sequence
  Description of Artificial Sequence: Synthetic oligonucleotide
acuagauuacauuuauuag

SEQ ID NO: 1387332 - RNA, 19 nt, Artificial Sequence
  Description of Artificial Sequence: Synthetic oligonucleotide
aacuauaugauguuucuuu

SEQ ID NO: 1387333 - RNA, 19 nt, Artificial Sequence
  Description of Artificial Sequence: Synthetic oligonucleotide
cauuuuaguuuuauuagag

SEQ ID NO: 1387334 - RNA, 19 nt, Artificial Sequence
  Description of Artificial Sequence: Synthetic oligonucleotide
uguuuacuuaacauuuuag

SEQ ID NO: 1387335 - RNA, 19 nt, Artificial Sequence
  Description of Artificial Sequence: Synthetic oligonucleotide
cuaagagcugcaaaggagg

SEQ ID NO: 1387336 - RNA, 19 nt, Artificial Sequence
  Description of Artificial Sequence: Synthetic oligonucleotide
aauuccuaauauccgagcu

SEQ ID NO: 1387337 - RNA, 19 nt, Artificial Sequence
  Description of Artificial Sequence: Synthetic oligonucleotide
cacaauuuaagaaaacuuc

SEQ ID NO: 1387338 - RNA, 19 nt, Artificial Sequence
  Description of Artificial Sequence: Synthetic oligonucleotide
gaguauaugguguagacaa

SEQ ID NO: 1387339 - RNA, 19 nt, Artificial Sequence
  Description of Artificial Sequence: Synthetic oligonucleotide
ugauauaaagugcacaauu

SEQ ID NO: 1387340 - RNA, 19 nt, Artificial Sequence
  Description of Artificial Sequence: Synthetic oligonucleotide
ucaaggauccuauacuuug

SEQ ID NO: 1387341 - RNA, 19 nt, Artificial Sequence
  Description of Artificial Sequence: Synthetic oligonucleotide
auacguguguuucuacucc

SEQ ID NO: 1387342 - RNA, 19 nt, Artificial Sequence
  Description of Artificial Sequence: Synthetic oligonucleotide
ucuguuaugauaaccggaa

SEQ ID NO: 1387343 - RNA, 19 nt, Artificial Sequence
  Description of Artificial Sequence: Synthetic oligonucleotide
uaacuaaaugcuuguaccc

SEQ ID NO: 1387344 - RNA, 19 nt, Artificial Sequence
  Description of Artificial Sequence: Synthetic oligonucleotide
aaaaccacuagauuacauu

SEQ ID NO: 1387345 - RNA, 19 nt, Artificial Sequence
  Description of Artificial Sequence: Synthetic oligonucleotide
ugguguagacaaaacaggc

SEQ ID NO: 1387346 - RNA, 19 nt, Artificial Sequence
  Description of Artificial Sequence: Synthetic oligonucleotide
uuucggauggucuuuguca

SEQ ID NO: 1387347 - RNA, 19 nt, Artificial Sequence
  Description of Artificial Sequence: Synthetic oligonucleotide
uaugauaaccggaauuccu

SEQ ID NO: 1387348 - RNA, 19 nt, Artificial Sequence
  Description of Artificial Sequence: Synthetic oligonucleotide
uaugcaggauaucugauau

SEQ ID NO: 1387349 - RNA, 19 nt, Artificial Sequence
  Description of Artificial Sequence: Synthetic oligonucleotide
uaugguuggaguauauggu

SEQ ID NO: 1387350 - RNA, 19 nt, Artificial Sequence
  Description of Artificial Sequence: Synthetic oligonucleotide
caauuuaagaaaacuucac

SEQ ID NO: 1387351 - RNA, 19 nt, Artificial Sequence
  Description of Artificial Sequence: Synthetic oligonucleotide
aauuaucugcuaugcagga

SEQ ID NO: 1387352 - RNA, 19 nt, Artificial Sequence
  Description of Artificial Sequence: Synthetic oligonucleotide
acucgccuuaauuagguuc

SEQ ID NO: 1387353 - RNA, 19 nt, Artificial Sequence
  Description of Artificial Sequence: Synthetic oligonucleotide
agguaauuaucugcuaugc

SEQ ID NO: 1387354 - RNA, 19 nt, Artificial Sequence
  Description of Artificial Sequence: Synthetic oligonucleotide
ucgagcaagacgcucaaga

SEQ ID NO: 1387355 - RNA, 19 nt, Artificial Sequence
  Description of Artificial Sequence: Synthetic oligonucleotide
acuauaugauguuucuuug

SEQ ID NO: 1387356 - RNA, 19 nt, Artificial Sequence
  Description of Artificial Sequence: Synthetic oligonucleotide
aagucgauuucuugcacug

SEQ ID NO: 1387357 - RNA, 19 nt, Artificial Sequence
  Description of Artificial Sequence: Synthetic oligonucleotide
uguuaugauaaccggaauu

SEQ ID NO: 1387358 - RNA, 19 nt, Artificial Sequence
  Description of Artificial Sequence: Synthetic oligonucleotide
acauuuuaguuuuauuaga

SEQ ID NO: 1387359 - RNA, 19 nt, Artificial Sequence
  Description of Artificial Sequence: Synthetic oligonucleotide
uuaucugcuaugcaggaua

SEQ ID NO: 1387360 - RNA, 19 nt, Artificial Sequence
  Description of Artificial Sequence: Synthetic oligonucleotide
auuccuaauauccgagcuc

SEQ ID NO: 1387361 - RNA, 19 nt, Artificial Sequence
  Description of Artificial Sequence: Synthetic oligonucleotide
uguacugccaagaccuuug

SEQ ID NO: 1387362 - RNA, 19 nt, Artificial Sequence
  Description of Artificial Sequence: Synthetic oligonucleotide
gaaaacuuggucuucggaa

SEQ ID NO: 1387363 - RNA, 19 nt, Artificial Sequence
  Description of Artificial Sequence: Synthetic oligonucleotide
uucuguuaugauaaccgga

SEQ ID NO: 1387364 - RNA, 19 nt, Artificial Sequence
  Description of Artificial Sequence: Synthetic oligonucleotide
cuagaaucaguauuuucac

SEQ ID NO: 1387365 - RNA, 19 nt, Artificial Sequence
  Description of Artificial Sequence: Synthetic oligonucleotide
uuaauuagguucugaauuu

SEQ ID NO: 1387366 - RNA, 19 nt, Artificial Sequence
  Description of Artificial Sequence: Synthetic oligonucleotide
uacuuaacauuuuaguuuu

SEQ ID NO: 1387367 - RNA, 19 nt, Artificial Sequence
  Description of Artificial Sequence: Synthetic oligonucleotide
auaaagugcacaauuuaag

SEQ ID NO: 1387368 - RNA, 19 nt, Artificial Sequence
  Description of Artificial Sequence: Synthetic oligonucleotide
uguagacaaaacaggcacc

SEQ ID NO: 1387369 - RNA, 19 nt, Artificial Sequence
  Description of Artificial Sequence: Synthetic oligonucleotide
cauugugacuucauaacug

SEQ ID NO: 1387370 - RNA, 19 nt, Artificial Sequence
  Description of Artificial Sequence: Synthetic oligonucleotide
uuccuaauauccgagcucc

SEQ ID NO: 1387371 - RNA, 19 nt, Artificial Sequence
  Description of Artificial Sequence: Synthetic oligonucleotide
ucacuaguggucacaauga

SEQ ID NO: 1387372 - RNA, 19 nt, Artificial Sequence
  Description of Artificial Sequence: Synthetic oligonucleotide
auugugacuucauaacugu

SEQ ID NO: 1387373 - RNA, 19 nt, Artificial Sequence
  Description of Artificial Sequence: Synthetic oligonucleotide
guucuguuaugauaaccgg

SEQ ID NO: 1387374 - RNA, 19 nt, Artificial Sequence
  Description of Artificial Sequence: Synthetic oligonucleotide
agcccauuaagaaacaaag

SEQ ID NO: 1387375 - RNA, 19 nt, Artificial Sequence
  Description of Artificial Sequence: Synthetic oligonucleotide
agaacggcuucacuagugg

SEQ ID NO: 1387376 - RNA, 19 nt, Artificial Sequence
  Description of Artificial Sequence: Synthetic oligonucleotide
guagauaacuauaugaugu

SEQ ID NO: 1387377 - RNA, 19 nt, Artificial Sequence
  Description of Artificial Sequence: Synthetic oligonucleotide
uaauauccgagcuccuugc

SEQ ID NO: 1387378 - RNA, 19 nt, Artificial Sequence
  Description of Artificial Sequence: Synthetic oligonucleotide
uccuauacuuuggagagca

SEQ ID NO: 1387379 - RNA, 19 nt, Artificial Sequence
  Description of Artificial Sequence: Synthetic oligonucleotide
auaagagcccauuaagaaa

SEQ ID NO: 1387380 - RNA, 19 nt, Artificial Sequence
  Description of Artificial Sequence: Synthetic oligonucleotide
ggaaucucggcuaaggccg

SEQ ID NO: 1387381 - RNA, 19 nt, Artificial Sequence
  Description of Artificial Sequence: Synthetic oligonucleotide
uggucuagccaguuaagug

SEQ ID NO: 1387382 - RNA, 19 nt, Artificial Sequence
  Description of Artificial Sequence: Synthetic oligonucleotide
augguuggaguauauggug

SEQ ID NO: 1387383 - RNA, 19 nt, Artificial Sequence
  Description of Artificial Sequence: Synthetic oligonucleotide
agcuagaaucaguauuuuc

SEQ ID NO: 1387384 - RNA, 19 nt, Artificial Sequence
  Description of Artificial Sequence: Synthetic oligonucleotide
agggucguaagcuggaucu

SEQ ID NO: 1387385 - RNA, 19 nt, Artificial Sequence
  Description of Artificial Sequence: Synthetic oligonucleotide
cuaauauccgagcuccuug

SEQ ID NO: 1387386 - RNA, 19 nt, Artificial Sequence
  Description of Artificial Sequence: Synthetic oligonucleotide
gaaaacuucaccagaggga

SEQ ID NO: 1387387 - RNA, 19 nt, Artificial Sequence
  Description of Artificial Sequence: Synthetic oligonucleotide
ugaaccucaaugccucggc

SEQ ID NO: 1387388 - RNA, 19 nt, Artificial Sequence
  Description of Artificial Sequence: Synthetic oligonucleotide
uccauuguaauuugucuua

SEQ ID NO: 1387389 - RNA, 19 nt, Artificial Sequence
  Description of Artificial Sequence: Synthetic oligonucleotide
agcaagacgcucaagagca

SEQ ID NO: 1387390 - RNA, 19 nt, Artificial Sequence
  Description of Artificial Sequence: Synthetic oligonucleotide
acuaagagcugcaaaggag

SEQ ID NO: 1387391 - RNA, 19 nt, Artificial Sequence
  Description of Artificial Sequence: Synthetic oligonucleotide
aaagguaugguuggaguau

SEQ ID NO: 1387392 - RNA, 19 nt, Artificial Sequence
  Description of Artificial Sequence: Synthetic oligonucleotide
uaaguguuacuaagagcug

SEQ ID NO: 1387393 - RNA, 19 nt, Artificial Sequence
  Description of Artificial Sequence: Synthetic oligonucleotide
uggaguauaugguguagac

SEQ ID NO: 1387394 - RNA, 19 nt, Artificial Sequence
  Description of Artificial Sequence: Synthetic oligonucleotide
aaccucaaugccucggcca

SEQ ID NO: 1387395 - RNA, 19 nt, Artificial Sequence
  Description of Artificial Sequence: Synthetic oligonucleotide
uuaagucgauuucuugcac

SEQ ID NO: 1387396 - RNA, 19 nt, Artificial Sequence
  Description of Artificial Sequence: Synthetic oligonucleotide
guacugaccccacucuucg

SEQ ID NO: 1387397 - RNA, 19 nt, Artificial Sequence
  Description of Artificial Sequence: Synthetic oligonucleotide
uugcuggauacauacgugu

SEQ ID NO: 1387398 - RNA, 19 nt, Artificial Sequence
  Description of Artificial Sequence: Synthetic oligonucleotide
cuuaauuagguucugaauu

SEQ ID NO: 1387399 - RNA, 19 nt, Artificial Sequence
  Description of Artificial Sequence: Synthetic oligonucleotide
ugggguacuguucuguuau

SEQ ID NO: 1387400 - RNA, 19 nt, Artificial Sequence
  Description of Artificial Sequence: Synthetic oligonucleotide
uaucugauauaaagugcac

SEQ ID NO: 1387401 - RNA, 19 nt, Artificial Sequence
  Description of Artificial Sequence: Synthetic oligonucleotide
uauccgagcuccuugcaac

SEQ ID NO: 1387402 - RNA, 19 nt, Artificial Sequence
  Description of Artificial Sequence: Synthetic oligonucleotide
acaaugaucccaguucgag

SEQ ID NO: 1387403 - RNA, 19 nt, Artificial Sequence
  Description of Artificial Sequence: Synthetic oligonucleotide
ugcuggauacauacgugug

SEQ ID NO: 1387404 - RNA, 19 nt, Artificial Sequence
  Description of Artificial Sequence: Synthetic oligonucleotide
ucgccauagaggcucagga

SEQ ID NO: 1387405 - RNA, 19 nt, Artificial Sequence
  Description of Artificial Sequence: Synthetic oligonucleotide
agaaaacuuggucuucgga

SEQ ID NO: 1387406 - RNA, 19 nt, Artificial Sequence
  Description of Artificial Sequence: Synthetic oligonucleotide
uugaauuucggauggucuu

SEQ ID NO: 1387407 - RNA, 19 nt, Artificial Sequence
  Description of Artificial Sequence: Synthetic oligonucleotide
acauacguguguuucuacu

SEQ ID NO: 1387408 - RNA, 19 nt, Artificial Sequence
  Description of Artificial Sequence: Synthetic oligonucleotide
caaugaucccaguucgagc

SEQ ID NO: 1387409 - RNA, 19 nt, Artificial Sequence
  Description of Artificial Sequence: Synthetic oligonucleotide
aauauccgagcuccuugca

SEQ ID NO: 1387410 - RNA, 19 nt, Artificial Sequence
  Description of Artificial Sequence: Synthetic oligonucleotide
acaccuguuaagucgauuu

SEQ ID NO: 1387411 - RNA, 19 nt, Artificial Sequence
  Description of Artificial Sequence: Synthetic oligonucleotide
cauacguguguuucuacuc

SEQ ID NO: 1387412 - RNA, 19 nt, Artificial Sequence
  Description of Artificial Sequence: Synthetic oligonucleotide
caccauagaaaacuugguc

SEQ ID NO: 1387413 - RNA, 19 nt, Artificial Sequence
  Description of Artificial Sequence: Synthetic oligonucleotide
acuaaaugcuuguacccaa

SEQ ID NO: 1387414 - RNA, 19 nt, Artificial Sequence
  Description of Artificial Sequence: Synthetic oligonucleotide
uuuggagagcagaccagac

SEQ ID NO: 1387415 - RNA, 19 nt, Artificial Sequence
  Description of Artificial Sequence: Synthetic oligonucleotide
ggauccuauacuuuggaga

SEQ ID NO: 1387416 - RNA, 19 nt, Artificial Sequence
  Description of Artificial Sequence: Synthetic oligonucleotide
acgaauuugcggugcaugu

SEQ ID NO: 1387417 - RNA, 19 nt, Artificial Sequence
  Description of Artificial Sequence: Synthetic oligonucleotide
ugauaaccggaauuccuaa

SEQ ID NO: 1387418 - RNA, 19 nt, Artificial Sequence
  Description of Artificial Sequence: Synthetic oligonucleotide
uggaaagguaugguuggag

SEQ ID NO: 1387419 - RNA, 19 nt, Artificial Sequence
  Description of Artificial Sequence: Synthetic oligonucleotide
ccaguuaaguguuacuaag

SEQ ID NO: 1387420 - RNA, 19 nt, Artificial Sequence
  Description of Artificial Sequence: Synthetic oligonucleotide
ggugugagauuucccaggg

SEQ ID NO: 1387421 - RNA, 19 nt, Artificial Sequence
  Description of Artificial Sequence: Synthetic oligonucleotide
agugacuuucauugugacu

SEQ ID NO: 1387422 - RNA, 19 nt, Artificial Sequence
  Description of Artificial Sequence: Synthetic oligonucleotide
aaacuucaccagagggagc

SEQ ID NO: 1387423 - RNA, 19 nt, Artificial Sequence
  Description of Artificial Sequence: Synthetic oligonucleotide
cacuguacugccaagaccu

SEQ ID NO: 1387424 - RNA, 19 nt, Artificial Sequence
  Description of Artificial Sequence: Synthetic oligonucleotide
agcacgucguagccggcgc

SEQ ID NO: 1387425 - RNA, 19 nt, Artificial Sequence
  Description of Artificial Sequence: Synthetic oligonucleotide
gaagagcaccggcacgccg

SEQ ID NO: 1387426 - RNA, 19 nt, Artificial Sequence
  Description of Artificial Sequence: Synthetic oligonucleotide
ucgcucaccgcgaagcccu

SEQ ID NO: 1387427 - RNA, 19 nt, Artificial Sequence
  Description of Artificial Sequence: Synthetic oligonucleotide
acgcucaagagcaaacauc

SEQ ID NO: 1387428 - RNA, 19 nt, Artificial Sequence
  Description of Artificial Sequence: Synthetic oligonucleotide
agcacuuuggaaagguaug

SEQ ID NO: 1387429 - RNA, 19 nt, Artificial Sequence
  Description of Artificial Sequence: Synthetic oligonucleotide
gugacuuucauugugacuu

SEQ ID NO: 1387430 - RNA, 19 nt, Artificial Sequence
  Description of Artificial Sequence: Synthetic oligonucleotide
gaauuucggauggucuuug

SEQ ID NO: 1387431 - RNA, 19 nt, Artificial Sequence
  Description of Artificial Sequence: Synthetic oligonucleotide
ugagauuucccagggucgu

SEQ ID NO: 1387432 - RNA, 19 nt, Artificial Sequence
  Description of Artificial Sequence: Synthetic oligonucleotide
cugcuaugaaucaugaggu

SEQ ID NO: 1387433 - RNA, 19 nt, Artificial Sequence
  Description of Artificial Sequence: Synthetic oligonucleotide
ucuucggcgaagagcugca

SEQ ID NO: 1387434 - RNA, 19 nt, Artificial Sequence
  Description of Artificial Sequence: Synthetic oligonucleotide
caguuaaguguuacuaaga

SEQ ID NO: 1387435 - RNA, 19 nt, Artificial Sequence
  Description of Artificial Sequence: Synthetic oligonucleotide
guacuugauggccggccgg

SEQ ID NO: 1387436 - RNA, 19 nt, Artificial Sequence
  Description of Artificial Sequence: Synthetic oligonucleotide
caguauuuucacaagcucu

SEQ ID NO: 1387437 - RNA, 19 nt, Artificial Sequence
  Description of Artificial Sequence: Synthetic oligonucleotide
guauaugguguagacaaaa

SEQ ID NO: 1387438 - RNA, 19 nt, Artificial Sequence
  Description of Artificial Sequence: Synthetic oligonucleotide
cuauacuuuggagagcaga

SEQ ID NO: 1387439 - RNA, 19 nt, Artificial Sequence
  Description of Artificial Sequence: Synthetic oligonucleotide
auccuauacuuuggagagc

SEQ ID NO: 1387440 - RNA, 19 nt, Artificial Sequence
  Description of Artificial Sequence: Synthetic oligonucleotide
ggaucccgauccuucaagg

SEQ ID NO: 1387441 - RNA, 19 nt, Artificial Sequence
  Description of Artificial Sequence: Synthetic oligonucleotide
uacauacguguguuucuac

SEQ ID NO: 1387442 - RNA, 19 nt, Artificial Sequence
  Description of Artificial Sequence: Synthetic oligonucleotide
cuagccaguuaaguguuac

SEQ ID NO: 1387443 - RNA, 19 nt, Artificial Sequence
  Description of Artificial Sequence: Synthetic oligonucleotide
cucaccgcgaagcccuugg

SEQ ID NO: 1387444 - RNA, 19 nt, Artificial Sequence
  Description of Artificial Sequence: Synthetic oligonucleotide
aguucgagcaagacgcuca

SEQ ID NO: 1387445 - RNA, 19 nt, Artificial Sequence
  Description of Artificial Sequence: Synthetic oligonucleotide
aacacuccggacgccagga

SEQ ID NO: 1387446 - RNA, 19 nt, Artificial Sequence
  Description of Artificial Sequence: Synthetic oligonucleotide
gaucccgauccuucaagga

SEQ ID NO: 1387447 - RNA, 19 nt, Artificial Sequence
  Description of Artificial Sequence: Synthetic oligonucleotide
cugcaccacgaauuugcgg

SEQ ID NO: 1387448 - RNA, 19 nt, Artificial Sequence
  Description of Artificial Sequence: Synthetic oligonucleotide
cucuucggcgaagagcugc

SEQ ID NO: 1387449 - RNA, 19 nt, Artificial Sequence
  Description of Artificial Sequence: Synthetic oligonucleotide
auauccgagcuccuugcaa

SEQ ID NO: 1387450 - RNA, 19 nt, Artificial Sequence
  Description of Artificial Sequence: Synthetic oligonucleotide
aguguuacuaagagcugca

SEQ ID NO: 1387451 - RNA, 19 nt, Artificial Sequence
  Description of Artificial Sequence: Synthetic oligonucleotide
auagaggcucaggaacuuc

SEQ ID NO: 1387452 - RNA, 19 nt, Artificial Sequence
  Description of Artificial Sequence: Synthetic oligonucleotide
acuccggacgccaggaauc

SEQ ID NO: 1387453 - RNA, 19 nt, Artificial Sequence
  Description of Artificial Sequence: Synthetic oligonucleotide
cauuuucuagaacaguagu

SEQ ID NO: 1387454 - RNA, 19 nt, Artificial Sequence
  Description of Artificial Sequence: Synthetic oligonucleotide
ugaauuucggauggucuuu

SEQ ID NO: 1387455 - RNA, 19 nt, Artificial Sequence
  Description of Artificial Sequence: Synthetic oligonucleotide
gaacaguaguucucaaccu

SEQ ID NO: 1387456 - RNA, 19 nt, Artificial Sequence
  Description of Artificial Sequence: Synthetic oligonucleotide
agagcugcaccacgaauuu

SEQ ID NO: 1387457 - RNA, 19 nt, Artificial Sequence
  Description of Artificial Sequence: Synthetic oligonucleotide
ccguuugcuggauacauac

SEQ ID NO: 1387458 - RNA, 19 nt, Artificial Sequence
  Description of Artificial Sequence: Synthetic oligonucleotide
gguaauuaucugcuaugca

SEQ ID NO: 1387459 - RNA, 19 nt, Artificial Sequence
  Description of Artificial Sequence: Synthetic oligonucleotide
agccaguuaaguguuacua

SEQ ID NO: 1387460 - RNA, 19 nt, Artificial Sequence
  Description of Artificial Sequence: Synthetic oligonucleotide
uugugacuucauaacugua

SEQ ID NO: 1387461 - RNA, 19 nt, Artificial Sequence
  Description of Artificial Sequence: Synthetic oligonucleotide
cacgaauuugcggugcaug

SEQ ID NO: 1387462 - RNA, 19 nt, Artificial Sequence
  Description of Artificial Sequence: Synthetic oligonucleotide
gugaaccucaaugccucgg

SEQ ID NO: 1387463 - RNA, 19 nt, Artificial Sequence
  Description of Artificial Sequence: Synthetic oligonucleotide
ugcuaugaaucaugaggua

SEQ ID NO: 1387464 - RNA, 19 nt, Artificial Sequence
  Description of Artificial Sequence: Synthetic oligonucleotide
ggauacauacguguguuuc

SEQ ID NO: 1387465 - RNA, 19 nt, Artificial Sequence
  Description of Artificial Sequence: Synthetic oligonucleotide
ucaccgcgaagcccuuggg

SEQ ID NO: 1387466 - RNA, 19 nt, Artificial Sequence
  Description of Artificial Sequence: Synthetic oligonucleotide
cuggucgccauagaggcuc

SEQ ID NO: 1387467 - RNA, 19 nt, Artificial Sequence
  Description of Artificial Sequence: Synthetic oligonucleotide
aguccgucggaggaucccg

SEQ ID NO: 1387468 - RNA, 19 nt, Artificial Sequence
  Description of Artificial Sequence: Synthetic oligonucleotide
ucuucggaagaaccagcuu

SEQ ID NO: 1387469 - RNA, 19 nt, Artificial Sequence
  Description of Artificial Sequence: Synthetic oligonucleotide
ggucuagccaguuaagugu

SEQ ID NO: 1387470 - RNA, 19 nt, Artificial Sequence
  Description of Artificial Sequence: Synthetic oligonucleotide
augauaaccggaauuccua

SEQ ID NO: 1387471 - RNA, 19 nt, Artificial Sequence
  Description of Artificial Sequence: Synthetic oligonucleotide
gggcacucgccuuaauuag

SEQ ID NO: 1387472 - RNA, 19 nt, Artificial Sequence
  Description of Artificial Sequence: Synthetic oligonucleotide
cuccuugcaacagucucug

SEQ ID NO: 1387473 - RNA, 19 nt, Artificial Sequence
  Description of Artificial Sequence: Synthetic oligonucleotide
cuaugcaggauaucugaua

SEQ ID NO: 1387474 - RNA, 19 nt, Artificial Sequence
  Description of Artificial Sequence: Synthetic oligonucleotide
aagguaugguuggaguaua

SEQ ID NO: 1387475 - RNA, 19 nt, Artificial Sequence
  Description of Artificial Sequence: Synthetic oligonucleotide
agacgcucaagagcaaaca

SEQ ID NO: 1387476 - RNA, 19 nt, Artificial Sequence
  Description of Artificial Sequence: Synthetic oligonucleotide
uuguacccaauggucuagc

SEQ ID NO: 1387477 - RNA, 19 nt, Artificial Sequence
  Description of Artificial Sequence: Synthetic oligonucleotide
cucgccuuaauuagguucu

SEQ ID NO: 1387478 - RNA, 19 nt, Artificial Sequence
  Description of Artificial Sequence: Synthetic oligonucleotide
uacuugauggccggccgga

SEQ ID NO: 1387479 - RNA, 19 nt, Artificial Sequence
  Description of Artificial Sequence: Synthetic oligonucleotide
gucgauuucuugcacugua

SEQ ID NO: 1387480 - RNA, 19 nt, Artificial Sequence
  Description of Artificial Sequence: Synthetic oligonucleotide
ucggauggucuuugucagc

SEQ ID NO: 1387481 - RNA, 19 nt, Artificial Sequence
  Description of Artificial Sequence: Synthetic oligonucleotide
agcaaacauccuguccauc

SEQ ID NO: 1387482 - RNA, 19 nt, Artificial Sequence
  Description of Artificial Sequence: Synthetic oligonucleotide
caccuguuaagucgauuuc

SEQ ID NO: 1387483 - RNA, 19 nt, Artificial Sequence
  Description of Artificial Sequence: Synthetic oligonucleotide
cgcgcgaacaccgagaagc

SEQ ID NO: 1387484 - RNA, 19 nt, Artificial Sequence
  Description of Artificial Sequence: Synthetic oligonucleotide
auacauacguguguuucua

SEQ ID NO: 1387485 - RNA, 19 nt, Artificial Sequence
  Description of Artificial Sequence: Synthetic oligonucleotide
caacacuccggacgccagg

SEQ ID NO: 1387486 - RNA, 19 nt, Artificial Sequence
  Description of Artificial Sequence: Synthetic oligonucleotide
uccuaauauccgagcuccu

SEQ ID NO: 1387487 - RNA, 19 nt, Artificial Sequence
  Description of Artificial Sequence: Synthetic oligonucleotide
ggcgaagagcugcaccacg

SEQ ID NO: 1387488 - RNA, 19 nt, Artificial Sequence
  Description of Artificial Sequence: Synthetic oligonucleotide
cuucaacuucagguaacac

SEQ ID NO: 1387489 - RNA, 19 nt, Artificial Sequence
  Description of Artificial Sequence: Synthetic oligonucleotide
ccuugcaacagucucuguc

SEQ ID NO: 1387490 - RNA, 19 nt, Artificial Sequence
  Description of Artificial Sequence: Synthetic oligonucleotide
cagcagaacggcuucacua

SEQ ID NO: 1387491 - RNA, 19 nt, Artificial Sequence
  Description of Artificial Sequence: Synthetic oligonucleotide
aagcuagaaucaguauuuu

SEQ ID NO: 1387492 - RNA, 19 nt, Artificial Sequence
  Description of Artificial Sequence: Synthetic oligonucleotide
gcuaugaaucaugagguaa

SEQ ID NO: 1387493 - RNA, 19 nt, Artificial Sequence
  Description of Artificial Sequence: Synthetic oligonucleotide
auccgagcuccuugcaaca

SEQ ID NO: 1387494 - RNA, 19 nt, Artificial Sequence
  Description of Artificial Sequence: Synthetic oligonucleotide
caccgcgaagcccuugggc

SEQ ID NO: 1387495 - RNA, 19 nt, Artificial Sequence
  Description of Artificial Sequence: Synthetic oligonucleotide
gucgccauagaggcucagg

SEQ ID NO: 1387496 - RNA, 19 nt, Artificial Sequence
  Description of Artificial Sequence: Synthetic oligonucleotide
gguaugguuggaguauaug

SEQ ID NO: 1387497 - RNA, 19 nt, Artificial Sequence
  Description of Artificial Sequence: Synthetic oligonucleotide
cagacuccggggcacucgc

SEQ ID NO: 1387498 - RNA, 19 nt, Artificial Sequence
  Description of Artificial Sequence: Synthetic oligonucleotide
ccggacgccaggaaucucg

SEQ ID NO: 1387499 - RNA, 19 nt, Artificial Sequence
  Description of Artificial Sequence: Synthetic oligonucleotide
uggauacauacguguguuu

SEQ ID NO: 1387500 - RNA, 19 nt, Artificial Sequence
  Description of Artificial Sequence: Synthetic oligonucleotide
accacgaauuugcggugca

SEQ ID NO: 1387501 - RNA, 19 nt, Artificial Sequence
  Description of Artificial Sequence: Synthetic oligonucleotide
gauaaccggaauuccuaau

SEQ ID NO: 1387502 - RNA, 19 nt, Artificial Sequence
  Description of Artificial Sequence: Synthetic oligonucleotide
ucuagccaguuaaguguua

SEQ ID NO: 1387503 - RNA, 19 nt, Artificial Sequence
  Description of Artificial Sequence: Synthetic oligonucleotide
gccuuaauuagguucugaa

SEQ ID NO: 1387504 - RNA, 19 nt, Artificial Sequence
  Description of Artificial Sequence: Synthetic oligonucleotide
cgucggaggaucccgaucc

SEQ ID NO: 1387505 - RNA, 19 nt, Artificial Sequence
  Description of Artificial Sequence: Synthetic oligonucleotide
ggaaagguaugguuggagu

SEQ ID NO: 1387506 - RNA, 19 nt, Artificial Sequence
  Description of Artificial Sequence: Synthetic oligonucleotide
gcagaccagacuccggggc

SEQ ID NO: 1387507 - RNA, 19 nt, Artificial Sequence
  Description of Artificial Sequence: Synthetic oligonucleotide
gacaagagcuugucuggcu

SEQ ID NO: 1387508 - RNA, 19 nt, Artificial Sequence
  Description of Artificial Sequence: Synthetic oligonucleotide
ggcacucgccuuaauuagg

SEQ ID NO: 1387509 - RNA, 19 nt, Artificial Sequence
  Description of Artificial Sequence: Synthetic oligonucleotide
ucggcuaaggccgcuucaa

SEQ ID NO: 1387510 - RNA, 19 nt, Artificial Sequence
  Description of Artificial Sequence: Synthetic oligonucleotide
aaccaucaagugacuuuca

SEQ ID NO: 1387511 - RNA, 19 nt, Artificial Sequence
  Description of Artificial Sequence: Synthetic oligonucleotide
gaaucucggcuaaggccgc

SEQ ID NO: 1387512 - RNA, 19 nt, Artificial Sequence
  Description of Artificial Sequence: Synthetic oligonucleotide
ggaguauaugguguagaca

SEQ ID NO: 1387513 - RNA, 19 nt, Artificial Sequence
  Description of Artificial Sequence: Synthetic oligonucleotide
aaggccgcuucaacuucag

SEQ ID NO: 1387514 - RNA, 19 nt, Artificial Sequence
  Description of Artificial Sequence: Synthetic oligonucleotide
gcuugcaguccgucggagg

SEQ ID NO: 1387515 - RNA, 19 nt, Artificial Sequence
  Description of Artificial Sequence: Synthetic oligonucleotide
cacaaugaucccaguucga

SEQ ID NO: 1387516 - RNA, 19 nt, Artificial Sequence
  Description of Artificial Sequence: Synthetic oligonucleotide
cuccauuguaauuugucuu

SEQ ID NO: 1387517 - RNA, 19 nt, Artificial Sequence
  Description of Artificial Sequence: Synthetic oligonucleotide
gaaaaccacuagauuacau

SEQ ID NO: 1387518 - RNA, 19 nt, Artificial Sequence
  Description of Artificial Sequence: Synthetic oligonucleotide
aggccgcuucaacuucagg

SEQ ID NO: 1387519 - RNA, 19 nt, Artificial Sequence
  Description of Artificial Sequence: Synthetic oligonucleotide
aguauaugguguagacaaa

SEQ ID NO: 1387520 - RNA, 19 nt, Artificial Sequence
  Description of Artificial Sequence: Synthetic oligonucleotide
acguacugaccccacucuu

SEQ ID NO: 1387521 - RNA, 19 nt, Artificial Sequence
  Description of Artificial Sequence: Synthetic oligonucleotide
cagggucguaagcuggauc

SEQ ID NO: 1387522 - RNA, 19 nt, Artificial Sequence
  Description of Artificial Sequence: Synthetic oligonucleotide
cacgucguagccggcgccg

SEQ ID NO: 1387523 - RNA, 19 nt, Artificial Sequence
  Description of Artificial Sequence: Synthetic oligonucleotide
ugcaguccgucggaggauc

SEQ ID NO: 1387524 - RNA, 19 nt, Artificial Sequence
  Description of Artificial Sequence: Synthetic oligonucleotide
gaacggcuucacuaguggu

SEQ ID NO: 1387525 - RNA, 19 nt, Artificial Sequence
  Description of Artificial Sequence: Synthetic oligonucleotide
agucgauuucuugcacugu

SEQ ID NO: 1387526 - RNA, 19 nt, Artificial Sequence
  Description of Artificial Sequence: Synthetic oligonucleotide
ggggcacucgccuuaauua

SEQ ID NO: 1387527 - RNA, 19 nt, Artificial Sequence
  Description of Artificial Sequence: Synthetic oligonucleotide
gaacugcuguuuacuuaac

SEQ ID NO: 1387528 - RNA, 19 nt, Artificial Sequence
  Description of Artificial Sequence: Synthetic oligonucleotide
ccacacuaauaaugucucc

SEQ ID NO: 1387529 - RNA, 19 nt, Artificial Sequence
  Description of Artificial Sequence: Synthetic oligonucleotide
gucguaagcuggaucugca

SEQ ID NO: 1387530 - RNA, 19 nt, Artificial Sequence
  Description of Artificial Sequence: Synthetic oligonucleotide
gcgaacaccgagaagcaga

SEQ ID NO: 1387531 - RNA, 19 nt, Artificial Sequence
  Description of Artificial Sequence: Synthetic oligonucleotide
gaggaucccgauccuucaa

SEQ ID NO: 1387532 - RNA, 19 nt, Artificial Sequence
  Description of Artificial Sequence: Synthetic oligonucleotide
ucggaagaaccagcuucac

SEQ ID NO: 1387533 - RNA, 19 nt, Artificial Sequence
  Description of Artificial Sequence: Synthetic oligonucleotide
ucacaccuguuaagucgau

SEQ ID NO: 1387534 - RNA, 19 nt, Artificial Sequence
  Description of Artificial Sequence: Synthetic oligonucleotide
cagaccagacuccggggca

SEQ ID NO: 1387535 - RNA, 19 nt, Artificial Sequence
  Description of Artificial Sequence: Synthetic oligonucleotide
uggucgccauagaggcuca

SEQ ID NO: 1387536 - RNA, 19 nt, Artificial Sequence
  Description of Artificial Sequence: Synthetic oligonucleotide
guucgagcaagacgcucaa

SEQ ID NO: 1387537 - RNA, 19 nt, Artificial Sequence
  Description of Artificial Sequence: Synthetic oligonucleotide
ggaggaucccgauccuuca

SEQ ID NO: 1387538 - RNA, 19 nt, Artificial Sequence
  Description of Artificial Sequence: Synthetic oligonucleotide
caguucgagcaagacgcuc

SEQ ID NO: 1387539 - RNA, 19 nt, Artificial Sequence
  Description of Artificial Sequence: Synthetic oligonucleotide
cguuugcuggauacauacg

SEQ ID NO: 1387540 - RNA, 19 nt, Artificial Sequence
  Description of Artificial Sequence: Synthetic oligonucleotide
gcuggauacauacgugugu

SEQ ID NO: 1387541 - RNA, 19 nt, Artificial Sequence
  Description of Artificial Sequence: Synthetic oligonucleotide
caaaggaggaacugcuguu

SEQ ID NO: 1387542 - RNA, 19 nt, Artificial Sequence
  Description of Artificial Sequence: Synthetic oligonucleotide
uccgucggaggaucccgau

SEQ ID NO: 1387543 - RNA, 19 nt, Artificial Sequence
  Description of Artificial Sequence: Synthetic oligonucleotide
cggaauuccuaauauccga

SEQ ID NO: 1387544 - RNA, 19 nt, Artificial Sequence
  Description of Artificial Sequence: Synthetic oligonucleotide
gagcaaacauccuguccau

SEQ ID NO: 1387545 - RNA, 19 nt, Artificial Sequence
  Description of Artificial Sequence: Synthetic oligonucleotide
gccaagaccuuugggguac

SEQ ID NO: 1387546 - RNA, 19 nt, Artificial Sequence
  Description of Artificial Sequence: Synthetic oligonucleotide
uagccggcgccguggggca

SEQ ID NO: 1387547 - RNA, 19 nt, Artificial Sequence
  Description of Artificial Sequence: Synthetic oligonucleotide
caguccgucggaggauccc

SEQ ID NO: 1387548 - RNA, 19 nt, Artificial Sequence
  Description of Artificial Sequence: Synthetic oligonucleotide
cguacugaccccacucuuc

SEQ ID NO: 1387549 - RNA, 19 nt, Artificial Sequence
  Description of Artificial Sequence: Synthetic oligonucleotide
ccuccauuguaauuugucu

SEQ ID NO: 1387550 - RNA, 19 nt, Artificial Sequence
  Description of Artificial Sequence: Synthetic oligonucleotide
guacaacacuccggacgcc

SEQ ID NO: 1387551 - RNA, 19 nt, Artificial Sequence
  Description of Artificial Sequence: Synthetic oligonucleotide
uugcaguccgucggaggau

SEQ ID NO: 1387552 - RNA, 19 nt, Artificial Sequence
  Description of Artificial Sequence: Synthetic oligonucleotide
gcuugcagcgcucgcucac

SEQ ID NO: 1387553 - RNA, 19 nt, Artificial Sequence
  Description of Artificial Sequence: Synthetic oligonucleotide
ccuauacuuuggagagcag

SEQ ID NO: 1387554 - RNA, 19 nt, Artificial Sequence
  Description of Artificial Sequence: Synthetic oligonucleotide
gcggugcaugucgagcugg

SEQ ID NO: 1387555 - RNA, 19 nt, Artificial Sequence
  Description of Artificial Sequence: Synthetic oligonucleotide
cacgccgcccgacggcgcc

SEQ ID NO: 1387556 - RNA, 19 nt, Artificial Sequence
  Description of Artificial Sequence: Synthetic oligonucleotide
cuggauacauacguguguu

SEQ ID NO: 1387557 - RNA, 19 nt, Artificial Sequence
  Description of Artificial Sequence: Synthetic oligonucleotide
agguaugguuggaguauau

SEQ ID NO: 1387558 - RNA, 19 nt, Artificial Sequence
  Description of Artificial Sequence: Synthetic oligonucleotide
ccuuaauuagguucugaau

SEQ ID NO: 1387559 - RNA, 19 nt, Artificial Sequence
  Description of Artificial Sequence: Synthetic oligonucleotide
cacguacugaccccacucu

SEQ ID NO: 1387560 - RNA, 19 nt, Artificial Sequence
  Description of Artificial Sequence: Synthetic oligonucleotide
cuguuaugauaaccggaau

SEQ ID NO: 1387561 - RNA, 19 nt, Artificial Sequence
  Description of Artificial Sequence: Synthetic oligonucleotide
ggcacgccgcccgacggcg

SEQ ID NO: 1387562 - RNA, 19 nt, Artificial Sequence
  Description of Artificial Sequence: Synthetic oligonucleotide
ccguggggcaccgacgcgg

SEQ ID NO: 1387563 - RNA, 19 nt, Artificial Sequence
  Description of Artificial Sequence: Synthetic oligonucleotide
cuucggcgaagagcugcac

SEQ ID NO: 1387564 - RNA, 19 nt, Artificial Sequence
  Description of Artificial Sequence: Synthetic oligonucleotide
gagauuucccagggucgua

SEQ ID NO: 1387565 - RNA, 19 nt, Artificial Sequence
  Description of Artificial Sequence: Synthetic oligonucleotide
gggucguaagcuggaucug

SEQ ID NO: 1387566 - RNA, 19 nt, Artificial Sequence
  Description of Artificial Sequence: Synthetic oligonucleotide
ggccggaaccuuuccugca

SEQ ID NO: 1387567 - RNA, 19 nt, Artificial Sequence
  Description of Artificial Sequence: Synthetic oligonucleotide
acuguacugccaagaccuu

SEQ ID NO: 1387568 - RNA, 19 nt, Artificial Sequence
  Description of Artificial Sequence: Synthetic oligonucleotide
cgcucgcucaccgcgaagc

SEQ ID NO: 1387569 - RNA, 19 nt, Artificial Sequence
  Description of Artificial Sequence: Synthetic oligonucleotide
gggagcacuuuggaaaggu

SEQ ID NO: 1387570 - RNA, 19 nt, Artificial Sequence
  Description of Artificial Sequence: Synthetic oligonucleotide
cgaacaccgagaagcagaa

SEQ ID NO: 1387571 - RNA, 19 nt, Artificial Sequence
  Description of Artificial Sequence: Synthetic oligonucleotide
gggccgcgcgaacaccgag

SEQ ID NO: 1387572 - RNA, 19 nt, Artificial Sequence
  Description of Artificial Sequence: Synthetic oligonucleotide
gccgcgcgaacaccgagaa

SEQ ID NO: 1387573 - RNA, 19 nt, Artificial Sequence
  Description of Artificial Sequence: Synthetic oligonucleotide
cagcgcggccaccgagggc

SEQ ID NO: 1387574 - RNA, 19 nt, Artificial Sequence
  Description of Artificial Sequence: Synthetic oligonucleotide
gcaggauaucugauauaaa

SEQ ID NO: 1387575 - RNA, 19 nt, Artificial Sequence
  Description of Artificial Sequence: Synthetic oligonucleotide
caccuccauuguaauuugu

SEQ ID NO: 1387576 - RNA, 19 nt, Artificial Sequence
  Description of Artificial Sequence: Synthetic oligonucleotide
cuucacuaguggucacaau

SEQ ID NO: 1387577 - RNA, 19 nt, Artificial Sequence
  Description of Artificial Sequence: Synthetic oligonucleotide
gcacucgccuuaauuaggu

SEQ ID NO: 1387578 - RNA, 19 nt, Artificial Sequence
  Description of Artificial Sequence: Synthetic oligonucleotide
ccuguuaagucgauuucuu

SEQ ID NO: 1387579 - RNA, 19 nt, Artificial Sequence
  Description of Artificial Sequence: Synthetic oligonucleotide
ccacaccgccgccagccag

SEQ ID NO: 1387580 - RNA, 19 nt, Artificial Sequence
  Description of Artificial Sequence: Synthetic oligonucleotide
guggggcaccgacgcgggc

SEQ ID NO: 1387581 - RNA, 19 nt, Artificial Sequence
  Description of Artificial Sequence: Synthetic oligonucleotide
ggugcaugucgagcugguc

SEQ ID NO: 1387582 - RNA, 19 nt, Artificial Sequence
  Description of Artificial Sequence: Synthetic oligonucleotide
guccgucggaggaucccga

SEQ ID NO: 1387583 - RNA, 19 nt, Artificial Sequence
  Description of Artificial Sequence: Synthetic oligonucleotide
gccguggggcaccgacgcg

SEQ ID NO: 1387584 - RNA, 19 nt, Artificial Sequence
  Description of Artificial Sequence: Synthetic oligonucleotide
ccgcuucaacuucagguaa

SEQ ID NO: 1387585 - RNA, 19 nt, Artificial Sequence
  Description of Artificial Sequence: Synthetic oligonucleotide
ccggcacgccgcccgacgg

SEQ ID NO: 1387586 - RNA, 19 nt, Artificial Sequence
  Description of Artificial Sequence: Synthetic oligonucleotide
gcaguccgucggaggaucc

SEQ ID NO: 1387587 - RNA, 19 nt, Artificial Sequence
  Description of Artificial Sequence: Synthetic oligonucleotide
gucggaggaucccgauccu

SEQ ID NO: 1387588 - RNA, 19 nt, Artificial Sequence
  Description of Artificial Sequence: Synthetic oligonucleotide
ccgucggaggaucccgauc

SEQ ID NO: 1387589 - RNA, 19 nt, Artificial Sequence
  Description of Artificial Sequence: Synthetic oligonucleotide
ggccguuugcuggauacau

SEQ ID NO: 1387590 - RNA, 19 nt, Artificial Sequence
  Description of Artificial Sequence: Synthetic oligonucleotide
ggccggccggaaccuuucc

SEQ ID NO: 1387591 - RNA, 19 nt, Artificial Sequence
  Description of Artificial Sequence: Synthetic oligonucleotide
gcgcgaacaccgagaagca

SEQ ID NO: 1387592 - RNA, 19 nt, Artificial Sequence
  Description of Artificial Sequence: Synthetic oligonucleotide
cuccggacgccaggaaucu

SEQ ID NO: 1387593 - RNA, 19 nt, Artificial Sequence
  Description of Artificial Sequence: Synthetic oligonucleotide
gaccagacuccggggcacu

SEQ ID NO: 1387594 - RNA, 19 nt, Artificial Sequence
  Description of Artificial Sequence: Synthetic oligonucleotide
ggccgcgcgaacaccgaga

SEQ ID NO: 1387595 - RNA, 19 nt, Artificial Sequence
  Description of Artificial Sequence: Synthetic oligonucleotide
cgcgaacaccgagaagcag

SEQ ID NO: 1387596 - RNA, 19 nt, Artificial Sequence
  Description of Artificial Sequence: Synthetic oligonucleotide
cacucgccuuaauuagguu

SEQ ID NO: 1387597 - RNA, 19 nt, Artificial Sequence
  Description of Artificial Sequence: Synthetic oligonucleotide
cggcuaaggccgcuucaac

SEQ ID NO: 1387598 - RNA, 19 nt, Artificial Sequence
  Description of Artificial Sequence: Synthetic oligonucleotide
gggccguuugcuggauaca

SEQ ID NO: 1387599 - RNA, 19 nt, Artificial Sequence
  Description of Artificial Sequence: Synthetic oligonucleotide
cacaccuguuaagucgauu

SEQ ID NO: 1387600 - RNA, 19 nt, Artificial Sequence
  Description of Artificial Sequence: Synthetic oligonucleotide
ccuaauauccgagcuccuu

SEQ ID NO: 1387601 - RNA, 19 nt, Artificial Sequence
  Description of Artificial Sequence: Synthetic oligonucleotide
gcucaccgcgaagcccuug

SEQ ID NO: 1387602 - RNA, 19 nt, Artificial Sequence
  Description of Artificial Sequence: Synthetic oligonucleotide
caccggcacgccgcccgac

SEQ ID NO: 1387603 - RNA, 19 nt, Artificial Sequence
  Description of Artificial Sequence: Synthetic oligonucleotide
gccggccggaaccuuuccu

SEQ ID NO: 1387604 - RNA, 19 nt, Artificial Sequence
  Description of Artificial Sequence: Synthetic oligonucleotide
ccaguucgagcaagacgcu

SEQ ID NO: 1387605 - RNA, 19 nt, Artificial Sequence
  Description of Artificial Sequence: Synthetic oligonucleotide
cgccuuaauuagguucuga

SEQ ID NO: 1387606 - RNA, 19 nt, Artificial Sequence
  Description of Artificial Sequence: Synthetic oligonucleotide
cggcacgccgcccgacggc

SEQ ID NO: 1387607 - RNA, 19 nt, Artificial Sequence
  Description of Artificial Sequence: Synthetic oligonucleotide
gcuggucgccauagaggcu

SEQ ID NO: 1387608 - RNA, 19 nt, Artificial Sequence
  Description of Artificial Sequence: Synthetic oligonucleotide
cccaaccaucaagugacuu

SEQ ID NO: 1387609 - RNA, 19 nt, Artificial Sequence
  Description of Artificial Sequence: Synthetic oligonucleotide
ccccaaccaucaagugacu

SEQ ID NO: 1387610 - RNA, 19 nt, Artificial Sequence
  Description of Artificial Sequence: Synthetic oligonucleotide
gggcaccgacgcgggccgc

SEQ ID NO: 1387611 - RNA, 19 nt, Artificial Sequence
  Description of Artificial Sequence: Synthetic oligonucleotide
cggggcacucgccuuaauu

SEQ ID NO: 1387612 - RNA, 19 nt, Artificial Sequence
  Description of Artificial Sequence: Synthetic oligonucleotide
ccacgaauuugcggugcau

SEQ ID NO: 1387613 - RNA, 19 nt, Artificial Sequence
  Description of Artificial Sequence: Synthetic oligonucleotide
cggugcaugucgagcuggu

SEQ ID NO: 1387614 - RNA, 19 nt, Artificial Sequence
  Description of Artificial Sequence: Synthetic oligonucleotide
ccagggucguaagcuggau

SEQ ID NO: 1387615 - RNA, 19 nt, Artificial Sequence
  Description of Artificial Sequence: Synthetic oligonucleotide
ccaagaccuuugggguacu

SEQ ID NO: 1387616 - RNA, 19 nt, Artificial Sequence
  Description of Artificial Sequence: Synthetic oligonucleotide
ccgacgcgggccgcgcgaa

SEQ ID NO: 1387617 - RNA, 19 nt, Artificial Sequence
  Description of Artificial Sequence: Synthetic oligonucleotide
ccagggccguuugcuggau

SEQ ID NO: 1387618 - RNA, 19 nt, Artificial Sequence
  Description of Artificial Sequence: Synthetic oligonucleotide
ccggggcacucgccuuaau

SEQ ID NO: 1387619 - RNA, 19 nt, Artificial Sequence
  Description of Artificial Sequence: Synthetic oligonucleotide
aacacuacaagcuaaaugu

SEQ ID NO: 1387620 - RNA, 19 nt, Artificial Sequence
  Description of Artificial Sequence: Synthetic oligonucleotide
uucaauaugcuuauguaag

SEQ ID NO: 1387621 - RNA, 19 nt, Artificial Sequence
  Description of Artificial Sequence: Synthetic oligonucleotide
caaauuauauuuuccaggg

SEQ ID NO: 1387622 - RNA, 19 nt, Artificial Sequence
  Description of Artificial Sequence: Synthetic oligonucleotide
agaauucaacacuacaagc

SEQ ID NO: 1387623 - RNA, 19 nt, Artificial Sequence
  Description of Artificial Sequence: Synthetic oligonucleotide
auuagcaacuucaauaugc

SEQ ID NO: 1387624 - RNA, 19 nt, Artificial Sequence
  Description of Artificial Sequence: Synthetic oligonucleotide
auuaauggaacauggggac

SEQ ID NO: 1387625 - RNA, 19 nt, Artificial Sequence
  Description of Artificial Sequence: Synthetic oligonucleotide
aauaagauaagccacugua

SEQ ID NO: 1387626 - RNA, 19 nt, Artificial Sequence
  Description of Artificial Sequence: Synthetic oligonucleotide
agauccauccauaugaucc

SEQ ID NO: 1387627 - RNA, 19 nt, Artificial Sequence
  Description of Artificial Sequence: Synthetic oligonucleotide
uuaacgaagaaguugacaa

SEQ ID NO: 1387628 - RNA, 19 nt, Artificial Sequence
  Description of Artificial Sequence: Synthetic oligonucleotide
aagaacaagcgccacaaag

SEQ ID NO: 1387629 - RNA, 19 nt, Artificial Sequence
  Description of Artificial Sequence: Synthetic oligonucleotide
uguauucauauaaucgagg

SEQ ID NO: 1387630 - RNA, 19 nt, Artificial Sequence
  Description of Artificial Sequence: Synthetic oligonucleotide
uuagugguuuauuagacca

SEQ ID NO: 1387631 - RNA, 19 nt, Artificial Sequence
  Description of Artificial Sequence: Synthetic oligonucleotide
auaugauccacauaugucu

SEQ ID NO: 1387632 - RNA, 19 nt, Artificial Sequence
  Description of Artificial Sequence: Synthetic oligonucleotide
ugacuaaacggcaaggcag

SEQ ID NO: 1387633 - RNA, 19 nt, Artificial Sequence
  Description of Artificial Sequence: Synthetic oligonucleotide
ucacucaucugacuaaacg

SEQ ID NO: 1387634 - RNA, 19 nt, Artificial Sequence
  Description of Artificial Sequence: Synthetic oligonucleotide
gagaauucaacacuacaag

SEQ ID NO: 1387635 - RNA, 19 nt, Artificial Sequence
  Description of Artificial Sequence: Synthetic oligonucleotide
gaguguauucauauaaucg

SEQ ID NO: 1387636 - RNA, 19 nt, Artificial Sequence
  Description of Artificial Sequence: Synthetic oligonucleotide
auccauaugauccacauau

SEQ ID NO: 1387637 - RNA, 19 nt, Artificial Sequence
  Description of Artificial Sequence: Synthetic oligonucleotide
uaaaccauuccuuaagaga

SEQ ID NO: 1387638 - RNA, 19 nt, Artificial Sequence
  Description of Artificial Sequence: Synthetic oligonucleotide
ucagucuugcaauacacag

SEQ ID NO: 1387639 - RNA, 19 nt, Artificial Sequence
  Description of Artificial Sequence: Synthetic oligonucleotide
gaauaaggcucauuaacag

SEQ ID NO: 1387640 - RNA, 19 nt, Artificial Sequence
  Description of Artificial Sequence: Synthetic oligonucleotide
uuucuagcaaaccuguagc

SEQ ID NO: 1387641 - RNA, 19 nt, Artificial Sequence
  Description of Artificial Sequence: Synthetic oligonucleotide
uaugcuauuacuucucaga

SEQ ID NO: 1387642 - RNA, 19 nt, Artificial Sequence
  Description of Artificial Sequence: Synthetic oligonucleotide
aauaugcuuauguaagaga

SEQ ID NO: 1387643 - RNA, 19 nt, Artificial Sequence
  Description of Artificial Sequence: Synthetic oligonucleotide
auaaggcucauuaacagac

SEQ ID NO: 1387644 - RNA, 19 nt, Artificial Sequence
  Description of Artificial Sequence: Synthetic oligonucleotide
caaaacacuagaaugacca

SEQ ID NO: 1387645 - RNA, 19 nt, Artificial Sequence
  Description of Artificial Sequence: Synthetic oligonucleotide
ucgagaaauggaauaaggc

SEQ ID NO: 1387646 - RNA, 19 nt, Artificial Sequence
  Description of Artificial Sequence: Synthetic oligonucleotide
uauaacuugugauggagga

SEQ ID NO: 1387647 - RNA, 19 nt, Artificial Sequence
  Description of Artificial Sequence: Synthetic oligonucleotide
caaaaugagaggcugggcc

SEQ ID NO: 1387648 - RNA, 19 nt, Artificial Sequence
  Description of Artificial Sequence: Synthetic oligonucleotide
aauaaggcucauuaacaga

SEQ ID NO: 1387649 - RNA, 19 nt, Artificial Sequence
  Description of Artificial Sequence: Synthetic oligonucleotide
uuaaaccauuccuuaagag

SEQ ID NO: 1387650 - RNA, 19 nt, Artificial Sequence
  Description of Artificial Sequence: Synthetic oligonucleotide
acaagcuaaauguucuuuc

SEQ ID NO: 1387651 - RNA, 19 nt, Artificial Sequence
  Description of Artificial Sequence: Synthetic oligonucleotide
ugugcauucagucuugcaa

SEQ ID NO: 1387652 - RNA, 19 nt, Artificial Sequence
  Description of Artificial Sequence: Synthetic oligonucleotide
cacucaucugacuaaacgg

SEQ ID NO: 1387653 - RNA, 19 nt, Artificial Sequence
  Description of Artificial Sequence: Synthetic oligonucleotide
uccuuaagagaauucaaca

SEQ ID NO: 1387654 - RNA, 19 nt, Artificial Sequence
  Description of Artificial Sequence: Synthetic oligonucleotide
gagugaguaagauccaucc

SEQ ID NO: 1387655 - RNA, 19 nt, Artificial Sequence
  Description of Artificial Sequence: Synthetic oligonucleotide
ucuugcaauacacagcaaa

SEQ ID NO: 1387656 - RNA, 19 nt, Artificial Sequence
  Description of Artificial Sequence: Synthetic oligonucleotide
aacaucguuuucaauucgc

SEQ ID NO: 1387657 - RNA, 19 nt, Artificial Sequence
  Description of Artificial Sequence: Synthetic oligonucleotide
ugcgucacugaucacaggc

SEQ ID NO: 1387658 - RNA, 19 nt, Artificial Sequence
  Description of Artificial Sequence: Synthetic oligonucleotide
auacuuagugguuuauuag

SEQ ID NO: 1387659 - RNA, 19 nt, Artificial Sequence
  Description of Artificial Sequence: Synthetic oligonucleotide
cuugcaauacacagcaaag

SEQ ID NO: 1387660 - RNA, 19 nt, Artificial Sequence
  Description of Artificial Sequence: Synthetic oligonucleotide
auugcuuccaguaguacac

SEQ ID NO: 1387661 - RNA, 19 nt, Artificial Sequence
  Description of Artificial Sequence: Synthetic oligonucleotide
gacaauugugcauucaguc

SEQ ID NO: 1387662 - RNA, 19 nt, Artificial Sequence
  Description of Artificial Sequence: Synthetic oligonucleotide
aacggcaaggcagagagug

SEQ ID NO: 1387663 - RNA, 19 nt, Artificial Sequence
  Description of Artificial Sequence: Synthetic oligonucleotide
uacuuagugguuuauuaga

SEQ ID NO: 1387664 - RNA, 19 nt, Artificial Sequence
  Description of Artificial Sequence: Synthetic oligonucleotide
aagcucuuaacgaagaagu

SEQ ID NO: 1387665 - RNA, 19 nt, Artificial Sequence
  Description of Artificial Sequence: Synthetic oligonucleotide
aacaucgagaaauggaaua

SEQ ID NO: 1387666 - RNA, 19 nt, Artificial Sequence
  Description of Artificial Sequence: Synthetic oligonucleotide
uuuugcaucuccugcuccg

SEQ ID NO: 1387667 - RNA, 19 nt, Artificial Sequence
  Description of Artificial Sequence: Synthetic oligonucleotide
gcauuaauggaacaugggg

SEQ ID NO: 1387668 - RNA, 19 nt, Artificial Sequence
  Description of Artificial Sequence: Synthetic oligonucleotide
acucaucugacuaaacggc

SEQ ID NO: 1387669 - RNA, 19 nt, Artificial Sequence
  Description of Artificial Sequence: Synthetic oligonucleotide
cauuaacagacacagcuac

SEQ ID NO: 1387670 - RNA, 19 nt, Artificial Sequence
  Description of Artificial Sequence: Synthetic oligonucleotide
guagcugaauaccuuuucg

SEQ ID NO: 1387671 - RNA, 19 nt, Artificial Sequence
  Description of Artificial Sequence: Synthetic oligonucleotide
aagcuaaauguucuuucug

SEQ ID NO: 1387672 - RNA, 19 nt, Artificial Sequence
  Description of Artificial Sequence: Synthetic oligonucleotide
agaacaagcgccacaaagg

SEQ ID NO: 1387673 - RNA, 19 nt, Artificial Sequence
  Description of Artificial Sequence: Synthetic oligonucleotide
aagauccauccauaugauc

SEQ ID NO: 1387674 - RNA, 19 nt, Artificial Sequence
  Description of Artificial Sequence: Synthetic oligonucleotide
cucugaaucacuguacucc

SEQ ID NO: 1387675 - RNA, 19 nt, Artificial Sequence
  Description of Artificial Sequence: Synthetic oligonucleotide
ucaguugcuuucuuuaggu

SEQ ID NO: 1387676 - RNA, 19 nt, Artificial Sequence
  Description of Artificial Sequence: Synthetic oligonucleotide
aggacaauugugcauucag

SEQ ID NO: 1387677 - RNA, 19 nt, Artificial Sequence
  Description of Artificial Sequence: Synthetic oligonucleotide
cuuagugguuuauuagacc

SEQ ID NO: 1387678 - RNA, 19 nt, Artificial Sequence
  Description of Artificial Sequence: Synthetic oligonucleotide
gccacuguaaaauauuuag

SEQ ID NO: 1387679 - RNA, 19 nt, Artificial Sequence
  Description of Artificial Sequence: Synthetic oligonucleotide
uucaauucgcucaugcuua

SEQ ID NO: 1387680 - RNA, 19 nt, Artificial Sequence
  Description of Artificial Sequence: Synthetic oligonucleotide
uucguauugcuuccaguag

SEQ ID NO: 1387681 - RNA, 19 nt, Artificial Sequence
  Description of Artificial Sequence: Synthetic oligonucleotide
augcuuauguaagagauca

SEQ ID NO: 1387682 - RNA, 19 nt, Artificial Sequence
  Description of Artificial Sequence: Synthetic oligonucleotide
cauaugauccacauauguc

SEQ ID NO: 1387683 - RNA, 19 nt, Artificial Sequence
  Description of Artificial Sequence: Synthetic oligonucleotide
uuucguauugcuuccagua

SEQ ID NO: 1387684 - RNA, 19 nt, Artificial Sequence
  Description of Artificial Sequence: Synthetic oligonucleotide
ucaauaugcuuauguaaga

SEQ ID NO: 1387685 - RNA, 19 nt, Artificial Sequence
  Description of Artificial Sequence: Synthetic oligonucleotide
aauaggaagcaaaacacua

SEQ ID NO: 1387686 - RNA, 19 nt, Artificial Sequence
  Description of Artificial Sequence: Synthetic oligonucleotide
cuguacuagaggaggagcg

SEQ ID NO: 1387687 - RNA, 19 nt, Artificial Sequence
  Description of Artificial Sequence: Synthetic oligonucleotide
aguaguacacuccuugcgu

SEQ ID NO: 1387688 - RNA, 19 nt, Artificial Sequence
  Description of Artificial Sequence: Synthetic oligonucleotide
cagguauaacuugugaugg

SEQ ID NO: 1387689 - RNA, 19 nt, Artificial Sequence
  Description of Artificial Sequence: Synthetic oligonucleotide
acuuagugguuuauuagac

SEQ ID NO: 1387690 - RNA, 19 nt, Artificial Sequence
  Description of Artificial Sequence: Synthetic oligonucleotide
gaagcucuuaacgaagaag

SEQ ID NO: 1387691 - RNA, 19 nt, Artificial Sequence
  Description of Artificial Sequence: Synthetic oligonucleotide
cuuauguaagagaucagca

SEQ ID NO: 1387692 - RNA, 19 nt, Artificial Sequence
  Description of Artificial Sequence: Synthetic oligonucleotide
cucuuaacgaagaaguuga

SEQ ID NO: 1387693 - RNA, 19 nt, Artificial Sequence
  Description of Artificial Sequence: Synthetic oligonucleotide
ucagaagcagguauaacuu

SEQ ID NO: 1387694 - RNA, 19 nt, Artificial Sequence
  Description of Artificial Sequence: Synthetic oligonucleotide
agcaaaacacuagaaugac

SEQ ID NO: 1387695 - RNA, 19 nt, Artificial Sequence
  Description of Artificial Sequence: Synthetic oligonucleotide
acugugacaggugaugacg

SEQ ID NO: 1387696 - RNA, 19 nt, Artificial Sequence
  Description of Artificial Sequence: Synthetic oligonucleotide
acugaucacaggcagggug

SEQ ID NO: 1387697 - RNA, 19 nt, Artificial Sequence
  Description of Artificial Sequence: Synthetic oligonucleotide
auauaaucgaggcaguguu

SEQ ID NO: 1387698 - RNA, 19 nt, Artificial Sequence
  Description of Artificial Sequence: Synthetic oligonucleotide
aaaccuguagcagaacuga

SEQ ID NO: 1387699 - RNA, 19 nt, Artificial Sequence
  Description of Artificial Sequence: Synthetic oligonucleotide
uucgacuuuucguagcuga

SEQ ID NO: 1387700 - RNA, 19 nt, Artificial Sequence
  Description of Artificial Sequence: Synthetic oligonucleotide
uaacgaagaaguugacaag

SEQ ID NO: 1387701 - RNA, 19 nt, Artificial Sequence
  Description of Artificial Sequence: Synthetic oligonucleotide
cugaucacaggcagggugg

SEQ ID NO: 1387702 - RNA, 19 nt, Artificial Sequence
  Description of Artificial Sequence: Synthetic oligonucleotide
cucauuaacagacacagcu

SEQ ID NO: 1387703 - RNA, 19 nt, Artificial Sequence
  Description of Artificial Sequence: Synthetic oligonucleotide
ucuagcaaaccuguagcag

SEQ ID NO: 1387704 - RNA, 19 nt, Artificial Sequence
  Description of Artificial Sequence: Synthetic oligonucleotide
uuccaugcuuaauacuuag

SEQ ID NO: 1387705 - RNA, 19 nt, Artificial Sequence
  Description of Artificial Sequence: Synthetic oligonucleotide
gacaagguagaugggagag

SEQ ID NO: 1387706 - RNA, 19 nt, Artificial Sequence
  Description of Artificial Sequence: Synthetic oligonucleotide
aucgagaaauggaauaagg

SEQ ID NO: 1387707 - RNA, 19 nt, Artificial Sequence
  Description of Artificial Sequence: Synthetic oligonucleotide
caaagcaacuuccuuacuc

SEQ ID NO: 1387708 - RNA, 19 nt, Artificial Sequence
  Description of Artificial Sequence: Synthetic oligonucleotide
cuuuucguagcugaauacc

SEQ ID NO: 1387709 - RNA, 19 nt, Artificial Sequence
  Description of Artificial Sequence: Synthetic oligonucleotide
ucguauugcuuccaguagu

SEQ ID NO: 1387710 - RNA, 19 nt, Artificial Sequence
  Description of Artificial Sequence: Synthetic oligonucleotide
agauaagccacuguaaaau

SEQ ID NO: 1387711 - RNA, 19 nt, Artificial Sequence
  Description of Artificial Sequence: Synthetic oligonucleotide
auuaacagacacagcuacc

SEQ ID NO: 1387712 - RNA, 19 nt, Artificial Sequence
  Description of Artificial Sequence: Synthetic oligonucleotide
auaugcuauuacuucucag

SEQ ID NO: 1387713 - RNA, 19 nt, Artificial Sequence
  Description of Artificial Sequence: Synthetic oligonucleotide
auaugcuuauguaagagau

SEQ ID NO: 1387714 - RNA, 19 nt, Artificial Sequence
  Description of Artificial Sequence: Synthetic oligonucleotide
ucugacuaaacggcaaggc

SEQ ID NO: 1387715 - RNA, 19 nt, Artificial Sequence
  Description of Artificial Sequence: Synthetic oligonucleotide
acuaagacccucuccucag

SEQ ID NO: 1387716 - RNA, 19 nt, Artificial Sequence
  Description of Artificial Sequence: Synthetic oligonucleotide
auauaugcuauuacuucuc

SEQ ID NO: 1387717 - RNA, 19 nt, Artificial Sequence
  Description of Artificial Sequence: Synthetic oligonucleotide
gcuauuacuucucagagaa

SEQ ID NO: 1387718 - RNA, 19 nt, Artificial Sequence
  Description of Artificial Sequence: Synthetic oligonucleotide
uugcaauacacagcaaagc

SEQ ID NO: 1387719 - RNA, 19 nt, Artificial Sequence
  Description of Artificial Sequence: Synthetic oligonucleotide
gaacaagcgccacaaagga

SEQ ID NO: 1387720 - RNA, 19 nt, Artificial Sequence
  Description of Artificial Sequence: Synthetic oligonucleotide
acuacaagcuaaauguucu

SEQ ID NO: 1387721 - RNA, 19 nt, Artificial Sequence
  Description of Artificial Sequence: Synthetic oligonucleotide
ggcucauuaacagacacag

SEQ ID NO: 1387722 - RNA, 19 nt, Artificial Sequence
  Description of Artificial Sequence: Synthetic oligonucleotide
cuugcgucacugaucacag

SEQ ID NO: 1387723 - RNA, 19 nt, Artificial Sequence
  Description of Artificial Sequence: Synthetic oligonucleotide
ucauuaacagacacagcua

SEQ ID NO: 1387724 - RNA, 19 nt, Artificial Sequence
  Description of Artificial Sequence: Synthetic oligonucleotide
uucuagcaaaccuguagca

SEQ ID NO: 1387725 - RNA, 19 nt, Artificial Sequence
  Description of Artificial Sequence: Synthetic oligonucleotide
uucaacacuacaagcuaaa

SEQ ID NO: 1387726 - RNA, 19 nt, Artificial Sequence
  Description of Artificial Sequence: Synthetic oligonucleotide
ucuucgacuuuucguagcu

SEQ ID NO: 1387727 - RNA, 19 nt, Artificial Sequence
  Description of Artificial Sequence: Synthetic oligonucleotide
cauguggucugacuaagac

SEQ ID NO: 1387728 - RNA, 19 nt, Artificial Sequence
  Description of Artificial Sequence: Synthetic oligonucleotide
ggaauaggaagcaaaacac

SEQ ID NO: 1387729 - RNA, 19 nt, Artificial Sequence
  Description of Artificial Sequence: Synthetic oligonucleotide
auuuaguuugaaauauaug

SEQ ID NO: 1387730 - RNA, 19 nt, Artificial Sequence
  Description of Artificial Sequence: Synthetic oligonucleotide
cugcaccucaccuuguggg

SEQ ID NO: 1387731 - RNA, 19 nt, Artificial Sequence
  Description of Artificial Sequence: Synthetic oligonucleotide
uaagccacuguaaaauauu

SEQ ID NO: 1387732 - RNA, 19 nt, Artificial Sequence
  Description of Artificial Sequence: Synthetic oligonucleotide
uaauggaacauggggaccu

SEQ ID NO: 1387733 - RNA, 19 nt, Artificial Sequence
  Description of Artificial Sequence: Synthetic oligonucleotide
uaugcuuauguaagagauc

SEQ ID NO: 1387734 - RNA, 19 nt, Artificial Sequence
  Description of Artificial Sequence: Synthetic oligonucleotide
guguauucauauaaucgag

SEQ ID NO: 1387735 - RNA, 19 nt, Artificial Sequence
  Description of Artificial Sequence: Synthetic oligonucleotide
agcagguauaacuugugau

SEQ ID NO: 1387736 - RNA, 19 nt, Artificial Sequence
  Description of Artificial Sequence: Synthetic oligonucleotide
caguaguacacuccuugcg

SEQ ID NO: 1387737 - RNA, 19 nt, Artificial Sequence
  Description of Artificial Sequence: Synthetic oligonucleotide
cacuacaagcuaaauguuc

SEQ ID NO: 1387738 - RNA, 19 nt, Artificial Sequence
  Description of Artificial Sequence: Synthetic oligonucleotide
caaaccuguagcagaacug

SEQ ID NO: 1387739 - RNA, 19 nt, Artificial Sequence
  Description of Artificial Sequence: Synthetic oligonucleotide
ugaguaagauccauccaua

SEQ ID NO: 1387740 - RNA, 19 nt, Artificial Sequence
  Description of Artificial Sequence: Synthetic oligonucleotide
cugugacaggugaugacgg

SEQ ID NO: 1387741 - RNA, 19 nt, Artificial Sequence
  Description of Artificial Sequence: Synthetic oligonucleotide
aacaagcgccacaaaggac

SEQ ID NO: 1387742 - RNA, 19 nt, Artificial Sequence
  Description of Artificial Sequence: Synthetic oligonucleotide
ugcuauuacuucucagaga

SEQ ID NO: 1387743 - RNA, 19 nt, Artificial Sequence
  Description of Artificial Sequence: Synthetic oligonucleotide
agaaauggaauaaggcuca

SEQ ID NO: 1387744 - RNA, 19 nt, Artificial Sequence
  Description of Artificial Sequence: Synthetic oligonucleotide
aagaacgccaggggcaauc

SEQ ID NO: 1387745 - RNA, 19 nt, Artificial Sequence
  Description of Artificial Sequence: Synthetic oligonucleotide
uuuucguauugcuuccagu

SEQ ID NO: 1387746 - RNA, 19 nt, Artificial Sequence
  Description of Artificial Sequence: Synthetic oligonucleotide
acaaaggacaauugugcau

SEQ ID NO: 1387747 - RNA, 19 nt, Artificial Sequence
  Description of Artificial Sequence: Synthetic oligonucleotide
ucaucugacuaaacggcaa

SEQ ID NO: 1387748 - RNA, 19 nt, Artificial Sequence
  Description of Artificial Sequence: Synthetic oligonucleotide
cagucuugcaauacacagc

SEQ ID NO: 1387749 - RNA, 19 nt, Artificial Sequence
  Description of Artificial Sequence: Synthetic oligonucleotide
cuagcaaaccuguagcaga

SEQ ID NO: 1387750 - RNA, 19 nt, Artificial Sequence
  Description of Artificial Sequence: Synthetic oligonucleotide
agcaacuucaauaugcuua

SEQ ID NO: 1387751 - RNA, 19 nt, Artificial Sequence
  Description of Artificial Sequence: Synthetic oligonucleotide
uucauauaaucgaggcagu

SEQ ID NO: 1387752 - RNA, 19 nt, Artificial Sequence
  Description of Artificial Sequence: Synthetic oligonucleotide
ucauauaaucgaggcagug

SEQ ID NO: 1387753 - RNA, 19 nt, Artificial Sequence
  Description of Artificial Sequence: Synthetic oligonucleotide
aacuuccuuacuccagcca

SEQ ID NO: 1387754 - RNA, 19 nt, Artificial Sequence
  Description of Artificial Sequence: Synthetic oligonucleotide
acugccggagcuugcaaag

SEQ ID NO: 1387755 - RNA, 19 nt, Artificial Sequence
  Description of Artificial Sequence: Synthetic oligonucleotide
uuaauggaacauggggacc

SEQ ID NO: 1387756 - RNA, 19 nt, Artificial Sequence
  Description of Artificial Sequence: Synthetic oligonucleotide
ugauacagguggguauugg

SEQ ID NO: 1387757 - RNA, 19 nt, Artificial Sequence
  Description of Artificial Sequence: Synthetic oligonucleotide
uccauaugauccacauaug

SEQ ID NO: 1387758 - RNA, 19 nt, Artificial Sequence
  Description of Artificial Sequence: Synthetic oligonucleotide
aauguucuuucugagugua

SEQ ID NO: 1387759 - RNA, 19 nt, Artificial Sequence
  Description of Artificial Sequence: Synthetic oligonucleotide
ugugggaguggaugaacug

SEQ ID NO: 1387760 - RNA, 19 nt, Artificial Sequence
  Description of Artificial Sequence: Synthetic oligonucleotide
gcuaaauguucuuucugag

SEQ ID NO: 1387761 - RNA, 19 nt, Artificial Sequence
  Description of Artificial Sequence: Synthetic oligonucleotide
uggaugacgcuuuggcuca

SEQ ID NO: 1387762 - RNA, 19 nt, Artificial Sequence
  Description of Artificial Sequence: Synthetic oligonucleotide
uaaggcucauuaacagaca

SEQ ID NO: 1387763 - RNA, 19 nt, Artificial Sequence
  Description of Artificial Sequence: Synthetic oligonucleotide
gguauaacuugugauggag

SEQ ID NO: 1387764 - RNA, 19 nt, Artificial Sequence
  Description of Artificial Sequence: Synthetic oligonucleotide
ugacaagguagaugggaga

SEQ ID NO: 1387765 - RNA, 19 nt, Artificial Sequence
  Description of Artificial Sequence: Synthetic oligonucleotide
agugaguaagauccaucca

SEQ ID NO: 1387766 - RNA, 19 nt, Artificial Sequence
  Description of Artificial Sequence: Synthetic oligonucleotide
uuuccaugcuuaauacuua

SEQ ID NO: 1387767 - RNA, 19 nt, Artificial Sequence
  Description of Artificial Sequence: Synthetic oligonucleotide
ucaauucgcucaugcuuag

SEQ ID NO: 1387768 - RNA, 19 nt, Artificial Sequence
  Description of Artificial Sequence: Synthetic oligonucleotide
uaagacccucuccucagcu

SEQ ID NO: 1387769 - RNA, 19 nt, Artificial Sequence
  Description of Artificial Sequence: Synthetic oligonucleotide
acggccgaaugccuggugg

SEQ ID NO: 1387770 - RNA, 19 nt, Artificial Sequence
  Description of Artificial Sequence: Synthetic oligonucleotide
caacaucguuuucaauucg

SEQ ID NO: 1387771 - RNA, 19 nt, Artificial Sequence
  Description of Artificial Sequence: Synthetic oligonucleotide
ccaugcuuaauacuuagug

SEQ ID NO: 1387772 - RNA, 19 nt, Artificial Sequence
  Description of Artificial Sequence: Synthetic oligonucleotide
ugcuuauguaagagaucag

SEQ ID NO: 1387773 - RNA, 19 nt, Artificial Sequence
  Description of Artificial Sequence: Synthetic oligonucleotide
uggagaaggcuguacuaga

SEQ ID NO: 1387774 - RNA, 19 nt, Artificial Sequence
  Description of Artificial Sequence: Synthetic oligonucleotide
gacuaagacccucuccuca

SEQ ID NO: 1387775 - RNA, 19 nt, Artificial Sequence
  Description of Artificial Sequence: Synthetic oligonucleotide
auaacuugugauggaggag

SEQ ID NO: 1387776 - RNA, 19 nt, Artificial Sequence
  Description of Artificial Sequence: Synthetic oligonucleotide
agagugaguaagauccauc

SEQ ID NO: 1387777 - RNA, 19 nt, Artificial Sequence
  Description of Artificial Sequence: Synthetic oligonucleotide
augacggccgaaugccugg

SEQ ID NO: 1387778 - RNA, 19 nt, Artificial Sequence
  Description of Artificial Sequence: Synthetic oligonucleotide
aucugacuaaacggcaagg

SEQ ID NO: 1387779 - RNA, 19 nt, Artificial Sequence
  Description of Artificial Sequence: Synthetic oligonucleotide
caucguuuucaauucgcuc

SEQ ID NO: 1387780 - RNA, 19 nt, Artificial Sequence
  Description of Artificial Sequence: Synthetic oligonucleotide
ucuuaacgaagaaguugac

SEQ ID NO: 1387781 - RNA, 19 nt, Artificial Sequence
  Description of Artificial Sequence: Synthetic oligonucleotide
gauaagccacuguaaaaua

SEQ ID NO: 1387782 - RNA, 19 nt, Artificial Sequence
  Description of Artificial Sequence: Synthetic oligonucleotide
ggugaugacggccgaaugc

SEQ ID NO: 1387783 - RNA, 19 nt, Artificial Sequence
  Description of Artificial Sequence: Synthetic oligonucleotide
ugacgcuuuggcucagaag

SEQ ID NO: 1387784 - RNA, 19 nt, Artificial Sequence
  Description of Artificial Sequence: Synthetic oligonucleotide
cuggcacagucucacauac

SEQ ID NO: 1387785 - RNA, 19 nt, Artificial Sequence
  Description of Artificial Sequence: Synthetic oligonucleotide
uucguagcugaauaccuuu

SEQ ID NO: 1387786 - RNA, 19 nt, Artificial Sequence
  Description of Artificial Sequence: Synthetic oligonucleotide
uguacuagaggaggagcga

SEQ ID NO: 1387787 - RNA, 19 nt, Artificial Sequence
  Description of Artificial Sequence: Synthetic oligonucleotide
gugaugacggccgaaugcc

SEQ ID NO: 1387788 - RNA, 19 nt, Artificial Sequence
  Description of Artificial Sequence: Synthetic oligonucleotide
caggguggauggaugacgc

SEQ ID NO: 1387789 - RNA, 19 nt, Artificial Sequence
  Description of Artificial Sequence: Synthetic oligonucleotide
auugugcauucagucuugc

SEQ ID NO: 1387790 - RNA, 19 nt, Artificial Sequence
  Description of Artificial Sequence: Synthetic oligonucleotide
ugcuuaauacuuagugguu

SEQ ID NO: 1387791 - RNA, 19 nt, Artificial Sequence
  Description of Artificial Sequence: Synthetic oligonucleotide
cagcucuagcuacuggugg

SEQ ID NO: 1387792 - RNA, 19 nt, Artificial Sequence
  Description of Artificial Sequence: Synthetic oligonucleotide
auaagauaagccacuguaa

SEQ ID NO: 1387793 - RNA, 19 nt, Artificial Sequence
  Description of Artificial Sequence: Synthetic oligonucleotide
cucuucgacuuuucguagc

SEQ ID NO: 1387794 - RNA, 19 nt, Artificial Sequence
  Description of Artificial Sequence: Synthetic oligonucleotide
uccaugcuuaauacuuagu

SEQ ID NO: 1387795 - RNA, 19 nt, Artificial Sequence
  Description of Artificial Sequence: Synthetic oligonucleotide
cuguucacgcugcucuucg

SEQ ID NO: 1387796 - RNA, 19 nt, Artificial Sequence
  Description of Artificial Sequence: Synthetic oligonucleotide
ggaauaaggcucauuaaca

SEQ ID NO: 1387797 - RNA, 19 nt, Artificial Sequence
  Description of Artificial Sequence: Synthetic oligonucleotide
uauaaucgaggcaguguuu

SEQ ID NO: 1387798 - RNA, 19 nt, Artificial Sequence
  Description of Artificial Sequence: Synthetic oligonucleotide
cacagcaaugcgccgagac

SEQ ID NO: 1387799 - RNA, 19 nt, Artificial Sequence
  Description of Artificial Sequence: Synthetic oligonucleotide
gagcgauuggaggaggagc

SEQ ID NO: 1387800 - RNA, 19 nt, Artificial Sequence
  Description of Artificial Sequence: Synthetic oligonucleotide
caucgagaaauggaauaag

SEQ ID NO: 1387801 - RNA, 19 nt, Artificial Sequence
  Description of Artificial Sequence: Synthetic oligonucleotide
uucacgcugcucuucgacu

SEQ ID NO: 1387802 - RNA, 19 nt, Artificial Sequence
  Description of Artificial Sequence: Synthetic oligonucleotide
acaucgagaaauggaauaa

SEQ ID NO: 1387803 - RNA, 19 nt, Artificial Sequence
  Description of Artificial Sequence: Synthetic oligonucleotide
acagcaaugcgccgagaca

SEQ ID NO: 1387804 - RNA, 19 nt, Artificial Sequence
  Description of Artificial Sequence: Synthetic oligonucleotide
gggcauuaauggaacaugg

SEQ ID NO: 1387805 - RNA, 19 nt, Artificial Sequence
  Description of Artificial Sequence: Synthetic oligonucleotide
uccacauaugucugugguc

SEQ ID NO: 1387806 - RNA, 19 nt, Artificial Sequence
  Description of Artificial Sequence: Synthetic oligonucleotide
ucgcucaugcuuagcuucc

SEQ ID NO: 1387807 - RNA, 19 nt, Artificial Sequence
  Description of Artificial Sequence: Synthetic oligonucleotide
guaguacacuccuugcguc

SEQ ID NO: 1387808 - RNA, 19 nt, Artificial Sequence
  Description of Artificial Sequence: Synthetic oligonucleotide
acaagguagaugggagagg

SEQ ID NO: 1387809 - RNA, 19 nt, Artificial Sequence
  Description of Artificial Sequence: Synthetic oligonucleotide
cuccuugcgucacugauca

SEQ ID NO: 1387810 - RNA, 19 nt, Artificial Sequence
  Description of Artificial Sequence: Synthetic oligonucleotide
cugacuaaacggcaaggca

SEQ ID NO: 1387811 - RNA, 19 nt, Artificial Sequence
  Description of Artificial Sequence: Synthetic oligonucleotide
uuaauacuuagugguuuau

SEQ ID NO: 1387812 - RNA, 19 nt, Artificial Sequence
  Description of Artificial Sequence: Synthetic oligonucleotide
cuagaaugaccaaauauuu

SEQ ID NO: 1387813 - RNA, 19 nt, Artificial Sequence
  Description of Artificial Sequence: Synthetic oligonucleotide
gcucuuaacgaagaaguug

SEQ ID NO: 1387814 - RNA, 19 nt, Artificial Sequence
  Description of Artificial Sequence: Synthetic oligonucleotide
uacaagcuaaauguucuuu

SEQ ID NO: 1387815 - RNA, 19 nt, Artificial Sequence
  Description of Artificial Sequence: Synthetic oligonucleotide
gaugacggccgaaugccug

SEQ ID NO: 1387816 - RNA, 19 nt, Artificial Sequence
  Description of Artificial Sequence: Synthetic oligonucleotide
uggugguacugccggagcu

SEQ ID NO: 1387817 - RNA, 19 nt, Artificial Sequence
  Description of Artificial Sequence: Synthetic oligonucleotide
uacuccagccagucuaagu

SEQ ID NO: 1387818 - RNA, 19 nt, Artificial Sequence
  Description of Artificial Sequence: Synthetic oligonucleotide
uaauacuuagugguuuauu

SEQ ID NO: 1387819 - RNA, 19 nt, Artificial Sequence
  Description of Artificial Sequence: Synthetic oligonucleotide
gacuaaacggcaaggcaga

SEQ ID NO: 1387820 - RNA, 19 nt, Artificial Sequence
  Description of Artificial Sequence: Synthetic oligonucleotide
agguauaacuugugaugga

SEQ ID NO: 1387821 - RNA, 19 nt, Artificial Sequence
  Description of Artificial Sequence: Synthetic oligonucleotide
augaggaauaggaagcaaa

SEQ ID NO: 1387822 - RNA, 19 nt, Artificial Sequence
  Description of Artificial Sequence: Synthetic oligonucleotide
ucgacuuuucguagcugaa

SEQ ID NO: 1387823 - RNA, 19 nt, Artificial Sequence
  Description of Artificial Sequence: Synthetic oligonucleotide
uaaucgaggcaguguuucu

SEQ ID NO: 1387824 - RNA, 19 nt, Artificial Sequence
  Description of Artificial Sequence: Synthetic oligonucleotide
guagaugggagagguggag

SEQ ID NO: 1387825 - RNA, 19 nt, Artificial Sequence
  Description of Artificial Sequence: Synthetic oligonucleotide
guaagagaucagcaucauc

SEQ ID NO: 1387826 - RNA, 19 nt, Artificial Sequence
  Description of Artificial Sequence: Synthetic oligonucleotide
gugacaggugaugacggcc

SEQ ID NO: 1387827 - RNA, 19 nt, Artificial Sequence
  Description of Artificial Sequence: Synthetic oligonucleotide
aagccacuguaaaauauuu

SEQ ID NO: 1387828 - RNA, 19 nt, Artificial Sequence
  Description of Artificial Sequence: Synthetic oligonucleotide
aaucgaggcaguguuucuu

SEQ ID NO: 1387829 - RNA, 19 nt, Artificial Sequence
  Description of Artificial Sequence: Synthetic oligonucleotide
uugugcauucagucuugca

SEQ ID NO: 1387830 - RNA, 19 nt, Artificial Sequence
  Description of Artificial Sequence: Synthetic oligonucleotide
cuggucagaaguucacuca

SEQ ID NO: 1387831 - RNA, 19 nt, Artificial Sequence
  Description of Artificial Sequence: Synthetic oligonucleotide
ugaagaacgccaggggcaa

SEQ ID NO: 1387832 - RNA, 19 nt, Artificial Sequence
  Description of Artificial Sequence: Synthetic oligonucleotide
agcgauuggaggaggagcu

SEQ ID NO: 1387833 - RNA, 19 nt, Artificial Sequence
  Description of Artificial Sequence: Synthetic oligonucleotide
aauggaacauggggaccug

SEQ ID NO: 1387834 - RNA, 19 nt, Artificial Sequence
  Description of Artificial Sequence: Synthetic oligonucleotide
ugaugacggccgaaugccu

SEQ ID NO: 1387835 - RNA, 19 nt, Artificial Sequence
  Description of Artificial Sequence: Synthetic oligonucleotide
agacacagcuaccuucaaa

SEQ ID NO: 1387836 - RNA, 19 nt, Artificial Sequence
  Description of Artificial Sequence: Synthetic oligonucleotide
cuaagacccucuccucagc

SEQ ID NO: 1387837 - RNA, 19 nt, Artificial Sequence
  Description of Artificial Sequence: Synthetic oligonucleotide
agcaacuuccuuacuccag

SEQ ID NO: 1387838 - RNA, 19 nt, Artificial Sequence
  Description of Artificial Sequence: Synthetic oligonucleotide
ucaacacuacaagcuaaau

SEQ ID NO: 1387839 - RNA, 19 nt, Artificial Sequence
  Description of Artificial Sequence: Synthetic oligonucleotide
acuccuugcgucacugauc

SEQ ID NO: 1387840 - RNA, 19 nt, Artificial Sequence
  Description of Artificial Sequence: Synthetic oligonucleotide
cacuagaaugaccaaauau

SEQ ID NO: 1387841 - RNA, 19 nt, Artificial Sequence
  Description of Artificial Sequence: Synthetic oligonucleotide
aggugaugacggccgaaug

SEQ ID NO: 1387842 - RNA, 19 nt, Artificial Sequence
  Description of Artificial Sequence: Synthetic oligonucleotide
uacugccggagcuugcaaa

SEQ ID NO: 1387843 - RNA, 19 nt, Artificial Sequence
  Description of Artificial Sequence: Synthetic oligonucleotide
uguaagagaucagcaucau

SEQ ID NO: 1387844 - RNA, 19 nt, Artificial Sequence
  Description of Artificial Sequence: Synthetic oligonucleotide
ucguagcugaauaccuuuu

SEQ ID NO: 1387845 - RNA, 19 nt, Artificial Sequence
  Description of Artificial Sequence: Synthetic oligonucleotide
auucgcucaugcuuagcuu

SEQ ID NO: 1387846 - RNA, 19 nt, Artificial Sequence
  Description of Artificial Sequence: Synthetic oligonucleotide
agcugggugaagaacgcca

SEQ ID NO: 1387847 - RNA, 19 nt, Artificial Sequence
  Description of Artificial Sequence: Synthetic oligonucleotide
acuaaacggcaaggcagag

SEQ ID NO: 1387848 - RNA, 19 nt, Artificial Sequence
  Description of Artificial Sequence: Synthetic oligonucleotide
uugcgucacugaucacagg

SEQ ID NO: 1387849 - RNA, 19 nt, Artificial Sequence
  Description of Artificial Sequence: Synthetic oligonucleotide
agcaaaccuguagcagaac

SEQ ID NO: 1387850 - RNA, 19 nt, Artificial Sequence
  Description of Artificial Sequence: Synthetic oligonucleotide
guggguauugguuuugcau

SEQ ID NO: 1387851 - RNA, 19 nt, Artificial Sequence
  Description of Artificial Sequence: Synthetic oligonucleotide
auggaacauggggaccugg

SEQ ID NO: 1387852 - RNA, 19 nt, Artificial Sequence
  Description of Artificial Sequence: Synthetic oligonucleotide
acacuagaaugaccaaaua

SEQ ID NO: 1387853 - RNA, 19 nt, Artificial Sequence
  Description of Artificial Sequence: Synthetic oligonucleotide
ggggcauuaauggaacaug

SEQ ID NO: 1387854 - RNA, 19 nt, Artificial Sequence
  Description of Artificial Sequence: Synthetic oligonucleotide
gcaacugugacaggugaug

SEQ ID NO: 1387855 - RNA, 19 nt, Artificial Sequence
  Description of Artificial Sequence: Synthetic oligonucleotide
uuccuuacuccagccaguc

SEQ ID NO: 1387856 - RNA, 19 nt, Artificial Sequence
  Description of Artificial Sequence: Synthetic oligonucleotide
agcuugcaaagcuguggcu

SEQ ID NO: 1387857 - RNA, 19 nt, Artificial Sequence
  Description of Artificial Sequence: Synthetic oligonucleotide
ugcuuagcuuccuguucac

SEQ ID NO: 1387858 - RNA, 19 nt, Artificial Sequence
  Description of Artificial Sequence: Synthetic oligonucleotide
uccuuacuccagccagucu

SEQ ID NO: 1387859 - RNA, 19 nt, Artificial Sequence
  Description of Artificial Sequence: Synthetic oligonucleotide
aggaagcaaaacacuagaa

SEQ ID NO: 1387860 - RNA, 19 nt, Artificial Sequence
  Description of Artificial Sequence: Synthetic oligonucleotide
caauugugcauucagucuu

SEQ ID NO: 1387861 - RNA, 19 nt, Artificial Sequence
  Description of Artificial Sequence: Synthetic oligonucleotide
gaagucauugaagcucuua

SEQ ID NO: 1387862 - RNA, 19 nt, Artificial Sequence
  Description of Artificial Sequence: Synthetic oligonucleotide
cuuacuccagccagucuaa

SEQ ID NO: 1387863 - RNA, 19 nt, Artificial Sequence
  Description of Artificial Sequence: Synthetic oligonucleotide
uuacuccagccagucuaag

SEQ ID NO: 1387864 - RNA, 19 nt, Artificial Sequence
  Description of Artificial Sequence: Synthetic oligonucleotide
cauauaaucgaggcagugu

SEQ ID NO: 1387865 - RNA, 19 nt, Artificial Sequence
  Description of Artificial Sequence: Synthetic oligonucleotide
gcaggguggauggaugacg

SEQ ID NO: 1387866 - RNA, 19 nt, Artificial Sequence
  Description of Artificial Sequence: Synthetic oligonucleotide
agccagucuaagucauccu

SEQ ID NO: 1387867 - RNA, 19 nt, Artificial Sequence
  Description of Artificial Sequence: Synthetic oligonucleotide
gcuguacuagaggaggagc

SEQ ID NO: 1387868 - RNA, 19 nt, Artificial Sequence
  Description of Artificial Sequence: Synthetic oligonucleotide
gggcaaucugaagaggagc

SEQ ID NO: 1387869 - RNA, 19 nt, Artificial Sequence
  Description of Artificial Sequence: Synthetic oligonucleotide
cugaauaccuuuucguauu

SEQ ID NO: 1387870 - RNA, 19 nt, Artificial Sequence
  Description of Artificial Sequence: Synthetic oligonucleotide
gaacgccaggggcaaucug

SEQ ID NO: 1387871 - RNA, 19 nt, Artificial Sequence
  Description of Artificial Sequence: Synthetic oligonucleotide
agcaaugcgccgagacagg

SEQ ID NO: 1387872 - RNA, 19 nt, Artificial Sequence
  Description of Artificial Sequence: Synthetic oligonucleotide
caagguagaugggagaggu

SEQ ID NO: 1387873 - RNA, 19 nt, Artificial Sequence
  Description of Artificial Sequence: Synthetic oligonucleotide
guuauucauuaugaggaau

SEQ ID NO: 1387874 - RNA, 19 nt, Artificial Sequence
  Description of Artificial Sequence: Synthetic oligonucleotide
aaccuguagcagaacugau

SEQ ID NO: 1387875 - RNA, 19 nt, Artificial Sequence
  Description of Artificial Sequence: Synthetic oligonucleotide
agcuaccuucaaaauuuca

SEQ ID NO: 1387876 - RNA, 19 nt, Artificial Sequence
  Description of Artificial Sequence: Synthetic oligonucleotide
cugauacagguggguauug

SEQ ID NO: 1387877 - RNA, 19 nt, Artificial Sequence
  Description of Artificial Sequence: Synthetic oligonucleotide
cgagaaauggaauaaggcu

SEQ ID NO: 1387878 - RNA, 19 nt, Artificial Sequence
  Description of Artificial Sequence: Synthetic oligonucleotide
gcaaaccuguagcagaacu

SEQ ID NO: 1387879 - RNA, 19 nt, Artificial Sequence
  Description of Artificial Sequence: Synthetic oligonucleotide
ggcucauguggucugacua

SEQ ID NO: 1387880 - RNA, 19 nt, Artificial Sequence
  Description of Artificial Sequence: Synthetic oligonucleotide
cuaaacggcaaggcagaga

SEQ ID NO: 1387881 - RNA, 19 nt, Artificial Sequence
  Description of Artificial Sequence: Synthetic oligonucleotide
gucugacuaagacccucuc

SEQ ID NO: 1387882 - RNA, 19 nt, Artificial Sequence
  Description of Artificial Sequence: Synthetic oligonucleotide
agaacgccaggggcaaucu

SEQ ID NO: 1387883 - RNA, 19 nt, Artificial Sequence
  Description of Artificial Sequence: Synthetic oligonucleotide
cuucgacuuuucguagcug

SEQ ID NO: 1387884 - RNA, 19 nt, Artificial Sequence
  Description of Artificial Sequence: Synthetic oligonucleotide
auaugucuguggucuuguu

SEQ ID NO: 1387885 - RNA, 19 nt, Artificial Sequence
  Description of Artificial Sequence: Synthetic oligonucleotide
ggggcaaucugaagaggag

SEQ ID NO: 1387886 - RNA, 19 nt, Artificial Sequence
  Description of Artificial Sequence: Synthetic oligonucleotide
accuguagcagaacugaua

SEQ ID NO: 1387887 - RNA, 19 nt, Artificial Sequence
  Description of Artificial Sequence: Synthetic oligonucleotide
cacagcuaccuucaaaauu

SEQ ID NO: 1387888 - RNA, 19 nt, Artificial Sequence
  Description of Artificial Sequence: Synthetic oligonucleotide
ccuuacuccagccagucua

SEQ ID NO: 1387889 - RNA, 19 nt, Artificial Sequence
  Description of Artificial Sequence: Synthetic oligonucleotide
ggagcgauuggaggaggag

SEQ ID NO: 1387890 - RNA, 19 nt, Artificial Sequence
  Description of Artificial Sequence: Synthetic oligonucleotide
ccauaugauccacauaugu

SEQ ID NO: 1387891 - RNA, 19 nt, Artificial Sequence
  Description of Artificial Sequence: Synthetic oligonucleotide
agcucuuaacgaagaaguu

SEQ ID NO: 1387892 - RNA, 19 nt, Artificial Sequence
  Description of Artificial Sequence: Synthetic oligonucleotide
acacuccuugcgucacuga

SEQ ID NO: 1387893 - RNA, 19 nt, Artificial Sequence
  Description of Artificial Sequence: Synthetic oligonucleotide
gacggccgaaugccuggug

SEQ ID NO: 1387894 - RNA, 19 nt, Artificial Sequence
  Description of Artificial Sequence: Synthetic oligonucleotide
gggcucacaaacacaggug

SEQ ID NO: 1387895 - RNA, 19 nt, Artificial Sequence
  Description of Artificial Sequence: Synthetic oligonucleotide
aaugagaggcugggccauu

SEQ ID NO: 1387896 - RNA, 19 nt, Artificial Sequence
  Description of Artificial Sequence: Synthetic oligonucleotide
gcagcucuagcuacuggug

SEQ ID NO: 1387897 - RNA, 19 nt, Artificial Sequence
  Description of Artificial Sequence: Synthetic oligonucleotide
gcucauguggucugacuaa

SEQ ID NO: 1387898 - RNA, 19 nt, Artificial Sequence
  Description of Artificial Sequence: Synthetic oligonucleotide
caacuucaauaugcuuaug

SEQ ID NO: 1387899 - RNA, 19 nt, Artificial Sequence
  Description of Artificial Sequence: Synthetic oligonucleotide
cuccacagcaaugcgccga

SEQ ID NO: 1387900 - RNA, 19 nt, Artificial Sequence
  Description of Artificial Sequence: Synthetic oligonucleotide
gagagugaguaagauccau

SEQ ID NO: 1387901 - RNA, 19 nt, Artificial Sequence
  Description of Artificial Sequence: Synthetic oligonucleotide
ccuugcgucacugaucaca

SEQ ID NO: 1387902 - RNA, 19 nt, Artificial Sequence
  Description of Artificial Sequence: Synthetic oligonucleotide
cgauuggaggaggagcugg

SEQ ID NO: 1387903 - RNA, 19 nt, Artificial Sequence
  Description of Artificial Sequence: Synthetic oligonucleotide
acgcuuuggcucagaagca

SEQ ID NO: 1387904 - RNA, 19 nt, Artificial Sequence
  Description of Artificial Sequence: Synthetic oligonucleotide
gcggguuucuagcaaaccu

SEQ ID NO: 1387905 - RNA, 19 nt, Artificial Sequence
  Description of Artificial Sequence: Synthetic oligonucleotide
aggagcgauuggaggagga

SEQ ID NO: 1387906 - RNA, 19 nt, Artificial Sequence
  Description of Artificial Sequence: Synthetic oligonucleotide
gguacugccggagcuugca

SEQ ID NO: 1387907 - RNA, 19 nt, Artificial Sequence
  Description of Artificial Sequence: Synthetic oligonucleotide
ggaaaagguuauucauuau

SEQ ID NO: 1387908 - RNA, 19 nt, Artificial Sequence
  Description of Artificial Sequence: Synthetic oligonucleotide
ggcggguuucuagcaaacc

SEQ ID NO: 1387909 - RNA, 19 nt, Artificial Sequence
  Description of Artificial Sequence: Synthetic oligonucleotide
gaugacgcuuuggcucaga

SEQ ID NO: 1387910 - RNA, 19 nt, Artificial Sequence
  Description of Artificial Sequence: Synthetic oligonucleotide
ugacggccgaaugccuggu

SEQ ID NO: 1387911 - RNA, 19 nt, Artificial Sequence
  Description of Artificial Sequence: Synthetic oligonucleotide
guacuagaggaggagcgau

SEQ ID NO: 1387912 - RNA, 19 nt, Artificial Sequence
  Description of Artificial Sequence: Synthetic oligonucleotide
cugggccauuagcaacuuc

SEQ ID NO: 1387913 - RNA, 19 nt, Artificial Sequence
  Description of Artificial Sequence: Synthetic oligonucleotide
acaggugaugacggccgaa

SEQ ID NO: 1387914 - RNA, 19 nt, Artificial Sequence
  Description of Artificial Sequence: Synthetic oligonucleotide
cuacaagcuaaauguucuu

SEQ ID NO: 1387915 - RNA, 19 nt, Artificial Sequence
  Description of Artificial Sequence: Synthetic oligonucleotide
ggacaauugugcauucagu

SEQ ID NO: 1387916 - RNA, 19 nt, Artificial Sequence
  Description of Artificial Sequence: Synthetic oligonucleotide
cucuagcuacugguggaga

SEQ ID NO: 1387917 - RNA, 19 nt, Artificial Sequence
  Description of Artificial Sequence: Synthetic oligonucleotide
ccagucuaagucauccucu

SEQ ID NO: 1387918 - RNA, 19 nt, Artificial Sequence
  Description of Artificial Sequence: Synthetic oligonucleotide
acggcaaggcagagaguga

SEQ ID NO: 1387919 - RNA, 19 nt, Artificial Sequence
  Description of Artificial Sequence: Synthetic oligonucleotide
ggaguggggcucacaaaca

SEQ ID NO: 1387920 - RNA, 19 nt, Artificial Sequence
  Description of Artificial Sequence: Synthetic oligonucleotide
guacugccggagcuugcaa

SEQ ID NO: 1387921 - RNA, 19 nt, Artificial Sequence
  Description of Artificial Sequence: Synthetic oligonucleotide
cacuccuugcgucacugau

SEQ ID NO: 1387922 - RNA, 19 nt, Artificial Sequence
  Description of Artificial Sequence: Synthetic oligonucleotide
uccuugcgucacugaucac

SEQ ID NO: 1387923 - RNA, 19 nt, Artificial Sequence
  Description of Artificial Sequence: Synthetic oligonucleotide
aagcgccacaaaggacaau

SEQ ID NO: 1387924 - RNA, 19 nt, Artificial Sequence
  Description of Artificial Sequence: Synthetic oligonucleotide
gcuacugguggagaaggcu

SEQ ID NO: 1387925 - RNA, 19 nt, Artificial Sequence
  Description of Artificial Sequence: Synthetic oligonucleotide
ggggcggguuucuagcaaa

SEQ ID NO: 1387926 - RNA, 19 nt, Artificial Sequence
  Description of Artificial Sequence: Synthetic oligonucleotide
acgccaggggcaaucugaa

SEQ ID NO: 1387927 - RNA, 19 nt, Artificial Sequence
  Description of Artificial Sequence: Synthetic oligonucleotide
ggccgaaugccugguggug

SEQ ID NO: 1387928 - RNA, 19 nt, Artificial Sequence
  Description of Artificial Sequence: Synthetic oligonucleotide
gcaaugcgccgagacagga

SEQ ID NO: 1387929 - RNA, 19 nt, Artificial Sequence
  Description of Artificial Sequence: Synthetic oligonucleotide
gcgucacugaucacaggca

SEQ ID NO: 1387930 - RNA, 19 nt, Artificial Sequence
  Description of Artificial Sequence: Synthetic oligonucleotide
gugcauugguggaggugga

SEQ ID NO: 1387931 - RNA, 19 nt, Artificial Sequence
  Description of Artificial Sequence: Synthetic oligonucleotide
guacacuccuugcgucacu

SEQ ID NO: 1387932 - RNA, 19 nt, Artificial Sequence
  Description of Artificial Sequence: Synthetic oligonucleotide
gcgauuggaggaggagcug

SEQ ID NO: 1387933 - RNA, 19 nt, Artificial Sequence
  Description of Artificial Sequence: Synthetic oligonucleotide
ggccauuagcaacuucaau

SEQ ID NO: 1387934 - RNA, 19 nt, Artificial Sequence
  Description of Artificial Sequence: Synthetic oligonucleotide
gguuucuagcaaaccugua

SEQ ID NO: 1387935 - RNA, 19 nt, Artificial Sequence
  Description of Artificial Sequence: Synthetic oligonucleotide
ggucugacuaagacccucu

SEQ ID NO: 1387936 - RNA, 19 nt, Artificial Sequence
  Description of Artificial Sequence: Synthetic oligonucleotide
caaugcgccgagacaggau

SEQ ID NO: 1387937 - RNA, 19 nt, Artificial Sequence
  Description of Artificial Sequence: Synthetic oligonucleotide
gucuugcaauacacagcaa

SEQ ID NO: 1387938 - RNA, 19 nt, Artificial Sequence
  Description of Artificial Sequence: Synthetic oligonucleotide
gggcggguuucuagcaaac

SEQ ID NO: 1387939 - RNA, 19 nt, Artificial Sequence
  Description of Artificial Sequence: Synthetic oligonucleotide
caggugaugacggccgaau

SEQ ID NO: 1387940 - RNA, 19 nt, Artificial Sequence
  Description of Artificial Sequence: Synthetic oligonucleotide
gguggcucauguggucuga

SEQ ID NO: 1387941 - RNA, 19 nt, Artificial Sequence
  Description of Artificial Sequence: Synthetic oligonucleotide
ggaugacgcuuuggcucag

SEQ ID NO: 1387942 - RNA, 19 nt, Artificial Sequence
  Description of Artificial Sequence: Synthetic oligonucleotide
cggagcuugcaaagcugug

SEQ ID NO: 1387943 - RNA, 19 nt, Artificial Sequence
  Description of Artificial Sequence: Synthetic oligonucleotide
cacauaugucuguggucuu

SEQ ID NO: 1387944 - RNA, 19 nt, Artificial Sequence
  Description of Artificial Sequence: Synthetic oligonucleotide
ccggagcuugcaaagcugu

SEQ ID NO: 1387945 - RNA, 19 nt, Artificial Sequence
  Description of Artificial Sequence: Synthetic oligonucleotide
ccgugcauugguggaggug

SEQ ID NO: 1387946 - RNA, 19 nt, Artificial Sequence
  Description of Artificial Sequence: Synthetic oligonucleotide
ggugguacugccggagcuu

SEQ ID NO: 1387947 - RNA, 19 nt, Artificial Sequence
  Description of Artificial Sequence: Synthetic oligonucleotide
cacgcugcucuucgacuuu

SEQ ID NO: 1387948 - RNA, 19 nt, Artificial Sequence
  Description of Artificial Sequence: Synthetic oligonucleotide
ccgagacaggaugguggca

SEQ ID NO: 1387949 - RNA, 19 nt, Artificial Sequence
  Description of Artificial Sequence: Synthetic oligonucleotide
cggccgaaugccugguggu

SEQ ID NO: 1387950 - RNA, 19 nt, Artificial Sequence
  Description of Artificial Sequence: Synthetic oligonucleotide
aauuucaugaaauaaguug

SEQ ID NO: 1387951 - RNA, 19 nt, Artificial Sequence
  Description of Artificial Sequence: Synthetic oligonucleotide
aaaguaaauggguaaggcc

SEQ ID NO: 1387952 - RNA, 19 nt, Artificial Sequence
  Description of Artificial Sequence: Synthetic oligonucleotide
aauugguaaacuuugggug

SEQ ID NO: 1387953 - RNA, 19 nt, Artificial Sequence
  Description of Artificial Sequence: Synthetic oligonucleotide
aguguuauagaacagcccg

SEQ ID NO: 1387954 - RNA, 19 nt, Artificial Sequence
  Description of Artificial Sequence: Synthetic oligonucleotide
aauguaugacgucauaauc

SEQ ID NO: 1387955 - RNA, 19 nt, Artificial Sequence
  Description of Artificial Sequence: Synthetic oligonucleotide
aaaaguaaauggguaaggc

SEQ ID NO: 1387956 - RNA, 19 nt, Artificial Sequence
  Description of Artificial Sequence: Synthetic oligonucleotide
ucuuauauggacaauggga

SEQ ID NO: 1387957 - RNA, 19 nt, Artificial Sequence
  Description of Artificial Sequence: Synthetic oligonucleotide
uguacuucgugcaagaaug

SEQ ID NO: 1387958 - RNA, 19 nt, Artificial Sequence
  Description of Artificial Sequence: Synthetic oligonucleotide
ucugaaauugaguugagug

SEQ ID NO: 1387959 - RNA, 19 nt, Artificial Sequence
  Description of Artificial Sequence: Synthetic oligonucleotide
aauugaguugaguguagcc

SEQ ID NO: 1387960 - RNA, 19 nt, Artificial Sequence
  Description of Artificial Sequence: Synthetic oligonucleotide
aacaccugcaucuaauuuc

SEQ ID NO: 1387961 - RNA, 19 nt, Artificial Sequence
  Description of Artificial Sequence: Synthetic oligonucleotide
aaaagaguaauugguaaac

SEQ ID NO: 1387962 - RNA, 19 nt, Artificial Sequence
  Description of Artificial Sequence: Synthetic oligonucleotide
uauagaacagcccguaccg

SEQ ID NO: 1387963 - RNA, 19 nt, Artificial Sequence
  Description of Artificial Sequence: Synthetic oligonucleotide
uuuagcaucuucuauaggu

SEQ ID NO: 1387964 - RNA, 19 nt, Artificial Sequence
  Description of Artificial Sequence: Synthetic oligonucleotide
ucuucuauaggucugaaau

SEQ ID NO: 1387965 - RNA, 19 nt, Artificial Sequence
  Description of Artificial Sequence: Synthetic oligonucleotide
aacucgaacuuucccaucc

SEQ ID NO: 1387966 - RNA, 19 nt, Artificial Sequence
  Description of Artificial Sequence: Synthetic oligonucleotide
uguuuaaacacucucuucu

SEQ ID NO: 1387967 - RNA, 19 nt, Artificial Sequence
  Description of Artificial Sequence: Synthetic oligonucleotide
agaacaggucaccauaucc

SEQ ID NO: 1387968 - RNA, 19 nt, Artificial Sequence
  Description of Artificial Sequence: Synthetic oligonucleotide
agauguuucuuauauggac

SEQ ID NO: 1387969 - RNA, 19 nt, Artificial Sequence
  Description of Artificial Sequence: Synthetic oligonucleotide
auuucaugaaauaaguugg

SEQ ID NO: 1387970 - RNA, 19 nt, Artificial Sequence
  Description of Artificial Sequence: Synthetic oligonucleotide
aagaaugguaacucgaacu

SEQ ID NO: 1387971 - RNA, 19 nt, Artificial Sequence
  Description of Artificial Sequence: Synthetic oligonucleotide
uggacaaugggaauaaaug

SEQ ID NO: 1387972 - RNA, 19 nt, Artificial Sequence
  Description of Artificial Sequence: Synthetic oligonucleotide
aauauguccguguugugug

SEQ ID NO: 1387973 - RNA, 19 nt, Artificial Sequence
  Description of Artificial Sequence: Synthetic oligonucleotide
aaauacuucccuugaaucu

SEQ ID NO: 1387974 - RNA, 19 nt, Artificial Sequence
  Description of Artificial Sequence: Synthetic oligonucleotide
aauaacccgguauucugac

SEQ ID NO: 1387975 - RNA, 19 nt, Artificial Sequence
  Description of Artificial Sequence: Synthetic oligonucleotide
uaaguaacagcgcucaucu

SEQ ID NO: 1387976 - RNA, 19 nt, Artificial Sequence
  Description of Artificial Sequence: Synthetic oligonucleotide
uuauagaacagcccguacc

SEQ ID NO: 1387977 - RNA, 19 nt, Artificial Sequence
  Description of Artificial Sequence: Synthetic oligonucleotide
aaaucguagguuuucaaau

SEQ ID NO: 1387978 - RNA, 19 nt, Artificial Sequence
  Description of Artificial Sequence: Synthetic oligonucleotide
aaagccugaaaggacaagg

SEQ ID NO: 1387979 - RNA, 19 nt, Artificial Sequence
  Description of Artificial Sequence: Synthetic oligonucleotide
uguaugacgucauaaucag

SEQ ID NO: 1387980 - RNA, 19 nt, Artificial Sequence
  Description of Artificial Sequence: Synthetic oligonucleotide
uaugacgucauaaucagua

SEQ ID NO: 1387981 - RNA, 19 nt, Artificial Sequence
  Description of Artificial Sequence: Synthetic oligonucleotide
aaugggaauaaauguauaa

SEQ ID NO: 1387982 - RNA, 19 nt, Artificial Sequence
  Description of Artificial Sequence: Synthetic oligonucleotide
guuucuuaaguccagguac

SEQ ID NO: 1387983 - RNA, 19 nt, Artificial Sequence
  Description of Artificial Sequence: Synthetic oligonucleotide
uaauugguaaacuuugggu

SEQ ID NO: 1387984 - RNA, 19 nt, Artificial Sequence
  Description of Artificial Sequence: Synthetic oligonucleotide
guaauugguaaacuuuggg

SEQ ID NO: 1387985 - RNA, 19 nt, Artificial Sequence
  Description of Artificial Sequence: Synthetic oligonucleotide
aaucguagguuuucaaaug

SEQ ID NO: 1387986 - RNA, 19 nt, Artificial Sequence
  Description of Artificial Sequence: Synthetic oligonucleotide
cuugacguuucuuaagucc

SEQ ID NO: 1387987 - RNA, 19 nt, Artificial Sequence
  Description of Artificial Sequence: Synthetic oligonucleotide
aaauguaugacgucauaau

SEQ ID NO: 1387988 - RNA, 19 nt, Artificial Sequence
  Description of Artificial Sequence: Synthetic oligonucleotide
acagcucgaauacagcagc

SEQ ID NO: 1387989 - RNA, 19 nt, Artificial Sequence
  Description of Artificial Sequence: Synthetic oligonucleotide
aagucaacauucuacaguu

SEQ ID NO: 1387990 - RNA, 19 nt, Artificial Sequence
  Description of Artificial Sequence: Synthetic oligonucleotide
uuguaaucaacaauccgga

SEQ ID NO: 1387991 - RNA, 19 nt, Artificial Sequence
  Description of Artificial Sequence: Synthetic oligonucleotide
uucuagauguuucuuauau

SEQ ID NO: 1387992 - RNA, 19 nt, Artificial Sequence
  Description of Artificial Sequence: Synthetic oligonucleotide
auaaucaguaaaugcuuuc

SEQ ID NO: 1387993 - RNA, 19 nt, Artificial Sequence
  Description of Artificial Sequence: Synthetic oligonucleotide
uccugagugauguuuagcc

SEQ ID NO: 1387994 - RNA, 19 nt, Artificial Sequence
  Description of Artificial Sequence: Synthetic oligonucleotide
uuguacagcucgaauacag

SEQ ID NO: 1387995 - RNA, 19 nt, Artificial Sequence
  Description of Artificial Sequence: Synthetic oligonucleotide
uuugcgcugaccuucagac

SEQ ID NO: 1387996 - RNA, 19 nt, Artificial Sequence
  Description of Artificial Sequence: Synthetic oligonucleotide
uugaguguagccuuguagu

SEQ ID NO: 1387997 - RNA, 19 nt, Artificial Sequence
  Description of Artificial Sequence: Synthetic oligonucleotide
augggaauaaauguauaac

SEQ ID NO: 1387998 - RNA, 19 nt, Artificial Sequence
  Description of Artificial Sequence: Synthetic oligonucleotide
aacaauccggacuucaaau

SEQ ID NO: 1387999 - RNA, 19 nt, Artificial Sequence
  Description of Artificial Sequence: Synthetic oligonucleotide
ucuguacuuguaaucaaca

SEQ ID NO: 1388000 - RNA, 19 nt, Artificial Sequence
  Description of Artificial Sequence: Synthetic oligonucleotide
ucgacauagcugcaaacag

SEQ ID NO: 1388001 - RNA, 19 nt, Artificial Sequence
  Description of Artificial Sequence: Synthetic oligonucleotide
auaggucugaaauugaguu

SEQ ID NO: 1388002 - RNA, 19 nt, Artificial Sequence
  Description of Artificial Sequence: Synthetic oligonucleotide
uugacguuucuuaagucca

SEQ ID NO: 1388003 - RNA, 19 nt, Artificial Sequence
  Description of Artificial Sequence: Synthetic oligonucleotide
aagaguaauugguaaacuu

SEQ ID NO: 1388004 - RNA, 19 nt, Artificial Sequence
  Description of Artificial Sequence: Synthetic oligonucleotide
aaauguggauacuguuuuc

SEQ ID NO: 1388005 - RNA, 19 nt, Artificial Sequence
  Description of Artificial Sequence: Synthetic oligonucleotide
auccauaagagcugguguc

SEQ ID NO: 1388006 - RNA, 19 nt, Artificial Sequence
  Description of Artificial Sequence: Synthetic oligonucleotide
gaucaguggaguguuauag

SEQ ID NO: 1388007 - RNA, 19 nt, Artificial Sequence
  Description of Artificial Sequence: Synthetic oligonucleotide
guaguuuagauuuucuaga

SEQ ID NO: 1388008 - RNA, 19 nt, Artificial Sequence
  Description of Artificial Sequence: Synthetic oligonucleotide
acagcgcucaucuucacag

SEQ ID NO: 1388009 - RNA, 19 nt, Artificial Sequence
  Description of Artificial Sequence: Synthetic oligonucleotide
aaucgaaacucugguuugc

SEQ ID NO: 1388010 - RNA, 19 nt, Artificial Sequence
  Description of Artificial Sequence: Synthetic oligonucleotide
uauccauaagagcuggugu

SEQ ID NO: 1388011 - RNA, 19 nt, Artificial Sequence
  Description of Artificial Sequence: Synthetic oligonucleotide
agaauuguucacgugcugg

SEQ ID NO: 1388012 - RNA, 19 nt, Artificial Sequence
  Description of Artificial Sequence: Synthetic oligonucleotide
uaaucaguaaaugcuuucc

SEQ ID NO: 1388013 - RNA, 19 nt, Artificial Sequence
  Description of Artificial Sequence: Synthetic oligonucleotide
auugguaaacuuugggugu

SEQ ID NO: 1388014 - RNA, 19 nt, Artificial Sequence
  Description of Artificial Sequence: Synthetic oligonucleotide
uauaggucugaaauugagu

SEQ ID NO: 1388015 - RNA, 19 nt, Artificial Sequence
  Description of Artificial Sequence: Synthetic oligonucleotide
aaacccgaguucucuguac

SEQ ID NO: 1388016 - RNA, 19 nt, Artificial Sequence
  Description of Artificial Sequence: Synthetic oligonucleotide
guacuuguaaucaacaauc

SEQ ID NO: 1388017 - RNA, 19 nt, Artificial Sequence
  Description of Artificial Sequence: Synthetic oligonucleotide
uuucuuaaguccagguaca

SEQ ID NO: 1388018 - RNA, 19 nt, Artificial Sequence
  Description of Artificial Sequence: Synthetic oligonucleotide
cauauccaaagucagcuug

SEQ ID NO: 1388019 - RNA, 19 nt, Artificial Sequence
  Description of Artificial Sequence: Synthetic oligonucleotide
aauguggauacuguuuuca

SEQ ID NO: 1388020 - RNA, 19 nt, Artificial Sequence
  Description of Artificial Sequence: Synthetic oligonucleotide
ucugaaagccugaaaggac

SEQ ID NO: 1388021 - RNA, 19 nt, Artificial Sequence
  Description of Artificial Sequence: Synthetic oligonucleotide
uacagcucgaauacagcag

SEQ ID NO: 1388022 - RNA, 19 nt, Artificial Sequence
  Description of Artificial Sequence: Synthetic oligonucleotide
ucgggcauauccaaaguca

SEQ ID NO: 1388023 - RNA, 19 nt, Artificial Sequence
  Description of Artificial Sequence: Synthetic oligonucleotide
acgauguacacgucuguac

SEQ ID NO: 1388024 - RNA, 19 nt, Artificial Sequence
  Description of Artificial Sequence: Synthetic oligonucleotide
uuucaugaaauaaguuggu

SEQ ID NO: 1388025 - RNA, 19 nt, Artificial Sequence
  Description of Artificial Sequence: Synthetic oligonucleotide
ugaaauugaguugagugua

SEQ ID NO: 1388026 - RNA, 19 nt, Artificial Sequence
  Description of Artificial Sequence: Synthetic oligonucleotide
aaagaguaauugguaaacu

SEQ ID NO: 1388027 - RNA, 19 nt, Artificial Sequence
  Description of Artificial Sequence: Synthetic oligonucleotide
aacagcccguaccgcaugc

SEQ ID NO: 1388028 - RNA, 19 nt, Artificial Sequence
  Description of Artificial Sequence: Synthetic oligonucleotide
cugauugggagucuggaug

SEQ ID NO: 1388029 - RNA, 19 nt, Artificial Sequence
  Description of Artificial Sequence: Synthetic oligonucleotide
ucuucuuaaauggccacug

SEQ ID NO: 1388030 - RNA, 19 nt, Artificial Sequence
  Description of Artificial Sequence: Synthetic oligonucleotide
ugagaguguuuaaacacuc

SEQ ID NO: 1388031 - RNA, 19 nt, Artificial Sequence
  Description of Artificial Sequence: Synthetic oligonucleotide
ucgaacuuucccauccuug

SEQ ID NO: 1388032 - RNA, 19 nt, Artificial Sequence
  Description of Artificial Sequence: Synthetic oligonucleotide
aguuuagauuuucuagaug

SEQ ID NO: 1388033 - RNA, 19 nt, Artificial Sequence
  Description of Artificial Sequence: Synthetic oligonucleotide
ccaggucuaaguaacagcg

SEQ ID NO: 1388034 - RNA, 19 nt, Artificial Sequence
  Description of Artificial Sequence: Synthetic oligonucleotide
uccguguugugugugaucc

SEQ ID NO: 1388035 - RNA, 19 nt, Artificial Sequence
  Description of Artificial Sequence: Synthetic oligonucleotide
ucuauaggucugaaauuga

SEQ ID NO: 1388036 - RNA, 19 nt, Artificial Sequence
  Description of Artificial Sequence: Synthetic oligonucleotide
ugaaagaauuguucacgug

SEQ ID NO: 1388037 - RNA, 19 nt, Artificial Sequence
  Description of Artificial Sequence: Synthetic oligonucleotide
aguggugguacauguuaac

SEQ ID NO: 1388038 - RNA, 19 nt, Artificial Sequence
  Description of Artificial Sequence: Synthetic oligonucleotide
gagugugcgagucuccucc

SEQ ID NO: 1388039 - RNA, 19 nt, Artificial Sequence
  Description of Artificial Sequence: Synthetic oligonucleotide
gaaaucguagguuuucaaa

SEQ ID NO: 1388040 - RNA, 19 nt, Artificial Sequence
  Description of Artificial Sequence: Synthetic oligonucleotide
ugcaucuaauuucaugaaa

SEQ ID NO: 1388041 - RNA, 19 nt, Artificial Sequence
  Description of Artificial Sequence: Synthetic oligonucleotide
uggugguacauguuaacac

SEQ ID NO: 1388042 - RNA, 19 nt, Artificial Sequence
  Description of Artificial Sequence: Synthetic oligonucleotide
agacaucagugcuugacug

SEQ ID NO: 1388043 - RNA, 19 nt, Artificial Sequence
  Description of Artificial Sequence: Synthetic oligonucleotide
auguaugacgucauaauca

SEQ ID NO: 1388044 - RNA, 19 nt, Artificial Sequence
  Description of Artificial Sequence: Synthetic oligonucleotide
gguacaugaauucuucuac

SEQ ID NO: 1388045 - RNA, 19 nt, Artificial Sequence
  Description of Artificial Sequence: Synthetic oligonucleotide
ugauugggagucuggaugu

SEQ ID NO: 1388046 - RNA, 19 nt, Artificial Sequence
  Description of Artificial Sequence: Synthetic oligonucleotide
gauguacacgucuguacug

SEQ ID NO: 1388047 - RNA, 19 nt, Artificial Sequence
  Description of Artificial Sequence: Synthetic oligonucleotide
gguaaggccagcuccaugc

SEQ ID NO: 1388048 - RNA, 19 nt, Artificial Sequence
  Description of Artificial Sequence: Synthetic oligonucleotide
acaauccggacuucaaaug

SEQ ID NO: 1388049 - RNA, 19 nt, Artificial Sequence
  Description of Artificial Sequence: Synthetic oligonucleotide
aacccgguauucugacagc

SEQ ID NO: 1388050 - RNA, 19 nt, Artificial Sequence
  Description of Artificial Sequence: Synthetic oligonucleotide
aucguagguuuucaaaugu

SEQ ID NO: 1388051 - RNA, 19 nt, Artificial Sequence
  Description of Artificial Sequence: Synthetic oligonucleotide
aagaauuguucacgugcug

SEQ ID NO: 1388052 - RNA, 19 nt, Artificial Sequence
  Description of Artificial Sequence: Synthetic oligonucleotide
ucuguacugaaagaauugu

SEQ ID NO: 1388053 - RNA, 19 nt, Artificial Sequence
  Description of Artificial Sequence: Synthetic oligonucleotide
guaguggacaccucugagc

SEQ ID NO: 1388054 - RNA, 19 nt, Artificial Sequence
  Description of Artificial Sequence: Synthetic oligonucleotide
agacuugagucgcuuguuc

SEQ ID NO: 1388055 - RNA, 19 nt, Artificial Sequence
  Description of Artificial Sequence: Synthetic oligonucleotide
uuugaaaucguagguuuuc

SEQ ID NO: 1388056 - RNA, 19 nt, Artificial Sequence
  Description of Artificial Sequence: Synthetic oligonucleotide
cauuuaccagcucauuuug

SEQ ID NO: 1388057 - RNA, 19 nt, Artificial Sequence
  Description of Artificial Sequence: Synthetic oligonucleotide
gaaggcccugaauaacccg

SEQ ID NO: 1388058 - RNA, 19 nt, Artificial Sequence
  Description of Artificial Sequence: Synthetic oligonucleotide
guaaucaacaauccggacu

SEQ ID NO: 1388059 - RNA, 19 nt, Artificial Sequence
  Description of Artificial Sequence: Synthetic oligonucleotide
ugcuugacuguccaguuua

SEQ ID NO: 1388060 - RNA, 19 nt, Artificial Sequence
  Description of Artificial Sequence: Synthetic oligonucleotide
aacaggguagccaaaucga

SEQ ID NO: 1388061 - RNA, 19 nt, Artificial Sequence
  Description of Artificial Sequence: Synthetic oligonucleotide
auauccauaagagcuggug

SEQ ID NO: 1388062 - RNA, 19 nt, Artificial Sequence
  Description of Artificial Sequence: Synthetic oligonucleotide
gguugagaaaaucacagaa

SEQ ID NO: 1388063 - RNA, 19 nt, Artificial Sequence
  Description of Artificial Sequence: Synthetic oligonucleotide
gaaauugaguugaguguag

SEQ ID NO: 1388064 - RNA, 19 nt, Artificial Sequence
  Description of Artificial Sequence: Synthetic oligonucleotide
ucagacaucagugcuugac

SEQ ID NO: 1388065 - RNA, 19 nt, Artificial Sequence
  Description of Artificial Sequence: Synthetic oligonucleotide
agaaaaucacagaaguggu

SEQ ID NO: 1388066 - RNA, 19 nt, Artificial Sequence
  Description of Artificial Sequence: Synthetic oligonucleotide
auguggauacuguuuucag

SEQ ID NO: 1388067 - RNA, 19 nt, Artificial Sequence
  Description of Artificial Sequence: Synthetic oligonucleotide
uguaaucaacaauccggac

SEQ ID NO: 1388068 - RNA, 19 nt, Artificial Sequence
  Description of Artificial Sequence: Synthetic oligonucleotide
acauguccgcagcugacuc

SEQ ID NO: 1388069 - RNA, 19 nt, Artificial Sequence
  Description of Artificial Sequence: Synthetic oligonucleotide
auaagagcuggugucccac

SEQ ID NO: 1388070 - RNA, 19 nt, Artificial Sequence
  Description of Artificial Sequence: Synthetic oligonucleotide
guagagguugagaaaauca

SEQ ID NO: 1388071 - RNA, 19 nt, Artificial Sequence
  Description of Artificial Sequence: Synthetic oligonucleotide
uuuugaaaucguagguuuu

SEQ ID NO: 1388072 - RNA, 19 nt, Artificial Sequence
  Description of Artificial Sequence: Synthetic oligonucleotide
gguaacucgaacuuuccca

SEQ ID NO: 1388073 - RNA, 19 nt, Artificial Sequence
  Description of Artificial Sequence: Synthetic oligonucleotide
agaaggcccugaauaaccc

SEQ ID NO: 1388074 - RNA, 19 nt, Artificial Sequence
  Description of Artificial Sequence: Synthetic oligonucleotide
accugcaucuaauuucaug

SEQ ID NO: 1388075 - RNA, 19 nt, Artificial Sequence
  Description of Artificial Sequence: Synthetic oligonucleotide
guacagcucgaauacagca

SEQ ID NO: 1388076 - RNA, 19 nt, Artificial Sequence
  Description of Artificial Sequence: Synthetic oligonucleotide
agucgcuuguucucucugg

SEQ ID NO: 1388077 - RNA, 19 nt, Artificial Sequence
  Description of Artificial Sequence: Synthetic oligonucleotide
caucaaaagaguaauuggu

SEQ ID NO: 1388078 - RNA, 19 nt, Artificial Sequence
  Description of Artificial Sequence: Synthetic oligonucleotide
cugaaagccugaaaggaca

SEQ ID NO: 1388079 - RNA, 19 nt, Artificial Sequence
  Description of Artificial Sequence: Synthetic oligonucleotide
ucgaaacucugguuugcag

SEQ ID NO: 1388080 - RNA, 19 nt, Artificial Sequence
  Description of Artificial Sequence: Synthetic oligonucleotide
acaucagugcuugacuguc

SEQ ID NO: 1388081 - RNA, 19 nt, Artificial Sequence
  Description of Artificial Sequence: Synthetic oligonucleotide
agcucgaauacagcagccc

SEQ ID NO: 1388082 - RNA, 19 nt, Artificial Sequence
  Description of Artificial Sequence: Synthetic oligonucleotide
agaccaguagcucugcaau

SEQ ID NO: 1388083 - RNA, 19 nt, Artificial Sequence
  Description of Artificial Sequence: Synthetic oligonucleotide
uccauaagagcuggugucc

SEQ ID NO: 1388084 - RNA, 19 nt, Artificial Sequence
  Description of Artificial Sequence: Synthetic oligonucleotide
caagaaugguaacucgaac

SEQ ID NO: 1388085 - RNA, 19 nt, Artificial Sequence
  Description of Artificial Sequence: Synthetic oligonucleotide
ucccacgucgacauagcug

SEQ ID NO: 1388086 - RNA, 19 nt, Artificial Sequence
  Description of Artificial Sequence: Synthetic oligonucleotide
cuucgugcaagaaugguaa

SEQ ID NO: 1388087 - RNA, 19 nt, Artificial Sequence
  Description of Artificial Sequence: Synthetic oligonucleotide
ucacauuuagcaucuucua

SEQ ID NO: 1388088 - RNA, 19 nt, Artificial Sequence
  Description of Artificial Sequence: Synthetic oligonucleotide
ugaaaucguagguuuucaa

SEQ ID NO: 1388089 - RNA, 19 nt, Artificial Sequence
  Description of Artificial Sequence: Synthetic oligonucleotide
gauguaguggacaccucug

SEQ ID NO: 1388090 - RNA, 19 nt, Artificial Sequence
  Description of Artificial Sequence: Synthetic oligonucleotide
ugagugauguuuagccuau

SEQ ID NO: 1388091 - RNA, 19 nt, Artificial Sequence
  Description of Artificial Sequence: Synthetic oligonucleotide
aacagcgcucaucuucaca

SEQ ID NO: 1388092 - RNA, 19 nt, Artificial Sequence
  Description of Artificial Sequence: Synthetic oligonucleotide
caaaagaguaauugguaaa

SEQ ID NO: 1388093 - RNA, 19 nt, Artificial Sequence
  Description of Artificial Sequence: Synthetic oligonucleotide
uacgugcucugaaagccug

SEQ ID NO: 1388094 - RNA, 19 nt, Artificial Sequence
  Description of Artificial Sequence: Synthetic oligonucleotide
cccacgucgacauagcugc

SEQ ID NO: 1388095 - RNA, 19 nt, Artificial Sequence
  Description of Artificial Sequence: Synthetic oligonucleotide
uaaauauguccguguugug

SEQ ID NO: 1388096 - RNA, 19 nt, Artificial Sequence
  Description of Artificial Sequence: Synthetic oligonucleotide
gaguguuauagaacagccc

SEQ ID NO: 1388097 - RNA, 19 nt, Artificial Sequence
  Description of Artificial Sequence: Synthetic oligonucleotide
ucaaauguaugacgucaua

SEQ ID NO: 1388098 - RNA, 19 nt, Artificial Sequence
  Description of Artificial Sequence: Synthetic oligonucleotide
auagaacagcccguaccgc

SEQ ID NO: 1388099 - RNA, 19 nt, Artificial Sequence
  Description of Artificial Sequence: Synthetic oligonucleotide
acauucuacaguucaucau

SEQ ID NO: 1388100 - RNA, 19 nt, Artificial Sequence
  Description of Artificial Sequence: Synthetic oligonucleotide
aacuuuggguguucuccca

SEQ ID NO: 1388101 - RNA, 19 nt, Artificial Sequence
  Description of Artificial Sequence: Synthetic oligonucleotide
agguacaugaauucuucua

SEQ ID NO: 1388102 - RNA, 19 nt, Artificial Sequence
  Description of Artificial Sequence: Synthetic oligonucleotide
ggaguguuauagaacagcc

SEQ ID NO: 1388103 - RNA, 19 nt, Artificial Sequence
  Description of Artificial Sequence: Synthetic oligonucleotide
gguauucugacagccagag

SEQ ID NO: 1388104 - RNA, 19 nt, Artificial Sequence
  Description of Artificial Sequence: Synthetic oligonucleotide
acccgguauucugacagcc

SEQ ID NO: 1388105 - RNA, 19 nt, Artificial Sequence
  Description of Artificial Sequence: Synthetic oligonucleotide
aauuguucacgugcugggu

SEQ ID NO: 1388106 - RNA, 19 nt, Artificial Sequence
  Description of Artificial Sequence: Synthetic oligonucleotide
cagcaaaccaagacugcag

SEQ ID NO: 1388107 - RNA, 19 nt, Artificial Sequence
  Description of Artificial Sequence: Synthetic oligonucleotide
cacaucacgauguacacgu

SEQ ID NO: 1388108 - RNA, 19 nt, Artificial Sequence
  Description of Artificial Sequence: Synthetic oligonucleotide
ccugcaucuaauuucauga

SEQ ID NO: 1388109 - RNA, 19 nt, Artificial Sequence
  Description of Artificial Sequence: Synthetic oligonucleotide
aaaacccgaguucucugua

SEQ ID NO: 1388110 - RNA, 19 nt, Artificial Sequence
  Description of Artificial Sequence: Synthetic oligonucleotide
aucagugcuugacugucca

SEQ ID NO: 1388111 - RNA, 19 nt, Artificial Sequence
  Description of Artificial Sequence: Synthetic oligonucleotide
ugccaauaaauauguccgu

SEQ ID NO: 1388112 - RNA, 19 nt, Artificial Sequence
  Description of Artificial Sequence: Synthetic oligonucleotide
acgucauaaucaguaaaug

SEQ ID NO: 1388113 - RNA, 19 nt, Artificial Sequence
  Description of Artificial Sequence: Synthetic oligonucleotide
caugaaauaaguugguuuu

SEQ ID NO: 1388114 - RNA, 19 nt, Artificial Sequence
  Description of Artificial Sequence: Synthetic oligonucleotide
uucuuaaguccagguacag

SEQ ID NO: 1388115 - RNA, 19 nt, Artificial Sequence
  Description of Artificial Sequence: Synthetic oligonucleotide
agguugagaaaaucacaga

SEQ ID NO: 1388116 - RNA, 19 nt, Artificial Sequence
  Description of Artificial Sequence: Synthetic oligonucleotide
ucuugacguuucuuaaguc

SEQ ID NO: 1388117 - RNA, 19 nt, Artificial Sequence
  Description of Artificial Sequence: Synthetic oligonucleotide
ucgugcaagaaugguaacu

SEQ ID NO: 1388118 - RNA, 19 nt, Artificial Sequence
  Description of Artificial Sequence: Synthetic oligonucleotide
ucugauugggagucuggau

SEQ ID NO: 1388119 - RNA, 19 nt, Artificial Sequence
  Description of Artificial Sequence: Synthetic oligonucleotide
ucuuaaguccagguacaga

SEQ ID NO: 1388120 - RNA, 19 nt, Artificial Sequence
  Description of Artificial Sequence: Synthetic oligonucleotide
guuauagaacagcccguac

SEQ ID NO: 1388121 - RNA, 19 nt, Artificial Sequence
  Description of Artificial Sequence: Synthetic oligonucleotide
ugcaguacgugcucugaaa

SEQ ID NO: 1388122 - RNA, 19 nt, Artificial Sequence
  Description of Artificial Sequence: Synthetic oligonucleotide
acguuucuuaaguccaggu

SEQ ID NO: 1388123 - RNA, 19 nt, Artificial Sequence
  Description of Artificial Sequence: Synthetic oligonucleotide
uucuucuuaaauggccacu

SEQ ID NO: 1388124 - RNA, 19 nt, Artificial Sequence
  Description of Artificial Sequence: Synthetic oligonucleotide
auguaguggacaccucuga

SEQ ID NO: 1388125 - RNA, 19 nt, Artificial Sequence
  Description of Artificial Sequence: Synthetic oligonucleotide
ugaguguagccuuguaguu

SEQ ID NO: 1388126 - RNA, 19 nt, Artificial Sequence
  Description of Artificial Sequence: Synthetic oligonucleotide
auccggacuucaaaugugg

SEQ ID NO: 1388127 - RNA, 19 nt, Artificial Sequence
  Description of Artificial Sequence: Synthetic oligonucleotide
aagccugaaaggacaaggu

SEQ ID NO: 1388128 - RNA, 19 nt, Artificial Sequence
  Description of Artificial Sequence: Synthetic oligonucleotide
gaauaacccgguauucuga

SEQ ID NO: 1388129 - RNA, 19 nt, Artificial Sequence
  Description of Artificial Sequence: Synthetic oligonucleotide
caggucuaaguaacagcgc

SEQ ID NO: 1388130 - RNA, 19 nt, Artificial Sequence
  Description of Artificial Sequence: Synthetic oligonucleotide
uuucuagauguuucuuaua

SEQ ID NO: 1388131 - RNA, 19 nt, Artificial Sequence
  Description of Artificial Sequence: Synthetic oligonucleotide
gucuaaguaacagcgcuca

SEQ ID NO: 1388132 - RNA, 19 nt, Artificial Sequence
  Description of Artificial Sequence: Synthetic oligonucleotide
caaauguaugacgucauaa

SEQ ID NO: 1388133 - RNA, 19 nt, Artificial Sequence
  Description of Artificial Sequence: Synthetic oligonucleotide
cgaaacucugguuugcagg

SEQ ID NO: 1388134 - RNA, 19 nt, Artificial Sequence
  Description of Artificial Sequence: Synthetic oligonucleotide
gucgacauagcugcaaaca

SEQ ID NO: 1388135 - RNA, 19 nt, Artificial Sequence
  Description of Artificial Sequence: Synthetic oligonucleotide
gcaguacgugcucugaaag

SEQ ID NO: 1388136 - RNA, 19 nt, Artificial Sequence
  Description of Artificial Sequence: Synthetic oligonucleotide
uccggacuucaaaugugga

SEQ ID NO: 1388137 - RNA, 19 nt, Artificial Sequence
  Description of Artificial Sequence: Synthetic oligonucleotide
gugugugauccucagcuga

SEQ ID NO: 1388138 - RNA, 19 nt, Artificial Sequence
  Description of Artificial Sequence: Synthetic oligonucleotide
agcugcaaacaggguagcc

SEQ ID NO: 1388139 - RNA, 19 nt, Artificial Sequence
  Description of Artificial Sequence: Synthetic oligonucleotide
cugagugauguuuagccua

SEQ ID NO: 1388140 - RNA, 19 nt, Artificial Sequence
  Description of Artificial Sequence: Synthetic oligonucleotide
ggugucggagaacagguca

SEQ ID NO: 1388141 - RNA, 19 nt, Artificial Sequence
  Description of Artificial Sequence: Synthetic oligonucleotide
caguuguacagcucgaaua

SEQ ID NO: 1388142 - RNA, 19 nt, Artificial Sequence
  Description of Artificial Sequence: Synthetic oligonucleotide
caucagugcuugacugucc

SEQ ID NO: 1388143 - RNA, 19 nt, Artificial Sequence
  Description of Artificial Sequence: Synthetic oligonucleotide
guacuucgugcaagaaugg

SEQ ID NO: 1388144 - RNA, 19 nt, Artificial Sequence
  Description of Artificial Sequence: Synthetic oligonucleotide
guacauguuaacaccugca

SEQ ID NO: 1388145 - RNA, 19 nt, Artificial Sequence
  Description of Artificial Sequence: Synthetic oligonucleotide
uaugcagcacaugcuggga

SEQ ID NO: 1388146 - RNA, 19 nt, Artificial Sequence
  Description of Artificial Sequence: Synthetic oligonucleotide
gagaacaggucaccauauc

SEQ ID NO: 1388147 - RNA, 19 nt, Artificial Sequence
  Description of Artificial Sequence: Synthetic oligonucleotide
gacgucauaaucaguaaau

SEQ ID NO: 1388148 - RNA, 19 nt, Artificial Sequence
  Description of Artificial Sequence: Synthetic oligonucleotide
auauguccguguugugugu

SEQ ID NO: 1388149 - RNA, 19 nt, Artificial Sequence
  Description of Artificial Sequence: Synthetic oligonucleotide
ucuaaguaacagcgcucau

SEQ ID NO: 1388150 - RNA, 19 nt, Artificial Sequence
  Description of Artificial Sequence: Synthetic oligonucleotide
guacagaccaguagcucug

SEQ ID NO: 1388151 - RNA, 19 nt, Artificial Sequence
  Description of Artificial Sequence: Synthetic oligonucleotide
uugcaguacgugcucugaa

SEQ ID NO: 1388152 - RNA, 19 nt, Artificial Sequence
  Description of Artificial Sequence: Synthetic oligonucleotide
auaacccgguauucugaca

SEQ ID NO: 1388153 - RNA, 19 nt, Artificial Sequence
  Description of Artificial Sequence: Synthetic oligonucleotide
uuggguguucucccagcgu

SEQ ID NO: 1388154 - RNA, 19 nt, Artificial Sequence
  Description of Artificial Sequence: Synthetic oligonucleotide
cugaaagaauuguucacgu

SEQ ID NO: 1388155 - RNA, 19 nt, Artificial Sequence
  Description of Artificial Sequence: Synthetic oligonucleotide
gaaucugucagggcuccuc

SEQ ID NO: 1388156 - RNA, 19 nt, Artificial Sequence
  Description of Artificial Sequence: Synthetic oligonucleotide
ucggagaacaggucaccau

SEQ ID NO: 1388157 - RNA, 19 nt, Artificial Sequence
  Description of Artificial Sequence: Synthetic oligonucleotide
agugcauuuaccagcucau

SEQ ID NO: 1388158 - RNA, 19 nt, Artificial Sequence
  Description of Artificial Sequence: Synthetic oligonucleotide
uaccgggaacaaaccagac

SEQ ID NO: 1388159 - RNA, 19 nt, Artificial Sequence
  Description of Artificial Sequence: Synthetic oligonucleotide
uucgugcaagaaugguaac

SEQ ID NO: 1388160 - RNA, 19 nt, Artificial Sequence
  Description of Artificial Sequence: Synthetic oligonucleotide
caucccacgucgacauagc

SEQ ID NO: 1388161 - RNA, 19 nt, Artificial Sequence
  Description of Artificial Sequence: Synthetic oligonucleotide
acuucgugcaagaauggua

SEQ ID NO: 1388162 - RNA, 19 nt, Artificial Sequence
  Description of Artificial Sequence: Synthetic oligonucleotide
gguacagaccaguagcucu

SEQ ID NO: 1388163 - RNA, 19 nt, Artificial Sequence
  Description of Artificial Sequence: Synthetic oligonucleotide
guggugguacauguuaaca

SEQ ID NO: 1388164 - RNA, 19 nt, Artificial Sequence
  Description of Artificial Sequence: Synthetic oligonucleotide
auugggagucuggauguga

SEQ ID NO: 1388165 - RNA, 19 nt, Artificial Sequence
  Description of Artificial Sequence: Synthetic oligonucleotide
ugcaaacaggguagccaaa

SEQ ID NO: 1388166 - RNA, 19 nt, Artificial Sequence
  Description of Artificial Sequence: Synthetic oligonucleotide
agaucaguggaguguuaua

SEQ ID NO: 1388167 - RNA, 19 nt, Artificial Sequence
  Description of Artificial Sequence: Synthetic oligonucleotide
agcgcucaucuucacaguu

SEQ ID NO: 1388168 - RNA, 19 nt, Artificial Sequence
  Description of Artificial Sequence: Synthetic oligonucleotide
uggaugugagaguguuuaa

SEQ ID NO: 1388169 - RNA, 19 nt, Artificial Sequence
  Description of Artificial Sequence: Synthetic oligonucleotide
ggucacauuuagcaucuuc

SEQ ID NO: 1388170 - RNA, 19 nt, Artificial Sequence
  Description of Artificial Sequence: Synthetic oligonucleotide
guaaauggguaaggccagc

SEQ ID NO: 1388171 - RNA, 19 nt, Artificial Sequence
  Description of Artificial Sequence: Synthetic oligonucleotide
caguuuacaguguccucca

SEQ ID NO: 1388172 - RNA, 19 nt, Artificial Sequence
  Description of Artificial Sequence: Synthetic oligonucleotide
acgucgacauagcugcaaa

SEQ ID NO: 1388173 - RNA, 19 nt, Artificial Sequence
  Description of Artificial Sequence: Synthetic oligonucleotide
caauccggacuucaaaugu

SEQ ID NO: 1388174 - RNA, 19 nt, Artificial Sequence
  Description of Artificial Sequence: Synthetic oligonucleotide
cagcccguaccgcaugcgg

SEQ ID NO: 1388175 - RNA, 19 nt, Artificial Sequence
  Description of Artificial Sequence: Synthetic oligonucleotide
cuccugagugauguuuagc

SEQ ID NO: 1388176 - RNA, 19 nt, Artificial Sequence
  Description of Artificial Sequence: Synthetic oligonucleotide
guaccgggaacaaaccaga

SEQ ID NO: 1388177 - RNA, 19 nt, Artificial Sequence
  Description of Artificial Sequence: Synthetic oligonucleotide
aucgaaacucugguuugca

SEQ ID NO: 1388178 - RNA, 19 nt, Artificial Sequence
  Description of Artificial Sequence: Synthetic oligonucleotide
uugguaaacuuuggguguu

SEQ ID NO: 1388179 - RNA, 19 nt, Artificial Sequence
  Description of Artificial Sequence: Synthetic oligonucleotide
caaugggaauaaauguaua

SEQ ID NO: 1388180 - RNA, 19 nt, Artificial Sequence
  Description of Artificial Sequence: Synthetic oligonucleotide
uggacaccucugagccugg

SEQ ID NO: 1388181 - RNA, 19 nt, Artificial Sequence
  Description of Artificial Sequence: Synthetic oligonucleotide
ccgguauucugacagccag

SEQ ID NO: 1388182 - RNA, 19 nt, Artificial Sequence
  Description of Artificial Sequence: Synthetic oligonucleotide
ucggauggugccccuuauc

SEQ ID NO: 1388183 - RNA, 19 nt, Artificial Sequence
  Description of Artificial Sequence: Synthetic oligonucleotide
cauaaucaguaaaugcuuu

SEQ ID NO: 1388184 - RNA, 19 nt, Artificial Sequence
  Description of Artificial Sequence: Synthetic oligonucleotide
aucccacgucgacauagcu

SEQ ID NO: 1388185 - RNA, 19 nt, Artificial Sequence
  Description of Artificial Sequence: Synthetic oligonucleotide
ggugccccuuaucuugagg

SEQ ID NO: 1388186 - RNA, 19 nt, Artificial Sequence
  Description of Artificial Sequence: Synthetic oligonucleotide
uggugucccacaucacgau

SEQ ID NO: 1388187 - RNA, 19 nt, Artificial Sequence
  Description of Artificial Sequence: Synthetic oligonucleotide
gcucgaauacagcagccca

SEQ ID NO: 1388188 - RNA, 19 nt, Artificial Sequence
  Description of Artificial Sequence: Synthetic oligonucleotide
guagccaaaucgaaacucu

SEQ ID NO: 1388189 - RNA, 19 nt, Artificial Sequence
  Description of Artificial Sequence: Synthetic oligonucleotide
cauaagagcugguguccca

SEQ ID NO: 1388190 - RNA, 19 nt, Artificial Sequence
  Description of Artificial Sequence: Synthetic oligonucleotide
gauugggagucuggaugug

SEQ ID NO: 1388191 - RNA, 19 nt, Artificial Sequence
  Description of Artificial Sequence: Synthetic oligonucleotide
aguggacaccucugagccu

SEQ ID NO: 1388192 - RNA, 19 nt, Artificial Sequence
  Description of Artificial Sequence: Synthetic oligonucleotide
agcccguaccgcaugcggg

SEQ ID NO: 1388193 - RNA, 19 nt, Artificial Sequence
  Description of Artificial Sequence: Synthetic oligonucleotide
cugcaucuaauuucaugaa

SEQ ID NO: 1388194 - RNA, 19 nt, Artificial Sequence
  Description of Artificial Sequence: Synthetic oligonucleotide
ccccuuaucuugaggaaac

SEQ ID NO: 1388195 - RNA, 19 nt, Artificial Sequence
  Description of Artificial Sequence: Synthetic oligonucleotide
ggugucccacaucacgaug

SEQ ID NO: 1388196 - RNA, 19 nt, Artificial Sequence
  Description of Artificial Sequence: Synthetic oligonucleotide
agugugcgagucuccucca

SEQ ID NO: 1388197 - RNA, 19 nt, Artificial Sequence
  Description of Artificial Sequence: Synthetic oligonucleotide
guuguacagcucgaauaca

SEQ ID NO: 1388198 - RNA, 19 nt, Artificial Sequence
  Description of Artificial Sequence: Synthetic oligonucleotide
aguugaguguagccuugua

SEQ ID NO: 1388199 - RNA, 19 nt, Artificial Sequence
  Description of Artificial Sequence: Synthetic oligonucleotide
uacuucccuugaaucuguc

SEQ ID NO: 1388200 - RNA, 19 nt, Artificial Sequence
  Description of Artificial Sequence: Synthetic oligonucleotide
acgucuguacugaaagaau

SEQ ID NO: 1388201 - RNA, 19 nt, Artificial Sequence
  Description of Artificial Sequence: Synthetic oligonucleotide
gauacuguuuucagugcau

SEQ ID NO: 1388202 - RNA, 19 nt, Artificial Sequence
  Description of Artificial Sequence: Synthetic oligonucleotide
aaccagacuugagucgcuu

SEQ ID NO: 1388203 - RNA, 19 nt, Artificial Sequence
  Description of Artificial Sequence: Synthetic oligonucleotide
cucugauugggagucugga

SEQ ID NO: 1388204 - RNA, 19 nt, Artificial Sequence
  Description of Artificial Sequence: Synthetic oligonucleotide
uagcugcaaacaggguagc

SEQ ID NO: 1388205 - RNA, 19 nt, Artificial Sequence
  Description of Artificial Sequence: Synthetic oligonucleotide
gagggcuuuugcgcugacc

SEQ ID NO: 1388206 - RNA, 19 nt, Artificial Sequence
  Description of Artificial Sequence: Synthetic oligonucleotide
agcuccaugcaugccaaua

SEQ ID NO: 1388207 - RNA, 19 nt, Artificial Sequence
  Description of Artificial Sequence: Synthetic oligonucleotide
guauucugacagccagaga

SEQ ID NO: 1388208 - RNA, 19 nt, Artificial Sequence
  Description of Artificial Sequence: Synthetic oligonucleotide
uuccgguauucuguacuuc

SEQ ID NO: 1388209 - RNA, 19 nt, Artificial Sequence
  Description of Artificial Sequence: Synthetic oligonucleotide
ugguaaacuuuggguguuc

SEQ ID NO: 1388210 - RNA, 19 nt, Artificial Sequence
  Description of Artificial Sequence: Synthetic oligonucleotide
uguccguguugugugugau

SEQ ID NO: 1388211 - RNA, 19 nt, Artificial Sequence
  Description of Artificial Sequence: Synthetic oligonucleotide
ccaucccacgucgacauag

SEQ ID NO: 1388212 - RNA, 19 nt, Artificial Sequence
  Description of Artificial Sequence: Synthetic oligonucleotide
cuccaugcaugccaauaaa

SEQ ID NO: 1388213 - RNA, 19 nt, Artificial Sequence
  Description of Artificial Sequence: Synthetic oligonucleotide
cuugacuguccaguuuaca

SEQ ID NO: 1388214 - RNA, 19 nt, Artificial Sequence
  Description of Artificial Sequence: Synthetic oligonucleotide
cuuccagaacauguccgca

SEQ ID NO: 1388215 - RNA, 19 nt, Artificial Sequence
  Description of Artificial Sequence: Synthetic oligonucleotide
cuuuugcgcugaccuucag

SEQ ID NO: 1388216 - RNA, 19 nt, Artificial Sequence
  Description of Artificial Sequence: Synthetic oligonucleotide
cgugcaagaaugguaacuc

SEQ ID NO: 1388217 - RNA, 19 nt, Artificial Sequence
  Description of Artificial Sequence: Synthetic oligonucleotide
cgggcauauccaaagucag

SEQ ID NO: 1388218 - RNA, 19 nt, Artificial Sequence
  Description of Artificial Sequence: Synthetic oligonucleotide
gagugauguuuagccuaug

SEQ ID NO: 1388219 - RNA, 19 nt, Artificial Sequence
  Description of Artificial Sequence: Synthetic oligonucleotide
ccacaucacgauguacacg

SEQ ID NO: 1388220 - RNA, 19 nt, Artificial Sequence
  Description of Artificial Sequence: Synthetic oligonucleotide
cccagcgucggauggugcc

SEQ ID NO: 1388221 - RNA, 19 nt, Artificial Sequence
  Description of Artificial Sequence: Synthetic oligonucleotide
augcggggcagcaaugaaa

SEQ ID NO: 1388222 - RNA, 19 nt, Artificial Sequence
  Description of Artificial Sequence: Synthetic oligonucleotide
guccguguugugugugauc

SEQ ID NO: 1388223 - RNA, 19 nt, Artificial Sequence
  Description of Artificial Sequence: Synthetic oligonucleotide
acgugcugggugauguaga

SEQ ID NO: 1388224 - RNA, 19 nt, Artificial Sequence
  Description of Artificial Sequence: Synthetic oligonucleotide
guguuauagaacagcccgu

SEQ ID NO: 1388225 - RNA, 19 nt, Artificial Sequence
  Description of Artificial Sequence: Synthetic oligonucleotide
ugagccuggccaggucuaa

SEQ ID NO: 1388226 - RNA, 19 nt, Artificial Sequence
  Description of Artificial Sequence: Synthetic oligonucleotide
cagcgucggauggugcccc

SEQ ID NO: 1388227 - RNA, 19 nt, Artificial Sequence
  Description of Artificial Sequence: Synthetic oligonucleotide
ccgggaacaaaccagacuu

SEQ ID NO: 1388228 - RNA, 19 nt, Artificial Sequence
  Description of Artificial Sequence: Synthetic oligonucleotide
ggguaaggccagcuccaug

SEQ ID NO: 1388229 - RNA, 19 nt, Artificial Sequence
  Description of Artificial Sequence: Synthetic oligonucleotide
gucugaaauugaguugagu

SEQ ID NO: 1388230 - RNA, 19 nt, Artificial Sequence
  Description of Artificial Sequence: Synthetic oligonucleotide
uuguucucucugggcuggc

SEQ ID NO: 1388231 - RNA, 19 nt, Artificial Sequence
  Description of Artificial Sequence: Synthetic oligonucleotide
uggguaaggccagcuccau

SEQ ID NO: 1388232 - RNA, 19 nt, Artificial Sequence
  Description of Artificial Sequence: Synthetic oligonucleotide
cguguugugugugauccuc

SEQ ID NO: 1388233 - RNA, 19 nt, Artificial Sequence
  Description of Artificial Sequence: Synthetic oligonucleotide
guaugacgucauaaucagu

SEQ ID NO: 1388234 - RNA, 19 nt, Artificial Sequence
  Description of Artificial Sequence: Synthetic oligonucleotide
guacgugcucugaaagccu

SEQ ID NO: 1388235 - RNA, 19 nt, Artificial Sequence
  Description of Artificial Sequence: Synthetic oligonucleotide
cacgucgacauagcugcaa

SEQ ID NO: 1388236 - RNA, 19 nt, Artificial Sequence
  Description of Artificial Sequence: Synthetic oligonucleotide
acgugcucugaaagccuga

SEQ ID NO: 1388237 - RNA, 19 nt, Artificial Sequence
  Description of Artificial Sequence: Synthetic oligonucleotide
cggggcagcaaugaaaaca

SEQ ID NO: 1388238 - RNA, 19 nt, Artificial Sequence
  Description of Artificial Sequence: Synthetic oligonucleotide
agcgucggauggugccccu

SEQ ID NO: 1388239 - RNA, 19 nt, Artificial Sequence
  Description of Artificial Sequence: Synthetic oligonucleotide
cgucgacauagcugcaaac

SEQ ID NO: 1388240 - RNA, 19 nt, Artificial Sequence
  Description of Artificial Sequence: Synthetic oligonucleotide
ccgccaggugauguagugg

SEQ ID NO: 1388241 - RNA, 19 nt, Artificial Sequence
  Description of Artificial Sequence: Synthetic oligonucleotide
gcuuuugcgcugaccuuca

SEQ ID NO: 1388242 - RNA, 19 nt, Artificial Sequence
  Description of Artificial Sequence: Synthetic oligonucleotide
gccccuuaucuugaggaaa

SEQ ID NO: 1388243 - RNA, 19 nt, Artificial Sequence
  Description of Artificial Sequence: Synthetic oligonucleotide
gcccugaauaacccgguau

SEQ ID NO: 1388244 - RNA, 19 nt, Artificial Sequence
  Description of Artificial Sequence: Synthetic oligonucleotide
cagcuugcuuccagaacau

SEQ ID NO: 1388245 - RNA, 19 nt, Artificial Sequence
  Description of Artificial Sequence: Synthetic oligonucleotide
cccgguauucugacagcca

SEQ ID NO: 1388246 - RNA, 19 nt, Artificial Sequence
  Description of Artificial Sequence: Synthetic oligonucleotide
accgcaugcggggcagcaa

SEQ ID NO: 1388247 - RNA, 19 nt, Artificial Sequence
  Description of Artificial Sequence: Synthetic oligonucleotide
gcuuccgccaggugaugua

SEQ ID NO: 1388248 - RNA, 19 nt, Artificial Sequence
  Description of Artificial Sequence: Synthetic oligonucleotide
gcauauccaaagucagcuu

SEQ ID NO: 1388249 - RNA, 19 nt, Artificial Sequence
  Description of Artificial Sequence: Synthetic oligonucleotide
gucggauggugccccuuau

SEQ ID NO: 1388250 - RNA, 19 nt, Artificial Sequence
  Description of Artificial Sequence: Synthetic oligonucleotide
cccugaauaacccgguauu

SEQ ID NO: 1388251 - RNA, 19 nt, Artificial Sequence
  Description of Artificial Sequence: Synthetic oligonucleotide
ccggacuucaaauguggau

SEQ ID NO: 1388252 - RNA, 19 nt, Artificial Sequence
  Description of Artificial Sequence: Synthetic oligonucleotide
agccgcucucgggcauauc

SEQ ID NO: 1388253 - RNA, 19 nt, Artificial Sequence
  Description of Artificial Sequence: Synthetic oligonucleotide
gccccagcaguaguuuaga

SEQ ID NO: 1388254 - RNA, 19 nt, Artificial Sequence
  Description of Artificial Sequence: Synthetic oligonucleotide
cgguauucugacagccaga

SEQ ID NO: 1388255 - RNA, 19 nt, Artificial Sequence
  Description of Artificial Sequence: Synthetic oligonucleotide
cccuuaucuugaggaaaca

SEQ ID NO: 1388256 - RNA, 19 nt, Artificial Sequence
  Description of Artificial Sequence: Synthetic oligonucleotide
ccgguauucuguacuucgu

SEQ ID NO: 1388257 - RNA, 19 nt, Artificial Sequence
  Description of Artificial Sequence: Synthetic oligonucleotide
cccguaccgcaugcggggc

SEQ ID NO: 1388258 - RNA, 19 nt, Artificial Sequence
  Description of Artificial Sequence: Synthetic oligonucleotide
ggcuuccgccaggugaugu

SEQ ID NO: 1388259 - RNA, 19 nt, Artificial Sequence
  Description of Artificial Sequence: Synthetic oligonucleotide
cgugcucugaaagccugaa

SEQ ID NO: 1388260 - RNA, 19 nt, Artificial Sequence
  Description of Artificial Sequence: Synthetic oligonucleotide
ccguaccgcaugcggggca

SEQ ID NO: 1388261 - RNA, 19 nt, Artificial Sequence
  Description of Artificial Sequence: Synthetic oligonucleotide
ccacgucgacauagcugca

SEQ ID NO: 1388262 - RNA, 19 nt, Artificial Sequence
  Description of Artificial Sequence: Synthetic oligonucleotide
ccgcaugcggggcagcaau

SEQ ID NO: 1388263 - RNA, 19 nt, Artificial Sequence
  Description of Artificial Sequence: Synthetic oligonucleotide
cgucggauggugccccuua

SEQ ID NO: 1388264 - RNA, 19 nt, Artificial Sequence
  Description of Artificial Sequence: Synthetic oligonucleotide
ccaagacugcagagggcuu

SEQ ID NO: 1388265 - RNA, 19 nt, Artificial Sequence
  Description of Artificial Sequence: Synthetic oligonucleotide
ccguguugugugugauccu

SEQ ID NO: 1388266 - RNA, 19 nt, Artificial Sequence
  Description of Artificial Sequence: Synthetic oligonucleotide
gcgucggauggugccccuu

SEQ ID NO: 1388267 - RNA, 19 nt, Artificial Sequence
  Description of Artificial Sequence: Synthetic oligonucleotide
uuauaauaaauaaacaggg

SEQ ID NO: 1388268 - RNA, 19 nt, Artificial Sequence
  Description of Artificial Sequence: Synthetic oligonucleotide
auuuugaugaacaagaggg

SEQ ID NO: 1388269 - RNA, 19 nt, Artificial Sequence
  Description of Artificial Sequence: Synthetic oligonucleotide
auuauaauaaauaaacagg

SEQ ID NO: 1388270 - RNA, 19 nt, Artificial Sequence
  Description of Artificial Sequence: Synthetic oligonucleotide
auuccaagcacccaggacc

SEQ ID NO: 1388271 - RNA, 19 nt, Artificial Sequence
  Description of Artificial Sequence: Synthetic oligonucleotide
auaauaaauaaacagggcu

SEQ ID NO: 1388272 - RNA, 19 nt, Artificial Sequence
  Description of Artificial Sequence: Synthetic oligonucleotide
uaauaaauaaacagggcug

SEQ ID NO: 1388273 - RNA, 19 nt, Artificial Sequence
  Description of Artificial Sequence: Synthetic oligonucleotide
acuacugcgggccagaguc

SEQ ID NO: 1388274 - RNA, 19 nt, Artificial Sequence
  Description of Artificial Sequence: Synthetic oligonucleotide
gauuuugaugaacaagagg

SEQ ID NO: 1388275 - RNA, 19 nt, Artificial Sequence
  Description of Artificial Sequence: Synthetic oligonucleotide
gaaaguagaaggaaugggg

SEQ ID NO: 1388276 - RNA, 19 nt, Artificial Sequence
  Description of Artificial Sequence: Synthetic oligonucleotide
aacugggucauccaaguag

SEQ ID NO: 1388277 - RNA, 19 nt, Artificial Sequence
  Description of Artificial Sequence: Synthetic oligonucleotide
ucuuguacuccucuggcgg

SEQ ID NO: 1388278 - RNA, 19 nt, Artificial Sequence
  Description of Artificial Sequence: Synthetic oligonucleotide
uggacugcuaauaacagac

SEQ ID NO: 1388279 - RNA, 19 nt, Artificial Sequence
  Description of Artificial Sequence: Synthetic oligonucleotide
ugugaaaggagcuggaugu

SEQ ID NO: 1388280 - RNA, 19 nt, Artificial Sequence
  Description of Artificial Sequence: Synthetic oligonucleotide
uuuugaugaacaagagggg

SEQ ID NO: 1388281 - RNA, 19 nt, Artificial Sequence
  Description of Artificial Sequence: Synthetic oligonucleotide
aacaagaggggcuugggca

SEQ ID NO: 1388282 - RNA, 19 nt, Artificial Sequence
  Description of Artificial Sequence: Synthetic oligonucleotide
guugaugguacucuauugg

SEQ ID NO: 1388283 - RNA, 19 nt, Artificial Sequence
  Description of Artificial Sequence: Synthetic oligonucleotide
aacacaucucuguugaacu

SEQ ID NO: 1388284 - RNA, 19 nt, Artificial Sequence
  Description of Artificial Sequence: Synthetic oligonucleotide
aaauaaacagggcugugaa

SEQ ID NO: 1388285 - RNA, 19 nt, Artificial Sequence
  Description of Artificial Sequence: Synthetic oligonucleotide
uggacugcccaucagguag

SEQ ID NO: 1388286 - RNA, 19 nt, Artificial Sequence
  Description of Artificial Sequence: Synthetic oligonucleotide
gauguauagggcaagaaga

SEQ ID NO: 1388287 - RNA, 19 nt, Artificial Sequence
  Description of Artificial Sequence: Synthetic oligonucleotide
ugacaggaaaccucgcucg

SEQ ID NO: 1388288 - RNA, 19 nt, Artificial Sequence
  Description of Artificial Sequence: Synthetic oligonucleotide
aguucuacaccugcuagcc

SEQ ID NO: 1388289 - RNA, 19 nt, Artificial Sequence
  Description of Artificial Sequence: Synthetic oligonucleotide
gacugcuaauaacagaccc

SEQ ID NO: 1388290 - RNA, 19 nt, Artificial Sequence
  Description of Artificial Sequence: Synthetic oligonucleotide
gaucaaauacuggauaccc

SEQ ID NO: 1388291 - RNA, 19 nt, Artificial Sequence
  Description of Artificial Sequence: Synthetic oligonucleotide
aaaucccggcauuccaagc

SEQ ID NO: 1388292 - RNA, 19 nt, Artificial Sequence
  Description of Artificial Sequence: Synthetic oligonucleotide
aaggcucuacacuugucuc

SEQ ID NO: 1388293 - RNA, 19 nt, Artificial Sequence
  Description of Artificial Sequence: Synthetic oligonucleotide
aacuacugagugcaccccg

SEQ ID NO: 1388294 - RNA, 19 nt, Artificial Sequence
  Description of Artificial Sequence: Synthetic oligonucleotide
cuggcuucuuauuaaagag

SEQ ID NO: 1388295 - RNA, 19 nt, Artificial Sequence
  Description of Artificial Sequence: Synthetic oligonucleotide
ugaugguacucuauuggag

SEQ ID NO: 1388296 - RNA, 19 nt, Artificial Sequence
  Description of Artificial Sequence: Synthetic oligonucleotide
aauuccccuaucaucugcc

SEQ ID NO: 1388297 - RNA, 19 nt, Artificial Sequence
  Description of Artificial Sequence: Synthetic oligonucleotide
accucgcucgaucaaauac

SEQ ID NO: 1388298 - RNA, 19 nt, Artificial Sequence
  Description of Artificial Sequence: Synthetic oligonucleotide
auaugugugggugauaucu

SEQ ID NO: 1388299 - RNA, 19 nt, Artificial Sequence
  Description of Artificial Sequence: Synthetic oligonucleotide
ucuacacuugucuccaacc

SEQ ID NO: 1388300 - RNA, 19 nt, Artificial Sequence
  Description of Artificial Sequence: Synthetic oligonucleotide
uauagggcaagaagaggag

SEQ ID NO: 1388301 - RNA, 19 nt, Artificial Sequence
  Description of Artificial Sequence: Synthetic oligonucleotide
gugcccagaauucagggcg

SEQ ID NO: 1388302 - RNA, 19 nt, Artificial Sequence
  Description of Artificial Sequence: Synthetic oligonucleotide
cucucuugcuuccaaauag

SEQ ID NO: 1388303 - RNA, 19 nt, Artificial Sequence
  Description of Artificial Sequence: Synthetic oligonucleotide
accagucagaguucuacac

SEQ ID NO: 1388304 - RNA, 19 nt, Artificial Sequence
  Description of Artificial Sequence: Synthetic oligonucleotide
uguauagggcaagaagagg

SEQ ID NO: 1388305 - RNA, 19 nt, Artificial Sequence
  Description of Artificial Sequence: Synthetic oligonucleotide
uguaaugccgccucuggac

SEQ ID NO: 1388306 - RNA, 19 nt, Artificial Sequence
  Description of Artificial Sequence: Synthetic oligonucleotide
uaaauaaacagggcuguga

SEQ ID NO: 1388307 - RNA, 19 nt, Artificial Sequence
  Description of Artificial Sequence: Synthetic oligonucleotide
agucccauucacugagucc

SEQ ID NO: 1388308 - RNA, 19 nt, Artificial Sequence
  Description of Artificial Sequence: Synthetic oligonucleotide
uaucccgagaagaggagcc

SEQ ID NO: 1388309 - RNA, 19 nt, Artificial Sequence
  Description of Artificial Sequence: Synthetic oligonucleotide
agaguucuacaccugcuag

SEQ ID NO: 1388310 - RNA, 19 nt, Artificial Sequence
  Description of Artificial Sequence: Synthetic oligonucleotide
acaccugcuagccucacag

SEQ ID NO: 1388311 - RNA, 19 nt, Artificial Sequence
  Description of Artificial Sequence: Synthetic oligonucleotide
uugaugguacucuauugga

SEQ ID NO: 1388312 - RNA, 19 nt, Artificial Sequence
  Description of Artificial Sequence: Synthetic oligonucleotide
aggaguucgagacuggccu

SEQ ID NO: 1388313 - RNA, 19 nt, Artificial Sequence
  Description of Artificial Sequence: Synthetic oligonucleotide
aggcucuacacuugucucc

SEQ ID NO: 1388314 - RNA, 19 nt, Artificial Sequence
  Description of Artificial Sequence: Synthetic oligonucleotide
aguugaugguacucuauug

SEQ ID NO: 1388315 - RNA, 19 nt, Artificial Sequence
  Description of Artificial Sequence: Synthetic oligonucleotide
agugcauugucuucagaug

SEQ ID NO: 1388316 - RNA, 19 nt, Artificial Sequence
  Description of Artificial Sequence: Synthetic oligonucleotide
cagaaauuccccuaucauc

SEQ ID NO: 1388317 - RNA, 19 nt, Artificial Sequence
  Description of Artificial Sequence: Synthetic oligonucleotide
uucgaucucugccucagga

SEQ ID NO: 1388318 - RNA, 19 nt, Artificial Sequence
  Description of Artificial Sequence: Synthetic oligonucleotide
aaggugcgcagcccggagc

SEQ ID NO: 1388319 - RNA, 19 nt, Artificial Sequence
  Description of Artificial Sequence: Synthetic oligonucleotide
gaaaucccggcauuccaag

SEQ ID NO: 1388320 - RNA, 19 nt, Artificial Sequence
  Description of Artificial Sequence: Synthetic oligonucleotide
ggauguauagggcaagaag

SEQ ID NO: 1388321 - RNA, 19 nt, Artificial Sequence
  Description of Artificial Sequence: Synthetic oligonucleotide
aggaaagaugaggaguucg

SEQ ID NO: 1388322 - RNA, 19 nt, Artificial Sequence
  Description of Artificial Sequence: Synthetic oligonucleotide
uguaaagugcauugucuuc

SEQ ID NO: 1388323 - RNA, 19 nt, Artificial Sequence
  Description of Artificial Sequence: Synthetic oligonucleotide
aauaaacagggcugugaaa

SEQ ID NO: 1388324 - RNA, 19 nt, Artificial Sequence
  Description of Artificial Sequence: Synthetic oligonucleotide
uucuacaccugcuagccuc

SEQ ID NO: 1388325 - RNA, 19 nt, Artificial Sequence
  Description of Artificial Sequence: Synthetic oligonucleotide
cucgcagggaacuacugag

SEQ ID NO: 1388326 - RNA, 19 nt, Artificial Sequence
  Description of Artificial Sequence: Synthetic oligonucleotide
uuccgcuccaggaugaagu

SEQ ID NO: 1388327 - RNA, 19 nt, Artificial Sequence
  Description of Artificial Sequence: Synthetic oligonucleotide
ugauguuccuuugauuccc

SEQ ID NO: 1388328 - RNA, 19 nt, Artificial Sequence
  Description of Artificial Sequence: Synthetic oligonucleotide
gcuaauaacagaccccugc

SEQ ID NO: 1388329 - RNA, 19 nt, Artificial Sequence
  Description of Artificial Sequence: Synthetic oligonucleotide
agugugauaugugugggug

SEQ ID NO: 1388330 - RNA, 19 nt, Artificial Sequence
  Description of Artificial Sequence: Synthetic oligonucleotide
agcucugauggcuucgauc

SEQ ID NO: 1388331 - RNA, 19 nt, Artificial Sequence
  Description of Artificial Sequence: Synthetic oligonucleotide
uaugugugggugauaucug

SEQ ID NO: 1388332 - RNA, 19 nt, Artificial Sequence
  Description of Artificial Sequence: Synthetic oligonucleotide
acugagugcaccccgcuug

SEQ ID NO: 1388333 - RNA, 19 nt, Artificial Sequence
  Description of Artificial Sequence: Synthetic oligonucleotide
uucgagacuggccucuggc

SEQ ID NO: 1388334 - RNA, 19 nt, Artificial Sequence
  Description of Artificial Sequence: Synthetic oligonucleotide
uauuggaguugcuggagcu

SEQ ID NO: 1388335 - RNA, 19 nt, Artificial Sequence
  Description of Artificial Sequence: Synthetic oligonucleotide
gaaagaugaggaguucgag

SEQ ID NO: 1388336 - RNA, 19 nt, Artificial Sequence
  Description of Artificial Sequence: Synthetic oligonucleotide
guauagggcaagaagagga

SEQ ID NO: 1388337 - RNA, 19 nt, Artificial Sequence
  Description of Artificial Sequence: Synthetic oligonucleotide
uccccuaucaucugccggc

SEQ ID NO: 1388338 - RNA, 19 nt, Artificial Sequence
  Description of Artificial Sequence: Synthetic oligonucleotide
cauuguugaaggcuggguc

SEQ ID NO: 1388339 - RNA, 19 nt, Artificial Sequence
  Description of Artificial Sequence: Synthetic oligonucleotide
ucuauuggaguugcuggag

SEQ ID NO: 1388340 - RNA, 19 nt, Artificial Sequence
  Description of Artificial Sequence: Synthetic oligonucleotide
aguggagauuuugaugaac

SEQ ID NO: 1388341 - RNA, 19 nt, Artificial Sequence
  Description of Artificial Sequence: Synthetic oligonucleotide
gaggccaauucuguaaugc

SEQ ID NO: 1388342 - RNA, 19 nt, Artificial Sequence
  Description of Artificial Sequence: Synthetic oligonucleotide
aggugcgcagcccggagcc

SEQ ID NO: 1388343 - RNA, 19 nt, Artificial Sequence
  Description of Artificial Sequence: Synthetic oligonucleotide
cauugucuucagauguagg

SEQ ID NO: 1388344 - RNA, 19 nt, Artificial Sequence
  Description of Artificial Sequence: Synthetic oligonucleotide
ggaaaguagaaggaauggg

SEQ ID NO: 1388345 - RNA, 19 nt, Artificial Sequence
  Description of Artificial Sequence: Synthetic oligonucleotide
ucaggcuaucccgagaaga

SEQ ID NO: 1388346 - RNA, 19 nt, Artificial Sequence
  Description of Artificial Sequence: Synthetic oligonucleotide
gaagaggagccagagcugc

SEQ ID NO: 1388347 - RNA, 19 nt, Artificial Sequence
  Description of Artificial Sequence: Synthetic oligonucleotide
cuugggcucagggugaucc

SEQ ID NO: 1388348 - RNA, 19 nt, Artificial Sequence
  Description of Artificial Sequence: Synthetic oligonucleotide
uucaaggcucuacacuugu

SEQ ID NO: 1388349 - RNA, 19 nt, Artificial Sequence
  Description of Artificial Sequence: Synthetic oligonucleotide
aaccagucagaguucuaca

SEQ ID NO: 1388350 - RNA, 19 nt, Artificial Sequence
  Description of Artificial Sequence: Synthetic oligonucleotide
auguauagggcaagaagag

SEQ ID NO: 1388351 - RNA, 19 nt, Artificial Sequence
  Description of Artificial Sequence: Synthetic oligonucleotide
gaugguacucuauuggagu

SEQ ID NO: 1388352 - RNA, 19 nt, Artificial Sequence
  Description of Artificial Sequence: Synthetic oligonucleotide
aggaugaagugagccaccc

SEQ ID NO: 1388353 - RNA, 19 nt, Artificial Sequence
  Description of Artificial Sequence: Synthetic oligonucleotide
gaacaagaggggcuugggc

SEQ ID NO: 1388354 - RNA, 19 nt, Artificial Sequence
  Description of Artificial Sequence: Synthetic oligonucleotide
uguuccuuugauucccgcu

SEQ ID NO: 1388355 - RNA, 19 nt, Artificial Sequence
  Description of Artificial Sequence: Synthetic oligonucleotide
cauucuggcucgcagcccc

SEQ ID NO: 1388356 - RNA, 19 nt, Artificial Sequence
  Description of Artificial Sequence: Synthetic oligonucleotide
cugugaaaggacuggcgag

SEQ ID NO: 1388357 - RNA, 19 nt, Artificial Sequence
  Description of Artificial Sequence: Synthetic oligonucleotide
ggagauuuugaugaacaag

SEQ ID NO: 1388358 - RNA, 19 nt, Artificial Sequence
  Description of Artificial Sequence: Synthetic oligonucleotide
gagguugaggccaauucug

SEQ ID NO: 1388359 - RNA, 19 nt, Artificial Sequence
  Description of Artificial Sequence: Synthetic oligonucleotide
ggaacuacugagugcaccc

SEQ ID NO: 1388360 - RNA, 19 nt, Artificial Sequence
  Description of Artificial Sequence: Synthetic oligonucleotide
aggaguugggacuuguaaa

SEQ ID NO: 1388361 - RNA, 19 nt, Artificial Sequence
  Description of Artificial Sequence: Synthetic oligonucleotide
cucuuguacuccucuggcg

SEQ ID NO: 1388362 - RNA, 19 nt, Artificial Sequence
  Description of Artificial Sequence: Synthetic oligonucleotide
agauuuugaugaacaagag

SEQ ID NO: 1388363 - RNA, 19 nt, Artificial Sequence
  Description of Artificial Sequence: Synthetic oligonucleotide
caggcuaucccgagaagag

SEQ ID NO: 1388364 - RNA, 19 nt, Artificial Sequence
  Description of Artificial Sequence: Synthetic oligonucleotide
ucucgcagggaacuacuga

SEQ ID NO: 1388365 - RNA, 19 nt, Artificial Sequence
  Description of Artificial Sequence: Synthetic oligonucleotide
uucgagugcccuccucacg

SEQ ID NO: 1388366 - RNA, 19 nt, Artificial Sequence
  Description of Artificial Sequence: Synthetic oligonucleotide
auguuccuuugauucccgc

SEQ ID NO: 1388367 - RNA, 19 nt, Artificial Sequence
  Description of Artificial Sequence: Synthetic oligonucleotide
cauucacugaguccuuggc

SEQ ID NO: 1388368 - RNA, 19 nt, Artificial Sequence
  Description of Artificial Sequence: Synthetic oligonucleotide
guaaugccgccucuggacc

SEQ ID NO: 1388369 - RNA, 19 nt, Artificial Sequence
  Description of Artificial Sequence: Synthetic oligonucleotide
cuaauaacagaccccugca

SEQ ID NO: 1388370 - RNA, 19 nt, Artificial Sequence
  Description of Artificial Sequence: Synthetic oligonucleotide
gaaauuccccuaucaucug

SEQ ID NO: 1388371 - RNA, 19 nt, Artificial Sequence
  Description of Artificial Sequence: Synthetic oligonucleotide
ggcaauacugggcaugcag

SEQ ID NO: 1388372 - RNA, 19 nt, Artificial Sequence
  Description of Artificial Sequence: Synthetic oligonucleotide
uaaguguccuccagacuac

SEQ ID NO: 1388373 - RNA, 19 nt, Artificial Sequence
  Description of Artificial Sequence: Synthetic oligonucleotide
aucccggcauuccaagcac

SEQ ID NO: 1388374 - RNA, 19 nt, Artificial Sequence
  Description of Artificial Sequence: Synthetic oligonucleotide
aguggcuggagguuccuca

SEQ ID NO: 1388375 - RNA, 19 nt, Artificial Sequence
  Description of Artificial Sequence: Synthetic oligonucleotide
cucgcucgaucaaauacug

SEQ ID NO: 1388376 - RNA, 19 nt, Artificial Sequence
  Description of Artificial Sequence: Synthetic oligonucleotide
augaacaagaggggcuugg

SEQ ID NO: 1388377 - RNA, 19 nt, Artificial Sequence
  Description of Artificial Sequence: Synthetic oligonucleotide
uuggcaauacugggcaugc

SEQ ID NO: 1388378 - RNA, 19 nt, Artificial Sequence
  Description of Artificial Sequence: Synthetic oligonucleotide
acuacugagugcaccccgc

SEQ ID NO: 1388379 - RNA, 19 nt, Artificial Sequence
  Description of Artificial Sequence: Synthetic oligonucleotide
ucuacaccugcuagccuca

SEQ ID NO: 1388380 - RNA, 19 nt, Artificial Sequence
  Description of Artificial Sequence: Synthetic oligonucleotide
uggagauuuugaugaacaa

SEQ ID NO: 1388381 - RNA, 19 nt, Artificial Sequence
  Description of Artificial Sequence: Synthetic oligonucleotide
aucgccugcccauaagugu

SEQ ID NO: 1388382 - RNA, 19 nt, Artificial Sequence
  Description of Artificial Sequence: Synthetic oligonucleotide
ugugauaugugugggugau

SEQ ID NO: 1388383 - RNA, 19 nt, Artificial Sequence
  Description of Artificial Sequence: Synthetic oligonucleotide
ucgcucgaucaaauacugg

SEQ ID NO: 1388384 - RNA, 19 nt, Artificial Sequence
  Description of Artificial Sequence: Synthetic oligonucleotide
cuuguacuccucuggcggc

SEQ ID NO: 1388385 - RNA, 19 nt, Artificial Sequence
  Description of Artificial Sequence: Synthetic oligonucleotide
ucacugaguccuuggcucc

SEQ ID NO: 1388386 - RNA, 19 nt, Artificial Sequence
  Description of Artificial Sequence: Synthetic oligonucleotide
ucacagguaaggaggggaa

SEQ ID NO: 1388387 - RNA, 19 nt, Artificial Sequence
  Description of Artificial Sequence: Synthetic oligonucleotide
gaggaguugggacuuguaa

SEQ ID NO: 1388388 - RNA, 19 nt, Artificial Sequence
  Description of Artificial Sequence: Synthetic oligonucleotide
caaccagucagaguucuac

SEQ ID NO: 1388389 - RNA, 19 nt, Artificial Sequence
  Description of Artificial Sequence: Synthetic oligonucleotide
uaucuguaaagugcauugu

SEQ ID NO: 1388390 - RNA, 19 nt, Artificial Sequence
  Description of Artificial Sequence: Synthetic oligonucleotide
guggagauuuugaugaaca

SEQ ID NO: 1388391 - RNA, 19 nt, Artificial Sequence
  Description of Artificial Sequence: Synthetic oligonucleotide
cuaccaucuucccgggucc

SEQ ID NO: 1388392 - RNA, 19 nt, Artificial Sequence
  Description of Artificial Sequence: Synthetic oligonucleotide
aaugccgccucuggaccac

SEQ ID NO: 1388393 - RNA, 19 nt, Artificial Sequence
  Description of Artificial Sequence: Synthetic oligonucleotide
aggaaaccucgcucgauca

SEQ ID NO: 1388394 - RNA, 19 nt, Artificial Sequence
  Description of Artificial Sequence: Synthetic oligonucleotide
agcagaugaagacgaggca

SEQ ID NO: 1388395 - RNA, 19 nt, Artificial Sequence
  Description of Artificial Sequence: Synthetic oligonucleotide
ucgccugcccauaaguguc

SEQ ID NO: 1388396 - RNA, 19 nt, Artificial Sequence
  Description of Artificial Sequence: Synthetic oligonucleotide
ggccaauucuguaaugccg

SEQ ID NO: 1388397 - RNA, 19 nt, Artificial Sequence
  Description of Artificial Sequence: Synthetic oligonucleotide
ugugugggugauaucugua

SEQ ID NO: 1388398 - RNA, 19 nt, Artificial Sequence
  Description of Artificial Sequence: Synthetic oligonucleotide
cuuugccucucuugcuucc

SEQ ID NO: 1388399 - RNA, 19 nt, Artificial Sequence
  Description of Artificial Sequence: Synthetic oligonucleotide
agggugauccucugggagu

SEQ ID NO: 1388400 - RNA, 19 nt, Artificial Sequence
  Description of Artificial Sequence: Synthetic oligonucleotide
ugauucccgcuucuccagc

SEQ ID NO: 1388401 - RNA, 19 nt, Artificial Sequence
  Description of Artificial Sequence: Synthetic oligonucleotide
ugcauugucuucagaugua

SEQ ID NO: 1388402 - RNA, 19 nt, Artificial Sequence
  Description of Artificial Sequence: Synthetic oligonucleotide
ugauaucuguaaagugcau

SEQ ID NO: 1388403 - RNA, 19 nt, Artificial Sequence
  Description of Artificial Sequence: Synthetic oligonucleotide
cuucaaggcucuacacuug

SEQ ID NO: 1388404 - RNA, 19 nt, Artificial Sequence
  Description of Artificial Sequence: Synthetic oligonucleotide
gagugcaccccgcuugagc

SEQ ID NO: 1388405 - RNA, 19 nt, Artificial Sequence
  Description of Artificial Sequence: Synthetic oligonucleotide
accccuucgagugcccucc

SEQ ID NO: 1388406 - RNA, 19 nt, Artificial Sequence
  Description of Artificial Sequence: Synthetic oligonucleotide
uuguacuccucuggcggcg

SEQ ID NO: 1388407 - RNA, 19 nt, Artificial Sequence
  Description of Artificial Sequence: Synthetic oligonucleotide
agcccggagccggaaaucc

SEQ ID NO: 1388408 - RNA, 19 nt, Artificial Sequence
  Description of Artificial Sequence: Synthetic oligonucleotide
ugaggccaauucuguaaug

SEQ ID NO: 1388409 - RNA, 19 nt, Artificial Sequence
  Description of Artificial Sequence: Synthetic oligonucleotide
ugaugaacaagaggggcuu

SEQ ID NO: 1388410 - RNA, 19 nt, Artificial Sequence
  Description of Artificial Sequence: Synthetic oligonucleotide
ugguacucuauuggaguug

SEQ ID NO: 1388411 - RNA, 19 nt, Artificial Sequence
  Description of Artificial Sequence: Synthetic oligonucleotide
caucgccugcccauaagug

SEQ ID NO: 1388412 - RNA, 19 nt, Artificial Sequence
  Description of Artificial Sequence: Synthetic oligonucleotide
gaauucagggcgggccugg

SEQ ID NO: 1388413 - RNA, 19 nt, Artificial Sequence
  Description of Artificial Sequence: Synthetic oligonucleotide
ggacugugaaaggagcugg

SEQ ID NO: 1388414 - RNA, 19 nt, Artificial Sequence
  Description of Artificial Sequence: Synthetic oligonucleotide
cuaucccgagaagaggagc

SEQ ID NO: 1388415 - RNA, 19 nt, Artificial Sequence
  Description of Artificial Sequence: Synthetic oligonucleotide
aggccuggccuguuggcgg

SEQ ID NO: 1388416 - RNA, 19 nt, Artificial Sequence
  Description of Artificial Sequence: Synthetic oligonucleotide
agaugaggaguucgagacu

SEQ ID NO: 1388417 - RNA, 19 nt, Artificial Sequence
  Description of Artificial Sequence: Synthetic oligonucleotide
gcucaggugauggaggagg

SEQ ID NO: 1388418 - RNA, 19 nt, Artificial Sequence
  Description of Artificial Sequence: Synthetic oligonucleotide
gguggcaucuggaagggcc

SEQ ID NO: 1388419 - RNA, 19 nt, Artificial Sequence
  Description of Artificial Sequence: Synthetic oligonucleotide
agugucugacaggaaaccu

SEQ ID NO: 1388420 - RNA, 19 nt, Artificial Sequence
  Description of Artificial Sequence: Synthetic oligonucleotide
gaggaguucgagacuggcc

SEQ ID NO: 1388421 - RNA, 19 nt, Artificial Sequence
  Description of Artificial Sequence: Synthetic oligonucleotide
gggugauaucuguaaagug

SEQ ID NO: 1388422 - RNA, 19 nt, Artificial Sequence
  Description of Artificial Sequence: Synthetic oligonucleotide
cauccaaguagaggggaag

SEQ ID NO: 1388423 - RNA, 19 nt, Artificial Sequence
  Description of Artificial Sequence: Synthetic oligonucleotide
uaaugccgccucuggacca

SEQ ID NO: 1388424 - RNA, 19 nt, Artificial Sequence
  Description of Artificial Sequence: Synthetic oligonucleotide
uccgcuccaggaugaagug

SEQ ID NO: 1388425 - RNA, 19 nt, Artificial Sequence
  Description of Artificial Sequence: Synthetic oligonucleotide
acuugucuccaaccaguca

SEQ ID NO: 1388426 - RNA, 19 nt, Artificial Sequence
  Description of Artificial Sequence: Synthetic oligonucleotide
gguacucuauuggaguugc

SEQ ID NO: 1388427 - RNA, 19 nt, Artificial Sequence
  Description of Artificial Sequence: Synthetic oligonucleotide
gagucccauucacugaguc

SEQ ID NO: 1388428 - RNA, 19 nt, Artificial Sequence
  Description of Artificial Sequence: Synthetic oligonucleotide
gugcauugucuucagaugu

SEQ ID NO: 1388429 - RNA, 19 nt, Artificial Sequence
  Description of Artificial Sequence: Synthetic oligonucleotide
aggaacugggucauccaag

SEQ ID NO: 1388430 - RNA, 19 nt, Artificial Sequence
  Description of Artificial Sequence: Synthetic oligonucleotide
uggagguuccucaggcuau

SEQ ID NO: 1388431 - RNA, 19 nt, Artificial Sequence
  Description of Artificial Sequence: Synthetic oligonucleotide
cucuauuggaguugcugga

SEQ ID NO: 1388432 - RNA, 19 nt, Artificial Sequence
  Description of Artificial Sequence: Synthetic oligonucleotide
gaaggugcgcagcccggag

SEQ ID NO: 1388433 - RNA, 19 nt, Artificial Sequence
  Description of Artificial Sequence: Synthetic oligonucleotide
ggaguugggacuuguaaaa

SEQ ID NO: 1388434 - RNA, 19 nt, Artificial Sequence
  Description of Artificial Sequence: Synthetic oligonucleotide
ucgcucaggugauggagga

SEQ ID NO: 1388435 - RNA, 19 nt, Artificial Sequence
  Description of Artificial Sequence: Synthetic oligonucleotide
ucgcagggaacuacugagu

SEQ ID NO: 1388436 - RNA, 19 nt, Artificial Sequence
  Description of Artificial Sequence: Synthetic oligonucleotide
agcccaggaaagaugagga

SEQ ID NO: 1388437 - RNA, 19 nt, Artificial Sequence
  Description of Artificial Sequence: Synthetic oligonucleotide
caggaugaagugagccacc

SEQ ID NO: 1388438 - RNA, 19 nt, Artificial Sequence
  Description of Artificial Sequence: Synthetic oligonucleotide
gaacuacugagugcacccc

SEQ ID NO: 1388439 - RNA, 19 nt, Artificial Sequence
  Description of Artificial Sequence: Synthetic oligonucleotide
caggaaaccucgcucgauc

SEQ ID NO: 1388440 - RNA, 19 nt, Artificial Sequence
  Description of Artificial Sequence: Synthetic oligonucleotide
cagauguagguggggaaag

SEQ ID NO: 1388441 - RNA, 19 nt, Artificial Sequence
  Description of Artificial Sequence: Synthetic oligonucleotide
aagaggaguugggacuugu

SEQ ID NO: 1388442 - RNA, 19 nt, Artificial Sequence
  Description of Artificial Sequence: Synthetic oligonucleotide
aggcuaucccgagaagagg

SEQ ID NO: 1388443 - RNA, 19 nt, Artificial Sequence
  Description of Artificial Sequence: Synthetic oligonucleotide
ugguggguggaggaagcag

SEQ ID NO: 1388444 - RNA, 19 nt, Artificial Sequence
  Description of Artificial Sequence: Synthetic oligonucleotide
gccaauucuguaaugccgc

SEQ ID NO: 1388445 - RNA, 19 nt, Artificial Sequence
  Description of Artificial Sequence: Synthetic oligonucleotide
guggacugcuaauaacaga

SEQ ID NO: 1388446 - RNA, 19 nt, Artificial Sequence
  Description of Artificial Sequence: Synthetic oligonucleotide
cucgaucaaauacuggaua

SEQ ID NO: 1388447 - RNA, 19 nt, Artificial Sequence
  Description of Artificial Sequence: Synthetic oligonucleotide
gacaucuugggcucagggu

SEQ ID NO: 1388448 - RNA, 19 nt, Artificial Sequence
  Description of Artificial Sequence: Synthetic oligonucleotide
uguacuccucuggcggcgg

SEQ ID NO: 1388449 - RNA, 19 nt, Artificial Sequence
  Description of Artificial Sequence: Synthetic oligonucleotide
uggauguauagggcaagaa

SEQ ID NO: 1388450 - RNA, 19 nt, Artificial Sequence
  Description of Artificial Sequence: Synthetic oligonucleotide
aggcaguggagauuuugau

SEQ ID NO: 1388451 - RNA, 19 nt, Artificial Sequence
  Description of Artificial Sequence: Synthetic oligonucleotide
gaaaccucgcucgaucaaa

SEQ ID NO: 1388452 - RNA, 19 nt, Artificial Sequence
  Description of Artificial Sequence: Synthetic oligonucleotide
ucccgagaagaggagccag

SEQ ID NO: 1388453 - RNA, 19 nt, Artificial Sequence
  Description of Artificial Sequence: Synthetic oligonucleotide
ccagucagaguucuacacc

SEQ ID NO: 1388454 - RNA, 19 nt, Artificial Sequence
  Description of Artificial Sequence: Synthetic oligonucleotide
ugagcccaucgccugccca

SEQ ID NO: 1388455 - RNA, 19 nt, Artificial Sequence
  Description of Artificial Sequence: Synthetic oligonucleotide
cagggcugugaaaggacug

SEQ ID NO: 1388456 - RNA, 19 nt, Artificial Sequence
  Description of Artificial Sequence: Synthetic oligonucleotide
gauguagguggggaaagua

SEQ ID NO: 1388457 - RNA, 19 nt, Artificial Sequence
  Description of Artificial Sequence: Synthetic oligonucleotide
gugugggugauaucuguaa

SEQ ID NO: 1388458 - RNA, 19 nt, Artificial Sequence
  Description of Artificial Sequence: Synthetic oligonucleotide
guucgagacuggccucugg

SEQ ID NO: 1388459 - RNA, 19 nt, Artificial Sequence
  Description of Artificial Sequence: Synthetic oligonucleotide
ucccggcauuccaagcacc

SEQ ID NO: 1388460 - RNA, 19 nt, Artificial Sequence
  Description of Artificial Sequence: Synthetic oligonucleotide
caucuucccgggucccugg

SEQ ID NO: 1388461 - RNA, 19 nt, Artificial Sequence
  Description of Artificial Sequence: Synthetic oligonucleotide
gugaaaggacuggcgaggc

SEQ ID NO: 1388462 - RNA, 19 nt, Artificial Sequence
  Description of Artificial Sequence: Synthetic oligonucleotide
ggcccuuugccucucuugc

SEQ ID NO: 1388463 - RNA, 19 nt, Artificial Sequence
  Description of Artificial Sequence: Synthetic oligonucleotide
gcucuuguacuccucuggc

SEQ ID NO: 1388464 - RNA, 19 nt, Artificial Sequence
  Description of Artificial Sequence: Synthetic oligonucleotide
aaaccucgcucgaucaaau

SEQ ID NO: 1388465 - RNA, 19 nt, Artificial Sequence
  Description of Artificial Sequence: Synthetic oligonucleotide
cucacagguaaggagggga

SEQ ID NO: 1388466 - RNA, 19 nt, Artificial Sequence
  Description of Artificial Sequence: Synthetic oligonucleotide
uacugcgggccagaguccc

SEQ ID NO: 1388467 - RNA, 19 nt, Artificial Sequence
  Description of Artificial Sequence: Synthetic oligonucleotide
ucuucccgggucccuggug

SEQ ID NO: 1388468 - RNA, 19 nt, Artificial Sequence
  Description of Artificial Sequence: Synthetic oligonucleotide
aggacuggcgaggcagugg

SEQ ID NO: 1388469 - RNA, 19 nt, Artificial Sequence
  Description of Artificial Sequence: Synthetic oligonucleotide
cugggcauucgcucaggug

SEQ ID NO: 1388470 - RNA, 19 nt, Artificial Sequence
  Description of Artificial Sequence: Synthetic oligonucleotide
gcuugggcauucuggcucg

SEQ ID NO: 1388471 - RNA, 19 nt, Artificial Sequence
  Description of Artificial Sequence: Synthetic oligonucleotide
gcauucgcucaggugaugg

SEQ ID NO: 1388472 - RNA, 19 nt, Artificial Sequence
  Description of Artificial Sequence: Synthetic oligonucleotide
uccagacuacugcgggcca

SEQ ID NO: 1388473 - RNA, 19 nt, Artificial Sequence
  Description of Artificial Sequence: Synthetic oligonucleotide
caaggcucuacacuugucu

SEQ ID NO: 1388474 - RNA, 19 nt, Artificial Sequence
  Description of Artificial Sequence: Synthetic oligonucleotide
ugcuagccucacagguaag

SEQ ID NO: 1388475 - RNA, 19 nt, Artificial Sequence
  Description of Artificial Sequence: Synthetic oligonucleotide
ugagggcguggacugcuaa

SEQ ID NO: 1388476 - RNA, 19 nt, Artificial Sequence
  Description of Artificial Sequence: Synthetic oligonucleotide
ccacaggagugucugacag

SEQ ID NO: 1388477 - RNA, 19 nt, Artificial Sequence
  Description of Artificial Sequence: Synthetic oligonucleotide
aaccucgcucgaucaaaua

SEQ ID NO: 1388478 - RNA, 19 nt, Artificial Sequence
  Description of Artificial Sequence: Synthetic oligonucleotide
gcauugucuucagauguag

SEQ ID NO: 1388479 - RNA, 19 nt, Artificial Sequence
  Description of Artificial Sequence: Synthetic oligonucleotide
cuugagcccaucgccugcc

SEQ ID NO: 1388480 - RNA, 19 nt, Artificial Sequence
  Description of Artificial Sequence: Synthetic oligonucleotide
ucuggcucgcagccccagc

SEQ ID NO: 1388481 - RNA, 19 nt, Artificial Sequence
  Description of Artificial Sequence: Synthetic oligonucleotide
cuuggacugcccaucaggu

SEQ ID NO: 1388482 - RNA, 19 nt, Artificial Sequence
  Description of Artificial Sequence: Synthetic oligonucleotide
cacagguaaggaggggaag

SEQ ID NO: 1388483 - RNA, 19 nt, Artificial Sequence
  Description of Artificial Sequence: Synthetic oligonucleotide
gcaucgguggaggaacugg

SEQ ID NO: 1388484 - RNA, 19 nt, Artificial Sequence
  Description of Artificial Sequence: Synthetic oligonucleotide
caccugcuagccucacagg

SEQ ID NO: 1388485 - RNA, 19 nt, Artificial Sequence
  Description of Artificial Sequence: Synthetic oligonucleotide
cugcuagccucacagguaa

SEQ ID NO: 1388486 - RNA, 19 nt, Artificial Sequence
  Description of Artificial Sequence: Synthetic oligonucleotide
cuacugcgggccagagucc

SEQ ID NO: 1388487 - RNA, 19 nt, Artificial Sequence
  Description of Artificial Sequence: Synthetic oligonucleotide
uuggacugcccaucaggua

SEQ ID NO: 1388488 - RNA, 19 nt, Artificial Sequence
  Description of Artificial Sequence: Synthetic oligonucleotide
agggacugugaaaggagcu

SEQ ID NO: 1388489 - RNA, 19 nt, Artificial Sequence
  Description of Artificial Sequence: Synthetic oligonucleotide
ggcugugaaaggacuggcg

SEQ ID NO: 1388490 - RNA, 19 nt, Artificial Sequence
  Description of Artificial Sequence: Synthetic oligonucleotide
uacugagugcaccccgcuu

SEQ ID NO: 1388491 - RNA, 19 nt, Artificial Sequence
  Description of Artificial Sequence: Synthetic oligonucleotide
ggaaagaugaggaguucga

SEQ ID NO: 1388492 - RNA, 19 nt, Artificial Sequence
  Description of Artificial Sequence: Synthetic oligonucleotide
caucuugggcucaggguga

SEQ ID NO: 1388493 - RNA, 19 nt, Artificial Sequence
  Description of Artificial Sequence: Synthetic oligonucleotide
ccaggaugaagugagccac

SEQ ID NO: 1388494 - RNA, 19 nt, Artificial Sequence
  Description of Artificial Sequence: Synthetic oligonucleotide
gggaacuacugagugcacc

SEQ ID NO: 1388495 - RNA, 19 nt, Artificial Sequence
  Description of Artificial Sequence: Synthetic oligonucleotide
uccucuggugagggcgugg

SEQ ID NO: 1388496 - RNA, 19 nt, Artificial Sequence
  Description of Artificial Sequence: Synthetic oligonucleotide
agguugaggccaauucugu

SEQ ID NO: 1388497 - RNA, 19 nt, Artificial Sequence
  Description of Artificial Sequence: Synthetic oligonucleotide
ugccgguuccccagaaauu

SEQ ID NO: 1388498 - RNA, 19 nt, Artificial Sequence
  Description of Artificial Sequence: Synthetic oligonucleotide
ugcaccccgcuugagccca

SEQ ID NO: 1388499 - RNA, 19 nt, Artificial Sequence
  Description of Artificial Sequence: Synthetic oligonucleotide
ggcuaucccgagaagagga

SEQ ID NO: 1388500 - RNA, 19 nt, Artificial Sequence
  Description of Artificial Sequence: Synthetic oligonucleotide
ccaauucuguaaugccgcc

SEQ ID NO: 1388501 - RNA, 19 nt, Artificial Sequence
  Description of Artificial Sequence: Synthetic oligonucleotide
gucacugaaggauguggcu

SEQ ID NO: 1388502 - RNA, 19 nt, Artificial Sequence
  Description of Artificial Sequence: Synthetic oligonucleotide
cucaggcuaucccgagaag

SEQ ID NO: 1388503 - RNA, 19 nt, Artificial Sequence
  Description of Artificial Sequence: Synthetic oligonucleotide
gucugcuugcacaggccag

SEQ ID NO: 1388504 - RNA, 19 nt, Artificial Sequence
  Description of Artificial Sequence: Synthetic oligonucleotide
cugcaucagagaggucucg

SEQ ID NO: 1388505 - RNA, 19 nt, Artificial Sequence
  Description of Artificial Sequence: Synthetic oligonucleotide
uuuccccagggcugaugcu

SEQ ID NO: 1388506 - RNA, 19 nt, Artificial Sequence
  Description of Artificial Sequence: Synthetic oligonucleotide
augaggaguucgagacugg

SEQ ID NO: 1388507 - RNA, 19 nt, Artificial Sequence
  Description of Artificial Sequence: Synthetic oligonucleotide
gcguggacugcuaauaaca

SEQ ID NO: 1388508 - RNA, 19 nt, Artificial Sequence
  Description of Artificial Sequence: Synthetic oligonucleotide
cuccucacggcuaccaucu

SEQ ID NO: 1388509 - RNA, 19 nt, Artificial Sequence
  Description of Artificial Sequence: Synthetic oligonucleotide
aguagaggggaaggucacu

SEQ ID NO: 1388510 - RNA, 19 nt, Artificial Sequence
  Description of Artificial Sequence: Synthetic oligonucleotide
cguggacugcuaauaacag

SEQ ID NO: 1388511 - RNA, 19 nt, Artificial Sequence
  Description of Artificial Sequence: Synthetic oligonucleotide
caggaccccuucgagugcc

SEQ ID NO: 1388512 - RNA, 19 nt, Artificial Sequence
  Description of Artificial Sequence: Synthetic oligonucleotide
ugauccucugggagucuuu

SEQ ID NO: 1388513 - RNA, 19 nt, Artificial Sequence
  Description of Artificial Sequence: Synthetic oligonucleotide
ggcguggacugcuaauaac

SEQ ID NO: 1388514 - RNA, 19 nt, Artificial Sequence
  Description of Artificial Sequence: Synthetic oligonucleotide
cugcgcugggcauucgcuc

SEQ ID NO: 1388515 - RNA, 19 nt, Artificial Sequence
  Description of Artificial Sequence: Synthetic oligonucleotide
ggaugaagugagccacccc

SEQ ID NO: 1388516 - RNA, 19 nt, Artificial Sequence
  Description of Artificial Sequence: Synthetic oligonucleotide
uggcaucgguggaggaacu

SEQ ID NO: 1388517 - RNA, 19 nt, Artificial Sequence
  Description of Artificial Sequence: Synthetic oligonucleotide
gggcauucuggcucgcagc

SEQ ID NO: 1388518 - RNA, 19 nt, Artificial Sequence
  Description of Artificial Sequence: Synthetic oligonucleotide
gagguuccucaggcuaucc

SEQ ID NO: 1388519 - RNA, 19 nt, Artificial Sequence
  Description of Artificial Sequence: Synthetic oligonucleotide
cgcucgaucaaauacugga

SEQ ID NO: 1388520 - RNA, 19 nt, Artificial Sequence
  Description of Artificial Sequence: Synthetic oligonucleotide
agcuggugcccagaauuca

SEQ ID NO: 1388521 - RNA, 19 nt, Artificial Sequence
  Description of Artificial Sequence: Synthetic oligonucleotide
cuccaaccagucagaguuc

SEQ ID NO: 1388522 - RNA, 19 nt, Artificial Sequence
  Description of Artificial Sequence: Synthetic oligonucleotide
gagaggucucgcagggaac

SEQ ID NO: 1388523 - RNA, 19 nt, Artificial Sequence
  Description of Artificial Sequence: Synthetic oligonucleotide
gccggcucaggccuuuccg

SEQ ID NO: 1388524 - RNA, 19 nt, Artificial Sequence
  Description of Artificial Sequence: Synthetic oligonucleotide
ggacuggcgaggcagugga

SEQ ID NO: 1388525 - RNA, 19 nt, Artificial Sequence
  Description of Artificial Sequence: Synthetic oligonucleotide
ggaacugggucauccaagu

SEQ ID NO: 1388526 - RNA, 19 nt, Artificial Sequence
  Description of Artificial Sequence: Synthetic oligonucleotide
ggacugcuaauaacagacc

SEQ ID NO: 1388527 - RNA, 19 nt, Artificial Sequence
  Description of Artificial Sequence: Synthetic oligonucleotide
aucgguggaggaacuggug

SEQ ID NO: 1388528 - RNA, 19 nt, Artificial Sequence
  Description of Artificial Sequence: Synthetic oligonucleotide
gccuuuccgcuccaggaug

SEQ ID NO: 1388529 - RNA, 19 nt, Artificial Sequence
  Description of Artificial Sequence: Synthetic oligonucleotide
cauucgcucaggugaugga

SEQ ID NO: 1388530 - RNA, 19 nt, Artificial Sequence
  Description of Artificial Sequence: Synthetic oligonucleotide
ugagugcaccccgcuugag

SEQ ID NO: 1388531 - RNA, 19 nt, Artificial Sequence
  Description of Artificial Sequence: Synthetic oligonucleotide
guacuccucuggcggcggg

SEQ ID NO: 1388532 - RNA, 19 nt, Artificial Sequence
  Description of Artificial Sequence: Synthetic oligonucleotide
uucccgggucccugguggc

SEQ ID NO: 1388533 - RNA, 19 nt, Artificial Sequence
  Description of Artificial Sequence: Synthetic oligonucleotide
gcuggugcccagaauucag

SEQ ID NO: 1388534 - RNA, 19 nt, Artificial Sequence
  Description of Artificial Sequence: Synthetic oligonucleotide
ggagccggaaaucccggca

SEQ ID NO: 1388535 - RNA, 19 nt, Artificial Sequence
  Description of Artificial Sequence: Synthetic oligonucleotide
agggaacuacugagugcac

SEQ ID NO: 1388536 - RNA, 19 nt, Artificial Sequence
  Description of Artificial Sequence: Synthetic oligonucleotide
acaggaaaccucgcucgau

SEQ ID NO: 1388537 - RNA, 19 nt, Artificial Sequence
  Description of Artificial Sequence: Synthetic oligonucleotide
gguuccccagaaauucccc

SEQ ID NO: 1388538 - RNA, 19 nt, Artificial Sequence
  Description of Artificial Sequence: Synthetic oligonucleotide
caggaaagaugaggaguuc

SEQ ID NO: 1388539 - RNA, 19 nt, Artificial Sequence
  Description of Artificial Sequence: Synthetic oligonucleotide
gucccugguggcaucggug

SEQ ID NO: 1388540 - RNA, 19 nt, Artificial Sequence
  Description of Artificial Sequence: Synthetic oligonucleotide
agggcguggacugcuaaua

SEQ ID NO: 1388541 - RNA, 19 nt, Artificial Sequence
  Description of Artificial Sequence: Synthetic oligonucleotide
agacuacugcgggccagag

SEQ ID NO: 1388542 - RNA, 19 nt, Artificial Sequence
  Description of Artificial Sequence: Synthetic oligonucleotide
cccggcauuccaagcaccc

SEQ ID NO: 1388543 - RNA, 19 nt, Artificial Sequence
  Description of Artificial Sequence: Synthetic oligonucleotide
ugcccugccccagugugau

SEQ ID NO: 1388544 - RNA, 19 nt, Artificial Sequence
  Description of Artificial Sequence: Synthetic oligonucleotide
cuggagcuuggacugccca

SEQ ID NO: 1388545 - RNA, 19 nt, Artificial Sequence
  Description of Artificial Sequence: Synthetic oligonucleotide
cuggauguauagggcaaga

SEQ ID NO: 1388546 - RNA, 19 nt, Artificial Sequence
  Description of Artificial Sequence: Synthetic oligonucleotide
aguucgagacuggccucug

SEQ ID NO: 1388547 - RNA, 19 nt, Artificial Sequence
  Description of Artificial Sequence: Synthetic oligonucleotide
gcuaucccgagaagaggag

SEQ ID NO: 1388548 - RNA, 19 nt, Artificial Sequence
  Description of Artificial Sequence: Synthetic oligonucleotide
cugagugcaccccgcuuga

SEQ ID NO: 1388549 - RNA, 19 nt, Artificial Sequence
  Description of Artificial Sequence: Synthetic oligonucleotide
gggaaggucacugaaggau

SEQ ID NO: 1388550 - RNA, 19 nt, Artificial Sequence
  Description of Artificial Sequence: Synthetic oligonucleotide
ggcucuacacuugucucca

SEQ ID NO: 1388551 - RNA, 19 nt, Artificial Sequence
  Description of Artificial Sequence: Synthetic oligonucleotide
uggcaucuggaagggcccu

SEQ ID NO: 1388552 - RNA, 19 nt, Artificial Sequence
  Description of Artificial Sequence: Synthetic oligonucleotide
caucgguggaggaacuggu

SEQ ID NO: 1388553 - RNA, 19 nt, Artificial Sequence
  Description of Artificial Sequence: Synthetic oligonucleotide
ggaaaucccggcauuccaa

SEQ ID NO: 1388554 - RNA, 19 nt, Artificial Sequence
  Description of Artificial Sequence: Synthetic oligonucleotide
uggcaauacugggcaugca

SEQ ID NO: 1388555 - RNA, 19 nt, Artificial Sequence
  Description of Artificial Sequence: Synthetic oligonucleotide
ccgguuccccagaaauucc

SEQ ID NO: 1388556 - RNA, 19 nt, Artificial Sequence
  Description of Artificial Sequence: Synthetic oligonucleotide
gguugaggccaauucugua

SEQ ID NO: 1388557 - RNA, 19 nt, Artificial Sequence
  Description of Artificial Sequence: Synthetic oligonucleotide
caucugccggcucaggccu

SEQ ID NO: 1388558 - RNA, 19 nt, Artificial Sequence
  Description of Artificial Sequence: Synthetic oligonucleotide
gagccggaaaucccggcau

SEQ ID NO: 1388559 - RNA, 19 nt, Artificial Sequence
  Description of Artificial Sequence: Synthetic oligonucleotide
gcauuccaagcacccagga

SEQ ID NO: 1388560 - RNA, 19 nt, Artificial Sequence
  Description of Artificial Sequence: Synthetic oligonucleotide
gaguucgagacuggccucu

SEQ ID NO: 1388561 - RNA, 19 nt, Artificial Sequence
  Description of Artificial Sequence: Synthetic oligonucleotide
cugcuugcacaggccagug

SEQ ID NO: 1388562 - RNA, 19 nt, Artificial Sequence
  Description of Artificial Sequence: Synthetic oligonucleotide
caguugaugguacucuauu

SEQ ID NO: 1388563 - RNA, 19 nt, Artificial Sequence
  Description of Artificial Sequence: Synthetic oligonucleotide
ccggcucaggccuuuccgc

SEQ ID NO: 1388564 - RNA, 19 nt, Artificial Sequence
  Description of Artificial Sequence: Synthetic oligonucleotide
ggaaaccucgcucgaucaa

SEQ ID NO: 1388565 - RNA, 19 nt, Artificial Sequence
  Description of Artificial Sequence: Synthetic oligonucleotide
gacuggcgaggcaguggag

SEQ ID NO: 1388566 - RNA, 19 nt, Artificial Sequence
  Description of Artificial Sequence: Synthetic oligonucleotide
gaggagccagagcugcagu

SEQ ID NO: 1388567 - RNA, 19 nt, Artificial Sequence
  Description of Artificial Sequence: Synthetic oligonucleotide
ccuucgagugcccuccuca

SEQ ID NO: 1388568 - RNA, 19 nt, Artificial Sequence
  Description of Artificial Sequence: Synthetic oligonucleotide
aggaccccuucgagugccc

SEQ ID NO: 1388569 - RNA, 19 nt, Artificial Sequence
  Description of Artificial Sequence: Synthetic oligonucleotide
cccauaaguguccuccaga

SEQ ID NO: 1388570 - RNA, 19 nt, Artificial Sequence
  Description of Artificial Sequence: Synthetic oligonucleotide
cgguuccccagaaauuccc

SEQ ID NO: 1388571 - RNA, 19 nt, Artificial Sequence
  Description of Artificial Sequence: Synthetic oligonucleotide
gucuccaaccagucagagu

SEQ ID NO: 1388572 - RNA, 19 nt, Artificial Sequence
  Description of Artificial Sequence: Synthetic oligonucleotide
gagcccaucgccugcccau

SEQ ID NO: 1388573 - RNA, 19 nt, Artificial Sequence
  Description of Artificial Sequence: Synthetic oligonucleotide
ccgccucuggaccacauca

SEQ ID NO: 1388574 - RNA, 19 nt, Artificial Sequence
  Description of Artificial Sequence: Synthetic oligonucleotide
guucuacaccugcuagccu

SEQ ID NO: 1388575 - RNA, 19 nt, Artificial Sequence
  Description of Artificial Sequence: Synthetic oligonucleotide
gugaaaggagcuggaugua

SEQ ID NO: 1388576 - RNA, 19 nt, Artificial Sequence
  Description of Artificial Sequence: Synthetic oligonucleotide
cuugggcauucuggcucgc

SEQ ID NO: 1388577 - RNA, 19 nt, Artificial Sequence
  Description of Artificial Sequence: Synthetic oligonucleotide
gagggcguggacugcuaau

SEQ ID NO: 1388578 - RNA, 19 nt, Artificial Sequence
  Description of Artificial Sequence: Synthetic oligonucleotide
ucccgggucccugguggca

SEQ ID NO: 1388579 - RNA, 19 nt, Artificial Sequence
  Description of Artificial Sequence: Synthetic oligonucleotide
ugccgccucuggaccacau

SEQ ID NO: 1388580 - RNA, 19 nt, Artificial Sequence
  Description of Artificial Sequence: Synthetic oligonucleotide
cagacuacugcgggccaga

SEQ ID NO: 1388581 - RNA, 19 nt, Artificial Sequence
  Description of Artificial Sequence: Synthetic oligonucleotide
ccucgcucgaucaaauacu

SEQ ID NO: 1388582 - RNA, 19 nt, Artificial Sequence
  Description of Artificial Sequence: Synthetic oligonucleotide
agugcccuccucacggcua

SEQ ID NO: 1388583 - RNA, 19 nt, Artificial Sequence
  Description of Artificial Sequence: Synthetic oligonucleotide
gguggcaucgguggaggaa

SEQ ID NO: 1388584 - RNA, 19 nt, Artificial Sequence
  Description of Artificial Sequence: Synthetic oligonucleotide
ggagcccaggaaagaugag

SEQ ID NO: 1388585 - RNA, 19 nt, Artificial Sequence
  Description of Artificial Sequence: Synthetic oligonucleotide
cauccucuggugagggcgu

SEQ ID NO: 1388586 - RNA, 19 nt, Artificial Sequence
  Description of Artificial Sequence: Synthetic oligonucleotide
ccuuuccgcuccaggauga

SEQ ID NO: 1388587 - RNA, 19 nt, Artificial Sequence
  Description of Artificial Sequence: Synthetic oligonucleotide
cagggcccgguccuuggca

SEQ ID NO: 1388588 - RNA, 19 nt, Artificial Sequence
  Description of Artificial Sequence: Synthetic oligonucleotide
ugggcugacccugguucuu

SEQ ID NO: 1388589 - RNA, 19 nt, Artificial Sequence
  Description of Artificial Sequence: Synthetic oligonucleotide
ggcaucgguggaggaacug

SEQ ID NO: 1388590 - RNA, 19 nt, Artificial Sequence
  Description of Artificial Sequence: Synthetic oligonucleotide
gggcguggacugcuaauaa

SEQ ID NO: 1388591 - RNA, 19 nt, Artificial Sequence
  Description of Artificial Sequence: Synthetic oligonucleotide
ccucacagguaaggagggg

SEQ ID NO: 1388592 - RNA, 19 nt, Artificial Sequence
  Description of Artificial Sequence: Synthetic oligonucleotide
ccccacaggagugucugac

SEQ ID NO: 1388593 - RNA, 19 nt, Artificial Sequence
  Description of Artificial Sequence: Synthetic oligonucleotide
cuacugagugcaccccgcu

SEQ ID NO: 1388594 - RNA, 19 nt, Artificial Sequence
  Description of Artificial Sequence: Synthetic oligonucleotide
ccccgcuugagcccaucgc

SEQ ID NO: 1388595 - RNA, 19 nt, Artificial Sequence
  Description of Artificial Sequence: Synthetic oligonucleotide
cccagcucugauggcuucg

SEQ ID NO: 1388596 - RNA, 19 nt, Artificial Sequence
  Description of Artificial Sequence: Synthetic oligonucleotide
ucugccggcucaggccuuu

SEQ ID NO: 1388597 - RNA, 19 nt, Artificial Sequence
  Description of Artificial Sequence: Synthetic oligonucleotide
gcgggccagagucccauuc

SEQ ID NO: 1388598 - RNA, 19 nt, Artificial Sequence
  Description of Artificial Sequence: Synthetic oligonucleotide
uggcgaggcaguggagauu

SEQ ID NO: 1388599 - RNA, 19 nt, Artificial Sequence
  Description of Artificial Sequence: Synthetic oligonucleotide
guuggcggugguggcaucu

SEQ ID NO: 1388600 - RNA, 19 nt, Artificial Sequence
  Description of Artificial Sequence: Synthetic oligonucleotide
cuggcgaggcaguggagau

SEQ ID NO: 1388601 - RNA, 19 nt, Artificial Sequence
  Description of Artificial Sequence: Synthetic oligonucleotide
ccuuugauucccgcuucuc

SEQ ID NO: 1388602 - RNA, 19 nt, Artificial Sequence
  Description of Artificial Sequence: Synthetic oligonucleotide
ccaggaccccuucgagugc

SEQ ID NO: 1388603 - RNA, 19 nt, Artificial Sequence
  Description of Artificial Sequence: Synthetic oligonucleotide
gcgcugggcauucgcucag

SEQ ID NO: 1388604 - RNA, 19 nt, Artificial Sequence
  Description of Artificial Sequence: Synthetic oligonucleotide
ccagacuacugcgggccag

SEQ ID NO: 1388605 - RNA, 19 nt, Artificial Sequence
  Description of Artificial Sequence: Synthetic oligonucleotide
cagcccggagccggaaauc

SEQ ID NO: 1388606 - RNA, 19 nt, Artificial Sequence
  Description of Artificial Sequence: Synthetic oligonucleotide
gccggaaaucccggcauuc

SEQ ID NO: 1388607 - RNA, 19 nt, Artificial Sequence
  Description of Artificial Sequence: Synthetic oligonucleotide
ccugcuagccucacaggua

SEQ ID NO: 1388608 - RNA, 19 nt, Artificial Sequence
  Description of Artificial Sequence: Synthetic oligonucleotide
cccaucgccugcccauaag

SEQ ID NO: 1388609 - RNA, 19 nt, Artificial Sequence
  Description of Artificial Sequence: Synthetic oligonucleotide
gugauaugugugggugaua

SEQ ID NO: 1388610 - RNA, 19 nt, Artificial Sequence
  Description of Artificial Sequence: Synthetic oligonucleotide
caguggcuggagguuccuc

SEQ ID NO: 1388611 - RNA, 19 nt, Artificial Sequence
  Description of Artificial Sequence: Synthetic oligonucleotide
ggcgaggcaguggagauuu

SEQ ID NO: 1388612 - RNA, 19 nt, Artificial Sequence
  Description of Artificial Sequence: Synthetic oligonucleotide
ggcauucgcucaggugaug

SEQ ID NO: 1388613 - RNA, 19 nt, Artificial Sequence
  Description of Artificial Sequence: Synthetic oligonucleotide
ugcgggccagagucccauu

SEQ ID NO: 1388614 - RNA, 19 nt, Artificial Sequence
  Description of Artificial Sequence: Synthetic oligonucleotide
acugcgggccagaguccca

SEQ ID NO: 1388615 - RNA, 19 nt, Artificial Sequence
  Description of Artificial Sequence: Synthetic oligonucleotide
cagagaggucucgcaggga

SEQ ID NO: 1388616 - RNA, 19 nt, Artificial Sequence
  Description of Artificial Sequence: Synthetic oligonucleotide
ccccagaaauuccccuauc

SEQ ID NO: 1388617 - RNA, 19 nt, Artificial Sequence
  Description of Artificial Sequence: Synthetic oligonucleotide
cggaaaucccggcauucca

SEQ ID NO: 1388618 - RNA, 19 nt, Artificial Sequence
  Description of Artificial Sequence: Synthetic oligonucleotide
ggcucgcagccccagcucu

SEQ ID NO: 1388619 - RNA, 19 nt, Artificial Sequence
  Description of Artificial Sequence: Synthetic oligonucleotide
ggccuuuccgcuccaggau

SEQ ID NO: 1388620 - RNA, 19 nt, Artificial Sequence
  Description of Artificial Sequence: Synthetic oligonucleotide
ggcucugcgcugggcauuc

SEQ ID NO: 1388621 - RNA, 19 nt, Artificial Sequence
  Description of Artificial Sequence: Synthetic oligonucleotide
ccaucgccugcccauaagu

SEQ ID NO: 1388622 - RNA, 19 nt, Artificial Sequence
  Description of Artificial Sequence: Synthetic oligonucleotide
gggucccugguggcaucgg

SEQ ID NO: 1388623 - RNA, 19 nt, Artificial Sequence
  Description of Artificial Sequence: Synthetic oligonucleotide
gcggaggugggcauccucu

SEQ ID NO: 1388624 - RNA, 19 nt, Artificial Sequence
  Description of Artificial Sequence: Synthetic oligonucleotide
gggcugacccugguucuuc

SEQ ID NO: 1388625 - RNA, 19 nt, Artificial Sequence
  Description of Artificial Sequence: Synthetic oligonucleotide
cuguuggcggugguggcau

SEQ ID NO: 1388626 - RNA, 19 nt, Artificial Sequence
  Description of Artificial Sequence: Synthetic oligonucleotide
ggucccugguggcaucggu

SEQ ID NO: 1388627 - RNA, 19 nt, Artificial Sequence
  Description of Artificial Sequence: Synthetic oligonucleotide
ccucuggcggcgggguggg

SEQ ID NO: 1388628 - RNA, 19 nt, Artificial Sequence
  Description of Artificial Sequence: Synthetic oligonucleotide
gugauccucugggagucuu

SEQ ID NO: 1388629 - RNA, 19 nt, Artificial Sequence
  Description of Artificial Sequence: Synthetic oligonucleotide
ccuguuggcggugguggca

SEQ ID NO: 1388630 - RNA, 19 nt, Artificial Sequence
  Description of Artificial Sequence: Synthetic oligonucleotide
ccaacacaucucuguugaa

SEQ ID NO: 1388631 - RNA, 19 nt, Artificial Sequence
  Description of Artificial Sequence: Synthetic oligonucleotide
gcagcccggagccggaaau

SEQ ID NO: 1388632 - RNA, 19 nt, Artificial Sequence
  Description of Artificial Sequence: Synthetic oligonucleotide
cccuaucaucugccggcuc

SEQ ID NO: 1388633 - RNA, 19 nt, Artificial Sequence
  Description of Artificial Sequence: Synthetic oligonucleotide
gccucuggaccacaucauu

SEQ ID NO: 1388634 - RNA, 19 nt, Artificial Sequence
  Description of Artificial Sequence: Synthetic oligonucleotide
ggccagagucccauucacu

SEQ ID NO: 1388635 - RNA, 19 nt, Artificial Sequence
  Description of Artificial Sequence: Synthetic oligonucleotide
ccucuggugagggcgugga

SEQ ID NO: 1388636 - RNA, 19 nt, Artificial Sequence
  Description of Artificial Sequence: Synthetic oligonucleotide
gugagggcguggacugcua

SEQ ID NO: 1388637 - RNA, 19 nt, Artificial Sequence
  Description of Artificial Sequence: Synthetic oligonucleotide
cucuggcggcggggugggg

SEQ ID NO: 1388638 - RNA, 19 nt, Artificial Sequence
  Description of Artificial Sequence: Synthetic oligonucleotide
ccgcuugagcccaucgccu

SEQ ID NO: 1388639 - RNA, 19 nt, Artificial Sequence
  Description of Artificial Sequence: Synthetic oligonucleotide
gcucugcgcugggcauucg

SEQ ID NO: 1388640 - RNA, 19 nt, Artificial Sequence
  Description of Artificial Sequence: Synthetic oligonucleotide
cugggugcccugccccagu

SEQ ID NO: 1388641 - RNA, 19 nt, Artificial Sequence
  Description of Artificial Sequence: Synthetic oligonucleotide
guggggcggaggugggcau

SEQ ID NO: 1388642 - RNA, 19 nt, Artificial Sequence
  Description of Artificial Sequence: Synthetic oligonucleotide
gcccaucgccugcccauaa

SEQ ID NO: 1388643 - RNA, 19 nt, Artificial Sequence
  Description of Artificial Sequence: Synthetic oligonucleotide
cagcucugauggcuucgau

SEQ ID NO: 1388644 - RNA, 19 nt, Artificial Sequence
  Description of Artificial Sequence: Synthetic oligonucleotide
ccggcauuccaagcaccca

SEQ ID NO: 1388645 - RNA, 19 nt, Artificial Sequence
  Description of Artificial Sequence: Synthetic oligonucleotide
ggccuggccuguuggcggu

SEQ ID NO: 1388646 - RNA, 19 nt, Artificial Sequence
  Description of Artificial Sequence: Synthetic oligonucleotide
ccgcuccaggaugaaguga

SEQ ID NO: 1388647 - RNA, 19 nt, Artificial Sequence
  Description of Artificial Sequence: Synthetic oligonucleotide
gggcauucgcucaggugau

SEQ ID NO: 1388648 - RNA, 19 nt, Artificial Sequence
  Description of Artificial Sequence: Synthetic oligonucleotide
ggcuaccaucuucccgggu

SEQ ID NO: 1388649 - RNA, 19 nt, Artificial Sequence
  Description of Artificial Sequence: Synthetic oligonucleotide
cugcgggccagagucccau

SEQ ID NO: 1388650 - RNA, 19 nt, Artificial Sequence
  Description of Artificial Sequence: Synthetic oligonucleotide
ggagcucuucaaggcucua

SEQ ID NO: 1388651 - RNA, 19 nt, Artificial Sequence
  Description of Artificial Sequence: Synthetic oligonucleotide
ccgggucccugguggcauc

SEQ ID NO: 1388652 - RNA, 19 nt, Artificial Sequence
  Description of Artificial Sequence: Synthetic oligonucleotide
ggaccccuucgagugcccu

SEQ ID NO: 1388653 - RNA, 19 nt, Artificial Sequence
  Description of Artificial Sequence: Synthetic oligonucleotide
ggcaucuggaagggcccuu

SEQ ID NO: 1388654 - RNA, 19 nt, Artificial Sequence
  Description of Artificial Sequence: Synthetic oligonucleotide
gccucaggaaggacaucuu

SEQ ID NO: 1388655 - RNA, 19 nt, Artificial Sequence
  Description of Artificial Sequence: Synthetic oligonucleotide
gggcccgguccuuggcaau

SEQ ID NO: 1388656 - RNA, 19 nt, Artificial Sequence
  Description of Artificial Sequence: Synthetic oligonucleotide
ccccuaucaucugccggcu

SEQ ID NO: 1388657 - RNA, 19 nt, Artificial Sequence
  Description of Artificial Sequence: Synthetic oligonucleotide
cccgguccuuggcaauacu

SEQ ID NO: 1388658 - RNA, 19 nt, Artificial Sequence
  Description of Artificial Sequence: Synthetic oligonucleotide
cccgggucccugguggcau

SEQ ID NO: 1388659 - RNA, 19 nt, Artificial Sequence
  Description of Artificial Sequence: Synthetic oligonucleotide
ccccuucgagugcccuccu

SEQ ID NO: 1388660 - RNA, 19 nt, Artificial Sequence
  Description of Artificial Sequence: Synthetic oligonucleotide
aauguuagcaguuacauag

SEQ ID NO: 1388661 - RNA, 19 nt, Artificial Sequence
  Description of Artificial Sequence: Synthetic oligonucleotide
aaauguauaucacauaugg

SEQ ID NO: 1388662 - RNA, 19 nt, Artificial Sequence
  Description of Artificial Sequence: Synthetic oligonucleotide
auguauaucacauaugggc

SEQ ID NO: 1388663 - RNA, 19 nt, Artificial Sequence
  Description of Artificial Sequence: Synthetic oligonucleotide
aauagaucaggcuucuucc

SEQ ID NO: 1388664 - RNA, 19 nt, Artificial Sequence
  Description of Artificial Sequence: Synthetic oligonucleotide
aaaauuacuucauugagcu

SEQ ID NO: 1388665 - RNA, 19 nt, Artificial Sequence
  Description of Artificial Sequence: Synthetic oligonucleotide
uaugacaccaccuaaaacc

SEQ ID NO: 1388666 - RNA, 19 nt, Artificial Sequence
  Description of Artificial Sequence: Synthetic oligonucleotide
ugaauuauguuuaaggaug

SEQ ID NO: 1388667 - RNA, 19 nt, Artificial Sequence
  Description of Artificial Sequence: Synthetic oligonucleotide
aagcuauagaguuaaacag

SEQ ID NO: 1388668 - RNA, 19 nt, Artificial Sequence
  Description of Artificial Sequence: Synthetic oligonucleotide
uguuuaaggaugcucaggg

SEQ ID NO: 1388669 - RNA, 19 nt, Artificial Sequence
  Description of Artificial Sequence: Synthetic oligonucleotide
uucugaaugaagaaaaccc

SEQ ID NO: 1388670 - RNA, 19 nt, Artificial Sequence
  Description of Artificial Sequence: Synthetic oligonucleotide
aacagauagcaauagauca

SEQ ID NO: 1388671 - RNA, 19 nt, Artificial Sequence
  Description of Artificial Sequence: Synthetic oligonucleotide
aaguccaagguauuuggcc

SEQ ID NO: 1388672 - RNA, 19 nt, Artificial Sequence
  Description of Artificial Sequence: Synthetic oligonucleotide
ugaugcgagaauaugaucc

SEQ ID NO: 1388673 - RNA, 19 nt, Artificial Sequence
  Description of Artificial Sequence: Synthetic oligonucleotide
uuagcaguuacauagcaag

SEQ ID NO: 1388674 - RNA, 19 nt, Artificial Sequence
  Description of Artificial Sequence: Synthetic oligonucleotide
auguguagagaauucaagc

SEQ ID NO: 1388675 - RNA, 19 nt, Artificial Sequence
  Description of Artificial Sequence: Synthetic oligonucleotide
uuauguuuaaggaugcuca

SEQ ID NO: 1388676 - RNA, 19 nt, Artificial Sequence
  Description of Artificial Sequence: Synthetic oligonucleotide
uauaguacaaugaucgcca

SEQ ID NO: 1388677 - RNA, 19 nt, Artificial Sequence
  Description of Artificial Sequence: Synthetic oligonucleotide
uaacugagaggccaaaugg

SEQ ID NO: 1388678 - RNA, 19 nt, Artificial Sequence
  Description of Artificial Sequence: Synthetic oligonucleotide
uuaaucaaaaggcacuaug

SEQ ID NO: 1388679 - RNA, 19 nt, Artificial Sequence
  Description of Artificial Sequence: Synthetic oligonucleotide
ugguaauaggcuaaggaag

SEQ ID NO: 1388680 - RNA, 19 nt, Artificial Sequence
  Description of Artificial Sequence: Synthetic oligonucleotide
uauuuggccaggaaaaggc

SEQ ID NO: 1388681 - RNA, 19 nt, Artificial Sequence
  Description of Artificial Sequence: Synthetic oligonucleotide
ucugaaugaagaaaacccc

SEQ ID NO: 1388682 - RNA, 19 nt, Artificial Sequence
  Description of Artificial Sequence: Synthetic oligonucleotide
uugcuaguuauucugaaug

SEQ ID NO: 1388683 - RNA, 19 nt, Artificial Sequence
  Description of Artificial Sequence: Synthetic oligonucleotide
uaaucaaaaggcacuauga

SEQ ID NO: 1388684 - RNA, 19 nt, Artificial Sequence
  Description of Artificial Sequence: Synthetic oligonucleotide
agaagauuauaguacaaug

SEQ ID NO: 1388685 - RNA, 19 nt, Artificial Sequence
  Description of Artificial Sequence: Synthetic oligonucleotide
uguauaucacauaugggcu

SEQ ID NO: 1388686 - RNA, 19 nt, Artificial Sequence
  Description of Artificial Sequence: Synthetic oligonucleotide
ugggcaacuacacaaacgc

SEQ ID NO: 1388687 - RNA, 19 nt, Artificial Sequence
  Description of Artificial Sequence: Synthetic oligonucleotide
uuuguugcuaguuauucug

SEQ ID NO: 1388688 - RNA, 19 nt, Artificial Sequence
  Description of Artificial Sequence: Synthetic oligonucleotide
auucugaaugaagaaaacc

SEQ ID NO: 1388689 - RNA, 19 nt, Artificial Sequence
  Description of Artificial Sequence: Synthetic oligonucleotide
uagaguuaaacagauagca

SEQ ID NO: 1388690 - RNA, 19 nt, Artificial Sequence
  Description of Artificial Sequence: Synthetic oligonucleotide
auuauaguacaaugaucgc

SEQ ID NO: 1388691 - RNA, 19 nt, Artificial Sequence
  Description of Artificial Sequence: Synthetic oligonucleotide
aaacagauagcaauagauc

SEQ ID NO: 1388692 - RNA, 19 nt, Artificial Sequence
  Description of Artificial Sequence: Synthetic oligonucleotide
acugaauccgaagucagcc

SEQ ID NO: 1388693 - RNA, 19 nt, Artificial Sequence
  Description of Artificial Sequence: Synthetic oligonucleotide
uuaacugagaggccaaaug

SEQ ID NO: 1388694 - RNA, 19 nt, Artificial Sequence
  Description of Artificial Sequence: Synthetic oligonucleotide
uguugaugcgagaauauga

SEQ ID NO: 1388695 - RNA, 19 nt, Artificial Sequence
  Description of Artificial Sequence: Synthetic oligonucleotide
uuauaguacaaugaucgcc

SEQ ID NO: 1388696 - RNA, 19 nt, Artificial Sequence
  Description of Artificial Sequence: Synthetic oligonucleotide
uguguagagaauucaagcu

SEQ ID NO: 1388697 - RNA, 19 nt, Artificial Sequence
  Description of Artificial Sequence: Synthetic oligonucleotide
ugaauccgaagucagccgg

SEQ ID NO: 1388698 - RNA, 19 nt, Artificial Sequence
  Description of Artificial Sequence: Synthetic oligonucleotide
aaaccuacuaccacagugg

SEQ ID NO: 1388699 - RNA, 19 nt, Artificial Sequence
  Description of Artificial Sequence: Synthetic oligonucleotide
uuggugacuacuaacuagc

SEQ ID NO: 1388700 - RNA, 19 nt, Artificial Sequence
  Description of Artificial Sequence: Synthetic oligonucleotide
auagcaauagaucaggcuu

SEQ ID NO: 1388701 - RNA, 19 nt, Artificial Sequence
  Description of Artificial Sequence: Synthetic oligonucleotide
accaccuaaaaccuacuac

SEQ ID NO: 1388702 - RNA, 19 nt, Artificial Sequence
  Description of Artificial Sequence: Synthetic oligonucleotide
gugacuacuaacuagcuuc

SEQ ID NO: 1388703 - RNA, 19 nt, Artificial Sequence
  Description of Artificial Sequence: Synthetic oligonucleotide
auuggugacuacuaacuag

SEQ ID NO: 1388704 - RNA, 19 nt, Artificial Sequence
  Description of Artificial Sequence: Synthetic oligonucleotide
uuuucuaaugugaauguua

SEQ ID NO: 1388705 - RNA, 19 nt, Artificial Sequence
  Description of Artificial Sequence: Synthetic oligonucleotide
aagacugagcuacaacaag

SEQ ID NO: 1388706 - RNA, 19 nt, Artificial Sequence
  Description of Artificial Sequence: Synthetic oligonucleotide
aauguauaucacauauggg

SEQ ID NO: 1388707 - RNA, 19 nt, Artificial Sequence
  Description of Artificial Sequence: Synthetic oligonucleotide
uacaaugaucgccaagucc

SEQ ID NO: 1388708 - RNA, 19 nt, Artificial Sequence
  Description of Artificial Sequence: Synthetic oligonucleotide
ucugucuuacagaagauua

SEQ ID NO: 1388709 - RNA, 19 nt, Artificial Sequence
  Description of Artificial Sequence: Synthetic oligonucleotide
auuauguuuaaggaugcuc

SEQ ID NO: 1388710 - RNA, 19 nt, Artificial Sequence
  Description of Artificial Sequence: Synthetic oligonucleotide
uacaacaaguuuucuaaug

SEQ ID NO: 1388711 - RNA, 19 nt, Artificial Sequence
  Description of Artificial Sequence: Synthetic oligonucleotide
cuaaggaagacugagcuac

SEQ ID NO: 1388712 - RNA, 19 nt, Artificial Sequence
  Description of Artificial Sequence: Synthetic oligonucleotide
uacuuaaauuaaucaaaag

SEQ ID NO: 1388713 - RNA, 19 nt, Artificial Sequence
  Description of Artificial Sequence: Synthetic oligonucleotide
gaugcgagaauaugauccg

SEQ ID NO: 1388714 - RNA, 19 nt, Artificial Sequence
  Description of Artificial Sequence: Synthetic oligonucleotide
agaucaggcuucuuccucc

SEQ ID NO: 1388715 - RNA, 19 nt, Artificial Sequence
  Description of Artificial Sequence: Synthetic oligonucleotide
aaggcacuaugacaccacc

SEQ ID NO: 1388716 - RNA, 19 nt, Artificial Sequence
  Description of Artificial Sequence: Synthetic oligonucleotide
uggaaaugaacauguguag

SEQ ID NO: 1388717 - RNA, 19 nt, Artificial Sequence
  Description of Artificial Sequence: Synthetic oligonucleotide
agugguaauaggcuaagga

SEQ ID NO: 1388718 - RNA, 19 nt, Artificial Sequence
  Description of Artificial Sequence: Synthetic oligonucleotide
cuaaugugaauguuagcag

SEQ ID NO: 1388719 - RNA, 19 nt, Artificial Sequence
  Description of Artificial Sequence: Synthetic oligonucleotide
uacacaaacgcgcccuucg

SEQ ID NO: 1388720 - RNA, 19 nt, Artificial Sequence
  Description of Artificial Sequence: Synthetic oligonucleotide
uaaugugaauguuagcagu

SEQ ID NO: 1388721 - RNA, 19 nt, Artificial Sequence
  Description of Artificial Sequence: Synthetic oligonucleotide
caguuacauagcaagaagc

SEQ ID NO: 1388722 - RNA, 19 nt, Artificial Sequence
  Description of Artificial Sequence: Synthetic oligonucleotide
aauggauccaagaaacaug

SEQ ID NO: 1388723 - RNA, 19 nt, Artificial Sequence
  Description of Artificial Sequence: Synthetic oligonucleotide
auagaguuaaacagauagc

SEQ ID NO: 1388724 - RNA, 19 nt, Artificial Sequence
  Description of Artificial Sequence: Synthetic oligonucleotide
uaccacagugguaauaggc

SEQ ID NO: 1388725 - RNA, 19 nt, Artificial Sequence
  Description of Artificial Sequence: Synthetic oligonucleotide
agagaauucaagcuauaga

SEQ ID NO: 1388726 - RNA, 19 nt, Artificial Sequence
  Description of Artificial Sequence: Synthetic oligonucleotide
gaagauuauaguacaauga

SEQ ID NO: 1388727 - RNA, 19 nt, Artificial Sequence
  Description of Artificial Sequence: Synthetic oligonucleotide
aguacaaugaucgccaagu

SEQ ID NO: 1388728 - RNA, 19 nt, Artificial Sequence
  Description of Artificial Sequence: Synthetic oligonucleotide
aacaaguuuucuaauguga

SEQ ID NO: 1388729 - RNA, 19 nt, Artificial Sequence
  Description of Artificial Sequence: Synthetic oligonucleotide
gaaguuaaagccaaaugga

SEQ ID NO: 1388730 - RNA, 19 nt, Artificial Sequence
  Description of Artificial Sequence: Synthetic oligonucleotide
aagccaaauggaaaugaac

SEQ ID NO: 1388731 - RNA, 19 nt, Artificial Sequence
  Description of Artificial Sequence: Synthetic oligonucleotide
cuuacagaagauuauagua

SEQ ID NO: 1388732 - RNA, 19 nt, Artificial Sequence
  Description of Artificial Sequence: Synthetic oligonucleotide
ugagcuacaacaaguuuuc

SEQ ID NO: 1388733 - RNA, 19 nt, Artificial Sequence
  Description of Artificial Sequence: Synthetic oligonucleotide
augaucgccaaguccaagg

SEQ ID NO: 1388734 - RNA, 19 nt, Artificial Sequence
  Description of Artificial Sequence: Synthetic oligonucleotide
aaauggauccaagaaacau

SEQ ID NO: 1388735 - RNA, 19 nt, Artificial Sequence
  Description of Artificial Sequence: Synthetic oligonucleotide
gaaaaggccaagauggcug

SEQ ID NO: 1388736 - RNA, 19 nt, Artificial Sequence
  Description of Artificial Sequence: Synthetic oligonucleotide
uacuaacuagcuucaaagc

SEQ ID NO: 1388737 - RNA, 19 nt, Artificial Sequence
  Description of Artificial Sequence: Synthetic oligonucleotide
uauguuuaaggaugcucag

SEQ ID NO: 1388738 - RNA, 19 nt, Artificial Sequence
  Description of Artificial Sequence: Synthetic oligonucleotide
acaaugaucgccaagucca

SEQ ID NO: 1388739 - RNA, 19 nt, Artificial Sequence
  Description of Artificial Sequence: Synthetic oligonucleotide
uguuagcaguuacauagca

SEQ ID NO: 1388740 - RNA, 19 nt, Artificial Sequence
  Description of Artificial Sequence: Synthetic oligonucleotide
accuaaaaccuacuaccac

SEQ ID NO: 1388741 - RNA, 19 nt, Artificial Sequence
  Description of Artificial Sequence: Synthetic oligonucleotide
uuaaggaugcucaggguuc

SEQ ID NO: 1388742 - RNA, 19 nt, Artificial Sequence
  Description of Artificial Sequence: Synthetic oligonucleotide
uaacuagcuucaaagcaug

SEQ ID NO: 1388743 - RNA, 19 nt, Artificial Sequence
  Description of Artificial Sequence: Synthetic oligonucleotide
ugugaauguuagcaguuac

SEQ ID NO: 1388744 - RNA, 19 nt, Artificial Sequence
  Description of Artificial Sequence: Synthetic oligonucleotide
aguuuucuaaugugaaugu

SEQ ID NO: 1388745 - RNA, 19 nt, Artificial Sequence
  Description of Artificial Sequence: Synthetic oligonucleotide
acuaccacagugguaauag

SEQ ID NO: 1388746 - RNA, 19 nt, Artificial Sequence
  Description of Artificial Sequence: Synthetic oligonucleotide
ucugaacaccuacagcacc

SEQ ID NO: 1388747 - RNA, 19 nt, Artificial Sequence
  Description of Artificial Sequence: Synthetic oligonucleotide
agauuauaguacaaugauc

SEQ ID NO: 1388748 - RNA, 19 nt, Artificial Sequence
  Description of Artificial Sequence: Synthetic oligonucleotide
ugaauguuagcaguuacau

SEQ ID NO: 1388749 - RNA, 19 nt, Artificial Sequence
  Description of Artificial Sequence: Synthetic oligonucleotide
uacauagcaagaagcaguc

SEQ ID NO: 1388750 - RNA, 19 nt, Artificial Sequence
  Description of Artificial Sequence: Synthetic oligonucleotide
aauuaaucaaaaggcacua

SEQ ID NO: 1388751 - RNA, 19 nt, Artificial Sequence
  Description of Artificial Sequence: Synthetic oligonucleotide
ggcgauaagggaaacaagg

SEQ ID NO: 1388752 - RNA, 19 nt, Artificial Sequence
  Description of Artificial Sequence: Synthetic oligonucleotide
caauagaucaggcuucuuc

SEQ ID NO: 1388753 - RNA, 19 nt, Artificial Sequence
  Description of Artificial Sequence: Synthetic oligonucleotide
cugaaguuaaagccaaaug

SEQ ID NO: 1388754 - RNA, 19 nt, Artificial Sequence
  Description of Artificial Sequence: Synthetic oligonucleotide
aaaaggccaagauggcuga

SEQ ID NO: 1388755 - RNA, 19 nt, Artificial Sequence
  Description of Artificial Sequence: Synthetic oligonucleotide
acaaacgcgcccuucgcuc

SEQ ID NO: 1388756 - RNA, 19 nt, Artificial Sequence
  Description of Artificial Sequence: Synthetic oligonucleotide
uacagcaccgcguugcuac

SEQ ID NO: 1388757 - RNA, 19 nt, Artificial Sequence
  Description of Artificial Sequence: Synthetic oligonucleotide
aacauguguagagaauuca

SEQ ID NO: 1388758 - RNA, 19 nt, Artificial Sequence
  Description of Artificial Sequence: Synthetic oligonucleotide
ugcuaguuauucugaauga

SEQ ID NO: 1388759 - RNA, 19 nt, Artificial Sequence
  Description of Artificial Sequence: Synthetic oligonucleotide
guauaucacauaugggcug

SEQ ID NO: 1388760 - RNA, 19 nt, Artificial Sequence
  Description of Artificial Sequence: Synthetic oligonucleotide
guuacauagcaagaagcag

SEQ ID NO: 1388761 - RNA, 19 nt, Artificial Sequence
  Description of Artificial Sequence: Synthetic oligonucleotide
aggaagacugagcuacaac

SEQ ID NO: 1388762 - RNA, 19 nt, Artificial Sequence
  Description of Artificial Sequence: Synthetic oligonucleotide
ccaaauggauccaagaaac

SEQ ID NO: 1388763 - RNA, 19 nt, Artificial Sequence
  Description of Artificial Sequence: Synthetic oligonucleotide
cagauagcaauagaucagg

SEQ ID NO: 1388764 - RNA, 19 nt, Artificial Sequence
  Description of Artificial Sequence: Synthetic oligonucleotide
ugaacauguguagagaauu

SEQ ID NO: 1388765 - RNA, 19 nt, Artificial Sequence
  Description of Artificial Sequence: Synthetic oligonucleotide
gaguuaaacagauagcaau

SEQ ID NO: 1388766 - RNA, 19 nt, Artificial Sequence
  Description of Artificial Sequence: Synthetic oligonucleotide
gaauucaagcuauagaguu

SEQ ID NO: 1388767 - RNA, 19 nt, Artificial Sequence
  Description of Artificial Sequence: Synthetic oligonucleotide
ccaccuaaaaccuacuacc

SEQ ID NO: 1388768 - RNA, 19 nt, Artificial Sequence
  Description of Artificial Sequence: Synthetic oligonucleotide
cuucauugagcuaccugcc

SEQ ID NO: 1388769 - RNA, 19 nt, Artificial Sequence
  Description of Artificial Sequence: Synthetic oligonucleotide
uacuucauugagcuaccug

SEQ ID NO: 1388770 - RNA, 19 nt, Artificial Sequence
  Description of Artificial Sequence: Synthetic oligonucleotide
uuaaagccaaauggaaaug

SEQ ID NO: 1388771 - RNA, 19 nt, Artificial Sequence
  Description of Artificial Sequence: Synthetic oligonucleotide
aaaggcacuaugacaccac

SEQ ID NO: 1388772 - RNA, 19 nt, Artificial Sequence
  Description of Artificial Sequence: Synthetic oligonucleotide
aguuacauagcaagaagca

SEQ ID NO: 1388773 - RNA, 19 nt, Artificial Sequence
  Description of Artificial Sequence: Synthetic oligonucleotide
aacuacugaauuauguuua

SEQ ID NO: 1388774 - RNA, 19 nt, Artificial Sequence
  Description of Artificial Sequence: Synthetic oligonucleotide
uucauugagcuaccugccc

SEQ ID NO: 1388775 - RNA, 19 nt, Artificial Sequence
  Description of Artificial Sequence: Synthetic oligonucleotide
auuacuucauugagcuacc

SEQ ID NO: 1388776 - RNA, 19 nt, Artificial Sequence
  Description of Artificial Sequence: Synthetic oligonucleotide
accuacagcaccgcguugc

SEQ ID NO: 1388777 - RNA, 19 nt, Artificial Sequence
  Description of Artificial Sequence: Synthetic oligonucleotide
guauuuggccaggaaaagg

SEQ ID NO: 1388778 - RNA, 19 nt, Artificial Sequence
  Description of Artificial Sequence: Synthetic oligonucleotide
ggaagacugagcuacaaca

SEQ ID NO: 1388779 - RNA, 19 nt, Artificial Sequence
  Description of Artificial Sequence: Synthetic oligonucleotide
aaguuaaagccaaauggaa

SEQ ID NO: 1388780 - RNA, 19 nt, Artificial Sequence
  Description of Artificial Sequence: Synthetic oligonucleotide
ugcgagaauaugauccgcu

SEQ ID NO: 1388781 - RNA, 19 nt, Artificial Sequence
  Description of Artificial Sequence: Synthetic oligonucleotide
aacuacacaaacgcgcccu

SEQ ID NO: 1388782 - RNA, 19 nt, Artificial Sequence
  Description of Artificial Sequence: Synthetic oligonucleotide
ugcuacuccgccaucuuac

SEQ ID NO: 1388783 - RNA, 19 nt, Artificial Sequence
  Description of Artificial Sequence: Synthetic oligonucleotide
agcagucugucuuacagaa

SEQ ID NO: 1388784 - RNA, 19 nt, Artificial Sequence
  Description of Artificial Sequence: Synthetic oligonucleotide
aagaagcagucugucuuac

SEQ ID NO: 1388785 - RNA, 19 nt, Artificial Sequence
  Description of Artificial Sequence: Synthetic oligonucleotide
aacuagcuucaaagcaugc

SEQ ID NO: 1388786 - RNA, 19 nt, Artificial Sequence
  Description of Artificial Sequence: Synthetic oligonucleotide
gugguaauaggcuaaggaa

SEQ ID NO: 1388787 - RNA, 19 nt, Artificial Sequence
  Description of Artificial Sequence: Synthetic oligonucleotide
aaccuacuaccacaguggu

SEQ ID NO: 1388788 - RNA, 19 nt, Artificial Sequence
  Description of Artificial Sequence: Synthetic oligonucleotide
uaguacaaugaucgccaag

SEQ ID NO: 1388789 - RNA, 19 nt, Artificial Sequence
  Description of Artificial Sequence: Synthetic oligonucleotide
ucuugccugaaaauguaua

SEQ ID NO: 1388790 - RNA, 19 nt, Artificial Sequence
  Description of Artificial Sequence: Synthetic oligonucleotide
uagcaauagaucaggcuuc

SEQ ID NO: 1388791 - RNA, 19 nt, Artificial Sequence
  Description of Artificial Sequence: Synthetic oligonucleotide
gucuuacagaagauuauag

SEQ ID NO: 1388792 - RNA, 19 nt, Artificial Sequence
  Description of Artificial Sequence: Synthetic oligonucleotide
acacaaacgcgcccuucgc

SEQ ID NO: 1388793 - RNA, 19 nt, Artificial Sequence
  Description of Artificial Sequence: Synthetic oligonucleotide
ugcucaacuacugaauuau

SEQ ID NO: 1388794 - RNA, 19 nt, Artificial Sequence
  Description of Artificial Sequence: Synthetic oligonucleotide
agauagcaauagaucaggc

SEQ ID NO: 1388795 - RNA, 19 nt, Artificial Sequence
  Description of Artificial Sequence: Synthetic oligonucleotide
uauuggugacuacuaacua

SEQ ID NO: 1388796 - RNA, 19 nt, Artificial Sequence
  Description of Artificial Sequence: Synthetic oligonucleotide
accgcguugcuacuccgcc

SEQ ID NO: 1388797 - RNA, 19 nt, Artificial Sequence
  Description of Artificial Sequence: Synthetic oligonucleotide
cagucugucuuacagaaga

SEQ ID NO: 1388798 - RNA, 19 nt, Artificial Sequence
  Description of Artificial Sequence: Synthetic oligonucleotide
auggauccaagaaacauga

SEQ ID NO: 1388799 - RNA, 19 nt, Artificial Sequence
  Description of Artificial Sequence: Synthetic oligonucleotide
cugaauccgaagucagccg

SEQ ID NO: 1388800 - RNA, 19 nt, Artificial Sequence
  Description of Artificial Sequence: Synthetic oligonucleotide
gucgucugaacaccuacag

SEQ ID NO: 1388801 - RNA, 19 nt, Artificial Sequence
  Description of Artificial Sequence: Synthetic oligonucleotide
auguuuaaggaugcucagg

SEQ ID NO: 1388802 - RNA, 19 nt, Artificial Sequence
  Description of Artificial Sequence: Synthetic oligonucleotide
aagcagucugucuuacaga

SEQ ID NO: 1388803 - RNA, 19 nt, Artificial Sequence
  Description of Artificial Sequence: Synthetic oligonucleotide
ucacauaugggcuggcuuu

SEQ ID NO: 1388804 - RNA, 19 nt, Artificial Sequence
  Description of Artificial Sequence: Synthetic oligonucleotide
gguugguuuauuuucaaaa

SEQ ID NO: 1388805 - RNA, 19 nt, Artificial Sequence
  Description of Artificial Sequence: Synthetic oligonucleotide
gcuacaacaaguuuucuaa

SEQ ID NO: 1388806 - RNA, 19 nt, Artificial Sequence
  Description of Artificial Sequence: Synthetic oligonucleotide
gacaccaccuaaaaccuac

SEQ ID NO: 1388807 - RNA, 19 nt, Artificial Sequence
  Description of Artificial Sequence: Synthetic oligonucleotide
agcaccgcguugcuacucc

SEQ ID NO: 1388808 - RNA, 19 nt, Artificial Sequence
  Description of Artificial Sequence: Synthetic oligonucleotide
gauagcaauagaucaggcu

SEQ ID NO: 1388809 - RNA, 19 nt, Artificial Sequence
  Description of Artificial Sequence: Synthetic oligonucleotide
aauuauguuuaaggaugcu

SEQ ID NO: 1388810 - RNA, 19 nt, Artificial Sequence
  Description of Artificial Sequence: Synthetic oligonucleotide
auucaagcuauagaguuaa

SEQ ID NO: 1388811 - RNA, 19 nt, Artificial Sequence
  Description of Artificial Sequence: Synthetic oligonucleotide
ucgucugaacaccuacagc

SEQ ID NO: 1388812 - RNA, 19 nt, Artificial Sequence
  Description of Artificial Sequence: Synthetic oligonucleotide
gaugcucaggguucuugcc

SEQ ID NO: 1388813 - RNA, 19 nt, Artificial Sequence
  Description of Artificial Sequence: Synthetic oligonucleotide
uucuaaugugaauguuagc

SEQ ID NO: 1388814 - RNA, 19 nt, Artificial Sequence
  Description of Artificial Sequence: Synthetic oligonucleotide
aaugugaauguuagcaguu

SEQ ID NO: 1388815 - RNA, 19 nt, Artificial Sequence
  Description of Artificial Sequence: Synthetic oligonucleotide
uccgaagucagccggucgu

SEQ ID NO: 1388816 - RNA, 19 nt, Artificial Sequence
  Description of Artificial Sequence: Synthetic oligonucleotide
ugaucgccaaguccaaggu

SEQ ID NO: 1388817 - RNA, 19 nt, Artificial Sequence
  Description of Artificial Sequence: Synthetic oligonucleotide
auguuagcaguuacauagc

SEQ ID NO: 1388818 - RNA, 19 nt, Artificial Sequence
  Description of Artificial Sequence: Synthetic oligonucleotide
aauccgaagucagccgguc

SEQ ID NO: 1388819 - RNA, 19 nt, Artificial Sequence
  Description of Artificial Sequence: Synthetic oligonucleotide
uguugcuaguuauucugaa

SEQ ID NO: 1388820 - RNA, 19 nt, Artificial Sequence
  Description of Artificial Sequence: Synthetic oligonucleotide
uuguugaugcgagaauaug

SEQ ID NO: 1388821 - RNA, 19 nt, Artificial Sequence
  Description of Artificial Sequence: Synthetic oligonucleotide
aguuaaagccaaauggaaa

SEQ ID NO: 1388822 - RNA, 19 nt, Artificial Sequence
  Description of Artificial Sequence: Synthetic oligonucleotide
aaugaucgccaaguccaag

SEQ ID NO: 1388823 - RNA, 19 nt, Artificial Sequence
  Description of Artificial Sequence: Synthetic oligonucleotide
ugucuuacagaagauuaua

SEQ ID NO: 1388824 - RNA, 19 nt, Artificial Sequence
  Description of Artificial Sequence: Synthetic oligonucleotide
gagacugaauccgaaguca

SEQ ID NO: 1388825 - RNA, 19 nt, Artificial Sequence
  Description of Artificial Sequence: Synthetic oligonucleotide
aaggccaagauggcugaag

SEQ ID NO: 1388826 - RNA, 19 nt, Artificial Sequence
  Description of Artificial Sequence: Synthetic oligonucleotide
gaacaccuacagcaccgcg

SEQ ID NO: 1388827 - RNA, 19 nt, Artificial Sequence
  Description of Artificial Sequence: Synthetic oligonucleotide
agcuacaacaaguuuucua

SEQ ID NO: 1388828 - RNA, 19 nt, Artificial Sequence
  Description of Artificial Sequence: Synthetic oligonucleotide
uagaucaggcuucuuccuc

SEQ ID NO: 1388829 - RNA, 19 nt, Artificial Sequence
  Description of Artificial Sequence: Synthetic oligonucleotide
acuacugaauuauguuuaa

SEQ ID NO: 1388830 - RNA, 19 nt, Artificial Sequence
  Description of Artificial Sequence: Synthetic oligonucleotide
aacaccuacagcaccgcgu

SEQ ID NO: 1388831 - RNA, 19 nt, Artificial Sequence
  Description of Artificial Sequence: Synthetic oligonucleotide
aguuaaacagauagcaaua

SEQ ID NO: 1388832 - RNA, 19 nt, Artificial Sequence
  Description of Artificial Sequence: Synthetic oligonucleotide
ucgcucaggggucacugcc

SEQ ID NO: 1388833 - RNA, 19 nt, Artificial Sequence
  Description of Artificial Sequence: Synthetic oligonucleotide
aauucaagcuauagaguua

SEQ ID NO: 1388834 - RNA, 19 nt, Artificial Sequence
  Description of Artificial Sequence: Synthetic oligonucleotide
uugaugcgagaauaugauc

SEQ ID NO: 1388835 - RNA, 19 nt, Artificial Sequence
  Description of Artificial Sequence: Synthetic oligonucleotide
augcgagaauaugauccgc

SEQ ID NO: 1388836 - RNA, 19 nt, Artificial Sequence
  Description of Artificial Sequence: Synthetic oligonucleotide
aagucagccggucgucuga

SEQ ID NO: 1388837 - RNA, 19 nt, Artificial Sequence
  Description of Artificial Sequence: Synthetic oligonucleotide
agguauuuggccaggaaaa

SEQ ID NO: 1388838 - RNA, 19 nt, Artificial Sequence
  Description of Artificial Sequence: Synthetic oligonucleotide
agacugagcuacaacaagu

SEQ ID NO: 1388839 - RNA, 19 nt, Artificial Sequence
  Description of Artificial Sequence: Synthetic oligonucleotide
uaaggaagacugagcuaca

SEQ ID NO: 1388840 - RNA, 19 nt, Artificial Sequence
  Description of Artificial Sequence: Synthetic oligonucleotide
auccuggcgggcgauaagg

SEQ ID NO: 1388841 - RNA, 19 nt, Artificial Sequence
  Description of Artificial Sequence: Synthetic oligonucleotide
uucuugccugaaaauguau

SEQ ID NO: 1388842 - RNA, 19 nt, Artificial Sequence
  Description of Artificial Sequence: Synthetic oligonucleotide
aggcuaaggaagacugagc

SEQ ID NO: 1388843 - RNA, 19 nt, Artificial Sequence
  Description of Artificial Sequence: Synthetic oligonucleotide
gaacauguguagagaauuc

SEQ ID NO: 1388844 - RNA, 19 nt, Artificial Sequence
  Description of Artificial Sequence: Synthetic oligonucleotide
cugaauuauguuuaaggau

SEQ ID NO: 1388845 - RNA, 19 nt, Artificial Sequence
  Description of Artificial Sequence: Synthetic oligonucleotide
guugguuuauuuucaaaau

SEQ ID NO: 1388846 - RNA, 19 nt, Artificial Sequence
  Description of Artificial Sequence: Synthetic oligonucleotide
cuaacuagcuucaaagcau

SEQ ID NO: 1388847 - RNA, 19 nt, Artificial Sequence
  Description of Artificial Sequence: Synthetic oligonucleotide
cuaccacagugguaauagg

SEQ ID NO: 1388848 - RNA, 19 nt, Artificial Sequence
  Description of Artificial Sequence: Synthetic oligonucleotide
aucacauaugggcuggcuu

SEQ ID NO: 1388849 - RNA, 19 nt, Artificial Sequence
  Description of Artificial Sequence: Synthetic oligonucleotide
uacuccgccaucuuacauu

SEQ ID NO: 1388850 - RNA, 19 nt, Artificial Sequence
  Description of Artificial Sequence: Synthetic oligonucleotide
accacagugguaauaggcu

SEQ ID NO: 1388851 - RNA, 19 nt, Artificial Sequence
  Description of Artificial Sequence: Synthetic oligonucleotide
augacaccaccuaaaaccu

SEQ ID NO: 1388852 - RNA, 19 nt, Artificial Sequence
  Description of Artificial Sequence: Synthetic oligonucleotide
gaagacugagcuacaacaa

SEQ ID NO: 1388853 - RNA, 19 nt, Artificial Sequence
  Description of Artificial Sequence: Synthetic oligonucleotide
aucgccaaguccaagguau

SEQ ID NO: 1388854 - RNA, 19 nt, Artificial Sequence
  Description of Artificial Sequence: Synthetic oligonucleotide
uugccugaaaauguauauc

SEQ ID NO: 1388855 - RNA, 19 nt, Artificial Sequence
  Description of Artificial Sequence: Synthetic oligonucleotide
uggugacuacuaacuagcu

SEQ ID NO: 1388856 - RNA, 19 nt, Artificial Sequence
  Description of Artificial Sequence: Synthetic oligonucleotide
agggugcucaacuacugaa

SEQ ID NO: 1388857 - RNA, 19 nt, Artificial Sequence
  Description of Artificial Sequence: Synthetic oligonucleotide
gguaauaggcuaaggaaga

SEQ ID NO: 1388858 - RNA, 19 nt, Artificial Sequence
  Description of Artificial Sequence: Synthetic oligonucleotide
gaauguuagcaguuacaua

SEQ ID NO: 1388859 - RNA, 19 nt, Artificial Sequence
  Description of Artificial Sequence: Synthetic oligonucleotide
gcgauaagggaaacaaggg

SEQ ID NO: 1388860 - RNA, 19 nt, Artificial Sequence
  Description of Artificial Sequence: Synthetic oligonucleotide
auccgaagucagccggucg

SEQ ID NO: 1388861 - RNA, 19 nt, Artificial Sequence
  Description of Artificial Sequence: Synthetic oligonucleotide
agacugaauccgaagucag

SEQ ID NO: 1388862 - RNA, 19 nt, Artificial Sequence
  Description of Artificial Sequence: Synthetic oligonucleotide
auaucacauaugggcuggc

SEQ ID NO: 1388863 - RNA, 19 nt, Artificial Sequence
  Description of Artificial Sequence: Synthetic oligonucleotide
acagugguaauaggcuaag

SEQ ID NO: 1388864 - RNA, 19 nt, Artificial Sequence
  Description of Artificial Sequence: Synthetic oligonucleotide
acugagcuacaacaaguuu

SEQ ID NO: 1388865 - RNA, 19 nt, Artificial Sequence
  Description of Artificial Sequence: Synthetic oligonucleotide
caaauggauccaagaaaca

SEQ ID NO: 1388866 - RNA, 19 nt, Artificial Sequence
  Description of Artificial Sequence: Synthetic oligonucleotide
aaacgcgcccuucgcucag

SEQ ID NO: 1388867 - RNA, 19 nt, Artificial Sequence
  Description of Artificial Sequence: Synthetic oligonucleotide
uauccuggcgggcgauaag

SEQ ID NO: 1388868 - RNA, 19 nt, Artificial Sequence
  Description of Artificial Sequence: Synthetic oligonucleotide
gacugaauccgaagucagc

SEQ ID NO: 1388869 - RNA, 19 nt, Artificial Sequence
  Description of Artificial Sequence: Synthetic oligonucleotide
ccaggaaaaggccaagaug

SEQ ID NO: 1388870 - RNA, 19 nt, Artificial Sequence
  Description of Artificial Sequence: Synthetic oligonucleotide
guaauaggcuaaggaagac

SEQ ID NO: 1388871 - RNA, 19 nt, Artificial Sequence
  Description of Artificial Sequence: Synthetic oligonucleotide
acauguguagagaauucaa

SEQ ID NO: 1388872 - RNA, 19 nt, Artificial Sequence
  Description of Artificial Sequence: Synthetic oligonucleotide
cugagcuacaacaaguuuu

SEQ ID NO: 1388873 - RNA, 19 nt, Artificial Sequence
  Description of Artificial Sequence: Synthetic oligonucleotide
gugaauguuagcaguuaca

SEQ ID NO: 1388874 - RNA, 19 nt, Artificial Sequence
  Description of Artificial Sequence: Synthetic oligonucleotide
uaaggaugcucaggguucu

SEQ ID NO: 1388875 - RNA, 19 nt, Artificial Sequence
  Description of Artificial Sequence: Synthetic oligonucleotide
acaccuacagcaccgcguu

SEQ ID NO: 1388876 - RNA, 19 nt, Artificial Sequence
  Description of Artificial Sequence: Synthetic oligonucleotide
agccggucgucugaacacc

SEQ ID NO: 1388877 - RNA, 19 nt, Artificial Sequence
  Description of Artificial Sequence: Synthetic oligonucleotide
ggagacugaauccgaaguc

SEQ ID NO: 1388878 - RNA, 19 nt, Artificial Sequence
  Description of Artificial Sequence: Synthetic oligonucleotide
ccuacuaccacagugguaa

SEQ ID NO: 1388879 - RNA, 19 nt, Artificial Sequence
  Description of Artificial Sequence: Synthetic oligonucleotide
ugcggagacugaauccgaa

SEQ ID NO: 1388880 - RNA, 19 nt, Artificial Sequence
  Description of Artificial Sequence: Synthetic oligonucleotide
uaucacauaugggcuggcu

SEQ ID NO: 1388881 - RNA, 19 nt, Artificial Sequence
  Description of Artificial Sequence: Synthetic oligonucleotide
cacuaugacaccaccuaaa

SEQ ID NO: 1388882 - RNA, 19 nt, Artificial Sequence
  Description of Artificial Sequence: Synthetic oligonucleotide
guacaaugaucgccaaguc

SEQ ID NO: 1388883 - RNA, 19 nt, Artificial Sequence
  Description of Artificial Sequence: Synthetic oligonucleotide
ggaugcucaggguucuugc

SEQ ID NO: 1388884 - RNA, 19 nt, Artificial Sequence
  Description of Artificial Sequence: Synthetic oligonucleotide
auaguacaaugaucgccaa

SEQ ID NO: 1388885 - RNA, 19 nt, Artificial Sequence
  Description of Artificial Sequence: Synthetic oligonucleotide
agaagcagucugucuuaca

SEQ ID NO: 1388886 - RNA, 19 nt, Artificial Sequence
  Description of Artificial Sequence: Synthetic oligonucleotide
ggcuaaggaagacugagcu

SEQ ID NO: 1388887 - RNA, 19 nt, Artificial Sequence
  Description of Artificial Sequence: Synthetic oligonucleotide
agcaauagaucaggcuucu

SEQ ID NO: 1388888 - RNA, 19 nt, Artificial Sequence
  Description of Artificial Sequence: Synthetic oligonucleotide
uucgcucaggggucacugc

SEQ ID NO: 1388889 - RNA, 19 nt, Artificial Sequence
  Description of Artificial Sequence: Synthetic oligonucleotide
uuauccuggcgggcgauaa

SEQ ID NO: 1388890 - RNA, 19 nt, Artificial Sequence
  Description of Artificial Sequence: Synthetic oligonucleotide
cacagugguaauaggcuaa

SEQ ID NO: 1388891 - RNA, 19 nt, Artificial Sequence
  Description of Artificial Sequence: Synthetic oligonucleotide
accugccccugccuaacag

SEQ ID NO: 1388892 - RNA, 19 nt, Artificial Sequence
  Description of Artificial Sequence: Synthetic oligonucleotide
uugcuacuccgccaucuua

SEQ ID NO: 1388893 - RNA, 19 nt, Artificial Sequence
  Description of Artificial Sequence: Synthetic oligonucleotide
cagccggucgucugaacac

SEQ ID NO: 1388894 - RNA, 19 nt, Artificial Sequence
  Description of Artificial Sequence: Synthetic oligonucleotide
cugccuaacagggugcuca

SEQ ID NO: 1388895 - RNA, 19 nt, Artificial Sequence
  Description of Artificial Sequence: Synthetic oligonucleotide
uggauccaagaaacaugaa

SEQ ID NO: 1388896 - RNA, 19 nt, Artificial Sequence
  Description of Artificial Sequence: Synthetic oligonucleotide
cuaacagggugcucaacua

SEQ ID NO: 1388897 - RNA, 19 nt, Artificial Sequence
  Description of Artificial Sequence: Synthetic oligonucleotide
guugaugcgagaauaugau

SEQ ID NO: 1388898 - RNA, 19 nt, Artificial Sequence
  Description of Artificial Sequence: Synthetic oligonucleotide
augaacauguguagagaau

SEQ ID NO: 1388899 - RNA, 19 nt, Artificial Sequence
  Description of Artificial Sequence: Synthetic oligonucleotide
gcuuuguugcuaguuauuc

SEQ ID NO: 1388900 - RNA, 19 nt, Artificial Sequence
  Description of Artificial Sequence: Synthetic oligonucleotide
acagaagauuauaguacaa

SEQ ID NO: 1388901 - RNA, 19 nt, Artificial Sequence
  Description of Artificial Sequence: Synthetic oligonucleotide
uucaagcuauagaguuaaa

SEQ ID NO: 1388902 - RNA, 19 nt, Artificial Sequence
  Description of Artificial Sequence: Synthetic oligonucleotide
cuggcgggcgauaagggaa

SEQ ID NO: 1388903 - RNA, 19 nt, Artificial Sequence
  Description of Artificial Sequence: Synthetic oligonucleotide
ggcacuaugacaccaccua

SEQ ID NO: 1388904 - RNA, 19 nt, Artificial Sequence
  Description of Artificial Sequence: Synthetic oligonucleotide
uuacuucauugagcuaccu

SEQ ID NO: 1388905 - RNA, 19 nt, Artificial Sequence
  Description of Artificial Sequence: Synthetic oligonucleotide
cagugguaauaggcuaagg

SEQ ID NO: 1388906 - RNA, 19 nt, Artificial Sequence
  Description of Artificial Sequence: Synthetic oligonucleotide
cacauaugggcuggcuuug

SEQ ID NO: 1388907 - RNA, 19 nt, Artificial Sequence
  Description of Artificial Sequence: Synthetic oligonucleotide
aguuuaacugagaggccaa

SEQ ID NO: 1388908 - RNA, 19 nt, Artificial Sequence
  Description of Artificial Sequence: Synthetic oligonucleotide
uggcgggcgauaagggaaa

SEQ ID NO: 1388909 - RNA, 19 nt, Artificial Sequence
  Description of Artificial Sequence: Synthetic oligonucleotide
caagaagcagucugucuua

SEQ ID NO: 1388910 - RNA, 19 nt, Artificial Sequence
  Description of Artificial Sequence: Synthetic oligonucleotide
guugcuaguuauucugaau

SEQ ID NO: 1388911 - RNA, 19 nt, Artificial Sequence
  Description of Artificial Sequence: Synthetic oligonucleotide
gaucgccaaguccaaggua

SEQ ID NO: 1388912 - RNA, 19 nt, Artificial Sequence
  Description of Artificial Sequence: Synthetic oligonucleotide
augugaauguuagcaguua

SEQ ID NO: 1388913 - RNA, 19 nt, Artificial Sequence
  Description of Artificial Sequence: Synthetic oligonucleotide
acuacacaaacgcgcccuu

SEQ ID NO: 1388914 - RNA, 19 nt, Artificial Sequence
  Description of Artificial Sequence: Synthetic oligonucleotide
ugccuaacagggugcucaa

SEQ ID NO: 1388915 - RNA, 19 nt, Artificial Sequence
  Description of Artificial Sequence: Synthetic oligonucleotide
caccgcguugcuacuccgc

SEQ ID NO: 1388916 - RNA, 19 nt, Artificial Sequence
  Description of Artificial Sequence: Synthetic oligonucleotide
acauagcaagaagcagucu

SEQ ID NO: 1388917 - RNA, 19 nt, Artificial Sequence
  Description of Artificial Sequence: Synthetic oligonucleotide
gggcaacuacacaaacgcg

SEQ ID NO: 1388918 - RNA, 19 nt, Artificial Sequence
  Description of Artificial Sequence: Synthetic oligonucleotide
gguucuugccugaaaaugu

SEQ ID NO: 1388919 - RNA, 19 nt, Artificial Sequence
  Description of Artificial Sequence: Synthetic oligonucleotide
caaacgcgcccuucgcuca

SEQ ID NO: 1388920 - RNA, 19 nt, Artificial Sequence
  Description of Artificial Sequence: Synthetic oligonucleotide
ccugccccugccuaacagg

SEQ ID NO: 1388921 - RNA, 19 nt, Artificial Sequence
  Description of Artificial Sequence: Synthetic oligonucleotide
gcuauagaguuaaacagau

SEQ ID NO: 1388922 - RNA, 19 nt, Artificial Sequence
  Description of Artificial Sequence: Synthetic oligonucleotide
aacgcgcccuucgcucagg

SEQ ID NO: 1388923 - RNA, 19 nt, Artificial Sequence
  Description of Artificial Sequence: Synthetic oligonucleotide
caagguauuuggccaggaa

SEQ ID NO: 1388924 - RNA, 19 nt, Artificial Sequence
  Description of Artificial Sequence: Synthetic oligonucleotide
aggcacuaugacaccaccu

SEQ ID NO: 1388925 - RNA, 19 nt, Artificial Sequence
  Description of Artificial Sequence: Synthetic oligonucleotide
cagaagauuauaguacaau

SEQ ID NO: 1388926 - RNA, 19 nt, Artificial Sequence
  Description of Artificial Sequence: Synthetic oligonucleotide
gcuaguuauucugaaugaa

SEQ ID NO: 1388927 - RNA, 19 nt, Artificial Sequence
  Description of Artificial Sequence: Synthetic oligonucleotide
cugucuuacagaagauuau

SEQ ID NO: 1388928 - RNA, 19 nt, Artificial Sequence
  Description of Artificial Sequence: Synthetic oligonucleotide
agcuaccugccccugccua

SEQ ID NO: 1388929 - RNA, 19 nt, Artificial Sequence
  Description of Artificial Sequence: Synthetic oligonucleotide
cuacacaaacgcgcccuuc

SEQ ID NO: 1388930 - RNA, 19 nt, Artificial Sequence
  Description of Artificial Sequence: Synthetic oligonucleotide
acagcaccgcguugcuacu

SEQ ID NO: 1388931 - RNA, 19 nt, Artificial Sequence
  Description of Artificial Sequence: Synthetic oligonucleotide
ugccccugccuaacagggu

SEQ ID NO: 1388932 - RNA, 19 nt, Artificial Sequence
  Description of Artificial Sequence: Synthetic oligonucleotide
uaccugccccugccuaaca

SEQ ID NO: 1388933 - RNA, 19 nt, Artificial Sequence
  Description of Artificial Sequence: Synthetic oligonucleotide
gccugaaaauguauaucac

SEQ ID NO: 1388934 - RNA, 19 nt, Artificial Sequence
  Description of Artificial Sequence: Synthetic oligonucleotide
cauugagcuaccugccccu

SEQ ID NO: 1388935 - RNA, 19 nt, Artificial Sequence
  Description of Artificial Sequence: Synthetic oligonucleotide
acgcgcccuucgcucaggg

SEQ ID NO: 1388936 - RNA, 19 nt, Artificial Sequence
  Description of Artificial Sequence: Synthetic oligonucleotide
agucugucuuacagaagau

SEQ ID NO: 1388937 - RNA, 19 nt, Artificial Sequence
  Description of Artificial Sequence: Synthetic oligonucleotide
guuuaacugagaggccaaa

SEQ ID NO: 1388938 - RNA, 19 nt, Artificial Sequence
  Description of Artificial Sequence: Synthetic oligonucleotide
ucgccaaguccaagguauu

SEQ ID NO: 1388939 - RNA, 19 nt, Artificial Sequence
  Description of Artificial Sequence: Synthetic oligonucleotide
gacugagcuacaacaaguu

SEQ ID NO: 1388940 - RNA, 19 nt, Artificial Sequence
  Description of Artificial Sequence: Synthetic oligonucleotide
caaugaucgccaaguccaa

SEQ ID NO: 1388941 - RNA, 19 nt, Artificial Sequence
  Description of Artificial Sequence: Synthetic oligonucleotide
agaggccaaauggauccaa

SEQ ID NO: 1388942 - RNA, 19 nt, Artificial Sequence
  Description of Artificial Sequence: Synthetic oligonucleotide
acauaugggcuggcuuugu

SEQ ID NO: 1388943 - RNA, 19 nt, Artificial Sequence
  Description of Artificial Sequence: Synthetic oligonucleotide
cuaccugccccugccuaac

SEQ ID NO: 1388944 - RNA, 19 nt, Artificial Sequence
  Description of Artificial Sequence: Synthetic oligonucleotide
gggcgauaagggaaacaag

SEQ ID NO: 1388945 - RNA, 19 nt, Artificial Sequence
  Description of Artificial Sequence: Synthetic oligonucleotide
gcucaggggucacugccgc

SEQ ID NO: 1388946 - RNA, 19 nt, Artificial Sequence
  Description of Artificial Sequence: Synthetic oligonucleotide
gggcuggcuuuguugcuag

SEQ ID NO: 1388947 - RNA, 19 nt, Artificial Sequence
  Description of Artificial Sequence: Synthetic oligonucleotide
ggucacugccgcugcggag

SEQ ID NO: 1388948 - RNA, 19 nt, Artificial Sequence
  Description of Artificial Sequence: Synthetic oligonucleotide
gcuaaggaagacugagcua

SEQ ID NO: 1388949 - RNA, 19 nt, Artificial Sequence
  Description of Artificial Sequence: Synthetic oligonucleotide
guuuucuaaugugaauguu

SEQ ID NO: 1388950 - RNA, 19 nt, Artificial Sequence
  Description of Artificial Sequence: Synthetic oligonucleotide
guagagaauucaagcuaua

SEQ ID NO: 1388951 - RNA, 19 nt, Artificial Sequence
  Description of Artificial Sequence: Synthetic oligonucleotide
gcacuaugacaccaccuaa

SEQ ID NO: 1388952 - RNA, 19 nt, Artificial Sequence
  Description of Artificial Sequence: Synthetic oligonucleotide
gcucaacuacugaauuaug

SEQ ID NO: 1388953 - RNA, 19 nt, Artificial Sequence
  Description of Artificial Sequence: Synthetic oligonucleotide
gaauccgaagucagccggu

SEQ ID NO: 1388954 - RNA, 19 nt, Artificial Sequence
  Description of Artificial Sequence: Synthetic oligonucleotide
cugcggagacugaauccga

SEQ ID NO: 1388955 - RNA, 19 nt, Artificial Sequence
  Description of Artificial Sequence: Synthetic oligonucleotide
ugccgcugcggagacugaa

SEQ ID NO: 1388956 - RNA, 19 nt, Artificial Sequence
  Description of Artificial Sequence: Synthetic oligonucleotide
cccaaagcagucacaugca

SEQ ID NO: 1388957 - RNA, 19 nt, Artificial Sequence
  Description of Artificial Sequence: Synthetic oligonucleotide
cacaaacgcgcccuucgcu

SEQ ID NO: 1388958 - RNA, 19 nt, Artificial Sequence
  Description of Artificial Sequence: Synthetic oligonucleotide
ggucgucugaacaccuaca

SEQ ID NO: 1388959 - RNA, 19 nt, Artificial Sequence
  Description of Artificial Sequence: Synthetic oligonucleotide
ggugacuacuaacuagcuu

SEQ ID NO: 1388960 - RNA, 19 nt, Artificial Sequence
  Description of Artificial Sequence: Synthetic oligonucleotide
gcaccgcguugcuacuccg

SEQ ID NO: 1388961 - RNA, 19 nt, Artificial Sequence
  Description of Artificial Sequence: Synthetic oligonucleotide
gggguugguuuauuuucaa

SEQ ID NO: 1388962 - RNA, 19 nt, Artificial Sequence
  Description of Artificial Sequence: Synthetic oligonucleotide
cgcugcggagacugaaucc

SEQ ID NO: 1388963 - RNA, 19 nt, Artificial Sequence
  Description of Artificial Sequence: Synthetic oligonucleotide
gucugucuuacagaagauu

SEQ ID NO: 1388964 - RNA, 19 nt, Artificial Sequence
  Description of Artificial Sequence: Synthetic oligonucleotide
caccuacagcaccgcguug

SEQ ID NO: 1388965 - RNA, 19 nt, Artificial Sequence
  Description of Artificial Sequence: Synthetic oligonucleotide
agucagccggucgucugaa

SEQ ID NO: 1388966 - RNA, 19 nt, Artificial Sequence
  Description of Artificial Sequence: Synthetic oligonucleotide
aaggaugcucaggguucuu

SEQ ID NO: 1388967 - RNA, 19 nt, Artificial Sequence
  Description of Artificial Sequence: Synthetic oligonucleotide
gcgcccuucgcucaggggu

SEQ ID NO: 1388968 - RNA, 19 nt, Artificial Sequence
  Description of Artificial Sequence: Synthetic oligonucleotide
gucagccggucgucugaac

SEQ ID NO: 1388969 - RNA, 19 nt, Artificial Sequence
  Description of Artificial Sequence: Synthetic oligonucleotide
ccacagugguaauaggcua

SEQ ID NO: 1388970 - RNA, 19 nt, Artificial Sequence
  Description of Artificial Sequence: Synthetic oligonucleotide
accuacuaccacaguggua

SEQ ID NO: 1388971 - RNA, 19 nt, Artificial Sequence
  Description of Artificial Sequence: Synthetic oligonucleotide
cggucgucugaacaccuac

SEQ ID NO: 1388972 - RNA, 19 nt, Artificial Sequence
  Description of Artificial Sequence: Synthetic oligonucleotide
gggucacugccgcugcgga

SEQ ID NO: 1388973 - RNA, 19 nt, Artificial Sequence
  Description of Artificial Sequence: Synthetic oligonucleotide
ccgcugcggagacugaauc

SEQ ID NO: 1388974 - RNA, 19 nt, Artificial Sequence
  Description of Artificial Sequence: Synthetic oligonucleotide
cuacuccgccaucuuacau

SEQ ID NO: 1388975 - RNA, 19 nt, Artificial Sequence
  Description of Artificial Sequence: Synthetic oligonucleotide
ccuggcgggcgauaaggga

SEQ ID NO: 1388976 - RNA, 19 nt, Artificial Sequence
  Description of Artificial Sequence: Synthetic oligonucleotide
cagcaccgcguugcuacuc

SEQ ID NO: 1388977 - RNA, 19 nt, Artificial Sequence
  Description of Artificial Sequence: Synthetic oligonucleotide
cgggcgauaagggaaacaa

SEQ ID NO: 1388978 - RNA, 19 nt, Artificial Sequence
  Description of Artificial Sequence: Synthetic oligonucleotide
cuuauccuggcgggcgaua

SEQ ID NO: 1388979 - RNA, 19 nt, Artificial Sequence
  Description of Artificial Sequence: Synthetic oligonucleotide
gcucaggguucuugccuga

SEQ ID NO: 1388980 - RNA, 19 nt, Artificial Sequence
  Description of Artificial Sequence: Synthetic oligonucleotide
ggccaagauggcugaaguu

SEQ ID NO: 1388981 - RNA, 19 nt, Artificial Sequence
  Description of Artificial Sequence: Synthetic oligonucleotide
cuacuaccacagugguaau

SEQ ID NO: 1388982 - RNA, 19 nt, Artificial Sequence
  Description of Artificial Sequence: Synthetic oligonucleotide
cuacagcaccgcguugcua

SEQ ID NO: 1388983 - RNA, 19 nt, Artificial Sequence
  Description of Artificial Sequence: Synthetic oligonucleotide
ccgaagucagccggucguc

SEQ ID NO: 1388984 - RNA, 19 nt, Artificial Sequence
  Description of Artificial Sequence: Synthetic oligonucleotide
gccuaacagggugcucaac

SEQ ID NO: 1388985 - RNA, 19 nt, Artificial Sequence
  Description of Artificial Sequence: Synthetic oligonucleotide
gcgggcgauaagggaaaca

SEQ ID NO: 1388986 - RNA, 19 nt, Artificial Sequence
  Description of Artificial Sequence: Synthetic oligonucleotide
cucaggggucacugccgcu

SEQ ID NO: 1388987 - RNA, 19 nt, Artificial Sequence
  Description of Artificial Sequence: Synthetic oligonucleotide
cgcccuucgcucagggguc

SEQ ID NO: 1388988 - RNA, 19 nt, Artificial Sequence
  Description of Artificial Sequence: Synthetic oligonucleotide
ggcgggcgauaagggaaac

SEQ ID NO: 1388989 - RNA, 19 nt, Artificial Sequence
  Description of Artificial Sequence: Synthetic oligonucleotide
gggugggguugguuuauuu

SEQ ID NO: 1388990 - RNA, 19 nt, Artificial Sequence
  Description of Artificial Sequence: Synthetic oligonucleotide
cgcgcccuucgcucagggg

SEQ ID NO: 1388991 - RNA, 19 nt, Artificial Sequence
  Description of Artificial Sequence: Synthetic oligonucleotide
ccgcguugcuacuccgcca

SEQ ID NO: 1388992 - RNA, 19 nt, Artificial Sequence
  Description of Artificial Sequence: Synthetic oligonucleotide
ccugccuaacagggugcuc

SEQ ID NO: 1388993 - RNA, 19 nt, Artificial Sequence
  Description of Artificial Sequence: Synthetic oligonucleotide
gcguugcuacuccgccauc

SEQ ID NO: 1388994 - RNA, 19 nt, Artificial Sequence
  Description of Artificial Sequence: Synthetic oligonucleotide
ccuacagcaccgcguugcu

SEQ ID NO: 1388995 - RNA, 19 nt, Artificial Sequence
  Description of Artificial Sequence: Synthetic oligonucleotide
cguugcuacuccgccaucu

SEQ ID NO: 1388996 - RNA, 19 nt, Artificial Sequence
  Description of Artificial Sequence: Synthetic oligonucleotide
gccggucgucugaacaccu

SEQ ID NO: 1388997 - RNA, 19 nt, Artificial Sequence
  Description of Artificial Sequence: Synthetic oligonucleotide
gcccuucgcucagggguca

SEQ ID NO: 1388998 - RNA, 19 nt, Artificial Sequence
  Description of Artificial Sequence: Synthetic oligonucleotide
ccggucgucugaacaccua

SEQ ID NO: 1388999 - RNA, 19 nt, Artificial Sequence
  Description of Artificial Sequence: Synthetic oligonucleotide
cgcguugcuacuccgccau

SEQ ID NO: 1389000 - RNA, 19 nt, Artificial Sequence
  Description of Artificial Sequence: Synthetic oligonucleotide
gcaauagaucaggcuucuu

SEQ ID NO: 1389001 - RNA, 19 nt, Artificial Sequence
  Description of Artificial Sequence: Synthetic oligonucleotide
gccgcugcggagacugaau

SEQ ID NO: 1389002 - RNA, 19 nt, Artificial Sequence
  Description of Artificial Sequence: Synthetic oligonucleotide
cccugccuaacagggugcu

SEQ ID NO: 1389003 - RNA, 19 nt, Artificial Sequence
  Description of Artificial Sequence: Synthetic oligonucleotide
ccuucgcucaggggucacu

SEQ ID NO: 1389004 - RNA, 19 nt, Artificial Sequence
  Description of Artificial Sequence: Synthetic oligonucleotide
cacugccgcugcggagacu

SEQ ID NO: 1389005 - RNA, 19 nt, Artificial Sequence
  Description of Artificial Sequence: Synthetic oligonucleotide
cgccaaguccaagguauuu

SEQ ID NO: 1389006 - RNA, 19 nt, Artificial Sequence
  Description of Artificial Sequence: Synthetic oligonucleotide
uauaauauaguucaaaagu

SEQ ID NO: 1389007 - RNA, 19 nt, Artificial Sequence
  Description of Artificial Sequence: Synthetic oligonucleotide
uaagcuaggacuaauaggc

SEQ ID NO: 1389008 - RNA, 19 nt, Artificial Sequence
  Description of Artificial Sequence: Synthetic oligonucleotide
aguguauucuauuuguucc

SEQ ID NO: 1389009 - RNA, 19 nt, Artificial Sequence
  Description of Artificial Sequence: Synthetic oligonucleotide
aaacgucucagguacaggc

SEQ ID NO: 1389010 - RNA, 19 nt, Artificial Sequence
  Description of Artificial Sequence: Synthetic oligonucleotide
ucauucauuacucaggggc

SEQ ID NO: 1389011 - RNA, 19 nt, Artificial Sequence
  Description of Artificial Sequence: Synthetic oligonucleotide
auaacugauaaugaguugc

SEQ ID NO: 1389012 - RNA, 19 nt, Artificial Sequence
  Description of Artificial Sequence: Synthetic oligonucleotide
aauaagcuaggacuaauag

SEQ ID NO: 1389013 - RNA, 19 nt, Artificial Sequence
  Description of Artificial Sequence: Synthetic oligonucleotide
ggugauaucaacuugcugg

SEQ ID NO: 1389014 - RNA, 19 nt, Artificial Sequence
  Description of Artificial Sequence: Synthetic oligonucleotide
uuauaaaaccuugaggacg

SEQ ID NO: 1389015 - RNA, 19 nt, Artificial Sequence
  Description of Artificial Sequence: Synthetic oligonucleotide
aaugagagggcaaugaguc

SEQ ID NO: 1389016 - RNA, 19 nt, Artificial Sequence
  Description of Artificial Sequence: Synthetic oligonucleotide
cuagcucucacuaauaagc

SEQ ID NO: 1389017 - RNA, 19 nt, Artificial Sequence
  Description of Artificial Sequence: Synthetic oligonucleotide
auauaauauaguucaaaag

SEQ ID NO: 1389018 - RNA, 19 nt, Artificial Sequence
  Description of Artificial Sequence: Synthetic oligonucleotide
aagaucacacaacaguuag

SEQ ID NO: 1389019 - RNA, 19 nt, Artificial Sequence
  Description of Artificial Sequence: Synthetic oligonucleotide
uauucaucaaccagcacag

SEQ ID NO: 1389020 - RNA, 19 nt, Artificial Sequence
  Description of Artificial Sequence: Synthetic oligonucleotide
uuauuccugagcaauuugg

SEQ ID NO: 1389021 - RNA, 19 nt, Artificial Sequence
  Description of Artificial Sequence: Synthetic oligonucleotide
ucgacuuucuuguucaugg

SEQ ID NO: 1389022 - RNA, 19 nt, Artificial Sequence
  Description of Artificial Sequence: Synthetic oligonucleotide
aacucacugugucaggagc

SEQ ID NO: 1389023 - RNA, 19 nt, Artificial Sequence
  Description of Artificial Sequence: Synthetic oligonucleotide
auaagcuaggacuaauagg

SEQ ID NO: 1389024 - RNA, 19 nt, Artificial Sequence
  Description of Artificial Sequence: Synthetic oligonucleotide
uacaguccaaaugagaggg

SEQ ID NO: 1389025 - RNA, 19 nt, Artificial Sequence
  Description of Artificial Sequence: Synthetic oligonucleotide
uccuuuaaccaccuggccg

SEQ ID NO: 1389026 - RNA, 19 nt, Artificial Sequence
  Description of Artificial Sequence: Synthetic oligonucleotide
uauaccagaagcaacucac

SEQ ID NO: 1389027 - RNA, 19 nt, Artificial Sequence
  Description of Artificial Sequence: Synthetic oligonucleotide
acaaacuggcgcuugaagg

SEQ ID NO: 1389028 - RNA, 19 nt, Artificial Sequence
  Description of Artificial Sequence: Synthetic oligonucleotide
uauauggcgaugcagcuca

SEQ ID NO: 1389029 - RNA, 19 nt, Artificial Sequence
  Description of Artificial Sequence: Synthetic oligonucleotide
uauaaaaccuugaggacga

SEQ ID NO: 1389030 - RNA, 19 nt, Artificial Sequence
  Description of Artificial Sequence: Synthetic oligonucleotide
uaaagugcuccgcuaaacg

SEQ ID NO: 1389031 - RNA, 19 nt, Artificial Sequence
  Description of Artificial Sequence: Synthetic oligonucleotide
ugaggggcaagcaagcacg

SEQ ID NO: 1389032 - RNA, 19 nt, Artificial Sequence
  Description of Artificial Sequence: Synthetic oligonucleotide
aaauauaccagaagcaacu

SEQ ID NO: 1389033 - RNA, 19 nt, Artificial Sequence
  Description of Artificial Sequence: Synthetic oligonucleotide
cauagagaagcccauacag

SEQ ID NO: 1389034 - RNA, 19 nt, Artificial Sequence
  Description of Artificial Sequence: Synthetic oligonucleotide
uauaugcugaccuugacua

SEQ ID NO: 1389035 - RNA, 19 nt, Artificial Sequence
  Description of Artificial Sequence: Synthetic oligonucleotide
ugcauugccucaaauauac

SEQ ID NO: 1389036 - RNA, 19 nt, Artificial Sequence
  Description of Artificial Sequence: Synthetic oligonucleotide
acuacucacuacuucuucc

SEQ ID NO: 1389037 - RNA, 19 nt, Artificial Sequence
  Description of Artificial Sequence: Synthetic oligonucleotide
aaaagaguguauucuauuu

SEQ ID NO: 1389038 - RNA, 19 nt, Artificial Sequence
  Description of Artificial Sequence: Synthetic oligonucleotide
ucauucuuauaaaaccuug

SEQ ID NO: 1389039 - RNA, 19 nt, Artificial Sequence
  Description of Artificial Sequence: Synthetic oligonucleotide
ucccuggugguauaaaugg

SEQ ID NO: 1389040 - RNA, 19 nt, Artificial Sequence
  Description of Artificial Sequence: Synthetic oligonucleotide
aaaaccuugaggacgacug

SEQ ID NO: 1389041 - RNA, 19 nt, Artificial Sequence
  Description of Artificial Sequence: Synthetic oligonucleotide
cauuccuccugcuacaucc

SEQ ID NO: 1389042 - RNA, 19 nt, Artificial Sequence
  Description of Artificial Sequence: Synthetic oligonucleotide
aggucagccgcucauagac

SEQ ID NO: 1389043 - RNA, 19 nt, Artificial Sequence
  Description of Artificial Sequence: Synthetic oligonucleotide
cucuauauggcgaugcagc

SEQ ID NO: 1389044 - RNA, 19 nt, Artificial Sequence
  Description of Artificial Sequence: Synthetic oligonucleotide
ucacuguccaaccagccag

SEQ ID NO: 1389045 - RNA, 19 nt, Artificial Sequence
  Description of Artificial Sequence: Synthetic oligonucleotide
agaagcaacucacuguguc

SEQ ID NO: 1389046 - RNA, 19 nt, Artificial Sequence
  Description of Artificial Sequence: Synthetic oligonucleotide
uugacuaagacggucacug

SEQ ID NO: 1389047 - RNA, 19 nt, Artificial Sequence
  Description of Artificial Sequence: Synthetic oligonucleotide
uuugggaucauguuacgcu

SEQ ID NO: 1389048 - RNA, 19 nt, Artificial Sequence
  Description of Artificial Sequence: Synthetic oligonucleotide
gaaguaaccccucugucug

SEQ ID NO: 1389049 - RNA, 19 nt, Artificial Sequence
  Description of Artificial Sequence: Synthetic oligonucleotide
cugaagugauuccagagcc

SEQ ID NO: 1389050 - RNA, 19 nt, Artificial Sequence
  Description of Artificial Sequence: Synthetic oligonucleotide
uuauaugcugaccuugacu

SEQ ID NO: 1389051 - RNA, 19 nt, Artificial Sequence
  Description of Artificial Sequence: Synthetic oligonucleotide
agaaagagcaaggaccucg

SEQ ID NO: 1389052 - RNA, 19 nt, Artificial Sequence
  Description of Artificial Sequence: Synthetic oligonucleotide
aaagugcuccgcuaaacgu

SEQ ID NO: 1389053 - RNA, 19 nt, Artificial Sequence
  Description of Artificial Sequence: Synthetic oligonucleotide
guuagagccaguauaacug

SEQ ID NO: 1389054 - RNA, 19 nt, Artificial Sequence
  Description of Artificial Sequence: Synthetic oligonucleotide
gauaucaacuugcuggcac

SEQ ID NO: 1389055 - RNA, 19 nt, Artificial Sequence
  Description of Artificial Sequence: Synthetic oligonucleotide
auacagguaacucaggcaa

SEQ ID NO: 1389056 - RNA, 19 nt, Artificial Sequence
  Description of Artificial Sequence: Synthetic oligonucleotide
uuuauuccugagcaauuug

SEQ ID NO: 1389057 - RNA, 19 nt, Artificial Sequence
  Description of Artificial Sequence: Synthetic oligonucleotide
aauauaccagaagcaacuc

SEQ ID NO: 1389058 - RNA, 19 nt, Artificial Sequence
  Description of Artificial Sequence: Synthetic oligonucleotide
aguuagagccaguauaacu

SEQ ID NO: 1389059 - RNA, 19 nt, Artificial Sequence
  Description of Artificial Sequence: Synthetic oligonucleotide
ucgggugauaucaacuugc

SEQ ID NO: 1389060 - RNA, 19 nt, Artificial Sequence
  Description of Artificial Sequence: Synthetic oligonucleotide
aggacuaauaggccaagag

SEQ ID NO: 1389061 - RNA, 19 nt, Artificial Sequence
  Description of Artificial Sequence: Synthetic oligonucleotide
aaaguucauucauuacuca

SEQ ID NO: 1389062 - RNA, 19 nt, Artificial Sequence
  Description of Artificial Sequence: Synthetic oligonucleotide
agaaacuaaagugcuccgc

SEQ ID NO: 1389063 - RNA, 19 nt, Artificial Sequence
  Description of Artificial Sequence: Synthetic oligonucleotide
cauccuuuaaccaccuggc

SEQ ID NO: 1389064 - RNA, 19 nt, Artificial Sequence
  Description of Artificial Sequence: Synthetic oligonucleotide
accacgagaaugcccaugg

SEQ ID NO: 1389065 - RNA, 19 nt, Artificial Sequence
  Description of Artificial Sequence: Synthetic oligonucleotide
uuaaccaccuggccgaaac

SEQ ID NO: 1389066 - RNA, 19 nt, Artificial Sequence
  Description of Artificial Sequence: Synthetic oligonucleotide
uccgcuaaacgucucaggu

SEQ ID NO: 1389067 - RNA, 19 nt, Artificial Sequence
  Description of Artificial Sequence: Synthetic oligonucleotide
caucaaccagcacagagag

SEQ ID NO: 1389068 - RNA, 19 nt, Artificial Sequence
  Description of Artificial Sequence: Synthetic oligonucleotide
uuguauacucacuacucac

SEQ ID NO: 1389069 - RNA, 19 nt, Artificial Sequence
  Description of Artificial Sequence: Synthetic oligonucleotide
uauaacugauaaugaguug

SEQ ID NO: 1389070 - RNA, 19 nt, Artificial Sequence
  Description of Artificial Sequence: Synthetic oligonucleotide
gacauagagaagcccauac

SEQ ID NO: 1389071 - RNA, 19 nt, Artificial Sequence
  Description of Artificial Sequence: Synthetic oligonucleotide
uucgaaguaaccccucugu

SEQ ID NO: 1389072 - RNA, 19 nt, Artificial Sequence
  Description of Artificial Sequence: Synthetic oligonucleotide
uguuacgcugauuuguccu

SEQ ID NO: 1389073 - RNA, 19 nt, Artificial Sequence
  Description of Artificial Sequence: Synthetic oligonucleotide
ugguuguauacucacuacu

SEQ ID NO: 1389074 - RNA, 19 nt, Artificial Sequence
  Description of Artificial Sequence: Synthetic oligonucleotide
aacuaaagugcuccgcuaa

SEQ ID NO: 1389075 - RNA, 19 nt, Artificial Sequence
  Description of Artificial Sequence: Synthetic oligonucleotide
acuagcucucacuaauaag

SEQ ID NO: 1389076 - RNA, 19 nt, Artificial Sequence
  Description of Artificial Sequence: Synthetic oligonucleotide
ucuaucauguccugcugca

SEQ ID NO: 1389077 - RNA, 19 nt, Artificial Sequence
  Description of Artificial Sequence: Synthetic oligonucleotide
uaacugauaaugaguugca

SEQ ID NO: 1389078 - RNA, 19 nt, Artificial Sequence
  Description of Artificial Sequence: Synthetic oligonucleotide
aggaccucgaggcaagggg

SEQ ID NO: 1389079 - RNA, 19 nt, Artificial Sequence
  Description of Artificial Sequence: Synthetic oligonucleotide
acgagaaugcccauggagg

SEQ ID NO: 1389080 - RNA, 19 nt, Artificial Sequence
  Description of Artificial Sequence: Synthetic oligonucleotide
auguuacgcugauuugucc

SEQ ID NO: 1389081 - RNA, 19 nt, Artificial Sequence
  Description of Artificial Sequence: Synthetic oligonucleotide
ucauguuacgcugauuugu

SEQ ID NO: 1389082 - RNA, 19 nt, Artificial Sequence
  Description of Artificial Sequence: Synthetic oligonucleotide
aaaugagagggcaaugagu

SEQ ID NO: 1389083 - RNA, 19 nt, Artificial Sequence
  Description of Artificial Sequence: Synthetic oligonucleotide
ugcgccccagcaaagauca

SEQ ID NO: 1389084 - RNA, 19 nt, Artificial Sequence
  Description of Artificial Sequence: Synthetic oligonucleotide
auaauauaguucaaaaguu

SEQ ID NO: 1389085 - RNA, 19 nt, Artificial Sequence
  Description of Artificial Sequence: Synthetic oligonucleotide
cauugccucaaauauacca

SEQ ID NO: 1389086 - RNA, 19 nt, Artificial Sequence
  Description of Artificial Sequence: Synthetic oligonucleotide
acccacuucgaaguaaccc

SEQ ID NO: 1389087 - RNA, 19 nt, Artificial Sequence
  Description of Artificial Sequence: Synthetic oligonucleotide
ccugcuacauccuuuaacc

SEQ ID NO: 1389088 - RNA, 19 nt, Artificial Sequence
  Description of Artificial Sequence: Synthetic oligonucleotide
uugaguucacuguccaacc

SEQ ID NO: 1389089 - RNA, 19 nt, Artificial Sequence
  Description of Artificial Sequence: Synthetic oligonucleotide
uuggugugugaacauguug

SEQ ID NO: 1389090 - RNA, 19 nt, Artificial Sequence
  Description of Artificial Sequence: Synthetic oligonucleotide
gacuaauaggccaagagcu

SEQ ID NO: 1389091 - RNA, 19 nt, Artificial Sequence
  Description of Artificial Sequence: Synthetic oligonucleotide
aagugcuccgcuaaacguc

SEQ ID NO: 1389092 - RNA, 19 nt, Artificial Sequence
  Description of Artificial Sequence: Synthetic oligonucleotide
uaauaagcuaggacuaaua

SEQ ID NO: 1389093 - RNA, 19 nt, Artificial Sequence
  Description of Artificial Sequence: Synthetic oligonucleotide
  modified_base (10)..(10): a, c, u, g, unknown or other
auagucugcngggaacugg

SEQ ID NO: 1389094 - RNA, 19 nt, Artificial Sequence
  Description of Artificial Sequence: Synthetic oligonucleotide
uaaccauggagaccauaag

SEQ ID NO: 1389095 - RNA, 19 nt, Artificial Sequence
  Description of Artificial Sequence: Synthetic oligonucleotide
uuuauaugcugaccuugac

SEQ ID NO: 1389096 - RNA, 19 nt, Artificial Sequence
  Description of Artificial Sequence: Synthetic oligonucleotide
uguauucuauuuguucccc

SEQ ID NO: 1389097 - RNA, 19 nt, Artificial Sequence
  Description of Artificial Sequence: Synthetic oligonucleotide
  modified_base (4)..(4): a, c, u, g, unknown or other
ugcngggaacuggugaugg

SEQ ID NO: 1389098 - RNA, 19 nt, Artificial Sequence
  Description of Artificial Sequence: Synthetic oligonucleotide
aagcuaggacuaauaggcc

SEQ ID NO: 1389099 - RNA, 19 nt, Artificial Sequence
  Description of Artificial Sequence: Synthetic oligonucleotide
auauaccagaagcaacuca

SEQ ID NO: 1389100 - RNA, 19 nt, Artificial Sequence
  Description of Artificial Sequence: Synthetic oligonucleotide
cauuuauaugcugaccuug

SEQ ID NO: 1389101 - RNA, 19 nt, Artificial Sequence
  Description of Artificial Sequence: Synthetic oligonucleotide
gucacugcaaacaggguag

SEQ ID NO: 1389102 - RNA, 19 nt, Artificial Sequence
  Description of Artificial Sequence: Synthetic oligonucleotide
cacgagaaugcccauggag

SEQ ID NO: 1389103 - RNA, 19 nt, Artificial Sequence
  Description of Artificial Sequence: Synthetic oligonucleotide
agcaagcacgcagacaugg

SEQ ID NO: 1389104 - RNA, 19 nt, Artificial Sequence
  Description of Artificial Sequence: Synthetic oligonucleotide
aacugauaaugaguugcag

SEQ ID NO: 1389105 - RNA, 19 nt, Artificial Sequence
  Description of Artificial Sequence: Synthetic oligonucleotide
ucaggcaagugcauugccu

SEQ ID NO: 1389106 - RNA, 19 nt, Artificial Sequence
  Description of Artificial Sequence: Synthetic oligonucleotide
agcuaggacuaauaggcca

SEQ ID NO: 1389107 - RNA, 19 nt, Artificial Sequence
  Description of Artificial Sequence: Synthetic oligonucleotide
ugugaggagcccuguggcg

SEQ ID NO: 1389108 - RNA, 19 nt, Artificial Sequence
  Description of Artificial Sequence: Synthetic oligonucleotide
gaaacuaaagugcuccgcu

SEQ ID NO: 1389109 - RNA, 19 nt, Artificial Sequence
  Description of Artificial Sequence: Synthetic oligonucleotide
agcccauacaguccaaaug

SEQ ID NO: 1389110 - RNA, 19 nt, Artificial Sequence
  Description of Artificial Sequence: Synthetic oligonucleotide
aguacgugggguuggcgag

SEQ ID NO: 1389111 - RNA, 19 nt, Artificial Sequence
  Description of Artificial Sequence: Synthetic oligonucleotide
uacagguaacucaggcaag

SEQ ID NO: 1389112 - RNA, 19 nt, Artificial Sequence
  Description of Artificial Sequence: Synthetic oligonucleotide
ugauuccagagccucgacu

SEQ ID NO: 1389113 - RNA, 19 nt, Artificial Sequence
  Description of Artificial Sequence: Synthetic oligonucleotide
guuggcgaggugucgagag

SEQ ID NO: 1389114 - RNA, 19 nt, Artificial Sequence
  Description of Artificial Sequence: Synthetic oligonucleotide
agaugagcaaaugucccag

SEQ ID NO: 1389115 - RNA, 19 nt, Artificial Sequence
  Description of Artificial Sequence: Synthetic oligonucleotide
ugaguucacuguccaacca

SEQ ID NO: 1389116 - RNA, 19 nt, Artificial Sequence
  Description of Artificial Sequence: Synthetic oligonucleotide
acucacugugucaggagcc

SEQ ID NO: 1389117 - RNA, 19 nt, Artificial Sequence
  Description of Artificial Sequence: Synthetic oligonucleotide
cauguuacgcugauuuguc

SEQ ID NO: 1389118 - RNA, 19 nt, Artificial Sequence
  Description of Artificial Sequence: Synthetic oligonucleotide
ugacccacuucgaaguaac

SEQ ID NO: 1389119 - RNA, 19 nt, Artificial Sequence
  Description of Artificial Sequence: Synthetic oligonucleotide
aaacuaaagugcuccgcua

SEQ ID NO: 1389120 - RNA, 19 nt, Artificial Sequence
  Description of Artificial Sequence: Synthetic oligonucleotide
  modified_base (9)..(9): a, c, u, g, unknown or other
uagucugcngggaacuggu

SEQ ID NO: 1389121 - RNA, 19 nt, Artificial Sequence
  Description of Artificial Sequence: Synthetic oligonucleotide
gaaacuagcucucacuaau

SEQ ID NO: 1389122 - RNA, 19 nt, Artificial Sequence
  Description of Artificial Sequence: Synthetic oligonucleotide
gaagcaacucacuguguca

SEQ ID NO: 1389123 - RNA, 19 nt, Artificial Sequence
  Description of Artificial Sequence: Synthetic oligonucleotide
cucucacuaauaagcuagg

SEQ ID NO: 1389124 - RNA, 19 nt, Artificial Sequence
  Description of Artificial Sequence: Synthetic oligonucleotide
aucauguuacgcugauuug

SEQ ID NO: 1389125 - RNA, 19 nt, Artificial Sequence
  Description of Artificial Sequence: Synthetic oligonucleotide
gcucucacuaauaagcuag

SEQ ID NO: 1389126 - RNA, 19 nt, Artificial Sequence
  Description of Artificial Sequence: Synthetic oligonucleotide
cauaagcuccuccugugug

SEQ ID NO: 1389127 - RNA, 19 nt, Artificial Sequence
  Description of Artificial Sequence: Synthetic oligonucleotide
auaggccaagagcugaaga

SEQ ID NO: 1389128 - RNA, 19 nt, Artificial Sequence
  Description of Artificial Sequence: Synthetic oligonucleotide
agaucacacaacaguuagc

SEQ ID NO: 1389129 - RNA, 19 nt, Artificial Sequence
  Description of Artificial Sequence: Synthetic oligonucleotide
  modified_base (6)..(6): a, c, u, g, unknown or other
ucugcngggaacuggugau

SEQ ID NO: 1389130 - RNA, 19 nt, Artificial Sequence
  Description of Artificial Sequence: Synthetic oligonucleotide
uaaacgucucagguacagg

SEQ ID NO: 1389131 - RNA, 19 nt, Artificial Sequence
  Description of Artificial Sequence: Synthetic oligonucleotide
aaagaucacacaacaguua

SEQ ID NO: 1389132 - RNA, 19 nt, Artificial Sequence
  Description of Artificial Sequence: Synthetic oligonucleotide
uucccauuuauaugcugac

SEQ ID NO: 1389133 - RNA, 19 nt, Artificial Sequence
  Description of Artificial Sequence: Synthetic oligonucleotide
guuacgcugauuuguccug

SEQ ID NO: 1389134 - RNA, 19 nt, Artificial Sequence
  Description of Artificial Sequence: Synthetic oligonucleotide
gaggugucgagaggaaggg

SEQ ID NO: 1389135 - RNA, 19 nt, Artificial Sequence
  Description of Artificial Sequence: Synthetic oligonucleotide
agguauuggugugugaaca

SEQ ID NO: 1389136 - RNA, 19 nt, Artificial Sequence
  Description of Artificial Sequence: Synthetic oligonucleotide
acuaagacggucacuguca

SEQ ID NO: 1389137 - RNA, 19 nt, Artificial Sequence
  Description of Artificial Sequence: Synthetic oligonucleotide
cagcggucagacauguucc

SEQ ID NO: 1389138 - RNA, 19 nt, Artificial Sequence
  Description of Artificial Sequence: Synthetic oligonucleotide
uacucacuacuucuuccca

SEQ ID NO: 1389139 - RNA, 19 nt, Artificial Sequence
  Description of Artificial Sequence: Synthetic oligonucleotide
ugauuuguccugacccacu

SEQ ID NO: 1389140 - RNA, 19 nt, Artificial Sequence
  Description of Artificial Sequence: Synthetic oligonucleotide
ucgaaguaaccccucuguc

SEQ ID NO: 1389141 - RNA, 19 nt, Artificial Sequence
  Description of Artificial Sequence: Synthetic oligonucleotide
cugguuguauacucacuac

SEQ ID NO: 1389142 - RNA, 19 nt, Artificial Sequence
  Description of Artificial Sequence: Synthetic oligonucleotide
aacuggcgcuugaaggccc

SEQ ID NO: 1389143 - RNA, 19 nt, Artificial Sequence
  Description of Artificial Sequence: Synthetic oligonucleotide
uaauaggccaagagcugaa

SEQ ID NO: 1389144 - RNA, 19 nt, Artificial Sequence
  Description of Artificial Sequence: Synthetic oligonucleotide
auguugaguucacugucca

SEQ ID NO: 1389145 - RNA, 19 nt, Artificial Sequence
  Description of Artificial Sequence: Synthetic oligonucleotide
uuggcgaggugucgagagg

SEQ ID NO: 1389146 - RNA, 19 nt, Artificial Sequence
  Description of Artificial Sequence: Synthetic oligonucleotide
gaguacgugggguuggcga

SEQ ID NO: 1389147 - RNA, 19 nt, Artificial Sequence
  Description of Artificial Sequence: Synthetic oligonucleotide
aagaaagagcaaggaccuc

SEQ ID NO: 1389148 - RNA, 19 nt, Artificial Sequence
  Description of Artificial Sequence: Synthetic oligonucleotide
uaaaaccuugaggacgacu

SEQ ID NO: 1389149 - RNA, 19 nt, Artificial Sequence
  Description of Artificial Sequence: Synthetic oligonucleotide
agcggucagacauguuccg

SEQ ID NO: 1389150 - RNA, 19 nt, Artificial Sequence
  Description of Artificial Sequence: Synthetic oligonucleotide
aaggaccucgaggcaaggg

SEQ ID NO: 1389151 - RNA, 19 nt, Artificial Sequence
  Description of Artificial Sequence: Synthetic oligonucleotide
uccgaccacgagaaugccc

SEQ ID NO: 1389152 - RNA, 19 nt, Artificial Sequence
  Description of Artificial Sequence: Synthetic oligonucleotide
cccacuucgaaguaacccc

SEQ ID NO: 1389153 - RNA, 19 nt, Artificial Sequence
  Description of Artificial Sequence: Synthetic oligonucleotide
cuaaagugcuccgcuaaac

SEQ ID NO: 1389154 - RNA, 19 nt, Artificial Sequence
  Description of Artificial Sequence: Synthetic oligonucleotide
gagaccauaagcuccuccu

SEQ ID NO: 1389155 - RNA, 19 nt, Artificial Sequence
  Description of Artificial Sequence: Synthetic oligonucleotide
guaaccauggagaccauaa

SEQ ID NO: 1389156 - RNA, 19 nt, Artificial Sequence
  Description of Artificial Sequence: Synthetic oligonucleotide
uuguucauggcagcaauuu

SEQ ID NO: 1389157 - RNA, 19 nt, Artificial Sequence
  Description of Artificial Sequence: Synthetic oligonucleotide
acuaauaggccaagagcug

SEQ ID NO: 1389158 - RNA, 19 nt, Artificial Sequence
  Description of Artificial Sequence: Synthetic oligonucleotide
  modified_base (7)..(7): a, c, u, g, unknown or other
gucugcngggaacugguga

SEQ ID NO: 1389159 - RNA, 19 nt, Artificial Sequence
  Description of Artificial Sequence: Synthetic oligonucleotide
ucccauuuauaugcugacc

SEQ ID NO: 1389160 - RNA, 19 nt, Artificial Sequence
  Description of Artificial Sequence: Synthetic oligonucleotide
agcaacucacugugucagg

SEQ ID NO: 1389161 - RNA, 19 nt, Artificial Sequence
  Description of Artificial Sequence: Synthetic oligonucleotide
gguaacucaggcaagugca

SEQ ID NO: 1389162 - RNA, 19 nt, Artificial Sequence
  Description of Artificial Sequence: Synthetic oligonucleotide
gauuccagagccucgacuu

SEQ ID NO: 1389163 - RNA, 19 nt, Artificial Sequence
  Description of Artificial Sequence: Synthetic oligonucleotide
gcuacauccuuuaaccacc

SEQ ID NO: 1389164 - RNA, 19 nt, Artificial Sequence
  Description of Artificial Sequence: Synthetic oligonucleotide
ucucacuaauaagcuagga

SEQ ID NO: 1389165 - RNA, 19 nt, Artificial Sequence
  Description of Artificial Sequence: Synthetic oligonucleotide
ucucccuggugguauaaau

SEQ ID NO: 1389166 - RNA, 19 nt, Artificial Sequence
  Description of Artificial Sequence: Synthetic oligonucleotide
agaggaccaucuuccacca

SEQ ID NO: 1389167 - RNA, 19 nt, Artificial Sequence
  Description of Artificial Sequence: Synthetic oligonucleotide
ggggcaagcaagcacgcag

SEQ ID NO: 1389168 - RNA, 19 nt, Artificial Sequence
  Description of Artificial Sequence: Synthetic oligonucleotide
ugaacauguugaguucacu

SEQ ID NO: 1389169 - RNA, 19 nt, Artificial Sequence
  Description of Artificial Sequence: Synthetic oligonucleotide
acuaaagugcuccgcuaaa

SEQ ID NO: 1389170 - RNA, 19 nt, Artificial Sequence
  Description of Artificial Sequence: Synthetic oligonucleotide
cucagugcaggcccgcccc

SEQ ID NO: 1389171 - RNA, 19 nt, Artificial Sequence
  Description of Artificial Sequence: Synthetic oligonucleotide
aguaaccccucugucuguc

SEQ ID NO: 1389172 - RNA, 19 nt, Artificial Sequence
  Description of Artificial Sequence: Synthetic oligonucleotide
cuaauaggccaagagcuga

SEQ ID NO: 1389173 - RNA, 19 nt, Artificial Sequence
  Description of Artificial Sequence: Synthetic oligonucleotide
ugucaggagccuugugcgc

SEQ ID NO: 1389174 - RNA, 19 nt, Artificial Sequence
  Description of Artificial Sequence: Synthetic oligonucleotide
uccugguuguauacucacu

SEQ ID NO: 1389175 - RNA, 19 nt, Artificial Sequence
  Description of Artificial Sequence: Synthetic oligonucleotide
cagccgcucauagacauag

SEQ ID NO: 1389176 - RNA, 19 nt, Artificial Sequence
  Description of Artificial Sequence: Synthetic oligonucleotide
caacucacugugucaggag

SEQ ID NO: 1389177 - RNA, 19 nt, Artificial Sequence
  Description of Artificial Sequence: Synthetic oligonucleotide
cuccgcuaaacgucucagg

SEQ ID NO: 1389178 - RNA, 19 nt, Artificial Sequence
  Description of Artificial Sequence: Synthetic oligonucleotide
cagguauuggugugugaac

SEQ ID NO: 1389179 - RNA, 19 nt, Artificial Sequence
  Description of Artificial Sequence: Synthetic oligonucleotide
acagguaacucaggcaagu

SEQ ID NO: 1389180 - RNA, 19 nt, Artificial Sequence
  Description of Artificial Sequence: Synthetic oligonucleotide
aacgucucagguacaggcu

SEQ ID NO: 1389181 - RNA, 19 nt, Artificial Sequence
  Description of Artificial Sequence: Synthetic oligonucleotide
ugcuccgcuaaacgucuca

SEQ ID NO: 1389182 - RNA, 19 nt, Artificial Sequence
  Description of Artificial Sequence: Synthetic oligonucleotide
cucgggugauaucaacuug

SEQ ID NO: 1389183 - RNA, 19 nt, Artificial Sequence
  Description of Artificial Sequence: Synthetic oligonucleotide
gagggcaaugagucuccag

SEQ ID NO: 1389184 - RNA, 19 nt, Artificial Sequence
  Description of Artificial Sequence: Synthetic oligonucleotide
acuaauaagcuaggacuaa

SEQ ID NO: 1389185 - RNA, 19 nt, Artificial Sequence
  Description of Artificial Sequence: Synthetic oligonucleotide
uucauuacucaggggcuac

SEQ ID NO: 1389186 - RNA, 19 nt, Artificial Sequence
  Description of Artificial Sequence: Synthetic oligonucleotide
agagaggcgucugaucucu

SEQ ID NO: 1389187 - RNA, 19 nt, Artificial Sequence
  Description of Artificial Sequence: Synthetic oligonucleotide
ucuguccugguuguauacu

SEQ ID NO: 1389188 - RNA, 19 nt, Artificial Sequence
  Description of Artificial Sequence: Synthetic oligonucleotide
ugugcgccccagcaaagau

SEQ ID NO: 1389189 - RNA, 19 nt, Artificial Sequence
  Description of Artificial Sequence: Synthetic oligonucleotide
acaguccaaaugagagggc

SEQ ID NO: 1389190 - RNA, 19 nt, Artificial Sequence
  Description of Artificial Sequence: Synthetic oligonucleotide
guccugguuguauacucac

SEQ ID NO: 1389191 - RNA, 19 nt, Artificial Sequence
  Description of Artificial Sequence: Synthetic oligonucleotide
aggcgucugaucucuucag

SEQ ID NO: 1389192 - RNA, 19 nt, Artificial Sequence
  Description of Artificial Sequence: Synthetic oligonucleotide
uggcgaggugucgagagga

SEQ ID NO: 1389193 - RNA, 19 nt, Artificial Sequence
  Description of Artificial Sequence: Synthetic oligonucleotide
gaaagagcaaggaccucga

SEQ ID NO: 1389194 - RNA, 19 nt, Artificial Sequence
  Description of Artificial Sequence: Synthetic oligonucleotide
cugauuuguccugacccac

SEQ ID NO: 1389195 - RNA, 19 nt, Artificial Sequence
  Description of Artificial Sequence: Synthetic oligonucleotide
ugacuaagacggucacugu

SEQ ID NO: 1389196 - RNA, 19 nt, Artificial Sequence
  Description of Artificial Sequence: Synthetic oligonucleotide
ugauaucaacuugcuggca

SEQ ID NO: 1389197 - RNA, 19 nt, Artificial Sequence
  Description of Artificial Sequence: Synthetic oligonucleotide
gcgucugaucucuucagcc

SEQ ID NO: 1389198 - RNA, 19 nt, Artificial Sequence
  Description of Artificial Sequence: Synthetic oligonucleotide
uaaccaccuggccgaaacu

SEQ ID NO: 1389199 - RNA, 19 nt, Artificial Sequence
  Description of Artificial Sequence: Synthetic oligonucleotide
augagagggcaaugagucu

SEQ ID NO: 1389200 - RNA, 19 nt, Artificial Sequence
  Description of Artificial Sequence: Synthetic oligonucleotide
cacuacucacuacuucuuc

SEQ ID NO: 1389201 - RNA, 19 nt, Artificial Sequence
  Description of Artificial Sequence: Synthetic oligonucleotide
gucaggagccuugugcgcc

SEQ ID NO: 1389202 - RNA, 19 nt, Artificial Sequence
  Description of Artificial Sequence: Synthetic oligonucleotide
uacauccuuuaaccaccug

SEQ ID NO: 1389203 - RNA, 19 nt, Artificial Sequence
  Description of Artificial Sequence: Synthetic oligonucleotide
accucgaggcaaggggugc

SEQ ID NO: 1389204 - RNA, 19 nt, Artificial Sequence
  Description of Artificial Sequence: Synthetic oligonucleotide
ccaucugguauucaucaac

SEQ ID NO: 1389205 - RNA, 19 nt, Artificial Sequence
  Description of Artificial Sequence: Synthetic oligonucleotide
uuacgcugauuuguccuga

SEQ ID NO: 1389206 - RNA, 19 nt, Artificial Sequence
  Description of Artificial Sequence: Synthetic oligonucleotide
ggcaaugagucuccagccc

SEQ ID NO: 1389207 - RNA, 19 nt, Artificial Sequence
  Description of Artificial Sequence: Synthetic oligonucleotide
uuguccugacccacuucga

SEQ ID NO: 1389208 - RNA, 19 nt, Artificial Sequence
  Description of Artificial Sequence: Synthetic oligonucleotide
auaugcugaccuugacuaa

SEQ ID NO: 1389209 - RNA, 19 nt, Artificial Sequence
  Description of Artificial Sequence: Synthetic oligonucleotide
cuugugcgccccagcaaag

SEQ ID NO: 1389210 - RNA, 19 nt, Artificial Sequence
  Description of Artificial Sequence: Synthetic oligonucleotide
cgcuaaacgucucagguac

SEQ ID NO: 1389211 - RNA, 19 nt, Artificial Sequence
  Description of Artificial Sequence: Synthetic oligonucleotide
auaaaaccuugaggacgac

SEQ ID NO: 1389212 - RNA, 19 nt, Artificial Sequence
  Description of Artificial Sequence: Synthetic oligonucleotide
cuauauggcgaugcagcuc

SEQ ID NO: 1389213 - RNA, 19 nt, Artificial Sequence
  Description of Artificial Sequence: Synthetic oligonucleotide
agcucucacuaauaagcua

SEQ ID NO: 1389214 - RNA, 19 nt, Artificial Sequence
  Description of Artificial Sequence: Synthetic oligonucleotide
uaggacuaauaggccaaga

SEQ ID NO: 1389215 - RNA, 19 nt, Artificial Sequence
  Description of Artificial Sequence: Synthetic oligonucleotide
cuaggacuaauaggccaag

SEQ ID NO: 1389216 - RNA, 19 nt, Artificial Sequence
  Description of Artificial Sequence: Synthetic oligonucleotide
gaccuugacuaagacgguc

SEQ ID NO: 1389217 - RNA, 19 nt, Artificial Sequence
  Description of Artificial Sequence: Synthetic oligonucleotide
ccaguauaacugauaauga

SEQ ID NO: 1389218 - RNA, 19 nt, Artificial Sequence
  Description of Artificial Sequence: Synthetic oligonucleotide
cuggccgaaacuagcucuc

SEQ ID NO: 1389219 - RNA, 19 nt, Artificial Sequence
  Description of Artificial Sequence: Synthetic oligonucleotide
ggagaccauaagcuccucc

SEQ ID NO: 1389220 - RNA, 19 nt, Artificial Sequence
  Description of Artificial Sequence: Synthetic oligonucleotide
uacgcugauuuguccugac

SEQ ID NO: 1389221 - RNA, 19 nt, Artificial Sequence
  Description of Artificial Sequence: Synthetic oligonucleotide
gcaaugagucuccagccca

SEQ ID NO: 1389222 - RNA, 19 nt, Artificial Sequence
  Description of Artificial Sequence: Synthetic oligonucleotide
cacuccuccgaccacgaga

SEQ ID NO: 1389223 - RNA, 19 nt, Artificial Sequence
  Description of Artificial Sequence: Synthetic oligonucleotide
acuccuccgaccacgagaa

SEQ ID NO: 1389224 - RNA, 19 nt, Artificial Sequence
  Description of Artificial Sequence: Synthetic oligonucleotide
guaaccccucugucugucc

SEQ ID NO: 1389225 - RNA, 19 nt, Artificial Sequence
  Description of Artificial Sequence: Synthetic oligonucleotide
ugggguuggcgaggugucg

SEQ ID NO: 1389226 - RNA, 19 nt, Artificial Sequence
  Description of Artificial Sequence: Synthetic oligonucleotide
auucauuacucaggggcua

SEQ ID NO: 1389227 - RNA, 19 nt, Artificial Sequence
  Description of Artificial Sequence: Synthetic oligonucleotide
aggugucgagaggaagggg

SEQ ID NO: 1389228 - RNA, 19 nt, Artificial Sequence
  Description of Artificial Sequence: Synthetic oligonucleotide
cacaacuggggcuuuauuu

SEQ ID NO: 1389229 - RNA, 19 nt, Artificial Sequence
  Description of Artificial Sequence: Synthetic oligonucleotide
auguccugcugcauagucu

SEQ ID NO: 1389230 - RNA, 19 nt, Artificial Sequence
  Description of Artificial Sequence: Synthetic oligonucleotide
ugcugggcugcagguauug

SEQ ID NO: 1389231 - RNA, 19 nt, Artificial Sequence
  Description of Artificial Sequence: Synthetic oligonucleotide
gugaacauguugaguucac

SEQ ID NO: 1389232 - RNA, 19 nt, Artificial Sequence
  Description of Artificial Sequence: Synthetic oligonucleotide
cacuucgaaguaaccccuc

SEQ ID NO: 1389233 - RNA, 19 nt, Artificial Sequence
  Description of Artificial Sequence: Synthetic oligonucleotide
ucagugcaggcccgcccca

SEQ ID NO: 1389234 - RNA, 19 nt, Artificial Sequence
  Description of Artificial Sequence: Synthetic oligonucleotide
gaccucgaggcaaggggug

SEQ ID NO: 1389235 - RNA, 19 nt, Artificial Sequence
  Description of Artificial Sequence: Synthetic oligonucleotide
ggugguauaaauggaauuu

SEQ ID NO: 1389236 - RNA, 19 nt, Artificial Sequence
  Description of Artificial Sequence: Synthetic oligonucleotide
guacgugggguuggcgagg

SEQ ID NO: 1389237 - RNA, 19 nt, Artificial Sequence
  Description of Artificial Sequence: Synthetic oligonucleotide
cagagaggcgucugaucuc

SEQ ID NO: 1389238 - RNA, 19 nt, Artificial Sequence
  Description of Artificial Sequence: Synthetic oligonucleotide
uugugcgccccagcaaaga

SEQ ID NO: 1389239 - RNA, 19 nt, Artificial Sequence
  Description of Artificial Sequence: Synthetic oligonucleotide
gguagacugaggggcaagc

SEQ ID NO: 1389240 - RNA, 19 nt, Artificial Sequence
  Description of Artificial Sequence: Synthetic oligonucleotide
ggcgucugaucucuucagc

SEQ ID NO: 1389241 - RNA, 19 nt, Artificial Sequence
  Description of Artificial Sequence: Synthetic oligonucleotide
agagccaguauaacugaua

SEQ ID NO: 1389242 - RNA, 19 nt, Artificial Sequence
  Description of Artificial Sequence: Synthetic oligonucleotide
gauuuguccugacccacuu

SEQ ID NO: 1389243 - RNA, 19 nt, Artificial Sequence
  Description of Artificial Sequence: Synthetic oligonucleotide
cccauuuauaugcugaccu

SEQ ID NO: 1389244 - RNA, 19 nt, Artificial Sequence
  Description of Artificial Sequence: Synthetic oligonucleotide
cucucgggugauaucaacu

SEQ ID NO: 1389245 - RNA, 19 nt, Artificial Sequence
  Description of Artificial Sequence: Synthetic oligonucleotide
ccgaccacgagaaugccca

SEQ ID NO: 1389246 - RNA, 19 nt, Artificial Sequence
  Description of Artificial Sequence: Synthetic oligonucleotide
gacccacuucgaaguaacc

SEQ ID NO: 1389247 - RNA, 19 nt, Artificial Sequence
  Description of Artificial Sequence: Synthetic oligonucleotide
gaagcccauacaguccaaa

SEQ ID NO: 1389248 - RNA, 19 nt, Artificial Sequence
  Description of Artificial Sequence: Synthetic oligonucleotide
ccauacaguccaaaugaga

SEQ ID NO: 1389249 - RNA, 19 nt, Artificial Sequence
  Description of Artificial Sequence: Synthetic oligonucleotide
cuugaggacgacuggggau

SEQ ID NO: 1389250 - RNA, 19 nt, Artificial Sequence
  Description of Artificial Sequence: Synthetic oligonucleotide
aggggcuucaagccaucua

SEQ ID NO: 1389251 - RNA, 19 nt, Artificial Sequence
  Description of Artificial Sequence: Synthetic oligonucleotide
caccauuccuccugcuaca

SEQ ID NO: 1389252 - RNA, 19 nt, Artificial Sequence
  Description of Artificial Sequence: Synthetic oligonucleotide
uuuaaccaccuggccgaaa

SEQ ID NO: 1389253 - RNA, 19 nt, Artificial Sequence
  Description of Artificial Sequence: Synthetic oligonucleotide
uacgugggguuggcgaggu

SEQ ID NO: 1389254 - RNA, 19 nt, Artificial Sequence
  Description of Artificial Sequence: Synthetic oligonucleotide
ccaaaugagagggcaauga

SEQ ID NO: 1389255 - RNA, 19 nt, Artificial Sequence
  Description of Artificial Sequence: Synthetic oligonucleotide
acgacuggggaugggugga

SEQ ID NO: 1389256 - RNA, 19 nt, Artificial Sequence
  Description of Artificial Sequence: Synthetic oligonucleotide
cuucucagugcaggcccgc

SEQ ID NO: 1389257 - RNA, 19 nt, Artificial Sequence
  Description of Artificial Sequence: Synthetic oligonucleotide
gcaagaaacuaaagugcuc

SEQ ID NO: 1389258 - RNA, 19 nt, Artificial Sequence
  Description of Artificial Sequence: Synthetic oligonucleotide
gucgagaggaaggggcuuc

SEQ ID NO: 1389259 - RNA, 19 nt, Artificial Sequence
  Description of Artificial Sequence: Synthetic oligonucleotide
ggggcuucaagccaucuau

SEQ ID NO: 1389260 - RNA, 19 nt, Artificial Sequence
  Description of Artificial Sequence: Synthetic oligonucleotide
uggccgaaacuagcucuca

SEQ ID NO: 1389261 - RNA, 19 nt, Artificial Sequence
  Description of Artificial Sequence: Synthetic oligonucleotide
caaggaccucgaggcaagg

SEQ ID NO: 1389262 - RNA, 19 nt, Artificial Sequence
  Description of Artificial Sequence: Synthetic oligonucleotide
cuaauaagcuaggacuaau

SEQ ID NO: 1389263 - RNA, 19 nt, Artificial Sequence
  Description of Artificial Sequence: Synthetic oligonucleotide
gcaacucacugugucagga

SEQ ID NO: 1389264 - RNA, 19 nt, Artificial Sequence
  Description of Artificial Sequence: Synthetic oligonucleotide
ugcccacuaucugcugggc

SEQ ID NO: 1389265 - RNA, 19 nt, Artificial Sequence
  Description of Artificial Sequence: Synthetic oligonucleotide
  modified_base (5)..(5): a, c, u, g, unknown or other
cugcngggaacuggugaug

SEQ ID NO: 1389266 - RNA, 19 nt, Artificial Sequence
  Description of Artificial Sequence: Synthetic oligonucleotide
auucaucaaccagcacaga

SEQ ID NO: 1389267 - RNA, 19 nt, Artificial Sequence
  Description of Artificial Sequence: Synthetic oligonucleotide
gcaagcacgcagacauggg

SEQ ID NO: 1389268 - RNA, 19 nt, Artificial Sequence
  Description of Artificial Sequence: Synthetic oligonucleotide
cuuuauuccugagcaauuu

SEQ ID NO: 1389269 - RNA, 19 nt, Artificial Sequence
  Description of Artificial Sequence: Synthetic oligonucleotide
ugucgagaggaaggggcuu

SEQ ID NO: 1389270 - RNA, 19 nt, Artificial Sequence
  Description of Artificial Sequence: Synthetic oligonucleotide
ggaccaucuuccaccauuc

SEQ ID NO: 1389271 - RNA, 19 nt, Artificial Sequence
  Description of Artificial Sequence: Synthetic oligonucleotide
ggcgaguacgugggguugg

SEQ ID NO: 1389272 - RNA, 19 nt, Artificial Sequence
  Description of Artificial Sequence: Synthetic oligonucleotide
gccaucuaucauguccugc

SEQ ID NO: 1389273 - RNA, 19 nt, Artificial Sequence
  Description of Artificial Sequence: Synthetic oligonucleotide
ccgcucauagacauagaga

SEQ ID NO: 1389274 - RNA, 19 nt, Artificial Sequence
  Description of Artificial Sequence: Synthetic oligonucleotide
  modified_base (3)..(3): a, c, u, g, unknown or other
gcngggaacuggugauggc

SEQ ID NO: 1389275 - RNA, 19 nt, Artificial Sequence
  Description of Artificial Sequence: Synthetic oligonucleotide
uauggcgaugcagcucauu

SEQ ID NO: 1389276 - RNA, 19 nt, Artificial Sequence
  Description of Artificial Sequence: Synthetic oligonucleotide
gcuccgcuaaacgucucag

SEQ ID NO: 1389277 - RNA, 19 nt, Artificial Sequence
  Description of Artificial Sequence: Synthetic oligonucleotide
ucgaggcaaggggugcuuc

SEQ ID NO: 1389278 - RNA, 19 nt, Artificial Sequence
  Description of Artificial Sequence: Synthetic oligonucleotide
gcggucagacauguuccgg

SEQ ID NO: 1389279 - RNA, 19 nt, Artificial Sequence
  Description of Artificial Sequence: Synthetic oligonucleotide
ggguuggcgaggugucgag

SEQ ID NO: 1389280 - RNA, 19 nt, Artificial Sequence
  Description of Artificial Sequence: Synthetic oligonucleotide
cuacauccuuuaaccaccu

SEQ ID NO: 1389281 - RNA, 19 nt, Artificial Sequence
  Description of Artificial Sequence: Synthetic oligonucleotide
ggccgaaacuagcucucac

SEQ ID NO: 1389282 - RNA, 19 nt, Artificial Sequence
  Description of Artificial Sequence: Synthetic oligonucleotide
  modified_base (8)..(8): a, c, u, g, unknown or other
agucugcngggaacuggug

SEQ ID NO: 1389283 - RNA, 19 nt, Artificial Sequence
  Description of Artificial Sequence: Synthetic oligonucleotide
  modified_base (2)..(2): a, c, u, g, unknown or other
cngggaacuggugauggcu

SEQ ID NO: 1389284 - RNA, 19 nt, Artificial Sequence
  Description of Artificial Sequence: Synthetic oligonucleotide
ggagcagcggucagacaug

SEQ ID NO: 1389285 - RNA, 19 nt, Artificial Sequence
  Description of Artificial Sequence: Synthetic oligonucleotide
ccgaaacuagcucucacua

SEQ ID NO: 1389286 - RNA, 19 nt, Artificial Sequence
  Description of Artificial Sequence: Synthetic oligonucleotide
guccaaaugagagggcaau

SEQ ID NO: 1389287 - RNA, 19 nt, Artificial Sequence
  Description of Artificial Sequence: Synthetic oligonucleotide
gcgcuugaaggcccucucc

SEQ ID NO: 1389288 - RNA, 19 nt, Artificial Sequence
  Description of Artificial Sequence: Synthetic oligonucleotide
gugugugaacauguugagu

SEQ ID NO: 1389289 - RNA, 19 nt, Artificial Sequence
  Description of Artificial Sequence: Synthetic oligonucleotide
acggucacugucacugcaa

SEQ ID NO: 1389290 - RNA, 19 nt, Artificial Sequence
  Description of Artificial Sequence: Synthetic oligonucleotide
gccgaaacuagcucucacu

SEQ ID NO: 1389291 - RNA, 19 nt, Artificial Sequence
  Description of Artificial Sequence: Synthetic oligonucleotide
gcgaggugucgagaggaag

SEQ ID NO: 1389292 - RNA, 19 nt, Artificial Sequence
  Description of Artificial Sequence: Synthetic oligonucleotide
ccacuaucugcugggcugc

SEQ ID NO: 1389293 - RNA, 19 nt, Artificial Sequence
  Description of Artificial Sequence: Synthetic oligonucleotide
acgcagacaugggcaggag

SEQ ID NO: 1389294 - RNA, 19 nt, Artificial Sequence
  Description of Artificial Sequence: Synthetic oligonucleotide
cugacccacuucgaaguaa

SEQ ID NO: 1389295 - RNA, 19 nt, Artificial Sequence
  Description of Artificial Sequence: Synthetic oligonucleotide
uguuccggcccaggccuuc

SEQ ID NO: 1389296 - RNA, 19 nt, Artificial Sequence
  Description of Artificial Sequence: Synthetic oligonucleotide
aggcucucccuggugguau

SEQ ID NO: 1389297 - RNA, 19 nt, Artificial Sequence
  Description of Artificial Sequence: Synthetic oligonucleotide
cuugacuaagacggucacu

SEQ ID NO: 1389298 - RNA, 19 nt, Artificial Sequence
  Description of Artificial Sequence: Synthetic oligonucleotide
ccuugugcgccccagcaaa

SEQ ID NO: 1389299 - RNA, 19 nt, Artificial Sequence
  Description of Artificial Sequence: Synthetic oligonucleotide
gcauugccucaaauauacc

SEQ ID NO: 1389300 - RNA, 19 nt, Artificial Sequence
  Description of Artificial Sequence: Synthetic oligonucleotide
ggcaaggggugcuucuucu

SEQ ID NO: 1389301 - RNA, 19 nt, Artificial Sequence
  Description of Artificial Sequence: Synthetic oligonucleotide
cgucugaucucuucagcca

SEQ ID NO: 1389302 - RNA, 19 nt, Artificial Sequence
  Description of Artificial Sequence: Synthetic oligonucleotide
aggagccuugugcgcccca

SEQ ID NO: 1389303 - RNA, 19 nt, Artificial Sequence
  Description of Artificial Sequence: Synthetic oligonucleotide
ccuggccgaaacuagcucu

SEQ ID NO: 1389304 - RNA, 19 nt, Artificial Sequence
  Description of Artificial Sequence: Synthetic oligonucleotide
cagaagcaacucacugugu

SEQ ID NO: 1389305 - RNA, 19 nt, Artificial Sequence
  Description of Artificial Sequence: Synthetic oligonucleotide
cccuggugguauaaaugga

SEQ ID NO: 1389306 - RNA, 19 nt, Artificial Sequence
  Description of Artificial Sequence: Synthetic oligonucleotide
acacaucagcagagauaca

SEQ ID NO: 1389307 - RNA, 19 nt, Artificial Sequence
  Description of Artificial Sequence: Synthetic oligonucleotide
gggguuggcgaggugucga

SEQ ID NO: 1389308 - RNA, 19 nt, Artificial Sequence
  Description of Artificial Sequence: Synthetic oligonucleotide
cgaaacuagcucucacuaa

SEQ ID NO: 1389309 - RNA, 19 nt, Artificial Sequence
  Description of Artificial Sequence: Synthetic oligonucleotide
gggcgaguacgugggguug

SEQ ID NO: 1389310 - RNA, 19 nt, Artificial Sequence
  Description of Artificial Sequence: Synthetic oligonucleotide
ggaaggggcuucaagccau

SEQ ID NO: 1389311 - RNA, 19 nt, Artificial Sequence
  Description of Artificial Sequence: Synthetic oligonucleotide
cugcaguuagagccaguau

SEQ ID NO: 1389312 - RNA, 19 nt, Artificial Sequence
  Description of Artificial Sequence: Synthetic oligonucleotide
gcuaaacgucucagguaca

SEQ ID NO: 1389313 - RNA, 19 nt, Artificial Sequence
  Description of Artificial Sequence: Synthetic oligonucleotide
ggucagccgcucauagaca

SEQ ID NO: 1389314 - RNA, 19 nt, Artificial Sequence
  Description of Artificial Sequence: Synthetic oligonucleotide
ggaccucgaggcaaggggu

SEQ ID NO: 1389315 - RNA, 19 nt, Artificial Sequence
  Description of Artificial Sequence: Synthetic oligonucleotide
cuccugcuacauccuuuaa

SEQ ID NO: 1389316 - RNA, 19 nt, Artificial Sequence
  Description of Artificial Sequence: Synthetic oligonucleotide
cgagaaugcccauggaggu

SEQ ID NO: 1389317 - RNA, 19 nt, Artificial Sequence
  Description of Artificial Sequence: Synthetic oligonucleotide
ccacuucgaaguaaccccu

SEQ ID NO: 1389318 - RNA, 19 nt, Artificial Sequence
  Description of Artificial Sequence: Synthetic oligonucleotide
gguuggcgaggugucgaga

SEQ ID NO: 1389319 - RNA, 19 nt, Artificial Sequence
  Description of Artificial Sequence: Synthetic oligonucleotide
gcgaguacgugggguuggc

SEQ ID NO: 1389320 - RNA, 19 nt, Artificial Sequence
  Description of Artificial Sequence: Synthetic oligonucleotide
ccgcuaaacgucucaggua

SEQ ID NO: 1389321 - RNA, 19 nt, Artificial Sequence
  Description of Artificial Sequence: Synthetic oligonucleotide
ccuuccucuauauggcgau

SEQ ID NO: 1389322 - RNA, 19 nt, Artificial Sequence
  Description of Artificial Sequence: Synthetic oligonucleotide
gccuugugcgccccagcaa

SEQ ID NO: 1389323 - RNA, 19 nt, Artificial Sequence
  Description of Artificial Sequence: Synthetic oligonucleotide
auauggcgaugcagcucau

SEQ ID NO: 1389324 - RNA, 19 nt, Artificial Sequence
  Description of Artificial Sequence: Synthetic oligonucleotide
cacuaucugcugggcugca

SEQ ID NO: 1389325 - RNA, 19 nt, Artificial Sequence
  Description of Artificial Sequence: Synthetic oligonucleotide
cgaguacgugggguuggcg

SEQ ID NO: 1389326 - RNA, 19 nt, Artificial Sequence
  Description of Artificial Sequence: Synthetic oligonucleotide
cagauucucucgggugaua

SEQ ID NO: 1389327 - RNA, 19 nt, Artificial Sequence
  Description of Artificial Sequence: Synthetic oligonucleotide
gagccucgacuuucuuguu

SEQ ID NO: 1389328 - RNA, 19 nt, Artificial Sequence
  Description of Artificial Sequence: Synthetic oligonucleotide
ccacuccuccgaccacgag

SEQ ID NO: 1389329 - RNA, 19 nt, Artificial Sequence
  Description of Artificial Sequence: Synthetic oligonucleotide
ggggcgaguacgugggguu

SEQ ID NO: 1389330 - RNA, 19 nt, Artificial Sequence
  Description of Artificial Sequence: Synthetic oligonucleotide
ccacgagaaugcccaugga

SEQ ID NO: 1389331 - RNA, 19 nt, Artificial Sequence
  Description of Artificial Sequence: Synthetic oligonucleotide
ggcgaggugucgagaggaa

SEQ ID NO: 1389332 - RNA, 19 nt, Artificial Sequence
  Description of Artificial Sequence: Synthetic oligonucleotide
ggucacaacuggggcuuua

SEQ ID NO: 1389333 - RNA, 19 nt, Artificial Sequence
  Description of Artificial Sequence: Synthetic oligonucleotide
gcccgccccagcugcccac

SEQ ID NO: 1389334 - RNA, 19 nt, Artificial Sequence
  Description of Artificial Sequence: Synthetic oligonucleotide
cucgaggcaaggggugcuu

SEQ ID NO: 1389335 - RNA, 19 nt, Artificial Sequence
  Description of Artificial Sequence: Synthetic oligonucleotide
cccaggccuuccucuauau

SEQ ID NO: 1389336 - RNA, 19 nt, Artificial Sequence
  Description of Artificial Sequence: Synthetic oligonucleotide
ccucgaggcaaggggugcu

SEQ ID NO: 1389337 - RNA, 19 nt, Artificial Sequence
  Description of Artificial Sequence: Synthetic oligonucleotide
cuccuccgaccacgagaau

SEQ ID NO: 1389338 - RNA, 19 nt, Artificial Sequence
  Description of Artificial Sequence: Synthetic oligonucleotide
gcgccccagcaaagaucac

SEQ ID NO: 1389339 - RNA, 19 nt, Artificial Sequence
  Description of Artificial Sequence: Synthetic oligonucleotide
cgaccacgagaaugcccau

SEQ ID NO: 1389340 - RNA, 19 nt, Artificial Sequence
  Description of Artificial Sequence: Synthetic oligonucleotide
cccgccccagcugcccacu

SEQ ID NO: 1389341 - RNA, 19 nt, Artificial Sequence
  Description of Artificial Sequence: Synthetic oligonucleotide
uccucuauaaaauaaaucu

SEQ ID NO: 1389342 - RNA, 19 nt, Artificial Sequence
  Description of Artificial Sequence: Synthetic oligonucleotide
uuaaauacuggcuucaagu

SEQ ID NO: 1389343 - RNA, 19 nt, Artificial Sequence
  Description of Artificial Sequence: Synthetic oligonucleotide
ugaguuuugauaaccauca

SEQ ID NO: 1389344 - RNA, 19 nt, Artificial Sequence
  Description of Artificial Sequence: Synthetic oligonucleotide
gaauucaagaucuuggcug

SEQ ID NO: 1389345 - RNA, 19 nt, Artificial Sequence
  Description of Artificial Sequence: Synthetic oligonucleotide
uccaaucagacacugaucc

SEQ ID NO: 1389346 - RNA, 19 nt, Artificial Sequence
  Description of Artificial Sequence: Synthetic oligonucleotide
uuugauaaccaucaguggu

SEQ ID NO: 1389347 - RNA, 19 nt, Artificial Sequence
  Description of Artificial Sequence: Synthetic oligonucleotide
acuaagaccaaaugcugcc

SEQ ID NO: 1389348 - RNA, 19 nt, Artificial Sequence
  Description of Artificial Sequence: Synthetic oligonucleotide
gaaaauuugcuauaaacaa

SEQ ID NO: 1389349 - RNA, 19 nt, Artificial Sequence
  Description of Artificial Sequence: Synthetic oligonucleotide
uccucggucacuuaagugg

SEQ ID NO: 1389350 - RNA, 19 nt, Artificial Sequence
  Description of Artificial Sequence: Synthetic oligonucleotide
gacuugauagcagaaaacg

SEQ ID NO: 1389351 - RNA, 19 nt, Artificial Sequence
  Description of Artificial Sequence: Synthetic oligonucleotide
aaugcugugaauccugcca

SEQ ID NO: 1389352 - RNA, 19 nt, Artificial Sequence
  Description of Artificial Sequence: Synthetic oligonucleotide
agagaugucgaauucaaga

SEQ ID NO: 1389353 - RNA, 19 nt, Artificial Sequence
  Description of Artificial Sequence: Synthetic oligonucleotide
uuuugauaaccaucagugg

SEQ ID NO: 1389354 - RNA, 19 nt, Artificial Sequence
  Description of Artificial Sequence: Synthetic oligonucleotide
uaaguggcuagcaaagaag

SEQ ID NO: 1389355 - RNA, 19 nt, Artificial Sequence
  Description of Artificial Sequence: Synthetic oligonucleotide
aauucaagaucuuggcuga

SEQ ID NO: 1389356 - RNA, 19 nt, Artificial Sequence
  Description of Artificial Sequence: Synthetic oligonucleotide
uguaucauggucuggccag

SEQ ID NO: 1389357 - RNA, 19 nt, Artificial Sequence
  Description of Artificial Sequence: Synthetic oligonucleotide
uguagucucaugcagcgca

SEQ ID NO: 1389358 - RNA, 19 nt, Artificial Sequence
  Description of Artificial Sequence: Synthetic oligonucleotide
uaaaugaguuuugauaacc

SEQ ID NO: 1389359 - RNA, 19 nt, Artificial Sequence
  Description of Artificial Sequence: Synthetic oligonucleotide
aacguacugacccucuguc

SEQ ID NO: 1389360 - RNA, 19 nt, Artificial Sequence
  Description of Artificial Sequence: Synthetic oligonucleotide
uugauagcagaaaacguac

SEQ ID NO: 1389361 - RNA, 19 nt, Artificial Sequence
  Description of Artificial Sequence: Synthetic oligonucleotide
gaaugguucucuuuggcug

SEQ ID NO: 1389362 - RNA, 19 nt, Artificial Sequence
  Description of Artificial Sequence: Synthetic oligonucleotide
ugguacauuaaaauagacu

SEQ ID NO: 1389363 - RNA, 19 nt, Artificial Sequence
  Description of Artificial Sequence: Synthetic oligonucleotide
uuugaaugguucucuuugg

SEQ ID NO: 1389364 - RNA, 19 nt, Artificial Sequence
  Description of Artificial Sequence: Synthetic oligonucleotide
acgucuaugcauaugaggg

SEQ ID NO: 1389365 - RNA, 19 nt, Artificial Sequence
  Description of Artificial Sequence: Synthetic oligonucleotide
acuacgaagcccuucagcu

SEQ ID NO: 1389366 - RNA, 19 nt, Artificial Sequence
  Description of Artificial Sequence: Synthetic oligonucleotide
cucauguaggagaugaaag

SEQ ID NO: 1389367 - RNA, 19 nt, Artificial Sequence
  Description of Artificial Sequence: Synthetic oligonucleotide
auaugucucauguaggaga

SEQ ID NO: 1389368 - RNA, 19 nt, Artificial Sequence
  Description of Artificial Sequence: Synthetic oligonucleotide
ugaagcgugcggauggugg

SEQ ID NO: 1389369 - RNA, 19 nt, Artificial Sequence
  Description of Artificial Sequence: Synthetic oligonucleotide
uucgguuuuccuuagucug

SEQ ID NO: 1389370 - RNA, 19 nt, Artificial Sequence
  Description of Artificial Sequence: Synthetic oligonucleotide
uggauaugucucauguagg

SEQ ID NO: 1389371 - RNA, 19 nt, Artificial Sequence
  Description of Artificial Sequence: Synthetic oligonucleotide
uguccaaucagacacugau

SEQ ID NO: 1389372 - RNA, 19 nt, Artificial Sequence
  Description of Artificial Sequence: Synthetic oligonucleotide
aguuuugauaaccaucagu

SEQ ID NO: 1389373 - RNA, 19 nt, Artificial Sequence
  Description of Artificial Sequence: Synthetic oligonucleotide
agaugucgaauucaagauc

SEQ ID NO: 1389374 - RNA, 19 nt, Artificial Sequence
  Description of Artificial Sequence: Synthetic oligonucleotide
ugauaugccgcaccgcucc

SEQ ID NO: 1389375 - RNA, 19 nt, Artificial Sequence
  Description of Artificial Sequence: Synthetic oligonucleotide
ugccuuguuccuaagaccu

SEQ ID NO: 1389376 - RNA, 19 nt, Artificial Sequence
  Description of Artificial Sequence: Synthetic oligonucleotide
uuaaguggcuagcaaagaa

SEQ ID NO: 1389377 - RNA, 19 nt, Artificial Sequence
  Description of Artificial Sequence: Synthetic oligonucleotide
aucacccucacuacgaagc

SEQ ID NO: 1389378 - RNA, 19 nt, Artificial Sequence
  Description of Artificial Sequence: Synthetic oligonucleotide
uagaggaugacuugauagc

SEQ ID NO: 1389379 - RNA, 19 nt, Artificial Sequence
  Description of Artificial Sequence: Synthetic oligonucleotide
gcagaaaacguacugaccc

SEQ ID NO: 1389380 - RNA, 19 nt, Artificial Sequence
  Description of Artificial Sequence: Synthetic oligonucleotide
ucgaauucaagaucuuggc

SEQ ID NO: 1389381 - RNA, 19 nt, Artificial Sequence
  Description of Artificial Sequence: Synthetic oligonucleotide
ugaucacugggccugaccu

SEQ ID NO: 1389382 - RNA, 19 nt, Artificial Sequence
  Description of Artificial Sequence: Synthetic oligonucleotide
aaaggacucucugugaugu

SEQ ID NO: 1389383 - RNA, 19 nt, Artificial Sequence
  Description of Artificial Sequence: Synthetic oligonucleotide
gucgaauucaagaucuugg

SEQ ID NO: 1389384 - RNA, 19 nt, Artificial Sequence
  Description of Artificial Sequence: Synthetic oligonucleotide
ugcagaaugucaacugcag

SEQ ID NO: 1389385 - RNA, 19 nt, Artificial Sequence
  Description of Artificial Sequence: Synthetic oligonucleotide
aaauucaggugagugauau

SEQ ID NO: 1389386 - RNA, 19 nt, Artificial Sequence
  Description of Artificial Sequence: Synthetic oligonucleotide
agugaaauucaggugagug

SEQ ID NO: 1389387 - RNA, 19 nt, Artificial Sequence
  Description of Artificial Sequence: Synthetic oligonucleotide
ugucucauguaggagauga

SEQ ID NO: 1389388 - RNA, 19 nt, Artificial Sequence
  Description of Artificial Sequence: Synthetic oligonucleotide
gauuaauccuaggaccacg

SEQ ID NO: 1389389 - RNA, 19 nt, Artificial Sequence
  Description of Artificial Sequence: Synthetic oligonucleotide
aaaaggacucucugugaug

SEQ ID NO: 1389390 - RNA, 19 nt, Artificial Sequence
  Description of Artificial Sequence: Synthetic oligonucleotide
uuaaaugaguuuugauaac

SEQ ID NO: 1389391 - RNA, 19 nt, Artificial Sequence
  Description of Artificial Sequence: Synthetic oligonucleotide
guccacuaagaccaaaugc

SEQ ID NO: 1389392 - RNA, 19 nt, Artificial Sequence
  Description of Artificial Sequence: Synthetic oligonucleotide
augaguuuugauaaccauc

SEQ ID NO: 1389393 - RNA, 19 nt, Artificial Sequence
  Description of Artificial Sequence: Synthetic oligonucleotide
cacgucuaugcauaugagg

SEQ ID NO: 1389394 - RNA, 19 nt, Artificial Sequence
  Description of Artificial Sequence: Synthetic oligonucleotide
ggagaugaaagugagcagg

SEQ ID NO: 1389395 - RNA, 19 nt, Artificial Sequence
  Description of Artificial Sequence: Synthetic oligonucleotide
augacuugauagcagaaaa

SEQ ID NO: 1389396 - RNA, 19 nt, Artificial Sequence
  Description of Artificial Sequence: Synthetic oligonucleotide
ugaaugguucucuuuggcu

SEQ ID NO: 1389397 - RNA, 19 nt, Artificial Sequence
  Description of Artificial Sequence: Synthetic oligonucleotide
ugacuugauagcagaaaac

SEQ ID NO: 1389398 - RNA, 19 nt, Artificial Sequence
  Description of Artificial Sequence: Synthetic oligonucleotide
uagcagaaaacguacugac

SEQ ID NO: 1389399 - RNA, 19 nt, Artificial Sequence
  Description of Artificial Sequence: Synthetic oligonucleotide
uguccacuaagaccaaaug

SEQ ID NO: 1389400 - RNA, 19 nt, Artificial Sequence
  Description of Artificial Sequence: Synthetic oligonucleotide
aaaacguacugacccucug

SEQ ID NO: 1389401 - RNA, 19 nt, Artificial Sequence
  Description of Artificial Sequence: Synthetic oligonucleotide
uugauaaccaucagugguu

SEQ ID NO: 1389402 - RNA, 19 nt, Artificial Sequence
  Description of Artificial Sequence: Synthetic oligonucleotide
uaaccaucagugguuaaag

SEQ ID NO: 1389403 - RNA, 19 nt, Artificial Sequence
  Description of Artificial Sequence: Synthetic oligonucleotide
ucuaugcauaugagggucc

SEQ ID NO: 1389404 - RNA, 19 nt, Artificial Sequence
  Description of Artificial Sequence: Synthetic oligonucleotide
ugugugaucacugggccug

SEQ ID NO: 1389405 - RNA, 19 nt, Artificial Sequence
  Description of Artificial Sequence: Synthetic oligonucleotide
aucauugcuaucacugugg

SEQ ID NO: 1389406 - RNA, 19 nt, Artificial Sequence
  Description of Artificial Sequence: Synthetic oligonucleotide
aaacguacugacccucugu

SEQ ID NO: 1389407 - RNA, 19 nt, Artificial Sequence
  Description of Artificial Sequence: Synthetic oligonucleotide
caccaagucagagaugucg

SEQ ID NO: 1389408 - RNA, 19 nt, Artificial Sequence
  Description of Artificial Sequence: Synthetic oligonucleotide
uugguacauuaaaauagac

SEQ ID NO: 1389409 - RNA, 19 nt, Artificial Sequence
  Description of Artificial Sequence: Synthetic oligonucleotide
acuuaaguggcuagcaaag

SEQ ID NO: 1389410 - RNA, 19 nt, Artificial Sequence
  Description of Artificial Sequence: Synthetic oligonucleotide
cuugauagcagaaaacgua

SEQ ID NO: 1389411 - RNA, 19 nt, Artificial Sequence
  Description of Artificial Sequence: Synthetic oligonucleotide
ucccugaacguccaaugcc

SEQ ID NO: 1389412 - RNA, 19 nt, Artificial Sequence
  Description of Artificial Sequence: Synthetic oligonucleotide
gauaugucucauguaggag

SEQ ID NO: 1389413 - RNA, 19 nt, Artificial Sequence
  Description of Artificial Sequence: Synthetic oligonucleotide
auccucuauaaaauaaauc

SEQ ID NO: 1389414 - RNA, 19 nt, Artificial Sequence
  Description of Artificial Sequence: Synthetic oligonucleotide
guaacaauguccacuaaga

SEQ ID NO: 1389415 - RNA, 19 nt, Artificial Sequence
  Description of Artificial Sequence: Synthetic oligonucleotide
uggaguucugcucccaaac

SEQ ID NO: 1389416 - RNA, 19 nt, Artificial Sequence
  Description of Artificial Sequence: Synthetic oligonucleotide
aaguauccucuauaaaaua

SEQ ID NO: 1389417 - RNA, 19 nt, Artificial Sequence
  Description of Artificial Sequence: Synthetic oligonucleotide
cauguagcaagguuucuuc

SEQ ID NO: 1389418 - RNA, 19 nt, Artificial Sequence
  Description of Artificial Sequence: Synthetic oligonucleotide
ugagggucccugaacgucc

SEQ ID NO: 1389419 - RNA, 19 nt, Artificial Sequence
  Description of Artificial Sequence: Synthetic oligonucleotide
ucugggacaagcuggcacu

SEQ ID NO: 1389420 - RNA, 19 nt, Artificial Sequence
  Description of Artificial Sequence: Synthetic oligonucleotide
cugauuaauccuaggacca

SEQ ID NO: 1389421 - RNA, 19 nt, Artificial Sequence
  Description of Artificial Sequence: Synthetic oligonucleotide
gaugucgaauucaagaucu

SEQ ID NO: 1389422 - RNA, 19 nt, Artificial Sequence
  Description of Artificial Sequence: Synthetic oligonucleotide
ucauugcuaucacugugga

SEQ ID NO: 1389423 - RNA, 19 nt, Artificial Sequence
  Description of Artificial Sequence: Synthetic oligonucleotide
gucaccgugggagucaugg

SEQ ID NO: 1389424 - RNA, 19 nt, Artificial Sequence
  Description of Artificial Sequence: Synthetic oligonucleotide
agucaggacauagaggaug

SEQ ID NO: 1389425 - RNA, 19 nt, Artificial Sequence
  Description of Artificial Sequence: Synthetic oligonucleotide
uucuguagcuccugacuag

SEQ ID NO: 1389426 - RNA, 19 nt, Artificial Sequence
  Description of Artificial Sequence: Synthetic oligonucleotide
ugauagcagaaaacguacu

SEQ ID NO: 1389427 - RNA, 19 nt, Artificial Sequence
  Description of Artificial Sequence: Synthetic oligonucleotide
aggaugacuugauagcaga

SEQ ID NO: 1389428 - RNA, 19 nt, Artificial Sequence
  Description of Artificial Sequence: Synthetic oligonucleotide
ucaucauugcuaucacugu

SEQ ID NO: 1389429 - RNA, 19 nt, Artificial Sequence
  Description of Artificial Sequence: Synthetic oligonucleotide
agaaaacguacugacccuc

SEQ ID NO: 1389430 - RNA, 19 nt, Artificial Sequence
  Description of Artificial Sequence: Synthetic oligonucleotide
uucaaguauccucuauaaa

SEQ ID NO: 1389431 - RNA, 19 nt, Artificial Sequence
  Description of Artificial Sequence: Synthetic oligonucleotide
gacaagcuggcacuuucag

SEQ ID NO: 1389432 - RNA, 19 nt, Artificial Sequence
  Description of Artificial Sequence: Synthetic oligonucleotide
agcgcaccaagucagagau

SEQ ID NO: 1389433 - RNA, 19 nt, Artificial Sequence
  Description of Artificial Sequence: Synthetic oligonucleotide
guagcaagguuucuucaug

SEQ ID NO: 1389434 - RNA, 19 nt, Artificial Sequence
  Description of Artificial Sequence: Synthetic oligonucleotide
ugucgaauucaagaucuug

SEQ ID NO: 1389435 - RNA, 19 nt, Artificial Sequence
  Description of Artificial Sequence: Synthetic oligonucleotide
uggccugcaacugagugcc

SEQ ID NO: 1389436 - RNA, 19 nt, Artificial Sequence
  Description of Artificial Sequence: Synthetic oligonucleotide
ugacuaggggauccccugg

SEQ ID NO: 1389437 - RNA, 19 nt, Artificial Sequence
  Description of Artificial Sequence: Synthetic oligonucleotide
caguguaaugcugugaauc

SEQ ID NO: 1389438 - RNA, 19 nt, Artificial Sequence
  Description of Artificial Sequence: Synthetic oligonucleotide
uguagcaagguuucuucau

SEQ ID NO: 1389439 - RNA, 19 nt, Artificial Sequence
  Description of Artificial Sequence: Synthetic oligonucleotide
aaccaucagugguuaaagu

SEQ ID NO: 1389440 - RNA, 19 nt, Artificial Sequence
  Description of Artificial Sequence: Synthetic oligonucleotide
gagcaggucgucuggcugg

SEQ ID NO: 1389441 - RNA, 19 nt, Artificial Sequence
  Description of Artificial Sequence: Synthetic oligonucleotide
agcaccguccugcauguag

SEQ ID NO: 1389442 - RNA, 19 nt, Artificial Sequence
  Description of Artificial Sequence: Synthetic oligonucleotide
uuggcugauuaauccuagg

SEQ ID NO: 1389443 - RNA, 19 nt, Artificial Sequence
  Description of Artificial Sequence: Synthetic oligonucleotide
ucucauguaggagaugaaa

SEQ ID NO: 1389444 - RNA, 19 nt, Artificial Sequence
  Description of Artificial Sequence: Synthetic oligonucleotide
ccuaggaccacgucuaugc

SEQ ID NO: 1389445 - RNA, 19 nt, Artificial Sequence
  Description of Artificial Sequence: Synthetic oligonucleotide
uaaacaagauuugguacau

SEQ ID NO: 1389446 - RNA, 19 nt, Artificial Sequence
  Description of Artificial Sequence: Synthetic oligonucleotide
caagccuugaagcgugcgg

SEQ ID NO: 1389447 - RNA, 19 nt, Artificial Sequence
  Description of Artificial Sequence: Synthetic oligonucleotide
agaggaugacuugauagca

SEQ ID NO: 1389448 - RNA, 19 nt, Artificial Sequence
  Description of Artificial Sequence: Synthetic oligonucleotide
cugccuuguuccuaagacc

SEQ ID NO: 1389449 - RNA, 19 nt, Artificial Sequence
  Description of Artificial Sequence: Synthetic oligonucleotide
agugccacguggccagggc

SEQ ID NO: 1389450 - RNA, 19 nt, Artificial Sequence
  Description of Artificial Sequence: Synthetic oligonucleotide
aauccuaggaccacgucua

SEQ ID NO: 1389451 - RNA, 19 nt, Artificial Sequence
  Description of Artificial Sequence: Synthetic oligonucleotide
gauccccuggucaagcaag

SEQ ID NO: 1389452 - RNA, 19 nt, Artificial Sequence
  Description of Artificial Sequence: Synthetic oligonucleotide
cuuagucuguccaaucaga

SEQ ID NO: 1389453 - RNA, 19 nt, Artificial Sequence
  Description of Artificial Sequence: Synthetic oligonucleotide
aagccuugaagcgugcgga

SEQ ID NO: 1389454 - RNA, 19 nt, Artificial Sequence
  Description of Artificial Sequence: Synthetic oligonucleotide
agcacugcagugugugauc

SEQ ID NO: 1389455 - RNA, 19 nt, Artificial Sequence
  Description of Artificial Sequence: Synthetic oligonucleotide
guagcuccugacuagggga

SEQ ID NO: 1389456 - RNA, 19 nt, Artificial Sequence
  Description of Artificial Sequence: Synthetic oligonucleotide
gaagcgugcggaugguggc

SEQ ID NO: 1389457 - RNA, 19 nt, Artificial Sequence
  Description of Artificial Sequence: Synthetic oligonucleotide
cuaagaccugccuuguuca

SEQ ID NO: 1389458 - RNA, 19 nt, Artificial Sequence
  Description of Artificial Sequence: Synthetic oligonucleotide
gaggguguaucauggucug

SEQ ID NO: 1389459 - RNA, 19 nt, Artificial Sequence
  Description of Artificial Sequence: Synthetic oligonucleotide
gugaauccugccauccucg

SEQ ID NO: 1389460 - RNA, 19 nt, Artificial Sequence
  Description of Artificial Sequence: Synthetic oligonucleotide
ucacccucacuacgaagcc

SEQ ID NO: 1389461 - RNA, 19 nt, Artificial Sequence
  Description of Artificial Sequence: Synthetic oligonucleotide
ugugccugagagugccacg

SEQ ID NO: 1389462 - RNA, 19 nt, Artificial Sequence
  Description of Artificial Sequence: Synthetic oligonucleotide
gaggaugacuugauagcag

SEQ ID NO: 1389463 - RNA, 19 nt, Artificial Sequence
  Description of Artificial Sequence: Synthetic oligonucleotide
acuugauagcagaaaacgu

SEQ ID NO: 1389464 - RNA, 19 nt, Artificial Sequence
  Description of Artificial Sequence: Synthetic oligonucleotide
aguagcgcuggcauuugac

SEQ ID NO: 1389465 - RNA, 19 nt, Artificial Sequence
  Description of Artificial Sequence: Synthetic oligonucleotide
ugggagucauggcugugcc

SEQ ID NO: 1389466 - RNA, 19 nt, Artificial Sequence
  Description of Artificial Sequence: Synthetic oligonucleotide
aagcgugcggaugguggcc

SEQ ID NO: 1389467 - RNA, 19 nt, Artificial Sequence
  Description of Artificial Sequence: Synthetic oligonucleotide
acaaauuccugugucccca

SEQ ID NO: 1389468 - RNA, 19 nt, Artificial Sequence
  Description of Artificial Sequence: Synthetic oligonucleotide
auaaccaucagugguuaaa

SEQ ID NO: 1389469 - RNA, 19 nt, Artificial Sequence
  Description of Artificial Sequence: Synthetic oligonucleotide
cacuacgaagcccuucagc

SEQ ID NO: 1389470 - RNA, 19 nt, Artificial Sequence
  Description of Artificial Sequence: Synthetic oligonucleotide
auccugaggaggcugcucu

SEQ ID NO: 1389471 - RNA, 19 nt, Artificial Sequence
  Description of Artificial Sequence: Synthetic oligonucleotide
cuuguucaggucauguuaa

SEQ ID NO: 1389472 - RNA, 19 nt, Artificial Sequence
  Description of Artificial Sequence: Synthetic oligonucleotide
gugagugauaugccgcacc

SEQ ID NO: 1389473 - RNA, 19 nt, Artificial Sequence
  Description of Artificial Sequence: Synthetic oligonucleotide
cuauggauaugucucaugu

SEQ ID NO: 1389474 - RNA, 19 nt, Artificial Sequence
  Description of Artificial Sequence: Synthetic oligonucleotide
ggauaugucucauguagga

SEQ ID NO: 1389475 - RNA, 19 nt, Artificial Sequence
  Description of Artificial Sequence: Synthetic oligonucleotide
agcugaggcuuccuucccg

SEQ ID NO: 1389476 - RNA, 19 nt, Artificial Sequence
  Description of Artificial Sequence: Synthetic oligonucleotide
uuaauccuaggaccacguc

SEQ ID NO: 1389477 - RNA, 19 nt, Artificial Sequence
  Description of Artificial Sequence: Synthetic oligonucleotide
acuaggggauccccugguc

SEQ ID NO: 1389478 - RNA, 19 nt, Artificial Sequence
  Description of Artificial Sequence: Synthetic oligonucleotide
auuaauccuaggaccacgu

SEQ ID NO: 1389479 - RNA, 19 nt, Artificial Sequence
  Description of Artificial Sequence: Synthetic oligonucleotide
ugcauaugagggucccuga

SEQ ID NO: 1389480 - RNA, 19 nt, Artificial Sequence
  Description of Artificial Sequence: Synthetic oligonucleotide
caccgugguggguaaaggc

SEQ ID NO: 1389481 - RNA, 19 nt, Artificial Sequence
  Description of Artificial Sequence: Synthetic oligonucleotide
ugagugccaguguaaugcu

SEQ ID NO: 1389482 - RNA, 19 nt, Artificial Sequence
  Description of Artificial Sequence: Synthetic oligonucleotide
cugacuaggggauccccug

SEQ ID NO: 1389483 - RNA, 19 nt, Artificial Sequence
  Description of Artificial Sequence: Synthetic oligonucleotide
ugauuaauccuaggaccac

SEQ ID NO: 1389484 - RNA, 19 nt, Artificial Sequence
  Description of Artificial Sequence: Synthetic oligonucleotide
gucuaugcauaugaggguc

SEQ ID NO: 1389485 - RNA, 19 nt, Artificial Sequence
  Description of Artificial Sequence: Synthetic oligonucleotide
uaugccgcaccgcuccugu

SEQ ID NO: 1389486 - RNA, 19 nt, Artificial Sequence
  Description of Artificial Sequence: Synthetic oligonucleotide
ggguaaaggccccuggcag

SEQ ID NO: 1389487 - RNA, 19 nt, Artificial Sequence
  Description of Artificial Sequence: Synthetic oligonucleotide
cauugcuaucacuguggag

SEQ ID NO: 1389488 - RNA, 19 nt, Artificial Sequence
  Description of Artificial Sequence: Synthetic oligonucleotide
auccucggucacuuaagug

SEQ ID NO: 1389489 - RNA, 19 nt, Artificial Sequence
  Description of Artificial Sequence: Synthetic oligonucleotide
cugaacguccaaugccagc

SEQ ID NO: 1389490 - RNA, 19 nt, Artificial Sequence
  Description of Artificial Sequence: Synthetic oligonucleotide
cuugaagauucuguagcuc

SEQ ID NO: 1389491 - RNA, 19 nt, Artificial Sequence
  Description of Artificial Sequence: Synthetic oligonucleotide
cuaugcauaugaggguccc

SEQ ID NO: 1389492 - RNA, 19 nt, Artificial Sequence
  Description of Artificial Sequence: Synthetic oligonucleotide
augugccugagagugccac

SEQ ID NO: 1389493 - RNA, 19 nt, Artificial Sequence
  Description of Artificial Sequence: Synthetic oligonucleotide
agugugucuuuguaacaau

SEQ ID NO: 1389494 - RNA, 19 nt, Artificial Sequence
  Description of Artificial Sequence: Synthetic oligonucleotide
guauccucuauaaaauaaa

SEQ ID NO: 1389495 - RNA, 19 nt, Artificial Sequence
  Description of Artificial Sequence: Synthetic oligonucleotide
uccugcauguagcaagguu

SEQ ID NO: 1389496 - RNA, 19 nt, Artificial Sequence
  Description of Artificial Sequence: Synthetic oligonucleotide
guaaugcugugaauccugc

SEQ ID NO: 1389497 - RNA, 19 nt, Artificial Sequence
  Description of Artificial Sequence: Synthetic oligonucleotide
agucucaugcagcgcacca

SEQ ID NO: 1389498 - RNA, 19 nt, Artificial Sequence
  Description of Artificial Sequence: Synthetic oligonucleotide
augcugugaauccugccau

SEQ ID NO: 1389499 - RNA, 19 nt, Artificial Sequence
  Description of Artificial Sequence: Synthetic oligonucleotide
aggcacuuugaaugguucu

SEQ ID NO: 1389500 - RNA, 19 nt, Artificial Sequence
  Description of Artificial Sequence: Synthetic oligonucleotide
gucccugaacguccaaugc

SEQ ID NO: 1389501 - RNA, 19 nt, Artificial Sequence
  Description of Artificial Sequence: Synthetic oligonucleotide
ugauaaccaucagugguua

SEQ ID NO: 1389502 - RNA, 19 nt, Artificial Sequence
  Description of Artificial Sequence: Synthetic oligonucleotide
ugggccugaccuauggaua

SEQ ID NO: 1389503 - RNA, 19 nt, Artificial Sequence
  Description of Artificial Sequence: Synthetic oligonucleotide
aaggacucucugugaugug

SEQ ID NO: 1389504 - RNA, 19 nt, Artificial Sequence
  Description of Artificial Sequence: Synthetic oligonucleotide
caucacccucacuacgaag

SEQ ID NO: 1389505 - RNA, 19 nt, Artificial Sequence
  Description of Artificial Sequence: Synthetic oligonucleotide
gucgucgugcccaggaugc

SEQ ID NO: 1389506 - RNA, 19 nt, Artificial Sequence
  Description of Artificial Sequence: Synthetic oligonucleotide
gggauccugaugaaacugg

SEQ ID NO: 1389507 - RNA, 19 nt, Artificial Sequence
  Description of Artificial Sequence: Synthetic oligonucleotide
gacaagugucacaucuuca

SEQ ID NO: 1389508 - RNA, 19 nt, Artificial Sequence
  Description of Artificial Sequence: Synthetic oligonucleotide
gcuagcaaagaagccauug

SEQ ID NO: 1389509 - RNA, 19 nt, Artificial Sequence
  Description of Artificial Sequence: Synthetic oligonucleotide
ugccgcaccgcuccugucu

SEQ ID NO: 1389510 - RNA, 19 nt, Artificial Sequence
  Description of Artificial Sequence: Synthetic oligonucleotide
gguggguaaaggccccugg

SEQ ID NO: 1389511 - RNA, 19 nt, Artificial Sequence
  Description of Artificial Sequence: Synthetic oligonucleotide
uuccuucgguuuuccuuag

SEQ ID NO: 1389512 - RNA, 19 nt, Artificial Sequence
  Description of Artificial Sequence: Synthetic oligonucleotide
gauccugaugaaacuggca

SEQ ID NO: 1389513 - RNA, 19 nt, Artificial Sequence
  Description of Artificial Sequence: Synthetic oligonucleotide
ucuggagcaccguccugca

SEQ ID NO: 1389514 - RNA, 19 nt, Artificial Sequence
  Description of Artificial Sequence: Synthetic oligonucleotide
acguacugacccucugucu

SEQ ID NO: 1389515 - RNA, 19 nt, Artificial Sequence
  Description of Artificial Sequence: Synthetic oligonucleotide
uuguucaggucauguuaaa

SEQ ID NO: 1389516 - RNA, 19 nt, Artificial Sequence
  Description of Artificial Sequence: Synthetic oligonucleotide
ggucccugaacguccaaug

SEQ ID NO: 1389517 - RNA, 19 nt, Artificial Sequence
  Description of Artificial Sequence: Synthetic oligonucleotide
gguguaucauggucuggcc

SEQ ID NO: 1389518 - RNA, 19 nt, Artificial Sequence
  Description of Artificial Sequence: Synthetic oligonucleotide
ccuaagaccugccuuguuc

SEQ ID NO: 1389519 - RNA, 19 nt, Artificial Sequence
  Description of Artificial Sequence: Synthetic oligonucleotide
caugccgugucuuuguagu

SEQ ID NO: 1389520 - RNA, 19 nt, Artificial Sequence
  Description of Artificial Sequence: Synthetic oligonucleotide
caaauuccuguguccccac

SEQ ID NO: 1389521 - RNA, 19 nt, Artificial Sequence
  Description of Artificial Sequence: Synthetic oligonucleotide
auccccuggucaagcaagc

SEQ ID NO: 1389522 - RNA, 19 nt, Artificial Sequence
  Description of Artificial Sequence: Synthetic oligonucleotide
agcuggcacuuucaguccu

SEQ ID NO: 1389523 - RNA, 19 nt, Artificial Sequence
  Description of Artificial Sequence: Synthetic oligonucleotide
ggaugcugggccaguagcg

SEQ ID NO: 1389524 - RNA, 19 nt, Artificial Sequence
  Description of Artificial Sequence: Synthetic oligonucleotide
ggagaugacaagugucaca

SEQ ID NO: 1389525 - RNA, 19 nt, Artificial Sequence
  Description of Artificial Sequence: Synthetic oligonucleotide
agaccaaaugcugccuugu

SEQ ID NO: 1389526 - RNA, 19 nt, Artificial Sequence
  Description of Artificial Sequence: Synthetic oligonucleotide
ugaaagugagcaggucguc

SEQ ID NO: 1389527 - RNA, 19 nt, Artificial Sequence
  Description of Artificial Sequence: Synthetic oligonucleotide
aggucauguuaaaugaguu

SEQ ID NO: 1389528 - RNA, 19 nt, Artificial Sequence
  Description of Artificial Sequence: Synthetic oligonucleotide
cuuaaguggcuagcaaaga

SEQ ID NO: 1389529 - RNA, 19 nt, Artificial Sequence
  Description of Artificial Sequence: Synthetic oligonucleotide
ccugagagugccacguggc

SEQ ID NO: 1389530 - RNA, 19 nt, Artificial Sequence
  Description of Artificial Sequence: Synthetic oligonucleotide
ccucuugugucaucauugc

SEQ ID NO: 1389531 - RNA, 19 nt, Artificial Sequence
  Description of Artificial Sequence: Synthetic oligonucleotide
uucaagaucuuggcugauu

SEQ ID NO: 1389532 - RNA, 19 nt, Artificial Sequence
  Description of Artificial Sequence: Synthetic oligonucleotide
ccguccugcauguagcaag

SEQ ID NO: 1389533 - RNA, 19 nt, Artificial Sequence
  Description of Artificial Sequence: Synthetic oligonucleotide
gccaguguaaugcugugaa

SEQ ID NO: 1389534 - RNA, 19 nt, Artificial Sequence
  Description of Artificial Sequence: Synthetic oligonucleotide
gagugauaugccgcaccgc

SEQ ID NO: 1389535 - RNA, 19 nt, Artificial Sequence
  Description of Artificial Sequence: Synthetic oligonucleotide
uugaagcgugcggauggug

SEQ ID NO: 1389536 - RNA, 19 nt, Artificial Sequence
  Description of Artificial Sequence: Synthetic oligonucleotide
aaacaagauuugguacauu

SEQ ID NO: 1389537 - RNA, 19 nt, Artificial Sequence
  Description of Artificial Sequence: Synthetic oligonucleotide
ugcagcgcaccaagucaga

SEQ ID NO: 1389538 - RNA, 19 nt, Artificial Sequence
  Description of Artificial Sequence: Synthetic oligonucleotide
ggucgucuggcugggaggg

SEQ ID NO: 1389539 - RNA, 19 nt, Artificial Sequence
  Description of Artificial Sequence: Synthetic oligonucleotide
aggaccacgucuaugcaua

SEQ ID NO: 1389540 - RNA, 19 nt, Artificial Sequence
  Description of Artificial Sequence: Synthetic oligonucleotide
gcaauguacacaaauuccu

SEQ ID NO: 1389541 - RNA, 19 nt, Artificial Sequence
  Description of Artificial Sequence: Synthetic oligonucleotide
accgugggagucauggcug

SEQ ID NO: 1389542 - RNA, 19 nt, Artificial Sequence
  Description of Artificial Sequence: Synthetic oligonucleotide
augguucucuuuggcuggg

SEQ ID NO: 1389543 - RNA, 19 nt, Artificial Sequence
  Description of Artificial Sequence: Synthetic oligonucleotide
guagcgcuggcauuugacu

SEQ ID NO: 1389544 - RNA, 19 nt, Artificial Sequence
  Description of Artificial Sequence: Synthetic oligonucleotide
accgcuccugucugaauau

SEQ ID NO: 1389545 - RNA, 19 nt, Artificial Sequence
  Description of Artificial Sequence: Synthetic oligonucleotide
uggcugggaggguguauca

SEQ ID NO: 1389546 - RNA, 19 nt, Artificial Sequence
  Description of Artificial Sequence: Synthetic oligonucleotide
cguacugacccucugucug

SEQ ID NO: 1389547 - RNA, 19 nt, Artificial Sequence
  Description of Artificial Sequence: Synthetic oligonucleotide
ugcauguagcaagguuucu

SEQ ID NO: 1389548 - RNA, 19 nt, Artificial Sequence
  Description of Artificial Sequence: Synthetic oligonucleotide
ccgugguggguaaaggccc

SEQ ID NO: 1389549 - RNA, 19 nt, Artificial Sequence
  Description of Artificial Sequence: Synthetic oligonucleotide
gcaacugagugccagugua

SEQ ID NO: 1389550 - RNA, 19 nt, Artificial Sequence
  Description of Artificial Sequence: Synthetic oligonucleotide
ggucgucgugcccaggaug

SEQ ID NO: 1389551 - RNA, 19 nt, Artificial Sequence
  Description of Artificial Sequence: Synthetic oligonucleotide
agcaagccuugaagcgugc

SEQ ID NO: 1389552 - RNA, 19 nt, Artificial Sequence
  Description of Artificial Sequence: Synthetic oligonucleotide
gaaaacguacugacccucu

SEQ ID NO: 1389553 - RNA, 19 nt, Artificial Sequence
  Description of Artificial Sequence: Synthetic oligonucleotide
agcaggucgucuggcuggg

SEQ ID NO: 1389554 - RNA, 19 nt, Artificial Sequence
  Description of Artificial Sequence: Synthetic oligonucleotide
gaccacgucuaugcauaug

SEQ ID NO: 1389555 - RNA, 19 nt, Artificial Sequence
  Description of Artificial Sequence: Synthetic oligonucleotide
guccaaucagacacugauc

SEQ ID NO: 1389556 - RNA, 19 nt, Artificial Sequence
  Description of Artificial Sequence: Synthetic oligonucleotide
ucggucaccgugggaguca

SEQ ID NO: 1389557 - RNA, 19 nt, Artificial Sequence
  Description of Artificial Sequence: Synthetic oligonucleotide
cacccucacuacgaagccc

SEQ ID NO: 1389558 - RNA, 19 nt, Artificial Sequence
  Description of Artificial Sequence: Synthetic oligonucleotide
ucacugggccugaccuaug

SEQ ID NO: 1389559 - RNA, 19 nt, Artificial Sequence
  Description of Artificial Sequence: Synthetic oligonucleotide
gagugccacguggccaggg

SEQ ID NO: 1389560 - RNA, 19 nt, Artificial Sequence
  Description of Artificial Sequence: Synthetic oligonucleotide
gaucacugggccugaccua

SEQ ID NO: 1389561 - RNA, 19 nt, Artificial Sequence
  Description of Artificial Sequence: Synthetic oligonucleotide
uccccuggucaagcaagcc

SEQ ID NO: 1389562 - RNA, 19 nt, Artificial Sequence
  Description of Artificial Sequence: Synthetic oligonucleotide
cuaggaccacgucuaugca

SEQ ID NO: 1389563 - RNA, 19 nt, Artificial Sequence
  Description of Artificial Sequence: Synthetic oligonucleotide
cagaaaacguacugacccu

SEQ ID NO: 1389564 - RNA, 19 nt, Artificial Sequence
  Description of Artificial Sequence: Synthetic oligonucleotide
ccauccucggucacuuaag

SEQ ID NO: 1389565 - RNA, 19 nt, Artificial Sequence
  Description of Artificial Sequence: Synthetic oligonucleotide
gaaauucaggugagugaua

SEQ ID NO: 1389566 - RNA, 19 nt, Artificial Sequence
  Description of Artificial Sequence: Synthetic oligonucleotide
uggucgucgugcccaggau

SEQ ID NO: 1389567 - RNA, 19 nt, Artificial Sequence
  Description of Artificial Sequence: Synthetic oligonucleotide
agccuugaagcgugcggau

SEQ ID NO: 1389568 - RNA, 19 nt, Artificial Sequence
  Description of Artificial Sequence: Synthetic oligonucleotide
cuuucaguccuggaguccu

SEQ ID NO: 1389569 - RNA, 19 nt, Artificial Sequence
  Description of Artificial Sequence: Synthetic oligonucleotide
ccugaacguccaaugccag

SEQ ID NO: 1389570 - RNA, 19 nt, Artificial Sequence
  Description of Artificial Sequence: Synthetic oligonucleotide
cagcgcaccaagucagaga

SEQ ID NO: 1389571 - RNA, 19 nt, Artificial Sequence
  Description of Artificial Sequence: Synthetic oligonucleotide
cccugaacguccaaugcca

SEQ ID NO: 1389572 - RNA, 19 nt, Artificial Sequence
  Description of Artificial Sequence: Synthetic oligonucleotide
auaugccgcaccgcuccug

SEQ ID NO: 1389573 - RNA, 19 nt, Artificial Sequence
  Description of Artificial Sequence: Synthetic oligonucleotide
ccacgucuaugcauaugag

SEQ ID NO: 1389574 - RNA, 19 nt, Artificial Sequence
  Description of Artificial Sequence: Synthetic oligonucleotide
ugcuaucacuguggaguuc

SEQ ID NO: 1389575 - RNA, 19 nt, Artificial Sequence
  Description of Artificial Sequence: Synthetic oligonucleotide
gcuaucacuguggaguucu

SEQ ID NO: 1389576 - RNA, 19 nt, Artificial Sequence
  Description of Artificial Sequence: Synthetic oligonucleotide
caccgcuccugucugaaua

SEQ ID NO: 1389577 - RNA, 19 nt, Artificial Sequence
  Description of Artificial Sequence: Synthetic oligonucleotide
gggagaugacaagugucac

SEQ ID NO: 1389578 - RNA, 19 nt, Artificial Sequence
  Description of Artificial Sequence: Synthetic oligonucleotide
gcaagccuugaagcgugcg

SEQ ID NO: 1389579 - RNA, 19 nt, Artificial Sequence
  Description of Artificial Sequence: Synthetic oligonucleotide
cugggccugaccuauggau

SEQ ID NO: 1389580 - RNA, 19 nt, Artificial Sequence
  Description of Artificial Sequence: Synthetic oligonucleotide
augucucauguaggagaug

SEQ ID NO: 1389581 - RNA, 19 nt, Artificial Sequence
  Description of Artificial Sequence: Synthetic oligonucleotide
accaugccgugucuuugua

SEQ ID NO: 1389582 - RNA, 19 nt, Artificial Sequence
  Description of Artificial Sequence: Synthetic oligonucleotide
cucauuggccauggucguc

SEQ ID NO: 1389583 - RNA, 19 nt, Artificial Sequence
  Description of Artificial Sequence: Synthetic oligonucleotide
auccuaggaccacgucuau

SEQ ID NO: 1389584 - RNA, 19 nt, Artificial Sequence
  Description of Artificial Sequence: Synthetic oligonucleotide
gcaccguccugcauguagc

SEQ ID NO: 1389585 - RNA, 19 nt, Artificial Sequence
  Description of Artificial Sequence: Synthetic oligonucleotide
auucaagaucuuggcugau

SEQ ID NO: 1389586 - RNA, 19 nt, Artificial Sequence
  Description of Artificial Sequence: Synthetic oligonucleotide
agcgugcggaugguggccu

SEQ ID NO: 1389587 - RNA, 19 nt, Artificial Sequence
  Description of Artificial Sequence: Synthetic oligonucleotide
augccgcaccgcuccuguc

SEQ ID NO: 1389588 - RNA, 19 nt, Artificial Sequence
  Description of Artificial Sequence: Synthetic oligonucleotide
gugugugaucacugggccu

SEQ ID NO: 1389589 - RNA, 19 nt, Artificial Sequence
  Description of Artificial Sequence: Synthetic oligonucleotide
gcagcgcaccaagucagag

SEQ ID NO: 1389590 - RNA, 19 nt, Artificial Sequence
  Description of Artificial Sequence: Synthetic oligonucleotide
uucaucccacuggcaacau

SEQ ID NO: 1389591 - RNA, 19 nt, Artificial Sequence
  Description of Artificial Sequence: Synthetic oligonucleotide
caccguccugcauguagca

SEQ ID NO: 1389592 - RNA, 19 nt, Artificial Sequence
  Description of Artificial Sequence: Synthetic oligonucleotide
gauaugccgcaccgcuccu

SEQ ID NO: 1389593 - RNA, 19 nt, Artificial Sequence
  Description of Artificial Sequence: Synthetic oligonucleotide
gugccugagagugccacgu

SEQ ID NO: 1389594 - RNA, 19 nt, Artificial Sequence
  Description of Artificial Sequence: Synthetic oligonucleotide
ccugaccuauggauauguc

SEQ ID NO: 1389595 - RNA, 19 nt, Artificial Sequence
  Description of Artificial Sequence: Synthetic oligonucleotide
ugggacaagcuggcacuuu

SEQ ID NO: 1389596 - RNA, 19 nt, Artificial Sequence
  Description of Artificial Sequence: Synthetic oligonucleotide
gccuugaagcgugcggaug

SEQ ID NO: 1389597 - RNA, 19 nt, Artificial Sequence
  Description of Artificial Sequence: Synthetic oligonucleotide
gucucauguaggagaugaa

SEQ ID NO: 1389598 - RNA, 19 nt, Artificial Sequence
  Description of Artificial Sequence: Synthetic oligonucleotide
augucgaauucaagaucuu

SEQ ID NO: 1389599 - RNA, 19 nt, Artificial Sequence
  Description of Artificial Sequence: Synthetic oligonucleotide
accguccugcauguagcaa

SEQ ID NO: 1389600 - RNA, 19 nt, Artificial Sequence
  Description of Artificial Sequence: Synthetic oligonucleotide
ucgucgugcccaggaugcu

SEQ ID NO: 1389601 - RNA, 19 nt, Artificial Sequence
  Description of Artificial Sequence: Synthetic oligonucleotide
ccaccgugguggguaaagg

SEQ ID NO: 1389602 - RNA, 19 nt, Artificial Sequence
  Description of Artificial Sequence: Synthetic oligonucleotide
cacguggccagggcugguc

SEQ ID NO: 1389603 - RNA, 19 nt, Artificial Sequence
  Description of Artificial Sequence: Synthetic oligonucleotide
cucaugcagcgcaccaagu

SEQ ID NO: 1389604 - RNA, 19 nt, Artificial Sequence
  Description of Artificial Sequence: Synthetic oligonucleotide
caguagcgcuggcauuuga

SEQ ID NO: 1389605 - RNA, 19 nt, Artificial Sequence
  Description of Artificial Sequence: Synthetic oligonucleotide
gcgcagucucucauuggcc

SEQ ID NO: 1389606 - RNA, 19 nt, Artificial Sequence
  Description of Artificial Sequence: Synthetic oligonucleotide
caccaugccgugucuuugu

SEQ ID NO: 1389607 - RNA, 19 nt, Artificial Sequence
  Description of Artificial Sequence: Synthetic oligonucleotide
gccgcaccgcuccugucug

SEQ ID NO: 1389608 - RNA, 19 nt, Artificial Sequence
  Description of Artificial Sequence: Synthetic oligonucleotide
cccaccgugguggguaaag

SEQ ID NO: 1389609 - RNA, 19 nt, Artificial Sequence
  Description of Artificial Sequence: Synthetic oligonucleotide
gugccacguggccagggcu

SEQ ID NO: 1389610 - RNA, 19 nt, Artificial Sequence
  Description of Artificial Sequence: Synthetic oligonucleotide
ccaagucagagaugucgaa

SEQ ID NO: 1389611 - RNA, 19 nt, Artificial Sequence
  Description of Artificial Sequence: Synthetic oligonucleotide
gggccugaccuauggauau

SEQ ID NO: 1389612 - RNA, 19 nt, Artificial Sequence
  Description of Artificial Sequence: Synthetic oligonucleotide
ccauggucgucgugcccag

SEQ ID NO: 1389613 - RNA, 19 nt, Artificial Sequence
  Description of Artificial Sequence: Synthetic oligonucleotide
cgcaccaagucagagaugu

SEQ ID NO: 1389614 - RNA, 19 nt, Artificial Sequence
  Description of Artificial Sequence: Synthetic oligonucleotide
gagucaggacauagaggau

SEQ ID NO: 1389615 - RNA, 19 nt, Artificial Sequence
  Description of Artificial Sequence: Synthetic oligonucleotide
gugugaucacugggccuga

SEQ ID NO: 1389616 - RNA, 19 nt, Artificial Sequence
  Description of Artificial Sequence: Synthetic oligonucleotide
ggccugaccuauggauaug

SEQ ID NO: 1389617 - RNA, 19 nt, Artificial Sequence
  Description of Artificial Sequence: Synthetic oligonucleotide
ccucacuacgaagcccuuc

SEQ ID NO: 1389618 - RNA, 19 nt, Artificial Sequence
  Description of Artificial Sequence: Synthetic oligonucleotide
cuugaagcgugcggauggu

SEQ ID NO: 1389619 - RNA, 19 nt, Artificial Sequence
  Description of Artificial Sequence: Synthetic oligonucleotide
gcauguagcaagguuucuu

SEQ ID NO: 1389620 - RNA, 19 nt, Artificial Sequence
  Description of Artificial Sequence: Synthetic oligonucleotide
gccugaccuauggauaugu

SEQ ID NO: 1389621 - RNA, 19 nt, Artificial Sequence
  Description of Artificial Sequence: Synthetic oligonucleotide
cagugaaauucaggugagu

SEQ ID NO: 1389622 - RNA, 19 nt, Artificial Sequence
  Description of Artificial Sequence: Synthetic oligonucleotide
gccaguagcgcuggcauuu

SEQ ID NO: 1389623 - RNA, 19 nt, Artificial Sequence
  Description of Artificial Sequence: Synthetic oligonucleotide
ccaguagcgcuggcauuug

SEQ ID NO: 1389624 - RNA, 19 nt, Artificial Sequence
  Description of Artificial Sequence: Synthetic oligonucleotide
ccccuggucaagcaagccu

SEQ ID NO: 1389625 - RNA, 19 nt, Artificial Sequence
  Description of Artificial Sequence: Synthetic oligonucleotide
gucucucauuggccauggu

SEQ ID NO: 1389626 - RNA, 19 nt, Artificial Sequence
  Description of Artificial Sequence: Synthetic oligonucleotide
cgucgugcccaggaugcug

SEQ ID NO: 1389627 - RNA, 19 nt, Artificial Sequence
  Description of Artificial Sequence: Synthetic oligonucleotide
gcgugcggaugguggccug

SEQ ID NO: 1389628 - RNA, 19 nt, Artificial Sequence
  Description of Artificial Sequence: Synthetic oligonucleotide
gugguggguaaaggccccu

SEQ ID NO: 1389629 - RNA, 19 nt, Artificial Sequence
  Description of Artificial Sequence: Synthetic oligonucleotide
gcgcaccaagucagagaug

SEQ ID NO: 1389630 - RNA, 19 nt, Artificial Sequence
  Description of Artificial Sequence: Synthetic oligonucleotide
ggaccacgucuaugcauau

SEQ ID NO: 1389631 - RNA, 19 nt, Artificial Sequence
  Description of Artificial Sequence: Synthetic oligonucleotide
ccaguguaaugcugugaau

SEQ ID NO: 1389632 - RNA, 19 nt, Artificial Sequence
  Description of Artificial Sequence: Synthetic oligonucleotide
ccgcuccugucugaauauc

SEQ ID NO: 1389633 - RNA, 19 nt, Artificial Sequence
  Description of Artificial Sequence: Synthetic oligonucleotide
ggucaccgugggagucaug

SEQ ID NO: 1389634 - RNA, 19 nt, Artificial Sequence
  Description of Artificial Sequence: Synthetic oligonucleotide
ggcugggaggguguaucau

SEQ ID NO: 1389635 - RNA, 19 nt, Artificial Sequence
  Description of Artificial Sequence: Synthetic oligonucleotide
ggccaguagcgcuggcauu

SEQ ID NO: 1389636 - RNA, 19 nt, Artificial Sequence
  Description of Artificial Sequence: Synthetic oligonucleotide
gucgucuggcugggagggu

SEQ ID NO: 1389637 - RNA, 19 nt, Artificial Sequence
  Description of Artificial Sequence: Synthetic oligonucleotide
gagcaccguccugcaugua

SEQ ID NO: 1389638 - RNA, 19 nt, Artificial Sequence
  Description of Artificial Sequence: Synthetic oligonucleotide
cgugucuuuguagucucau

SEQ ID NO: 1389639 - RNA, 19 nt, Artificial Sequence
  Description of Artificial Sequence: Synthetic oligonucleotide
ggcuagcaaagaagccauu

SEQ ID NO: 1389640 - RNA, 19 nt, Artificial Sequence
  Description of Artificial Sequence: Synthetic oligonucleotide
gcgcuggcauuugacuuuu

SEQ ID NO: 1389641 - RNA, 19 nt, Artificial Sequence
  Description of Artificial Sequence: Synthetic oligonucleotide
gcaggucgucuggcuggga

SEQ ID NO: 1389642 - RNA, 19 nt, Artificial Sequence
  Description of Artificial Sequence: Synthetic oligonucleotide
ccaccucuugugucaucau

SEQ ID NO: 1389643 - RNA, 19 nt, Artificial Sequence
  Description of Artificial Sequence: Synthetic oligonucleotide
ccgcaccgcuccugucuga

SEQ ID NO: 1389644 - RNA, 19 nt, Artificial Sequence
  Description of Artificial Sequence: Synthetic oligonucleotide
cgcaccgcuccugucugaa

SEQ ID NO: 1389645 - RNA, 19 nt, Artificial Sequence
  Description of Artificial Sequence: Synthetic oligonucleotide
cccucacuacgaagcccuu

SEQ ID NO: 1389646 - RNA, 19 nt, Artificial Sequence
  Description of Artificial Sequence: Synthetic oligonucleotide
ccacguggccagggcuggu

SEQ ID NO: 1389647 - RNA, 19 nt, Artificial Sequence
  Description of Artificial Sequence: Synthetic oligonucleotide
uuuaaguuuacuuaugggu

SEQ ID NO: 1389648 - RNA, 19 nt, Artificial Sequence
  Description of Artificial Sequence: Synthetic oligonucleotide
uuuaaagucaaaccagucc

SEQ ID NO: 1389649 - RNA, 19 nt, Artificial Sequence
  Description of Artificial Sequence: Synthetic oligonucleotide
gaugucauaggauuuaaag

SEQ ID NO: 1389650 - RNA, 19 nt, Artificial Sequence
  Description of Artificial Sequence: Synthetic oligonucleotide
gauuaaaucggagugaccc

SEQ ID NO: 1389651 - RNA, 19 nt, Artificial Sequence
  Description of Artificial Sequence: Synthetic oligonucleotide
uacuuauggguucauaagg

SEQ ID NO: 1389652 - RNA, 19 nt, Artificial Sequence
  Description of Artificial Sequence: Synthetic oligonucleotide
ugucauaggauuuaaaguc

SEQ ID NO: 1389653 - RNA, 19 nt, Artificial Sequence
  Description of Artificial Sequence: Synthetic oligonucleotide
aagucaaauggaugaaugg

SEQ ID NO: 1389654 - RNA, 19 nt, Artificial Sequence
  Description of Artificial Sequence: Synthetic oligonucleotide
auagacaguuaguaguucc

SEQ ID NO: 1389655 - RNA, 19 nt, Artificial Sequence
  Description of Artificial Sequence: Synthetic oligonucleotide
acaguuaguaguuccaggg

SEQ ID NO: 1389656 - RNA, 19 nt, Artificial Sequence
  Description of Artificial Sequence: Synthetic oligonucleotide
auaggauuuaaagucaaac

SEQ ID NO: 1389657 - RNA, 19 nt, Artificial Sequence
  Description of Artificial Sequence: Synthetic oligonucleotide
uccguaauaggccagugag

SEQ ID NO: 1389658 - RNA, 19 nt, Artificial Sequence
  Description of Artificial Sequence: Synthetic oligonucleotide
agugugguggugcuuagcc

SEQ ID NO: 1389659 - RNA, 19 nt, Artificial Sequence
  Description of Artificial Sequence: Synthetic oligonucleotide
agaggauuaaaucggagug

SEQ ID NO: 1389660 - RNA, 19 nt, Artificial Sequence
  Description of Artificial Sequence: Synthetic oligonucleotide
uucauaaggguucacccag

SEQ ID NO: 1389661 - RNA, 19 nt, Artificial Sequence
  Description of Artificial Sequence: Synthetic oligonucleotide
cacagaggaaacuagcugg

SEQ ID NO: 1389662 - RNA, 19 nt, Artificial Sequence
  Description of Artificial Sequence: Synthetic oligonucleotide
aguggcgagcccuucaucc

SEQ ID NO: 1389663 - RNA, 19 nt, Artificial Sequence
  Description of Artificial Sequence: Synthetic oligonucleotide
gauggugacagugauaggc

SEQ ID NO: 1389664 - RNA, 19 nt, Artificial Sequence
  Description of Artificial Sequence: Synthetic oligonucleotide
uuaaguuuacuuauggguu

SEQ ID NO: 1389665 - RNA, 19 nt, Artificial Sequence
  Description of Artificial Sequence: Synthetic oligonucleotide
cuuuaaguuuacuuauggg

SEQ ID NO: 1389666 - RNA, 19 nt, Artificial Sequence
  Description of Artificial Sequence: Synthetic oligonucleotide
aagguuaucgagcccgagg

SEQ ID NO: 1389667 - RNA, 19 nt, Artificial Sequence
  Description of Artificial Sequence: Synthetic oligonucleotide
gagaagauuccguaauagg

SEQ ID NO: 1389668 - RNA, 19 nt, Artificial Sequence
  Description of Artificial Sequence: Synthetic oligonucleotide
uuacuuauggguucauaag

SEQ ID NO: 1389669 - RNA, 19 nt, Artificial Sequence
  Description of Artificial Sequence: Synthetic oligonucleotide
ugagccacgaagaagucca

SEQ ID NO: 1389670 - RNA, 19 nt, Artificial Sequence
  Description of Artificial Sequence: Synthetic oligonucleotide
cacccagaggauuaaaucg

SEQ ID NO: 1389671 - RNA, 19 nt, Artificial Sequence
  Description of Artificial Sequence: Synthetic oligonucleotide
ugcaaauggagauuucccc

SEQ ID NO: 1389672 - RNA, 19 nt, Artificial Sequence
  Description of Artificial Sequence: Synthetic oligonucleotide
gaagauuccguaauaggcc

SEQ ID NO: 1389673 - RNA, 19 nt, Artificial Sequence
  Description of Artificial Sequence: Synthetic oligonucleotide
cuguaggccggaaugaugg

SEQ ID NO: 1389674 - RNA, 19 nt, Artificial Sequence
  Description of Artificial Sequence: Synthetic oligonucleotide
uccaagguuaucgagcccg

SEQ ID NO: 1389675 - RNA, 19 nt, Artificial Sequence
  Description of Artificial Sequence: Synthetic oligonucleotide
augucauaggauuuaaagu

SEQ ID NO: 1389676 - RNA, 19 nt, Artificial Sequence
  Description of Artificial Sequence: Synthetic oligonucleotide
acuaugucccaucuguauc

SEQ ID NO: 1389677 - RNA, 19 nt, Artificial Sequence
  Description of Artificial Sequence: Synthetic oligonucleotide
uaugcugagucuaggauaa

SEQ ID NO: 1389678 - RNA, 19 nt, Artificial Sequence
  Description of Artificial Sequence: Synthetic oligonucleotide
ucaaauggaugaauggcgu

SEQ ID NO: 1389679 - RNA, 19 nt, Artificial Sequence
  Description of Artificial Sequence: Synthetic oligonucleotide
gaggaaacuagcugggugc

SEQ ID NO: 1389680 - RNA, 19 nt, Artificial Sequence
  Description of Artificial Sequence: Synthetic oligonucleotide
gaguucgugauccuggagc

SEQ ID NO: 1389681 - RNA, 19 nt, Artificial Sequence
  Description of Artificial Sequence: Synthetic oligonucleotide
guauccuucugccacauug

SEQ ID NO: 1389682 - RNA, 19 nt, Artificial Sequence
  Description of Artificial Sequence: Synthetic oligonucleotide
gucaaauggaugaauggcg

SEQ ID NO: 1389683 - RNA, 19 nt, Artificial Sequence
  Description of Artificial Sequence: Synthetic oligonucleotide
gaugaguucgugauccugg

SEQ ID NO: 1389684 - RNA, 19 nt, Artificial Sequence
  Description of Artificial Sequence: Synthetic oligonucleotide
uucaggacgaagucaaaug

SEQ ID NO: 1389685 - RNA, 19 nt, Artificial Sequence
  Description of Artificial Sequence: Synthetic oligonucleotide
aguuaguaguuccagggca

SEQ ID NO: 1389686 - RNA, 19 nt, Artificial Sequence
  Description of Artificial Sequence: Synthetic oligonucleotide
aggaugaugggucuuucuc

SEQ ID NO: 1389687 - RNA, 19 nt, Artificial Sequence
  Description of Artificial Sequence: Synthetic oligonucleotide
cuaugucccaucuguaucc

SEQ ID NO: 1389688 - RNA, 19 nt, Artificial Sequence
  Description of Artificial Sequence: Synthetic oligonucleotide
aauggaugaauggcguagg

SEQ ID NO: 1389689 - RNA, 19 nt, Artificial Sequence
  Description of Artificial Sequence: Synthetic oligonucleotide
gaauagugaagaugagacc

SEQ ID NO: 1389690 - RNA, 19 nt, Artificial Sequence
  Description of Artificial Sequence: Synthetic oligonucleotide
aggauuaaaucggagugac

SEQ ID NO: 1389691 - RNA, 19 nt, Artificial Sequence
  Description of Artificial Sequence: Synthetic oligonucleotide
ucuccugacacaguccucg

SEQ ID NO: 1389692 - RNA, 19 nt, Artificial Sequence
  Description of Artificial Sequence: Synthetic oligonucleotide
gaagaaguccagcuuggag

SEQ ID NO: 1389693 - RNA, 19 nt, Artificial Sequence
  Description of Artificial Sequence: Synthetic oligonucleotide
uaggauaagagagggagca

SEQ ID NO: 1389694 - RNA, 19 nt, Artificial Sequence
  Description of Artificial Sequence: Synthetic oligonucleotide
ucucacauacugcugguac

SEQ ID NO: 1389695 - RNA, 19 nt, Artificial Sequence
  Description of Artificial Sequence: Synthetic oligonucleotide
ucuuggaugucauaggauu

SEQ ID NO: 1389696 - RNA, 19 nt, Artificial Sequence
  Description of Artificial Sequence: Synthetic oligonucleotide
acuuauggguucauaaggg

SEQ ID NO: 1389697 - RNA, 19 nt, Artificial Sequence
  Description of Artificial Sequence: Synthetic oligonucleotide
auccgugguacuccuaagc

SEQ ID NO: 1389698 - RNA, 19 nt, Artificial Sequence
  Description of Artificial Sequence: Synthetic oligonucleotide
ucaccuggauaucuggugc

SEQ ID NO: 1389699 - RNA, 19 nt, Artificial Sequence
  Description of Artificial Sequence: Synthetic oligonucleotide
acagugauaggcucccagg

SEQ ID NO: 1389700 - RNA, 19 nt, Artificial Sequence
  Description of Artificial Sequence: Synthetic oligonucleotide
uaaguuuacuuauggguuc

SEQ ID NO: 1389701 - RNA, 19 nt, Artificial Sequence
  Description of Artificial Sequence: Synthetic oligonucleotide
agucuaggauaagagaggg

SEQ ID NO: 1389702 - RNA, 19 nt, Artificial Sequence
  Description of Artificial Sequence: Synthetic oligonucleotide
acagauguggacgugggag

SEQ ID NO: 1389703 - RNA, 19 nt, Artificial Sequence
  Description of Artificial Sequence: Synthetic oligonucleotide
aacuaugucccaucuguau

SEQ ID NO: 1389704 - RNA, 19 nt, Artificial Sequence
  Description of Artificial Sequence: Synthetic oligonucleotide
uaaagucaaaccaguccug

SEQ ID NO: 1389705 - RNA, 19 nt, Artificial Sequence
  Description of Artificial Sequence: Synthetic oligonucleotide
agaggaaacuagcugggug

SEQ ID NO: 1389706 - RNA, 19 nt, Artificial Sequence
  Description of Artificial Sequence: Synthetic oligonucleotide
gagucuaggauaagagagg

SEQ ID NO: 1389707 - RNA, 19 nt, Artificial Sequence
  Description of Artificial Sequence: Synthetic oligonucleotide
auggaugaauggcguaggc

SEQ ID NO: 1389708 - RNA, 19 nt, Artificial Sequence
  Description of Artificial Sequence: Synthetic oligonucleotide
cacuccaagguuaucgagc

SEQ ID NO: 1389709 - RNA, 19 nt, Artificial Sequence
  Description of Artificial Sequence: Synthetic oligonucleotide
aaucggagugaccccacug

SEQ ID NO: 1389710 - RNA, 19 nt, Artificial Sequence
  Description of Artificial Sequence: Synthetic oligonucleotide
uuaaaucggagugacccca

SEQ ID NO: 1389711 - RNA, 19 nt, Artificial Sequence
  Description of Artificial Sequence: Synthetic oligonucleotide
agguuaucgagcccgaggu

SEQ ID NO: 1389712 - RNA, 19 nt, Artificial Sequence
  Description of Artificial Sequence: Synthetic oligonucleotide
uuauggguucauaaggguu

SEQ ID NO: 1389713 - RNA, 19 nt, Artificial Sequence
  Description of Artificial Sequence: Synthetic oligonucleotide
uggaugaauggcguaggcg

SEQ ID NO: 1389714 - RNA, 19 nt, Artificial Sequence
  Description of Artificial Sequence: Synthetic oligonucleotide
auaucuggugcucucuuca

SEQ ID NO: 1389715 - RNA, 19 nt, Artificial Sequence
  Description of Artificial Sequence: Synthetic oligonucleotide
uccgugguacuccuaagca

SEQ ID NO: 1389716 - RNA, 19 nt, Artificial Sequence
  Description of Artificial Sequence: Synthetic oligonucleotide
cacgaagaaguccagcuug

SEQ ID NO: 1389717 - RNA, 19 nt, Artificial Sequence
  Description of Artificial Sequence: Synthetic oligonucleotide
guuaucgagcccgaggucc

SEQ ID NO: 1389718 - RNA, 19 nt, Artificial Sequence
  Description of Artificial Sequence: Synthetic oligonucleotide
agaaggggagauuggcccg

SEQ ID NO: 1389719 - RNA, 19 nt, Artificial Sequence
  Description of Artificial Sequence: Synthetic oligonucleotide
uaggccggaaugaugguga

SEQ ID NO: 1389720 - RNA, 19 nt, Artificial Sequence
  Description of Artificial Sequence: Synthetic oligonucleotide
ggaugaugggucuuucucg

SEQ ID NO: 1389721 - RNA, 19 nt, Artificial Sequence
  Description of Artificial Sequence: Synthetic oligonucleotide
auaaggguucacccagagg

SEQ ID NO: 1389722 - RNA, 19 nt, Artificial Sequence
  Description of Artificial Sequence: Synthetic oligonucleotide
cuaggauaagagagggagc

SEQ ID NO: 1389723 - RNA, 19 nt, Artificial Sequence
  Description of Artificial Sequence: Synthetic oligonucleotide
cuuaguuggccgaugcuuc

SEQ ID NO: 1389724 - RNA, 19 nt, Artificial Sequence
  Description of Artificial Sequence: Synthetic oligonucleotide
uacuccuaagcaccgugcc

SEQ ID NO: 1389725 - RNA, 19 nt, Artificial Sequence
  Description of Artificial Sequence: Synthetic oligonucleotide
ugucccaucuguauccuuc

SEQ ID NO: 1389726 - RNA, 19 nt, Artificial Sequence
  Description of Artificial Sequence: Synthetic oligonucleotide
ucgaugacuggauucugca

SEQ ID NO: 1389727 - RNA, 19 nt, Artificial Sequence
  Description of Artificial Sequence: Synthetic oligonucleotide
aguucgugauccuggagca

SEQ ID NO: 1389728 - RNA, 19 nt, Artificial Sequence
  Description of Artificial Sequence: Synthetic oligonucleotide
ucuguaggccggaaugaug

SEQ ID NO: 1389729 - RNA, 19 nt, Artificial Sequence
  Description of Artificial Sequence: Synthetic oligonucleotide
uauccuucugccacauugu

SEQ ID NO: 1389730 - RNA, 19 nt, Artificial Sequence
  Description of Artificial Sequence: Synthetic oligonucleotide
ccugaaguuagcaucuucc

SEQ ID NO: 1389731 - RNA, 19 nt, Artificial Sequence
  Description of Artificial Sequence: Synthetic oligonucleotide
gaagaugagaccacuggga

SEQ ID NO: 1389732 - RNA, 19 nt, Artificial Sequence
  Description of Artificial Sequence: Synthetic oligonucleotide
cacgaggugggacaggaag

SEQ ID NO: 1389733 - RNA, 19 nt, Artificial Sequence
  Description of Artificial Sequence: Synthetic oligonucleotide
acuaugcugagucuaggau

SEQ ID NO: 1389734 - RNA, 19 nt, Artificial Sequence
  Description of Artificial Sequence: Synthetic oligonucleotide
aagucaaaccaguccugca

SEQ ID NO: 1389735 - RNA, 19 nt, Artificial Sequence
  Description of Artificial Sequence: Synthetic oligonucleotide
aaccgcaggaagcucuuca

SEQ ID NO: 1389736 - RNA, 19 nt, Artificial Sequence
  Description of Artificial Sequence: Synthetic oligonucleotide
agucaaaccaguccugcaa

SEQ ID NO: 1389737 - RNA, 19 nt, Artificial Sequence
  Description of Artificial Sequence: Synthetic oligonucleotide
uaagcaccgugccauuccc

SEQ ID NO: 1389738 - RNA, 19 nt, Artificial Sequence
  Description of Artificial Sequence: Synthetic oligonucleotide
ucccuuguccgaauaguga

SEQ ID NO: 1389739 - RNA, 19 nt, Artificial Sequence
  Description of Artificial Sequence: Synthetic oligonucleotide
ucacuccaagguuaucgag

SEQ ID NO: 1389740 - RNA, 19 nt, Artificial Sequence
  Description of Artificial Sequence: Synthetic oligonucleotide
aaguuuacuuauggguuca

SEQ ID NO: 1389741 - RNA, 19 nt, Artificial Sequence
  Description of Artificial Sequence: Synthetic oligonucleotide
aguauagugugguggugcu

SEQ ID NO: 1389742 - RNA, 19 nt, Artificial Sequence
  Description of Artificial Sequence: Synthetic oligonucleotide
gaugagaccacugggaacu

SEQ ID NO: 1389743 - RNA, 19 nt, Artificial Sequence
  Description of Artificial Sequence: Synthetic oligonucleotide
cuaagcaccgugccauucc

SEQ ID NO: 1389744 - RNA, 19 nt, Artificial Sequence
  Description of Artificial Sequence: Synthetic oligonucleotide
ucgcuguugucauagcaac

SEQ ID NO: 1389745 - RNA, 19 nt, Artificial Sequence
  Description of Artificial Sequence: Synthetic oligonucleotide
uuccguaauaggccaguga

SEQ ID NO: 1389746 - RNA, 19 nt, Artificial Sequence
  Description of Artificial Sequence: Synthetic oligonucleotide
cucgaugacuggauucugc

SEQ ID NO: 1389747 - RNA, 19 nt, Artificial Sequence
  Description of Artificial Sequence: Synthetic oligonucleotide
ugcuucacgaggugggaca

SEQ ID NO: 1389748 - RNA, 19 nt, Artificial Sequence
  Description of Artificial Sequence: Synthetic oligonucleotide
uucggucacuccaagguua

SEQ ID NO: 1389749 - RNA, 19 nt, Artificial Sequence
  Description of Artificial Sequence: Synthetic oligonucleotide
aguuggccgaugcuucacg

SEQ ID NO: 1389750 - RNA, 19 nt, Artificial Sequence
  Description of Artificial Sequence: Synthetic oligonucleotide
ugagcaacuaugucccauc

SEQ ID NO: 1389751 - RNA, 19 nt, Artificial Sequence
  Description of Artificial Sequence: Synthetic oligonucleotide
uucucguuugagcugucuc

SEQ ID NO: 1389752 - RNA, 19 nt, Artificial Sequence
  Description of Artificial Sequence: Synthetic oligonucleotide
aguacuuuguccaguagau

SEQ ID NO: 1389753 - RNA, 19 nt, Artificial Sequence
  Description of Artificial Sequence: Synthetic oligonucleotide
caguuaguaguuccagggc

SEQ ID NO: 1389754 - RNA, 19 nt, Artificial Sequence
  Description of Artificial Sequence: Synthetic oligonucleotide
caguauagugugguggugc

SEQ ID NO: 1389755 - RNA, 19 nt, Artificial Sequence
  Description of Artificial Sequence: Synthetic oligonucleotide
ugaguucgugauccuggag

SEQ ID NO: 1389756 - RNA, 19 nt, Artificial Sequence
  Description of Artificial Sequence: Synthetic oligonucleotide
aaacuagcugggugcaaau

SEQ ID NO: 1389757 - RNA, 19 nt, Artificial Sequence
  Description of Artificial Sequence: Synthetic oligonucleotide
ugcugagucuaggauaaga

SEQ ID NO: 1389758 - RNA, 19 nt, Artificial Sequence
  Description of Artificial Sequence: Synthetic oligonucleotide
agacaguuaguaguuccag

SEQ ID NO: 1389759 - RNA, 19 nt, Artificial Sequence
  Description of Artificial Sequence: Synthetic oligonucleotide
uuaucgagcccgaggucca

SEQ ID NO: 1389760 - RNA, 19 nt, Artificial Sequence
  Description of Artificial Sequence: Synthetic oligonucleotide
ucauaaggguucacccaga

SEQ ID NO: 1389761 - RNA, 19 nt, Artificial Sequence
  Description of Artificial Sequence: Synthetic oligonucleotide
gacgugggagaagauuccg

SEQ ID NO: 1389762 - RNA, 19 nt, Artificial Sequence
  Description of Artificial Sequence: Synthetic oligonucleotide
aaaucggagugaccccacu

SEQ ID NO: 1389763 - RNA, 19 nt, Artificial Sequence
  Description of Artificial Sequence: Synthetic oligonucleotide
uucgugauccuggagcaac

SEQ ID NO: 1389764 - RNA, 19 nt, Artificial Sequence
  Description of Artificial Sequence: Synthetic oligonucleotide
ggugcaaauggagauuucc

SEQ ID NO: 1389765 - RNA, 19 nt, Artificial Sequence
  Description of Artificial Sequence: Synthetic oligonucleotide
gaggauuaaaucggaguga

SEQ ID NO: 1389766 - RNA, 19 nt, Artificial Sequence
  Description of Artificial Sequence: Synthetic oligonucleotide
gccggaaugauggugacag

SEQ ID NO: 1389767 - RNA, 19 nt, Artificial Sequence
  Description of Artificial Sequence: Synthetic oligonucleotide
acauccgugguacuccuaa

SEQ ID NO: 1389768 - RNA, 19 nt, Artificial Sequence
  Description of Artificial Sequence: Synthetic oligonucleotide
gugcaaauggagauuuccc

SEQ ID NO: 1389769 - RNA, 19 nt, Artificial Sequence
  Description of Artificial Sequence: Synthetic oligonucleotide
ugaccaaccgcaggaagcu

SEQ ID NO: 1389770 - RNA, 19 nt, Artificial Sequence
  Description of Artificial Sequence: Synthetic oligonucleotide
agcaaaaugcagagcucac

SEQ ID NO: 1389771 - RNA, 19 nt, Artificial Sequence
  Description of Artificial Sequence: Synthetic oligonucleotide
gaugaugggucuuucucgu

SEQ ID NO: 1389772 - RNA, 19 nt, Artificial Sequence
  Description of Artificial Sequence: Synthetic oligonucleotide
aguagccccggcuccggcg

SEQ ID NO: 1389773 - RNA, 19 nt, Artificial Sequence
  Description of Artificial Sequence: Synthetic oligonucleotide
gaugaauggcguaggcgug

SEQ ID NO: 1389774 - RNA, 19 nt, Artificial Sequence
  Description of Artificial Sequence: Synthetic oligonucleotide
cuaugcugagucuaggaua

SEQ ID NO: 1389775 - RNA, 19 nt, Artificial Sequence
  Description of Artificial Sequence: Synthetic oligonucleotide
uuggccgaugcuucacgag

SEQ ID NO: 1389776 - RNA, 19 nt, Artificial Sequence
  Description of Artificial Sequence: Synthetic oligonucleotide
agcaacuaugucccaucug

SEQ ID NO: 1389777 - RNA, 19 nt, Artificial Sequence
  Description of Artificial Sequence: Synthetic oligonucleotide
uggcgagcccuucauccag

SEQ ID NO: 1389778 - RNA, 19 nt, Artificial Sequence
  Description of Artificial Sequence: Synthetic oligonucleotide
gcugagucuaggauaagag

SEQ ID NO: 1389779 - RNA, 19 nt, Artificial Sequence
  Description of Artificial Sequence: Synthetic oligonucleotide
gggagcaaaaugcagagcu

SEQ ID NO: 1389780 - RNA, 19 nt, Artificial Sequence
  Description of Artificial Sequence: Synthetic oligonucleotide
gggucuuucucguuugagc

SEQ ID NO: 1389781 - RNA, 19 nt, Artificial Sequence
  Description of Artificial Sequence: Synthetic oligonucleotide
aauaggccagugagcaaug

SEQ ID NO: 1389782 - RNA, 19 nt, Artificial Sequence
  Description of Artificial Sequence: Synthetic oligonucleotide
uggugcuuagccucuuccu

SEQ ID NO: 1389783 - RNA, 19 nt, Artificial Sequence
  Description of Artificial Sequence: Synthetic oligonucleotide
ggugcuuagccucuuccug

SEQ ID NO: 1389784 - RNA, 19 nt, Artificial Sequence
  Description of Artificial Sequence: Synthetic oligonucleotide
acgaagaaguccagcuugg

SEQ ID NO: 1389785 - RNA, 19 nt, Artificial Sequence
  Description of Artificial Sequence: Synthetic oligonucleotide
ggaugaauggcguaggcgu

SEQ ID NO: 1389786 - RNA, 19 nt, Artificial Sequence
  Description of Artificial Sequence: Synthetic oligonucleotide
agggagcaaaaugcagagc

SEQ ID NO: 1389787 - RNA, 19 nt, Artificial Sequence
  Description of Artificial Sequence: Synthetic oligonucleotide
gaaacuagcugggugcaaa

SEQ ID NO: 1389788 - RNA, 19 nt, Artificial Sequence
  Description of Artificial Sequence: Synthetic oligonucleotide
augaguucgugauccugga

SEQ ID NO: 1389789 - RNA, 19 nt, Artificial Sequence
  Description of Artificial Sequence: Synthetic oligonucleotide
auaagagagggagcaaaau

SEQ ID NO: 1389790 - RNA, 19 nt, Artificial Sequence
  Description of Artificial Sequence: Synthetic oligonucleotide
ggugucgcuguugucauag

SEQ ID NO: 1389791 - RNA, 19 nt, Artificial Sequence
  Description of Artificial Sequence: Synthetic oligonucleotide
guaggcguggcucccacca

SEQ ID NO: 1389792 - RNA, 19 nt, Artificial Sequence
  Description of Artificial Sequence: Synthetic oligonucleotide
acuccuaagcaccgugcca

SEQ ID NO: 1389793 - RNA, 19 nt, Artificial Sequence
  Description of Artificial Sequence: Synthetic oligonucleotide
gguacuccuaagcaccgug

SEQ ID NO: 1389794 - RNA, 19 nt, Artificial Sequence
  Description of Artificial Sequence: Synthetic oligonucleotide
guuugagcugucuccugac

SEQ ID NO: 1389795 - RNA, 19 nt, Artificial Sequence
  Description of Artificial Sequence: Synthetic oligonucleotide
gcaacuaugucccaucugu

SEQ ID NO: 1389796 - RNA, 19 nt, Artificial Sequence
  Description of Artificial Sequence: Synthetic oligonucleotide
ccucaguauaguguggugg

SEQ ID NO: 1389797 - RNA, 19 nt, Artificial Sequence
  Description of Artificial Sequence: Synthetic oligonucleotide
gugauaggcucccaggucu

SEQ ID NO: 1389798 - RNA, 19 nt, Artificial Sequence
  Description of Artificial Sequence: Synthetic oligonucleotide
aucggggugucgcuguugu

SEQ ID NO: 1389799 - RNA, 19 nt, Artificial Sequence
  Description of Artificial Sequence: Synthetic oligonucleotide
accggguuccugaaaggac

SEQ ID NO: 1389800 - RNA, 19 nt, Artificial Sequence
  Description of Artificial Sequence: Synthetic oligonucleotide
ggcggauuuucucuuuaag

SEQ ID NO: 1389801 - RNA, 19 nt, Artificial Sequence
  Description of Artificial Sequence: Synthetic oligonucleotide
cagaggauuaaaucggagu

SEQ ID NO: 1389802 - RNA, 19 nt, Artificial Sequence
  Description of Artificial Sequence: Synthetic oligonucleotide
ugggugcaaauggagauuu

SEQ ID NO: 1389803 - RNA, 19 nt, Artificial Sequence
  Description of Artificial Sequence: Synthetic oligonucleotide
guagccccggcuccggcgg

SEQ ID NO: 1389804 - RNA, 19 nt, Artificial Sequence
  Description of Artificial Sequence: Synthetic oligonucleotide
augcuucacgaggugggac

SEQ ID NO: 1389805 - RNA, 19 nt, Artificial Sequence
  Description of Artificial Sequence: Synthetic oligonucleotide
aggcguggcucccaccauc

SEQ ID NO: 1389806 - RNA, 19 nt, Artificial Sequence
  Description of Artificial Sequence: Synthetic oligonucleotide
gcugccgugggccaccggg

SEQ ID NO: 1389807 - RNA, 19 nt, Artificial Sequence
  Description of Artificial Sequence: Synthetic oligonucleotide
caccgugccauucccgaag

SEQ ID NO: 1389808 - RNA, 19 nt, Artificial Sequence
  Description of Artificial Sequence: Synthetic oligonucleotide
ccaguguuugaccaaccgc

SEQ ID NO: 1389809 - RNA, 19 nt, Artificial Sequence
  Description of Artificial Sequence: Synthetic oligonucleotide
uggaugucauaggauuuaa

SEQ ID NO: 1389810 - RNA, 19 nt, Artificial Sequence
  Description of Artificial Sequence: Synthetic oligonucleotide
auaggccagugagcaaugg

SEQ ID NO: 1389811 - RNA, 19 nt, Artificial Sequence
  Description of Artificial Sequence: Synthetic oligonucleotide
gaccacugggaacuccuuc

SEQ ID NO: 1389812 - RNA, 19 nt, Artificial Sequence
  Description of Artificial Sequence: Synthetic oligonucleotide
gugguacuccuaagcaccg

SEQ ID NO: 1389813 - RNA, 19 nt, Artificial Sequence
  Description of Artificial Sequence: Synthetic oligonucleotide
gccaccggguuccugaaag

SEQ ID NO: 1389814 - RNA, 19 nt, Artificial Sequence
  Description of Artificial Sequence: Synthetic oligonucleotide
cauagacaguuaguaguuc

SEQ ID NO: 1389815 - RNA, 19 nt, Artificial Sequence
  Description of Artificial Sequence: Synthetic oligonucleotide
cuuauggguucauaagggu

SEQ ID NO: 1389816 - RNA, 19 nt, Artificial Sequence
  Description of Artificial Sequence: Synthetic oligonucleotide
ugaauggcguaggcguggc

SEQ ID NO: 1389817 - RNA, 19 nt, Artificial Sequence
  Description of Artificial Sequence: Synthetic oligonucleotide
aggccggaaugauggugac

SEQ ID NO: 1389818 - RNA, 19 nt, Artificial Sequence
  Description of Artificial Sequence: Synthetic oligonucleotide
ucggucacuccaagguuau

SEQ ID NO: 1389819 - RNA, 19 nt, Artificial Sequence
  Description of Artificial Sequence: Synthetic oligonucleotide
guacuccuaagcaccgugc

SEQ ID NO: 1389820 - RNA, 19 nt, Artificial Sequence
  Description of Artificial Sequence: Synthetic oligonucleotide
gugacacugucuuggaugu

SEQ ID NO: 1389821 - RNA, 19 nt, Artificial Sequence
  Description of Artificial Sequence: Synthetic oligonucleotide
ucguuugagcugucuccug

SEQ ID NO: 1389822 - RNA, 19 nt, Artificial Sequence
  Description of Artificial Sequence: Synthetic oligonucleotide
uaugucccaucuguauccu

SEQ ID NO: 1389823 - RNA, 19 nt, Artificial Sequence
  Description of Artificial Sequence: Synthetic oligonucleotide
uguaggccggaaugauggu

SEQ ID NO: 1389824 - RNA, 19 nt, Artificial Sequence
  Description of Artificial Sequence: Synthetic oligonucleotide
aagcaccgugccauucccg

SEQ ID NO: 1389825 - RNA, 19 nt, Artificial Sequence
  Description of Artificial Sequence: Synthetic oligonucleotide
cagauguggacgugggaga

SEQ ID NO: 1389826 - RNA, 19 nt, Artificial Sequence
  Description of Artificial Sequence: Synthetic oligonucleotide
ggguucauaaggguucacc

SEQ ID NO: 1389827 - RNA, 19 nt, Artificial Sequence
  Description of Artificial Sequence: Synthetic oligonucleotide
ugaguagccccggcuccgg

SEQ ID NO: 1389828 - RNA, 19 nt, Artificial Sequence
  Description of Artificial Sequence: Synthetic oligonucleotide
cagccucaguauagugugg

SEQ ID NO: 1389829 - RNA, 19 nt, Artificial Sequence
  Description of Artificial Sequence: Synthetic oligonucleotide
auuccguaauaggccagug

SEQ ID NO: 1389830 - RNA, 19 nt, Artificial Sequence
  Description of Artificial Sequence: Synthetic oligonucleotide
aggaaacuagcugggugca

SEQ ID NO: 1389831 - RNA, 19 nt, Artificial Sequence
  Description of Artificial Sequence: Synthetic oligonucleotide
uuaguaguuccagggcaua

SEQ ID NO: 1389832 - RNA, 19 nt, Artificial Sequence
  Description of Artificial Sequence: Synthetic oligonucleotide
ggggagauuggcccggggc

SEQ ID NO: 1389833 - RNA, 19 nt, Artificial Sequence
  Description of Artificial Sequence: Synthetic oligonucleotide
guuggccgaugcuucacga

SEQ ID NO: 1389834 - RNA, 19 nt, Artificial Sequence
  Description of Artificial Sequence: Synthetic oligonucleotide
accaaccgcaggaagcucu

SEQ ID NO: 1389835 - RNA, 19 nt, Artificial Sequence
  Description of Artificial Sequence: Synthetic oligonucleotide
cccaugcauagacaguuag

SEQ ID NO: 1389836 - RNA, 19 nt, Artificial Sequence
  Description of Artificial Sequence: Synthetic oligonucleotide
agauuccguaauaggccag

SEQ ID NO: 1389837 - RNA, 19 nt, Artificial Sequence
  Description of Artificial Sequence: Synthetic oligonucleotide
uucagcuuaguuggccgau

SEQ ID NO: 1389838 - RNA, 19 nt, Artificial Sequence
  Description of Artificial Sequence: Synthetic oligonucleotide
ccagaggauuaaaucggag

SEQ ID NO: 1389839 - RNA, 19 nt, Artificial Sequence
  Description of Artificial Sequence: Synthetic oligonucleotide
gcaacaguccuguuucaga

SEQ ID NO: 1389840 - RNA, 19 nt, Artificial Sequence
  Description of Artificial Sequence: Synthetic oligonucleotide
uuuccacucucuggucggc

SEQ ID NO: 1389841 - RNA, 19 nt, Artificial Sequence
  Description of Artificial Sequence: Synthetic oligonucleotide
gucgcuguugucauagcaa

SEQ ID NO: 1389842 - RNA, 19 nt, Artificial Sequence
  Description of Artificial Sequence: Synthetic oligonucleotide
ucgagcccgagguccagaa

SEQ ID NO: 1389843 - RNA, 19 nt, Artificial Sequence
  Description of Artificial Sequence: Synthetic oligonucleotide
ggauaagagagggagcaaa

SEQ ID NO: 1389844 - RNA, 19 nt, Artificial Sequence
  Description of Artificial Sequence: Synthetic oligonucleotide
caaauggaugaauggcgua

SEQ ID NO: 1389845 - RNA, 19 nt, Artificial Sequence
  Description of Artificial Sequence: Synthetic oligonucleotide
ucccaugcauagacaguua

SEQ ID NO: 1389846 - RNA, 19 nt, Artificial Sequence
  Description of Artificial Sequence: Synthetic oligonucleotide
caacuccaucacaguggcg

SEQ ID NO: 1389847 - RNA, 19 nt, Artificial Sequence
  Description of Artificial Sequence: Synthetic oligonucleotide
cguaauaggccagugagca

SEQ ID NO: 1389848 - RNA, 19 nt, Artificial Sequence
  Description of Artificial Sequence: Synthetic oligonucleotide
gcggauuuucucuuuaagu

SEQ ID NO: 1389849 - RNA, 19 nt, Artificial Sequence
  Description of Artificial Sequence: Synthetic oligonucleotide
ccguaauaggccagugagc

SEQ ID NO: 1389850 - RNA, 19 nt, Artificial Sequence
  Description of Artificial Sequence: Synthetic oligonucleotide
augggucuuucucguuuga

SEQ ID NO: 1389851 - RNA, 19 nt, Artificial Sequence
  Description of Artificial Sequence: Synthetic oligonucleotide
ccauggaaguucuccugcc

SEQ ID NO: 1389852 - RNA, 19 nt, Artificial Sequence
  Description of Artificial Sequence: Synthetic oligonucleotide
agacgcugcaggccugagu

SEQ ID NO: 1389853 - RNA, 19 nt, Artificial Sequence
  Description of Artificial Sequence: Synthetic oligonucleotide
cuccaagguuaucgagccc

SEQ ID NO: 1389854 - RNA, 19 nt, Artificial Sequence
  Description of Artificial Sequence: Synthetic oligonucleotide
uguggacgugggagaagau

SEQ ID NO: 1389855 - RNA, 19 nt, Artificial Sequence
  Description of Artificial Sequence: Synthetic oligonucleotide
gagcaacuaugucccaucu

SEQ ID NO: 1389856 - RNA, 19 nt, Artificial Sequence
  Description of Artificial Sequence: Synthetic oligonucleotide
gauuccguaauaggccagu

SEQ ID NO: 1389857 - RNA, 19 nt, Artificial Sequence
  Description of Artificial Sequence: Synthetic oligonucleotide
cacaucccgggccagucca

SEQ ID NO: 1389858 - RNA, 19 nt, Artificial Sequence
  Description of Artificial Sequence: Synthetic oligonucleotide
ggauuaaaucggagugacc

SEQ ID NO: 1389859 - RNA, 19 nt, Artificial Sequence
  Description of Artificial Sequence: Synthetic oligonucleotide
cuuggaugucauaggauuu

SEQ ID NO: 1389860 - RNA, 19 nt, Artificial Sequence
  Description of Artificial Sequence: Synthetic oligonucleotide
cuucacgaggugggacagg

SEQ ID NO: 1389861 - RNA, 19 nt, Artificial Sequence
  Description of Artificial Sequence: Synthetic oligonucleotide
ccugaguagccccggcucc

SEQ ID NO: 1389862 - RNA, 19 nt, Artificial Sequence
  Description of Artificial Sequence: Synthetic oligonucleotide
caucccgggccaguccacg

SEQ ID NO: 1389863 - RNA, 19 nt, Artificial Sequence
  Description of Artificial Sequence: Synthetic oligonucleotide
uaucgagcccgagguccag

SEQ ID NO: 1389864 - RNA, 19 nt, Artificial Sequence
  Description of Artificial Sequence: Synthetic oligonucleotide
cggaaugauggugacagug

SEQ ID NO: 1389865 - RNA, 19 nt, Artificial Sequence
  Description of Artificial Sequence: Synthetic oligonucleotide
guuuacuuauggguucaua

SEQ ID NO: 1389866 - RNA, 19 nt, Artificial Sequence
  Description of Artificial Sequence: Synthetic oligonucleotide
augagaccacugggaacuc

SEQ ID NO: 1389867 - RNA, 19 nt, Artificial Sequence
  Description of Artificial Sequence: Synthetic oligonucleotide
ccgugguacuccuaagcac

SEQ ID NO: 1389868 - RNA, 19 nt, Artificial Sequence
  Description of Artificial Sequence: Synthetic oligonucleotide
guggcgagcccuucaucca

SEQ ID NO: 1389869 - RNA, 19 nt, Artificial Sequence
  Description of Artificial Sequence: Synthetic oligonucleotide
gaucggggugucgcuguug

SEQ ID NO: 1389870 - RNA, 19 nt, Artificial Sequence
  Description of Artificial Sequence: Synthetic oligonucleotide
uguauccuucugccacauu

SEQ ID NO: 1389871 - RNA, 19 nt, Artificial Sequence
  Description of Artificial Sequence: Synthetic oligonucleotide
gcaaaaugcagagcucaca

SEQ ID NO: 1389872 - RNA, 19 nt, Artificial Sequence
  Description of Artificial Sequence: Synthetic oligonucleotide
guuaguaguuccagggcau

SEQ ID NO: 1389873 - RNA, 19 nt, Artificial Sequence
  Description of Artificial Sequence: Synthetic oligonucleotide
caacuaugucccaucugua

SEQ ID NO: 1389874 - RNA, 19 nt, Artificial Sequence
  Description of Artificial Sequence: Synthetic oligonucleotide
acgugggagaagauuccgu

SEQ ID NO: 1389875 - RNA, 19 nt, Artificial Sequence
  Description of Artificial Sequence: Synthetic oligonucleotide
guucaggacgaagucaaau

SEQ ID NO: 1389876 - RNA, 19 nt, Artificial Sequence
  Description of Artificial Sequence: Synthetic oligonucleotide
uuccacucucuggucggcu

SEQ ID NO: 1389877 - RNA, 19 nt, Artificial Sequence
  Description of Artificial Sequence: Synthetic oligonucleotide
aggauaagagagggagcaa

SEQ ID NO: 1389878 - RNA, 19 nt, Artificial Sequence
  Description of Artificial Sequence: Synthetic oligonucleotide
augaugggucuuucucguu

SEQ ID NO: 1389879 - RNA, 19 nt, Artificial Sequence
  Description of Artificial Sequence: Synthetic oligonucleotide
gucuaggauaagagaggga

SEQ ID NO: 1389880 - RNA, 19 nt, Artificial Sequence
  Description of Artificial Sequence: Synthetic oligonucleotide
gugucgcuguugucauagc

SEQ ID NO: 1389881 - RNA, 19 nt, Artificial Sequence
  Description of Artificial Sequence: Synthetic oligonucleotide
cagggcauagaaggggaga

SEQ ID NO: 1389882 - RNA, 19 nt, Artificial Sequence
  Description of Artificial Sequence: Synthetic oligonucleotide
ccggguuccugaaaggaca

SEQ ID NO: 1389883 - RNA, 19 nt, Artificial Sequence
  Description of Artificial Sequence: Synthetic oligonucleotide
cuuggcaauagaacaucuu

SEQ ID NO: 1389884 - RNA, 19 nt, Artificial Sequence
  Description of Artificial Sequence: Synthetic oligonucleotide
ggauucugcaguguguagu

SEQ ID NO: 1389885 - RNA, 19 nt, Artificial Sequence
  Description of Artificial Sequence: Synthetic oligonucleotide
cauuguggguggggucugc

SEQ ID NO: 1389886 - RNA, 19 nt, Artificial Sequence
  Description of Artificial Sequence: Synthetic oligonucleotide
cuuucucguuugagcuguc

SEQ ID NO: 1389887 - RNA, 19 nt, Artificial Sequence
  Description of Artificial Sequence: Synthetic oligonucleotide
gguuaucgagcccgagguc

SEQ ID NO: 1389888 - RNA, 19 nt, Artificial Sequence
  Description of Artificial Sequence: Synthetic oligonucleotide
gcuucacgaggugggacag

SEQ ID NO: 1389889 - RNA, 19 nt, Artificial Sequence
  Description of Artificial Sequence: Synthetic oligonucleotide
uaggcguggcucccaccau

SEQ ID NO: 1389890 - RNA, 19 nt, Artificial Sequence
  Description of Artificial Sequence: Synthetic oligonucleotide
cccuuguccgaauagugaa

SEQ ID NO: 1389891 - RNA, 19 nt, Artificial Sequence
  Description of Artificial Sequence: Synthetic oligonucleotide
caccggguuccugaaagga

SEQ ID NO: 1389892 - RNA, 19 nt, Artificial Sequence
  Description of Artificial Sequence: Synthetic oligonucleotide
gguuggcccgcugagcaac

SEQ ID NO: 1389893 - RNA, 19 nt, Artificial Sequence
  Description of Artificial Sequence: Synthetic oligonucleotide
acaucccgggccaguccac

SEQ ID NO: 1389894 - RNA, 19 nt, Artificial Sequence
  Description of Artificial Sequence: Synthetic oligonucleotide
uccggcggauuuucucuuu

SEQ ID NO: 1389895 - RNA, 19 nt, Artificial Sequence
  Description of Artificial Sequence: Synthetic oligonucleotide
gccugaguagccccggcuc

SEQ ID NO: 1389896 - RNA, 19 nt, Artificial Sequence
  Description of Artificial Sequence: Synthetic oligonucleotide
agccccgccugucuucaau

SEQ ID NO: 1389897 - RNA, 19 nt, Artificial Sequence
  Description of Artificial Sequence: Synthetic oligonucleotide
ggagauuggcccggggcac

SEQ ID NO: 1389898 - RNA, 19 nt, Artificial Sequence
  Description of Artificial Sequence: Synthetic oligonucleotide
agcccgagguccagaaggu

SEQ ID NO: 1389899 - RNA, 19 nt, Artificial Sequence
  Description of Artificial Sequence: Synthetic oligonucleotide
ucccgggccaguccacguu

SEQ ID NO: 1389900 - RNA, 19 nt, Artificial Sequence
  Description of Artificial Sequence: Synthetic oligonucleotide
ccuucggucacuccaaggu

SEQ ID NO: 1389901 - RNA, 19 nt, Artificial Sequence
  Description of Artificial Sequence: Synthetic oligonucleotide
caucacaguggcgagcccu

SEQ ID NO: 1389902 - RNA, 19 nt, Artificial Sequence
  Description of Artificial Sequence: Synthetic oligonucleotide
agcccuucauccagccuga

SEQ ID NO: 1389903 - RNA, 19 nt, Artificial Sequence
  Description of Artificial Sequence: Synthetic oligonucleotide
cuccuaagcaccgugccau

SEQ ID NO: 1389904 - RNA, 19 nt, Artificial Sequence
  Description of Artificial Sequence: Synthetic oligonucleotide
gauuggcccggggcacuug

SEQ ID NO: 1389905 - RNA, 19 nt, Artificial Sequence
  Description of Artificial Sequence: Synthetic oligonucleotide
uggcguaggcguggcuccc

SEQ ID NO: 1389906 - RNA, 19 nt, Artificial Sequence
  Description of Artificial Sequence: Synthetic oligonucleotide
ggcccgcugagcaacuaug

SEQ ID NO: 1389907 - RNA, 19 nt, Artificial Sequence
  Description of Artificial Sequence: Synthetic oligonucleotide
caccuggauaucuggugcu

SEQ ID NO: 1389908 - RNA, 19 nt, Artificial Sequence
  Description of Artificial Sequence: Synthetic oligonucleotide
gaccaaccgcaggaagcuc

SEQ ID NO: 1389909 - RNA, 19 nt, Artificial Sequence
  Description of Artificial Sequence: Synthetic oligonucleotide
gggcacuuguuucucacau

SEQ ID NO: 1389910 - RNA, 19 nt, Artificial Sequence
  Description of Artificial Sequence: Synthetic oligonucleotide
gcgagcccuucauccagcc

SEQ ID NO: 1389911 - RNA, 19 nt, Artificial Sequence
  Description of Artificial Sequence: Synthetic oligonucleotide
cacggcccuggaacuccag

SEQ ID NO: 1389912 - RNA, 19 nt, Artificial Sequence
  Description of Artificial Sequence: Synthetic oligonucleotide
ggaugucauaggauuuaaa

SEQ ID NO: 1389913 - RNA, 19 nt, Artificial Sequence
  Description of Artificial Sequence: Synthetic oligonucleotide
aucgagcccgagguccaga

SEQ ID NO: 1389914 - RNA, 19 nt, Artificial Sequence
  Description of Artificial Sequence: Synthetic oligonucleotide
gcuccggcggauuuucucu

SEQ ID NO: 1389915 - RNA, 19 nt, Artificial Sequence
  Description of Artificial Sequence: Synthetic oligonucleotide
cuucggucacuccaagguu

SEQ ID NO: 1389916 - RNA, 19 nt, Artificial Sequence
  Description of Artificial Sequence: Synthetic oligonucleotide
cccgcugagcaacuauguc

SEQ ID NO: 1389917 - RNA, 19 nt, Artificial Sequence
  Description of Artificial Sequence: Synthetic oligonucleotide
uuggcccggggcacuuguu

SEQ ID NO: 1389918 - RNA, 19 nt, Artificial Sequence
  Description of Artificial Sequence: Synthetic oligonucleotide
gaauggcguaggcguggcu

SEQ ID NO: 1389919 - RNA, 19 nt, Artificial Sequence
  Description of Artificial Sequence: Synthetic oligonucleotide
ggguucacccagaggauua

SEQ ID NO: 1389920 - RNA, 19 nt, Artificial Sequence
  Description of Artificial Sequence: Synthetic oligonucleotide
aagccccgccugucuucaa

SEQ ID NO: 1389921 - RNA, 19 nt, Artificial Sequence
  Description of Artificial Sequence: Synthetic oligonucleotide
guucgugauccuggagcaa

SEQ ID NO: 1389922 - RNA, 19 nt, Artificial Sequence
  Description of Artificial Sequence: Synthetic oligonucleotide
ggcgagcccuucauccagc

SEQ ID NO: 1389923 - RNA, 19 nt, Artificial Sequence
  Description of Artificial Sequence: Synthetic oligonucleotide
ggcuuggaaagccccgccu

SEQ ID NO: 1389924 - RNA, 19 nt, Artificial Sequence
  Description of Artificial Sequence: Synthetic oligonucleotide
gagauuggcccggggcacu

SEQ ID NO: 1389925 - RNA, 19 nt, Artificial Sequence
  Description of Artificial Sequence: Synthetic oligonucleotide
cccgagguccagaaggucu

SEQ ID NO: 1389926 - RNA, 19 nt, Artificial Sequence
  Description of Artificial Sequence: Synthetic oligonucleotide
gccccgccugucuucaauc

SEQ ID NO: 1389927 - RNA, 19 nt, Artificial Sequence
  Description of Artificial Sequence: Synthetic oligonucleotide
cagacgcugcaggccugag

SEQ ID NO: 1389928 - RNA, 19 nt, Artificial Sequence
  Description of Artificial Sequence: Synthetic oligonucleotide
ccaagguuaucgagcccga

SEQ ID NO: 1389929 - RNA, 19 nt, Artificial Sequence
  Description of Artificial Sequence: Synthetic oligonucleotide
agaccacugggaacuccuu

SEQ ID NO: 1389930 - RNA, 19 nt, Artificial Sequence
  Description of Artificial Sequence: Synthetic oligonucleotide
gguucacccagaggauuaa

SEQ ID NO: 1389931 - RNA, 19 nt, Artificial Sequence
  Description of Artificial Sequence: Synthetic oligonucleotide
cucuguaggccggaaugau

SEQ ID NO: 1389932 - RNA, 19 nt, Artificial Sequence
  Description of Artificial Sequence: Synthetic oligonucleotide
gugguggugcuuagccucu

SEQ ID NO: 1389933 - RNA, 19 nt, Artificial Sequence
  Description of Artificial Sequence: Synthetic oligonucleotide
ggaaacuagcugggugcaa

SEQ ID NO: 1389934 - RNA, 19 nt, Artificial Sequence
  Description of Artificial Sequence: Synthetic oligonucleotide
ugguggugcuuagccucuu

SEQ ID NO: 1389935 - RNA, 19 nt, Artificial Sequence
  Description of Artificial Sequence: Synthetic oligonucleotide
gggaucggggugucgcugu

SEQ ID NO: 1389936 - RNA, 19 nt, Artificial Sequence
  Description of Artificial Sequence: Synthetic oligonucleotide
gcuggggaucggggugucg

SEQ ID NO: 1389937 - RNA, 19 nt, Artificial Sequence
  Description of Artificial Sequence: Synthetic oligonucleotide
cccgggccaguccacguuc

SEQ ID NO: 1389938 - RNA, 19 nt, Artificial Sequence
  Description of Artificial Sequence: Synthetic oligonucleotide
gcguaggcguggcucccac

SEQ ID NO: 1389939 - RNA, 19 nt, Artificial Sequence
  Description of Artificial Sequence: Synthetic oligonucleotide
cugggugcaaauggagauu

SEQ ID NO: 1389940 - RNA, 19 nt, Artificial Sequence
  Description of Artificial Sequence: Synthetic oligonucleotide
guauagugugguggugcuu

SEQ ID NO: 1389941 - RNA, 19 nt, Artificial Sequence
  Description of Artificial Sequence: Synthetic oligonucleotide
gccgugggccaccggguuc

SEQ ID NO: 1389942 - RNA, 19 nt, Artificial Sequence
  Description of Artificial Sequence: Synthetic oligonucleotide
cguaggcguggcucccacc

SEQ ID NO: 1389943 - RNA, 19 nt, Artificial Sequence
  Description of Artificial Sequence: Synthetic oligonucleotide
ggccugaguagccccggcu

SEQ ID NO: 1389944 - RNA, 19 nt, Artificial Sequence
  Description of Artificial Sequence: Synthetic oligonucleotide
ggaacgccaccagcuccac

SEQ ID NO: 1389945 - RNA, 19 nt, Artificial Sequence
  Description of Artificial Sequence: Synthetic oligonucleotide
ggccggaaugauggugaca

SEQ ID NO: 1389946 - RNA, 19 nt, Artificial Sequence
  Description of Artificial Sequence: Synthetic oligonucleotide
gcaccgugccauucccgaa

SEQ ID NO: 1389947 - RNA, 19 nt, Artificial Sequence
  Description of Artificial Sequence: Synthetic oligonucleotide
cuccggcggauuuucucuu

SEQ ID NO: 1389948 - RNA, 19 nt, Artificial Sequence
  Description of Artificial Sequence: Synthetic oligonucleotide
ccggcuccggcggauuuuc

SEQ ID NO: 1389949 - RNA, 19 nt, Artificial Sequence
  Description of Artificial Sequence: Synthetic oligonucleotide
gcccgcugagcaacuaugu

SEQ ID NO: 1389950 - RNA, 19 nt, Artificial Sequence
  Description of Artificial Sequence: Synthetic oligonucleotide
cgcacaucccgggccaguc

SEQ ID NO: 1389951 - RNA, 19 nt, Artificial Sequence
  Description of Artificial Sequence: Synthetic oligonucleotide
cccggggcacuuguuucuc

SEQ ID NO: 1389952 - RNA, 19 nt, Artificial Sequence
  Description of Artificial Sequence: Synthetic oligonucleotide
ccggggcacuuguuucuca

SEQ ID NO: 1389953 - RNA, 19 nt, Artificial Sequence
  Description of Artificial Sequence: Synthetic oligonucleotide
gggugucgcuguugucaua

SEQ ID NO: 1389954 - RNA, 19 nt, Artificial Sequence
  Description of Artificial Sequence: Synthetic oligonucleotide
ccgagguccagaaggucuu

SEQ ID NO: 1389955 - RNA, 19 nt, Artificial Sequence
  Description of Artificial Sequence: Synthetic oligonucleotide
gggcauagaaggggagauu

SEQ ID NO: 1389956 - RNA, 19 nt, Artificial Sequence
  Description of Artificial Sequence: Synthetic oligonucleotide
ggaucggggugucgcuguu

SEQ ID NO: 1389957 - RNA, 19 nt, Artificial Sequence
  Description of Artificial Sequence: Synthetic oligonucleotide
ccggaaugauggugacagu

SEQ ID NO: 1389958 - RNA, 19 nt, Artificial Sequence
  Description of Artificial Sequence: Synthetic oligonucleotide
ccgggccaguccacguucu

SEQ ID NO: 1389959 - RNA, 19 nt, Artificial Sequence
  Description of Artificial Sequence: Synthetic oligonucleotide
cggucacuccaagguuauc

SEQ ID NO: 1389960 - RNA, 19 nt, Artificial Sequence
  Description of Artificial Sequence: Synthetic oligonucleotide
cccggcuccggcggauuuu

SEQ ID NO: 1389961 - RNA, 19 nt, Artificial Sequence
  Description of Artificial Sequence: Synthetic oligonucleotide
ccccggcuccggcggauuu

SEQ ID NO: 1389962 - RNA, 19 nt, Artificial Sequence
  Description of Artificial Sequence: Synthetic oligonucleotide
cggcuccggcggauuuucu

SEQ ID NO: 1389963 - RNA, 19 nt, Artificial Sequence
  Description of Artificial Sequence: Synthetic oligonucleotide
uuucauuugaccuagaucg

SEQ ID NO: 1389964 - RNA, 19 nt, Artificial Sequence
  Description of Artificial Sequence: Synthetic oligonucleotide
aaucuaauugcacacaaac

SEQ ID NO: 1389965 - RNA, 19 nt, Artificial Sequence
  Description of Artificial Sequence: Synthetic oligonucleotide
aauucauucacuuaaucca

SEQ ID NO: 1389966 - RNA, 19 nt, Artificial Sequence
  Description of Artificial Sequence: Synthetic oligonucleotide
auaagaacaacucuaacag

SEQ ID NO: 1389967 - RNA, 19 nt, Artificial Sequence
  Description of Artificial Sequence: Synthetic oligonucleotide
guaaccaaaacuuuaaucc

SEQ ID NO: 1389968 - RNA, 19 nt, Artificial Sequence
  Description of Artificial Sequence: Synthetic oligonucleotide
uccauaauagccaaaagca

SEQ ID NO: 1389969 - RNA, 19 nt, Artificial Sequence
  Description of Artificial Sequence: Synthetic oligonucleotide
uaaacaacaauuuguaacc

SEQ ID NO: 1389970 - RNA, 19 nt, Artificial Sequence
  Description of Artificial Sequence: Synthetic oligonucleotide
auaaaagccacuuucauga

SEQ ID NO: 1389971 - RNA, 19 nt, Artificial Sequence
  Description of Artificial Sequence: Synthetic oligonucleotide
aaugcaugccuccauauuc

SEQ ID NO: 1389972 - RNA, 19 nt, Artificial Sequence
  Description of Artificial Sequence: Synthetic oligonucleotide
uuauacuuggacuugauac

SEQ ID NO: 1389973 - RNA, 19 nt, Artificial Sequence
  Description of Artificial Sequence: Synthetic oligonucleotide
ucuaauugcacacaaacaa

SEQ ID NO: 1389974 - RNA, 19 nt, Artificial Sequence
  Description of Artificial Sequence: Synthetic oligonucleotide
acaaucugaaaacaacucc

SEQ ID NO: 1389975 - RNA, 19 nt, Artificial Sequence
  Description of Artificial Sequence: Synthetic oligonucleotide
agauuaugaagucucaaac

SEQ ID NO: 1389976 - RNA, 19 nt, Artificial Sequence
  Description of Artificial Sequence: Synthetic oligonucleotide
ucaugauggauuaauuugg

SEQ ID NO: 1389977 - RNA, 19 nt, Artificial Sequence
  Description of Artificial Sequence: Synthetic oligonucleotide
acaccuuacaaucuaaugg

SEQ ID NO: 1389978 - RNA, 19 nt, Artificial Sequence
  Description of Artificial Sequence: Synthetic oligonucleotide
uacuacacaauuaugcuag

SEQ ID NO: 1389979 - RNA, 19 nt, Artificial Sequence
  Description of Artificial Sequence: Synthetic oligonucleotide
uuauuaauccaaaagcacu

SEQ ID NO: 1389980 - RNA, 19 nt, Artificial Sequence
  Description of Artificial Sequence: Synthetic oligonucleotide
ucaacgaaagcaaagccag

SEQ ID NO: 1389981 - RNA, 19 nt, Artificial Sequence
  Description of Artificial Sequence: Synthetic oligonucleotide
ucuaguucagucuuguucc

SEQ ID NO: 1389982 - RNA, 19 nt, Artificial Sequence
  Description of Artificial Sequence: Synthetic oligonucleotide
gauaagaacaacucuaaca

SEQ ID NO: 1389983 - RNA, 19 nt, Artificial Sequence
  Description of Artificial Sequence: Synthetic oligonucleotide
aacucaaagguucagcucu

SEQ ID NO: 1389984 - RNA, 19 nt, Artificial Sequence
  Description of Artificial Sequence: Synthetic oligonucleotide
cuuacaaucuaauggacag

SEQ ID NO: 1389985 - RNA, 19 nt, Artificial Sequence
  Description of Artificial Sequence: Synthetic oligonucleotide
uccgagauuaccuacauac

SEQ ID NO: 1389986 - RNA, 19 nt, Artificial Sequence
  Description of Artificial Sequence: Synthetic oligonucleotide
acaauuuguaaccaaaacu

SEQ ID NO: 1389987 - RNA, 19 nt, Artificial Sequence
  Description of Artificial Sequence: Synthetic oligonucleotide
uccaaaagcacuuuacaag

SEQ ID NO: 1389988 - RNA, 19 nt, Artificial Sequence
  Description of Artificial Sequence: Synthetic oligonucleotide
uucaaguuaaacaacaauu

SEQ ID NO: 1389989 - RNA, 19 nt, Artificial Sequence
  Description of Artificial Sequence: Synthetic oligonucleotide
acauauuacaaaugacagc

SEQ ID NO: 1389990 - RNA, 19 nt, Artificial Sequence
  Description of Artificial Sequence: Synthetic oligonucleotide
uuuguaacuuuguugaaug

SEQ ID NO: 1389991 - RNA, 19 nt, Artificial Sequence
  Description of Artificial Sequence: Synthetic oligonucleotide
aaucuaauggacaggaauc

SEQ ID NO: 1389992 - RNA, 19 nt, Artificial Sequence
  Description of Artificial Sequence: Synthetic oligonucleotide
gauggauuaauuuggaauc

SEQ ID NO: 1389993 - RNA, 19 nt, Artificial Sequence
  Description of Artificial Sequence: Synthetic oligonucleotide
aucaugauggauuaauuug

SEQ ID NO: 1389994 - RNA, 19 nt, Artificial Sequence
  Description of Artificial Sequence: Synthetic oligonucleotide
cauuuaaccauaugguggg

SEQ ID NO: 1389995 - RNA, 19 nt, Artificial Sequence
  Description of Artificial Sequence: Synthetic oligonucleotide
gauuuaaucuaauugcaca

SEQ ID NO: 1389996 - RNA, 19 nt, Artificial Sequence
  Description of Artificial Sequence: Synthetic oligonucleotide
uuuuacaucaugauggauu

SEQ ID NO: 1389997 - RNA, 19 nt, Artificial Sequence
  Description of Artificial Sequence: Synthetic oligonucleotide
uauaguauggcuuccaaua

SEQ ID NO: 1389998 - RNA, 19 nt, Artificial Sequence
  Description of Artificial Sequence: Synthetic oligonucleotide
uccaauaggaauguuauac

SEQ ID NO: 1389999 - RNA, 19 nt, Artificial Sequence
  Description of Artificial Sequence: Synthetic oligonucleotide
uccuccauauuucuaagag

SEQ ID NO: 1390000 - RNA, 19 nt, Artificial Sequence
  Description of Artificial Sequence: Synthetic oligonucleotide
uauacuuggacuugauacc

SEQ ID NO: 1390001 - RNA, 19 nt, Artificial Sequence
  Description of Artificial Sequence: Synthetic oligonucleotide
aaguuaaacaacaauuugu

SEQ ID NO: 1390002 - RNA, 19 nt, Artificial Sequence
  Description of Artificial Sequence: Synthetic oligonucleotide
uaugcuaguauuuuauuaa

SEQ ID NO: 1390003 - RNA, 19 nt, Artificial Sequence
  Description of Artificial Sequence: Synthetic oligonucleotide
gacuacuacacaauuaugc

SEQ ID NO: 1390004 - RNA, 19 nt, Artificial Sequence
  Description of Artificial Sequence: Synthetic oligonucleotide
uucaacgaaagcaaagcca

SEQ ID NO: 1390005 - RNA, 19 nt, Artificial Sequence
  Description of Artificial Sequence: Synthetic oligonucleotide
aaaaugacuagcucuuaga

SEQ ID NO: 1390006 - RNA, 19 nt, Artificial Sequence
  Description of Artificial Sequence: Synthetic oligonucleotide
cuuaaagauagcauuagca

SEQ ID NO: 1390007 - RNA, 19 nt, Artificial Sequence
  Description of Artificial Sequence: Synthetic oligonucleotide
ugauggauuaauuuggaau

SEQ ID NO: 1390008 - RNA, 19 nt, Artificial Sequence
  Description of Artificial Sequence: Synthetic oligonucleotide
gucacaugaaguuauuucc

SEQ ID NO: 1390009 - RNA, 19 nt, Artificial Sequence
  Description of Artificial Sequence: Synthetic oligonucleotide
aagaaaguaacuggauaac

SEQ ID NO: 1390010 - RNA, 19 nt, Artificial Sequence
  Description of Artificial Sequence: Synthetic oligonucleotide
cuacauacaccuuacaauc

SEQ ID NO: 1390011 - RNA, 19 nt, Artificial Sequence
  Description of Artificial Sequence: Synthetic oligonucleotide
gagaucuucgccgaggugg

SEQ ID NO: 1390012 - RNA, 19 nt, Artificial Sequence
  Description of Artificial Sequence: Synthetic oligonucleotide
ucaacugacuacuacacaa

SEQ ID NO: 1390013 - RNA, 19 nt, Artificial Sequence
  Description of Artificial Sequence: Synthetic oligonucleotide
guccauaauagccaaaagc

SEQ ID NO: 1390014 - RNA, 19 nt, Artificial Sequence
  Description of Artificial Sequence: Synthetic oligonucleotide
cuaauggacaggaaucacg

SEQ ID NO: 1390015 - RNA, 19 nt, Artificial Sequence
  Description of Artificial Sequence: Synthetic oligonucleotide
uguaaccaaaacuuuaauc

SEQ ID NO: 1390016 - RNA, 19 nt, Artificial Sequence
  Description of Artificial Sequence: Synthetic oligonucleotide
acuuuaacugggcaggauc

SEQ ID NO: 1390017 - RNA, 19 nt, Artificial Sequence
  Description of Artificial Sequence: Synthetic oligonucleotide
aguuaugcugccuacuaag

SEQ ID NO: 1390018 - RNA, 19 nt, Artificial Sequence
  Description of Artificial Sequence: Synthetic oligonucleotide
ucgaagugguccauaauag

SEQ ID NO: 1390019 - RNA, 19 nt, Artificial Sequence
  Description of Artificial Sequence: Synthetic oligonucleotide
uccuacgguaaucaucucg

SEQ ID NO: 1390020 - RNA, 19 nt, Artificial Sequence
  Description of Artificial Sequence: Synthetic oligonucleotide
uacacaauuaugcuaguau

SEQ ID NO: 1390021 - RNA, 19 nt, Artificial Sequence
  Description of Artificial Sequence: Synthetic oligonucleotide
aucuagguuuauuucaguc

SEQ ID NO: 1390022 - RNA, 19 nt, Artificial Sequence
  Description of Artificial Sequence: Synthetic oligonucleotide
ugaaguuauuuccuguaca

SEQ ID NO: 1390023 - RNA, 19 nt, Artificial Sequence
  Description of Artificial Sequence: Synthetic oligonucleotide
uugcacacaaacaaucuga

SEQ ID NO: 1390024 - RNA, 19 nt, Artificial Sequence
  Description of Artificial Sequence: Synthetic oligonucleotide
aauuuccuguacauacucc

SEQ ID NO: 1390025 - RNA, 19 nt, Artificial Sequence
  Description of Artificial Sequence: Synthetic oligonucleotide
uacaauguacccuggaaac

SEQ ID NO: 1390026 - RNA, 19 nt, Artificial Sequence
  Description of Artificial Sequence: Synthetic oligonucleotide
ucuagguuuauuucagucu

SEQ ID NO: 1390027 - RNA, 19 nt, Artificial Sequence
  Description of Artificial Sequence: Synthetic oligonucleotide
gaagugguccauaauagcc

SEQ ID NO: 1390028 - RNA, 19 nt, Artificial Sequence
  Description of Artificial Sequence: Synthetic oligonucleotide
aguggguucacucaacuga

SEQ ID NO: 1390029 - RNA, 19 nt, Artificial Sequence
  Description of Artificial Sequence: Synthetic oligonucleotide
uuucacgagacagagaccu

SEQ ID NO: 1390030 - RNA, 19 nt, Artificial Sequence
  Description of Artificial Sequence: Synthetic oligonucleotide
gaacaacucuaacaguggg

SEQ ID NO: 1390031 - RNA, 19 nt, Artificial Sequence
  Description of Artificial Sequence: Synthetic oligonucleotide
augaaguuauuuccuguac

SEQ ID NO: 1390032 - RNA, 19 nt, Artificial Sequence
  Description of Artificial Sequence: Synthetic oligonucleotide
acuacuacacaauuaugcu

SEQ ID NO: 1390033 - RNA, 19 nt, Artificial Sequence
  Description of Artificial Sequence: Synthetic oligonucleotide
ggaaucacgaugcauuucg

SEQ ID NO: 1390034 - RNA, 19 nt, Artificial Sequence
  Description of Artificial Sequence: Synthetic oligonucleotide
agauuaccuacauacaccu

SEQ ID NO: 1390035 - RNA, 19 nt, Artificial Sequence
  Description of Artificial Sequence: Synthetic oligonucleotide
ugcauuucgagacccuggg

SEQ ID NO: 1390036 - RNA, 19 nt, Artificial Sequence
  Description of Artificial Sequence: Synthetic oligonucleotide
uucgaagugguccauaaua

SEQ ID NO: 1390037 - RNA, 19 nt, Artificial Sequence
  Description of Artificial Sequence: Synthetic oligonucleotide
uaguauggcuuccaauagg

SEQ ID NO: 1390038 - RNA, 19 nt, Artificial Sequence
  Description of Artificial Sequence: Synthetic oligonucleotide
uuggacuugauaccaagcu

SEQ ID NO: 1390039 - RNA, 19 nt, Artificial Sequence
  Description of Artificial Sequence: Synthetic oligonucleotide
aaagguucagcucuacaau

SEQ ID NO: 1390040 - RNA, 19 nt, Artificial Sequence
  Description of Artificial Sequence: Synthetic oligonucleotide
agacccuggguucaaacac

SEQ ID NO: 1390041 - RNA, 19 nt, Artificial Sequence
  Description of Artificial Sequence: Synthetic oligonucleotide
cacacaaacaaucugaaaa

SEQ ID NO: 1390042 - RNA, 19 nt, Artificial Sequence
  Description of Artificial Sequence: Synthetic oligonucleotide
uuuacaucaugauggauua

SEQ ID NO: 1390043 - RNA, 19 nt, Artificial Sequence
  Description of Artificial Sequence: Synthetic oligonucleotide
aucucgagggcgucgaccc

SEQ ID NO: 1390044 - RNA, 19 nt, Artificial Sequence
  Description of Artificial Sequence: Synthetic oligonucleotide
ucuuagaaggugacaacca

SEQ ID NO: 1390045 - RNA, 19 nt, Artificial Sequence
  Description of Artificial Sequence: Synthetic oligonucleotide
agcaaauuugaacagcuaa

SEQ ID NO: 1390046 - RNA, 19 nt, Artificial Sequence
  Description of Artificial Sequence: Synthetic oligonucleotide
uacaaucuaauggacagga

SEQ ID NO: 1390047 - RNA, 19 nt, Artificial Sequence
  Description of Artificial Sequence: Synthetic oligonucleotide
aauuuggaaucccaugcaa

SEQ ID NO: 1390048 - RNA, 19 nt, Artificial Sequence
  Description of Artificial Sequence: Synthetic oligonucleotide
aauguuauacuuggacuug

SEQ ID NO: 1390049 - RNA, 19 nt, Artificial Sequence
  Description of Artificial Sequence: Synthetic oligonucleotide
acauacuccugucacauga

SEQ ID NO: 1390050 - RNA, 19 nt, Artificial Sequence
  Description of Artificial Sequence: Synthetic oligonucleotide
agcucuacaauguacccug

SEQ ID NO: 1390051 - RNA, 19 nt, Artificial Sequence
  Description of Artificial Sequence: Synthetic oligonucleotide
ugccucuuaguuaugcugc

SEQ ID NO: 1390052 - RNA, 19 nt, Artificial Sequence
  Description of Artificial Sequence: Synthetic oligonucleotide
uaauuuggaaucccaugca

SEQ ID NO: 1390053 - RNA, 19 nt, Artificial Sequence
  Description of Artificial Sequence: Synthetic oligonucleotide
aauauaguauggcuuccaa

SEQ ID NO: 1390054 - RNA, 19 nt, Artificial Sequence
  Description of Artificial Sequence: Synthetic oligonucleotide
uggaaacuuaaagauagca

SEQ ID NO: 1390055 - RNA, 19 nt, Artificial Sequence
  Description of Artificial Sequence: Synthetic oligonucleotide
uauggcuuccaauaggaau

SEQ ID NO: 1390056 - RNA, 19 nt, Artificial Sequence
  Description of Artificial Sequence: Synthetic oligonucleotide
gaaggaucgagauggcuug

SEQ ID NO: 1390057 - RNA, 19 nt, Artificial Sequence
  Description of Artificial Sequence: Synthetic oligonucleotide
uacaccuuacaaucuaaug

SEQ ID NO: 1390058 - RNA, 19 nt, Artificial Sequence
  Description of Artificial Sequence: Synthetic oligonucleotide
uggguucaaacaccgaagc

SEQ ID NO: 1390059 - RNA, 19 nt, Artificial Sequence
  Description of Artificial Sequence: Synthetic oligonucleotide
aaugcaccaagauuaugaa

SEQ ID NO: 1390060 - RNA, 19 nt, Artificial Sequence
  Description of Artificial Sequence: Synthetic oligonucleotide
aacucuaacaguggguuca

SEQ ID NO: 1390061 - RNA, 19 nt, Artificial Sequence
  Description of Artificial Sequence: Synthetic oligonucleotide
guugaauguguucaugcug

SEQ ID NO: 1390062 - RNA, 19 nt, Artificial Sequence
  Description of Artificial Sequence: Synthetic oligonucleotide
aacgaaagcaaagccagga

SEQ ID NO: 1390063 - RNA, 19 nt, Artificial Sequence
  Description of Artificial Sequence: Synthetic oligonucleotide
ucuaacaguggguucacuc

SEQ ID NO: 1390064 - RNA, 19 nt, Artificial Sequence
  Description of Artificial Sequence: Synthetic oligonucleotide
ucauucacuuaauccagug

SEQ ID NO: 1390065 - RNA, 19 nt, Artificial Sequence
  Description of Artificial Sequence: Synthetic oligonucleotide
uagcauuagcacaucacac

SEQ ID NO: 1390066 - RNA, 19 nt, Artificial Sequence
  Description of Artificial Sequence: Synthetic oligonucleotide
aagcucaaaucucaacacu

SEQ ID NO: 1390067 - RNA, 19 nt, Artificial Sequence
  Description of Artificial Sequence: Synthetic oligonucleotide
uguugcauuaugauuuaau

SEQ ID NO: 1390068 - RNA, 19 nt, Artificial Sequence
  Description of Artificial Sequence: Synthetic oligonucleotide
aagucucaaacaaaacuug

SEQ ID NO: 1390069 - RNA, 19 nt, Artificial Sequence
  Description of Artificial Sequence: Synthetic oligonucleotide
cucaaaucucaacacuccg

SEQ ID NO: 1390070 - RNA, 19 nt, Artificial Sequence
  Description of Artificial Sequence: Synthetic oligonucleotide
agcauuagcacaucacacu

SEQ ID NO: 1390071 - RNA, 19 nt, Artificial Sequence
  Description of Artificial Sequence: Synthetic oligonucleotide
ucuaagaggaaugcaugcc

SEQ ID NO: 1390072 - RNA, 19 nt, Artificial Sequence
  Description of Artificial Sequence: Synthetic oligonucleotide
ucucuagaaagugaccugc

SEQ ID NO: 1390073 - RNA, 19 nt, Artificial Sequence
  Description of Artificial Sequence: Synthetic oligonucleotide
accuagaucggcuacgaga

SEQ ID NO: 1390074 - RNA, 19 nt, Artificial Sequence
  Description of Artificial Sequence: Synthetic oligonucleotide
uuaauccagugccucuuag

SEQ ID NO: 1390075 - RNA, 19 nt, Artificial Sequence
  Description of Artificial Sequence: Synthetic oligonucleotide
uguugaauguguucaugcu

SEQ ID NO: 1390076 - RNA, 19 nt, Artificial Sequence
  Description of Artificial Sequence: Synthetic oligonucleotide
uggaggacuccuccuacgg

SEQ ID NO: 1390077 - RNA, 19 nt, Artificial Sequence
  Description of Artificial Sequence: Synthetic oligonucleotide
ucggggauccucaaauuca

SEQ ID NO: 1390078 - RNA, 19 nt, Artificial Sequence
  Description of Artificial Sequence: Synthetic oligonucleotide
auuguuuccgagauuaccu

SEQ ID NO: 1390079 - RNA, 19 nt, Artificial Sequence
  Description of Artificial Sequence: Synthetic oligonucleotide
ugccuacuaagaaaguaac

SEQ ID NO: 1390080 - RNA, 19 nt, Artificial Sequence
  Description of Artificial Sequence: Synthetic oligonucleotide
uuaccuacauacaccuuac

SEQ ID NO: 1390081 - RNA, 19 nt, Artificial Sequence
  Description of Artificial Sequence: Synthetic oligonucleotide
agcucaaaucucaacacuc

SEQ ID NO: 1390082 - RNA, 19 nt, Artificial Sequence
  Description of Artificial Sequence: Synthetic oligonucleotide
uuacaaucuaauggacagg

SEQ ID NO: 1390083 - RNA, 19 nt, Artificial Sequence
  Description of Artificial Sequence: Synthetic oligonucleotide
uuaugcugccuacuaagaa

SEQ ID NO: 1390084 - RNA, 19 nt, Artificial Sequence
  Description of Artificial Sequence: Synthetic oligonucleotide
uaaccaacugcuuccccag

SEQ ID NO: 1390085 - RNA, 19 nt, Artificial Sequence
  Description of Artificial Sequence: Synthetic oligonucleotide
aaauauaguauggcuucca

SEQ ID NO: 1390086 - RNA, 19 nt, Artificial Sequence
  Description of Artificial Sequence: Synthetic oligonucleotide
ugauccuagaacuggcuuc

SEQ ID NO: 1390087 - RNA, 19 nt, Artificial Sequence
  Description of Artificial Sequence: Synthetic oligonucleotide
aggauucucacaaacauau

SEQ ID NO: 1390088 - RNA, 19 nt, Artificial Sequence
  Description of Artificial Sequence: Synthetic oligonucleotide
gauagcauuagcacaucac

SEQ ID NO: 1390089 - RNA, 19 nt, Artificial Sequence
  Description of Artificial Sequence: Synthetic oligonucleotide
cauucacuuaauccagugc

SEQ ID NO: 1390090 - RNA, 19 nt, Artificial Sequence
  Description of Artificial Sequence: Synthetic oligonucleotide
cuuggacuugauaccaagc

SEQ ID NO: 1390091 - RNA, 19 nt, Artificial Sequence
  Description of Artificial Sequence: Synthetic oligonucleotide
uaagaacaacucuaacagu

SEQ ID NO: 1390092 - RNA, 19 nt, Artificial Sequence
  Description of Artificial Sequence: Synthetic oligonucleotide
uccuaucucuagaaaguga

SEQ ID NO: 1390093 - RNA, 19 nt, Artificial Sequence
  Description of Artificial Sequence: Synthetic oligonucleotide
ugacuacuacacaauuaug

SEQ ID NO: 1390094 - RNA, 19 nt, Artificial Sequence
  Description of Artificial Sequence: Synthetic oligonucleotide
aaacaacaauuuguaacca

SEQ ID NO: 1390095 - RNA, 19 nt, Artificial Sequence
  Description of Artificial Sequence: Synthetic oligonucleotide
uuugaccuagaucggcuac

SEQ ID NO: 1390096 - RNA, 19 nt, Artificial Sequence
  Description of Artificial Sequence: Synthetic oligonucleotide
acaugaaguuauuuccugu

SEQ ID NO: 1390097 - RNA, 19 nt, Artificial Sequence
  Description of Artificial Sequence: Synthetic oligonucleotide
uggacuugauaccaagcuc

SEQ ID NO: 1390098 - RNA, 19 nt, Artificial Sequence
  Description of Artificial Sequence: Synthetic oligonucleotide
uuacaaaugacagcaugaa

SEQ ID NO: 1390099 - RNA, 19 nt, Artificial Sequence
  Description of Artificial Sequence: Synthetic oligonucleotide
uuaacugggcaggaucuag

SEQ ID NO: 1390100 - RNA, 19 nt, Artificial Sequence
  Description of Artificial Sequence: Synthetic oligonucleotide
caccuuacaaucuaaugga

SEQ ID NO: 1390101 - RNA, 19 nt, Artificial Sequence
  Description of Artificial Sequence: Synthetic oligonucleotide
cuguacauacuccugucac

SEQ ID NO: 1390102 - RNA, 19 nt, Artificial Sequence
  Description of Artificial Sequence: Synthetic oligonucleotide
aaaccaaauuuuguaacuu

SEQ ID NO: 1390103 - RNA, 19 nt, Artificial Sequence
  Description of Artificial Sequence: Synthetic oligonucleotide
aacugacuacuacacaauu

SEQ ID NO: 1390104 - RNA, 19 nt, Artificial Sequence
  Description of Artificial Sequence: Synthetic oligonucleotide
ugcacacaaacaaucugaa

SEQ ID NO: 1390105 - RNA, 19 nt, Artificial Sequence
  Description of Artificial Sequence: Synthetic oligonucleotide
uuaaccauaugguggguuu

SEQ ID NO: 1390106 - RNA, 19 nt, Artificial Sequence
  Description of Artificial Sequence: Synthetic oligonucleotide
cuggguucaaacaccgaag

SEQ ID NO: 1390107 - RNA, 19 nt, Artificial Sequence
  Description of Artificial Sequence: Synthetic oligonucleotide
ugugcacugucacauuuaa

SEQ ID NO: 1390108 - RNA, 19 nt, Artificial Sequence
  Description of Artificial Sequence: Synthetic oligonucleotide
uucccauuguuuccgagau

SEQ ID NO: 1390109 - RNA, 19 nt, Artificial Sequence
  Description of Artificial Sequence: Synthetic oligonucleotide
cacaugaaguuauuuccug

SEQ ID NO: 1390110 - RNA, 19 nt, Artificial Sequence
  Description of Artificial Sequence: Synthetic oligonucleotide
uguuuccgagauuaccuac

SEQ ID NO: 1390111 - RNA, 19 nt, Artificial Sequence
  Description of Artificial Sequence: Synthetic oligonucleotide
uggauuaauuuggaauccc

SEQ ID NO: 1390112 - RNA, 19 nt, Artificial Sequence
  Description of Artificial Sequence: Synthetic oligonucleotide
caaagguucagcucuacaa

SEQ ID NO: 1390113 - RNA, 19 nt, Artificial Sequence
  Description of Artificial Sequence: Synthetic oligonucleotide
agcaaacuggucuucuacu

SEQ ID NO: 1390114 - RNA, 19 nt, Artificial Sequence
  Description of Artificial Sequence: Synthetic oligonucleotide
ugggccacgauuucgacuu

SEQ ID NO: 1390115 - RNA, 19 nt, Artificial Sequence
  Description of Artificial Sequence: Synthetic oligonucleotide
aaaaugcaccaagauuaug

SEQ ID NO: 1390116 - RNA, 19 nt, Artificial Sequence
  Description of Artificial Sequence: Synthetic oligonucleotide
ucuuaguuaugcugccuac

SEQ ID NO: 1390117 - RNA, 19 nt, Artificial Sequence
  Description of Artificial Sequence: Synthetic oligonucleotide
uucauucacuuaauccagu

SEQ ID NO: 1390118 - RNA, 19 nt, Artificial Sequence
  Description of Artificial Sequence: Synthetic oligonucleotide
uugaccuagaucggcuacg

SEQ ID NO: 1390119 - RNA, 19 nt, Artificial Sequence
  Description of Artificial Sequence: Synthetic oligonucleotide
gguuucuuucacgagacag

SEQ ID NO: 1390120 - RNA, 19 nt, Artificial Sequence
  Description of Artificial Sequence: Synthetic oligonucleotide
auauaguauggcuuccaau

SEQ ID NO: 1390121 - RNA, 19 nt, Artificial Sequence
  Description of Artificial Sequence: Synthetic oligonucleotide
uaacaguggguucacucaa

SEQ ID NO: 1390122 - RNA, 19 nt, Artificial Sequence
  Description of Artificial Sequence: Synthetic oligonucleotide
aguauggcuuccaauagga

SEQ ID NO: 1390123 - RNA, 19 nt, Artificial Sequence
  Description of Artificial Sequence: Synthetic oligonucleotide
aucucuagaaagugaccug

SEQ ID NO: 1390124 - RNA, 19 nt, Artificial Sequence
  Description of Artificial Sequence: Synthetic oligonucleotide
aaucaucucgagggcgucg

SEQ ID NO: 1390125 - RNA, 19 nt, Artificial Sequence
  Description of Artificial Sequence: Synthetic oligonucleotide
uacgagaccuagagaagga

SEQ ID NO: 1390126 - RNA, 19 nt, Artificial Sequence
  Description of Artificial Sequence: Synthetic oligonucleotide
uaacucaaagguucagcuc

SEQ ID NO: 1390127 - RNA, 19 nt, Artificial Sequence
  Description of Artificial Sequence: Synthetic oligonucleotide
guaacucaaagguucagcu

SEQ ID NO: 1390128 - RNA, 19 nt, Artificial Sequence
  Description of Artificial Sequence: Synthetic oligonucleotide
aucuaauggacaggaauca

SEQ ID NO: 1390129 - RNA, 19 nt, Artificial Sequence
  Description of Artificial Sequence: Synthetic oligonucleotide
agauagcauuagcacauca

SEQ ID NO: 1390130 - RNA, 19 nt, Artificial Sequence
  Description of Artificial Sequence: Synthetic oligonucleotide
ggcuacgagaccuagagaa

SEQ ID NO: 1390131 - RNA, 19 nt, Artificial Sequence
  Description of Artificial Sequence: Synthetic oligonucleotide
aagauagcauuagcacauc

SEQ ID NO: 1390132 - RNA, 19 nt, Artificial Sequence
  Description of Artificial Sequence: Synthetic oligonucleotide
uaauccagugccucuuagu

SEQ ID NO: 1390133 - RNA, 19 nt, Artificial Sequence
  Description of Artificial Sequence: Synthetic oligonucleotide
ugguccauaauagccaaaa

SEQ ID NO: 1390134 - RNA, 19 nt, Artificial Sequence
  Description of Artificial Sequence: Synthetic oligonucleotide
uuguaacuuuguugaaugu

SEQ ID NO: 1390135 - RNA, 19 nt, Artificial Sequence
  Description of Artificial Sequence: Synthetic oligonucleotide
auuugagugugcaaggaaa

SEQ ID NO: 1390136 - RNA, 19 nt, Artificial Sequence
  Description of Artificial Sequence: Synthetic oligonucleotide
aacaguggguucacucaac

SEQ ID NO: 1390137 - RNA, 19 nt, Artificial Sequence
  Description of Artificial Sequence: Synthetic oligonucleotide
aacacuccgacaggcccac

SEQ ID NO: 1390138 - RNA, 19 nt, Artificial Sequence
  Description of Artificial Sequence: Synthetic oligonucleotide
aucucggggauccucaaau

SEQ ID NO: 1390139 - RNA, 19 nt, Artificial Sequence
  Description of Artificial Sequence: Synthetic oligonucleotide
ucgacaguuccacucucac

SEQ ID NO: 1390140 - RNA, 19 nt, Artificial Sequence
  Description of Artificial Sequence: Synthetic oligonucleotide
cuagguuuauuucagucua

SEQ ID NO: 1390141 - RNA, 19 nt, Artificial Sequence
  Description of Artificial Sequence: Synthetic oligonucleotide
acaacucuaacaguggguu

SEQ ID NO: 1390142 - RNA, 19 nt, Artificial Sequence
  Description of Artificial Sequence: Synthetic oligonucleotide
aaagcaaagccaggagggu

SEQ ID NO: 1390143 - RNA, 19 nt, Artificial Sequence
  Description of Artificial Sequence: Synthetic oligonucleotide
gguaaucaucucgagggcg

SEQ ID NO: 1390144 - RNA, 19 nt, Artificial Sequence
  Description of Artificial Sequence: Synthetic oligonucleotide
auucgacaguuccacucuc

SEQ ID NO: 1390145 - RNA, 19 nt, Artificial Sequence
  Description of Artificial Sequence: Synthetic oligonucleotide
uaguuaugcugccuacuaa

SEQ ID NO: 1390146 - RNA, 19 nt, Artificial Sequence
  Description of Artificial Sequence: Synthetic oligonucleotide
augcugaagauaaaagcca

SEQ ID NO: 1390147 - RNA, 19 nt, Artificial Sequence
  Description of Artificial Sequence: Synthetic oligonucleotide
uuuccgagauuaccuacau

SEQ ID NO: 1390148 - RNA, 19 nt, Artificial Sequence
  Description of Artificial Sequence: Synthetic oligonucleotide
ucuaauggacaggaaucac

SEQ ID NO: 1390149 - RNA, 19 nt, Artificial Sequence
  Description of Artificial Sequence: Synthetic oligonucleotide
uccauauuucuaagaggaa

SEQ ID NO: 1390150 - RNA, 19 nt, Artificial Sequence
  Description of Artificial Sequence: Synthetic oligonucleotide
ucgaccccaagaaggaggu

SEQ ID NO: 1390151 - RNA, 19 nt, Artificial Sequence
  Description of Artificial Sequence: Synthetic oligonucleotide
uucgacaguuccacucuca

SEQ ID NO: 1390152 - RNA, 19 nt, Artificial Sequence
  Description of Artificial Sequence: Synthetic oligonucleotide
acaggaaucacgaugcauu

SEQ ID NO: 1390153 - RNA, 19 nt, Artificial Sequence
  Description of Artificial Sequence: Synthetic oligonucleotide
uguuauacuuggacuugau

SEQ ID NO: 1390154 - RNA, 19 nt, Artificial Sequence
  Description of Artificial Sequence: Synthetic oligonucleotide
aauggacaggaaucacgau

SEQ ID NO: 1390155 - RNA, 19 nt, Artificial Sequence
  Description of Artificial Sequence: Synthetic oligonucleotide
gucgaccccaagaaggagg

SEQ ID NO: 1390156 - RNA, 19 nt, Artificial Sequence
  Description of Artificial Sequence: Synthetic oligonucleotide
ugguggguuuuacaucaug

SEQ ID NO: 1390157 - RNA, 19 nt, Artificial Sequence
  Description of Artificial Sequence: Synthetic oligonucleotide
ugacuagcucuuagaaggu

SEQ ID NO: 1390158 - RNA, 19 nt, Artificial Sequence
  Description of Artificial Sequence: Synthetic oligonucleotide
ucuucgccgagguggagga

SEQ ID NO: 1390159 - RNA, 19 nt, Artificial Sequence
  Description of Artificial Sequence: Synthetic oligonucleotide
aguucagucuuguucccau

SEQ ID NO: 1390160 - RNA, 19 nt, Artificial Sequence
  Description of Artificial Sequence: Synthetic oligonucleotide
gauccuagaacuggcuuca

SEQ ID NO: 1390161 - RNA, 19 nt, Artificial Sequence
  Description of Artificial Sequence: Synthetic oligonucleotide
cucaacacuccgacaggcc

SEQ ID NO: 1390162 - RNA, 19 nt, Artificial Sequence
  Description of Artificial Sequence: Synthetic oligonucleotide
aucgagauggcuugugguu

SEQ ID NO: 1390163 - RNA, 19 nt, Artificial Sequence
  Description of Artificial Sequence: Synthetic oligonucleotide
uguacccuggaaacuuaaa

SEQ ID NO: 1390164 - RNA, 19 nt, Artificial Sequence
  Description of Artificial Sequence: Synthetic oligonucleotide
ccauaauagccaaaagcac

SEQ ID NO: 1390165 - RNA, 19 nt, Artificial Sequence
  Description of Artificial Sequence: Synthetic oligonucleotide
guuauuuccuguacaccac

SEQ ID NO: 1390166 - RNA, 19 nt, Artificial Sequence
  Description of Artificial Sequence: Synthetic oligonucleotide
ggaauguuauacuuggacu

SEQ ID NO: 1390167 - RNA, 19 nt, Artificial Sequence
  Description of Artificial Sequence: Synthetic oligonucleotide
ggcgucgaccccaagaagg

SEQ ID NO: 1390168 - RNA, 19 nt, Artificial Sequence
  Description of Artificial Sequence: Synthetic oligonucleotide
cugccuacuaagaaaguaa

SEQ ID NO: 1390169 - RNA, 19 nt, Artificial Sequence
  Description of Artificial Sequence: Synthetic oligonucleotide
accaagcucacagauuuga

SEQ ID NO: 1390170 - RNA, 19 nt, Artificial Sequence
  Description of Artificial Sequence: Synthetic oligonucleotide
uuuaaccauaugguggguu

SEQ ID NO: 1390171 - RNA, 19 nt, Artificial Sequence
  Description of Artificial Sequence: Synthetic oligonucleotide
ucacuuaauccagugccuc

SEQ ID NO: 1390172 - RNA, 19 nt, Artificial Sequence
  Description of Artificial Sequence: Synthetic oligonucleotide
agugccucuuaguuaugcu

SEQ ID NO: 1390173 - RNA, 19 nt, Artificial Sequence
  Description of Artificial Sequence: Synthetic oligonucleotide
aucuucgccgagguggagg

SEQ ID NO: 1390174 - RNA, 19 nt, Artificial Sequence
  Description of Artificial Sequence: Synthetic oligonucleotide
ucaaacaccgaagcucaaa

SEQ ID NO: 1390175 - RNA, 19 nt, Artificial Sequence
  Description of Artificial Sequence: Synthetic oligonucleotide
ggaucgagauggcuugugg

SEQ ID NO: 1390176 - RNA, 19 nt, Artificial Sequence
  Description of Artificial Sequence: Synthetic oligonucleotide
guuucuuucacgagacaga

SEQ ID NO: 1390177 - RNA, 19 nt, Artificial Sequence
  Description of Artificial Sequence: Synthetic oligonucleotide
uucuuucacgagacagaga

SEQ ID NO: 1390178 - RNA, 19 nt, Artificial Sequence
  Description of Artificial Sequence: Synthetic oligonucleotide
aggguuccgagcaacccac

SEQ ID NO: 1390179 - RNA, 19 nt, Artificial Sequence
  Description of Artificial Sequence: Synthetic oligonucleotide
augauccuagaacuggcuu

SEQ ID NO: 1390180 - RNA, 19 nt, Artificial Sequence
  Description of Artificial Sequence: Synthetic oligonucleotide
acaauguacccuggaaacu

SEQ ID NO: 1390181 - RNA, 19 nt, Artificial Sequence
  Description of Artificial Sequence: Synthetic oligonucleotide
cuacuacacaauuaugcua

SEQ ID NO: 1390182 - RNA, 19 nt, Artificial Sequence
  Description of Artificial Sequence: Synthetic oligonucleotide
augcauuucgagacccugg

SEQ ID NO: 1390183 - RNA, 19 nt, Artificial Sequence
  Description of Artificial Sequence: Synthetic oligonucleotide
cuuagaaggugacaaccaa

SEQ ID NO: 1390184 - RNA, 19 nt, Artificial Sequence
  Description of Artificial Sequence: Synthetic oligonucleotide
accauaugguggguuuuac

SEQ ID NO: 1390185 - RNA, 19 nt, Artificial Sequence
  Description of Artificial Sequence: Synthetic oligonucleotide
uccuguacauacuccuguc

SEQ ID NO: 1390186 - RNA, 19 nt, Artificial Sequence
  Description of Artificial Sequence: Synthetic oligonucleotide
gaggguuccgagcaaccca

SEQ ID NO: 1390187 - RNA, 19 nt, Artificial Sequence
  Description of Artificial Sequence: Synthetic oligonucleotide
cuuuaacugggcaggaucu

SEQ ID NO: 1390188 - RNA, 19 nt, Artificial Sequence
  Description of Artificial Sequence: Synthetic oligonucleotide
caaucuaauggacaggaau

SEQ ID NO: 1390189 - RNA, 19 nt, Artificial Sequence
  Description of Artificial Sequence: Synthetic oligonucleotide
gcuuucaaguuaaacaaca

SEQ ID NO: 1390190 - RNA, 19 nt, Artificial Sequence
  Description of Artificial Sequence: Synthetic oligonucleotide
gcuugugguuucuuucacg

SEQ ID NO: 1390191 - RNA, 19 nt, Artificial Sequence
  Description of Artificial Sequence: Synthetic oligonucleotide
uagguuuauuucagucuau

SEQ ID NO: 1390192 - RNA, 19 nt, Artificial Sequence
  Description of Artificial Sequence: Synthetic oligonucleotide
acuaaaguucaaagcaaau

SEQ ID NO: 1390193 - RNA, 19 nt, Artificial Sequence
  Description of Artificial Sequence: Synthetic oligonucleotide
cuacgguaaucaucucgag

SEQ ID NO: 1390194 - RNA, 19 nt, Artificial Sequence
  Description of Artificial Sequence: Synthetic oligonucleotide
aggaaucacgaugcauuuc

SEQ ID NO: 1390195 - RNA, 19 nt, Artificial Sequence
  Description of Artificial Sequence: Synthetic oligonucleotide
agggcgucgaccccaagaa

SEQ ID NO: 1390196 - RNA, 19 nt, Artificial Sequence
  Description of Artificial Sequence: Synthetic oligonucleotide
gaggacuccuccuacggua

SEQ ID NO: 1390197 - RNA, 19 nt, Artificial Sequence
  Description of Artificial Sequence: Synthetic oligonucleotide
auuugaccuagaucggcua

SEQ ID NO: 1390198 - RNA, 19 nt, Artificial Sequence
  Description of Artificial Sequence: Synthetic oligonucleotide
uccuagaacuggcuucaau

SEQ ID NO: 1390199 - RNA, 19 nt, Artificial Sequence
  Description of Artificial Sequence: Synthetic oligonucleotide
caccauucgacaguuccac

SEQ ID NO: 1390200 - RNA, 19 nt, Artificial Sequence
  Description of Artificial Sequence: Synthetic oligonucleotide
guuauacuuggacuugaua

SEQ ID NO: 1390201 - RNA, 19 nt, Artificial Sequence
  Description of Artificial Sequence: Synthetic oligonucleotide
uaccuacauacaccuuaca

SEQ ID NO: 1390202 - RNA, 19 nt, Artificial Sequence
  Description of Artificial Sequence: Synthetic oligonucleotide
gacuagcucuuagaaggug

SEQ ID NO: 1390203 - RNA, 19 nt, Artificial Sequence
  Description of Artificial Sequence: Synthetic oligonucleotide
agacagagaccuuucucuu

SEQ ID NO: 1390204 - RNA, 19 nt, Artificial Sequence
  Description of Artificial Sequence: Synthetic oligonucleotide
acuacacaauuaugcuagu

SEQ ID NO: 1390205 - RNA, 19 nt, Artificial Sequence
  Description of Artificial Sequence: Synthetic oligonucleotide
gguccauaauagccaaaag

SEQ ID NO: 1390206 - RNA, 19 nt, Artificial Sequence
  Description of Artificial Sequence: Synthetic oligonucleotide
cuaagaggaaugcaugccu

SEQ ID NO: 1390207 - RNA, 19 nt, Artificial Sequence
  Description of Artificial Sequence: Synthetic oligonucleotide
gacccuggguucaaacacc

SEQ ID NO: 1390208 - RNA, 19 nt, Artificial Sequence
  Description of Artificial Sequence: Synthetic oligonucleotide
gguuuuacaucaugaugga

SEQ ID NO: 1390209 - RNA, 19 nt, Artificial Sequence
  Description of Artificial Sequence: Synthetic oligonucleotide
ugcuccggcuucgagagaa

SEQ ID NO: 1390210 - RNA, 19 nt, Artificial Sequence
  Description of Artificial Sequence: Synthetic oligonucleotide
uuucgagacccuggguuca

SEQ ID NO: 1390211 - RNA, 19 nt, Artificial Sequence
  Description of Artificial Sequence: Synthetic oligonucleotide
uucgccgagguggaggacu

SEQ ID NO: 1390212 - RNA, 19 nt, Artificial Sequence
  Description of Artificial Sequence: Synthetic oligonucleotide
agaccucaaguuauaaaau

SEQ ID NO: 1390213 - RNA, 19 nt, Artificial Sequence
  Description of Artificial Sequence: Synthetic oligonucleotide
gagggcgucgaccccaaga

SEQ ID NO: 1390214 - RNA, 19 nt, Artificial Sequence
  Description of Artificial Sequence: Synthetic oligonucleotide
agccacaagacuguugcau

SEQ ID NO: 1390215 - RNA, 19 nt, Artificial Sequence
  Description of Artificial Sequence: Synthetic oligonucleotide
caagaccucaaguuauaaa

SEQ ID NO: 1390216 - RNA, 19 nt, Artificial Sequence
  Description of Artificial Sequence: Synthetic oligonucleotide
guuuccgagauuaccuaca

SEQ ID NO: 1390217 - RNA, 19 nt, Artificial Sequence
  Description of Artificial Sequence: Synthetic oligonucleotide
caccgaagcucaaaucuca

SEQ ID NO: 1390218 - RNA, 19 nt, Artificial Sequence
  Description of Artificial Sequence: Synthetic oligonucleotide
caguggguucacucaacug

SEQ ID NO: 1390219 - RNA, 19 nt, Artificial Sequence
  Description of Artificial Sequence: Synthetic oligonucleotide
acgagacagagaccuuucu

SEQ ID NO: 1390220 - RNA, 19 nt, Artificial Sequence
  Description of Artificial Sequence: Synthetic oligonucleotide
gguggguuuuacaucauga

SEQ ID NO: 1390221 - RNA, 19 nt, Artificial Sequence
  Description of Artificial Sequence: Synthetic oligonucleotide
acccuggguucaaacaccg

SEQ ID NO: 1390222 - RNA, 19 nt, Artificial Sequence
  Description of Artificial Sequence: Synthetic oligonucleotide
agaggaaugcaugccucca

SEQ ID NO: 1390223 - RNA, 19 nt, Artificial Sequence
  Description of Artificial Sequence: Synthetic oligonucleotide
caacucuaacaguggguuc

SEQ ID NO: 1390224 - RNA, 19 nt, Artificial Sequence
  Description of Artificial Sequence: Synthetic oligonucleotide
cacgagacagagaccuuuc

SEQ ID NO: 1390225 - RNA, 19 nt, Artificial Sequence
  Description of Artificial Sequence: Synthetic oligonucleotide
caucaugauggauuaauuu

SEQ ID NO: 1390226 - RNA, 19 nt, Artificial Sequence
  Description of Artificial Sequence: Synthetic oligonucleotide
gcucaaaucucaacacucc

SEQ ID NO: 1390227 - RNA, 19 nt, Artificial Sequence
  Description of Artificial Sequence: Synthetic oligonucleotide
ccuacgguaaucaucucga

SEQ ID NO: 1390228 - RNA, 19 nt, Artificial Sequence
  Description of Artificial Sequence: Synthetic oligonucleotide
aauguacccuggaaacuua

SEQ ID NO: 1390229 - RNA, 19 nt, Artificial Sequence
  Description of Artificial Sequence: Synthetic oligonucleotide
cuuggagaucuucgccgag

SEQ ID NO: 1390230 - RNA, 19 nt, Artificial Sequence
  Description of Artificial Sequence: Synthetic oligonucleotide
aaccauaugguggguuuua

SEQ ID NO: 1390231 - RNA, 19 nt, Artificial Sequence
  Description of Artificial Sequence: Synthetic oligonucleotide
caucucgagggcgucgacc

SEQ ID NO: 1390232 - RNA, 19 nt, Artificial Sequence
  Description of Artificial Sequence: Synthetic oligonucleotide
gaccuagaucggcuacgag

SEQ ID NO: 1390233 - RNA, 19 nt, Artificial Sequence
  Description of Artificial Sequence: Synthetic oligonucleotide
ccauucgacaguuccacuc

SEQ ID NO: 1390234 - RNA, 19 nt, Artificial Sequence
  Description of Artificial Sequence: Synthetic oligonucleotide
ugcugccuacuaagaaagu

SEQ ID NO: 1390235 - RNA, 19 nt, Artificial Sequence
  Description of Artificial Sequence: Synthetic oligonucleotide
uuuaacugggcaggaucua

SEQ ID NO: 1390236 - RNA, 19 nt, Artificial Sequence
  Description of Artificial Sequence: Synthetic oligonucleotide
cucuuaguuaugcugccua

SEQ ID NO: 1390237 - RNA, 19 nt, Artificial Sequence
  Description of Artificial Sequence: Synthetic oligonucleotide
cucaacugacuacuacaca

SEQ ID NO: 1390238 - RNA, 19 nt, Artificial Sequence
  Description of Artificial Sequence: Synthetic oligonucleotide
cacgauuucgacuucuuuu

SEQ ID NO: 1390239 - RNA, 19 nt, Artificial Sequence
  Description of Artificial Sequence: Synthetic oligonucleotide
cugggcaggaucuagguuu

SEQ ID NO: 1390240 - RNA, 19 nt, Artificial Sequence
  Description of Artificial Sequence: Synthetic oligonucleotide
cauuugaccuagaucggcu

SEQ ID NO: 1390241 - RNA, 19 nt, Artificial Sequence
  Description of Artificial Sequence: Synthetic oligonucleotide
uggcuuccaauaggaaugu

SEQ ID NO: 1390242 - RNA, 19 nt, Artificial Sequence
  Description of Artificial Sequence: Synthetic oligonucleotide
agccaaaagcacgcucuag

SEQ ID NO: 1390243 - RNA, 19 nt, Artificial Sequence
  Description of Artificial Sequence: Synthetic oligonucleotide
accauucgacaguuccacu

SEQ ID NO: 1390244 - RNA, 19 nt, Artificial Sequence
  Description of Artificial Sequence: Synthetic oligonucleotide
gaucuagguuuauuucagu

SEQ ID NO: 1390245 - RNA, 19 nt, Artificial Sequence
  Description of Artificial Sequence: Synthetic oligonucleotide
uuccgagauuaccuacaua

SEQ ID NO: 1390246 - RNA, 19 nt, Artificial Sequence
  Description of Artificial Sequence: Synthetic oligonucleotide
aucaucucgagggcgucga

SEQ ID NO: 1390247 - RNA, 19 nt, Artificial Sequence
  Description of Artificial Sequence: Synthetic oligonucleotide
aaggaucgagauggcuugu

SEQ ID NO: 1390248 - RNA, 19 nt, Artificial Sequence
  Description of Artificial Sequence: Synthetic oligonucleotide
auauuacaaaugacagcau

SEQ ID NO: 1390249 - RNA, 19 nt, Artificial Sequence
  Description of Artificial Sequence: Synthetic oligonucleotide
caacacuccgacaggccca

SEQ ID NO: 1390250 - RNA, 19 nt, Artificial Sequence
  Description of Artificial Sequence: Synthetic oligonucleotide
gaaucacgaugcauuucga

SEQ ID NO: 1390251 - RNA, 19 nt, Artificial Sequence
  Description of Artificial Sequence: Synthetic oligonucleotide
uaaucaucucgagggcguc

SEQ ID NO: 1390252 - RNA, 19 nt, Artificial Sequence
  Description of Artificial Sequence: Synthetic oligonucleotide
cauucgacaguuccacucu

SEQ ID NO: 1390253 - RNA, 19 nt, Artificial Sequence
  Description of Artificial Sequence: Synthetic oligonucleotide
acacuuuaacugggcagga

SEQ ID NO: 1390254 - RNA, 19 nt, Artificial Sequence
  Description of Artificial Sequence: Synthetic oligonucleotide
ccuccuacgguaaucaucu

SEQ ID NO: 1390255 - RNA, 19 nt, Artificial Sequence
  Description of Artificial Sequence: Synthetic oligonucleotide
gcuacgagaccuagagaag

SEQ ID NO: 1390256 - RNA, 19 nt, Artificial Sequence
  Description of Artificial Sequence: Synthetic oligonucleotide
aggaucgagauggcuugug

SEQ ID NO: 1390257 - RNA, 19 nt, Artificial Sequence
  Description of Artificial Sequence: Synthetic oligonucleotide
gacuccuccuacgguaauc

SEQ ID NO: 1390258 - RNA, 19 nt, Artificial Sequence
  Description of Artificial Sequence: Synthetic oligonucleotide
agaucuucgccgaggugga

SEQ ID NO: 1390259 - RNA, 19 nt, Artificial Sequence
  Description of Artificial Sequence: Synthetic oligonucleotide
gcaccaagauuaugaaguc

SEQ ID NO: 1390260 - RNA, 19 nt, Artificial Sequence
  Description of Artificial Sequence: Synthetic oligonucleotide
cauacuccugucacaugaa

SEQ ID NO: 1390261 - RNA, 19 nt, Artificial Sequence
  Description of Artificial Sequence: Synthetic oligonucleotide
ccuacauacaccuuacaau

SEQ ID NO: 1390262 - RNA, 19 nt, Artificial Sequence
  Description of Artificial Sequence: Synthetic oligonucleotide
ucccaaggauucucacaaa

SEQ ID NO: 1390263 - RNA, 19 nt, Artificial Sequence
  Description of Artificial Sequence: Synthetic oligonucleotide
uucacgagacagagaccuu

SEQ ID NO: 1390264 - RNA, 19 nt, Artificial Sequence
  Description of Artificial Sequence: Synthetic oligonucleotide
cuucuccuaucucuagaaa

SEQ ID NO: 1390265 - RNA, 19 nt, Artificial Sequence
  Description of Artificial Sequence: Synthetic oligonucleotide
aagcacgcucuaguucagu

SEQ ID NO: 1390266 - RNA, 19 nt, Artificial Sequence
  Description of Artificial Sequence: Synthetic oligonucleotide
acgagaccuagagaaggau

SEQ ID NO: 1390267 - RNA, 19 nt, Artificial Sequence
  Description of Artificial Sequence: Synthetic oligonucleotide
ucgccgagguggaggacuc

SEQ ID NO: 1390268 - RNA, 19 nt, Artificial Sequence
  Description of Artificial Sequence: Synthetic oligonucleotide
gauaccaagcucacagauu

SEQ ID NO: 1390269 - RNA, 19 nt, Artificial Sequence
  Description of Artificial Sequence: Synthetic oligonucleotide
acaaucuaauggacaggaa

SEQ ID NO: 1390270 - RNA, 19 nt, Artificial Sequence
  Description of Artificial Sequence: Synthetic oligonucleotide
ggaggguuccgagcaaccc

SEQ ID NO: 1390271 - RNA, 19 nt, Artificial Sequence
  Description of Artificial Sequence: Synthetic oligonucleotide
gccaaaagcacgcucuagu

SEQ ID NO: 1390272 - RNA, 19 nt, Artificial Sequence
  Description of Artificial Sequence: Synthetic oligonucleotide
ggcuugugguuucuuucac

SEQ ID NO: 1390273 - RNA, 19 nt, Artificial Sequence
  Description of Artificial Sequence: Synthetic oligonucleotide
aggugggccacgauuucga

SEQ ID NO: 1390274 - RNA, 19 nt, Artificial Sequence
  Description of Artificial Sequence: Synthetic oligonucleotide
gcaggaucuagguuuauuu

SEQ ID NO: 1390275 - RNA, 19 nt, Artificial Sequence
  Description of Artificial Sequence: Synthetic oligonucleotide
ccauauucaacugugcacu

SEQ ID NO: 1390276 - RNA, 19 nt, Artificial Sequence
  Description of Artificial Sequence: Synthetic oligonucleotide
cuacacaauuaugcuagua

SEQ ID NO: 1390277 - RNA, 19 nt, Artificial Sequence
  Description of Artificial Sequence: Synthetic oligonucleotide
ccgaagcucaaaucucaac

SEQ ID NO: 1390278 - RNA, 19 nt, Artificial Sequence
  Description of Artificial Sequence: Synthetic oligonucleotide
cccacacacuucgaagugg

SEQ ID NO: 1390279 - RNA, 19 nt, Artificial Sequence
  Description of Artificial Sequence: Synthetic oligonucleotide
cccauuguuuccgagauua

SEQ ID NO: 1390280 - RNA, 19 nt, Artificial Sequence
  Description of Artificial Sequence: Synthetic oligonucleotide
cacuuaauccagugccucu

SEQ ID NO: 1390281 - RNA, 19 nt, Artificial Sequence
  Description of Artificial Sequence: Synthetic oligonucleotide
gaucuucgccgagguggag

SEQ ID NO: 1390282 - RNA, 19 nt, Artificial Sequence
  Description of Artificial Sequence: Synthetic oligonucleotide
ggugacaaccaaagggaaa

SEQ ID NO: 1390283 - RNA, 19 nt, Artificial Sequence
  Description of Artificial Sequence: Synthetic oligonucleotide
gcauuagcacaucacacuu

SEQ ID NO: 1390284 - RNA, 19 nt, Artificial Sequence
  Description of Artificial Sequence: Synthetic oligonucleotide
caauguacccuggaaacuu

SEQ ID NO: 1390285 - RNA, 19 nt, Artificial Sequence
  Description of Artificial Sequence: Synthetic oligonucleotide
gcugccuacuaagaaagua

SEQ ID NO: 1390286 - RNA, 19 nt, Artificial Sequence
  Description of Artificial Sequence: Synthetic oligonucleotide
gaaucccaugcaagaccuc

SEQ ID NO: 1390287 - RNA, 19 nt, Artificial Sequence
  Description of Artificial Sequence: Synthetic oligonucleotide
cgagacagagaccuuucuc

SEQ ID NO: 1390288 - RNA, 19 nt, Artificial Sequence
  Description of Artificial Sequence: Synthetic oligonucleotide
guauggcuuccaauaggaa

SEQ ID NO: 1390289 - RNA, 19 nt, Artificial Sequence
  Description of Artificial Sequence: Synthetic oligonucleotide
accgaagcucaaaucucaa

SEQ ID NO: 1390290 - RNA, 19 nt, Artificial Sequence
  Description of Artificial Sequence: Synthetic oligonucleotide
uucgagacccuggguucaa

SEQ ID NO: 1390291 - RNA, 19 nt, Artificial Sequence
  Description of Artificial Sequence: Synthetic oligonucleotide
cauuagcacaucacacuuu

SEQ ID NO: 1390292 - RNA, 19 nt, Artificial Sequence
  Description of Artificial Sequence: Synthetic oligonucleotide
ccgagauuaccuacauaca

SEQ ID NO: 1390293 - RNA, 19 nt, Artificial Sequence
  Description of Artificial Sequence: Synthetic oligonucleotide
gugggccacgauuucgacu

SEQ ID NO: 1390294 - RNA, 19 nt, Artificial Sequence
  Description of Artificial Sequence: Synthetic oligonucleotide
cucgagggcgucgacccca

SEQ ID NO: 1390295 - RNA, 19 nt, Artificial Sequence
  Description of Artificial Sequence: Synthetic oligonucleotide
gggcgucgaccccaagaag

SEQ ID NO: 1390296 - RNA, 19 nt, Artificial Sequence
  Description of Artificial Sequence: Synthetic oligonucleotide
ggguucaaacaccgaagcu

SEQ ID NO: 1390297 - RNA, 19 nt, Artificial Sequence
  Description of Artificial Sequence: Synthetic oligonucleotide
cuccuacgguaaucaucuc

SEQ ID NO: 1390298 - RNA, 19 nt, Artificial Sequence
  Description of Artificial Sequence: Synthetic oligonucleotide
cgguaaucaucucgagggc

SEQ ID NO: 1390299 - RNA, 19 nt, Artificial Sequence
  Description of Artificial Sequence: Synthetic oligonucleotide
cagcucuacaauguacccu

SEQ ID NO: 1390300 - RNA, 19 nt, Artificial Sequence
  Description of Artificial Sequence: Synthetic oligonucleotide
gcaugccuccauauucaac

SEQ ID NO: 1390301 - RNA, 19 nt, Artificial Sequence
  Description of Artificial Sequence: Synthetic oligonucleotide
ucgagacccuggguucaaa

SEQ ID NO: 1390302 - RNA, 19 nt, Artificial Sequence
  Description of Artificial Sequence: Synthetic oligonucleotide
cucggcagccacacagugu

SEQ ID NO: 1390303 - RNA, 19 nt, Artificial Sequence
  Description of Artificial Sequence: Synthetic oligonucleotide
cugucacauuuaaccauau

SEQ ID NO: 1390304 - RNA, 19 nt, Artificial Sequence
  Description of Artificial Sequence: Synthetic oligonucleotide
gauuaccuacauacaccuu

SEQ ID NO: 1390305 - RNA, 19 nt, Artificial Sequence
  Description of Artificial Sequence: Synthetic oligonucleotide
gcacgcucuaguucagucu

SEQ ID NO: 1390306 - RNA, 19 nt, Artificial Sequence
  Description of Artificial Sequence: Synthetic oligonucleotide
ggggauccucaaauucaac

SEQ ID NO: 1390307 - RNA, 19 nt, Artificial Sequence
  Description of Artificial Sequence: Synthetic oligonucleotide
cacaagacuguugcauuau

SEQ ID NO: 1390308 - RNA, 19 nt, Artificial Sequence
  Description of Artificial Sequence: Synthetic oligonucleotide
gccuacuaagaaaguaacu

SEQ ID NO: 1390309 - RNA, 19 nt, Artificial Sequence
  Description of Artificial Sequence: Synthetic oligonucleotide
gccacaagacuguugcauu

SEQ ID NO: 1390310 - RNA, 19 nt, Artificial Sequence
  Description of Artificial Sequence: Synthetic oligonucleotide
ggaggacuccuccuacggu

SEQ ID NO: 1390311 - RNA, 19 nt, Artificial Sequence
  Description of Artificial Sequence: Synthetic oligonucleotide
gcgucgaccccaagaagga

SEQ ID NO: 1390312 - RNA, 19 nt, Artificial Sequence
  Description of Artificial Sequence: Synthetic oligonucleotide
augguggguuuuacaucau

SEQ ID NO: 1390313 - RNA, 19 nt, Artificial Sequence
  Description of Artificial Sequence: Synthetic oligonucleotide
ccaaaagcacgcucuaguu

SEQ ID NO: 1390314 - RNA, 19 nt, Artificial Sequence
  Description of Artificial Sequence: Synthetic oligonucleotide
cuucgccgagguggaggac

SEQ ID NO: 1390315 - RNA, 19 nt, Artificial Sequence
  Description of Artificial Sequence: Synthetic oligonucleotide
gcauuucgagacccugggu

SEQ ID NO: 1390316 - RNA, 19 nt, Artificial Sequence
  Description of Artificial Sequence: Synthetic oligonucleotide
cccaugcaagaccucaagu

SEQ ID NO: 1390317 - RNA, 19 nt, Artificial Sequence
  Description of Artificial Sequence: Synthetic oligonucleotide
ggcuucgagagaagcuucu

SEQ ID NO: 1390318 - RNA, 19 nt, Artificial Sequence
  Description of Artificial Sequence: Synthetic oligonucleotide
cacuuuaacugggcaggau

SEQ ID NO: 1390319 - RNA, 19 nt, Artificial Sequence
  Description of Artificial Sequence: Synthetic oligonucleotide
cggggauccucaaauucaa

SEQ ID NO: 1390320 - RNA, 19 nt, Artificial Sequence
  Description of Artificial Sequence: Synthetic oligonucleotide
cuccuccuacgguaaucau

SEQ ID NO: 1390321 - RNA, 19 nt, Artificial Sequence
  Description of Artificial Sequence: Synthetic oligonucleotide
cgucgaccccaagaaggag

SEQ ID NO: 1390322 - RNA, 19 nt, Artificial Sequence
  Description of Artificial Sequence: Synthetic oligonucleotide
cucuaacaguggguucacu

SEQ ID NO: 1390323 - RNA, 19 nt, Artificial Sequence
  Description of Artificial Sequence: Synthetic oligonucleotide
ggcaggaucuagguuuauu

SEQ ID NO: 1390324 - RNA, 19 nt, Artificial Sequence
  Description of Artificial Sequence: Synthetic oligonucleotide
ggccacgauuucgacuucu

SEQ ID NO: 1390325 - RNA, 19 nt, Artificial Sequence
  Description of Artificial Sequence: Synthetic oligonucleotide
cccuggguucaaacaccga

SEQ ID NO: 1390326 - RNA, 19 nt, Artificial Sequence
  Description of Artificial Sequence: Synthetic oligonucleotide
ggguuccgagcaacccaca

SEQ ID NO: 1390327 - RNA, 19 nt, Artificial Sequence
  Description of Artificial Sequence: Synthetic oligonucleotide
ccucuuaguuaugcugccu

SEQ ID NO: 1390328 - RNA, 19 nt, Artificial Sequence
  Description of Artificial Sequence: Synthetic oligonucleotide
gccacgauuucgacuucuu

SEQ ID NO: 1390329 - RNA, 19 nt, Artificial Sequence
  Description of Artificial Sequence: Synthetic oligonucleotide
aaugagugcugcuggaagc

SEQ ID NO: 1390330 - RNA, 19 nt, Artificial Sequence
  Description of Artificial Sequence: Synthetic oligonucleotide
aguaauacuucuugugugc

SEQ ID NO: 1390331 - RNA, 19 nt, Artificial Sequence
  Description of Artificial Sequence: Synthetic oligonucleotide
acaguugugacagacaccg

SEQ ID NO: 1390332 - RNA, 19 nt, Artificial Sequence
  Description of Artificial Sequence: Synthetic oligonucleotide
agauuucacccuuggagcc

SEQ ID NO: 1390333 - RNA, 19 nt, Artificial Sequence
  Description of Artificial Sequence: Synthetic oligonucleotide
uagauuucacccuuggagc

SEQ ID NO: 1390334 - RNA, 19 nt, Artificial Sequence
  Description of Artificial Sequence: Synthetic oligonucleotide
uguugcaggccucacacag

SEQ ID NO: 1390335 - RNA, 19 nt, Artificial Sequence
  Description of Artificial Sequence: Synthetic oligonucleotide
uuguguacaguguaggucu

SEQ ID NO: 1390336 - RNA, 19 nt, Artificial Sequence
  Description of Artificial Sequence: Synthetic oligonucleotide
aaggcguguucucaggaac

SEQ ID NO: 1390337 - RNA, 19 nt, Artificial Sequence
  Description of Artificial Sequence: Synthetic oligonucleotide
aagcuuacgcgacaugcgg

SEQ ID NO: 1390338 - RNA, 19 nt, Artificial Sequence
  Description of Artificial Sequence: Synthetic oligonucleotide
ugcgguacacucaugguag

SEQ ID NO: 1390339 - RNA, 19 nt, Artificial Sequence
  Description of Artificial Sequence: Synthetic oligonucleotide
ugcgcaaaggcgcagcagg

SEQ ID NO: 1390340 - RNA, 19 nt, Artificial Sequence
  Description of Artificial Sequence: Synthetic oligonucleotide
uaagcuucgaggcugugga

SEQ ID NO: 1390341 - RNA, 19 nt, Artificial Sequence
  Description of Artificial Sequence: Synthetic oligonucleotide
gauguugcaggccucacac

SEQ ID NO: 1390342 - RNA, 19 nt, Artificial Sequence
  Description of Artificial Sequence: Synthetic oligonucleotide
uaugaagccacaguuguga

SEQ ID NO: 1390343 - RNA, 19 nt, Artificial Sequence
  Description of Artificial Sequence: Synthetic oligonucleotide
aaagggacgcucuccacug

SEQ ID NO: 1390344 - RNA, 19 nt, Artificial Sequence
  Description of Artificial Sequence: Synthetic oligonucleotide
aucuccagcgagcuggcgc

SEQ ID NO: 1390345 - RNA, 19 nt, Artificial Sequence
  Description of Artificial Sequence: Synthetic oligonucleotide
agccagguaagcuucgagg

SEQ ID NO: 1390346 - RNA, 19 nt, Artificial Sequence
  Description of Artificial Sequence: Synthetic oligonucleotide
acaccaugugguuugucac

SEQ ID NO: 1390347 - RNA, 19 nt, Artificial Sequence
  Description of Artificial Sequence: Synthetic oligonucleotide
acacucaugguagucggcc

SEQ ID NO: 1390348 - RNA, 19 nt, Artificial Sequence
  Description of Artificial Sequence: Synthetic oligonucleotide
acuucacgugcucggaggc

SEQ ID NO: 1390349 - RNA, 19 nt, Artificial Sequence
  Description of Artificial Sequence: Synthetic oligonucleotide
ugaaccugauguugcacag

SEQ ID NO: 1390350 - RNA, 19 nt, Artificial Sequence
  Description of Artificial Sequence: Synthetic oligonucleotide
uaucgggacugucacgcgg

SEQ ID NO: 1390351 - RNA, 19 nt, Artificial Sequence
  Description of Artificial Sequence: Synthetic oligonucleotide
ugccgugcaucaaugagug

SEQ ID NO: 1390352 - RNA, 19 nt, Artificial Sequence
  Description of Artificial Sequence: Synthetic oligonucleotide
caucaaugagugcugcugg

SEQ ID NO: 1390353 - RNA, 19 nt, Artificial Sequence
  Description of Artificial Sequence: Synthetic oligonucleotide
ucugcgugccuugucagcg

SEQ ID NO: 1390354 - RNA, 19 nt, Artificial Sequence
  Description of Artificial Sequence: Synthetic oligonucleotide
guacacucaugguagucgg

SEQ ID NO: 1390355 - RNA, 19 nt, Artificial Sequence
  Description of Artificial Sequence: Synthetic oligonucleotide
gaagcuuacgcgacaugcg

SEQ ID NO: 1390356 - RNA, 19 nt, Artificial Sequence
  Description of Artificial Sequence: Synthetic oligonucleotide
ucccuugugguagauauga

SEQ ID NO: 1390357 - RNA, 19 nt, Artificial Sequence
  Description of Artificial Sequence: Synthetic oligonucleotide
acucacuucacgugcucgg

SEQ ID NO: 1390358 - RNA, 19 nt, Artificial Sequence
  Description of Artificial Sequence: Synthetic oligonucleotide
gugccaaggguccaggcgg

SEQ ID NO: 1390359 - RNA, 19 nt, Artificial Sequence
  Description of Artificial Sequence: Synthetic oligonucleotide
guaauacuucuugugugcg

SEQ ID NO: 1390360 - RNA, 19 nt, Artificial Sequence
  Description of Artificial Sequence: Synthetic oligonucleotide
ugugagccagguaagcuuc

SEQ ID NO: 1390361 - RNA, 19 nt, Artificial Sequence
  Description of Artificial Sequence: Synthetic oligonucleotide
ggagcaguaauacuucuug

SEQ ID NO: 1390362 - RNA, 19 nt, Artificial Sequence
  Description of Artificial Sequence: Synthetic oligonucleotide
ucguccaccgaacugccug

SEQ ID NO: 1390363 - RNA, 19 nt, Artificial Sequence
  Description of Artificial Sequence: Synthetic oligonucleotide
ugugucguccaccgaacug

SEQ ID NO: 1390364 - RNA, 19 nt, Artificial Sequence
  Description of Artificial Sequence: Synthetic oligonucleotide
acgcggagcacguucggcc

SEQ ID NO: 1390365 - RNA, 19 nt, Artificial Sequence
  Description of Artificial Sequence: Synthetic oligonucleotide
cacgaguauuucuugugag

SEQ ID NO: 1390366 - RNA, 19 nt, Artificial Sequence
  Description of Artificial Sequence: Synthetic oligonucleotide
uaauacuucuugugugcga

SEQ ID NO: 1390367 - RNA, 19 nt, Artificial Sequence
  Description of Artificial Sequence: Synthetic oligonucleotide
gaguguguccguaugcacc

SEQ ID NO: 1390368 - RNA, 19 nt, Artificial Sequence
  Description of Artificial Sequence: Synthetic oligonucleotide
cacuucacgugcucggagg

SEQ ID NO: 1390369 - RNA, 19 nt, Artificial Sequence
  Description of Artificial Sequence: Synthetic oligonucleotide
cauguggaucuccagcgag

SEQ ID NO: 1390370 - RNA, 19 nt, Artificial Sequence
  Description of Artificial Sequence: Synthetic oligonucleotide
ugcauccggagucuggcga

SEQ ID NO: 1390371 - RNA, 19 nt, Artificial Sequence
  Description of Artificial Sequence: Synthetic oligonucleotide
gguacacucaugguagucg

SEQ ID NO: 1390372 - RNA, 19 nt, Artificial Sequence
  Description of Artificial Sequence: Synthetic oligonucleotide
agaggaugucccuuguggu

SEQ ID NO: 1390373 - RNA, 19 nt, Artificial Sequence
  Description of Artificial Sequence: Synthetic oligonucleotide
ucacuucacgugcucggag

SEQ ID NO: 1390374 - RNA, 19 nt, Artificial Sequence
  Description of Artificial Sequence: Synthetic oligonucleotide
auagagcuugcgucgccgg

SEQ ID NO: 1390375 - RNA, 19 nt, Artificial Sequence
  Description of Artificial Sequence: Synthetic oligonucleotide
uggcacaccaugugguuug

SEQ ID NO: 1390376 - RNA, 19 nt, Artificial Sequence
  Description of Artificial Sequence: Synthetic oligonucleotide
guaagcuucgaggcugugg

SEQ ID NO: 1390377 - RNA, 19 nt, Artificial Sequence
  Description of Artificial Sequence: Synthetic oligonucleotide
cuugugugcgaugaaggug

SEQ ID NO: 1390378 - RNA, 19 nt, Artificial Sequence
  Description of Artificial Sequence: Synthetic oligonucleotide
uguagaggaugucccuugu

SEQ ID NO: 1390379 - RNA, 19 nt, Artificial Sequence
  Description of Artificial Sequence: Synthetic oligonucleotide
ucggccucuggaguggucg

SEQ ID NO: 1390380 - RNA, 19 nt, Artificial Sequence
  Description of Artificial Sequence: Synthetic oligonucleotide
acagcgugcggcugggauc

SEQ ID NO: 1390381 - RNA, 19 nt, Artificial Sequence
  Description of Artificial Sequence: Synthetic oligonucleotide
gacacgcucauugggguag

SEQ ID NO: 1390382 - RNA, 19 nt, Artificial Sequence
  Description of Artificial Sequence: Synthetic oligonucleotide
ggcuguggaagcuuacgcg

SEQ ID NO: 1390383 - RNA, 19 nt, Artificial Sequence
  Description of Artificial Sequence: Synthetic oligonucleotide
ugguagauaugaagccaca

SEQ ID NO: 1390384 - RNA, 19 nt, Artificial Sequence
  Description of Artificial Sequence: Synthetic oligonucleotide
caccaugugguuugucacc

SEQ ID NO: 1390385 - RNA, 19 nt, Artificial Sequence
  Description of Artificial Sequence: Synthetic oligonucleotide
ugcgugccuugucagcggg

SEQ ID NO: 1390386 - RNA, 19 nt, Artificial Sequence
  Description of Artificial Sequence: Synthetic oligonucleotide
gaggcuguggaagcuuacg

SEQ ID NO: 1390387 - RNA, 19 nt, Artificial Sequence
  Description of Artificial Sequence: Synthetic oligonucleotide
uuacgcgacaugcgguaca

SEQ ID NO: 1390388 - RNA, 19 nt, Artificial Sequence
  Description of Artificial Sequence: Synthetic oligonucleotide
ccuugugguagauaugaag

SEQ ID NO: 1390389 - RNA, 19 nt, Artificial Sequence
  Description of Artificial Sequence: Synthetic oligonucleotide
gacugucacgcggagcacg

SEQ ID NO: 1390390 - RNA, 19 nt, Artificial Sequence
  Description of Artificial Sequence: Synthetic oligonucleotide
gugucguccaccgaacugc

SEQ ID NO: 1390391 - RNA, 19 nt, Artificial Sequence
  Description of Artificial Sequence: Synthetic oligonucleotide
ucauagagcuugcgucgcc

SEQ ID NO: 1390392 - RNA, 19 nt, Artificial Sequence
  Description of Artificial Sequence: Synthetic oligonucleotide
uguggaucuccagcgagcu

SEQ ID NO: 1390393 - RNA, 19 nt, Artificial Sequence
  Description of Artificial Sequence: Synthetic oligonucleotide
ucuaugggcccgucgggca

SEQ ID NO: 1390394 - RNA, 19 nt, Artificial Sequence
  Description of Artificial Sequence: Synthetic oligonucleotide
gccagguaagcuucgaggc

SEQ ID NO: 1390395 - RNA, 19 nt, Artificial Sequence
  Description of Artificial Sequence: Synthetic oligonucleotide
cuguagaggaugucccuug

SEQ ID NO: 1390396 - RNA, 19 nt, Artificial Sequence
  Description of Artificial Sequence: Synthetic oligonucleotide
agcacguucggccggugug

SEQ ID NO: 1390397 - RNA, 19 nt, Artificial Sequence
  Description of Artificial Sequence: Synthetic oligonucleotide
uacacucaugguagucggc

SEQ ID NO: 1390398 - RNA, 19 nt, Artificial Sequence
  Description of Artificial Sequence: Synthetic oligonucleotide
caggucuccgcgcacgugc

SEQ ID NO: 1390399 - RNA, 19 nt, Artificial Sequence
  Description of Artificial Sequence: Synthetic oligonucleotide
agagcuugcgucgccggcg

SEQ ID NO: 1390400 - RNA, 19 nt, Artificial Sequence
  Description of Artificial Sequence: Synthetic oligonucleotide
augcgguacacucauggua

SEQ ID NO: 1390401 - RNA, 19 nt, Artificial Sequence
  Description of Artificial Sequence: Synthetic oligonucleotide
ggugccgugcaucaaugag

SEQ ID NO: 1390402 - RNA, 19 nt, Artificial Sequence
  Description of Artificial Sequence: Synthetic oligonucleotide
caguguaggucucguggcg

SEQ ID NO: 1390403 - RNA, 19 nt, Artificial Sequence
  Description of Artificial Sequence: Synthetic oligonucleotide
caggccgugcaccaggcgc

SEQ ID NO: 1390404 - RNA, 19 nt, Artificial Sequence
  Description of Artificial Sequence: Synthetic oligonucleotide
acaccgcugaguguguccg

SEQ ID NO: 1390405 - RNA, 19 nt, Artificial Sequence
  Description of Artificial Sequence: Synthetic oligonucleotide
gugguagauaugaagccac

SEQ ID NO: 1390406 - RNA, 19 nt, Artificial Sequence
  Description of Artificial Sequence: Synthetic oligonucleotide
gcagacucacuucacgugc

SEQ ID NO: 1390407 - RNA, 19 nt, Artificial Sequence
  Description of Artificial Sequence: Synthetic oligonucleotide
gguggcguuccgcaguugg

SEQ ID NO: 1390408 - RNA, 19 nt, Artificial Sequence
  Description of Artificial Sequence: Synthetic oligonucleotide
gacaccgcugagugugucc

SEQ ID NO: 1390409 - RNA, 19 nt, Artificial Sequence
  Description of Artificial Sequence: Synthetic oligonucleotide
gguagauaugaagccacag

SEQ ID NO: 1390410 - RNA, 19 nt, Artificial Sequence
  Description of Artificial Sequence: Synthetic oligonucleotide
gagccagguaagcuucgag

SEQ ID NO: 1390411 - RNA, 19 nt, Artificial Sequence
  Description of Artificial Sequence: Synthetic oligonucleotide
agcgcuuguguacagugua

SEQ ID NO: 1390412 - RNA, 19 nt, Artificial Sequence
  Description of Artificial Sequence: Synthetic oligonucleotide
uggaagcuugccaggcugu

SEQ ID NO: 1390413 - RNA, 19 nt, Artificial Sequence
  Description of Artificial Sequence: Synthetic oligonucleotide
uggcgacaagcgcugcggg

SEQ ID NO: 1390414 - RNA, 19 nt, Artificial Sequence
  Description of Artificial Sequence: Synthetic oligonucleotide
uagagcuugcgucgccggc

SEQ ID NO: 1390415 - RNA, 19 nt, Artificial Sequence
  Description of Artificial Sequence: Synthetic oligonucleotide
cucguggcggcugaagcgg

SEQ ID NO: 1390416 - RNA, 19 nt, Artificial Sequence
  Description of Artificial Sequence: Synthetic oligonucleotide
ucaaugagugcugcuggaa

SEQ ID NO: 1390417 - RNA, 19 nt, Artificial Sequence
  Description of Artificial Sequence: Synthetic oligonucleotide
gggacugucacgcggagca

SEQ ID NO: 1390418 - RNA, 19 nt, Artificial Sequence
  Description of Artificial Sequence: Synthetic oligonucleotide
uuggagggcguccgcacac

SEQ ID NO: 1390419 - RNA, 19 nt, Artificial Sequence
  Description of Artificial Sequence: Synthetic oligonucleotide
gaugcgggcgggcccuugg

SEQ ID NO: 1390420 - RNA, 19 nt, Artificial Sequence
  Description of Artificial Sequence: Synthetic oligonucleotide
gagucuggcgacggggccg

SEQ ID NO: 1390421 - RNA, 19 nt, Artificial Sequence
  Description of Artificial Sequence: Synthetic oligonucleotide
agggcacgaguauuucuug

SEQ ID NO: 1390422 - RNA, 19 nt, Artificial Sequence
  Description of Artificial Sequence: Synthetic oligonucleotide
uucacgugcucggaggcgu

SEQ ID NO: 1390423 - RNA, 19 nt, Artificial Sequence
  Description of Artificial Sequence: Synthetic oligonucleotide
guagaggaugucccuugug

SEQ ID NO: 1390424 - RNA, 19 nt, Artificial Sequence
  Description of Artificial Sequence: Synthetic oligonucleotide
ugugcggggcucagcaccu

SEQ ID NO: 1390425 - RNA, 19 nt, Artificial Sequence
  Description of Artificial Sequence: Synthetic oligonucleotide
uggcguuccgcaguuggcc

SEQ ID NO: 1390426 - RNA, 19 nt, Artificial Sequence
  Description of Artificial Sequence: Synthetic oligonucleotide
gcagacacgcucauugggg

SEQ ID NO: 1390427 - RNA, 19 nt, Artificial Sequence
  Description of Artificial Sequence: Synthetic oligonucleotide
ggcacgaguauuucuugug

SEQ ID NO: 1390428 - RNA, 19 nt, Artificial Sequence
  Description of Artificial Sequence: Synthetic oligonucleotide
gaagcggauguugcaggcc

SEQ ID NO: 1390429 - RNA, 19 nt, Artificial Sequence
  Description of Artificial Sequence: Synthetic oligonucleotide
uggaagcuuacgcgacaug

SEQ ID NO: 1390430 - RNA, 19 nt, Artificial Sequence
  Description of Artificial Sequence: Synthetic oligonucleotide
cagcgugcggcugggaucg

SEQ ID NO: 1390431 - RNA, 19 nt, Artificial Sequence
  Description of Artificial Sequence: Synthetic oligonucleotide
cucauagagcuugcgucgc

SEQ ID NO: 1390432 - RNA, 19 nt, Artificial Sequence
  Description of Artificial Sequence: Synthetic oligonucleotide
ucacgcggagcacguucgg

SEQ ID NO: 1390433 - RNA, 19 nt, Artificial Sequence
  Description of Artificial Sequence: Synthetic oligonucleotide
cuggcgacaagcgcugcgg

SEQ ID NO: 1390434 - RNA, 19 nt, Artificial Sequence
  Description of Artificial Sequence: Synthetic oligonucleotide
guaguagcgcuuguguaca

SEQ ID NO: 1390435 - RNA, 19 nt, Artificial Sequence
  Description of Artificial Sequence: Synthetic oligonucleotide
uggaguggucgcgccaccg

SEQ ID NO: 1390436 - RNA, 19 nt, Artificial Sequence
  Description of Artificial Sequence: Synthetic oligonucleotide
gcuguggaagcuuacgcga

SEQ ID NO: 1390437 - RNA, 19 nt, Artificial Sequence
  Description of Artificial Sequence: Synthetic oligonucleotide
ucaugguagucggccagug

SEQ ID NO: 1390438 - RNA, 19 nt, Artificial Sequence
  Description of Artificial Sequence: Synthetic oligonucleotide
agugcgcaaaggcgcagca

SEQ ID NO: 1390439 - RNA, 19 nt, Artificial Sequence
  Description of Artificial Sequence: Synthetic oligonucleotide
gaaggcguguucucaggaa

SEQ ID NO: 1390440 - RNA, 19 nt, Artificial Sequence
  Description of Artificial Sequence: Synthetic oligonucleotide
gucacgcggagcacguucg

SEQ ID NO: 1390441 - RNA, 19 nt, Artificial Sequence
  Description of Artificial Sequence: Synthetic oligonucleotide
uccggagucuggcgacggg

SEQ ID NO: 1390442 - RNA, 19 nt, Artificial Sequence
  Description of Artificial Sequence: Synthetic oligonucleotide
agucuggcgacggggccgc

SEQ ID NO: 1390443 - RNA, 19 nt, Artificial Sequence
  Description of Artificial Sequence: Synthetic oligonucleotide
gacggggccgcuugcucag

SEQ ID NO: 1390444 - RNA, 19 nt, Artificial Sequence
  Description of Artificial Sequence: Synthetic oligonucleotide
guacaguguaggucucgug

SEQ ID NO: 1390445 - RNA, 19 nt, Artificial Sequence
  Description of Artificial Sequence: Synthetic oligonucleotide
ugggaucguccucuguguc

SEQ ID NO: 1390446 - RNA, 19 nt, Artificial Sequence
  Description of Artificial Sequence: Synthetic oligonucleotide
ucgggcaccgggccuggag

SEQ ID NO: 1390447 - RNA, 19 nt, Artificial Sequence
  Description of Artificial Sequence: Synthetic oligonucleotide
uaguagcgcuuguguacag

SEQ ID NO: 1390448 - RNA, 19 nt, Artificial Sequence
  Description of Artificial Sequence: Synthetic oligonucleotide
cucuucucguggcccaggc

SEQ ID NO: 1390449 - RNA, 19 nt, Artificial Sequence
  Description of Artificial Sequence: Synthetic oligonucleotide
cucugcgugccuugucagc

SEQ ID NO: 1390450 - RNA, 19 nt, Artificial Sequence
  Description of Artificial Sequence: Synthetic oligonucleotide
ucgaggcuguggaagcuua

SEQ ID NO: 1390451 - RNA, 19 nt, Artificial Sequence
  Description of Artificial Sequence: Synthetic oligonucleotide
uagucggccagugcaggca

SEQ ID NO: 1390452 - RNA, 19 nt, Artificial Sequence
  Description of Artificial Sequence: Synthetic oligonucleotide
caggucuaugggcccgucg

SEQ ID NO: 1390453 - RNA, 19 nt, Artificial Sequence
  Description of Artificial Sequence: Synthetic oligonucleotide
caggccucacacagcgugc

SEQ ID NO: 1390454 - RNA, 19 nt, Artificial Sequence
  Description of Artificial Sequence: Synthetic oligonucleotide
gcuucgaggcuguggaagc

SEQ ID NO: 1390455 - RNA, 19 nt, Artificial Sequence
  Description of Artificial Sequence: Synthetic oligonucleotide
agcagggcacgaguauuuc

SEQ ID NO: 1390456 - RNA, 19 nt, Artificial Sequence
  Description of Artificial Sequence: Synthetic oligonucleotide
ugugugcgaugaaggugga

SEQ ID NO: 1390457 - RNA, 19 nt, Artificial Sequence
  Description of Artificial Sequence: Synthetic oligonucleotide
cuucacgugcucggaggcg

SEQ ID NO: 1390458 - RNA, 19 nt, Artificial Sequence
  Description of Artificial Sequence: Synthetic oligonucleotide
uacgcgacaugcgguacac

SEQ ID NO: 1390459 - RNA, 19 nt, Artificial Sequence
  Description of Artificial Sequence: Synthetic oligonucleotide
ugcgucgccggcgcgugcg

SEQ ID NO: 1390460 - RNA, 19 nt, Artificial Sequence
  Description of Artificial Sequence: Synthetic oligonucleotide
cugcgggucugccucugcg

SEQ ID NO: 1390461 - RNA, 19 nt, Artificial Sequence
  Description of Artificial Sequence: Synthetic oligonucleotide
caccgucucuucucguggc

SEQ ID NO: 1390462 - RNA, 19 nt, Artificial Sequence
  Description of Artificial Sequence: Synthetic oligonucleotide
aggccucacacagcgugcg

SEQ ID NO: 1390463 - RNA, 19 nt, Artificial Sequence
  Description of Artificial Sequence: Synthetic oligonucleotide
acccuggugaguagauuuc

SEQ ID NO: 1390464 - RNA, 19 nt, Artificial Sequence
  Description of Artificial Sequence: Synthetic oligonucleotide
caccgaacugccugggcuc

SEQ ID NO: 1390465 - RNA, 19 nt, Artificial Sequence
  Description of Artificial Sequence: Synthetic oligonucleotide
ucgggacugucacgcggag

SEQ ID NO: 1390466 - RNA, 19 nt, Artificial Sequence
  Description of Artificial Sequence: Synthetic oligonucleotide
acaggggcggggccuacug

SEQ ID NO: 1390467 - RNA, 19 nt, Artificial Sequence
  Description of Artificial Sequence: Synthetic oligonucleotide
gagcuugcgucgccggcgc

SEQ ID NO: 1390468 - RNA, 19 nt, Artificial Sequence
  Description of Artificial Sequence: Synthetic oligonucleotide
gucuaugggcccgucgggc

SEQ ID NO: 1390469 - RNA, 19 nt, Artificial Sequence
  Description of Artificial Sequence: Synthetic oligonucleotide
cuugcgcucgccggucucg

SEQ ID NO: 1390470 - RNA, 19 nt, Artificial Sequence
  Description of Artificial Sequence: Synthetic oligonucleotide
ugcgggucugccucugcgu

SEQ ID NO: 1390471 - RNA, 19 nt, Artificial Sequence
  Description of Artificial Sequence: Synthetic oligonucleotide
ugcccggcuaucgggacug

SEQ ID NO: 1390472 - RNA, 19 nt, Artificial Sequence
  Description of Artificial Sequence: Synthetic oligonucleotide
ggugcauccggagucuggc

SEQ ID NO: 1390473 - RNA, 19 nt, Artificial Sequence
  Description of Artificial Sequence: Synthetic oligonucleotide
gaguggucgcgccaccguc

SEQ ID NO: 1390474 - RNA, 19 nt, Artificial Sequence
  Description of Artificial Sequence: Synthetic oligonucleotide
gauggggugcguggugccc

SEQ ID NO: 1390475 - RNA, 19 nt, Artificial Sequence
  Description of Artificial Sequence: Synthetic oligonucleotide
cugcgugccuugucagcgg

SEQ ID NO: 1390476 - RNA, 19 nt, Artificial Sequence
  Description of Artificial Sequence: Synthetic oligonucleotide
cuaugggcccgucgggcac

SEQ ID NO: 1390477 - RNA, 19 nt, Artificial Sequence
  Description of Artificial Sequence: Synthetic oligonucleotide
cuuacgcgacaugcgguac

SEQ ID NO: 1390478 - RNA, 19 nt, Artificial Sequence
  Description of Artificial Sequence: Synthetic oligonucleotide
gcacgaguauuucuuguga

SEQ ID NO: 1390479 - RNA, 19 nt, Artificial Sequence
  Description of Artificial Sequence: Synthetic oligonucleotide
ucacgugcucggaggcgug

SEQ ID NO: 1390480 - RNA, 19 nt, Artificial Sequence
  Description of Artificial Sequence: Synthetic oligonucleotide
cucgcugccccggccagcg

SEQ ID NO: 1390481 - RNA, 19 nt, Artificial Sequence
  Description of Artificial Sequence: Synthetic oligonucleotide
aaggggcagacacgcucau

SEQ ID NO: 1390482 - RNA, 19 nt, Artificial Sequence
  Description of Artificial Sequence: Synthetic oligonucleotide
aggucuccgcgcacgugcc

SEQ ID NO: 1390483 - RNA, 19 nt, Artificial Sequence
  Description of Artificial Sequence: Synthetic oligonucleotide
ggugcggauggccggcgcg

SEQ ID NO: 1390484 - RNA, 19 nt, Artificial Sequence
  Description of Artificial Sequence: Synthetic oligonucleotide
uggggugcguggugcccgg

SEQ ID NO: 1390485 - RNA, 19 nt, Artificial Sequence
  Description of Artificial Sequence: Synthetic oligonucleotide
caccuugagguggcguucc

SEQ ID NO: 1390486 - RNA, 19 nt, Artificial Sequence
  Description of Artificial Sequence: Synthetic oligonucleotide
uguaggucucguggcggcu

SEQ ID NO: 1390487 - RNA, 19 nt, Artificial Sequence
  Description of Artificial Sequence: Synthetic oligonucleotide
ggcuaucgggacugucacg

SEQ ID NO: 1390488 - RNA, 19 nt, Artificial Sequence
  Description of Artificial Sequence: Synthetic oligonucleotide
caccaggucuccgcgcacg

SEQ ID NO: 1390489 - RNA, 19 nt, Artificial Sequence
  Description of Artificial Sequence: Synthetic oligonucleotide
ggcgcaagugcuccaccag

SEQ ID NO: 1390490 - RNA, 19 nt, Artificial Sequence
  Description of Artificial Sequence: Synthetic oligonucleotide
agcuuacgcgacaugcggu

SEQ ID NO: 1390491 - RNA, 19 nt, Artificial Sequence
  Description of Artificial Sequence: Synthetic oligonucleotide
uaugggcccgucgggcacc

SEQ ID NO: 1390492 - RNA, 19 nt, Artificial Sequence
  Description of Artificial Sequence: Synthetic oligonucleotide
cacucaugguagucggcca

SEQ ID NO: 1390493 - RNA, 19 nt, Artificial Sequence
  Description of Artificial Sequence: Synthetic oligonucleotide
auccggagucuggcgacgg

SEQ ID NO: 1390494 - RNA, 19 nt, Artificial Sequence
  Description of Artificial Sequence: Synthetic oligonucleotide
agacaccgcugaguguguc

SEQ ID NO: 1390495 - RNA, 19 nt, Artificial Sequence
  Description of Artificial Sequence: Synthetic oligonucleotide
aggcguguucucaggaacu

SEQ ID NO: 1390496 - RNA, 19 nt, Artificial Sequence
  Description of Artificial Sequence: Synthetic oligonucleotide
gcacgugcccguugggcgg

SEQ ID NO: 1390497 - RNA, 19 nt, Artificial Sequence
  Description of Artificial Sequence: Synthetic oligonucleotide
aucgggacugucacgcgga

SEQ ID NO: 1390498 - RNA, 19 nt, Artificial Sequence
  Description of Artificial Sequence: Synthetic oligonucleotide
cccgcagacucacuucacg

SEQ ID NO: 1390499 - RNA, 19 nt, Artificial Sequence
  Description of Artificial Sequence: Synthetic oligonucleotide
acugucacgcggagcacgu

SEQ ID NO: 1390500 - RNA, 19 nt, Artificial Sequence
  Description of Artificial Sequence: Synthetic oligonucleotide
uugcgcucgccggucucgg

SEQ ID NO: 1390501 - RNA, 19 nt, Artificial Sequence
  Description of Artificial Sequence: Synthetic oligonucleotide
ccaccgucucuucucgugg

SEQ ID NO: 1390502 - RNA, 19 nt, Artificial Sequence
  Description of Artificial Sequence: Synthetic oligonucleotide
ggauguugcaggccucaca

SEQ ID NO: 1390503 - RNA, 19 nt, Artificial Sequence
  Description of Artificial Sequence: Synthetic oligonucleotide
uccgcgcacgugcccguug

SEQ ID NO: 1390504 - RNA, 19 nt, Artificial Sequence
  Description of Artificial Sequence: Synthetic oligonucleotide
accaggucuccgcgcacgu

SEQ ID NO: 1390505 - RNA, 19 nt, Artificial Sequence
  Description of Artificial Sequence: Synthetic oligonucleotide
acguucggccggugugcgg

SEQ ID NO: 1390506 - RNA, 19 nt, Artificial Sequence
  Description of Artificial Sequence: Synthetic oligonucleotide
gugcggauggccggcgcgg

SEQ ID NO: 1390507 - RNA, 19 nt, Artificial Sequence
  Description of Artificial Sequence: Synthetic oligonucleotide
cacguucggccggugugcg

SEQ ID NO: 1390508 - RNA, 19 nt, Artificial Sequence
  Description of Artificial Sequence: Synthetic oligonucleotide
gccaccgucucuucucgug

SEQ ID NO: 1390509 - RNA, 19 nt, Artificial Sequence
  Description of Artificial Sequence: Synthetic oligonucleotide
gucucggggaggagggcag

SEQ ID NO: 1390510 - RNA, 19 nt, Artificial Sequence
  Description of Artificial Sequence: Synthetic oligonucleotide
aguggucgcgccaccgucu

SEQ ID NO: 1390511 - RNA, 19 nt, Artificial Sequence
  Description of Artificial Sequence: Synthetic oligonucleotide
agcagugcgcaaaggcgca

SEQ ID NO: 1390512 - RNA, 19 nt, Artificial Sequence
  Description of Artificial Sequence: Synthetic oligonucleotide
gucagcgccggagccgcgg

SEQ ID NO: 1390513 - RNA, 19 nt, Artificial Sequence
  Description of Artificial Sequence: Synthetic oligonucleotide
acacgcucauugggguagg

SEQ ID NO: 1390514 - RNA, 19 nt, Artificial Sequence
  Description of Artificial Sequence: Synthetic oligonucleotide
gcugucagcgccggagccg

SEQ ID NO: 1390515 - RNA, 19 nt, Artificial Sequence
  Description of Artificial Sequence: Synthetic oligonucleotide
ggcgcgugcgcacgggcgg

SEQ ID NO: 1390516 - RNA, 19 nt, Artificial Sequence
  Description of Artificial Sequence: Synthetic oligonucleotide
ggcgcaguaguagcgcuug

SEQ ID NO: 1390517 - RNA, 19 nt, Artificial Sequence
  Description of Artificial Sequence: Synthetic oligonucleotide
gcgggcgggcccuuggagg

SEQ ID NO: 1390518 - RNA, 19 nt, Artificial Sequence
  Description of Artificial Sequence: Synthetic oligonucleotide
guucggccggugugcgggg

SEQ ID NO: 1390519 - RNA, 19 nt, Artificial Sequence
  Description of Artificial Sequence: Synthetic oligonucleotide
cacgcggagcacguucggc

SEQ ID NO: 1390520 - RNA, 19 nt, Artificial Sequence
  Description of Artificial Sequence: Synthetic oligonucleotide
cgcgacaugcgguacacuc

SEQ ID NO: 1390521 - RNA, 19 nt, Artificial Sequence
  Description of Artificial Sequence: Synthetic oligonucleotide
ccggucucggggaggaggg

SEQ ID NO: 1390522 - RNA, 19 nt, Artificial Sequence
  Description of Artificial Sequence: Synthetic oligonucleotide
ugucagcgggagccagggu

SEQ ID NO: 1390523 - RNA, 19 nt, Artificial Sequence
  Description of Artificial Sequence: Synthetic oligonucleotide
uggagggcguccgcacacc

SEQ ID NO: 1390524 - RNA, 19 nt, Artificial Sequence
  Description of Artificial Sequence: Synthetic oligonucleotide
gacaugcgguacacucaug

SEQ ID NO: 1390525 - RNA, 19 nt, Artificial Sequence
  Description of Artificial Sequence: Synthetic oligonucleotide
agcggauguugcaggccuc

SEQ ID NO: 1390526 - RNA, 19 nt, Artificial Sequence
  Description of Artificial Sequence: Synthetic oligonucleotide
ucgcgccaccgucucuucu

SEQ ID NO: 1390527 - RNA, 19 nt, Artificial Sequence
  Description of Artificial Sequence: Synthetic oligonucleotide
cgcacgugcccguugggcg

SEQ ID NO: 1390528 - RNA, 19 nt, Artificial Sequence
  Description of Artificial Sequence: Synthetic oligonucleotide
gugcgcaaaggcgcagcag

SEQ ID NO: 1390529 - RNA, 19 nt, Artificial Sequence
  Description of Artificial Sequence: Synthetic oligonucleotide
guggcguuccgcaguuggc

SEQ ID NO: 1390530 - RNA, 19 nt, Artificial Sequence
  Description of Artificial Sequence: Synthetic oligonucleotide
gcucaggucuaugggcccg

SEQ ID NO: 1390531 - RNA, 19 nt, Artificial Sequence
  Description of Artificial Sequence: Synthetic oligonucleotide
cagacacgcucauuggggu

SEQ ID NO: 1390532 - RNA, 19 nt, Artificial Sequence
  Description of Artificial Sequence: Synthetic oligonucleotide
guccaccgaacugccuggg

SEQ ID NO: 1390533 - RNA, 19 nt, Artificial Sequence
  Description of Artificial Sequence: Synthetic oligonucleotide
ggcguguucucaggaacug

SEQ ID NO: 1390534 - RNA, 19 nt, Artificial Sequence
  Description of Artificial Sequence: Synthetic oligonucleotide
gaggcgcaguaguagcgcu

SEQ ID NO: 1390535 - RNA, 19 nt, Artificial Sequence
  Description of Artificial Sequence: Synthetic oligonucleotide
gugccgugcaucaaugagu

SEQ ID NO: 1390536 - RNA, 19 nt, Artificial Sequence
  Description of Artificial Sequence: Synthetic oligonucleotide
ugagugcugcuggaagcuu

SEQ ID NO: 1390537 - RNA, 19 nt, Artificial Sequence
  Description of Artificial Sequence: Synthetic oligonucleotide
aggcacacaaagggacgcu

SEQ ID NO: 1390538 - RNA, 19 nt, Artificial Sequence
  Description of Artificial Sequence: Synthetic oligonucleotide
cacgggcggagcugucagc

SEQ ID NO: 1390539 - RNA, 19 nt, Artificial Sequence
  Description of Artificial Sequence: Synthetic oligonucleotide
gggcccgucgggcaccggg

SEQ ID NO: 1390540 - RNA, 19 nt, Artificial Sequence
  Description of Artificial Sequence: Synthetic oligonucleotide
caugcgguacacucauggu

SEQ ID NO: 1390541 - RNA, 19 nt, Artificial Sequence
  Description of Artificial Sequence: Synthetic oligonucleotide
gucccuugugguagauaug

SEQ ID NO: 1390542 - RNA, 19 nt, Artificial Sequence
  Description of Artificial Sequence: Synthetic oligonucleotide
cuacugcaggaggcggagc

SEQ ID NO: 1390543 - RNA, 19 nt, Artificial Sequence
  Description of Artificial Sequence: Synthetic oligonucleotide
gccggucucggggaggagg

SEQ ID NO: 1390544 - RNA, 19 nt, Artificial Sequence
  Description of Artificial Sequence: Synthetic oligonucleotide
cuugcgucgccggcgcgug

SEQ ID NO: 1390545 - RNA, 19 nt, Artificial Sequence
  Description of Artificial Sequence: Synthetic oligonucleotide
cucacuucacgugcucgga

SEQ ID NO: 1390546 - RNA, 19 nt, Artificial Sequence
  Description of Artificial Sequence: Synthetic oligonucleotide
gcauccggagucuggcgac

SEQ ID NO: 1390547 - RNA, 19 nt, Artificial Sequence
  Description of Artificial Sequence: Synthetic oligonucleotide
gacagacaccgcugagugu

SEQ ID NO: 1390548 - RNA, 19 nt, Artificial Sequence
  Description of Artificial Sequence: Synthetic oligonucleotide
caggggcggggccuacugc

SEQ ID NO: 1390549 - RNA, 19 nt, Artificial Sequence
  Description of Artificial Sequence: Synthetic oligonucleotide
gugcccguugggcgggcag

SEQ ID NO: 1390550 - RNA, 19 nt, Artificial Sequence
  Description of Artificial Sequence: Synthetic oligonucleotide
agguaagcuucgaggcugu

SEQ ID NO: 1390551 - RNA, 19 nt, Artificial Sequence
  Description of Artificial Sequence: Synthetic oligonucleotide
ccguaugcaccuugaggug

SEQ ID NO: 1390552 - RNA, 19 nt, Artificial Sequence
  Description of Artificial Sequence: Synthetic oligonucleotide
gcuuacgcgacaugcggua

SEQ ID NO: 1390553 - RNA, 19 nt, Artificial Sequence
  Description of Artificial Sequence: Synthetic oligonucleotide
gcgggucugccucugcgug

SEQ ID NO: 1390554 - RNA, 19 nt, Artificial Sequence
  Description of Artificial Sequence: Synthetic oligonucleotide
gcacgggcggagcugucag

SEQ ID NO: 1390555 - RNA, 19 nt, Artificial Sequence
  Description of Artificial Sequence: Synthetic oligonucleotide
ccguugggcgggcaguagg

SEQ ID NO: 1390556 - RNA, 19 nt, Artificial Sequence
  Description of Artificial Sequence: Synthetic oligonucleotide
cagcucauagagcuugcgu

SEQ ID NO: 1390557 - RNA, 19 nt, Artificial Sequence
  Description of Artificial Sequence: Synthetic oligonucleotide
uggcgggucguggcgcgag

SEQ ID NO: 1390558 - RNA, 19 nt, Artificial Sequence
  Description of Artificial Sequence: Synthetic oligonucleotide
augcaccuugagguggcgu

SEQ ID NO: 1390559 - RNA, 19 nt, Artificial Sequence
  Description of Artificial Sequence: Synthetic oligonucleotide
cugggaucguccucugugu

SEQ ID NO: 1390560 - RNA, 19 nt, Artificial Sequence
  Description of Artificial Sequence: Synthetic oligonucleotide
gcgcaaaggcgcagcaggg

SEQ ID NO: 1390561 - RNA, 19 nt, Artificial Sequence
  Description of Artificial Sequence: Synthetic oligonucleotide
ucuccgcgcacgugcccgu

SEQ ID NO: 1390562 - RNA, 19 nt, Artificial Sequence
  Description of Artificial Sequence: Synthetic oligonucleotide
cgcagacucacuucacgug

SEQ ID NO: 1390563 - RNA, 19 nt, Artificial Sequence
  Description of Artificial Sequence: Synthetic oligonucleotide
gggucugccucugcgugcc

SEQ ID NO: 1390564 - RNA, 19 nt, Artificial Sequence
  Description of Artificial Sequence: Synthetic oligonucleotide
gaggcgugagaggagcagu

SEQ ID NO: 1390565 - RNA, 19 nt, Artificial Sequence
  Description of Artificial Sequence: Synthetic oligonucleotide
ccuacugcaggaggcggag

SEQ ID NO: 1390566 - RNA, 19 nt, Artificial Sequence
  Description of Artificial Sequence: Synthetic oligonucleotide
cacgugcccguugggcggg

SEQ ID NO: 1390567 - RNA, 19 nt, Artificial Sequence
  Description of Artificial Sequence: Synthetic oligonucleotide
guggucgcgccaccgucuc

SEQ ID NO: 1390568 - RNA, 19 nt, Artificial Sequence
  Description of Artificial Sequence: Synthetic oligonucleotide
gacaagcgcugcgggucug

SEQ ID NO: 1390569 - RNA, 19 nt, Artificial Sequence
  Description of Artificial Sequence: Synthetic oligonucleotide
gcgacaagcgcugcggguc

SEQ ID NO: 1390570 - RNA, 19 nt, Artificial Sequence
  Description of Artificial Sequence: Synthetic oligonucleotide
ccggcuaucgggacuguca

SEQ ID NO: 1390571 - RNA, 19 nt, Artificial Sequence
  Description of Artificial Sequence: Synthetic oligonucleotide
cucgccggucucggggagg

SEQ ID NO: 1390572 - RNA, 19 nt, Artificial Sequence
  Description of Artificial Sequence: Synthetic oligonucleotide
ccggagucuggcgacgggg

SEQ ID NO: 1390573 - RNA, 19 nt, Artificial Sequence
  Description of Artificial Sequence: Synthetic oligonucleotide
cguucggccggugugcggg

SEQ ID NO: 1390574 - RNA, 19 nt, Artificial Sequence
  Description of Artificial Sequence: Synthetic oligonucleotide
cgcgaggcgcaguaguagc

SEQ ID NO: 1390575 - RNA, 19 nt, Artificial Sequence
  Description of Artificial Sequence: Synthetic oligonucleotide
augcgggcgggcccuugga

SEQ ID NO: 1390576 - RNA, 19 nt, Artificial Sequence
  Description of Artificial Sequence: Synthetic oligonucleotide
cagcgagcuggcgcugggg

SEQ ID NO: 1390577 - RNA, 19 nt, Artificial Sequence
  Description of Artificial Sequence: Synthetic oligonucleotide
uggucgcgccaccgucucu

SEQ ID NO: 1390578 - RNA, 19 nt, Artificial Sequence
  Description of Artificial Sequence: Synthetic oligonucleotide
gggucguggcgcgaggcgc

SEQ ID NO: 1390579 - RNA, 19 nt, Artificial Sequence
  Description of Artificial Sequence: Synthetic oligonucleotide
gcggagcacguucggccgg

SEQ ID NO: 1390580 - RNA, 19 nt, Artificial Sequence
  Description of Artificial Sequence: Synthetic oligonucleotide
gccccgcagacucacuuca

SEQ ID NO: 1390581 - RNA, 19 nt, Artificial Sequence
  Description of Artificial Sequence: Synthetic oligonucleotide
uucggccggugugcggggc

SEQ ID NO: 1390582 - RNA, 19 nt, Artificial Sequence
  Description of Artificial Sequence: Synthetic oligonucleotide
agacccuggugaguagauu

SEQ ID NO: 1390583 - RNA, 19 nt, Artificial Sequence
  Description of Artificial Sequence: Synthetic oligonucleotide
uugcgucgccggcgcgugc

SEQ ID NO: 1390584 - RNA, 19 nt, Artificial Sequence
  Description of Artificial Sequence: Synthetic oligonucleotide
gucgccggcgcgugcgcac

SEQ ID NO: 1390585 - RNA, 19 nt, Artificial Sequence
  Description of Artificial Sequence: Synthetic oligonucleotide
cgugagaggagcaguaaua

SEQ ID NO: 1390586 - RNA, 19 nt, Artificial Sequence
  Description of Artificial Sequence: Synthetic oligonucleotide
cgcggagcacguucggccg

SEQ ID NO: 1390587 - RNA, 19 nt, Artificial Sequence
  Description of Artificial Sequence: Synthetic oligonucleotide
ugaugcgggcgggcccuug

SEQ ID NO: 1390588 - RNA, 19 nt, Artificial Sequence
  Description of Artificial Sequence: Synthetic oligonucleotide
ugcguggugcccggcuauc

SEQ ID NO: 1390589 - RNA, 19 nt, Artificial Sequence
  Description of Artificial Sequence: Synthetic oligonucleotide
augggcccgucgggcaccg

SEQ ID NO: 1390590 - RNA, 19 nt, Artificial Sequence
  Description of Artificial Sequence: Synthetic oligonucleotide
gugugcgaugaagguggac

SEQ ID NO: 1390591 - RNA, 19 nt, Artificial Sequence
  Description of Artificial Sequence: Synthetic oligonucleotide
gcgacaugcgguacacuca

SEQ ID NO: 1390592 - RNA, 19 nt, Artificial Sequence
  Description of Artificial Sequence: Synthetic oligonucleotide
uggcgcuggggcagcuuuu

SEQ ID NO: 1390593 - RNA, 19 nt, Artificial Sequence
  Description of Artificial Sequence: Synthetic oligonucleotide
ggcggugcggccccgcaga

SEQ ID NO: 1390594 - RNA, 19 nt, Artificial Sequence
  Description of Artificial Sequence: Synthetic oligonucleotide
gcaggccgugcaccaggcg

SEQ ID NO: 1390595 - RNA, 19 nt, Artificial Sequence
  Description of Artificial Sequence: Synthetic oligonucleotide
gggucagaaggcguguucu

SEQ ID NO: 1390596 - RNA, 19 nt, Artificial Sequence
  Description of Artificial Sequence: Synthetic oligonucleotide
cgugccuugucagcgggag

SEQ ID NO: 1390597 - RNA, 19 nt, Artificial Sequence
  Description of Artificial Sequence: Synthetic oligonucleotide
gagcacguucggccggugu

SEQ ID NO: 1390598 - RNA, 19 nt, Artificial Sequence
  Description of Artificial Sequence: Synthetic oligonucleotide
gcgcgaggcgcaguaguag

SEQ ID NO: 1390599 - RNA, 19 nt, Artificial Sequence
  Description of Artificial Sequence: Synthetic oligonucleotide
guggaagcuuacgcgacau

SEQ ID NO: 1390600 - RNA, 19 nt, Artificial Sequence
  Description of Artificial Sequence: Synthetic oligonucleotide
ggcgggcccuuggagggcg

SEQ ID NO: 1390601 - RNA, 19 nt, Artificial Sequence
  Description of Artificial Sequence: Synthetic oligonucleotide
gcguggugcccggcuaucg

SEQ ID NO: 1390602 - RNA, 19 nt, Artificial Sequence
  Description of Artificial Sequence: Synthetic oligonucleotide
gggugccgugcaucaauga

SEQ ID NO: 1390603 - RNA, 19 nt, Artificial Sequence
  Description of Artificial Sequence: Synthetic oligonucleotide
gggcacgaguauuucuugu

SEQ ID NO: 1390604 - RNA, 19 nt, Artificial Sequence
  Description of Artificial Sequence: Synthetic oligonucleotide
gcguccgcacaccuugguc

SEQ ID NO: 1390605 - RNA, 19 nt, Artificial Sequence
  Description of Artificial Sequence: Synthetic oligonucleotide
cggcuaucgggacugucac

SEQ ID NO: 1390606 - RNA, 19 nt, Artificial Sequence
  Description of Artificial Sequence: Synthetic oligonucleotide
guggcgcgaggcgcaguag

SEQ ID NO: 1390607 - RNA, 19 nt, Artificial Sequence
  Description of Artificial Sequence: Synthetic oligonucleotide
ggucuccgcgcacgugccc

SEQ ID NO: 1390608 - RNA, 19 nt, Artificial Sequence
  Description of Artificial Sequence: Synthetic oligonucleotide
ucuggcgacggggccgcuu

SEQ ID NO: 1390609 - RNA, 19 nt, Artificial Sequence
  Description of Artificial Sequence: Synthetic oligonucleotide
ccgcgcacgugcccguugg

SEQ ID NO: 1390610 - RNA, 19 nt, Artificial Sequence
  Description of Artificial Sequence: Synthetic oligonucleotide
gucguggcgcgaggcgcag

SEQ ID NO: 1390611 - RNA, 19 nt, Artificial Sequence
  Description of Artificial Sequence: Synthetic oligonucleotide
gugcgcacgggcggagcug

SEQ ID NO: 1390612 - RNA, 19 nt, Artificial Sequence
  Description of Artificial Sequence: Synthetic oligonucleotide
gguaagcuucgaggcugug

SEQ ID NO: 1390613 - RNA, 19 nt, Artificial Sequence
  Description of Artificial Sequence: Synthetic oligonucleotide
cugugucguccaccgaacu

SEQ ID NO: 1390614 - RNA, 19 nt, Artificial Sequence
  Description of Artificial Sequence: Synthetic oligonucleotide
cacagcgugcggcugggau

SEQ ID NO: 1390615 - RNA, 19 nt, Artificial Sequence
  Description of Artificial Sequence: Synthetic oligonucleotide
cgaggcgcaguaguagcgc

SEQ ID NO: 1390616 - RNA, 19 nt, Artificial Sequence
  Description of Artificial Sequence: Synthetic oligonucleotide
ccagcgagcuggcgcuggg

SEQ ID NO: 1390617 - RNA, 19 nt, Artificial Sequence
  Description of Artificial Sequence: Synthetic oligonucleotide
gcagugcgcaaaggcgcag

SEQ ID NO: 1390618 - RNA, 19 nt, Artificial Sequence
  Description of Artificial Sequence: Synthetic oligonucleotide
gggcagcagugcgcaaagg

SEQ ID NO: 1390619 - RNA, 19 nt, Artificial Sequence
  Description of Artificial Sequence: Synthetic oligonucleotide
acgugcccguugggcgggc

SEQ ID NO: 1390620 - RNA, 19 nt, Artificial Sequence
  Description of Artificial Sequence: Synthetic oligonucleotide
ggugcguggugcccggcua

SEQ ID NO: 1390621 - RNA, 19 nt, Artificial Sequence
  Description of Artificial Sequence: Synthetic oligonucleotide
ccggcgcuugcgcucgccg

SEQ ID NO: 1390622 - RNA, 19 nt, Artificial Sequence
  Description of Artificial Sequence: Synthetic oligonucleotide
cggggccuacugcaggagg

SEQ ID NO: 1390623 - RNA, 19 nt, Artificial Sequence
  Description of Artificial Sequence: Synthetic oligonucleotide
ggcguuccgcaguuggccu

SEQ ID NO: 1390624 - RNA, 19 nt, Artificial Sequence
  Description of Artificial Sequence: Synthetic oligonucleotide
gggccggcgcuugcgcucg

SEQ ID NO: 1390625 - RNA, 19 nt, Artificial Sequence
  Description of Artificial Sequence: Synthetic oligonucleotide
gcgugagaggagcaguaau

SEQ ID NO: 1390626 - RNA, 19 nt, Artificial Sequence
  Description of Artificial Sequence: Synthetic oligonucleotide
cgcaaaggcgcagcagggc

SEQ ID NO: 1390627 - RNA, 19 nt, Artificial Sequence
  Description of Artificial Sequence: Synthetic oligonucleotide
aggcgcaguaguagcgcuu

SEQ ID NO: 1390628 - RNA, 19 nt, Artificial Sequence
  Description of Artificial Sequence: Synthetic oligonucleotide
acgcgacaugcgguacacu

SEQ ID NO: 1390629 - RNA, 19 nt, Artificial Sequence
  Description of Artificial Sequence: Synthetic oligonucleotide
ccaccgaacugccugggcu

SEQ ID NO: 1390630 - RNA, 19 nt, Artificial Sequence
  Description of Artificial Sequence: Synthetic oligonucleotide
ggcgugagaggagcaguaa

SEQ ID NO: 1390631 - RNA, 19 nt, Artificial Sequence
  Description of Artificial Sequence: Synthetic oligonucleotide
gcucgccggucucggggag

SEQ ID NO: 1390632 - RNA, 19 nt, Artificial Sequence
  Description of Artificial Sequence: Synthetic oligonucleotide
ggaguggucgcgccaccgu

SEQ ID NO: 1390633 - RNA, 19 nt, Artificial Sequence
  Description of Artificial Sequence: Synthetic oligonucleotide
cccuggugaguagauuuca

SEQ ID NO: 1390634 - RNA, 19 nt, Artificial Sequence
  Description of Artificial Sequence: Synthetic oligonucleotide
gccuacugcaggaggcgga

SEQ ID NO: 1390635 - RNA, 19 nt, Artificial Sequence
  Description of Artificial Sequence: Synthetic oligonucleotide
ggagccuggcuggcacacc

SEQ ID NO: 1390636 - RNA, 19 nt, Artificial Sequence
  Description of Artificial Sequence: Synthetic oligonucleotide
cgggucugccucugcgugc

SEQ ID NO: 1390637 - RNA, 19 nt, Artificial Sequence
  Description of Artificial Sequence: Synthetic oligonucleotide
ggucguggcgcgaggcgca

SEQ ID NO: 1390638 - RNA, 19 nt, Artificial Sequence
  Description of Artificial Sequence: Synthetic oligonucleotide
ccagguaagcuucgaggcu

SEQ ID NO: 1390639 - RNA, 19 nt, Artificial Sequence
  Description of Artificial Sequence: Synthetic oligonucleotide
aggggcagacacgcucauu

SEQ ID NO: 1390640 - RNA, 19 nt, Artificial Sequence
  Description of Artificial Sequence: Synthetic oligonucleotide
cuccagcgagcuggcgcug

SEQ ID NO: 1390641 - RNA, 19 nt, Artificial Sequence
  Description of Artificial Sequence: Synthetic oligonucleotide
ccgcagacucacuucacgu

SEQ ID NO: 1390642 - RNA, 19 nt, Artificial Sequence
  Description of Artificial Sequence: Synthetic oligonucleotide
cacgugcucggaggcguga

SEQ ID NO: 1390643 - RNA, 19 nt, Artificial Sequence
  Description of Artificial Sequence: Synthetic oligonucleotide
cgggucguggcgcgaggcg

SEQ ID NO: 1390644 - RNA, 19 nt, Artificial Sequence
  Description of Artificial Sequence: Synthetic oligonucleotide
ucguggcgcgaggcgcagu

SEQ ID NO: 1390645 - RNA, 19 nt, Artificial Sequence
  Description of Artificial Sequence: Synthetic oligonucleotide
ggacugucacgcggagcac

SEQ ID NO: 1390646 - RNA, 19 nt, Artificial Sequence
  Description of Artificial Sequence: Synthetic oligonucleotide
cgcgguggcgggucguggc

SEQ ID NO: 1390647 - RNA, 19 nt, Artificial Sequence
  Description of Artificial Sequence: Synthetic oligonucleotide
gcgacggggccgcuugcuc

SEQ ID NO: 1390648 - RNA, 19 nt, Artificial Sequence
  Description of Artificial Sequence: Synthetic oligonucleotide
gcuugcgcucgccggucuc

SEQ ID NO: 1390649 - RNA, 19 nt, Artificial Sequence
  Description of Artificial Sequence: Synthetic oligonucleotide
cggcgcuugcgcucgccgg

SEQ ID NO: 1390650 - RNA, 19 nt, Artificial Sequence
  Description of Artificial Sequence: Synthetic oligonucleotide
cagacaccgcugagugugu

SEQ ID NO: 1390651 - RNA, 19 nt, Artificial Sequence
  Description of Artificial Sequence: Synthetic oligonucleotide
gcgggucguggcgcgaggc

SEQ ID NO: 1390652 - RNA, 19 nt, Artificial Sequence
  Description of Artificial Sequence: Synthetic oligonucleotide
ggcgcuugcgcucgccggu

SEQ ID NO: 1390653 - RNA, 19 nt, Artificial Sequence
  Description of Artificial Sequence: Synthetic oligonucleotide
cggugugcggggcucagca

SEQ ID NO: 1390654 - RNA, 19 nt, Artificial Sequence
  Description of Artificial Sequence: Synthetic oligonucleotide
gugcguggugcccggcuau

SEQ ID NO: 1390655 - RNA, 19 nt, Artificial Sequence
  Description of Artificial Sequence: Synthetic oligonucleotide
ccccgcagacucacuucac

SEQ ID NO: 1390656 - RNA, 19 nt, Artificial Sequence
  Description of Artificial Sequence: Synthetic oligonucleotide
gcggauggccggcgcggug

SEQ ID NO: 1390657 - RNA, 19 nt, Artificial Sequence
  Description of Artificial Sequence: Synthetic oligonucleotide
cgguacacucaugguaguc

SEQ ID NO: 1390658 - RNA, 19 nt, Artificial Sequence
  Description of Artificial Sequence: Synthetic oligonucleotide
cguuccgcaguuggccuug

SEQ ID NO: 1390659 - RNA, 19 nt, Artificial Sequence
  Description of Artificial Sequence: Synthetic oligonucleotide
gcugaugcgggcgggcccu

SEQ ID NO: 1390660 - RNA, 19 nt, Artificial Sequence
  Description of Artificial Sequence: Synthetic oligonucleotide
ugggcccgucgggcaccgg

SEQ ID NO: 1390661 - RNA, 19 nt, Artificial Sequence
  Description of Artificial Sequence: Synthetic oligonucleotide
gccggagccgcggguccgg

SEQ ID NO: 1390662 - RNA, 19 nt, Artificial Sequence
  Description of Artificial Sequence: Synthetic oligonucleotide
ggcgcgaggcgcaguagua

SEQ ID NO: 1390663 - RNA, 19 nt, Artificial Sequence
  Description of Artificial Sequence: Synthetic oligonucleotide
cucaggucuaugggcccgu

SEQ ID NO: 1390664 - RNA, 19 nt, Artificial Sequence
  Description of Artificial Sequence: Synthetic oligonucleotide
ggcgcgguggcgggucgug

SEQ ID NO: 1390665 - RNA, 19 nt, Artificial Sequence
  Description of Artificial Sequence: Synthetic oligonucleotide
ccaccaggucuccgcgcac

SEQ ID NO: 1390666 - RNA, 19 nt, Artificial Sequence
  Description of Artificial Sequence: Synthetic oligonucleotide
gcgguacacucaugguagu

SEQ ID NO: 1390667 - RNA, 19 nt, Artificial Sequence
  Description of Artificial Sequence: Synthetic oligonucleotide
ccggcgcgugcgcacgggc

SEQ ID NO: 1390668 - RNA, 19 nt, Artificial Sequence
  Description of Artificial Sequence: Synthetic oligonucleotide
ggagcacguucggccggug

SEQ ID NO: 1390669 - RNA, 19 nt, Artificial Sequence
  Description of Artificial Sequence: Synthetic oligonucleotide
ccgucgggcaccgggccug

SEQ ID NO: 1390670 - RNA, 19 nt, Artificial Sequence
  Description of Artificial Sequence: Synthetic oligonucleotide
ccaggucuccgcgcacgug

SEQ ID NO: 1390671 - RNA, 19 nt, Artificial Sequence
  Description of Artificial Sequence: Synthetic oligonucleotide
ggcguccgcacaccuuggu

SEQ ID NO: 1390672 - RNA, 19 nt, Artificial Sequence
  Description of Artificial Sequence: Synthetic oligonucleotide
gcggugcggccccgcagac

SEQ ID NO: 1390673 - RNA, 19 nt, Artificial Sequence
  Description of Artificial Sequence: Synthetic oligonucleotide
cgggcggagcugucagcgc

SEQ ID NO: 1390674 - RNA, 19 nt, Artificial Sequence
  Description of Artificial Sequence: Synthetic oligonucleotide
gagggcguccgcacaccuu

SEQ ID NO: 1390675 - RNA, 19 nt, Artificial Sequence
  Description of Artificial Sequence: Synthetic oligonucleotide
cgacaugcgguacacucau

SEQ ID NO: 1390676 - RNA, 19 nt, Artificial Sequence
  Description of Artificial Sequence: Synthetic oligonucleotide
cccguugggcgggcaguag

SEQ ID NO: 1390677 - RNA, 19 nt, Artificial Sequence
  Description of Artificial Sequence: Synthetic oligonucleotide
gccggugugcggggcucag

SEQ ID NO: 1390678 - RNA, 19 nt, Artificial Sequence
  Description of Artificial Sequence: Synthetic oligonucleotide
cgggacugucacgcggagc

SEQ ID NO: 1390679 - RNA, 19 nt, Artificial Sequence
  Description of Artificial Sequence: Synthetic oligonucleotide
ggucgcgccaccgucucuu

SEQ ID NO: 1390680 - RNA, 19 nt, Artificial Sequence
  Description of Artificial Sequence: Synthetic oligonucleotide
ccgcuugcucaggucuaug

SEQ ID NO: 1390681 - RNA, 19 nt, Artificial Sequence
  Description of Artificial Sequence: Synthetic oligonucleotide
gcuugcgucgccggcgcgu

SEQ ID NO: 1390682 - RNA, 19 nt, Artificial Sequence
  Description of Artificial Sequence: Synthetic oligonucleotide
gcgucgccggcgcgugcgc

SEQ ID NO: 1390683 - RNA, 19 nt, Artificial Sequence
  Description of Artificial Sequence: Synthetic oligonucleotide
cgcgcacgugcccguuggg

SEQ ID NO: 1390684 - RNA, 19 nt, Artificial Sequence
  Description of Artificial Sequence: Synthetic oligonucleotide
gcgugcgcacgggcggagc

SEQ ID NO: 1390685 - RNA, 19 nt, Artificial Sequence
  Description of Artificial Sequence: Synthetic oligonucleotide
cggauguugcaggccucac

SEQ ID NO: 1390686 - RNA, 19 nt, Artificial Sequence
  Description of Artificial Sequence: Synthetic oligonucleotide
ccggcgcgguggcgggucg

SEQ ID NO: 1390687 - RNA, 19 nt, Artificial Sequence
  Description of Artificial Sequence: Synthetic oligonucleotide
ccucugugucguccaccga

SEQ ID NO: 1390688 - RNA, 19 nt, Artificial Sequence
  Description of Artificial Sequence: Synthetic oligonucleotide
cccggcuaucgggacuguc

SEQ ID NO: 1390689 - RNA, 19 nt, Artificial Sequence
  Description of Artificial Sequence: Synthetic oligonucleotide
ccggugugcggggcucagc

SEQ ID NO: 1390690 - RNA, 19 nt, Artificial Sequence
  Description of Artificial Sequence: Synthetic oligonucleotide
gcgugccuugucagcggga

SEQ ID NO: 1390691 - RNA, 19 nt, Artificial Sequence
  Description of Artificial Sequence: Synthetic oligonucleotide
agcgugcggcugggaucgu

SEQ ID NO: 1390692 - RNA, 19 nt, Artificial Sequence
  Description of Artificial Sequence: Synthetic oligonucleotide
cccuggcgacaagcgcugc

SEQ ID NO: 1390693 - RNA, 19 nt, Artificial Sequence
  Description of Artificial Sequence: Synthetic oligonucleotide
cguggcgcgaggcgcagua

SEQ ID NO: 1390694 - RNA, 19 nt, Artificial Sequence
  Description of Artificial Sequence: Synthetic oligonucleotide
ggggugcguggugcccggc

SEQ ID NO: 1390695 - RNA, 19 nt, Artificial Sequence
  Description of Artificial Sequence: Synthetic oligonucleotide
cgcucgccggucucgggga

SEQ ID NO: 1390696 - RNA, 19 nt, Artificial Sequence
  Description of Artificial Sequence: Synthetic oligonucleotide
gcgugcggcugggaucguc

SEQ ID NO: 1390697 - RNA, 19 nt, Artificial Sequence
  Description of Artificial Sequence: Synthetic oligonucleotide
cggaggcgugagaggagca

SEQ ID NO: 1390698 - RNA, 19 nt, Artificial Sequence
  Description of Artificial Sequence: Synthetic oligonucleotide
gccggcgcgguggcggguc

SEQ ID NO: 1390699 - RNA, 19 nt, Artificial Sequence
  Description of Artificial Sequence: Synthetic oligonucleotide
gcguuccgcaguuggccuu

SEQ ID NO: 1390700 - RNA, 19 nt, Artificial Sequence
  Description of Artificial Sequence: Synthetic oligonucleotide
ggccggugugcggggcuca

SEQ ID NO: 1390701 - RNA, 19 nt, Artificial Sequence
  Description of Artificial Sequence: Synthetic oligonucleotide
gcccguugggcgggcagua

SEQ ID NO: 1390702 - RNA, 19 nt, Artificial Sequence
  Description of Artificial Sequence: Synthetic oligonucleotide
gcugccccggccagcggcu

SEQ ID NO: 1390703 - RNA, 19 nt, Artificial Sequence
  Description of Artificial Sequence: Synthetic oligonucleotide
gcgcgugcgcacgggcgga

SEQ ID NO: 1390704 - RNA, 19 nt, Artificial Sequence
  Description of Artificial Sequence: Synthetic oligonucleotide
gccgcuugcucaggucuau

SEQ ID NO: 1390705 - RNA, 19 nt, Artificial Sequence
  Description of Artificial Sequence: Synthetic oligonucleotide
cgacaagcgcugcgggucu

SEQ ID NO: 1390706 - RNA, 19 nt, Artificial Sequence
  Description of Artificial Sequence: Synthetic oligonucleotide
cgccggcgcgugcgcacgg

SEQ ID NO: 1390707 - RNA, 19 nt, Artificial Sequence
  Description of Artificial Sequence: Synthetic oligonucleotide
cgugcgcacgggcggagcu

SEQ ID NO: 1390708 - RNA, 19 nt, Artificial Sequence
  Description of Artificial Sequence: Synthetic oligonucleotide
ggcgggcaguaggggcaga

SEQ ID NO: 1390709 - RNA, 19 nt, Artificial Sequence
  Description of Artificial Sequence: Synthetic oligonucleotide
cugucacgcggagcacguu

SEQ ID NO: 1390710 - RNA, 19 nt, Artificial Sequence
  Description of Artificial Sequence: Synthetic oligonucleotide
cgcgugcgcacgggcggag

SEQ ID NO: 1390711 - RNA, 19 nt, Artificial Sequence
  Description of Artificial Sequence: Synthetic oligonucleotide
ccccggccagcggcuucgg

SEQ ID NO: 1390712 - RNA, 19 nt, Artificial Sequence
  Description of Artificial Sequence: Synthetic oligonucleotide
gcgcugcgggucugccucu

SEQ ID NO: 1390713 - RNA, 19 nt, Artificial Sequence
  Description of Artificial Sequence: Synthetic oligonucleotide
cccgucgggcaccgggccu

SEQ ID NO: 1390714 - RNA, 19 nt, Artificial Sequence
  Description of Artificial Sequence: Synthetic oligonucleotide
ccgggccuggagagggcgu

SEQ ID NO: 1390715 - RNA, 19 nt, Artificial Sequence
  Description of Artificial Sequence: Synthetic oligonucleotide
cgggcccuuggagggcguc

SEQ ID NO: 1390716 - RNA, 19 nt, Artificial Sequence
  Description of Artificial Sequence: Synthetic oligonucleotide
gcgcacgggcggagcuguc

SEQ ID NO: 1390717 - RNA, 19 nt, Artificial Sequence
  Description of Artificial Sequence: Synthetic oligonucleotide
cuccgcgcacgugcccguu

SEQ ID NO: 1390718 - RNA, 19 nt, Artificial Sequence
  Description of Artificial Sequence: Synthetic oligonucleotide
gucuggcgacggggccgcu

SEQ ID NO: 1390719 - RNA, 19 nt, Artificial Sequence
  Description of Artificial Sequence: Synthetic oligonucleotide
cgucgccggcgcgugcgca

SEQ ID NO: 1390720 - RNA, 19 nt, Artificial Sequence
  Description of Artificial Sequence: Synthetic oligonucleotide
cgccggucucggggaggag

SEQ ID NO: 1390721 - RNA, 19 nt, Artificial Sequence
  Description of Artificial Sequence: Synthetic oligonucleotide
cggggccgcuugcucaggu

SEQ ID NO: 1390722 - RNA, 19 nt, Artificial Sequence
  Description of Artificial Sequence: Synthetic oligonucleotide
cgccaccgucucuucucgu

SEQ ID NO: 1390723 - RNA, 19 nt, Artificial Sequence
  Description of Artificial Sequence: Synthetic oligonucleotide
cugccccggccagcggcuu

SEQ ID NO: 1390724 - RNA, 19 nt, Artificial Sequence
  Description of Artificial Sequence: Synthetic oligonucleotide
gcccggcuaucgggacugu

SEQ ID NO: 1390725 - RNA, 19 nt, Artificial Sequence
  Description of Artificial Sequence: Synthetic oligonucleotide
cggugcggccccgcagacu

SEQ ID NO: 1390726 - RNA, 19 nt, Artificial Sequence
  Description of Artificial Sequence: Synthetic oligonucleotide
cggcgcgguggcgggucgu

SEQ ID NO: 1390727 - RNA, 19 nt, Artificial Sequence
  Description of Artificial Sequence: Synthetic oligonucleotide
acaacaacuauuuacaaac

SEQ ID NO: 1390728 - RNA, 19 nt, Artificial Sequence
  Description of Artificial Sequence: Synthetic oligonucleotide
aaaauuacaaagugaggac

SEQ ID NO: 1390729 - RNA, 19 nt, Artificial Sequence
  Description of Artificial Sequence: Synthetic oligonucleotide
aaaguuuauguucccaccc

SEQ ID NO: 1390730 - RNA, 19 nt, Artificial Sequence
  Description of Artificial Sequence: Synthetic oligonucleotide
cuuaacauuaguuggacgg

SEQ ID NO: 1390731 - RNA, 19 nt, Artificial Sequence
  Description of Artificial Sequence: Synthetic oligonucleotide
aaaacaagugguucuaauc

SEQ ID NO: 1390732 - RNA, 19 nt, Artificial Sequence
  Description of Artificial Sequence: Synthetic oligonucleotide
aaacaagugguucuaauca

SEQ ID NO: 1390733 - RNA, 19 nt, Artificial Sequence
  Description of Artificial Sequence: Synthetic oligonucleotide
cuuaagugcagccagaggc

SEQ ID NO: 1390734 - RNA, 19 nt, Artificial Sequence
  Description of Artificial Sequence: Synthetic oligonucleotide
ugaacugcggccacgaagg

SEQ ID NO: 1390735 - RNA, 19 nt, Artificial Sequence
  Description of Artificial Sequence: Synthetic oligonucleotide
uggacuucgacacuaagcc

SEQ ID NO: 1390736 - RNA, 19 nt, Artificial Sequence
  Description of Artificial Sequence: Synthetic oligonucleotide
aaaccuuacaauucggcug

SEQ ID NO: 1390737 - RNA, 19 nt, Artificial Sequence
  Description of Artificial Sequence: Synthetic oligonucleotide
aacgauuucuuguucgccg

SEQ ID NO: 1390738 - RNA, 19 nt, Artificial Sequence
  Description of Artificial Sequence: Synthetic oligonucleotide
cauaguaacaguugggccc

SEQ ID NO: 1390739 - RNA, 19 nt, Artificial Sequence
  Description of Artificial Sequence: Synthetic oligonucleotide
caaacgaggaaauaaggcc

SEQ ID NO: 1390740 - RNA, 19 nt, Artificial Sequence
  Description of Artificial Sequence: Synthetic oligonucleotide
aaaaccuuacaauucggcu

SEQ ID NO: 1390741 - RNA, 19 nt, Artificial Sequence
  Description of Artificial Sequence: Synthetic oligonucleotide
uacaaacgaggaaauaagg

SEQ ID NO: 1390742 - RNA, 19 nt, Artificial Sequence
  Description of Artificial Sequence: Synthetic oligonucleotide
aagaccguguacugcaccc

SEQ ID NO: 1390743 - RNA, 19 nt, Artificial Sequence
  Description of Artificial Sequence: Synthetic oligonucleotide
uacacaacaugauccaugg

SEQ ID NO: 1390744 - RNA, 19 nt, Artificial Sequence
  Description of Artificial Sequence: Synthetic oligonucleotide
uuuacaaacgaggaaauaa

SEQ ID NO: 1390745 - RNA, 19 nt, Artificial Sequence
  Description of Artificial Sequence: Synthetic oligonucleotide
aauucggcugugugcaacc

SEQ ID NO: 1390746 - RNA, 19 nt, Artificial Sequence
  Description of Artificial Sequence: Synthetic oligonucleotide
ugauccauggaacaccacc

SEQ ID NO: 1390747 - RNA, 19 nt, Artificial Sequence
  Description of Artificial Sequence: Synthetic oligonucleotide
aagugguucuaaucagacc

SEQ ID NO: 1390748 - RNA, 19 nt, Artificial Sequence
  Description of Artificial Sequence: Synthetic oligonucleotide
acaaacgaggaaauaaggc

SEQ ID NO: 1390749 - RNA, 19 nt, Artificial Sequence
  Description of Artificial Sequence: Synthetic oligonucleotide
auuaguuggacgguuuugc

SEQ ID NO: 1390750 - RNA, 19 nt, Artificial Sequence
  Description of Artificial Sequence: Synthetic oligonucleotide
ugcaacaaaguuuauguuc

SEQ ID NO: 1390751 - RNA, 19 nt, Artificial Sequence
  Description of Artificial Sequence: Synthetic oligonucleotide
aacaagaccguguacugca

SEQ ID NO: 1390752 - RNA, 19 nt, Artificial Sequence
  Description of Artificial Sequence: Synthetic oligonucleotide
ugaccuuagaaagaagggg

SEQ ID NO: 1390753 - RNA, 19 nt, Artificial Sequence
  Description of Artificial Sequence: Synthetic oligonucleotide
aacaugauccauggaacac

SEQ ID NO: 1390754 - RNA, 19 nt, Artificial Sequence
  Description of Artificial Sequence: Synthetic oligonucleotide
ugcaugcucauacagaaaa

SEQ ID NO: 1390755 - RNA, 19 nt, Artificial Sequence
  Description of Artificial Sequence: Synthetic oligonucleotide
agugaccuuagaaagaagg

SEQ ID NO: 1390756 - RNA, 19 nt, Artificial Sequence
  Description of Artificial Sequence: Synthetic oligonucleotide
aacuagucuggacagcuug

SEQ ID NO: 1390757 - RNA, 19 nt, Artificial Sequence
  Description of Artificial Sequence: Synthetic oligonucleotide
ugucggcuggacuacaucg

SEQ ID NO: 1390758 - RNA, 19 nt, Artificial Sequence
  Description of Artificial Sequence: Synthetic oligonucleotide
ugagccuuugccuauagaa

SEQ ID NO: 1390759 - RNA, 19 nt, Artificial Sequence
  Description of Artificial Sequence: Synthetic oligonucleotide
uuacacaacaugauccaug

SEQ ID NO: 1390760 - RNA, 19 nt, Artificial Sequence
  Description of Artificial Sequence: Synthetic oligonucleotide
uggaacgauuucuuguucg

SEQ ID NO: 1390761 - RNA, 19 nt, Artificial Sequence
  Description of Artificial Sequence: Synthetic oligonucleotide
aaccuuacaauucggcugu

SEQ ID NO: 1390762 - RNA, 19 nt, Artificial Sequence
  Description of Artificial Sequence: Synthetic oligonucleotide
aauuacaaagugaggacug

SEQ ID NO: 1390763 - RNA, 19 nt, Artificial Sequence
  Description of Artificial Sequence: Synthetic oligonucleotide
uucagaagaaauguuguca

SEQ ID NO: 1390764 - RNA, 19 nt, Artificial Sequence
  Description of Artificial Sequence: Synthetic oligonucleotide
aaacaagaccguguacugc

SEQ ID NO: 1390765 - RNA, 19 nt, Artificial Sequence
  Description of Artificial Sequence: Synthetic oligonucleotide
uggacuacaucgcuggcag

SEQ ID NO: 1390766 - RNA, 19 nt, Artificial Sequence
  Description of Artificial Sequence: Synthetic oligonucleotide
uguaggucaagauaccuuc

SEQ ID NO: 1390767 - RNA, 19 nt, Artificial Sequence
  Description of Artificial Sequence: Synthetic oligonucleotide
uuggacuucgacacuaagc

SEQ ID NO: 1390768 - RNA, 19 nt, Artificial Sequence
  Description of Artificial Sequence: Synthetic oligonucleotide
uugaguucagaagaaaugu

SEQ ID NO: 1390769 - RNA, 19 nt, Artificial Sequence
  Description of Artificial Sequence: Synthetic oligonucleotide
agcagaacuagucuggaca

SEQ ID NO: 1390770 - RNA, 19 nt, Artificial Sequence
  Description of Artificial Sequence: Synthetic oligonucleotide
ucuacaugacacucagggg

SEQ ID NO: 1390771 - RNA, 19 nt, Artificial Sequence
  Description of Artificial Sequence: Synthetic oligonucleotide
ucauaguaacaguugggcc

SEQ ID NO: 1390772 - RNA, 19 nt, Artificial Sequence
  Description of Artificial Sequence: Synthetic oligonucleotide
uaagccucaguaccugugg

SEQ ID NO: 1390773 - RNA, 19 nt, Artificial Sequence
  Description of Artificial Sequence: Synthetic oligonucleotide
acaacuauuuacaaacgag

SEQ ID NO: 1390774 - RNA, 19 nt, Artificial Sequence
  Description of Artificial Sequence: Synthetic oligonucleotide
uacaaagugaggacugagc

SEQ ID NO: 1390775 - RNA, 19 nt, Artificial Sequence
  Description of Artificial Sequence: Synthetic oligonucleotide
aaacgaggaaauaaggcca

SEQ ID NO: 1390776 - RNA, 19 nt, Artificial Sequence
  Description of Artificial Sequence: Synthetic oligonucleotide
uuacaauucggcugugugc

SEQ ID NO: 1390777 - RNA, 19 nt, Artificial Sequence
  Description of Artificial Sequence: Synthetic oligonucleotide
auaguaacaguugggcccc

SEQ ID NO: 1390778 - RNA, 19 nt, Artificial Sequence
  Description of Artificial Sequence: Synthetic oligonucleotide
caaaaccuuacaauucggc

SEQ ID NO: 1390779 - RNA, 19 nt, Artificial Sequence
  Description of Artificial Sequence: Synthetic oligonucleotide
auuuacucaugcaacaaag

SEQ ID NO: 1390780 - RNA, 19 nt, Artificial Sequence
  Description of Artificial Sequence: Synthetic oligonucleotide
uuggacuugucauaguaac

SEQ ID NO: 1390781 - RNA, 19 nt, Artificial Sequence
  Description of Artificial Sequence: Synthetic oligonucleotide
ucuaaucagaccacaucca

SEQ ID NO: 1390782 - RNA, 19 nt, Artificial Sequence
  Description of Artificial Sequence: Synthetic oligonucleotide
uuacucaugcaacaaaguu

SEQ ID NO: 1390783 - RNA, 19 nt, Artificial Sequence
  Description of Artificial Sequence: Synthetic oligonucleotide
acaacaugauccauggaac

SEQ ID NO: 1390784 - RNA, 19 nt, Artificial Sequence
  Description of Artificial Sequence: Synthetic oligonucleotide
uuuacucaugcaacaaagu

SEQ ID NO: 1390785 - RNA, 19 nt, Artificial Sequence
  Description of Artificial Sequence: Synthetic oligonucleotide
aacaguugggccccagaag

SEQ ID NO: 1390786 - RNA, 19 nt, Artificial Sequence
  Description of Artificial Sequence: Synthetic oligonucleotide
auuguguuuuccuuaacau

SEQ ID NO: 1390787 - RNA, 19 nt, Artificial Sequence
  Description of Artificial Sequence: Synthetic oligonucleotide
uacaauucggcugugugca

SEQ ID NO: 1390788 - RNA, 19 nt, Artificial Sequence
  Description of Artificial Sequence: Synthetic oligonucleotide
gaugcaugcucauacagaa

SEQ ID NO: 1390789 - RNA, 19 nt, Artificial Sequence
  Description of Artificial Sequence: Synthetic oligonucleotide
caaaguuuauguucccacc

SEQ ID NO: 1390790 - RNA, 19 nt, Artificial Sequence
  Description of Artificial Sequence: Synthetic oligonucleotide
aguaguaugagggugucca

SEQ ID NO: 1390791 - RNA, 19 nt, Artificial Sequence
  Description of Artificial Sequence: Synthetic oligonucleotide
auaccuucaggagaucacc

SEQ ID NO: 1390792 - RNA, 19 nt, Artificial Sequence
  Description of Artificial Sequence: Synthetic oligonucleotide
uugguaaacaagaccgugu

SEQ ID NO: 1390793 - RNA, 19 nt, Artificial Sequence
  Description of Artificial Sequence: Synthetic oligonucleotide
aguuggacgguuuugcccu

SEQ ID NO: 1390794 - RNA, 19 nt, Artificial Sequence
  Description of Artificial Sequence: Synthetic oligonucleotide
aauaaggccagugaccuua

SEQ ID NO: 1390795 - RNA, 19 nt, Artificial Sequence
  Description of Artificial Sequence: Synthetic oligonucleotide
gucaagauaccuucaggag

SEQ ID NO: 1390796 - RNA, 19 nt, Artificial Sequence
  Description of Artificial Sequence: Synthetic oligonucleotide
auuucuuguucgccgauug

SEQ ID NO: 1390797 - RNA, 19 nt, Artificial Sequence
  Description of Artificial Sequence: Synthetic oligonucleotide
aaagugaggacugagccuu

SEQ ID NO: 1390798 - RNA, 19 nt, Artificial Sequence
  Description of Artificial Sequence: Synthetic oligonucleotide
cuuacaauucggcugugug

SEQ ID NO: 1390799 - RNA, 19 nt, Artificial Sequence
  Description of Artificial Sequence: Synthetic oligonucleotide
uaggucaagauaccuucag

SEQ ID NO: 1390800 - RNA, 19 nt, Artificial Sequence
  Description of Artificial Sequence: Synthetic oligonucleotide
uccuaugacugguucaccc

SEQ ID NO: 1390801 - RNA, 19 nt, Artificial Sequence
  Description of Artificial Sequence: Synthetic oligonucleotide
caacaacuauuuacaaacg

SEQ ID NO: 1390802 - RNA, 19 nt, Artificial Sequence
  Description of Artificial Sequence: Synthetic oligonucleotide
acuaggcucauuucaaagu

SEQ ID NO: 1390803 - RNA, 19 nt, Artificial Sequence
  Description of Artificial Sequence: Synthetic oligonucleotide
uuucaaaguagaugagaac

SEQ ID NO: 1390804 - RNA, 19 nt, Artificial Sequence
  Description of Artificial Sequence: Synthetic oligonucleotide
uucucgguugaacugggca

SEQ ID NO: 1390805 - RNA, 19 nt, Artificial Sequence
  Description of Artificial Sequence: Synthetic oligonucleotide
gucauaguaacaguugggc

SEQ ID NO: 1390806 - RNA, 19 nt, Artificial Sequence
  Description of Artificial Sequence: Synthetic oligonucleotide
ucaugcaacaaaguuuaug

SEQ ID NO: 1390807 - RNA, 19 nt, Artificial Sequence
  Description of Artificial Sequence: Synthetic oligonucleotide
uucacucugggucaucacu

SEQ ID NO: 1390808 - RNA, 19 nt, Artificial Sequence
  Description of Artificial Sequence: Synthetic oligonucleotide
ugggguagauggaaaacca

SEQ ID NO: 1390809 - RNA, 19 nt, Artificial Sequence
  Description of Artificial Sequence: Synthetic oligonucleotide
aacccugaacaucacuugu

SEQ ID NO: 1390810 - RNA, 19 nt, Artificial Sequence
  Description of Artificial Sequence: Synthetic oligonucleotide
uguuuugaguucagaagaa

SEQ ID NO: 1390811 - RNA, 19 nt, Artificial Sequence
  Description of Artificial Sequence: Synthetic oligonucleotide
cuuacacccggccaguccc

SEQ ID NO: 1390812 - RNA, 19 nt, Artificial Sequence
  Description of Artificial Sequence: Synthetic oligonucleotide
uucuuguucgccgauugcc

SEQ ID NO: 1390813 - RNA, 19 nt, Artificial Sequence
  Description of Artificial Sequence: Synthetic oligonucleotide
aggaugcaugcucauacag

SEQ ID NO: 1390814 - RNA, 19 nt, Artificial Sequence
  Description of Artificial Sequence: Synthetic oligonucleotide
ucggcugugugcaaccaag

SEQ ID NO: 1390815 - RNA, 19 nt, Artificial Sequence
  Description of Artificial Sequence: Synthetic oligonucleotide
ucgacacuaagccucagua

SEQ ID NO: 1390816 - RNA, 19 nt, Artificial Sequence
  Description of Artificial Sequence: Synthetic oligonucleotide
uaguuggacgguuuugccc

SEQ ID NO: 1390817 - RNA, 19 nt, Artificial Sequence
  Description of Artificial Sequence: Synthetic oligonucleotide
uggguaacaguuucuuagc

SEQ ID NO: 1390818 - RNA, 19 nt, Artificial Sequence
  Description of Artificial Sequence: Synthetic oligonucleotide
ucccagacaccccaaaggu

SEQ ID NO: 1390819 - RNA, 19 nt, Artificial Sequence
  Description of Artificial Sequence: Synthetic oligonucleotide
uuaguuggacgguuuugcc

SEQ ID NO: 1390820 - RNA, 19 nt, Artificial Sequence
  Description of Artificial Sequence: Synthetic oligonucleotide
gaggaaauaaggccaguga

SEQ ID NO: 1390821 - RNA, 19 nt, Artificial Sequence
  Description of Artificial Sequence: Synthetic oligonucleotide
ucuucucgguugaacuggg

SEQ ID NO: 1390822 - RNA, 19 nt, Artificial Sequence
  Description of Artificial Sequence: Synthetic oligonucleotide
agaacuuguuuugaguuca

SEQ ID NO: 1390823 - RNA, 19 nt, Artificial Sequence
  Description of Artificial Sequence: Synthetic oligonucleotide
cuugucuuggacuucgaca

SEQ ID NO: 1390824 - RNA, 19 nt, Artificial Sequence
  Description of Artificial Sequence: Synthetic oligonucleotide
ucggaauccaccacgugaa

SEQ ID NO: 1390825 - RNA, 19 nt, Artificial Sequence
  Description of Artificial Sequence: Synthetic oligonucleotide
aaguaguaugagggugucc

SEQ ID NO: 1390826 - RNA, 19 nt, Artificial Sequence
  Description of Artificial Sequence: Synthetic oligonucleotide
uauccuaugacugguucac

SEQ ID NO: 1390827 - RNA, 19 nt, Artificial Sequence
  Description of Artificial Sequence: Synthetic oligonucleotide
ucuuguucgccgauugccu

SEQ ID NO: 1390828 - RNA, 19 nt, Artificial Sequence
  Description of Artificial Sequence: Synthetic oligonucleotide
uuacaaagugaggacugag

SEQ ID NO: 1390829 - RNA, 19 nt, Artificial Sequence
  Description of Artificial Sequence: Synthetic oligonucleotide
uuaacauuaguuggacggu

SEQ ID NO: 1390830 - RNA, 19 nt, Artificial Sequence
  Description of Artificial Sequence: Synthetic oligonucleotide
ucccauugccucuaccucc

SEQ ID NO: 1390831 - RNA, 19 nt, Artificial Sequence
  Description of Artificial Sequence: Synthetic oligonucleotide
ucuggaacgauuucuuguu

SEQ ID NO: 1390832 - RNA, 19 nt, Artificial Sequence
  Description of Artificial Sequence: Synthetic oligonucleotide
gacccauuuacucaugcaa

SEQ ID NO: 1390833 - RNA, 19 nt, Artificial Sequence
  Description of Artificial Sequence: Synthetic oligonucleotide
gaacccugaacaucacuug

SEQ ID NO: 1390834 - RNA, 19 nt, Artificial Sequence
  Description of Artificial Sequence: Synthetic oligonucleotide
ggacuugucauaguaacag

SEQ ID NO: 1390835 - RNA, 19 nt, Artificial Sequence
  Description of Artificial Sequence: Synthetic oligonucleotide
gucaaagaaggacuuggac

SEQ ID NO: 1390836 - RNA, 19 nt, Artificial Sequence
  Description of Artificial Sequence: Synthetic oligonucleotide
aacgaggaaauaaggccag

SEQ ID NO: 1390837 - RNA, 19 nt, Artificial Sequence
  Description of Artificial Sequence: Synthetic oligonucleotide
agcucuucucgguugaacu

SEQ ID NO: 1390838 - RNA, 19 nt, Artificial Sequence
  Description of Artificial Sequence: Synthetic oligonucleotide
uccgccuagaacuuguuuu

SEQ ID NO: 1390839 - RNA, 19 nt, Artificial Sequence
  Description of Artificial Sequence: Synthetic oligonucleotide
ucagccucgaacccugaac

SEQ ID NO: 1390840 - RNA, 19 nt, Artificial Sequence
  Description of Artificial Sequence: Synthetic oligonucleotide
acccauuuacucaugcaac

SEQ ID NO: 1390841 - RNA, 19 nt, Artificial Sequence
  Description of Artificial Sequence: Synthetic oligonucleotide
uagaacuuguuuugaguuc

SEQ ID NO: 1390842 - RNA, 19 nt, Artificial Sequence
  Description of Artificial Sequence: Synthetic oligonucleotide
gugaacugcggccacgaag

SEQ ID NO: 1390843 - RNA, 19 nt, Artificial Sequence
  Description of Artificial Sequence: Synthetic oligonucleotide
ggucaagauaccuucagga

SEQ ID NO: 1390844 - RNA, 19 nt, Artificial Sequence
  Description of Artificial Sequence: Synthetic oligonucleotide
gagaacacuuaagugcagc

SEQ ID NO: 1390845 - RNA, 19 nt, Artificial Sequence
  Description of Artificial Sequence: Synthetic oligonucleotide
cauuacacaacaugaucca

SEQ ID NO: 1390846 - RNA, 19 nt, Artificial Sequence
  Description of Artificial Sequence: Synthetic oligonucleotide
ugccugaccgccuccgugg

SEQ ID NO: 1390847 - RNA, 19 nt, Artificial Sequence
  Description of Artificial Sequence: Synthetic oligonucleotide
ugaguucagaagaaauguu

SEQ ID NO: 1390848 - RNA, 19 nt, Artificial Sequence
  Description of Artificial Sequence: Synthetic oligonucleotide
uuucuuguucgccgauugc

SEQ ID NO: 1390849 - RNA, 19 nt, Artificial Sequence
  Description of Artificial Sequence: Synthetic oligonucleotide
accccuauccuaugacugg

SEQ ID NO: 1390850 - RNA, 19 nt, Artificial Sequence
  Description of Artificial Sequence: Synthetic oligonucleotide
guacugcacccuuacaccc

SEQ ID NO: 1390851 - RNA, 19 nt, Artificial Sequence
  Description of Artificial Sequence: Synthetic oligonucleotide
uugagcuguguccccgagg

SEQ ID NO: 1390852 - RNA, 19 nt, Artificial Sequence
  Description of Artificial Sequence: Synthetic oligonucleotide
guaaacaagaccguguacu

SEQ ID NO: 1390853 - RNA, 19 nt, Artificial Sequence
  Description of Artificial Sequence: Synthetic oligonucleotide
acucaugcaacaaaguuua

SEQ ID NO: 1390854 - RNA, 19 nt, Artificial Sequence
  Description of Artificial Sequence: Synthetic oligonucleotide
ugagaacacuuaagugcag

SEQ ID NO: 1390855 - RNA, 19 nt, Artificial Sequence
  Description of Artificial Sequence: Synthetic oligonucleotide
ccaaguuuagguugagucc

SEQ ID NO: 1390856 - RNA, 19 nt, Artificial Sequence
  Description of Artificial Sequence: Synthetic oligonucleotide
agcauucaaguuaucagca

SEQ ID NO: 1390857 - RNA, 19 nt, Artificial Sequence
  Description of Artificial Sequence: Synthetic oligonucleotide
cuaugacugguucacccug

SEQ ID NO: 1390858 - RNA, 19 nt, Artificial Sequence
  Description of Artificial Sequence: Synthetic oligonucleotide
uaugacugguucacccugu

SEQ ID NO: 1390859 - RNA, 19 nt, Artificial Sequence
  Description of Artificial Sequence: Synthetic oligonucleotide
gacgguuuugcccucugga

SEQ ID NO: 1390860 - RNA, 19 nt, Artificial Sequence
  Description of Artificial Sequence: Synthetic oligonucleotide
agccuggcgaccauugagc

SEQ ID NO: 1390861 - RNA, 19 nt, Artificial Sequence
  Description of Artificial Sequence: Synthetic oligonucleotide
cuaagccucaguaccugug

SEQ ID NO: 1390862 - RNA, 19 nt, Artificial Sequence
  Description of Artificial Sequence: Synthetic oligonucleotide
uaccuucaggagaucaccu

SEQ ID NO: 1390863 - RNA, 19 nt, Artificial Sequence
  Description of Artificial Sequence: Synthetic oligonucleotide
uucgacacuaagccucagu

SEQ ID NO: 1390864 - RNA, 19 nt, Artificial Sequence
  Description of Artificial Sequence: Synthetic oligonucleotide
gaacgauuucuuguucgcc

SEQ ID NO: 1390865 - RNA, 19 nt, Artificial Sequence
  Description of Artificial Sequence: Synthetic oligonucleotide
gcagaacuagucuggacag

SEQ ID NO: 1390866 - RNA, 19 nt, Artificial Sequence
  Description of Artificial Sequence: Synthetic oligonucleotide
ucuucacucugggucauca

SEQ ID NO: 1390867 - RNA, 19 nt, Artificial Sequence
  Description of Artificial Sequence: Synthetic oligonucleotide
gacuacaucgcuggcaguc

SEQ ID NO: 1390868 - RNA, 19 nt, Artificial Sequence
  Description of Artificial Sequence: Synthetic oligonucleotide
aagccucaguaccugugga

SEQ ID NO: 1390869 - RNA, 19 nt, Artificial Sequence
  Description of Artificial Sequence: Synthetic oligonucleotide
uucaaguuaucagcagaac

SEQ ID NO: 1390870 - RNA, 19 nt, Artificial Sequence
  Description of Artificial Sequence: Synthetic oligonucleotide
caugucguccgccuagaac

SEQ ID NO: 1390871 - RNA, 19 nt, Artificial Sequence
  Description of Artificial Sequence: Synthetic oligonucleotide
caugauccauggaacacca

SEQ ID NO: 1390872 - RNA, 19 nt, Artificial Sequence
  Description of Artificial Sequence: Synthetic oligonucleotide
gauugccugaccgccuccg

SEQ ID NO: 1390873 - RNA, 19 nt, Artificial Sequence
  Description of Artificial Sequence: Synthetic oligonucleotide
cuuguucgccgauugccug

SEQ ID NO: 1390874 - RNA, 19 nt, Artificial Sequence
  Description of Artificial Sequence: Synthetic oligonucleotide
ggaacgauuucuuguucgc

SEQ ID NO: 1390875 - RNA, 19 nt, Artificial Sequence
  Description of Artificial Sequence: Synthetic oligonucleotide
auuacaaagugaggacuga

SEQ ID NO: 1390876 - RNA, 19 nt, Artificial Sequence
  Description of Artificial Sequence: Synthetic oligonucleotide
caacaugauccauggaaca

SEQ ID NO: 1390877 - RNA, 19 nt, Artificial Sequence
  Description of Artificial Sequence: Synthetic oligonucleotide
aacuuguuuugaguucaga

SEQ ID NO: 1390878 - RNA, 19 nt, Artificial Sequence
  Description of Artificial Sequence: Synthetic oligonucleotide
cuauccuaugacugguuca

SEQ ID NO: 1390879 - RNA, 19 nt, Artificial Sequence
  Description of Artificial Sequence: Synthetic oligonucleotide
cuuggacuucgacacuaag

SEQ ID NO: 1390880 - RNA, 19 nt, Artificial Sequence
  Description of Artificial Sequence: Synthetic oligonucleotide
ucgaacccugaacaucacu

SEQ ID NO: 1390881 - RNA, 19 nt, Artificial Sequence
  Description of Artificial Sequence: Synthetic oligonucleotide
ucggcuggacuacaucgcu

SEQ ID NO: 1390882 - RNA, 19 nt, Artificial Sequence
  Description of Artificial Sequence: Synthetic oligonucleotide
guaccuguggaagccaggc

SEQ ID NO: 1390883 - RNA, 19 nt, Artificial Sequence
  Description of Artificial Sequence: Synthetic oligonucleotide
caccuacaaauacuucccc

SEQ ID NO: 1390884 - RNA, 19 nt, Artificial Sequence
  Description of Artificial Sequence: Synthetic oligonucleotide
aguugggccccagaagauc

SEQ ID NO: 1390885 - RNA, 19 nt, Artificial Sequence
  Description of Artificial Sequence: Synthetic oligonucleotide
guaguaugaggguguccag

SEQ ID NO: 1390886 - RNA, 19 nt, Artificial Sequence
  Description of Artificial Sequence: Synthetic oligonucleotide
cuaaucagaccacauccaa

SEQ ID NO: 1390887 - RNA, 19 nt, Artificial Sequence
  Description of Artificial Sequence: Synthetic oligonucleotide
uuguucgccgauugccuga

SEQ ID NO: 1390888 - RNA, 19 nt, Artificial Sequence
  Description of Artificial Sequence: Synthetic oligonucleotide
ucgucauucaccugcccuu

SEQ ID NO: 1390889 - RNA, 19 nt, Artificial Sequence
  Description of Artificial Sequence: Synthetic oligonucleotide
cuaggcucauuucaaagua

SEQ ID NO: 1390890 - RNA, 19 nt, Artificial Sequence
  Description of Artificial Sequence: Synthetic oligonucleotide
caagaccguguacugcacc

SEQ ID NO: 1390891 - RNA, 19 nt, Artificial Sequence
  Description of Artificial Sequence: Synthetic oligonucleotide
gaguccaaagccaaguagu

SEQ ID NO: 1390892 - RNA, 19 nt, Artificial Sequence
  Description of Artificial Sequence: Synthetic oligonucleotide
cauuaguuggacgguuuug

SEQ ID NO: 1390893 - RNA, 19 nt, Artificial Sequence
  Description of Artificial Sequence: Synthetic oligonucleotide
cugaccgccuccguggagg

SEQ ID NO: 1390894 - RNA, 19 nt, Artificial Sequence
  Description of Artificial Sequence: Synthetic oligonucleotide
uugggugugcacagguguc

SEQ ID NO: 1390895 - RNA, 19 nt, Artificial Sequence
  Description of Artificial Sequence: Synthetic oligonucleotide
acuaagccucaguaccugu

SEQ ID NO: 1390896 - RNA, 19 nt, Artificial Sequence
  Description of Artificial Sequence: Synthetic oligonucleotide
agccaaguaguaugagggu

SEQ ID NO: 1390897 - RNA, 19 nt, Artificial Sequence
  Description of Artificial Sequence: Synthetic oligonucleotide
acaagugguucuaaucaga

SEQ ID NO: 1390898 - RNA, 19 nt, Artificial Sequence
  Description of Artificial Sequence: Synthetic oligonucleotide
uugccugaccgccuccgug

SEQ ID NO: 1390899 - RNA, 19 nt, Artificial Sequence
  Description of Artificial Sequence: Synthetic oligonucleotide
guaccaggccagcagcacc

SEQ ID NO: 1390900 - RNA, 19 nt, Artificial Sequence
  Description of Artificial Sequence: Synthetic oligonucleotide
acauuaguuggacgguuuu

SEQ ID NO: 1390901 - RNA, 19 nt, Artificial Sequence
  Description of Artificial Sequence: Synthetic oligonucleotide
aacauuaguuggacgguuu

SEQ ID NO: 1390902 - RNA, 19 nt, Artificial Sequence
  Description of Artificial Sequence: Synthetic oligonucleotide
ccaaaaccuuacaauucgg

SEQ ID NO: 1390903 - RNA, 19 nt, Artificial Sequence
  Description of Artificial Sequence: Synthetic oligonucleotide
cuuggacuugucauaguaa

SEQ ID NO: 1390904 - RNA, 19 nt, Artificial Sequence
  Description of Artificial Sequence: Synthetic oligonucleotide
auccuaugacugguucacc

SEQ ID NO: 1390905 - RNA, 19 nt, Artificial Sequence
  Description of Artificial Sequence: Synthetic oligonucleotide
ucguccgccuagaacuugu

SEQ ID NO: 1390906 - RNA, 19 nt, Artificial Sequence
  Description of Artificial Sequence: Synthetic oligonucleotide
agaagaaaauguaggucaa

SEQ ID NO: 1390907 - RNA, 19 nt, Artificial Sequence
  Description of Artificial Sequence: Synthetic oligonucleotide
aaauaaggccagugaccuu

SEQ ID NO: 1390908 - RNA, 19 nt, Artificial Sequence
  Description of Artificial Sequence: Synthetic oligonucleotide
gcauucaaguuaucagcag

SEQ ID NO: 1390909 - RNA, 19 nt, Artificial Sequence
  Description of Artificial Sequence: Synthetic oligonucleotide
acugagccuuugccuauag

SEQ ID NO: 1390910 - RNA, 19 nt, Artificial Sequence
  Description of Artificial Sequence: Synthetic oligonucleotide
uaacauuaguuggacgguu

SEQ ID NO: 1390911 - RNA, 19 nt, Artificial Sequence
  Description of Artificial Sequence: Synthetic oligonucleotide
ugacugggguagauggaaa

SEQ ID NO: 1390912 - RNA, 19 nt, Artificial Sequence
  Description of Artificial Sequence: Synthetic oligonucleotide
acgguuuugcccucuggaa

SEQ ID NO: 1390913 - RNA, 19 nt, Artificial Sequence
  Description of Artificial Sequence: Synthetic oligonucleotide
gacuucccacuguuagcag

SEQ ID NO: 1390914 - RNA, 19 nt, Artificial Sequence
  Description of Artificial Sequence: Synthetic oligonucleotide
gaggaugcaugcucauaca

SEQ ID NO: 1390915 - RNA, 19 nt, Artificial Sequence
  Description of Artificial Sequence: Synthetic oligonucleotide
gagaucaccuacaaauacu

SEQ ID NO: 1390916 - RNA, 19 nt, Artificial Sequence
  Description of Artificial Sequence: Synthetic oligonucleotide
cuucaggagaucaccuaca

SEQ ID NO: 1390917 - RNA, 19 nt, Artificial Sequence
  Description of Artificial Sequence: Synthetic oligonucleotide
cuacuguacuccuccucug

SEQ ID NO: 1390918 - RNA, 19 nt, Artificial Sequence
  Description of Artificial Sequence: Synthetic oligonucleotide
auuacacaacaugauccau

SEQ ID NO: 1390919 - RNA, 19 nt, Artificial Sequence
  Description of Artificial Sequence: Synthetic oligonucleotide
uguuagcagaugggguacc

SEQ ID NO: 1390920 - RNA, 19 nt, Artificial Sequence
  Description of Artificial Sequence: Synthetic oligonucleotide
cagccucgaacccugaaca

SEQ ID NO: 1390921 - RNA, 19 nt, Artificial Sequence
  Description of Artificial Sequence: Synthetic oligonucleotide
uccugagacuucccacugu

SEQ ID NO: 1390922 - RNA, 19 nt, Artificial Sequence
  Description of Artificial Sequence: Synthetic oligonucleotide
augacugguucacccugug

SEQ ID NO: 1390923 - RNA, 19 nt, Artificial Sequence
  Description of Artificial Sequence: Synthetic oligonucleotide
gguaaacaagaccguguac

SEQ ID NO: 1390924 - RNA, 19 nt, Artificial Sequence
  Description of Artificial Sequence: Synthetic oligonucleotide
ucucgucauucaccugccc

SEQ ID NO: 1390925 - RNA, 19 nt, Artificial Sequence
  Description of Artificial Sequence: Synthetic oligonucleotide
ucgccgauugccugaccgc

SEQ ID NO: 1390926 - RNA, 19 nt, Artificial Sequence
  Description of Artificial Sequence: Synthetic oligonucleotide
ugucagucagaggaugcau

SEQ ID NO: 1390927 - RNA, 19 nt, Artificial Sequence
  Description of Artificial Sequence: Synthetic oligonucleotide
uguguccccgagguaaccu

SEQ ID NO: 1390928 - RNA, 19 nt, Artificial Sequence
  Description of Artificial Sequence: Synthetic oligonucleotide
gccuagaacuuguuuugag

SEQ ID NO: 1390929 - RNA, 19 nt, Artificial Sequence
  Description of Artificial Sequence: Synthetic oligonucleotide
aguaccuguggaagccagg

SEQ ID NO: 1390930 - RNA, 19 nt, Artificial Sequence
  Description of Artificial Sequence: Synthetic oligonucleotide
gaucaccuacaaauacuuc

SEQ ID NO: 1390931 - RNA, 19 nt, Artificial Sequence
  Description of Artificial Sequence: Synthetic oligonucleotide
cagcucggugggaaguggg

SEQ ID NO: 1390932 - RNA, 19 nt, Artificial Sequence
  Description of Artificial Sequence: Synthetic oligonucleotide
acuugguaaacaagaccgu

SEQ ID NO: 1390933 - RNA, 19 nt, Artificial Sequence
  Description of Artificial Sequence: Synthetic oligonucleotide
uucggcugugugcaaccaa

SEQ ID NO: 1390934 - RNA, 19 nt, Artificial Sequence
  Description of Artificial Sequence: Synthetic oligonucleotide
ccuucaggagaucaccuac

SEQ ID NO: 1390935 - RNA, 19 nt, Artificial Sequence
  Description of Artificial Sequence: Synthetic oligonucleotide
guccagacuugguaaacaa

SEQ ID NO: 1390936 - RNA, 19 nt, Artificial Sequence
  Description of Artificial Sequence: Synthetic oligonucleotide
acaagaccguguacugcac

SEQ ID NO: 1390937 - RNA, 19 nt, Artificial Sequence
  Description of Artificial Sequence: Synthetic oligonucleotide
cuggaacgauuucuuguuc

SEQ ID NO: 1390938 - RNA, 19 nt, Artificial Sequence
  Description of Artificial Sequence: Synthetic oligonucleotide
caauucggcugugugcaac

SEQ ID NO: 1390939 - RNA, 19 nt, Artificial Sequence
  Description of Artificial Sequence: Synthetic oligonucleotide
gacuugucauaguaacagu

SEQ ID NO: 1390940 - RNA, 19 nt, Artificial Sequence
  Description of Artificial Sequence: Synthetic oligonucleotide
gccguguugucccauugcc

SEQ ID NO: 1390941 - RNA, 19 nt, Artificial Sequence
  Description of Artificial Sequence: Synthetic oligonucleotide
uuacacccggccaguccca

SEQ ID NO: 1390942 - RNA, 19 nt, Artificial Sequence
  Description of Artificial Sequence: Synthetic oligonucleotide
cuucacucugggucaucac

SEQ ID NO: 1390943 - RNA, 19 nt, Artificial Sequence
  Description of Artificial Sequence: Synthetic oligonucleotide
acuacaucgcuggcagucu

SEQ ID NO: 1390944 - RNA, 19 nt, Artificial Sequence
  Description of Artificial Sequence: Synthetic oligonucleotide
cuucucgguugaacugggc

SEQ ID NO: 1390945 - RNA, 19 nt, Artificial Sequence
  Description of Artificial Sequence: Synthetic oligonucleotide
uggacgguuuugcccucug

SEQ ID NO: 1390946 - RNA, 19 nt, Artificial Sequence
  Description of Artificial Sequence: Synthetic oligonucleotide
cagcagaacuagucuggac

SEQ ID NO: 1390947 - RNA, 19 nt, Artificial Sequence
  Description of Artificial Sequence: Synthetic oligonucleotide
gcucuucucgguugaacug

SEQ ID NO: 1390948 - RNA, 19 nt, Artificial Sequence
  Description of Artificial Sequence: Synthetic oligonucleotide
caaguaguaugaggguguc

SEQ ID NO: 1390949 - RNA, 19 nt, Artificial Sequence
  Description of Artificial Sequence: Synthetic oligonucleotide
ggguaacaguuucuuagca

SEQ ID NO: 1390950 - RNA, 19 nt, Artificial Sequence
  Description of Artificial Sequence: Synthetic oligonucleotide
ccacgaaggaaccucccag

SEQ ID NO: 1390951 - RNA, 19 nt, Artificial Sequence
  Description of Artificial Sequence: Synthetic oligonucleotide
cacuaagccucaguaccug

SEQ ID NO: 1390952 - RNA, 19 nt, Artificial Sequence
  Description of Artificial Sequence: Synthetic oligonucleotide
cuggcgaccauugagcugu

SEQ ID NO: 1390953 - RNA, 19 nt, Artificial Sequence
  Description of Artificial Sequence: Synthetic oligonucleotide
aguccaaagccaaguagua

SEQ ID NO: 1390954 - RNA, 19 nt, Artificial Sequence
  Description of Artificial Sequence: Synthetic oligonucleotide
agcucggugggaagugggg

SEQ ID NO: 1390955 - RNA, 19 nt, Artificial Sequence
  Description of Artificial Sequence: Synthetic oligonucleotide
gucggcuggacuacaucgc

SEQ ID NO: 1390956 - RNA, 19 nt, Artificial Sequence
  Description of Artificial Sequence: Synthetic oligonucleotide
ccucgaacccugaacauca

SEQ ID NO: 1390957 - RNA, 19 nt, Artificial Sequence
  Description of Artificial Sequence: Synthetic oligonucleotide
aggagaucaccuacaaaua

SEQ ID NO: 1390958 - RNA, 19 nt, Artificial Sequence
  Description of Artificial Sequence: Synthetic oligonucleotide
uguucgccgauugccugac

SEQ ID NO: 1390959 - RNA, 19 nt, Artificial Sequence
  Description of Artificial Sequence: Synthetic oligonucleotide
guaggucaagauaccuuca

SEQ ID NO: 1390960 - RNA, 19 nt, Artificial Sequence
  Description of Artificial Sequence: Synthetic oligonucleotide
ccuauccuaugacugguuc

SEQ ID NO: 1390961 - RNA, 19 nt, Artificial Sequence
  Description of Artificial Sequence: Synthetic oligonucleotide
auaaggccagugaccuuag

SEQ ID NO: 1390962 - RNA, 19 nt, Artificial Sequence
  Description of Artificial Sequence: Synthetic oligonucleotide
ugucguccgccuagaacuu

SEQ ID NO: 1390963 - RNA, 19 nt, Artificial Sequence
  Description of Artificial Sequence: Synthetic oligonucleotide
gcgaccauugagcuguguc

SEQ ID NO: 1390964 - RNA, 19 nt, Artificial Sequence
  Description of Artificial Sequence: Synthetic oligonucleotide
auugccugaccgccuccgu

SEQ ID NO: 1390965 - RNA, 19 nt, Artificial Sequence
  Description of Artificial Sequence: Synthetic oligonucleotide
augauccauggaacaccac

SEQ ID NO: 1390966 - RNA, 19 nt, Artificial Sequence
  Description of Artificial Sequence: Synthetic oligonucleotide
agguugaguccaaagccaa

SEQ ID NO: 1390967 - RNA, 19 nt, Artificial Sequence
  Description of Artificial Sequence: Synthetic oligonucleotide
ggaugcaugcucauacaga

SEQ ID NO: 1390968 - RNA, 19 nt, Artificial Sequence
  Description of Artificial Sequence: Synthetic oligonucleotide
accuugcuggguaacaguu

SEQ ID NO: 1390969 - RNA, 19 nt, Artificial Sequence
  Description of Artificial Sequence: Synthetic oligonucleotide
uccccgagguaaccuugcu

SEQ ID NO: 1390970 - RNA, 19 nt, Artificial Sequence
  Description of Artificial Sequence: Synthetic oligonucleotide
ggacgguuuugcccucugg

SEQ ID NO: 1390971 - RNA, 19 nt, Artificial Sequence
  Description of Artificial Sequence: Synthetic oligonucleotide
guuagcagaugggguacca

SEQ ID NO: 1390972 - RNA, 19 nt, Artificial Sequence
  Description of Artificial Sequence: Synthetic oligonucleotide
ccgccuagaacuuguuuug

SEQ ID NO: 1390973 - RNA, 19 nt, Artificial Sequence
  Description of Artificial Sequence: Synthetic oligonucleotide
gccuuugccuauagaaacc

SEQ ID NO: 1390974 - RNA, 19 nt, Artificial Sequence
  Description of Artificial Sequence: Synthetic oligonucleotide
cugacugggguagauggaa

SEQ ID NO: 1390975 - RNA, 19 nt, Artificial Sequence
  Description of Artificial Sequence: Synthetic oligonucleotide
agccucgaacccugaacau

SEQ ID NO: 1390976 - RNA, 19 nt, Artificial Sequence
  Description of Artificial Sequence: Synthetic oligonucleotide
guguccagacuugguaaac

SEQ ID NO: 1390977 - RNA, 19 nt, Artificial Sequence
  Description of Artificial Sequence: Synthetic oligonucleotide
cacuguuagcagauggggu

SEQ ID NO: 1390978 - RNA, 19 nt, Artificial Sequence
  Description of Artificial Sequence: Synthetic oligonucleotide
cucgaacccugaacaucac

SEQ ID NO: 1390979 - RNA, 19 nt, Artificial Sequence
  Description of Artificial Sequence: Synthetic oligonucleotide
agguaaccuugcuggguaa

SEQ ID NO: 1390980 - RNA, 19 nt, Artificial Sequence
  Description of Artificial Sequence: Synthetic oligonucleotide
cccugaacaucacuuguuc

SEQ ID NO: 1390981 - RNA, 19 nt, Artificial Sequence
  Description of Artificial Sequence: Synthetic oligonucleotide
cacgugaacugcggccacg

SEQ ID NO: 1390982 - RNA, 19 nt, Artificial Sequence
  Description of Artificial Sequence: Synthetic oligonucleotide
cucgucauucaccugcccu

SEQ ID NO: 1390983 - RNA, 19 nt, Artificial Sequence
  Description of Artificial Sequence: Synthetic oligonucleotide
gguugaguccaaagccaag

SEQ ID NO: 1390984 - RNA, 19 nt, Artificial Sequence
  Description of Artificial Sequence: Synthetic oligonucleotide
ugucagccucgaacccuga

SEQ ID NO: 1390985 - RNA, 19 nt, Artificial Sequence
  Description of Artificial Sequence: Synthetic oligonucleotide
cugcggccacgaaggaacc

SEQ ID NO: 1390986 - RNA, 19 nt, Artificial Sequence
  Description of Artificial Sequence: Synthetic oligonucleotide
uacacccggccagucccag

SEQ ID NO: 1390987 - RNA, 19 nt, Artificial Sequence
  Description of Artificial Sequence: Synthetic oligonucleotide
cauugagcuguguccccga

SEQ ID NO: 1390988 - RNA, 19 nt, Artificial Sequence
  Description of Artificial Sequence: Synthetic oligonucleotide
gugucggcuggacuacauc

SEQ ID NO: 1390989 - RNA, 19 nt, Artificial Sequence
  Description of Artificial Sequence: Synthetic oligonucleotide
ucuugcugacugggguaga

SEQ ID NO: 1390990 - RNA, 19 nt, Artificial Sequence
  Description of Artificial Sequence: Synthetic oligonucleotide
ccuuacacccggccagucc

SEQ ID NO: 1390991 - RNA, 19 nt, Artificial Sequence
  Description of Artificial Sequence: Synthetic oligonucleotide
agaccguguacugcacccu

SEQ ID NO: 1390992 - RNA, 19 nt, Artificial Sequence
  Description of Artificial Sequence: Synthetic oligonucleotide
ccugaacaucacuuguuca

SEQ ID NO: 1390993 - RNA, 19 nt, Artificial Sequence
  Description of Artificial Sequence: Synthetic oligonucleotide
ccauugagcuguguccccg

SEQ ID NO: 1390994 - RNA, 19 nt, Artificial Sequence
  Description of Artificial Sequence: Synthetic oligonucleotide
gugcccugucagucagagg

SEQ ID NO: 1390995 - RNA, 19 nt, Artificial Sequence
  Description of Artificial Sequence: Synthetic oligonucleotide
auucggcugugugcaacca

SEQ ID NO: 1390996 - RNA, 19 nt, Artificial Sequence
  Description of Artificial Sequence: Synthetic oligonucleotide
ggcccuuccuacuguacuc

SEQ ID NO: 1390997 - RNA, 19 nt, Artificial Sequence
  Description of Artificial Sequence: Synthetic oligonucleotide
gguaaccuugcuggguaac

SEQ ID NO: 1390998 - RNA, 19 nt, Artificial Sequence
  Description of Artificial Sequence: Synthetic oligonucleotide
cgacacuaagccucaguac

SEQ ID NO: 1390999 - RNA, 19 nt, Artificial Sequence
  Description of Artificial Sequence: Synthetic oligonucleotide
ccuagaacuuguuuugagu

SEQ ID NO: 1391000 - RNA, 19 nt, Artificial Sequence
  Description of Artificial Sequence: Synthetic oligonucleotide
ccgagguaaccuugcuggg

SEQ ID NO: 1391001 - RNA, 19 nt, Artificial Sequence
  Description of Artificial Sequence: Synthetic oligonucleotide
uuggacgguuuugcccucu

SEQ ID NO: 1391002 - RNA, 19 nt, Artificial Sequence
  Description of Artificial Sequence: Synthetic oligonucleotide
caggugucggcuggacuac

SEQ ID NO: 1391003 - RNA, 19 nt, Artificial Sequence
  Description of Artificial Sequence: Synthetic oligonucleotide
ucccuccaucaccuuuaaa

SEQ ID NO: 1391004 - RNA, 19 nt, Artificial Sequence
  Description of Artificial Sequence: Synthetic oligonucleotide
cgguuuugcccucuggaac

SEQ ID NO: 1391005 - RNA, 19 nt, Artificial Sequence
  Description of Artificial Sequence: Synthetic oligonucleotide
acgaggaaauaaggccagu

SEQ ID NO: 1391006 - RNA, 19 nt, Artificial Sequence
  Description of Artificial Sequence: Synthetic oligonucleotide
cauucaccugcccuugggu

SEQ ID NO: 1391007 - RNA, 19 nt, Artificial Sequence
  Description of Artificial Sequence: Synthetic oligonucleotide
cuugcuccaccauggggcu

SEQ ID NO: 1391008 - RNA, 19 nt, Artificial Sequence
  Description of Artificial Sequence: Synthetic oligonucleotide
ccaaguaguaugagggugu

SEQ ID NO: 1391009 - RNA, 19 nt, Artificial Sequence
  Description of Artificial Sequence: Synthetic oligonucleotide
guaugaggguguccagacu

SEQ ID NO: 1391010 - RNA, 19 nt, Artificial Sequence
  Description of Artificial Sequence: Synthetic oligonucleotide
guuggacgguuuugcccuc

SEQ ID NO: 1391011 - RNA, 19 nt, Artificial Sequence
  Description of Artificial Sequence: Synthetic oligonucleotide
ccagugaccuuagaaagaa

SEQ ID NO: 1391012 - RNA, 19 nt, Artificial Sequence
  Description of Artificial Sequence: Synthetic oligonucleotide
gauuucuuguucgccgauu

SEQ ID NO: 1391013 - RNA, 19 nt, Artificial Sequence
  Description of Artificial Sequence: Synthetic oligonucleotide
uuuugcccucuggaacgau

SEQ ID NO: 1391014 - RNA, 19 nt, Artificial Sequence
  Description of Artificial Sequence: Synthetic oligonucleotide
cugagccuuugccuauaga

SEQ ID NO: 1391015 - RNA, 19 nt, Artificial Sequence
  Description of Artificial Sequence: Synthetic oligonucleotide
ugcggccacgaaggaaccu

SEQ ID NO: 1391016 - RNA, 19 nt, Artificial Sequence
  Description of Artificial Sequence: Synthetic oligonucleotide
ccguguacugcacccuuac

SEQ ID NO: 1391017 - RNA, 19 nt, Artificial Sequence
  Description of Artificial Sequence: Synthetic oligonucleotide
acccggccagucccagcuc

SEQ ID NO: 1391018 - RNA, 19 nt, Artificial Sequence
  Description of Artificial Sequence: Synthetic oligonucleotide
ggcucuugcugacuggggu

SEQ ID NO: 1391019 - RNA, 19 nt, Artificial Sequence
  Description of Artificial Sequence: Synthetic oligonucleotide
augcaugcucauacagaaa

SEQ ID NO: 1391020 - RNA, 19 nt, Artificial Sequence
  Description of Artificial Sequence: Synthetic oligonucleotide
gccagugaccuuagaaaga

SEQ ID NO: 1391021 - RNA, 19 nt, Artificial Sequence
  Description of Artificial Sequence: Synthetic oligonucleotide
ugcgccguguugucccauu

SEQ ID NO: 1391022 - RNA, 19 nt, Artificial Sequence
  Description of Artificial Sequence: Synthetic oligonucleotide
cuagucuggacagcuugcu

SEQ ID NO: 1391023 - RNA, 19 nt, Artificial Sequence
  Description of Artificial Sequence: Synthetic oligonucleotide
uggcgaccauugagcugug

SEQ ID NO: 1391024 - RNA, 19 nt, Artificial Sequence
  Description of Artificial Sequence: Synthetic oligonucleotide
gccucgaacccugaacauc

SEQ ID NO: 1391025 - RNA, 19 nt, Artificial Sequence
  Description of Artificial Sequence: Synthetic oligonucleotide
accuuacaauucggcugug

SEQ ID NO: 1391026 - RNA, 19 nt, Artificial Sequence
  Description of Artificial Sequence: Synthetic oligonucleotide
ggacuucgacacuaagccu

SEQ ID NO: 1391027 - RNA, 19 nt, Artificial Sequence
  Description of Artificial Sequence: Synthetic oligonucleotide
ccuggcgaccauugagcug

SEQ ID NO: 1391028 - RNA, 19 nt, Artificial Sequence
  Description of Artificial Sequence: Synthetic oligonucleotide
gggcucuugcugacugggg

SEQ ID NO: 1391029 - RNA, 19 nt, Artificial Sequence
  Description of Artificial Sequence: Synthetic oligonucleotide
gaccguguacugcacccuu

SEQ ID NO: 1391030 - RNA, 19 nt, Artificial Sequence
  Description of Artificial Sequence: Synthetic oligonucleotide
aagugaggacugagccuuu

SEQ ID NO: 1391031 - RNA, 19 nt, Artificial Sequence
  Description of Artificial Sequence: Synthetic oligonucleotide
ccauuuacucaugcaacaa

SEQ ID NO: 1391032 - RNA, 19 nt, Artificial Sequence
  Description of Artificial Sequence: Synthetic oligonucleotide
agcccaugucguccgccua

SEQ ID NO: 1391033 - RNA, 19 nt, Artificial Sequence
  Description of Artificial Sequence: Synthetic oligonucleotide
cuuugccuauagaaaccuu

SEQ ID NO: 1391034 - RNA, 19 nt, Artificial Sequence
  Description of Artificial Sequence: Synthetic oligonucleotide
gacugagccuuugccuaua

SEQ ID NO: 1391035 - RNA, 19 nt, Artificial Sequence
  Description of Artificial Sequence: Synthetic oligonucleotide
cacccggccagucccagcu

SEQ ID NO: 1391036 - RNA, 19 nt, Artificial Sequence
  Description of Artificial Sequence: Synthetic oligonucleotide
gcggccacgaaggaaccuc

SEQ ID NO: 1391037 - RNA, 19 nt, Artificial Sequence
  Description of Artificial Sequence: Synthetic oligonucleotide
ccuaugacugguucacccu

SEQ ID NO: 1391038 - RNA, 19 nt, Artificial Sequence
  Description of Artificial Sequence: Synthetic oligonucleotide
aggugucggcuggacuaca

SEQ ID NO: 1391039 - RNA, 19 nt, Artificial Sequence
  Description of Artificial Sequence: Synthetic oligonucleotide
ccgauugccugaccgccuc

SEQ ID NO: 1391040 - RNA, 19 nt, Artificial Sequence
  Description of Artificial Sequence: Synthetic oligonucleotide
gcgccguguugucccauug

SEQ ID NO: 1391041 - RNA, 19 nt, Artificial Sequence
  Description of Artificial Sequence: Synthetic oligonucleotide
accguguacugcacccuua

SEQ ID NO: 1391042 - RNA, 19 nt, Artificial Sequence
  Description of Artificial Sequence: Synthetic oligonucleotide
gaacuagucuggacagcuu

SEQ ID NO: 1391043 - RNA, 19 nt, Artificial Sequence
  Description of Artificial Sequence: Synthetic oligonucleotide
ccaucaccuuuaaaauaaa

SEQ ID NO: 1391044 - RNA, 19 nt, Artificial Sequence
  Description of Artificial Sequence: Synthetic oligonucleotide
gcuguguccccgagguaac

SEQ ID NO: 1391045 - RNA, 19 nt, Artificial Sequence
  Description of Artificial Sequence: Synthetic oligonucleotide
cgaaggaaccucccagaca

SEQ ID NO: 1391046 - RNA, 19 nt, Artificial Sequence
  Description of Artificial Sequence: Synthetic oligonucleotide
ggccccagaagaucuuccu

SEQ ID NO: 1391047 - RNA, 19 nt, Artificial Sequence
  Description of Artificial Sequence: Synthetic oligonucleotide
cuugcugacugggguagau

SEQ ID NO: 1391048 - RNA, 19 nt, Artificial Sequence
  Description of Artificial Sequence: Synthetic oligonucleotide
cucccuccaucaccuuuaa

SEQ ID NO: 1391049 - RNA, 19 nt, Artificial Sequence
  Description of Artificial Sequence: Synthetic oligonucleotide
ccuuugccuauagaaaccu

SEQ ID NO: 1391050 - RNA, 19 nt, Artificial Sequence
  Description of Artificial Sequence: Synthetic oligonucleotide
cgccgauugccugaccgcc

SEQ ID NO: 1391051 - RNA, 19 nt, Artificial Sequence
  Description of Artificial Sequence: Synthetic oligonucleotide
guccgccuagaacuuguuu

SEQ ID NO: 1391052 - RNA, 19 nt, Artificial Sequence
  Description of Artificial Sequence: Synthetic oligonucleotide
cgccguguugucccauugc

SEQ ID NO: 1391053 - RNA, 19 nt, Artificial Sequence
  Description of Artificial Sequence: Synthetic oligonucleotide
caguugggccccagaagau

SEQ ID NO: 1391054 - RNA, 19 nt, Artificial Sequence
  Description of Artificial Sequence: Synthetic oligonucleotide
gccuggcgaccauugagcu

SEQ ID NO: 1391055 - RNA, 19 nt, Artificial Sequence
  Description of Artificial Sequence: Synthetic oligonucleotide
ccccucccugcccuugacc

SEQ ID NO: 1391056 - RNA, 19 nt, Artificial Sequence
  Description of Artificial Sequence: Synthetic oligonucleotide
cuacaucgcuggcagucuu

SEQ ID NO: 1391057 - RNA, 19 nt, Artificial Sequence
  Description of Artificial Sequence: Synthetic oligonucleotide
uugcgccguguugucccau

SEQ ID NO: 1391058 - RNA, 19 nt, Artificial Sequence
  Description of Artificial Sequence: Synthetic oligonucleotide
caucgcuggcagucuugcu

SEQ ID NO: 1391059 - RNA, 19 nt, Artificial Sequence
  Description of Artificial Sequence: Synthetic oligonucleotide
cccacccucccuccaucac

SEQ ID NO: 1391060 - RNA, 19 nt, Artificial Sequence
  Description of Artificial Sequence: Synthetic oligonucleotide
ccugaccgccuccguggag

SEQ ID NO: 1391061 - RNA, 19 nt, Artificial Sequence
  Description of Artificial Sequence: Synthetic oligonucleotide
ccucccaccccuauccuau

SEQ ID NO: 1391062 - RNA, 19 nt, Artificial Sequence
  Description of Artificial Sequence: Synthetic oligonucleotide
cggaauccaccacgugaac

SEQ ID NO: 1391063 - RNA, 19 nt, Artificial Sequence
  Description of Artificial Sequence: Synthetic oligonucleotide
gaccgccuccguggagguc

SEQ ID NO: 1391064 - RNA, 19 nt, Artificial Sequence
  Description of Artificial Sequence: Synthetic oligonucleotide
gccugaccgccuccgugga

SEQ ID NO: 1391065 - RNA, 19 nt, Artificial Sequence
  Description of Artificial Sequence: Synthetic oligonucleotide
ccguguugucccauugccu

SEQ ID NO: 1391066 - RNA, 19 nt, Artificial Sequence
  Description of Artificial Sequence: Synthetic oligonucleotide
ccccaaaggucucaguguu

SEQ ID NO: 1391067 - RNA, 19 nt, Artificial Sequence
  Description of Artificial Sequence: Synthetic oligonucleotide
cguguacugcacccuuaca

SEQ ID NO: 1391068 - RNA, 19 nt, Artificial Sequence
  Description of Artificial Sequence: Synthetic oligonucleotide
ggacuacaucgcuggcagu

SEQ ID NO: 1391069 - RNA, 19 nt, Artificial Sequence
  Description of Artificial Sequence: Synthetic oligonucleotide
ggugucggcuggacuacau

SEQ ID NO: 1391070 - RNA, 19 nt, Artificial Sequence
  Description of Artificial Sequence: Synthetic oligonucleotide
ccuuacaauucggcugugu

SEQ ID NO: 1391071 - RNA, 19 nt, Artificial Sequence
  Description of Artificial Sequence: Synthetic oligonucleotide
cgccuagaacuuguuuuga

SEQ ID NO: 1391072 - RNA, 19 nt, Artificial Sequence
  Description of Artificial Sequence: Synthetic oligonucleotide
cccuuacacccggccaguc

SEQ ID NO: 1391073 - RNA, 19 nt, Artificial Sequence
  Description of Artificial Sequence: Synthetic oligonucleotide
cccaugucguccgccuaga

SEQ ID NO: 1391074 - RNA, 19 nt, Artificial Sequence
  Description of Artificial Sequence: Synthetic oligonucleotide
ccaugucguccgccuagaa

SEQ ID NO: 1391075 - RNA, 19 nt, Artificial Sequence
  Description of Artificial Sequence: Synthetic oligonucleotide
ccccuauccuaugacuggu

SEQ ID NO: 1391076 - RNA, 19 nt, Artificial Sequence
  Description of Artificial Sequence: Synthetic oligonucleotide
gccgauugccugaccgccu

SEQ ID NO: 1391077 - RNA, 19 nt, Artificial Sequence
  Description of Artificial Sequence: Synthetic oligonucleotide
cccuauccuaugacugguu

SEQ ID NO: 1391078 - RNA, 19 nt, Artificial Sequence
  Description of Artificial Sequence: Synthetic oligonucleotide
ggcgaccauugagcugugu

SEQ ID NO: 1391079 - RNA, 19 nt, Artificial Sequence
  Description of Artificial Sequence: Synthetic oligonucleotide
aaugguucggcccagagcc

SEQ ID NO: 1391080 - RNA, 19 nt, Artificial Sequence
  Description of Artificial Sequence: Synthetic oligonucleotide
uuaaguacaauauagagug

SEQ ID NO: 1391081 - RNA, 19 nt, Artificial Sequence
  Description of Artificial Sequence: Synthetic oligonucleotide
agcauuuauauaaagauac

SEQ ID NO: 1391082 - RNA, 19 nt, Artificial Sequence
  Description of Artificial Sequence: Synthetic oligonucleotide
uuugcuuagacccugauua

SEQ ID NO: 1391083 - RNA, 19 nt, Artificial Sequence
  Description of Artificial Sequence: Synthetic oligonucleotide
aaugauuuggggcccauuc

SEQ ID NO: 1391084 - RNA, 19 nt, Artificial Sequence
  Description of Artificial Sequence: Synthetic oligonucleotide
aaagauacccuaaaguuuc

SEQ ID NO: 1391085 - RNA, 19 nt, Artificial Sequence
  Description of Artificial Sequence: Synthetic oligonucleotide
acuuaaguacaauauagag

SEQ ID NO: 1391086 - RNA, 19 nt, Artificial Sequence
  Description of Artificial Sequence: Synthetic oligonucleotide
agauccuugugauaggacc

SEQ ID NO: 1391087 - RNA, 19 nt, Artificial Sequence
  Description of Artificial Sequence: Synthetic oligonucleotide
aaaggauaguacccgaguc

SEQ ID NO: 1391088 - RNA, 19 nt, Artificial Sequence
  Description of Artificial Sequence: Synthetic oligonucleotide
gaugaucacacauugguug

SEQ ID NO: 1391089 - RNA, 19 nt, Artificial Sequence
  Description of Artificial Sequence: Synthetic oligonucleotide
uaaaguuucuaggaggugg

SEQ ID NO: 1391090 - RNA, 19 nt, Artificial Sequence
  Description of Artificial Sequence: Synthetic oligonucleotide
aggcuaagaaaacagcugc

SEQ ID NO: 1391091 - RNA, 19 nt, Artificial Sequence
  Description of Artificial Sequence: Synthetic oligonucleotide
acaagagauaaccccagcc

SEQ ID NO: 1391092 - RNA, 19 nt, Artificial Sequence
  Description of Artificial Sequence: Synthetic oligonucleotide
ucuagaggcagguuaacgg

SEQ ID NO: 1391093 - RNA, 19 nt, Artificial Sequence
  Description of Artificial Sequence: Synthetic oligonucleotide
aaaugguucggcccagagc

SEQ ID NO: 1391094 - RNA, 19 nt, Artificial Sequence
  Description of Artificial Sequence: Synthetic oligonucleotide
uuugucccagcuaaggagg

SEQ ID NO: 1391095 - RNA, 19 nt, Artificial Sequence
  Description of Artificial Sequence: Synthetic oligonucleotide
ggaauuuacacuuaaguac

SEQ ID NO: 1391096 - RNA, 19 nt, Artificial Sequence
  Description of Artificial Sequence: Synthetic oligonucleotide
gauaggaccucuuuguccc

SEQ ID NO: 1391097 - RNA, 19 nt, Artificial Sequence
  Description of Artificial Sequence: Synthetic oligonucleotide
cauacaggauuccaaaucc

SEQ ID NO: 1391098 - RNA, 19 nt, Artificial Sequence
  Description of Artificial Sequence: Synthetic oligonucleotide
cuuuaucucuccaagguug

SEQ ID NO: 1391099 - RNA, 19 nt, Artificial Sequence
  Description of Artificial Sequence: Synthetic oligonucleotide
acccgauuaaaccauacag

SEQ ID NO: 1391100 - RNA, 19 nt, Artificial Sequence
  Description of Artificial Sequence: Synthetic oligonucleotide
auacccuaaaguuucuagg

SEQ ID NO: 1391101 - RNA, 19 nt, Artificial Sequence
  Description of Artificial Sequence: Synthetic oligonucleotide
guacaauauagagugaggg

SEQ ID NO: 1391102 - RNA, 19 nt, Artificial Sequence
  Description of Artificial Sequence: Synthetic oligonucleotide
gauacccuaaaguuucuag

SEQ ID NO: 1391103 - RNA, 19 nt, Artificial Sequence
  Description of Artificial Sequence: Synthetic oligonucleotide
uuuacacuuaaguacaaua

SEQ ID NO: 1391104 - RNA, 19 nt, Artificial Sequence
  Description of Artificial Sequence: Synthetic oligonucleotide
uuacacuuaaguacaauau

SEQ ID NO: 1391105 - RNA, 19 nt, Artificial Sequence
  Description of Artificial Sequence: Synthetic oligonucleotide
uauagcacgccagaaagag

SEQ ID NO: 1391106 - RNA, 19 nt, Artificial Sequence
  Description of Artificial Sequence: Synthetic oligonucleotide
aagagauaaccccagcccu

SEQ ID NO: 1391107 - RNA, 19 nt, Artificial Sequence
  Description of Artificial Sequence: Synthetic oligonucleotide
ugugauaggaccucuuugu

SEQ ID NO: 1391108 - RNA, 19 nt, Artificial Sequence
  Description of Artificial Sequence: Synthetic oligonucleotide
guuaacggcagcuggacag

SEQ ID NO: 1391109 - RNA, 19 nt, Artificial Sequence
  Description of Artificial Sequence: Synthetic oligonucleotide
augaacaccguuucagggg

SEQ ID NO: 1391110 - RNA, 19 nt, Artificial Sequence
  Description of Artificial Sequence: Synthetic oligonucleotide
guggugauugcccuuacgg

SEQ ID NO: 1391111 - RNA, 19 nt, Artificial Sequence
  Description of Artificial Sequence: Synthetic oligonucleotide
aaggauaguacccgagucu

SEQ ID NO: 1391112 - RNA, 19 nt, Artificial Sequence
  Description of Artificial Sequence: Synthetic oligonucleotide
caagagauaaccccagccc

SEQ ID NO: 1391113 - RNA, 19 nt, Artificial Sequence
  Description of Artificial Sequence: Synthetic oligonucleotide
aacuucuagaacuccacaa

SEQ ID NO: 1391114 - RNA, 19 nt, Artificial Sequence
  Description of Artificial Sequence: Synthetic oligonucleotide
accaugguaaaccagccug

SEQ ID NO: 1391115 - RNA, 19 nt, Artificial Sequence
  Description of Artificial Sequence: Synthetic oligonucleotide
ugcucaaccaggaauggga

SEQ ID NO: 1391116 - RNA, 19 nt, Artificial Sequence
  Description of Artificial Sequence: Synthetic oligonucleotide
augauuuggggcccauucc

SEQ ID NO: 1391117 - RNA, 19 nt, Artificial Sequence
  Description of Artificial Sequence: Synthetic oligonucleotide
uggugaugaucacacauug

SEQ ID NO: 1391118 - RNA, 19 nt, Artificial Sequence
  Description of Artificial Sequence: Synthetic oligonucleotide
gauuaaaccauacaggauu

SEQ ID NO: 1391119 - RNA, 19 nt, Artificial Sequence
  Description of Artificial Sequence: Synthetic oligonucleotide
cuuugucccagcuaaggag

SEQ ID NO: 1391120 - RNA, 19 nt, Artificial Sequence
  Description of Artificial Sequence: Synthetic oligonucleotide
ugauaggaccucuuugucc

SEQ ID NO: 1391121 - RNA, 19 nt, Artificial Sequence
  Description of Artificial Sequence: Synthetic oligonucleotide
agaugaacaccguuucagg

SEQ ID NO: 1391122 - RNA, 19 nt, Artificial Sequence
  Description of Artificial Sequence: Synthetic oligonucleotide
uacccuaaaguuucuagga

SEQ ID NO: 1391123 - RNA, 19 nt, Artificial Sequence
  Description of Artificial Sequence: Synthetic oligonucleotide
caagggagcauuuauauaa

SEQ ID NO: 1391124 - RNA, 19 nt, Artificial Sequence
  Description of Artificial Sequence: Synthetic oligonucleotide
aggaggaaaugauuugggg

SEQ ID NO: 1391125 - RNA, 19 nt, Artificial Sequence
  Description of Artificial Sequence: Synthetic oligonucleotide
gagucuuagacugacucag

SEQ ID NO: 1391126 - RNA, 19 nt, Artificial Sequence
  Description of Artificial Sequence: Synthetic oligonucleotide
auguuagggaacgcgaggc

SEQ ID NO: 1391127 - RNA, 19 nt, Artificial Sequence
  Description of Artificial Sequence: Synthetic oligonucleotide
uguugccgaaguuuggugc

SEQ ID NO: 1391128 - RNA, 19 nt, Artificial Sequence
  Description of Artificial Sequence: Synthetic oligonucleotide
gauaguacccgagucuuag

SEQ ID NO: 1391129 - RNA, 19 nt, Artificial Sequence
  Description of Artificial Sequence: Synthetic oligonucleotide
uugccuuuaucucuccaag

SEQ ID NO: 1391130 - RNA, 19 nt, Artificial Sequence
  Description of Artificial Sequence: Synthetic oligonucleotide
uuagggaacgcgaggcccg

SEQ ID NO: 1391131 - RNA, 19 nt, Artificial Sequence
  Description of Artificial Sequence: Synthetic oligonucleotide
uucucggugaugaagcggu

SEQ ID NO: 1391132 - RNA, 19 nt, Artificial Sequence
  Description of Artificial Sequence: Synthetic oligonucleotide
uugugauaggaccucuuug

SEQ ID NO: 1391133 - RNA, 19 nt, Artificial Sequence
  Description of Artificial Sequence: Synthetic oligonucleotide
aacaccguuucaggggucc

SEQ ID NO: 1391134 - RNA, 19 nt, Artificial Sequence
  Description of Artificial Sequence: Synthetic oligonucleotide
ugauugacuuugcuuagac

SEQ ID NO: 1391135 - RNA, 19 nt, Artificial Sequence
  Description of Artificial Sequence: Synthetic oligonucleotide
cuagaggcagguuaacggc

SEQ ID NO: 1391136 - RNA, 19 nt, Artificial Sequence
  Description of Artificial Sequence: Synthetic oligonucleotide
ugggaaaggauaguacccg

SEQ ID NO: 1391137 - RNA, 19 nt, Artificial Sequence
  Description of Artificial Sequence: Synthetic oligonucleotide
aaccauacaggauuccaaa

SEQ ID NO: 1391138 - RNA, 19 nt, Artificial Sequence
  Description of Artificial Sequence: Synthetic oligonucleotide
ugcucaaggucacucagga

SEQ ID NO: 1391139 - RNA, 19 nt, Artificial Sequence
  Description of Artificial Sequence: Synthetic oligonucleotide
guacccgagucuuagacug

SEQ ID NO: 1391140 - RNA, 19 nt, Artificial Sequence
  Description of Artificial Sequence: Synthetic oligonucleotide
cugauucuggaacuguggg

SEQ ID NO: 1391141 - RNA, 19 nt, Artificial Sequence
  Description of Artificial Sequence: Synthetic oligonucleotide
aaggaggaaaugauuuggg

SEQ ID NO: 1391142 - RNA, 19 nt, Artificial Sequence
  Description of Artificial Sequence: Synthetic oligonucleotide
ugaacaccguuucaggggu

SEQ ID NO: 1391143 - RNA, 19 nt, Artificial Sequence
  Description of Artificial Sequence: Synthetic oligonucleotide
ggaggaaaugauuuggggc

SEQ ID NO: 1391144 - RNA, 19 nt, Artificial Sequence
  Description of Artificial Sequence: Synthetic oligonucleotide
aauauagagugagggucuc

SEQ ID NO: 1391145 - RNA, 19 nt, Artificial Sequence
  Description of Artificial Sequence: Synthetic oligonucleotide
ucuuugucccagcuaagga

SEQ ID NO: 1391146 - RNA, 19 nt, Artificial Sequence
  Description of Artificial Sequence: Synthetic oligonucleotide
aacuccaccgcaaucacca

SEQ ID NO: 1391147 - RNA, 19 nt, Artificial Sequence
  Description of Artificial Sequence: Synthetic oligonucleotide
cuaagaaaacagcugcaug

SEQ ID NO: 1391148 - RNA, 19 nt, Artificial Sequence
  Description of Artificial Sequence: Synthetic oligonucleotide
uccauguuagggaacgcga

SEQ ID NO: 1391149 - RNA, 19 nt, Artificial Sequence
  Description of Artificial Sequence: Synthetic oligonucleotide
uucggagggccccagaaga

SEQ ID NO: 1391150 - RNA, 19 nt, Artificial Sequence
  Description of Artificial Sequence: Synthetic oligonucleotide
ucauaguagugguauggca

SEQ ID NO: 1391151 - RNA, 19 nt, Artificial Sequence
  Description of Artificial Sequence: Synthetic oligonucleotide
uuagacccugauuacacaa

SEQ ID NO: 1391152 - RNA, 19 nt, Artificial Sequence
  Description of Artificial Sequence: Synthetic oligonucleotide
ucgucaaacugcugcaugc

SEQ ID NO: 1391153 - RNA, 19 nt, Artificial Sequence
  Description of Artificial Sequence: Synthetic oligonucleotide
cacgccagaaagaggaggg

SEQ ID NO: 1391154 - RNA, 19 nt, Artificial Sequence
  Description of Artificial Sequence: Synthetic oligonucleotide
ggcugcaauagucaggagg

SEQ ID NO: 1391155 - RNA, 19 nt, Artificial Sequence
  Description of Artificial Sequence: Synthetic oligonucleotide
uaaaccauacaggauucca

SEQ ID NO: 1391156 - RNA, 19 nt, Artificial Sequence
  Description of Artificial Sequence: Synthetic oligonucleotide
ugccuuuaucucuccaagg

SEQ ID NO: 1391157 - RNA, 19 nt, Artificial Sequence
  Description of Artificial Sequence: Synthetic oligonucleotide
uaguacccgagucuuagac

SEQ ID NO: 1391158 - RNA, 19 nt, Artificial Sequence
  Description of Artificial Sequence: Synthetic oligonucleotide
gcugcaauagucaggaggg

SEQ ID NO: 1391159 - RNA, 19 nt, Artificial Sequence
  Description of Artificial Sequence: Synthetic oligonucleotide
uuccgcagcacacggaaca

SEQ ID NO: 1391160 - RNA, 19 nt, Artificial Sequence
  Description of Artificial Sequence: Synthetic oligonucleotide
cauguuagggaacgcgagg

SEQ ID NO: 1391161 - RNA, 19 nt, Artificial Sequence
  Description of Artificial Sequence: Synthetic oligonucleotide
ugacgcacucgucaggccc

SEQ ID NO: 1391162 - RNA, 19 nt, Artificial Sequence
  Description of Artificial Sequence: Synthetic oligonucleotide
accgcaaucaccaugguaa

SEQ ID NO: 1391163 - RNA, 19 nt, Artificial Sequence
  Description of Artificial Sequence: Synthetic oligonucleotide
uagacccugauuacacaag

SEQ ID NO: 1391164 - RNA, 19 nt, Artificial Sequence
  Description of Artificial Sequence: Synthetic oligonucleotide
uccaaaucccugauuggac

SEQ ID NO: 1391165 - RNA, 19 nt, Artificial Sequence
  Description of Artificial Sequence: Synthetic oligonucleotide
acuucuagaacuccacaaa

SEQ ID NO: 1391166 - RNA, 19 nt, Artificial Sequence
  Description of Artificial Sequence: Synthetic oligonucleotide
gaggcuaagaaaacagcug

SEQ ID NO: 1391167 - RNA, 19 nt, Artificial Sequence
  Description of Artificial Sequence: Synthetic oligonucleotide
caaggcccugauuugauug

SEQ ID NO: 1391168 - RNA, 19 nt, Artificial Sequence
  Description of Artificial Sequence: Synthetic oligonucleotide
aggaagaguugucuggucu

SEQ ID NO: 1391169 - RNA, 19 nt, Artificial Sequence
  Description of Artificial Sequence: Synthetic oligonucleotide
uggugauugcccuuacggc

SEQ ID NO: 1391170 - RNA, 19 nt, Artificial Sequence
  Description of Artificial Sequence: Synthetic oligonucleotide
auacaggauuccaaauccc

SEQ ID NO: 1391171 - RNA, 19 nt, Artificial Sequence
  Description of Artificial Sequence: Synthetic oligonucleotide
uuccaaaucccugauugga

SEQ ID NO: 1391172 - RNA, 19 nt, Artificial Sequence
  Description of Artificial Sequence: Synthetic oligonucleotide
uggggaauuuacacuuaag

SEQ ID NO: 1391173 - RNA, 19 nt, Artificial Sequence
  Description of Artificial Sequence: Synthetic oligonucleotide
agaggcuaagaaaacagcu

SEQ ID NO: 1391174 - RNA, 19 nt, Artificial Sequence
  Description of Artificial Sequence: Synthetic oligonucleotide
ucccugauuggacaagaga

SEQ ID NO: 1391175 - RNA, 19 nt, Artificial Sequence
  Description of Artificial Sequence: Synthetic oligonucleotide
aagacccucuucucgguga

SEQ ID NO: 1391176 - RNA, 19 nt, Artificial Sequence
  Description of Artificial Sequence: Synthetic oligonucleotide
augucauuauagcacgcca

SEQ ID NO: 1391177 - RNA, 19 nt, Artificial Sequence
  Description of Artificial Sequence: Synthetic oligonucleotide
ugggguucgggcacaaggc

SEQ ID NO: 1391178 - RNA, 19 nt, Artificial Sequence
  Description of Artificial Sequence: Synthetic oligonucleotide
gccaaggucaaaugguucg

SEQ ID NO: 1391179 - RNA, 19 nt, Artificial Sequence
  Description of Artificial Sequence: Synthetic oligonucleotide
aggaaaugauuuggggccc

SEQ ID NO: 1391180 - RNA, 19 nt, Artificial Sequence
  Description of Artificial Sequence: Synthetic oligonucleotide
aaaguuucuaggaggugga

SEQ ID NO: 1391181 - RNA, 19 nt, Artificial Sequence
  Description of Artificial Sequence: Synthetic oligonucleotide
uuuguugccgaaguuuggu

SEQ ID NO: 1391182 - RNA, 19 nt, Artificial Sequence
  Description of Artificial Sequence: Synthetic oligonucleotide
gaugacacgcaggaggcug

SEQ ID NO: 1391183 - RNA, 19 nt, Artificial Sequence
  Description of Artificial Sequence: Synthetic oligonucleotide
uguuagggaacgcgaggcc

SEQ ID NO: 1391184 - RNA, 19 nt, Artificial Sequence
  Description of Artificial Sequence: Synthetic oligonucleotide
cccgauuaaaccauacagg

SEQ ID NO: 1391185 - RNA, 19 nt, Artificial Sequence
  Description of Artificial Sequence: Synthetic oligonucleotide
cccugauuacacaagaaag

SEQ ID NO: 1391186 - RNA, 19 nt, Artificial Sequence
  Description of Artificial Sequence: Synthetic oligonucleotide
agggagcauuuauauaaag

SEQ ID NO: 1391187 - RNA, 19 nt, Artificial Sequence
  Description of Artificial Sequence: Synthetic oligonucleotide
gugaugaucacacauuggu

SEQ ID NO: 1391188 - RNA, 19 nt, Artificial Sequence
  Description of Artificial Sequence: Synthetic oligonucleotide
gacggcauaggccuccaug

SEQ ID NO: 1391189 - RNA, 19 nt, Artificial Sequence
  Description of Artificial Sequence: Synthetic oligonucleotide
guugccgaaguuuggugcc

SEQ ID NO: 1391190 - RNA, 19 nt, Artificial Sequence
  Description of Artificial Sequence: Synthetic oligonucleotide
ugaugaucacacauugguu

SEQ ID NO: 1391191 - RNA, 19 nt, Artificial Sequence
  Description of Artificial Sequence: Synthetic oligonucleotide
caagguugcaaagacagga

SEQ ID NO: 1391192 - RNA, 19 nt, Artificial Sequence
  Description of Artificial Sequence: Synthetic oligonucleotide
acggcauaggccuccaugu

SEQ ID NO: 1391193 - RNA, 19 nt, Artificial Sequence
  Description of Artificial Sequence: Synthetic oligonucleotide
guaggugacgcacucguca

SEQ ID NO: 1391194 - RNA, 19 nt, Artificial Sequence
  Description of Artificial Sequence: Synthetic oligonucleotide
agacccugauuacacaaga

SEQ ID NO: 1391195 - RNA, 19 nt, Artificial Sequence
  Description of Artificial Sequence: Synthetic oligonucleotide
gagaggcuaagaaaacagc

SEQ ID NO: 1391196 - RNA, 19 nt, Artificial Sequence
  Description of Artificial Sequence: Synthetic oligonucleotide
cacuuaaguacaauauaga

SEQ ID NO: 1391197 - RNA, 19 nt, Artificial Sequence
  Description of Artificial Sequence: Synthetic oligonucleotide
uacggcugugcucauucug

SEQ ID NO: 1391198 - RNA, 19 nt, Artificial Sequence
  Description of Artificial Sequence: Synthetic oligonucleotide
aagaguugucuggucuuuc

SEQ ID NO: 1391199 - RNA, 19 nt, Artificial Sequence
  Description of Artificial Sequence: Synthetic oligonucleotide
ggagcauuuauauaaagau

SEQ ID NO: 1391200 - RNA, 19 nt, Artificial Sequence
  Description of Artificial Sequence: Synthetic oligonucleotide
cccuaaaguuucuaggagg

SEQ ID NO: 1391201 - RNA, 19 nt, Artificial Sequence
  Description of Artificial Sequence: Synthetic oligonucleotide
cucuuugucccagcuaagg

SEQ ID NO: 1391202 - RNA, 19 nt, Artificial Sequence
  Description of Artificial Sequence: Synthetic oligonucleotide
aaucccugauuggacaaga

SEQ ID NO: 1391203 - RNA, 19 nt, Artificial Sequence
  Description of Artificial Sequence: Synthetic oligonucleotide
gacaagagauaaccccagc

SEQ ID NO: 1391204 - RNA, 19 nt, Artificial Sequence
  Description of Artificial Sequence: Synthetic oligonucleotide
aggagguggauaagggccc

SEQ ID NO: 1391205 - RNA, 19 nt, Artificial Sequence
  Description of Artificial Sequence: Synthetic oligonucleotide
aguacccgagucuuagacu

SEQ ID NO: 1391206 - RNA, 19 nt, Artificial Sequence
  Description of Artificial Sequence: Synthetic oligonucleotide
augcgggugggagagacgg

SEQ ID NO: 1391207 - RNA, 19 nt, Artificial Sequence
  Description of Artificial Sequence: Synthetic oligonucleotide
uuguugccgaaguuuggug

SEQ ID NO: 1391208 - RNA, 19 nt, Artificial Sequence
  Description of Artificial Sequence: Synthetic oligonucleotide
gucauuauagcacgccaga

SEQ ID NO: 1391209 - RNA, 19 nt, Artificial Sequence
  Description of Artificial Sequence: Synthetic oligonucleotide
agagacggcauaggccucc

SEQ ID NO: 1391210 - RNA, 19 nt, Artificial Sequence
  Description of Artificial Sequence: Synthetic oligonucleotide
cugucugcacucaggaaug

SEQ ID NO: 1391211 - RNA, 19 nt, Artificial Sequence
  Description of Artificial Sequence: Synthetic oligonucleotide
cucauaguagugguauggc

SEQ ID NO: 1391212 - RNA, 19 nt, Artificial Sequence
  Description of Artificial Sequence: Synthetic oligonucleotide
agaguugucuggucuuucu

SEQ ID NO: 1391213 - RNA, 19 nt, Artificial Sequence
  Description of Artificial Sequence: Synthetic oligonucleotide
cuccauguuagggaacgcg

SEQ ID NO: 1391214 - RNA, 19 nt, Artificial Sequence
  Description of Artificial Sequence: Synthetic oligonucleotide
cuggauguaggugacgcac

SEQ ID NO: 1391215 - RNA, 19 nt, Artificial Sequence
  Description of Artificial Sequence: Synthetic oligonucleotide
auugcccuuacggcugugc

SEQ ID NO: 1391216 - RNA, 19 nt, Artificial Sequence
  Description of Artificial Sequence: Synthetic oligonucleotide
guauggcaugcguugcagg

SEQ ID NO: 1391217 - RNA, 19 nt, Artificial Sequence
  Description of Artificial Sequence: Synthetic oligonucleotide
guuagggaacgcgaggccc

SEQ ID NO: 1391218 - RNA, 19 nt, Artificial Sequence
  Description of Artificial Sequence: Synthetic oligonucleotide
ugacacccgauuaaaccau

SEQ ID NO: 1391219 - RNA, 19 nt, Artificial Sequence
  Description of Artificial Sequence: Synthetic oligonucleotide
gagugagggucucugucug

SEQ ID NO: 1391220 - RNA, 19 nt, Artificial Sequence
  Description of Artificial Sequence: Synthetic oligonucleotide
ccgguugacaaauuccugg

SEQ ID NO: 1391221 - RNA, 19 nt, Artificial Sequence
  Description of Artificial Sequence: Synthetic oligonucleotide
agguuaacggcagcuggac

SEQ ID NO: 1391222 - RNA, 19 nt, Artificial Sequence
  Description of Artificial Sequence: Synthetic oligonucleotide
gaaaggauaguacccgagu

SEQ ID NO: 1391223 - RNA, 19 nt, Artificial Sequence
  Description of Artificial Sequence: Synthetic oligonucleotide
gcagguuaacggcagcugg

SEQ ID NO: 1391224 - RNA, 19 nt, Artificial Sequence
  Description of Artificial Sequence: Synthetic oligonucleotide
uggacacacgccuccaccu

SEQ ID NO: 1391225 - RNA, 19 nt, Artificial Sequence
  Description of Artificial Sequence: Synthetic oligonucleotide
aguagugguauggcaugcg

SEQ ID NO: 1391226 - RNA, 19 nt, Artificial Sequence
  Description of Artificial Sequence: Synthetic oligonucleotide
agagauaaccccagcccuc

SEQ ID NO: 1391227 - RNA, 19 nt, Artificial Sequence
  Description of Artificial Sequence: Synthetic oligonucleotide
ucggcccagagccacuuug

SEQ ID NO: 1391228 - RNA, 19 nt, Artificial Sequence
  Description of Artificial Sequence: Synthetic oligonucleotide
ugaagcgguggugauugcc

SEQ ID NO: 1391229 - RNA, 19 nt, Artificial Sequence
  Description of Artificial Sequence: Synthetic oligonucleotide
cucaccccggaagaggucg

SEQ ID NO: 1391230 - RNA, 19 nt, Artificial Sequence
  Description of Artificial Sequence: Synthetic oligonucleotide
ucauuauagcacgccagaa

SEQ ID NO: 1391231 - RNA, 19 nt, Artificial Sequence
  Description of Artificial Sequence: Synthetic oligonucleotide
ugucacaguuccucagcca

SEQ ID NO: 1391232 - RNA, 19 nt, Artificial Sequence
  Description of Artificial Sequence: Synthetic oligonucleotide
aguccccagauccuuguga

SEQ ID NO: 1391233 - RNA, 19 nt, Artificial Sequence
  Description of Artificial Sequence: Synthetic oligonucleotide
ccgauuaaaccauacagga

SEQ ID NO: 1391234 - RNA, 19 nt, Artificial Sequence
  Description of Artificial Sequence: Synthetic oligonucleotide
gggcacaaggccuuuuggg

SEQ ID NO: 1391235 - RNA, 19 nt, Artificial Sequence
  Description of Artificial Sequence: Synthetic oligonucleotide
guugucuggucuuucuaga

SEQ ID NO: 1391236 - RNA, 19 nt, Artificial Sequence
  Description of Artificial Sequence: Synthetic oligonucleotide
caaaugguucggcccagag

SEQ ID NO: 1391237 - RNA, 19 nt, Artificial Sequence
  Description of Artificial Sequence: Synthetic oligonucleotide
ugcacucaggaaugugaug

SEQ ID NO: 1391238 - RNA, 19 nt, Artificial Sequence
  Description of Artificial Sequence: Synthetic oligonucleotide
ugguauggcaugcguugca

SEQ ID NO: 1391239 - RNA, 19 nt, Artificial Sequence
  Description of Artificial Sequence: Synthetic oligonucleotide
gagcauuuauauaaagaua

SEQ ID NO: 1391240 - RNA, 19 nt, Artificial Sequence
  Description of Artificial Sequence: Synthetic oligonucleotide
uugcuuagacccugauuac

SEQ ID NO: 1391241 - RNA, 19 nt, Artificial Sequence
  Description of Artificial Sequence: Synthetic oligonucleotide
accauacaggauuccaaau

SEQ ID NO: 1391242 - RNA, 19 nt, Artificial Sequence
  Description of Artificial Sequence: Synthetic oligonucleotide
gccacuacgcggaaggugg

SEQ ID NO: 1391243 - RNA, 19 nt, Artificial Sequence
  Description of Artificial Sequence: Synthetic oligonucleotide
cauaguagugguauggcau

SEQ ID NO: 1391244 - RNA, 19 nt, Artificial Sequence
  Description of Artificial Sequence: Synthetic oligonucleotide
cagugagggaugaucgaug

SEQ ID NO: 1391245 - RNA, 19 nt, Artificial Sequence
  Description of Artificial Sequence: Synthetic oligonucleotide
cacaacuccaccgcaauca

SEQ ID NO: 1391246 - RNA, 19 nt, Artificial Sequence
  Description of Artificial Sequence: Synthetic oligonucleotide
uaguagugguauggcaugc

SEQ ID NO: 1391247 - RNA, 19 nt, Artificial Sequence
  Description of Artificial Sequence: Synthetic oligonucleotide
gaaugggccacuacgcgga

SEQ ID NO: 1391248 - RNA, 19 nt, Artificial Sequence
  Description of Artificial Sequence: Synthetic oligonucleotide
caucuuguucggagggccc

SEQ ID NO: 1391249 - RNA, 19 nt, Artificial Sequence
  Description of Artificial Sequence: Synthetic oligonucleotide
uaccccguacuguaucucu

SEQ ID NO: 1391250 - RNA, 19 nt, Artificial Sequence
  Description of Artificial Sequence: Synthetic oligonucleotide
ggggaauuuacacuuaagu

SEQ ID NO: 1391251 - RNA, 19 nt, Artificial Sequence
  Description of Artificial Sequence: Synthetic oligonucleotide
cuacaacuucuagaacucc

SEQ ID NO: 1391252 - RNA, 19 nt, Artificial Sequence
  Description of Artificial Sequence: Synthetic oligonucleotide
gauuuggggcccauuccug

SEQ ID NO: 1391253 - RNA, 19 nt, Artificial Sequence
  Description of Artificial Sequence: Synthetic oligonucleotide
auggcaugcguugcaggcg

SEQ ID NO: 1391254 - RNA, 19 nt, Artificial Sequence
  Description of Artificial Sequence: Synthetic oligonucleotide
gcaauagucaggagggacc

SEQ ID NO: 1391255 - RNA, 19 nt, Artificial Sequence
  Description of Artificial Sequence: Synthetic oligonucleotide
uuaacggcagcuggacaga

SEQ ID NO: 1391256 - RNA, 19 nt, Artificial Sequence
  Description of Artificial Sequence: Synthetic oligonucleotide
caauauagagugagggucu

SEQ ID NO: 1391257 - RNA, 19 nt, Artificial Sequence
  Description of Artificial Sequence: Synthetic oligonucleotide
acacccgauuaaaccauac

SEQ ID NO: 1391258 - RNA, 19 nt, Artificial Sequence
  Description of Artificial Sequence: Synthetic oligonucleotide
auagcacgccagaaagagg

SEQ ID NO: 1391259 - RNA, 19 nt, Artificial Sequence
  Description of Artificial Sequence: Synthetic oligonucleotide
uuucuaggagguggauaag

SEQ ID NO: 1391260 - RNA, 19 nt, Artificial Sequence
  Description of Artificial Sequence: Synthetic oligonucleotide
gugauugcccuuacggcug

SEQ ID NO: 1391261 - RNA, 19 nt, Artificial Sequence
  Description of Artificial Sequence: Synthetic oligonucleotide
gugauaggaccucuuuguc

SEQ ID NO: 1391262 - RNA, 19 nt, Artificial Sequence
  Description of Artificial Sequence: Synthetic oligonucleotide
uccuaccccguacuguauc

SEQ ID NO: 1391263 - RNA, 19 nt, Artificial Sequence
  Description of Artificial Sequence: Synthetic oligonucleotide
cauuccugggguucgggca

SEQ ID NO: 1391264 - RNA, 19 nt, Artificial Sequence
  Description of Artificial Sequence: Synthetic oligonucleotide
acccugauugacuuugcuu

SEQ ID NO: 1391265 - RNA, 19 nt, Artificial Sequence
  Description of Artificial Sequence: Synthetic oligonucleotide
ccauacaggauuccaaauc

SEQ ID NO: 1391266 - RNA, 19 nt, Artificial Sequence
  Description of Artificial Sequence: Synthetic oligonucleotide
agauaaccccagcccucac

SEQ ID NO: 1391267 - RNA, 19 nt, Artificial Sequence
  Description of Artificial Sequence: Synthetic oligonucleotide
ggugaugaucacacauugg

SEQ ID NO: 1391268 - RNA, 19 nt, Artificial Sequence
  Description of Artificial Sequence: Synthetic oligonucleotide
augaagcgguggugauugc

SEQ ID NO: 1391269 - RNA, 19 nt, Artificial Sequence
  Description of Artificial Sequence: Synthetic oligonucleotide
acccgagucuuagacugac

SEQ ID NO: 1391270 - RNA, 19 nt, Artificial Sequence
  Description of Artificial Sequence: Synthetic oligonucleotide
uguaggugacgcacucguc

SEQ ID NO: 1391271 - RNA, 19 nt, Artificial Sequence
  Description of Artificial Sequence: Synthetic oligonucleotide
aguuccuaccccguacugu

SEQ ID NO: 1391272 - RNA, 19 nt, Artificial Sequence
  Description of Artificial Sequence: Synthetic oligonucleotide
guuucagggguccgguuga

SEQ ID NO: 1391273 - RNA, 19 nt, Artificial Sequence
  Description of Artificial Sequence: Synthetic oligonucleotide
uggggcuuccgcagcacac

SEQ ID NO: 1391274 - RNA, 19 nt, Artificial Sequence
  Description of Artificial Sequence: Synthetic oligonucleotide
agccaaccugaacuggcug

SEQ ID NO: 1391275 - RNA, 19 nt, Artificial Sequence
  Description of Artificial Sequence: Synthetic oligonucleotide
ggcacaaggccuuuuggga

SEQ ID NO: 1391276 - RNA, 19 nt, Artificial Sequence
  Description of Artificial Sequence: Synthetic oligonucleotide
aggugacgcacucgucagg

SEQ ID NO: 1391277 - RNA, 19 nt, Artificial Sequence
  Description of Artificial Sequence: Synthetic oligonucleotide
cccugauuugauuggcugg

SEQ ID NO: 1391278 - RNA, 19 nt, Artificial Sequence
  Description of Artificial Sequence: Synthetic oligonucleotide
aggauaguacccgagucuu

SEQ ID NO: 1391279 - RNA, 19 nt, Artificial Sequence
  Description of Artificial Sequence: Synthetic oligonucleotide
auaguacccgagucuuaga

SEQ ID NO: 1391280 - RNA, 19 nt, Artificial Sequence
  Description of Artificial Sequence: Synthetic oligonucleotide
aaacccucaucaaggcccu

SEQ ID NO: 1391281 - RNA, 19 nt, Artificial Sequence
  Description of Artificial Sequence: Synthetic oligonucleotide
guuccuaccccguacugua

SEQ ID NO: 1391282 - RNA, 19 nt, Artificial Sequence
  Description of Artificial Sequence: Synthetic oligonucleotide
gggagcauuuauauaaaga

SEQ ID NO: 1391283 - RNA, 19 nt, Artificial Sequence
  Description of Artificial Sequence: Synthetic oligonucleotide
acgccagaaagaggagggc

SEQ ID NO: 1391284 - RNA, 19 nt, Artificial Sequence
  Description of Artificial Sequence: Synthetic oligonucleotide
uuucuagaggcagguuaac

SEQ ID NO: 1391285 - RNA, 19 nt, Artificial Sequence
  Description of Artificial Sequence: Synthetic oligonucleotide
ggugauugcccuuacggcu

SEQ ID NO: 1391286 - RNA, 19 nt, Artificial Sequence
  Description of Artificial Sequence: Synthetic oligonucleotide
gagauaaccccagcccuca

SEQ ID NO: 1391287 - RNA, 19 nt, Artificial Sequence
  Description of Artificial Sequence: Synthetic oligonucleotide
aguuucuaggagguggaua

SEQ ID NO: 1391288 - RNA, 19 nt, Artificial Sequence
  Description of Artificial Sequence: Synthetic oligonucleotide
ugauugcccuuacggcugu

SEQ ID NO: 1391289 - RNA, 19 nt, Artificial Sequence
  Description of Artificial Sequence: Synthetic oligonucleotide
guaaaccagccugugcuca

SEQ ID NO: 1391290 - RNA, 19 nt, Artificial Sequence
  Description of Artificial Sequence: Synthetic oligonucleotide
aagauacccuaaaguuucu

SEQ ID NO: 1391291 - RNA, 19 nt, Artificial Sequence
  Description of Artificial Sequence: Synthetic oligonucleotide
cugcaugcgggugggagag

SEQ ID NO: 1391292 - RNA, 19 nt, Artificial Sequence
  Description of Artificial Sequence: Synthetic oligonucleotide
agcccuuccuacaacuucu

SEQ ID NO: 1391293 - RNA, 19 nt, Artificial Sequence
  Description of Artificial Sequence: Synthetic oligonucleotide
caacuucuagaacuccaca

SEQ ID NO: 1391294 - RNA, 19 nt, Artificial Sequence
  Description of Artificial Sequence: Synthetic oligonucleotide
uaacggcagcuggacagag

SEQ ID NO: 1391295 - RNA, 19 nt, Artificial Sequence
  Description of Artificial Sequence: Synthetic oligonucleotide
ccauguuagggaacgcgag

SEQ ID NO: 1391296 - RNA, 19 nt, Artificial Sequence
  Description of Artificial Sequence: Synthetic oligonucleotide
caugcgggugggagagacg

SEQ ID NO: 1391297 - RNA, 19 nt, Artificial Sequence
  Description of Artificial Sequence: Synthetic oligonucleotide
cuccaccgcaaucaccaug

SEQ ID NO: 1391298 - RNA, 19 nt, Artificial Sequence
  Description of Artificial Sequence: Synthetic oligonucleotide
ggugacgcacucgucaggc

SEQ ID NO: 1391299 - RNA, 19 nt, Artificial Sequence
  Description of Artificial Sequence: Synthetic oligonucleotide
gacgcacucgucaggcccc

SEQ ID NO: 1391300 - RNA, 19 nt, Artificial Sequence
  Description of Artificial Sequence: Synthetic oligonucleotide
ccgagucuuagacugacuc

SEQ ID NO: 1391301 - RNA, 19 nt, Artificial Sequence
  Description of Artificial Sequence: Synthetic oligonucleotide
cagguuaacggcagcugga

SEQ ID NO: 1391302 - RNA, 19 nt, Artificial Sequence
  Description of Artificial Sequence: Synthetic oligonucleotide
uacccgagucuuagacuga

SEQ ID NO: 1391303 - RNA, 19 nt, Artificial Sequence
  Description of Artificial Sequence: Synthetic oligonucleotide
ggacaagagauaaccccag

SEQ ID NO: 1391304 - RNA, 19 nt, Artificial Sequence
  Description of Artificial Sequence: Synthetic oligonucleotide
ugccauacacgugcacaug

SEQ ID NO: 1391305 - RNA, 19 nt, Artificial Sequence
  Description of Artificial Sequence: Synthetic oligonucleotide
gguauggcaugcguugcag

SEQ ID NO: 1391306 - RNA, 19 nt, Artificial Sequence
  Description of Artificial Sequence: Synthetic oligonucleotide
cacucaggaaugugauguc

SEQ ID NO: 1391307 - RNA, 19 nt, Artificial Sequence
  Description of Artificial Sequence: Synthetic oligonucleotide
uuacggcugugcucauucu

SEQ ID NO: 1391308 - RNA, 19 nt, Artificial Sequence
  Description of Artificial Sequence: Synthetic oligonucleotide
gcccugauuugauuggcug

SEQ ID NO: 1391309 - RNA, 19 nt, Artificial Sequence
  Description of Artificial Sequence: Synthetic oligonucleotide
ggucacucaggaagaagcc

SEQ ID NO: 1391310 - RNA, 19 nt, Artificial Sequence
  Description of Artificial Sequence: Synthetic oligonucleotide
aaguuucuaggagguggau

SEQ ID NO: 1391311 - RNA, 19 nt, Artificial Sequence
  Description of Artificial Sequence: Synthetic oligonucleotide
ucaaaugguucggcccaga

SEQ ID NO: 1391312 - RNA, 19 nt, Artificial Sequence
  Description of Artificial Sequence: Synthetic oligonucleotide
cagaaagaggagggcuugc

SEQ ID NO: 1391313 - RNA, 19 nt, Artificial Sequence
  Description of Artificial Sequence: Synthetic oligonucleotide
auauagagugagggucucu

SEQ ID NO: 1391314 - RNA, 19 nt, Artificial Sequence
  Description of Artificial Sequence: Synthetic oligonucleotide
ccaagguugcaaagacagg

SEQ ID NO: 1391315 - RNA, 19 nt, Artificial Sequence
  Description of Artificial Sequence: Synthetic oligonucleotide
ucuuguucggagggcccca

SEQ ID NO: 1391316 - RNA, 19 nt, Artificial Sequence
  Description of Artificial Sequence: Synthetic oligonucleotide
gugguauggcaugcguugc

SEQ ID NO: 1391317 - RNA, 19 nt, Artificial Sequence
  Description of Artificial Sequence: Synthetic oligonucleotide
gguaaaccagccugugcuc

SEQ ID NO: 1391318 - RNA, 19 nt, Artificial Sequence
  Description of Artificial Sequence: Synthetic oligonucleotide
agcuaaggaggaaaugauu

SEQ ID NO: 1391319 - RNA, 19 nt, Artificial Sequence
  Description of Artificial Sequence: Synthetic oligonucleotide
ucggagggccccagaagau

SEQ ID NO: 1391320 - RNA, 19 nt, Artificial Sequence
  Description of Artificial Sequence: Synthetic oligonucleotide
uugccgaaguuuggugccc

SEQ ID NO: 1391321 - RNA, 19 nt, Artificial Sequence
  Description of Artificial Sequence: Synthetic oligonucleotide
aauagucaggagggaccau

SEQ ID NO: 1391322 - RNA, 19 nt, Artificial Sequence
  Description of Artificial Sequence: Synthetic oligonucleotide
cacccgauuaaaccauaca

SEQ ID NO: 1391323 - RNA, 19 nt, Artificial Sequence
  Description of Artificial Sequence: Synthetic oligonucleotide
aaugggccacuacgcggaa

SEQ ID NO: 1391324 - RNA, 19 nt, Artificial Sequence
  Description of Artificial Sequence: Synthetic oligonucleotide
cuuccgcagcacacggaac

SEQ ID NO: 1391325 - RNA, 19 nt, Artificial Sequence
  Description of Artificial Sequence: Synthetic oligonucleotide
gaacgcgaggcccgcccgc

SEQ ID NO: 1391326 - RNA, 19 nt, Artificial Sequence
  Description of Artificial Sequence: Synthetic oligonucleotide
ggauguaggugacgcacuc

SEQ ID NO: 1391327 - RNA, 19 nt, Artificial Sequence
  Description of Artificial Sequence: Synthetic oligonucleotide
guagugguauggcaugcgu

SEQ ID NO: 1391328 - RNA, 19 nt, Artificial Sequence
  Description of Artificial Sequence: Synthetic oligonucleotide
ccaaaucccugauuggaca

SEQ ID NO: 1391329 - RNA, 19 nt, Artificial Sequence
  Description of Artificial Sequence: Synthetic oligonucleotide
auaggaccucuuuguccca

SEQ ID NO: 1391330 - RNA, 19 nt, Artificial Sequence
  Description of Artificial Sequence: Synthetic oligonucleotide
gucaaaugguucggcccag

SEQ ID NO: 1391331 - RNA, 19 nt, Artificial Sequence
  Description of Artificial Sequence: Synthetic oligonucleotide
cuuugccuuuaucucucca

SEQ ID NO: 1391332 - RNA, 19 nt, Artificial Sequence
  Description of Artificial Sequence: Synthetic oligonucleotide
gggguucgggcacaaggcc

SEQ ID NO: 1391333 - RNA, 19 nt, Artificial Sequence
  Description of Artificial Sequence: Synthetic oligonucleotide
gcacucaggaaugugaugu

SEQ ID NO: 1391334 - RNA, 19 nt, Artificial Sequence
  Description of Artificial Sequence: Synthetic oligonucleotide
acuacgcggaaggugguuu

SEQ ID NO: 1391335 - RNA, 19 nt, Artificial Sequence
  Description of Artificial Sequence: Synthetic oligonucleotide
aggcccgcccgcuggauga

SEQ ID NO: 1391336 - RNA, 19 nt, Artificial Sequence
  Description of Artificial Sequence: Synthetic oligonucleotide
uuguucggagggccccaga

SEQ ID NO: 1391337 - RNA, 19 nt, Artificial Sequence
  Description of Artificial Sequence: Synthetic oligonucleotide
aucccugauuggacaagag

SEQ ID NO: 1391338 - RNA, 19 nt, Artificial Sequence
  Description of Artificial Sequence: Synthetic oligonucleotide
ccuaaaguuucuaggaggu

SEQ ID NO: 1391339 - RNA, 19 nt, Artificial Sequence
  Description of Artificial Sequence: Synthetic oligonucleotide
caccguuucagggguccgg

SEQ ID NO: 1391340 - RNA, 19 nt, Artificial Sequence
  Description of Artificial Sequence: Synthetic oligonucleotide
caguuccuaccccguacug

SEQ ID NO: 1391341 - RNA, 19 nt, Artificial Sequence
  Description of Artificial Sequence: Synthetic oligonucleotide
gcauguuuuccccacuucu

SEQ ID NO: 1391342 - RNA, 19 nt, Artificial Sequence
  Description of Artificial Sequence: Synthetic oligonucleotide
ugcgggugggagagacggc

SEQ ID NO: 1391343 - RNA, 19 nt, Artificial Sequence
  Description of Artificial Sequence: Synthetic oligonucleotide
gacccugauuacacaagaa

SEQ ID NO: 1391344 - RNA, 19 nt, Artificial Sequence
  Description of Artificial Sequence: Synthetic oligonucleotide
gggcuuccgcagcacacgg

SEQ ID NO: 1391345 - RNA, 19 nt, Artificial Sequence
  Description of Artificial Sequence: Synthetic oligonucleotide
gugacgcacucgucaggcc

SEQ ID NO: 1391346 - RNA, 19 nt, Artificial Sequence
  Description of Artificial Sequence: Synthetic oligonucleotide
ugccgaaguuuggugccca

SEQ ID NO: 1391347 - RNA, 19 nt, Artificial Sequence
  Description of Artificial Sequence: Synthetic oligonucleotide
acccucaucaaggcccuga

SEQ ID NO: 1391348 - RNA, 19 nt, Artificial Sequence
  Description of Artificial Sequence: Synthetic oligonucleotide
accguuucagggguccggu

SEQ ID NO: 1391349 - RNA, 19 nt, Artificial Sequence
  Description of Artificial Sequence: Synthetic oligonucleotide
acaccguuucagggguccg

SEQ ID NO: 1391350 - RNA, 19 nt, Artificial Sequence
  Description of Artificial Sequence: Synthetic oligonucleotide
ggaacgcgaggcccgcccg

SEQ ID NO: 1391351 - RNA, 19 nt, Artificial Sequence
  Description of Artificial Sequence: Synthetic oligonucleotide
gucugcacucaggaaugug

SEQ ID NO: 1391352 - RNA, 19 nt, Artificial Sequence
  Description of Artificial Sequence: Synthetic oligonucleotide
cuugcccgucucaccccgg

SEQ ID NO: 1391353 - RNA, 19 nt, Artificial Sequence
  Description of Artificial Sequence: Synthetic oligonucleotide
agauacccuaaaguuucua

SEQ ID NO: 1391354 - RNA, 19 nt, Artificial Sequence
  Description of Artificial Sequence: Synthetic oligonucleotide
cccugauuggacaagagau

SEQ ID NO: 1391355 - RNA, 19 nt, Artificial Sequence
  Description of Artificial Sequence: Synthetic oligonucleotide
aacgcgaggcccgcccgcu

SEQ ID NO: 1391356 - RNA, 19 nt, Artificial Sequence
  Description of Artificial Sequence: Synthetic oligonucleotide
augaucgauggggaauuua

SEQ ID NO: 1391357 - RNA, 19 nt, Artificial Sequence
  Description of Artificial Sequence: Synthetic oligonucleotide
uggcugcaauagucaggag

SEQ ID NO: 1391358 - RNA, 19 nt, Artificial Sequence
  Description of Artificial Sequence: Synthetic oligonucleotide
gaggcccgcccgcuggaug

SEQ ID NO: 1391359 - RNA, 19 nt, Artificial Sequence
  Description of Artificial Sequence: Synthetic oligonucleotide
gguuaacggcagcuggaca

SEQ ID NO: 1391360 - RNA, 19 nt, Artificial Sequence
  Description of Artificial Sequence: Synthetic oligonucleotide
gcccgucucaccccggaag

SEQ ID NO: 1391361 - RNA, 19 nt, Artificial Sequence
  Description of Artificial Sequence: Synthetic oligonucleotide
gccaagggagcauuuauau

SEQ ID NO: 1391362 - RNA, 19 nt, Artificial Sequence
  Description of Artificial Sequence: Synthetic oligonucleotide
uagggaacgcgaggcccgc

SEQ ID NO: 1391363 - RNA, 19 nt, Artificial Sequence
  Description of Artificial Sequence: Synthetic oligonucleotide
ugucccagcuaaggaggaa

SEQ ID NO: 1391364 - RNA, 19 nt, Artificial Sequence
  Description of Artificial Sequence: Synthetic oligonucleotide
gcccuuacggcugugcuca

SEQ ID NO: 1391365 - RNA, 19 nt, Artificial Sequence
  Description of Artificial Sequence: Synthetic oligonucleotide
gggaacgcgaggcccgccc

SEQ ID NO: 1391366 - RNA, 19 nt, Artificial Sequence
  Description of Artificial Sequence: Synthetic oligonucleotide
agcacgccagaaagaggag

SEQ ID NO: 1391367 - RNA, 19 nt, Artificial Sequence
  Description of Artificial Sequence: Synthetic oligonucleotide
accccguacuguaucucug

SEQ ID NO: 1391368 - RNA, 19 nt, Artificial Sequence
  Description of Artificial Sequence: Synthetic oligonucleotide
gacacgcaggaggcugccc

SEQ ID NO: 1391369 - RNA, 19 nt, Artificial Sequence
  Description of Artificial Sequence: Synthetic oligonucleotide
cuaccccguacuguaucuc

SEQ ID NO: 1391370 - RNA, 19 nt, Artificial Sequence
  Description of Artificial Sequence: Synthetic oligonucleotide
acgcggaaggugguuuugu

SEQ ID NO: 1391371 - RNA, 19 nt, Artificial Sequence
  Description of Artificial Sequence: Synthetic oligonucleotide
ccuugcccgucucaccccg

SEQ ID NO: 1391372 - RNA, 19 nt, Artificial Sequence
  Description of Artificial Sequence: Synthetic oligonucleotide
ccugauuggacaagagaua

SEQ ID NO: 1391373 - RNA, 19 nt, Artificial Sequence
  Description of Artificial Sequence: Synthetic oligonucleotide
gccgcuggcugcaauaguc

SEQ ID NO: 1391374 - RNA, 19 nt, Artificial Sequence
  Description of Artificial Sequence: Synthetic oligonucleotide
gcugcaugcgggugggaga

SEQ ID NO: 1391375 - RNA, 19 nt, Artificial Sequence
  Description of Artificial Sequence: Synthetic oligonucleotide
ggcuugcucaaggucacuc

SEQ ID NO: 1391376 - RNA, 19 nt, Artificial Sequence
  Description of Artificial Sequence: Synthetic oligonucleotide
ggccacuacgcggaaggug

SEQ ID NO: 1391377 - RNA, 19 nt, Artificial Sequence
  Description of Artificial Sequence: Synthetic oligonucleotide
gacacccgauuaaaccaua

SEQ ID NO: 1391378 - RNA, 19 nt, Artificial Sequence
  Description of Artificial Sequence: Synthetic oligonucleotide
ggacacacgccuccaccuc

SEQ ID NO: 1391379 - RNA, 19 nt, Artificial Sequence
  Description of Artificial Sequence: Synthetic oligonucleotide
caccgcaaucaccauggua

SEQ ID NO: 1391380 - RNA, 19 nt, Artificial Sequence
  Description of Artificial Sequence: Synthetic oligonucleotide
gucucaccccggaagaggu

SEQ ID NO: 1391381 - RNA, 19 nt, Artificial Sequence
  Description of Artificial Sequence: Synthetic oligonucleotide
agaggucgucaaacugcug

SEQ ID NO: 1391382 - RNA, 19 nt, Artificial Sequence
  Description of Artificial Sequence: Synthetic oligonucleotide
cccuuccuacaacuucuag

SEQ ID NO: 1391383 - RNA, 19 nt, Artificial Sequence
  Description of Artificial Sequence: Synthetic oligonucleotide
ggaagaguugucuggucuu

SEQ ID NO: 1391384 - RNA, 19 nt, Artificial Sequence
  Description of Artificial Sequence: Synthetic oligonucleotide
gauugcccuuacggcugug

SEQ ID NO: 1391385 - RNA, 19 nt, Artificial Sequence
  Description of Artificial Sequence: Synthetic oligonucleotide
gagagacggcauaggccuc

SEQ ID NO: 1391386 - RNA, 19 nt, Artificial Sequence
  Description of Artificial Sequence: Synthetic oligonucleotide
gaacaccguuucagggguc

SEQ ID NO: 1391387 - RNA, 19 nt, Artificial Sequence
  Description of Artificial Sequence: Synthetic oligonucleotide
cgagucuuagacugacuca

SEQ ID NO: 1391388 - RNA, 19 nt, Artificial Sequence
  Description of Artificial Sequence: Synthetic oligonucleotide
ccacuuugccuuuaucucu

SEQ ID NO: 1391389 - RNA, 19 nt, Artificial Sequence
  Description of Artificial Sequence: Synthetic oligonucleotide
gccgaaguuuggugcccag

SEQ ID NO: 1391390 - RNA, 19 nt, Artificial Sequence
  Description of Artificial Sequence: Synthetic oligonucleotide
uucggcccagagccacuuu

SEQ ID NO: 1391391 - RNA, 19 nt, Artificial Sequence
  Description of Artificial Sequence: Synthetic oligonucleotide
gaaaugauuuggggcccau

SEQ ID NO: 1391392 - RNA, 19 nt, Artificial Sequence
  Description of Artificial Sequence: Synthetic oligonucleotide
cgucucaccccggaagagg

SEQ ID NO: 1391393 - RNA, 19 nt, Artificial Sequence
  Description of Artificial Sequence: Synthetic oligonucleotide
cugcaauagucaggaggga

SEQ ID NO: 1391394 - RNA, 19 nt, Artificial Sequence
  Description of Artificial Sequence: Synthetic oligonucleotide
ccagauccuugugauagga

SEQ ID NO: 1391395 - RNA, 19 nt, Artificial Sequence
  Description of Artificial Sequence: Synthetic oligonucleotide
cagccaagggagcauuuau

SEQ ID NO: 1391396 - RNA, 19 nt, Artificial Sequence
  Description of Artificial Sequence: Synthetic oligonucleotide
ccgaaguuuggugcccagc

SEQ ID NO: 1391397 - RNA, 19 nt, Artificial Sequence
  Description of Artificial Sequence: Synthetic oligonucleotide
gcaguuccuaccccguacu

SEQ ID NO: 1391398 - RNA, 19 nt, Artificial Sequence
  Description of Artificial Sequence: Synthetic oligonucleotide
gggccgcuggcugcaauag

SEQ ID NO: 1391399 - RNA, 19 nt, Artificial Sequence
  Description of Artificial Sequence: Synthetic oligonucleotide
ccuauacccugauugacuu

SEQ ID NO: 1391400 - RNA, 19 nt, Artificial Sequence
  Description of Artificial Sequence: Synthetic oligonucleotide
gagcugggcccaggaugag

SEQ ID NO: 1391401 - RNA, 19 nt, Artificial Sequence
  Description of Artificial Sequence: Synthetic oligonucleotide
cccuauacccugauugacu

SEQ ID NO: 1391402 - RNA, 19 nt, Artificial Sequence
  Description of Artificial Sequence: Synthetic oligonucleotide
gggaugaucgauggggaau

SEQ ID NO: 1391403 - RNA, 19 nt, Artificial Sequence
  Description of Artificial Sequence: Synthetic oligonucleotide
uucgggcacaaggccuuuu

SEQ ID NO: 1391404 - RNA, 19 nt, Artificial Sequence
  Description of Artificial Sequence: Synthetic oligonucleotide
ggaugaucgauggggaauu

SEQ ID NO: 1391405 - RNA, 19 nt, Artificial Sequence
  Description of Artificial Sequence: Synthetic oligonucleotide
cugcauguuuuccccacuu

SEQ ID NO: 1391406 - RNA, 19 nt, Artificial Sequence
  Description of Artificial Sequence: Synthetic oligonucleotide
ccaugccauacacgugcac

SEQ ID NO: 1391407 - RNA, 19 nt, Artificial Sequence
  Description of Artificial Sequence: Synthetic oligonucleotide
caggcaguuccuaccccgu

SEQ ID NO: 1391408 - RNA, 19 nt, Artificial Sequence
  Description of Artificial Sequence: Synthetic oligonucleotide
caacaccaaguccccagau

SEQ ID NO: 1391409 - RNA, 19 nt, Artificial Sequence
  Description of Artificial Sequence: Synthetic oligonucleotide
gaugaucgauggggaauuu

SEQ ID NO: 1391410 - RNA, 19 nt, Artificial Sequence
  Description of Artificial Sequence: Synthetic oligonucleotide
cgauggggaauuuacacuu

SEQ ID NO: 1391411 - RNA, 19 nt, Artificial Sequence
  Description of Artificial Sequence: Synthetic oligonucleotide
cuauacccugauugacuuu

SEQ ID NO: 1391412 - RNA, 19 nt, Artificial Sequence
  Description of Artificial Sequence: Synthetic oligonucleotide
ccccguacuguaucucuga

SEQ ID NO: 1391413 - RNA, 19 nt, Artificial Sequence
  Description of Artificial Sequence: Synthetic oligonucleotide
ggcuagguccaggaggggu

SEQ ID NO: 1391414 - RNA, 19 nt, Artificial Sequence
  Description of Artificial Sequence: Synthetic oligonucleotide
cuacgcggaaggugguuuu

SEQ ID NO: 1391415 - RNA, 19 nt, Artificial Sequence
  Description of Artificial Sequence: Synthetic oligonucleotide
ggguucgggcacaaggccu

SEQ ID NO: 1391416 - RNA, 19 nt, Artificial Sequence
  Description of Artificial Sequence: Synthetic oligonucleotide
ggauaguacccgagucuua

SEQ ID NO: 1391417 - RNA, 19 nt, Artificial Sequence
  Description of Artificial Sequence: Synthetic oligonucleotide
acgcacucgucaggccccu

SEQ ID NO: 1391418 - RNA, 19 nt, Artificial Sequence
  Description of Artificial Sequence: Synthetic oligonucleotide
cgauuaaaccauacaggau

SEQ ID NO: 1391419 - RNA, 19 nt, Artificial Sequence
  Description of Artificial Sequence: Synthetic oligonucleotide
ccuaccccguacuguaucu

SEQ ID NO: 1391420 - RNA, 19 nt, Artificial Sequence
  Description of Artificial Sequence: Synthetic oligonucleotide
cacacgccuccaccuccca

SEQ ID NO: 1391421 - RNA, 19 nt, Artificial Sequence
  Description of Artificial Sequence: Synthetic oligonucleotide
ccgucucaccccggaagag

SEQ ID NO: 1391422 - RNA, 19 nt, Artificial Sequence
  Description of Artificial Sequence: Synthetic oligonucleotide
ccgcccgcuggaugacacg

SEQ ID NO: 1391423 - RNA, 19 nt, Artificial Sequence
  Description of Artificial Sequence: Synthetic oligonucleotide
ggccuccauguuagggaac

SEQ ID NO: 1391424 - RNA, 19 nt, Artificial Sequence
  Description of Artificial Sequence: Synthetic oligonucleotide
ccgcaaucaccaugguaaa

SEQ ID NO: 1391425 - RNA, 19 nt, Artificial Sequence
  Description of Artificial Sequence: Synthetic oligonucleotide
gguucgggcacaaggccuu

SEQ ID NO: 1391426 - RNA, 19 nt, Artificial Sequence
  Description of Artificial Sequence: Synthetic oligonucleotide
ccagugagggaugaucgau

SEQ ID NO: 1391427 - RNA, 19 nt, Artificial Sequence
  Description of Artificial Sequence: Synthetic oligonucleotide
ggcccugauuugauuggcu

SEQ ID NO: 1391428 - RNA, 19 nt, Artificial Sequence
  Description of Artificial Sequence: Synthetic oligonucleotide
ccuuuugggaaaggauagu

SEQ ID NO: 1391429 - RNA, 19 nt, Artificial Sequence
  Description of Artificial Sequence: Synthetic oligonucleotide
guucggcccagagccacuu

SEQ ID NO: 1391430 - RNA, 19 nt, Artificial Sequence
  Description of Artificial Sequence: Synthetic oligonucleotide
ccguacuguaucucugauu

SEQ ID NO: 1391431 - RNA, 19 nt, Artificial Sequence
  Description of Artificial Sequence: Synthetic oligonucleotide
ggccgcuggcugcaauagu

SEQ ID NO: 1391432 - RNA, 19 nt, Artificial Sequence
  Description of Artificial Sequence: Synthetic oligonucleotide
gcccgcuggaugacacgca

SEQ ID NO: 1391433 - RNA, 19 nt, Artificial Sequence
  Description of Artificial Sequence: Synthetic oligonucleotide
gcgaggcccgcccgcugga

SEQ ID NO: 1391434 - RNA, 19 nt, Artificial Sequence
  Description of Artificial Sequence: Synthetic oligonucleotide
cacuacgcggaaggugguu

SEQ ID NO: 1391435 - RNA, 19 nt, Artificial Sequence
  Description of Artificial Sequence: Synthetic oligonucleotide
ccgcagcacacggaacaca

SEQ ID NO: 1391436 - RNA, 19 nt, Artificial Sequence
  Description of Artificial Sequence: Synthetic oligonucleotide
cccguacuguaucucugau

SEQ ID NO: 1391437 - RNA, 19 nt, Artificial Sequence
  Description of Artificial Sequence: Synthetic oligonucleotide
gcguugcaggcggggccgc

SEQ ID NO: 1391438 - RNA, 19 nt, Artificial Sequence
  Description of Artificial Sequence: Synthetic oligonucleotide
ccagcccuuccuacaacuu

SEQ ID NO: 1391439 - RNA, 19 nt, Artificial Sequence
  Description of Artificial Sequence: Synthetic oligonucleotide
guucgggcacaaggccuuu

SEQ ID NO: 1391440 - RNA, 19 nt, Artificial Sequence
  Description of Artificial Sequence: Synthetic oligonucleotide
ccacuacgcggaagguggu

SEQ ID NO: 1391441 - RNA, 19 nt, Artificial Sequence
  Description of Artificial Sequence: Synthetic oligonucleotide
ggcccgcccgcuggaugac

SEQ ID NO: 1391442 - RNA, 19 nt, Artificial Sequence
  Description of Artificial Sequence: Synthetic oligonucleotide
gggccacuacgcggaaggu

SEQ ID NO: 1391443 - RNA, 19 nt, Artificial Sequence
  Description of Artificial Sequence: Synthetic oligonucleotide
gcccgcccgcuggaugaca

SEQ ID NO: 1391444 - RNA, 19 nt, Artificial Sequence
  Description of Artificial Sequence: Synthetic oligonucleotide
ccaccgcaaucaccauggu

SEQ ID NO: 1391445 - RNA, 19 nt, Artificial Sequence
  Description of Artificial Sequence: Synthetic oligonucleotide
ccguuucagggguccgguu

SEQ ID NO: 1391446 - RNA, 19 nt, Artificial Sequence
  Description of Artificial Sequence: Synthetic oligonucleotide
gggguccgguugacaaauu

SEQ ID NO: 1391447 - RNA, 19 nt, Artificial Sequence
  Description of Artificial Sequence: Synthetic oligonucleotide
cggcauaggccuccauguu

SEQ ID NO: 1391448 - RNA, 19 nt, Artificial Sequence
  Description of Artificial Sequence: Synthetic oligonucleotide
ccuuacggcugugcucauu

SEQ ID NO: 1391449 - RNA, 19 nt, Artificial Sequence
  Description of Artificial Sequence: Synthetic oligonucleotide
cgcacucgucaggccccuu

SEQ ID NO: 1391450 - RNA, 19 nt, Artificial Sequence
  Description of Artificial Sequence: Synthetic oligonucleotide
aaguaaaaggcguacaucc

SEQ ID NO: 1391451 - RNA, 19 nt, Artificial Sequence
  Description of Artificial Sequence: Synthetic oligonucleotide
ugguuaguauagcagaugg

SEQ ID NO: 1391452 - RNA, 19 nt, Artificial Sequence
  Description of Artificial Sequence: Synthetic oligonucleotide
uauagcagauggaacaggg

SEQ ID NO: 1391453 - RNA, 19 nt, Artificial Sequence
  Description of Artificial Sequence: Synthetic oligonucleotide
aaugaucgucaucagguuc

SEQ ID NO: 1391454 - RNA, 19 nt, Artificial Sequence
  Description of Artificial Sequence: Synthetic oligonucleotide
aaugacaggaguguccucg

SEQ ID NO: 1391455 - RNA, 19 nt, Artificial Sequence
  Description of Artificial Sequence: Synthetic oligonucleotide
aauuucaaugaagcgcucc

SEQ ID NO: 1391456 - RNA, 19 nt, Artificial Sequence
  Description of Artificial Sequence: Synthetic oligonucleotide
aaugaagcgcuccacucgg

SEQ ID NO: 1391457 - RNA, 19 nt, Artificial Sequence
  Description of Artificial Sequence: Synthetic oligonucleotide
uugagaaggucguacacgg

SEQ ID NO: 1391458 - RNA, 19 nt, Artificial Sequence
  Description of Artificial Sequence: Synthetic oligonucleotide
aaaguaaaaggcguacauc

SEQ ID NO: 1391459 - RNA, 19 nt, Artificial Sequence
  Description of Artificial Sequence: Synthetic oligonucleotide
gauguauaggcucaggcuc

SEQ ID NO: 1391460 - RNA, 19 nt, Artificial Sequence
  Description of Artificial Sequence: Synthetic oligonucleotide
uuugagaaggucguacacg

SEQ ID NO: 1391461 - RNA, 19 nt, Artificial Sequence
  Description of Artificial Sequence: Synthetic oligonucleotide
ucuucaauguccagguagc

SEQ ID NO: 1391462 - RNA, 19 nt, Artificial Sequence
  Description of Artificial Sequence: Synthetic oligonucleotide
aaggcguacauccaucacu

SEQ ID NO: 1391463 - RNA, 19 nt, Artificial Sequence
  Description of Artificial Sequence: Synthetic oligonucleotide
aauucuuugcggugagcag

SEQ ID NO: 1391464 - RNA, 19 nt, Artificial Sequence
  Description of Artificial Sequence: Synthetic oligonucleotide
uuaguauagcagauggaac

SEQ ID NO: 1391465 - RNA, 19 nt, Artificial Sequence
  Description of Artificial Sequence: Synthetic oligonucleotide
agugccggagcccugcucc

SEQ ID NO: 1391466 - RNA, 19 nt, Artificial Sequence
  Description of Artificial Sequence: Synthetic oligonucleotide
uaugguucaugucuccuug

SEQ ID NO: 1391467 - RNA, 19 nt, Artificial Sequence
  Description of Artificial Sequence: Synthetic oligonucleotide
aaaaggcguacauccauca

SEQ ID NO: 1391468 - RNA, 19 nt, Artificial Sequence
  Description of Artificial Sequence: Synthetic oligonucleotide
ugauguauaggcucaggcu

SEQ ID NO: 1391469 - RNA, 19 nt, Artificial Sequence
  Description of Artificial Sequence: Synthetic oligonucleotide
gagaaggucguacacgggc

SEQ ID NO: 1391470 - RNA, 19 nt, Artificial Sequence
  Description of Artificial Sequence: Synthetic oligonucleotide
aaaggcguacauccaucac

SEQ ID NO: 1391471 - RNA, 19 nt, Artificial Sequence
  Description of Artificial Sequence: Synthetic oligonucleotide
uugcuacccgccaugaucc

SEQ ID NO: 1391472 - RNA, 19 nt, Artificial Sequence
  Description of Artificial Sequence: Synthetic oligonucleotide
cucggcuuugagaaggucg

SEQ ID NO: 1391473 - RNA, 19 nt, Artificial Sequence
  Description of Artificial Sequence: Synthetic oligonucleotide
guagcugacauggaaagcc

SEQ ID NO: 1391474 - RNA, 19 nt, Artificial Sequence
  Description of Artificial Sequence: Synthetic oligonucleotide
cugcauuacgcuuugccag

SEQ ID NO: 1391475 - RNA, 19 nt, Artificial Sequence
  Description of Artificial Sequence: Synthetic oligonucleotide
uccugguuaguauagcaga

SEQ ID NO: 1391476 - RNA, 19 nt, Artificial Sequence
  Description of Artificial Sequence: Synthetic oligonucleotide
ugcugcauuacgcuuugcc

SEQ ID NO: 1391477 - RNA, 19 nt, Artificial Sequence
  Description of Artificial Sequence: Synthetic oligonucleotide
auucuuugcggugagcagg

SEQ ID NO: 1391478 - RNA, 19 nt, Artificial Sequence
  Description of Artificial Sequence: Synthetic oligonucleotide
uuccucagucucaaggcag

SEQ ID NO: 1391479 - RNA, 19 nt, Artificial Sequence
  Description of Artificial Sequence: Synthetic oligonucleotide
guuaguauagcagauggaa

SEQ ID NO: 1391480 - RNA, 19 nt, Artificial Sequence
  Description of Artificial Sequence: Synthetic oligonucleotide
cucgaagcagcauuuuagc

SEQ ID NO: 1391481 - RNA, 19 nt, Artificial Sequence
  Description of Artificial Sequence: Synthetic oligonucleotide
aagcgcuccacucggcagg

SEQ ID NO: 1391482 - RNA, 19 nt, Artificial Sequence
  Description of Artificial Sequence: Synthetic oligonucleotide
cuagagagcccacagagca

SEQ ID NO: 1391483 - RNA, 19 nt, Artificial Sequence
  Description of Artificial Sequence: Synthetic oligonucleotide
agaauugcgcagggaaucc

SEQ ID NO: 1391484 - RNA, 19 nt, Artificial Sequence
  Description of Artificial Sequence: Synthetic oligonucleotide
agugaagacucuaggagag

SEQ ID NO: 1391485 - RNA, 19 nt, Artificial Sequence
  Description of Artificial Sequence: Synthetic oligonucleotide
ugguugauguauaggcuca

SEQ ID NO: 1391486 - RNA, 19 nt, Artificial Sequence
  Description of Artificial Sequence: Synthetic oligonucleotide
cugaucggggucuugcccg

SEQ ID NO: 1391487 - RNA, 19 nt, Artificial Sequence
  Description of Artificial Sequence: Synthetic oligonucleotide
cauguacucuggcaaacgc

SEQ ID NO: 1391488 - RNA, 19 nt, Artificial Sequence
  Description of Artificial Sequence: Synthetic oligonucleotide
uacaccgccgacgagcuag

SEQ ID NO: 1391489 - RNA, 19 nt, Artificial Sequence
  Description of Artificial Sequence: Synthetic oligonucleotide
cuauucuggucccauacuc

SEQ ID NO: 1391490 - RNA, 19 nt, Artificial Sequence
  Description of Artificial Sequence: Synthetic oligonucleotide
uucuuugcggugagcaggc

SEQ ID NO: 1391491 - RNA, 19 nt, Artificial Sequence
  Description of Artificial Sequence: Synthetic oligonucleotide
gguacuacuugcuacccgc

SEQ ID NO: 1391492 - RNA, 19 nt, Artificial Sequence
  Description of Artificial Sequence: Synthetic oligonucleotide
auggugaauucuuugcggu

SEQ ID NO: 1391493 - RNA, 19 nt, Artificial Sequence
  Description of Artificial Sequence: Synthetic oligonucleotide
caggagucgagcuacccgc

SEQ ID NO: 1391494 - RNA, 19 nt, Artificial Sequence
  Description of Artificial Sequence: Synthetic oligonucleotide
ucggcuuugagaaggucgu

SEQ ID NO: 1391495 - RNA, 19 nt, Artificial Sequence
  Description of Artificial Sequence: Synthetic oligonucleotide
acuacagccuccacgcgcc

SEQ ID NO: 1391496 - RNA, 19 nt, Artificial Sequence
  Description of Artificial Sequence: Synthetic oligonucleotide
acugcagccaagguacuac

SEQ ID NO: 1391497 - RNA, 19 nt, Artificial Sequence
  Description of Artificial Sequence: Synthetic oligonucleotide
gacuacagccuccacgcgc

SEQ ID NO: 1391498 - RNA, 19 nt, Artificial Sequence
  Description of Artificial Sequence: Synthetic oligonucleotide
uucucccacagaauugcgc

SEQ ID NO: 1391499 - RNA, 19 nt, Artificial Sequence
  Description of Artificial Sequence: Synthetic oligonucleotide
gccaauuucaaugaagcgc

SEQ ID NO: 1391500 - RNA, 19 nt, Artificial Sequence
  Description of Artificial Sequence: Synthetic oligonucleotide
aagugccacugccaauuuc

SEQ ID NO: 1391501 - RNA, 19 nt, Artificial Sequence
  Description of Artificial Sequence: Synthetic oligonucleotide
agcaccaacaggguugcac

SEQ ID NO: 1391502 - RNA, 19 nt, Artificial Sequence
  Description of Artificial Sequence: Synthetic oligonucleotide
aaaugaucgucaucagguu

SEQ ID NO: 1391503 - RNA, 19 nt, Artificial Sequence
  Description of Artificial Sequence: Synthetic oligonucleotide
guugcacucagacugcuga

SEQ ID NO: 1391504 - RNA, 19 nt, Artificial Sequence
  Description of Artificial Sequence: Synthetic oligonucleotide
cucuaugcugggcagcccg

SEQ ID NO: 1391505 - RNA, 19 nt, Artificial Sequence
  Description of Artificial Sequence: Synthetic oligonucleotide
ucaucaggagucgagcuac

SEQ ID NO: 1391506 - RNA, 19 nt, Artificial Sequence
  Description of Artificial Sequence: Synthetic oligonucleotide
gaaggugaaauuaggcuga

SEQ ID NO: 1391507 - RNA, 19 nt, Artificial Sequence
  Description of Artificial Sequence: Synthetic oligonucleotide
gacaggaguguccucgggc

SEQ ID NO: 1391508 - RNA, 19 nt, Artificial Sequence
  Description of Artificial Sequence: Synthetic oligonucleotide
ugguaguugcagaaccaug

SEQ ID NO: 1391509 - RNA, 19 nt, Artificial Sequence
  Description of Artificial Sequence: Synthetic oligonucleotide
ugagaaggucguacacggg

SEQ ID NO: 1391510 - RNA, 19 nt, Artificial Sequence
  Description of Artificial Sequence: Synthetic oligonucleotide
agagcaccaacaggguugc

SEQ ID NO: 1391511 - RNA, 19 nt, Artificial Sequence
  Description of Artificial Sequence: Synthetic oligonucleotide
cagccaagguacuacuugc

SEQ ID NO: 1391512 - RNA, 19 nt, Artificial Sequence
  Description of Artificial Sequence: Synthetic oligonucleotide
ccaacggugacccggaagg

SEQ ID NO: 1391513 - RNA, 19 nt, Artificial Sequence
  Description of Artificial Sequence: Synthetic oligonucleotide
cagucugugccagagguag

SEQ ID NO: 1391514 - RNA, 19 nt, Artificial Sequence
  Description of Artificial Sequence: Synthetic oligonucleotide
uggugaauucuuugcggug

SEQ ID NO: 1391515 - RNA, 19 nt, Artificial Sequence
  Description of Artificial Sequence: Synthetic oligonucleotide
accgccgacgagcuagggc

SEQ ID NO: 1391516 - RNA, 19 nt, Artificial Sequence
  Description of Artificial Sequence: Synthetic oligonucleotide
acgggcgucuuuccuauuc

SEQ ID NO: 1391517 - RNA, 19 nt, Artificial Sequence
  Description of Artificial Sequence: Synthetic oligonucleotide
cuuugcggugagcaggccc

SEQ ID NO: 1391518 - RNA, 19 nt, Artificial Sequence
  Description of Artificial Sequence: Synthetic oligonucleotide
agaaggucguacacgggcg

SEQ ID NO: 1391519 - RNA, 19 nt, Artificial Sequence
  Description of Artificial Sequence: Synthetic oligonucleotide
uucaucaggagucgagcua

SEQ ID NO: 1391520 - RNA, 19 nt, Artificial Sequence
  Description of Artificial Sequence: Synthetic oligonucleotide
gagcaugguugauguauag

SEQ ID NO: 1391521 - RNA, 19 nt, Artificial Sequence
  Description of Artificial Sequence: Synthetic oligonucleotide
cagugaagacucuaggaga

SEQ ID NO: 1391522 - RNA, 19 nt, Artificial Sequence
  Description of Artificial Sequence: Synthetic oligonucleotide
caacucuccgcguggcucg

SEQ ID NO: 1391523 - RNA, 19 nt, Artificial Sequence
  Description of Artificial Sequence: Synthetic oligonucleotide
aucaggagucgagcuaccc

SEQ ID NO: 1391524 - RNA, 19 nt, Artificial Sequence
  Description of Artificial Sequence: Synthetic oligonucleotide
auacuccugaagaaggcug

SEQ ID NO: 1391525 - RNA, 19 nt, Artificial Sequence
  Description of Artificial Sequence: Synthetic oligonucleotide
auccugugcuggcuagggc

SEQ ID NO: 1391526 - RNA, 19 nt, Artificial Sequence
  Description of Artificial Sequence: Synthetic oligonucleotide
gaaccaugacacacaguag

SEQ ID NO: 1391527 - RNA, 19 nt, Artificial Sequence
  Description of Artificial Sequence: Synthetic oligonucleotide
ugacuacagccuccacgcg

SEQ ID NO: 1391528 - RNA, 19 nt, Artificial Sequence
  Description of Artificial Sequence: Synthetic oligonucleotide
gucaccauguacucuggca

SEQ ID NO: 1391529 - RNA, 19 nt, Artificial Sequence
  Description of Artificial Sequence: Synthetic oligonucleotide
acuacuugcuacccgccau

SEQ ID NO: 1391530 - RNA, 19 nt, Artificial Sequence
  Description of Artificial Sequence: Synthetic oligonucleotide
ucuaugcugggcagcccgc

SEQ ID NO: 1391531 - RNA, 19 nt, Artificial Sequence
  Description of Artificial Sequence: Synthetic oligonucleotide
uggguggacaguuccacua

SEQ ID NO: 1391532 - RNA, 19 nt, Artificial Sequence
  Description of Artificial Sequence: Synthetic oligonucleotide
gucgccaacggugacccgg

SEQ ID NO: 1391533 - RNA, 19 nt, Artificial Sequence
  Description of Artificial Sequence: Synthetic oligonucleotide
uccacucggcaggucaugg

SEQ ID NO: 1391534 - RNA, 19 nt, Artificial Sequence
  Description of Artificial Sequence: Synthetic oligonucleotide
ugaucggggucuugcccgg

SEQ ID NO: 1391535 - RNA, 19 nt, Artificial Sequence
  Description of Artificial Sequence: Synthetic oligonucleotide
aguaaaaggcguacaucca

SEQ ID NO: 1391536 - RNA, 19 nt, Artificial Sequence
  Description of Artificial Sequence: Synthetic oligonucleotide
acucaagcucaguucuuca

SEQ ID NO: 1391537 - RNA, 19 nt, Artificial Sequence
  Description of Artificial Sequence: Synthetic oligonucleotide
ggucauggugaauucuuug

SEQ ID NO: 1391538 - RNA, 19 nt, Artificial Sequence
  Description of Artificial Sequence: Synthetic oligonucleotide
cugugguagugccggagcc

SEQ ID NO: 1391539 - RNA, 19 nt, Artificial Sequence
  Description of Artificial Sequence: Synthetic oligonucleotide
gcuggcuagggcccuaugg

SEQ ID NO: 1391540 - RNA, 19 nt, Artificial Sequence
  Description of Artificial Sequence: Synthetic oligonucleotide
gagucgagcuacccgcccc

SEQ ID NO: 1391541 - RNA, 19 nt, Artificial Sequence
  Description of Artificial Sequence: Synthetic oligonucleotide
ucccauccgacuccuugug

SEQ ID NO: 1391542 - RNA, 19 nt, Artificial Sequence
  Description of Artificial Sequence: Synthetic oligonucleotide
agcuacccgccccacaacu

SEQ ID NO: 1391543 - RNA, 19 nt, Artificial Sequence
  Description of Artificial Sequence: Synthetic oligonucleotide
ucccuagagagcccacaga

SEQ ID NO: 1391544 - RNA, 19 nt, Artificial Sequence
  Description of Artificial Sequence: Synthetic oligonucleotide
cacgcgccccaguacaccg

SEQ ID NO: 1391545 - RNA, 19 nt, Artificial Sequence
  Description of Artificial Sequence: Synthetic oligonucleotide
aguguccucgggcagugaa

SEQ ID NO: 1391546 - RNA, 19 nt, Artificial Sequence
  Description of Artificial Sequence: Synthetic oligonucleotide
gaauugcgcagggaauccc

SEQ ID NO: 1391547 - RNA, 19 nt, Artificial Sequence
  Description of Artificial Sequence: Synthetic oligonucleotide
cugguuaguauagcagaug

SEQ ID NO: 1391548 - RNA, 19 nt, Artificial Sequence
  Description of Artificial Sequence: Synthetic oligonucleotide
uacacgggcgucuuuccua

SEQ ID NO: 1391549 - RNA, 19 nt, Artificial Sequence
  Description of Artificial Sequence: Synthetic oligonucleotide
cuacuugcuacccgccaug

SEQ ID NO: 1391550 - RNA, 19 nt, Artificial Sequence
  Description of Artificial Sequence: Synthetic oligonucleotide
ugaauucuuugcggugagc

SEQ ID NO: 1391551 - RNA, 19 nt, Artificial Sequence
  Description of Artificial Sequence: Synthetic oligonucleotide
aucccgggcguccaggggu

SEQ ID NO: 1391552 - RNA, 19 nt, Artificial Sequence
  Description of Artificial Sequence: Synthetic oligonucleotide
uuuccuauucuggucccau

SEQ ID NO: 1391553 - RNA, 19 nt, Artificial Sequence
  Description of Artificial Sequence: Synthetic oligonucleotide
cugccucccugguaguugc

SEQ ID NO: 1391554 - RNA, 19 nt, Artificial Sequence
  Description of Artificial Sequence: Synthetic oligonucleotide
uugagguguuugagggcca

SEQ ID NO: 1391555 - RNA, 19 nt, Artificial Sequence
  Description of Artificial Sequence: Synthetic oligonucleotide
ccgccgacgagcuagggcc

SEQ ID NO: 1391556 - RNA, 19 nt, Artificial Sequence
  Description of Artificial Sequence: Synthetic oligonucleotide
ccaauuucaaugaagcgcu

SEQ ID NO: 1391557 - RNA, 19 nt, Artificial Sequence
  Description of Artificial Sequence: Synthetic oligonucleotide
agcaaaaguaaaaggcgua

SEQ ID NO: 1391558 - RNA, 19 nt, Artificial Sequence
  Description of Artificial Sequence: Synthetic oligonucleotide
ucguacacgggcgucuuuc

SEQ ID NO: 1391559 - RNA, 19 nt, Artificial Sequence
  Description of Artificial Sequence: Synthetic oligonucleotide
agcccacucaagcucaguu

SEQ ID NO: 1391560 - RNA, 19 nt, Artificial Sequence
  Description of Artificial Sequence: Synthetic oligonucleotide
cuacccgccaugauccuga

SEQ ID NO: 1391561 - RNA, 19 nt, Artificial Sequence
  Description of Artificial Sequence: Synthetic oligonucleotide
cuugcuugccugugccuuc

SEQ ID NO: 1391562 - RNA, 19 nt, Artificial Sequence
  Description of Artificial Sequence: Synthetic oligonucleotide
gacgagcuagggccggggc

SEQ ID NO: 1391563 - RNA, 19 nt, Artificial Sequence
  Description of Artificial Sequence: Synthetic oligonucleotide
acagaauugcgcagggaau

SEQ ID NO: 1391564 - RNA, 19 nt, Artificial Sequence
  Description of Artificial Sequence: Synthetic oligonucleotide
uacuugcuacccgccauga

SEQ ID NO: 1391565 - RNA, 19 nt, Artificial Sequence
  Description of Artificial Sequence: Synthetic oligonucleotide
ggcccuaugguucaugucu

SEQ ID NO: 1391566 - RNA, 19 nt, Artificial Sequence
  Description of Artificial Sequence: Synthetic oligonucleotide
cacucaagcucaguucuuc

SEQ ID NO: 1391567 - RNA, 19 nt, Artificial Sequence
  Description of Artificial Sequence: Synthetic oligonucleotide
gcuccgaagggacaggauc

SEQ ID NO: 1391568 - RNA, 19 nt, Artificial Sequence
  Description of Artificial Sequence: Synthetic oligonucleotide
caauuucaaugaagcgcuc

SEQ ID NO: 1391569 - RNA, 19 nt, Artificial Sequence
  Description of Artificial Sequence: Synthetic oligonucleotide
gaugggcuuggcccucggc

SEQ ID NO: 1391570 - RNA, 19 nt, Artificial Sequence
  Description of Artificial Sequence: Synthetic oligonucleotide
caccacaaguuccuguaga

SEQ ID NO: 1391571 - RNA, 19 nt, Artificial Sequence
  Description of Artificial Sequence: Synthetic oligonucleotide
agucgagcuacccgcccca

SEQ ID NO: 1391572 - RNA, 19 nt, Artificial Sequence
  Description of Artificial Sequence: Synthetic oligonucleotide
ugcagccaagguacuacuu

SEQ ID NO: 1391573 - RNA, 19 nt, Artificial Sequence
  Description of Artificial Sequence: Synthetic oligonucleotide
cccugguaguugcagaacc

SEQ ID NO: 1391574 - RNA, 19 nt, Artificial Sequence
  Description of Artificial Sequence: Synthetic oligonucleotide
aguacaccgccgacgagcu

SEQ ID NO: 1391575 - RNA, 19 nt, Artificial Sequence
  Description of Artificial Sequence: Synthetic oligonucleotide
cccggaaggugaaauuagg

SEQ ID NO: 1391576 - RNA, 19 nt, Artificial Sequence
  Description of Artificial Sequence: Synthetic oligonucleotide
guugccaucccgggcgucc

SEQ ID NO: 1391577 - RNA, 19 nt, Artificial Sequence
  Description of Artificial Sequence: Synthetic oligonucleotide
caucaggagucgagcuacc

SEQ ID NO: 1391578 - RNA, 19 nt, Artificial Sequence
  Description of Artificial Sequence: Synthetic oligonucleotide
cauuugcucuaugcugggc

SEQ ID NO: 1391579 - RNA, 19 nt, Artificial Sequence
  Description of Artificial Sequence: Synthetic oligonucleotide
ucgccaacggugacccgga

SEQ ID NO: 1391580 - RNA, 19 nt, Artificial Sequence
  Description of Artificial Sequence: Synthetic oligonucleotide
caccgugacuacagccucc

SEQ ID NO: 1391581 - RNA, 19 nt, Artificial Sequence
  Description of Artificial Sequence: Synthetic oligonucleotide
gcguacauccaucacugca

SEQ ID NO: 1391582 - RNA, 19 nt, Artificial Sequence
  Description of Artificial Sequence: Synthetic oligonucleotide
cagcuggugucgccaacgg

SEQ ID NO: 1391583 - RNA, 19 nt, Artificial Sequence
  Description of Artificial Sequence: Synthetic oligonucleotide
ugacccggaaggugaaauu

SEQ ID NO: 1391584 - RNA, 19 nt, Artificial Sequence
  Description of Artificial Sequence: Synthetic oligonucleotide
gacccggaaggugaaauua

SEQ ID NO: 1391585 - RNA, 19 nt, Artificial Sequence
  Description of Artificial Sequence: Synthetic oligonucleotide
ggguggacaguuccacuag

SEQ ID NO: 1391586 - RNA, 19 nt, Artificial Sequence
  Description of Artificial Sequence: Synthetic oligonucleotide
gcugaucggggucuugccc

SEQ ID NO: 1391587 - RNA, 19 nt, Artificial Sequence
  Description of Artificial Sequence: Synthetic oligonucleotide
aaggugaaauuaggcugau

SEQ ID NO: 1391588 - RNA, 19 nt, Artificial Sequence
  Description of Artificial Sequence: Synthetic oligonucleotide
augaagcgcuccacucggc

SEQ ID NO: 1391589 - RNA, 19 nt, Artificial Sequence
  Description of Artificial Sequence: Synthetic oligonucleotide
guacuacuugcuacccgcc

SEQ ID NO: 1391590 - RNA, 19 nt, Artificial Sequence
  Description of Artificial Sequence: Synthetic oligonucleotide
uggcuagggcccuaugguu

SEQ ID NO: 1391591 - RNA, 19 nt, Artificial Sequence
  Description of Artificial Sequence: Synthetic oligonucleotide
aguagcuggcuggguggac

SEQ ID NO: 1391592 - RNA, 19 nt, Artificial Sequence
  Description of Artificial Sequence: Synthetic oligonucleotide
ucgagcuacccgccccaca

SEQ ID NO: 1391593 - RNA, 19 nt, Artificial Sequence
  Description of Artificial Sequence: Synthetic oligonucleotide
cuggugucgccaacgguga

SEQ ID NO: 1391594 - RNA, 19 nt, Artificial Sequence
  Description of Artificial Sequence: Synthetic oligonucleotide
cagggaaucccaggugcag

SEQ ID NO: 1391595 - RNA, 19 nt, Artificial Sequence
  Description of Artificial Sequence: Synthetic oligonucleotide
uccacgcgccccaguacac

SEQ ID NO: 1391596 - RNA, 19 nt, Artificial Sequence
  Description of Artificial Sequence: Synthetic oligonucleotide
caagcccggagucgcggcc

SEQ ID NO: 1391597 - RNA, 19 nt, Artificial Sequence
  Description of Artificial Sequence: Synthetic oligonucleotide
caggaguguccucgggcag

SEQ ID NO: 1391598 - RNA, 19 nt, Artificial Sequence
  Description of Artificial Sequence: Synthetic oligonucleotide
cuagggccggggccaagcc

SEQ ID NO: 1391599 - RNA, 19 nt, Artificial Sequence
  Description of Artificial Sequence: Synthetic oligonucleotide
ugugcacucgaagcagcau

SEQ ID NO: 1391600 - RNA, 19 nt, Artificial Sequence
  Description of Artificial Sequence: Synthetic oligonucleotide
ccauccgacuccuuguguc

SEQ ID NO: 1391601 - RNA, 19 nt, Artificial Sequence
  Description of Artificial Sequence: Synthetic oligonucleotide
cucuccgcguggcucgccc

SEQ ID NO: 1391602 - RNA, 19 nt, Artificial Sequence
  Description of Artificial Sequence: Synthetic oligonucleotide
uccgacuccuugugucuuc

SEQ ID NO: 1391603 - RNA, 19 nt, Artificial Sequence
  Description of Artificial Sequence: Synthetic oligonucleotide
ccucgggcagugaagacuc

SEQ ID NO: 1391604 - RNA, 19 nt, Artificial Sequence
  Description of Artificial Sequence: Synthetic oligonucleotide
gcacucagacugcugagga

SEQ ID NO: 1391605 - RNA, 19 nt, Artificial Sequence
  Description of Artificial Sequence: Synthetic oligonucleotide
accgugacuacagccucca

SEQ ID NO: 1391606 - RNA, 19 nt, Artificial Sequence
  Description of Artificial Sequence: Synthetic oligonucleotide
gaaggucguacacgggcgu

SEQ ID NO: 1391607 - RNA, 19 nt, Artificial Sequence
  Description of Artificial Sequence: Synthetic oligonucleotide
guguccucgggcagugaag

SEQ ID NO: 1391608 - RNA, 19 nt, Artificial Sequence
  Description of Artificial Sequence: Synthetic oligonucleotide
caucccgggcguccagggg

SEQ ID NO: 1391609 - RNA, 19 nt, Artificial Sequence
  Description of Artificial Sequence: Synthetic oligonucleotide
ggugucgccaacggugacc

SEQ ID NO: 1391610 - RNA, 19 nt, Artificial Sequence
  Description of Artificial Sequence: Synthetic oligonucleotide
cuccacgcgccccaguaca

SEQ ID NO: 1391611 - RNA, 19 nt, Artificial Sequence
  Description of Artificial Sequence: Synthetic oligonucleotide
guauaggcucaggcucagg

SEQ ID NO: 1391612 - RNA, 19 nt, Artificial Sequence
  Description of Artificial Sequence: Synthetic oligonucleotide
gguagugccggagcccugc

SEQ ID NO: 1391613 - RNA, 19 nt, Artificial Sequence
  Description of Artificial Sequence: Synthetic oligonucleotide
aaggcugaucggggucuug

SEQ ID NO: 1391614 - RNA, 19 nt, Artificial Sequence
  Description of Artificial Sequence: Synthetic oligonucleotide
cccacaacucuccgcgugg

SEQ ID NO: 1391615 - RNA, 19 nt, Artificial Sequence
  Description of Artificial Sequence: Synthetic oligonucleotide
caccauguacucuggcaaa

SEQ ID NO: 1391616 - RNA, 19 nt, Artificial Sequence
  Description of Artificial Sequence: Synthetic oligonucleotide
guagggcgcggcgagcagc

SEQ ID NO: 1391617 - RNA, 19 nt, Artificial Sequence
  Description of Artificial Sequence: Synthetic oligonucleotide
cuggcuagggcccuauggu

SEQ ID NO: 1391618 - RNA, 19 nt, Artificial Sequence
  Description of Artificial Sequence: Synthetic oligonucleotide
ggucuugcccggguuggcg

SEQ ID NO: 1391619 - RNA, 19 nt, Artificial Sequence
  Description of Artificial Sequence: Synthetic oligonucleotide
cugugccagagguagagau

SEQ ID NO: 1391620 - RNA, 19 nt, Artificial Sequence
  Description of Artificial Sequence: Synthetic oligonucleotide
acccgccaugauccugagg

SEQ ID NO: 1391621 - RNA, 19 nt, Artificial Sequence
  Description of Artificial Sequence: Synthetic oligonucleotide
uggugucgccaacggugac

SEQ ID NO: 1391622 - RNA, 19 nt, Artificial Sequence
  Description of Artificial Sequence: Synthetic oligonucleotide
aucggggucuugcccgggu

SEQ ID NO: 1391623 - RNA, 19 nt, Artificial Sequence
  Description of Artificial Sequence: Synthetic oligonucleotide
cgccccacaacucuccgcg

SEQ ID NO: 1391624 - RNA, 19 nt, Artificial Sequence
  Description of Artificial Sequence: Synthetic oligonucleotide
ggagucgagcuacccgccc

SEQ ID NO: 1391625 - RNA, 19 nt, Artificial Sequence
  Description of Artificial Sequence: Synthetic oligonucleotide
ucgggcagugaagacucua

SEQ ID NO: 1391626 - RNA, 19 nt, Artificial Sequence
  Description of Artificial Sequence: Synthetic oligonucleotide
uacccgccaugauccugag

SEQ ID NO: 1391627 - RNA, 19 nt, Artificial Sequence
  Description of Artificial Sequence: Synthetic oligonucleotide
uagugccggagcccugcuc

SEQ ID NO: 1391628 - RNA, 19 nt, Artificial Sequence
  Description of Artificial Sequence: Synthetic oligonucleotide
ggcugaucggggucuugcc

SEQ ID NO: 1391629 - RNA, 19 nt, Artificial Sequence
  Description of Artificial Sequence: Synthetic oligonucleotide
gagcuacccgccccacaac

SEQ ID NO: 1391630 - RNA, 19 nt, Artificial Sequence
  Description of Artificial Sequence: Synthetic oligonucleotide
caggcgggagcucacccca

SEQ ID NO: 1391631 - RNA, 19 nt, Artificial Sequence
  Description of Artificial Sequence: Synthetic oligonucleotide
cugaugggcuuggcccucg

SEQ ID NO: 1391632 - RNA, 19 nt, Artificial Sequence
  Description of Artificial Sequence: Synthetic oligonucleotide
gaucggggucuugcccggg

SEQ ID NO: 1391633 - RNA, 19 nt, Artificial Sequence
  Description of Artificial Sequence: Synthetic oligonucleotide
ggggucuugcccggguugg

SEQ ID NO: 1391634 - RNA, 19 nt, Artificial Sequence
  Description of Artificial Sequence: Synthetic oligonucleotide
ccgguuccgaagcccaucc

SEQ ID NO: 1391635 - RNA, 19 nt, Artificial Sequence
  Description of Artificial Sequence: Synthetic oligonucleotide
guacuguagggcgcggcga

SEQ ID NO: 1391636 - RNA, 19 nt, Artificial Sequence
  Description of Artificial Sequence: Synthetic oligonucleotide
guagagcaccaacaggguu

SEQ ID NO: 1391637 - RNA, 19 nt, Artificial Sequence
  Description of Artificial Sequence: Synthetic oligonucleotide
ugcuacccgccaugauccu

SEQ ID NO: 1391638 - RNA, 19 nt, Artificial Sequence
  Description of Artificial Sequence: Synthetic oligonucleotide
gccgguagggcccgccgcg

SEQ ID NO: 1391639 - RNA, 19 nt, Artificial Sequence
  Description of Artificial Sequence: Synthetic oligonucleotide
cagauggaacaggggcagc

SEQ ID NO: 1391640 - RNA, 19 nt, Artificial Sequence
  Description of Artificial Sequence: Synthetic oligonucleotide
cuaugguucaugucuccuu

SEQ ID NO: 1391641 - RNA, 19 nt, Artificial Sequence
  Description of Artificial Sequence: Synthetic oligonucleotide
uccgaagggacaggaucuu

SEQ ID NO: 1391642 - RNA, 19 nt, Artificial Sequence
  Description of Artificial Sequence: Synthetic oligonucleotide
aggucauggugaauucuuu

SEQ ID NO: 1391643 - RNA, 19 nt, Artificial Sequence
  Description of Artificial Sequence: Synthetic oligonucleotide
gugaagacucuaggagaga

SEQ ID NO: 1391644 - RNA, 19 nt, Artificial Sequence
  Description of Artificial Sequence: Synthetic oligonucleotide
ucggggucuugcccggguu

SEQ ID NO: 1391645 - RNA, 19 nt, Artificial Sequence
  Description of Artificial Sequence: Synthetic oligonucleotide
ccugguaguugcagaacca

SEQ ID NO: 1391646 - RNA, 19 nt, Artificial Sequence
  Description of Artificial Sequence: Synthetic oligonucleotide
gggcuccugguuaguauag

SEQ ID NO: 1391647 - RNA, 19 nt, Artificial Sequence
  Description of Artificial Sequence: Synthetic oligonucleotide
cuugcccggguuggcggcc

SEQ ID NO: 1391648 - RNA, 19 nt, Artificial Sequence
  Description of Artificial Sequence: Synthetic oligonucleotide
guagggcccgccgcggggc

SEQ ID NO: 1391649 - RNA, 19 nt, Artificial Sequence
  Description of Artificial Sequence: Synthetic oligonucleotide
uggcaaacgccagccuuuu

SEQ ID NO: 1391650 - RNA, 19 nt, Artificial Sequence
  Description of Artificial Sequence: Synthetic oligonucleotide
acucuccgcguggcucgcc

SEQ ID NO: 1391651 - RNA, 19 nt, Artificial Sequence
  Description of Artificial Sequence: Synthetic oligonucleotide
ggcguacauccaucacugc

SEQ ID NO: 1391652 - RNA, 19 nt, Artificial Sequence
  Description of Artificial Sequence: Synthetic oligonucleotide
cacuaggcacuggcagagc

SEQ ID NO: 1391653 - RNA, 19 nt, Artificial Sequence
  Description of Artificial Sequence: Synthetic oligonucleotide
ggagcucaccccaauggaa

SEQ ID NO: 1391654 - RNA, 19 nt, Artificial Sequence
  Description of Artificial Sequence: Synthetic oligonucleotide
gcggcgagcagccucaccu

SEQ ID NO: 1391655 - RNA, 19 nt, Artificial Sequence
  Description of Artificial Sequence: Synthetic oligonucleotide
agacugcugaggagagaca

SEQ ID NO: 1391656 - RNA, 19 nt, Artificial Sequence
  Description of Artificial Sequence: Synthetic oligonucleotide
ggcguccagggguacugug

SEQ ID NO: 1391657 - RNA, 19 nt, Artificial Sequence
  Description of Artificial Sequence: Synthetic oligonucleotide
acaccgccgacgagcuagg

SEQ ID NO: 1391658 - RNA, 19 nt, Artificial Sequence
  Description of Artificial Sequence: Synthetic oligonucleotide
cccaguacaccgccgacga

SEQ ID NO: 1391659 - RNA, 19 nt, Artificial Sequence
  Description of Artificial Sequence: Synthetic oligonucleotide
cuggggcccugaccagugc

SEQ ID NO: 1391660 - RNA, 19 nt, Artificial Sequence
  Description of Artificial Sequence: Synthetic oligonucleotide
ucccgggcguccaggggua

SEQ ID NO: 1391661 - RNA, 19 nt, Artificial Sequence
  Description of Artificial Sequence: Synthetic oligonucleotide
gggguacugugugcacucg

SEQ ID NO: 1391662 - RNA, 19 nt, Artificial Sequence
  Description of Artificial Sequence: Synthetic oligonucleotide
cacucauucccuccuccgu

SEQ ID NO: 1391663 - RNA, 19 nt, Artificial Sequence
  Description of Artificial Sequence: Synthetic oligonucleotide
cguccagggguacugugug

SEQ ID NO: 1391664 - RNA, 19 nt, Artificial Sequence
  Description of Artificial Sequence: Synthetic oligonucleotide
gccaagcccggagucgcgg

SEQ ID NO: 1391665 - RNA, 19 nt, Artificial Sequence
  Description of Artificial Sequence: Synthetic oligonucleotide
gagucccuagagagcccac

SEQ ID NO: 1391666 - RNA, 19 nt, Artificial Sequence
  Description of Artificial Sequence: Synthetic oligonucleotide
cuucaauguccagguagcu

SEQ ID NO: 1391667 - RNA, 19 nt, Artificial Sequence
  Description of Artificial Sequence: Synthetic oligonucleotide
ccccacaacucuccgcgug

SEQ ID NO: 1391668 - RNA, 19 nt, Artificial Sequence
  Description of Artificial Sequence: Synthetic oligonucleotide
ccaagcccggagucgcggc

SEQ ID NO: 1391669 - RNA, 19 nt, Artificial Sequence
  Description of Artificial Sequence: Synthetic oligonucleotide
cugcagccaagguacuacu

SEQ ID NO: 1391670 - RNA, 19 nt, Artificial Sequence
  Description of Artificial Sequence: Synthetic oligonucleotide
cugguaguugcagaaccau

SEQ ID NO: 1391671 - RNA, 19 nt, Artificial Sequence
  Description of Artificial Sequence: Synthetic oligonucleotide
gagucgcggccgguagggc

SEQ ID NO: 1391672 - RNA, 19 nt, Artificial Sequence
  Description of Artificial Sequence: Synthetic oligonucleotide
gcuacccgccaugauccug

SEQ ID NO: 1391673 - RNA, 19 nt, Artificial Sequence
  Description of Artificial Sequence: Synthetic oligonucleotide
gcccuaugguucaugucuc

SEQ ID NO: 1391674 - RNA, 19 nt, Artificial Sequence
  Description of Artificial Sequence: Synthetic oligonucleotide
ucgcggccgguagggcccg

SEQ ID NO: 1391675 - RNA, 19 nt, Artificial Sequence
  Description of Artificial Sequence: Synthetic oligonucleotide
gccaucccgggcguccagg

SEQ ID NO: 1391676 - RNA, 19 nt, Artificial Sequence
  Description of Artificial Sequence: Synthetic oligonucleotide
gggcccuaugguucauguc

SEQ ID NO: 1391677 - RNA, 19 nt, Artificial Sequence
  Description of Artificial Sequence: Synthetic oligonucleotide
ccugguuaguauagcagau

SEQ ID NO: 1391678 - RNA, 19 nt, Artificial Sequence
  Description of Artificial Sequence: Synthetic oligonucleotide
cugcugcauuacgcuuugc

SEQ ID NO: 1391679 - RNA, 19 nt, Artificial Sequence
  Description of Artificial Sequence: Synthetic oligonucleotide
gcgggcgccaccgugacua

SEQ ID NO: 1391680 - RNA, 19 nt, Artificial Sequence
  Description of Artificial Sequence: Synthetic oligonucleotide
caccgccgacgagcuaggg

SEQ ID NO: 1391681 - RNA, 19 nt, Artificial Sequence
  Description of Artificial Sequence: Synthetic oligonucleotide
ccgccgcggggcaugcugg

SEQ ID NO: 1391682 - RNA, 19 nt, Artificial Sequence
  Description of Artificial Sequence: Synthetic oligonucleotide
gucgagcuacccgccccac

SEQ ID NO: 1391683 - RNA, 19 nt, Artificial Sequence
  Description of Artificial Sequence: Synthetic oligonucleotide
ccggagucgcggccgguag

SEQ ID NO: 1391684 - RNA, 19 nt, Artificial Sequence
  Description of Artificial Sequence: Synthetic oligonucleotide
gcuacccgccccacaacuc

SEQ ID NO: 1391685 - RNA, 19 nt, Artificial Sequence
  Description of Artificial Sequence: Synthetic oligonucleotide
gccgacgagcuagggccgg

SEQ ID NO: 1391686 - RNA, 19 nt, Artificial Sequence
  Description of Artificial Sequence: Synthetic oligonucleotide
cccgccccacaacucuccg

SEQ ID NO: 1391687 - RNA, 19 nt, Artificial Sequence
  Description of Artificial Sequence: Synthetic oligonucleotide
ccaguacaccgccgacgag

SEQ ID NO: 1391688 - RNA, 19 nt, Artificial Sequence
  Description of Artificial Sequence: Synthetic oligonucleotide
ccuccacgcgccccaguac

SEQ ID NO: 1391689 - RNA, 19 nt, Artificial Sequence
  Description of Artificial Sequence: Synthetic oligonucleotide
ggcgagcagccucaccucu

SEQ ID NO: 1391690 - RNA, 19 nt, Artificial Sequence
  Description of Artificial Sequence: Synthetic oligonucleotide
cgagcuacccgccccacaa

SEQ ID NO: 1391691 - RNA, 19 nt, Artificial Sequence
  Description of Artificial Sequence: Synthetic oligonucleotide
ccgccccacaacucuccgc

SEQ ID NO: 1391692 - RNA, 19 nt, Artificial Sequence
  Description of Artificial Sequence: Synthetic oligonucleotide
cacugcagccaagguacua

SEQ ID NO: 1391693 - RNA, 19 nt, Artificial Sequence
  Description of Artificial Sequence: Synthetic oligonucleotide
guagugccggagcccugcu

SEQ ID NO: 1391694 - RNA, 19 nt, Artificial Sequence
  Description of Artificial Sequence: Synthetic oligonucleotide
gaguguccucgggcaguga

SEQ ID NO: 1391695 - RNA, 19 nt, Artificial Sequence
  Description of Artificial Sequence: Synthetic oligonucleotide
gccccaguacaccgccgac

SEQ ID NO: 1391696 - RNA, 19 nt, Artificial Sequence
  Description of Artificial Sequence: Synthetic oligonucleotide
cgcuccacucggcagguca

SEQ ID NO: 1391697 - RNA, 19 nt, Artificial Sequence
  Description of Artificial Sequence: Synthetic oligonucleotide
cgcgccccaguacaccgcc

SEQ ID NO: 1391698 - RNA, 19 nt, Artificial Sequence
  Description of Artificial Sequence: Synthetic oligonucleotide
ccacgcgccccaguacacc

SEQ ID NO: 1391699 - RNA, 19 nt, Artificial Sequence
  Description of Artificial Sequence: Synthetic oligonucleotide
uccccgcgggcgccaccgu

SEQ ID NO: 1391700 - RNA, 19 nt, Artificial Sequence
  Description of Artificial Sequence: Synthetic oligonucleotide
cgccgacgagcuagggccg

SEQ ID NO: 1391701 - RNA, 19 nt, Artificial Sequence
  Description of Artificial Sequence: Synthetic oligonucleotide
cggagucgcggccgguagg

SEQ ID NO: 1391702 - RNA, 19 nt, Artificial Sequence
  Description of Artificial Sequence: Synthetic oligonucleotide
cggggucuugcccggguug

SEQ ID NO: 1391703 - RNA, 19 nt, Artificial Sequence
  Description of Artificial Sequence: Synthetic oligonucleotide
ccuaugguucaugucuccu

SEQ ID NO: 1391704 - RNA, 19 nt, Artificial Sequence
  Description of Artificial Sequence: Synthetic oligonucleotide
gaaggcugaucggggucuu

SEQ ID NO: 1391705 - RNA, 19 nt, Artificial Sequence
  Description of Artificial Sequence: Synthetic oligonucleotide
ccgacgagcuagggccggg

SEQ ID NO: 1391706 - RNA, 19 nt, Artificial Sequence
  Description of Artificial Sequence: Synthetic oligonucleotide
cccgguuccgaagcccauc

SEQ ID NO: 1391707 - RNA, 19 nt, Artificial Sequence
  Description of Artificial Sequence: Synthetic oligonucleotide
guacaccgccgacgagcua

SEQ ID NO: 1391708 - RNA, 19 nt, Artificial Sequence
  Description of Artificial Sequence: Synthetic oligonucleotide
cgacgagcuagggccgggg

SEQ ID NO: 1391709 - RNA, 19 nt, Artificial Sequence
  Description of Artificial Sequence: Synthetic oligonucleotide
ccucggcuuugagaagguc

SEQ ID NO: 1391710 - RNA, 19 nt, Artificial Sequence
  Description of Artificial Sequence: Synthetic oligonucleotide
cucgggcagugaagacucu

SEQ ID NO: 1391711 - RNA, 19 nt, Artificial Sequence
  Description of Artificial Sequence: Synthetic oligonucleotide
cgguagggcccgccgcggg

SEQ ID NO: 1391712 - RNA, 19 nt, Artificial Sequence
  Description of Artificial Sequence: Synthetic oligonucleotide
ccgugacuacagccuccac

SEQ ID NO: 1391713 - RNA, 19 nt, Artificial Sequence
  Description of Artificial Sequence: Synthetic oligonucleotide
cccggguuggcggccagca

SEQ ID NO: 1391714 - RNA, 19 nt, Artificial Sequence
  Description of Artificial Sequence: Synthetic oligonucleotide
ccaugggagggcuccuggu

SEQ ID NO: 1391715 - RNA, 19 nt, Artificial Sequence
  Description of Artificial Sequence: Synthetic oligonucleotide
cggccgguagggcccgccg

SEQ ID NO: 1391716 - RNA, 19 nt, Artificial Sequence
  Description of Artificial Sequence: Synthetic oligonucleotide
ccgcgggcgccaccgugac

SEQ ID NO: 1391717 - RNA, 19 nt, Artificial Sequence
  Description of Artificial Sequence: Synthetic oligonucleotide
gggcgccaccgugacuaca

SEQ ID NO: 1391718 - RNA, 19 nt, Artificial Sequence
  Description of Artificial Sequence: Synthetic oligonucleotide
cccauccgacuccuugugu

SEQ ID NO: 1391719 - RNA, 19 nt, Artificial Sequence
  Description of Artificial Sequence: Synthetic oligonucleotide
gcggccgguagggcccgcc

SEQ ID NO: 1391720 - RNA, 19 nt, Artificial Sequence
  Description of Artificial Sequence: Synthetic oligonucleotide
gggcccgccgcggggcaug

SEQ ID NO: 1391721 - RNA, 19 nt, Artificial Sequence
  Description of Artificial Sequence: Synthetic oligonucleotide
gcauuacgcuuugccaguu

SEQ ID NO: 1391722 - RNA, 19 nt, Artificial Sequence
  Description of Artificial Sequence: Synthetic oligonucleotide
ccgccaugauccugaggua

SEQ ID NO: 1391723 - RNA, 19 nt, Artificial Sequence
  Description of Artificial Sequence: Synthetic oligonucleotide
cgcggcgagcagccucacc

SEQ ID NO: 1391724 - RNA, 19 nt, Artificial Sequence
  Description of Artificial Sequence: Synthetic oligonucleotide
ggucguacacgggcgucuu

SEQ ID NO: 1391725 - RNA, 19 nt, Artificial Sequence
  Description of Artificial Sequence: Synthetic oligonucleotide
gccccacaacucuccgcgu

SEQ ID NO: 1391726 - RNA, 19 nt, Artificial Sequence
  Description of Artificial Sequence: Synthetic oligonucleotide
ccacucaagcucaguucuu

SEQ ID NO: 1391727 - RNA, 19 nt, Artificial Sequence
  Description of Artificial Sequence: Synthetic oligonucleotide
cgggcgucuuuccuauucu

SEQ ID NO: 1391728 - RNA, 19 nt, Artificial Sequence
  Description of Artificial Sequence: Synthetic oligonucleotide
gcccgcagccugugguagu

SEQ ID NO: 1391729 - RNA, 19 nt, Artificial Sequence
  Description of Artificial Sequence: Synthetic oligonucleotide
cgggcgccaccgugacuac

SEQ ID NO: 1391730 - RNA, 19 nt, Artificial Sequence
  Description of Artificial Sequence: Synthetic oligonucleotide
ccgcggggcaugcugggau

SEQ ID NO: 1391731 - RNA, 19 nt, Artificial Sequence
  Description of Artificial Sequence: Synthetic oligonucleotide
ccggggccaagcccggagu

SEQ ID NO: 1391732 - RNA, 19 nt, Artificial Sequence
  Description of Artificial Sequence: Synthetic oligonucleotide
cguugccaucccgggcguc

SEQ ID NO: 1391733 - RNA, 19 nt, Artificial Sequence
  Description of Artificial Sequence: Synthetic oligonucleotide
cccggagucgcggccggua

SEQ ID NO: 1391734 - RNA, 19 nt, Artificial Sequence
  Description of Artificial Sequence: Synthetic oligonucleotide
cccgggcguccagggguac

SEQ ID NO: 1391735 - RNA, 19 nt, Artificial Sequence
  Description of Artificial Sequence: Synthetic oligonucleotide
gcgcuccacucggcagguc

SEQ ID NO: 1391736 - RNA, 19 nt, Artificial Sequence
  Description of Artificial Sequence: Synthetic oligonucleotide
gcgcggcgagcagccucac

SEQ ID NO: 1391737 - RNA, 19 nt, Artificial Sequence
  Description of Artificial Sequence: Synthetic oligonucleotide
cggcuuugagaaggucgua

SEQ ID NO: 1391738 - RNA, 19 nt, Artificial Sequence
  Description of Artificial Sequence: Synthetic oligonucleotide
cgccaacggugacccggaa

SEQ ID NO: 1391739 - RNA, 19 nt, Artificial Sequence
  Description of Artificial Sequence: Synthetic oligonucleotide
cccucccauccgacuccuu

SEQ ID NO: 1391740 - RNA, 19 nt, Artificial Sequence
  Description of Artificial Sequence: Synthetic oligonucleotide
cgcgggcgccaccgugacu

SEQ ID NO: 1391741 - RNA, 19 nt, Artificial Sequence
  Description of Artificial Sequence: Synthetic oligonucleotide
uguagaucauuaaugacag

SEQ ID NO: 1391742 - RNA, 19 nt, Artificial Sequence
  Description of Artificial Sequence: Synthetic oligonucleotide
aagaacgguuguuaggacc

SEQ ID NO: 1391743 - RNA, 19 nt, Artificial Sequence
  Description of Artificial Sequence: Synthetic oligonucleotide
guuacaacgacacaagaag

SEQ ID NO: 1391744 - RNA, 19 nt, Artificial Sequence
  Description of Artificial Sequence: Synthetic oligonucleotide
auugguaggaaccaggcag

SEQ ID NO: 1391745 - RNA, 19 nt, Artificial Sequence
  Description of Artificial Sequence: Synthetic oligonucleotide
uagaucauuaaugacagcc

SEQ ID NO: 1391746 - RNA, 19 nt, Artificial Sequence
  Description of Artificial Sequence: Synthetic oligonucleotide
ucugaaacacgucugcagg

SEQ ID NO: 1391747 - RNA, 19 nt, Artificial Sequence
  Description of Artificial Sequence: Synthetic oligonucleotide
ugucucuuuaagcagaaca

SEQ ID NO: 1391748 - RNA, 19 nt, Artificial Sequence
  Description of Artificial Sequence: Synthetic oligonucleotide
uuacaacgacacaagaagg

SEQ ID NO: 1391749 - RNA, 19 nt, Artificial Sequence
  Description of Artificial Sequence: Synthetic oligonucleotide
ugagucucaguacagagcu

SEQ ID NO: 1391750 - RNA, 19 nt, Artificial Sequence
  Description of Artificial Sequence: Synthetic oligonucleotide
uaaugacagccgcagaucg

SEQ ID NO: 1391751 - RNA, 19 nt, Artificial Sequence
  Description of Artificial Sequence: Synthetic oligonucleotide
aaagggagcauccuggggu

SEQ ID NO: 1391752 - RNA, 19 nt, Artificial Sequence
  Description of Artificial Sequence: Synthetic oligonucleotide
aagaaggucccauaggagu

SEQ ID NO: 1391753 - RNA, 19 nt, Artificial Sequence
  Description of Artificial Sequence: Synthetic oligonucleotide
aacagucaccccucaaccc

SEQ ID NO: 1391754 - RNA, 19 nt, Artificial Sequence
  Description of Artificial Sequence: Synthetic oligonucleotide
uccuuaagcuaugagaggg

SEQ ID NO: 1391755 - RNA, 19 nt, Artificial Sequence
  Description of Artificial Sequence: Synthetic oligonucleotide
uucgagacagggcagaagc

SEQ ID NO: 1391756 - RNA, 19 nt, Artificial Sequence
  Description of Artificial Sequence: Synthetic oligonucleotide
agaacagucaccccucaac

SEQ ID NO: 1391757 - RNA, 19 nt, Artificial Sequence
  Description of Artificial Sequence: Synthetic oligonucleotide
agcagcguugcucacaugg

SEQ ID NO: 1391758 - RNA, 19 nt, Artificial Sequence
  Description of Artificial Sequence: Synthetic oligonucleotide
agcgaaaagagccuggcag

SEQ ID NO: 1391759 - RNA, 19 nt, Artificial Sequence
  Description of Artificial Sequence: Synthetic oligonucleotide
guugauuugccuaauguag

SEQ ID NO: 1391760 - RNA, 19 nt, Artificial Sequence
  Description of Artificial Sequence: Synthetic oligonucleotide
gacacagcgauacuggcag

SEQ ID NO: 1391761 - RNA, 19 nt, Artificial Sequence
  Description of Artificial Sequence: Synthetic oligonucleotide
auuugccuaauguagaagu

SEQ ID NO: 1391762 - RNA, 19 nt, Artificial Sequence
  Description of Artificial Sequence: Synthetic oligonucleotide
aacgacacaagaagguccc

SEQ ID NO: 1391763 - RNA, 19 nt, Artificial Sequence
  Description of Artificial Sequence: Synthetic oligonucleotide
gaucauuaaugacagccgc

SEQ ID NO: 1391764 - RNA, 19 nt, Artificial Sequence
  Description of Artificial Sequence: Synthetic oligonucleotide
cauaagagaguucauggug

SEQ ID NO: 1391765 - RNA, 19 nt, Artificial Sequence
  Description of Artificial Sequence: Synthetic oligonucleotide
aacuggaguagcugcacuc

SEQ ID NO: 1391766 - RNA, 19 nt, Artificial Sequence
  Description of Artificial Sequence: Synthetic oligonucleotide
aagacggugagucucagua

SEQ ID NO: 1391767 - RNA, 19 nt, Artificial Sequence
  Description of Artificial Sequence: Synthetic oligonucleotide
ugcauugguaggaaccagg

SEQ ID NO: 1391768 - RNA, 19 nt, Artificial Sequence
  Description of Artificial Sequence: Synthetic oligonucleotide
uuggacauagggcuccacg

SEQ ID NO: 1391769 - RNA, 19 nt, Artificial Sequence
  Description of Artificial Sequence: Synthetic oligonucleotide
ucauuaaugacagccgcag

SEQ ID NO: 1391770 - RNA, 19 nt, Artificial Sequence
  Description of Artificial Sequence: Synthetic oligonucleotide
uaagcuaugagagggagaa

SEQ ID NO: 1391771 - RNA, 19 nt, Artificial Sequence
  Description of Artificial Sequence: Synthetic oligonucleotide
aauccuguggagacgcugc

SEQ ID NO: 1391772 - RNA, 19 nt, Artificial Sequence
  Description of Artificial Sequence: Synthetic oligonucleotide
agaacgguuguuaggaccc

SEQ ID NO: 1391773 - RNA, 19 nt, Artificial Sequence
  Description of Artificial Sequence: Synthetic oligonucleotide
cuuuaagcagaacagucac

SEQ ID NO: 1391774 - RNA, 19 nt, Artificial Sequence
  Description of Artificial Sequence: Synthetic oligonucleotide
uugguuacaacgacacaag

SEQ ID NO: 1391775 - RNA, 19 nt, Artificial Sequence
  Description of Artificial Sequence: Synthetic oligonucleotide
acuggugugcaccuguuuc

SEQ ID NO: 1391776 - RNA, 19 nt, Artificial Sequence
  Description of Artificial Sequence: Synthetic oligonucleotide
aucgaugcuggcaauaucg

SEQ ID NO: 1391777 - RNA, 19 nt, Artificial Sequence
  Description of Artificial Sequence: Synthetic oligonucleotide
ugaugcauuucauuucgcc

SEQ ID NO: 1391778 - RNA, 19 nt, Artificial Sequence
  Description of Artificial Sequence: Synthetic oligonucleotide
auguagaucauuaaugaca

SEQ ID NO: 1391779 - RNA, 19 nt, Artificial Sequence
  Description of Artificial Sequence: Synthetic oligonucleotide
auguccacgcauucgggcc

SEQ ID NO: 1391780 - RNA, 19 nt, Artificial Sequence
  Description of Artificial Sequence: Synthetic oligonucleotide
ugccuaauguagaaguccc

SEQ ID NO: 1391781 - RNA, 19 nt, Artificial Sequence
  Description of Artificial Sequence: Synthetic oligonucleotide
agcuaugagagggagaaag

SEQ ID NO: 1391782 - RNA, 19 nt, Artificial Sequence
  Description of Artificial Sequence: Synthetic oligonucleotide
uagugguugaugcauuuca

SEQ ID NO: 1391783 - RNA, 19 nt, Artificial Sequence
  Description of Artificial Sequence: Synthetic oligonucleotide
cagguucacacaucgaugc

SEQ ID NO: 1391784 - RNA, 19 nt, Artificial Sequence
  Description of Artificial Sequence: Synthetic oligonucleotide
gaucugaaaggcauuguag

SEQ ID NO: 1391785 - RNA, 19 nt, Artificial Sequence
  Description of Artificial Sequence: Synthetic oligonucleotide
uaggcaccaggguagacgg

SEQ ID NO: 1391786 - RNA, 19 nt, Artificial Sequence
  Description of Artificial Sequence: Synthetic oligonucleotide
cucaguacagagcuggccc

SEQ ID NO: 1391787 - RNA, 19 nt, Artificial Sequence
  Description of Artificial Sequence: Synthetic oligonucleotide
gaacagucaccccucaacc

SEQ ID NO: 1391788 - RNA, 19 nt, Artificial Sequence
  Description of Artificial Sequence: Synthetic oligonucleotide
agagaguucauggugacca

SEQ ID NO: 1391789 - RNA, 19 nt, Artificial Sequence
  Description of Artificial Sequence: Synthetic oligonucleotide
augcauuucauuucgcccu

SEQ ID NO: 1391790 - RNA, 19 nt, Artificial Sequence
  Description of Artificial Sequence: Synthetic oligonucleotide
uagcucauaagagaguuca

SEQ ID NO: 1391791 - RNA, 19 nt, Artificial Sequence
  Description of Artificial Sequence: Synthetic oligonucleotide
cucuuuaagcagaacaguc

SEQ ID NO: 1391792 - RNA, 19 nt, Artificial Sequence
  Description of Artificial Sequence: Synthetic oligonucleotide
auagccaucuguacauucc

SEQ ID NO: 1391793 - RNA, 19 nt, Artificial Sequence
  Description of Artificial Sequence: Synthetic oligonucleotide
acaagaacgguuguuagga

SEQ ID NO: 1391794 - RNA, 19 nt, Artificial Sequence
  Description of Artificial Sequence: Synthetic oligonucleotide
ucgauaucacugcaggaga

SEQ ID NO: 1391795 - RNA, 19 nt, Artificial Sequence
  Description of Artificial Sequence: Synthetic oligonucleotide
uguuucacacucgucaaug

SEQ ID NO: 1391796 - RNA, 19 nt, Artificial Sequence
  Description of Artificial Sequence: Synthetic oligonucleotide
ucaugcaaagccugggcgc

SEQ ID NO: 1391797 - RNA, 19 nt, Artificial Sequence
  Description of Artificial Sequence: Synthetic oligonucleotide
agaucauuaaugacagccg

SEQ ID NO: 1391798 - RNA, 19 nt, Artificial Sequence
  Description of Artificial Sequence: Synthetic oligonucleotide
ucugcaggcacacuucgcu

SEQ ID NO: 1391799 - RNA, 19 nt, Artificial Sequence
  Description of Artificial Sequence: Synthetic oligonucleotide
cuucagaagguguaggcuc

SEQ ID NO: 1391800 - RNA, 19 nt, Artificial Sequence
  Description of Artificial Sequence: Synthetic oligonucleotide
agguuugggccucagaaca

SEQ ID NO: 1391801 - RNA, 19 nt, Artificial Sequence
  Description of Artificial Sequence: Synthetic oligonucleotide
aagagaguucauggugacc

SEQ ID NO: 1391802 - RNA, 19 nt, Artificial Sequence
  Description of Artificial Sequence: Synthetic oligonucleotide
guuaugacagucuuggcua

SEQ ID NO: 1391803 - RNA, 19 nt, Artificial Sequence
  Description of Artificial Sequence: Synthetic oligonucleotide
ucgguagcgacacucgucu

SEQ ID NO: 1391804 - RNA, 19 nt, Artificial Sequence
  Description of Artificial Sequence: Synthetic oligonucleotide
gucccauaggaguugaagc

SEQ ID NO: 1391805 - RNA, 19 nt, Artificial Sequence
  Description of Artificial Sequence: Synthetic oligonucleotide
cuaugagagggagaaagag

SEQ ID NO: 1391806 - RNA, 19 nt, Artificial Sequence
  Description of Artificial Sequence: Synthetic oligonucleotide
aggugcauugguaggaacc

SEQ ID NO: 1391807 - RNA, 19 nt, Artificial Sequence
  Description of Artificial Sequence: Synthetic oligonucleotide
uugccuaauguagaagucc

SEQ ID NO: 1391808 - RNA, 19 nt, Artificial Sequence
  Description of Artificial Sequence: Synthetic oligonucleotide
aguaaagacccgggaaggc

SEQ ID NO: 1391809 - RNA, 19 nt, Artificial Sequence
  Description of Artificial Sequence: Synthetic oligonucleotide
uucgccauguagaucauua

SEQ ID NO: 1391810 - RNA, 19 nt, Artificial Sequence
  Description of Artificial Sequence: Synthetic oligonucleotide
gacauuguugauuugccua

SEQ ID NO: 1391811 - RNA, 19 nt, Artificial Sequence
  Description of Artificial Sequence: Synthetic oligonucleotide
uagcggugcacaauggaug

SEQ ID NO: 1391812 - RNA, 19 nt, Artificial Sequence
  Description of Artificial Sequence: Synthetic oligonucleotide
uuugccuaauguagaaguc

SEQ ID NO: 1391813 - RNA, 19 nt, Artificial Sequence
  Description of Artificial Sequence: Synthetic oligonucleotide
uuaagcuaugagagggaga

SEQ ID NO: 1391814 - RNA, 19 nt, Artificial Sequence
  Description of Artificial Sequence: Synthetic oligonucleotide
ucacauggggcucccaugu

SEQ ID NO: 1391815 - RNA, 19 nt, Artificial Sequence
  Description of Artificial Sequence: Synthetic oligonucleotide
auaagagaguucaugguga

SEQ ID NO: 1391816 - RNA, 19 nt, Artificial Sequence
  Description of Artificial Sequence: Synthetic oligonucleotide
uuaugacagucuuggcuag

SEQ ID NO: 1391817 - RNA, 19 nt, Artificial Sequence
  Description of Artificial Sequence: Synthetic oligonucleotide
guucacacaucgaugcugg

SEQ ID NO: 1391818 - RNA, 19 nt, Artificial Sequence
  Description of Artificial Sequence: Synthetic oligonucleotide
cugcgucccacucauagcc

SEQ ID NO: 1391819 - RNA, 19 nt, Artificial Sequence
  Description of Artificial Sequence: Synthetic oligonucleotide
gcuccuuaagcuaugagag

SEQ ID NO: 1391820 - RNA, 19 nt, Artificial Sequence
  Description of Artificial Sequence: Synthetic oligonucleotide
uuaggacccagcuggaauc

SEQ ID NO: 1391821 - RNA, 19 nt, Artificial Sequence
  Description of Artificial Sequence: Synthetic oligonucleotide
cuuaagcuaugagagggag

SEQ ID NO: 1391822 - RNA, 19 nt, Artificial Sequence
  Description of Artificial Sequence: Synthetic oligonucleotide
cacaagaaggucccauagg

SEQ ID NO: 1391823 - RNA, 19 nt, Artificial Sequence
  Description of Artificial Sequence: Synthetic oligonucleotide
guaggaaccaggcagguua

SEQ ID NO: 1391824 - RNA, 19 nt, Artificial Sequence
  Description of Artificial Sequence: Synthetic oligonucleotide
gauaucacugcaggagaag

SEQ ID NO: 1391825 - RNA, 19 nt, Artificial Sequence
  Description of Artificial Sequence: Synthetic oligonucleotide
gguguaggcucccacaaag

SEQ ID NO: 1391826 - RNA, 19 nt, Artificial Sequence
  Description of Artificial Sequence: Synthetic oligonucleotide
gauuugccuaauguagaag

SEQ ID NO: 1391827 - RNA, 19 nt, Artificial Sequence
  Description of Artificial Sequence: Synthetic oligonucleotide
agcaguaaagacccgggaa

SEQ ID NO: 1391828 - RNA, 19 nt, Artificial Sequence
  Description of Artificial Sequence: Synthetic oligonucleotide
uccuucacaucauugucuc

SEQ ID NO: 1391829 - RNA, 19 nt, Artificial Sequence
  Description of Artificial Sequence: Synthetic oligonucleotide
cucaucgauaucacugcag

SEQ ID NO: 1391830 - RNA, 19 nt, Artificial Sequence
  Description of Artificial Sequence: Synthetic oligonucleotide
gcaguaaagacccgggaag

SEQ ID NO: 1391831 - RNA, 19 nt, Artificial Sequence
  Description of Artificial Sequence: Synthetic oligonucleotide
aggcauuguaggcaccagg

SEQ ID NO: 1391832 - RNA, 19 nt, Artificial Sequence
  Description of Artificial Sequence: Synthetic oligonucleotide
gacggugagucucaguaca

SEQ ID NO: 1391833 - RNA, 19 nt, Artificial Sequence
  Description of Artificial Sequence: Synthetic oligonucleotide
uagggcgacagucaugcaa

SEQ ID NO: 1391834 - RNA, 19 nt, Artificial Sequence
  Description of Artificial Sequence: Synthetic oligonucleotide
ugcaccuguuucacacucg

SEQ ID NO: 1391835 - RNA, 19 nt, Artificial Sequence
  Description of Artificial Sequence: Synthetic oligonucleotide
uaagagaguucauggugac

SEQ ID NO: 1391836 - RNA, 19 nt, Artificial Sequence
  Description of Artificial Sequence: Synthetic oligonucleotide
uuccgaauccuguggagac

SEQ ID NO: 1391837 - RNA, 19 nt, Artificial Sequence
  Description of Artificial Sequence: Synthetic oligonucleotide
agcguugcucacauggggc

SEQ ID NO: 1391838 - RNA, 19 nt, Artificial Sequence
  Description of Artificial Sequence: Synthetic oligonucleotide
aucccggugcaguucauag

SEQ ID NO: 1391839 - RNA, 19 nt, Artificial Sequence
  Description of Artificial Sequence: Synthetic oligonucleotide
ggugagucucaguacagag

SEQ ID NO: 1391840 - RNA, 19 nt, Artificial Sequence
  Description of Artificial Sequence: Synthetic oligonucleotide
acggagguugccuggaucu

SEQ ID NO: 1391841 - RNA, 19 nt, Artificial Sequence
  Description of Artificial Sequence: Synthetic oligonucleotide
cacaauggaugaagguugc

SEQ ID NO: 1391842 - RNA, 19 nt, Artificial Sequence
  Description of Artificial Sequence: Synthetic oligonucleotide
caggcacucguugacaucc

SEQ ID NO: 1391843 - RNA, 19 nt, Artificial Sequence
  Description of Artificial Sequence: Synthetic oligonucleotide
ugaaacacgucugcaggca

SEQ ID NO: 1391844 - RNA, 19 nt, Artificial Sequence
  Description of Artificial Sequence: Synthetic oligonucleotide
agguuaugacagucuuggc

SEQ ID NO: 1391845 - RNA, 19 nt, Artificial Sequence
  Description of Artificial Sequence: Synthetic oligonucleotide
uuaaugacagccgcagauc

SEQ ID NO: 1391846 - RNA, 19 nt, Artificial Sequence
  Description of Artificial Sequence: Synthetic oligonucleotide
gaagcggcccggcucauug

SEQ ID NO: 1391847 - RNA, 19 nt, Artificial Sequence
  Description of Artificial Sequence: Synthetic oligonucleotide
agagcaguaaagacccggg

SEQ ID NO: 1391848 - RNA, 19 nt, Artificial Sequence
  Description of Artificial Sequence: Synthetic oligonucleotide
auagccuugguuacaacga

SEQ ID NO: 1391849 - RNA, 19 nt, Artificial Sequence
  Description of Artificial Sequence: Synthetic oligonucleotide
agaacacuggugugcaccu

SEQ ID NO: 1391850 - RNA, 19 nt, Artificial Sequence
  Description of Artificial Sequence: Synthetic oligonucleotide
ccgauagcucauaagagag

SEQ ID NO: 1391851 - RNA, 19 nt, Artificial Sequence
  Description of Artificial Sequence: Synthetic oligonucleotide
uguccacgcauucgggccc

SEQ ID NO: 1391852 - RNA, 19 nt, Artificial Sequence
  Description of Artificial Sequence: Synthetic oligonucleotide
agcggugcacaauggauga

SEQ ID NO: 1391853 - RNA, 19 nt, Artificial Sequence
  Description of Artificial Sequence: Synthetic oligonucleotide
cuucgcucugaggugaugc

SEQ ID NO: 1391854 - RNA, 19 nt, Artificial Sequence
  Description of Artificial Sequence: Synthetic oligonucleotide
gacaucccggcagugcugg

SEQ ID NO: 1391855 - RNA, 19 nt, Artificial Sequence
  Description of Artificial Sequence: Synthetic oligonucleotide
cacaaagacggugagucuc

SEQ ID NO: 1391856 - RNA, 19 nt, Artificial Sequence
  Description of Artificial Sequence: Synthetic oligonucleotide
guacauuccguguagcugu

SEQ ID NO: 1391857 - RNA, 19 nt, Artificial Sequence
  Description of Artificial Sequence: Synthetic oligonucleotide
gcgaaaagagccuggcagg

SEQ ID NO: 1391858 - RNA, 19 nt, Artificial Sequence
  Description of Artificial Sequence: Synthetic oligonucleotide
ucugcgucccacucauagc

SEQ ID NO: 1391859 - RNA, 19 nt, Artificial Sequence
  Description of Artificial Sequence: Synthetic oligonucleotide
gaaacacgucugcaggcac

SEQ ID NO: 1391860 - RNA, 19 nt, Artificial Sequence
  Description of Artificial Sequence: Synthetic oligonucleotide
uuauuguccuucacaucau

SEQ ID NO: 1391861 - RNA, 19 nt, Artificial Sequence
  Description of Artificial Sequence: Synthetic oligonucleotide
uaugacagucuuggcuagg

SEQ ID NO: 1391862 - RNA, 19 nt, Artificial Sequence
  Description of Artificial Sequence: Synthetic oligonucleotide
auccacacaagaacgguug

SEQ ID NO: 1391863 - RNA, 19 nt, Artificial Sequence
  Description of Artificial Sequence: Synthetic oligonucleotide
aucacugcaggagaagcca

SEQ ID NO: 1391864 - RNA, 19 nt, Artificial Sequence
  Description of Artificial Sequence: Synthetic oligonucleotide
ggcuccuuaagcuaugaga

SEQ ID NO: 1391865 - RNA, 19 nt, Artificial Sequence
  Description of Artificial Sequence: Synthetic oligonucleotide
uccgacacuuggacauagg

SEQ ID NO: 1391866 - RNA, 19 nt, Artificial Sequence
  Description of Artificial Sequence: Synthetic oligonucleotide
cuugugggcagugacagga

SEQ ID NO: 1391867 - RNA, 19 nt, Artificial Sequence
  Description of Artificial Sequence: Synthetic oligonucleotide
cacacuggcagcgaaaaga

SEQ ID NO: 1391868 - RNA, 19 nt, Artificial Sequence
  Description of Artificial Sequence: Synthetic oligonucleotide
ucggggauggucaggcacu

SEQ ID NO: 1391869 - RNA, 19 nt, Artificial Sequence
  Description of Artificial Sequence: Synthetic oligonucleotide
cagcguugcucacaugggg

SEQ ID NO: 1391870 - RNA, 19 nt, Artificial Sequence
  Description of Artificial Sequence: Synthetic oligonucleotide
gagacgcugcucccaagag

SEQ ID NO: 1391871 - RNA, 19 nt, Artificial Sequence
  Description of Artificial Sequence: Synthetic oligonucleotide
gccuucgccauguagauca

SEQ ID NO: 1391872 - RNA, 19 nt, Artificial Sequence
  Description of Artificial Sequence: Synthetic oligonucleotide
aacgguugguguccacaca

SEQ ID NO: 1391873 - RNA, 19 nt, Artificial Sequence
  Description of Artificial Sequence: Synthetic oligonucleotide
gugggcaaggauuggggug

SEQ ID NO: 1391874 - RNA, 19 nt, Artificial Sequence
  Description of Artificial Sequence: Synthetic oligonucleotide
cacucgucaaugucuuggc

SEQ ID NO: 1391875 - RNA, 19 nt, Artificial Sequence
  Description of Artificial Sequence: Synthetic oligonucleotide
gaucgaggcagacacaaau

SEQ ID NO: 1391876 - RNA, 19 nt, Artificial Sequence
  Description of Artificial Sequence: Synthetic oligonucleotide
agacagggcagaagcagcg

SEQ ID NO: 1391877 - RNA, 19 nt, Artificial Sequence
  Description of Artificial Sequence: Synthetic oligonucleotide
ucgagacagggcagaagca

SEQ ID NO: 1391878 - RNA, 19 nt, Artificial Sequence
  Description of Artificial Sequence: Synthetic oligonucleotide
uggcaauaucgguagcgac

SEQ ID NO: 1391879 - RNA, 19 nt, Artificial Sequence
  Description of Artificial Sequence: Synthetic oligonucleotide
gaauccuguggagacgcug

SEQ ID NO: 1391880 - RNA, 19 nt, Artificial Sequence
  Description of Artificial Sequence: Synthetic oligonucleotide
cucccaagagcaacagcag

SEQ ID NO: 1391881 - RNA, 19 nt, Artificial Sequence
  Description of Artificial Sequence: Synthetic oligonucleotide
gcuagggcgacagucaugc

SEQ ID NO: 1391882 - RNA, 19 nt, Artificial Sequence
  Description of Artificial Sequence: Synthetic oligonucleotide
gaagcagcgguuguccgac

SEQ ID NO: 1391883 - RNA, 19 nt, Artificial Sequence
  Description of Artificial Sequence: Synthetic oligonucleotide
ggcccgauagcucauaaga

SEQ ID NO: 1391884 - RNA, 19 nt, Artificial Sequence
  Description of Artificial Sequence: Synthetic oligonucleotide
gggucguugacuccggcag

SEQ ID NO: 1391885 - RNA, 19 nt, Artificial Sequence
  Description of Artificial Sequence: Synthetic oligonucleotide
acucaucgauaucacugca

SEQ ID NO: 1391886 - RNA, 19 nt, Artificial Sequence
  Description of Artificial Sequence: Synthetic oligonucleotide
caacgguugguguccacac

SEQ ID NO: 1391887 - RNA, 19 nt, Artificial Sequence
  Description of Artificial Sequence: Synthetic oligonucleotide
cauuguaggcaccagggua

SEQ ID NO: 1391888 - RNA, 19 nt, Artificial Sequence
  Description of Artificial Sequence: Synthetic oligonucleotide
gauagcucauaagagaguu

SEQ ID NO: 1391889 - RNA, 19 nt, Artificial Sequence
  Description of Artificial Sequence: Synthetic oligonucleotide
cugaaaggcauuguaggca

SEQ ID NO: 1391890 - RNA, 19 nt, Artificial Sequence
  Description of Artificial Sequence: Synthetic oligonucleotide
auagcucauaagagaguuc

SEQ ID NO: 1391891 - RNA, 19 nt, Artificial Sequence
  Description of Artificial Sequence: Synthetic oligonucleotide
uauuguccuucacaucauu

SEQ ID NO: 1391892 - RNA, 19 nt, Artificial Sequence
  Description of Artificial Sequence: Synthetic oligonucleotide
acgguuguuaggacccagc

SEQ ID NO: 1391893 - RNA, 19 nt, Artificial Sequence
  Description of Artificial Sequence: Synthetic oligonucleotide
cauggggcucccaugucac

SEQ ID NO: 1391894 - RNA, 19 nt, Artificial Sequence
  Description of Artificial Sequence: Synthetic oligonucleotide
gauacuggcagagguaacu

SEQ ID NO: 1391895 - RNA, 19 nt, Artificial Sequence
  Description of Artificial Sequence: Synthetic oligonucleotide
cagaagcagcgguuguccg

SEQ ID NO: 1391896 - RNA, 19 nt, Artificial Sequence
  Description of Artificial Sequence: Synthetic oligonucleotide
guugacaucccggcagugc

SEQ ID NO: 1391897 - RNA, 19 nt, Artificial Sequence
  Description of Artificial Sequence: Synthetic oligonucleotide
uguccggcucuuccgaauc

SEQ ID NO: 1391898 - RNA, 19 nt, Artificial Sequence
  Description of Artificial Sequence: Synthetic oligonucleotide
auacuggcagagguaacug

SEQ ID NO: 1391899 - RNA, 19 nt, Artificial Sequence
  Description of Artificial Sequence: Synthetic oligonucleotide
cucggggauggucaggcac

SEQ ID NO: 1391900 - RNA, 19 nt, Artificial Sequence
  Description of Artificial Sequence: Synthetic oligonucleotide
aaggcauuguaggcaccag

SEQ ID NO: 1391901 - RNA, 19 nt, Artificial Sequence
  Description of Artificial Sequence: Synthetic oligonucleotide
cccggugcaguucauagcc

SEQ ID NO: 1391902 - RNA, 19 nt, Artificial Sequence
  Description of Artificial Sequence: Synthetic oligonucleotide
gaaggucccauaggaguug

SEQ ID NO: 1391903 - RNA, 19 nt, Artificial Sequence
  Description of Artificial Sequence: Synthetic oligonucleotide
cugucacuggccuggcaag

SEQ ID NO: 1391904 - RNA, 19 nt, Artificial Sequence
  Description of Artificial Sequence: Synthetic oligonucleotide
gcgguuguccgacacuugg

SEQ ID NO: 1391905 - RNA, 19 nt, Artificial Sequence
  Description of Artificial Sequence: Synthetic oligonucleotide
cucacauggggcucccaug

SEQ ID NO: 1391906 - RNA, 19 nt, Artificial Sequence
  Description of Artificial Sequence: Synthetic oligonucleotide
gagggccuucgccauguag

SEQ ID NO: 1391907 - RNA, 19 nt, Artificial Sequence
  Description of Artificial Sequence: Synthetic oligonucleotide
caagaacgguuguuaggac

SEQ ID NO: 1391908 - RNA, 19 nt, Artificial Sequence
  Description of Artificial Sequence: Synthetic oligonucleotide
acauccacacaagaacggu

SEQ ID NO: 1391909 - RNA, 19 nt, Artificial Sequence
  Description of Artificial Sequence: Synthetic oligonucleotide
aucgguagcgacacucguc

SEQ ID NO: 1391910 - RNA, 19 nt, Artificial Sequence
  Description of Artificial Sequence: Synthetic oligonucleotide
gacacaagaaggucccaua

SEQ ID NO: 1391911 - RNA, 19 nt, Artificial Sequence
  Description of Artificial Sequence: Synthetic oligonucleotide
cacagcgauacuggcagag

SEQ ID NO: 1391912 - RNA, 19 nt, Artificial Sequence
  Description of Artificial Sequence: Synthetic oligonucleotide
ugugcaccuguuucacacu

SEQ ID NO: 1391913 - RNA, 19 nt, Artificial Sequence
  Description of Artificial Sequence: Synthetic oligonucleotide
ucacuggccuggcaaggac

SEQ ID NO: 1391914 - RNA, 19 nt, Artificial Sequence
  Description of Artificial Sequence: Synthetic oligonucleotide
cauggaaguucacacaggu

SEQ ID NO: 1391915 - RNA, 19 nt, Artificial Sequence
  Description of Artificial Sequence: Synthetic oligonucleotide
cacgcaacgguuggugucc

SEQ ID NO: 1391916 - RNA, 19 nt, Artificial Sequence
  Description of Artificial Sequence: Synthetic oligonucleotide
cacuuggacauagggcucc

SEQ ID NO: 1391917 - RNA, 19 nt, Artificial Sequence
  Description of Artificial Sequence: Synthetic oligonucleotide
uuguuaggacccagcugga

SEQ ID NO: 1391918 - RNA, 19 nt, Artificial Sequence
  Description of Artificial Sequence: Synthetic oligonucleotide
acuggaguagcugcacuca

SEQ ID NO: 1391919 - RNA, 19 nt, Artificial Sequence
  Description of Artificial Sequence: Synthetic oligonucleotide
agggccuucgccauguaga

SEQ ID NO: 1391920 - RNA, 19 nt, Artificial Sequence
  Description of Artificial Sequence: Synthetic oligonucleotide
cuggugggcaaggauuggg

SEQ ID NO: 1391921 - RNA, 19 nt, Artificial Sequence
  Description of Artificial Sequence: Synthetic oligonucleotide
gcucuuccgaauccugugg

SEQ ID NO: 1391922 - RNA, 19 nt, Artificial Sequence
  Description of Artificial Sequence: Synthetic oligonucleotide
guagcgacacucgucuaug

SEQ ID NO: 1391923 - RNA, 19 nt, Artificial Sequence
  Description of Artificial Sequence: Synthetic oligonucleotide
uccacgcaacgguuggugu

SEQ ID NO: 1391924 - RNA, 19 nt, Artificial Sequence
  Description of Artificial Sequence: Synthetic oligonucleotide
gguucacacaucgaugcug

SEQ ID NO: 1391925 - RNA, 19 nt, Artificial Sequence
  Description of Artificial Sequence: Synthetic oligonucleotide
gguccugucacuggccugg

SEQ ID NO: 1391926 - RNA, 19 nt, Artificial Sequence
  Description of Artificial Sequence: Synthetic oligonucleotide
ucccggugcaguucauagc

SEQ ID NO: 1391927 - RNA, 19 nt, Artificial Sequence
  Description of Artificial Sequence: Synthetic oligonucleotide
cagcacggaucugaaaggc

SEQ ID NO: 1391928 - RNA, 19 nt, Artificial Sequence
  Description of Artificial Sequence: Synthetic oligonucleotide
gcaauaucgguagcgacac

SEQ ID NO: 1391929 - RNA, 19 nt, Artificial Sequence
  Description of Artificial Sequence: Synthetic oligonucleotide
aggguagacggagguugcc

SEQ ID NO: 1391930 - RNA, 19 nt, Artificial Sequence
  Description of Artificial Sequence: Synthetic oligonucleotide
caggguagacggagguugc

SEQ ID NO: 1391931 - RNA, 19 nt, Artificial Sequence
  Description of Artificial Sequence: Synthetic oligonucleotide
ccauaggaguugaagcagc

SEQ ID NO: 1391932 - RNA, 19 nt, Artificial Sequence
  Description of Artificial Sequence: Synthetic oligonucleotide
guaacuggaguagcugcac

SEQ ID NO: 1391933 - RNA, 19 nt, Artificial Sequence
  Description of Artificial Sequence: Synthetic oligonucleotide
ugcgucccacucauagcca

SEQ ID NO: 1391934 - RNA, 19 nt, Artificial Sequence
  Description of Artificial Sequence: Synthetic oligonucleotide
ggaguugaagcagcguugc

SEQ ID NO: 1391935 - RNA, 19 nt, Artificial Sequence
  Description of Artificial Sequence: Synthetic oligonucleotide
ucccuuuauuguccuucac

SEQ ID NO: 1391936 - RNA, 19 nt, Artificial Sequence
  Description of Artificial Sequence: Synthetic oligonucleotide
aggcuccuuaagcuaugag

SEQ ID NO: 1391937 - RNA, 19 nt, Artificial Sequence
  Description of Artificial Sequence: Synthetic oligonucleotide
gguuacaacgacacaagaa

SEQ ID NO: 1391938 - RNA, 19 nt, Artificial Sequence
  Description of Artificial Sequence: Synthetic oligonucleotide
ucgccauguagaucauuaa

SEQ ID NO: 1391939 - RNA, 19 nt, Artificial Sequence
  Description of Artificial Sequence: Synthetic oligonucleotide
gacggagguugccuggauc

SEQ ID NO: 1391940 - RNA, 19 nt, Artificial Sequence
  Description of Artificial Sequence: Synthetic oligonucleotide
agguucacacaucgaugcu

SEQ ID NO: 1391941 - RNA, 19 nt, Artificial Sequence
  Description of Artificial Sequence: Synthetic oligonucleotide
auaggaguugaagcagcgu

SEQ ID NO: 1391942 - RNA, 19 nt, Artificial Sequence
  Description of Artificial Sequence: Synthetic oligonucleotide
acacuuggacauagggcuc

SEQ ID NO: 1391943 - RNA, 19 nt, Artificial Sequence
  Description of Artificial Sequence: Synthetic oligonucleotide
acgcauucgggcccaauuu

SEQ ID NO: 1391944 - RNA, 19 nt, Artificial Sequence
  Description of Artificial Sequence: Synthetic oligonucleotide
caucgauaucacugcagga

SEQ ID NO: 1391945 - RNA, 19 nt, Artificial Sequence
  Description of Artificial Sequence: Synthetic oligonucleotide
gcacacuucgcucugaggu

SEQ ID NO: 1391946 - RNA, 19 nt, Artificial Sequence
  Description of Artificial Sequence: Synthetic oligonucleotide
agggcagaagcagcgguug

SEQ ID NO: 1391947 - RNA, 19 nt, Artificial Sequence
  Description of Artificial Sequence: Synthetic oligonucleotide
cuggugugcaccuguuuca

SEQ ID NO: 1391948 - RNA, 19 nt, Artificial Sequence
  Description of Artificial Sequence: Synthetic oligonucleotide
uacauuccguguagcuguc

SEQ ID NO: 1391949 - RNA, 19 nt, Artificial Sequence
  Description of Artificial Sequence: Synthetic oligonucleotide
cauugguaggaaccaggca

SEQ ID NO: 1391950 - RNA, 19 nt, Artificial Sequence
  Description of Artificial Sequence: Synthetic oligonucleotide
cauuucgcccuugcaggcc

SEQ ID NO: 1391951 - RNA, 19 nt, Artificial Sequence
  Description of Artificial Sequence: Synthetic oligonucleotide
gaagcagcguugcucacau

SEQ ID NO: 1391952 - RNA, 19 nt, Artificial Sequence
  Description of Artificial Sequence: Synthetic oligonucleotide
cacacaagaacgguuguua

SEQ ID NO: 1391953 - RNA, 19 nt, Artificial Sequence
  Description of Artificial Sequence: Synthetic oligonucleotide
gcauugguaggaaccaggc

SEQ ID NO: 1391954 - RNA, 19 nt, Artificial Sequence
  Description of Artificial Sequence: Synthetic oligonucleotide
guuaggacccagcuggaau

SEQ ID NO: 1391955 - RNA, 19 nt, Artificial Sequence
  Description of Artificial Sequence: Synthetic oligonucleotide
uggcuagggcgacagucau

SEQ ID NO: 1391956 - RNA, 19 nt, Artificial Sequence
  Description of Artificial Sequence: Synthetic oligonucleotide
guucgagacagggcagaag

SEQ ID NO: 1391957 - RNA, 19 nt, Artificial Sequence
  Description of Artificial Sequence: Synthetic oligonucleotide
cauuaaugacagccgcaga

SEQ ID NO: 1391958 - RNA, 19 nt, Artificial Sequence
  Description of Artificial Sequence: Synthetic oligonucleotide
ggcuccacgcaacgguugg

SEQ ID NO: 1391959 - RNA, 19 nt, Artificial Sequence
  Description of Artificial Sequence: Synthetic oligonucleotide
caggcagguuaugacaguc

SEQ ID NO: 1391960 - RNA, 19 nt, Artificial Sequence
  Description of Artificial Sequence: Synthetic oligonucleotide
gucguugacuccggcagug

SEQ ID NO: 1391961 - RNA, 19 nt, Artificial Sequence
  Description of Artificial Sequence: Synthetic oligonucleotide
agggcgacagucaugcaaa

SEQ ID NO: 1391962 - RNA, 19 nt, Artificial Sequence
  Description of Artificial Sequence: Synthetic oligonucleotide
agugguugaugcauuucau

SEQ ID NO: 1391963 - RNA, 19 nt, Artificial Sequence
  Description of Artificial Sequence: Synthetic oligonucleotide
uguuaggacccagcuggaa

SEQ ID NO: 1391964 - RNA, 19 nt, Artificial Sequence
  Description of Artificial Sequence: Synthetic oligonucleotide
uagcgacacucgucuaugu

SEQ ID NO: 1391965 - RNA, 19 nt, Artificial Sequence
  Description of Artificial Sequence: Synthetic oligonucleotide
cagaucgaggcagacacaa

SEQ ID NO: 1391966 - RNA, 19 nt, Artificial Sequence
  Description of Artificial Sequence: Synthetic oligonucleotide
ggugcauugguaggaacca

SEQ ID NO: 1391967 - RNA, 19 nt, Artificial Sequence
  Description of Artificial Sequence: Synthetic oligonucleotide
ggcacucguugacaucccg

SEQ ID NO: 1391968 - RNA, 19 nt, Artificial Sequence
  Description of Artificial Sequence: Synthetic oligonucleotide
guuucacacucgucaaugu

SEQ ID NO: 1391969 - RNA, 19 nt, Artificial Sequence
  Description of Artificial Sequence: Synthetic oligonucleotide
ccucagaacacuggugugc

SEQ ID NO: 1391970 - RNA, 19 nt, Artificial Sequence
  Description of Artificial Sequence: Synthetic oligonucleotide
uucgcccuugcaggccucg

SEQ ID NO: 1391971 - RNA, 19 nt, Artificial Sequence
  Description of Artificial Sequence: Synthetic oligonucleotide
cagccgcagaucgaggcag

SEQ ID NO: 1391972 - RNA, 19 nt, Artificial Sequence
  Description of Artificial Sequence: Synthetic oligonucleotide
cccgauagcucauaagaga

SEQ ID NO: 1391973 - RNA, 19 nt, Artificial Sequence
  Description of Artificial Sequence: Synthetic oligonucleotide
gugcauugguaggaaccag

SEQ ID NO: 1391974 - RNA, 19 nt, Artificial Sequence
  Description of Artificial Sequence: Synthetic oligonucleotide
cuccacgcaacgguuggug

SEQ ID NO: 1391975 - RNA, 19 nt, Artificial Sequence
  Description of Artificial Sequence: Synthetic oligonucleotide
acaauggaugaagguugcu

SEQ ID NO: 1391976 - RNA, 19 nt, Artificial Sequence
  Description of Artificial Sequence: Synthetic oligonucleotide
auacucccgggguccuguc

SEQ ID NO: 1391977 - RNA, 19 nt, Artificial Sequence
  Description of Artificial Sequence: Synthetic oligonucleotide
ugguaggaaccaggcaggu

SEQ ID NO: 1391978 - RNA, 19 nt, Artificial Sequence
  Description of Artificial Sequence: Synthetic oligonucleotide
ccuggggucguugacuccg

SEQ ID NO: 1391979 - RNA, 19 nt, Artificial Sequence
  Description of Artificial Sequence: Synthetic oligonucleotide
gagaagccaucccggugca

SEQ ID NO: 1391980 - RNA, 19 nt, Artificial Sequence
  Description of Artificial Sequence: Synthetic oligonucleotide
aggaccagcauggcacuga

SEQ ID NO: 1391981 - RNA, 19 nt, Artificial Sequence
  Description of Artificial Sequence: Synthetic oligonucleotide
cuggggucguugacuccgg

SEQ ID NO: 1391982 - RNA, 19 nt, Artificial Sequence
  Description of Artificial Sequence: Synthetic oligonucleotide
uggggucguugacuccggc

SEQ ID NO: 1391983 - RNA, 19 nt, Artificial Sequence
  Description of Artificial Sequence: Synthetic oligonucleotide
agccuugguuacaacgaca

SEQ ID NO: 1391984 - RNA, 19 nt, Artificial Sequence
  Description of Artificial Sequence: Synthetic oligonucleotide
gcccgauagcucauaagag

SEQ ID NO: 1391985 - RNA, 19 nt, Artificial Sequence
  Description of Artificial Sequence: Synthetic oligonucleotide
agguguaggcucccacaaa

SEQ ID NO: 1391986 - RNA, 19 nt, Artificial Sequence
  Description of Artificial Sequence: Synthetic oligonucleotide
ucguugacuccggcagugc

SEQ ID NO: 1391987 - RNA, 19 nt, Artificial Sequence
  Description of Artificial Sequence: Synthetic oligonucleotide
gucuuggcagagccuugug

SEQ ID NO: 1391988 - RNA, 19 nt, Artificial Sequence
  Description of Artificial Sequence: Synthetic oligonucleotide
ggauugggguguugagcag

SEQ ID NO: 1391989 - RNA, 19 nt, Artificial Sequence
  Description of Artificial Sequence: Synthetic oligonucleotide
aucgaggcagacacaaaua

SEQ ID NO: 1391990 - RNA, 19 nt, Artificial Sequence
  Description of Artificial Sequence: Synthetic oligonucleotide
cucacacuggcagcgaaaa

SEQ ID NO: 1391991 - RNA, 19 nt, Artificial Sequence
  Description of Artificial Sequence: Synthetic oligonucleotide
ccuuuauuguccuucacau

SEQ ID NO: 1391992 - RNA, 19 nt, Artificial Sequence
  Description of Artificial Sequence: Synthetic oligonucleotide
gagucucaguacagagcug

SEQ ID NO: 1391993 - RNA, 19 nt, Artificial Sequence
  Description of Artificial Sequence: Synthetic oligonucleotide
guccggcucuuccgaaucc

SEQ ID NO: 1391994 - RNA, 19 nt, Artificial Sequence
  Description of Artificial Sequence: Synthetic oligonucleotide
ccggcucauugacacagcg

SEQ ID NO: 1391995 - RNA, 19 nt, Artificial Sequence
  Description of Artificial Sequence: Synthetic oligonucleotide
uuccagcacggaucugaaa

SEQ ID NO: 1391996 - RNA, 19 nt, Artificial Sequence
  Description of Artificial Sequence: Synthetic oligonucleotide
aggcacucguugacauccc

SEQ ID NO: 1391997 - RNA, 19 nt, Artificial Sequence
  Description of Artificial Sequence: Synthetic oligonucleotide
gcagcgaaaagagccuggc

SEQ ID NO: 1391998 - RNA, 19 nt, Artificial Sequence
  Description of Artificial Sequence: Synthetic oligonucleotide
gcagcguugcucacauggg

SEQ ID NO: 1391999 - RNA, 19 nt, Artificial Sequence
  Description of Artificial Sequence: Synthetic oligonucleotide
ggugcaguucauagccuug

SEQ ID NO: 1392000 - RNA, 19 nt, Artificial Sequence
  Description of Artificial Sequence: Synthetic oligonucleotide
agggagcauccuggggucg

SEQ ID NO: 1392001 - RNA, 19 nt, Artificial Sequence
  Description of Artificial Sequence: Synthetic oligonucleotide
gucucaguacagagcuggc

SEQ ID NO: 1392002 - RNA, 19 nt, Artificial Sequence
  Description of Artificial Sequence: Synthetic oligonucleotide
caccuguuucacacucguc

SEQ ID NO: 1392003 - RNA, 19 nt, Artificial Sequence
  Description of Artificial Sequence: Synthetic oligonucleotide
gcagguuaugacagucuug

SEQ ID NO: 1392004 - RNA, 19 nt, Artificial Sequence
  Description of Artificial Sequence: Synthetic oligonucleotide
aagcuaugagagggagaaa

SEQ ID NO: 1392005 - RNA, 19 nt, Artificial Sequence
  Description of Artificial Sequence: Synthetic oligonucleotide
acacagcgauacuggcaga

SEQ ID NO: 1392006 - RNA, 19 nt, Artificial Sequence
  Description of Artificial Sequence: Synthetic oligonucleotide
agccaucuguacauuccgu

SEQ ID NO: 1392007 - RNA, 19 nt, Artificial Sequence
  Description of Artificial Sequence: Synthetic oligonucleotide
gcuaugagagggagaaaga

SEQ ID NO: 1392008 - RNA, 19 nt, Artificial Sequence
  Description of Artificial Sequence: Synthetic oligonucleotide
cagcgauacuggcagaggu

SEQ ID NO: 1392009 - RNA, 19 nt, Artificial Sequence
  Description of Artificial Sequence: Synthetic oligonucleotide
agcgauacuggcagaggua

SEQ ID NO: 1392010 - RNA, 19 nt, Artificial Sequence
  Description of Artificial Sequence: Synthetic oligonucleotide
cagcgaaaagagccuggca

SEQ ID NO: 1392011 - RNA, 19 nt, Artificial Sequence
  Description of Artificial Sequence: Synthetic oligonucleotide
auggggcucccaugucaca

SEQ ID NO: 1392012 - RNA, 19 nt, Artificial Sequence
  Description of Artificial Sequence: Synthetic oligonucleotide
guagccuugugggcaguga

SEQ ID NO: 1392013 - RNA, 19 nt, Artificial Sequence
  Description of Artificial Sequence: Synthetic oligonucleotide
uguagcuguccggcucuuc

SEQ ID NO: 1392014 - RNA, 19 nt, Artificial Sequence
  Description of Artificial Sequence: Synthetic oligonucleotide
guggagacgcugcucccaa

SEQ ID NO: 1392015 - RNA, 19 nt, Artificial Sequence
  Description of Artificial Sequence: Synthetic oligonucleotide
gccuaauguagaagucccc

SEQ ID NO: 1392016 - RNA, 19 nt, Artificial Sequence
  Description of Artificial Sequence: Synthetic oligonucleotide
cacauggggcucccauguc

SEQ ID NO: 1392017 - RNA, 19 nt, Artificial Sequence
  Description of Artificial Sequence: Synthetic oligonucleotide
aguacagagcuggcccgau

SEQ ID NO: 1392018 - RNA, 19 nt, Artificial Sequence
  Description of Artificial Sequence: Synthetic oligonucleotide
uguccgacacuuggacaua

SEQ ID NO: 1392019 - RNA, 19 nt, Artificial Sequence
  Description of Artificial Sequence: Synthetic oligonucleotide
gguuugggccucagaacac

SEQ ID NO: 1392020 - RNA, 19 nt, Artificial Sequence
  Description of Artificial Sequence: Synthetic oligonucleotide
ccuuaagcuaugagaggga

SEQ ID NO: 1392021 - RNA, 19 nt, Artificial Sequence
  Description of Artificial Sequence: Synthetic oligonucleotide
ucgcccuugcaggccucgg

SEQ ID NO: 1392022 - RNA, 19 nt, Artificial Sequence
  Description of Artificial Sequence: Synthetic oligonucleotide
acuucgcucugaggugaug

SEQ ID NO: 1392023 - RNA, 19 nt, Artificial Sequence
  Description of Artificial Sequence: Synthetic oligonucleotide
ugggcgcacucguccacau

SEQ ID NO: 1392024 - RNA, 19 nt, Artificial Sequence
  Description of Artificial Sequence: Synthetic oligonucleotide
agcucauaagagaguucau

SEQ ID NO: 1392025 - RNA, 19 nt, Artificial Sequence
  Description of Artificial Sequence: Synthetic oligonucleotide
gguagcgacacucgucuau

SEQ ID NO: 1392026 - RNA, 19 nt, Artificial Sequence
  Description of Artificial Sequence: Synthetic oligonucleotide
gcaacgguugguguccaca

SEQ ID NO: 1392027 - RNA, 19 nt, Artificial Sequence
  Description of Artificial Sequence: Synthetic oligonucleotide
agcauggcacugacauugu

SEQ ID NO: 1392028 - RNA, 19 nt, Artificial Sequence
  Description of Artificial Sequence: Synthetic oligonucleotide
ggggucguugacuccggca

SEQ ID NO: 1392029 - RNA, 19 nt, Artificial Sequence
  Description of Artificial Sequence: Synthetic oligonucleotide
ccacgcaacgguugguguc

SEQ ID NO: 1392030 - RNA, 19 nt, Artificial Sequence
  Description of Artificial Sequence: Synthetic oligonucleotide
cguugacuccggcagugcc

SEQ ID NO: 1392031 - RNA, 19 nt, Artificial Sequence
  Description of Artificial Sequence: Synthetic oligonucleotide
cacgucugcaggcacacuu

SEQ ID NO: 1392032 - RNA, 19 nt, Artificial Sequence
  Description of Artificial Sequence: Synthetic oligonucleotide
gggcgacagucaugcaaag

SEQ ID NO: 1392033 - RNA, 19 nt, Artificial Sequence
  Description of Artificial Sequence: Synthetic oligonucleotide
ggagguugccuggaucuga

SEQ ID NO: 1392034 - RNA, 19 nt, Artificial Sequence
  Description of Artificial Sequence: Synthetic oligonucleotide
ggugugcaccuguuucaca

SEQ ID NO: 1392035 - RNA, 19 nt, Artificial Sequence
  Description of Artificial Sequence: Synthetic oligonucleotide
ccagagcaguaaagacccg

SEQ ID NO: 1392036 - RNA, 19 nt, Artificial Sequence
  Description of Artificial Sequence: Synthetic oligonucleotide
cggugcacaauggaugaag

SEQ ID NO: 1392037 - RNA, 19 nt, Artificial Sequence
  Description of Artificial Sequence: Synthetic oligonucleotide
cagaacagucaccccucaa

SEQ ID NO: 1392038 - RNA, 19 nt, Artificial Sequence
  Description of Artificial Sequence: Synthetic oligonucleotide
agcgguuguccgacacuug

SEQ ID NO: 1392039 - RNA, 19 nt, Artificial Sequence
  Description of Artificial Sequence: Synthetic oligonucleotide
agaucgaggcagacacaaa

SEQ ID NO: 1392040 - RNA, 19 nt, Artificial Sequence
  Description of Artificial Sequence: Synthetic oligonucleotide
ggcagguuaugacagucuu

SEQ ID NO: 1392041 - RNA, 19 nt, Artificial Sequence
  Description of Artificial Sequence: Synthetic oligonucleotide
cugucugcgucccacucau

SEQ ID NO: 1392042 - RNA, 19 nt, Artificial Sequence
  Description of Artificial Sequence: Synthetic oligonucleotide
gggguucgagacagggcag

SEQ ID NO: 1392043 - RNA, 19 nt, Artificial Sequence
  Description of Artificial Sequence: Synthetic oligonucleotide
aggacccagcuggaauccu

SEQ ID NO: 1392044 - RNA, 19 nt, Artificial Sequence
  Description of Artificial Sequence: Synthetic oligonucleotide
cgacacucgucuaugucca

SEQ ID NO: 1392045 - RNA, 19 nt, Artificial Sequence
  Description of Artificial Sequence: Synthetic oligonucleotide
cauccuggggucguugacu

SEQ ID NO: 1392046 - RNA, 19 nt, Artificial Sequence
  Description of Artificial Sequence: Synthetic oligonucleotide
caguacagagcuggcccga

SEQ ID NO: 1392047 - RNA, 19 nt, Artificial Sequence
  Description of Artificial Sequence: Synthetic oligonucleotide
cuggcccgauagcucauaa

SEQ ID NO: 1392048 - RNA, 19 nt, Artificial Sequence
  Description of Artificial Sequence: Synthetic oligonucleotide
gcauuguaggcaccagggu

SEQ ID NO: 1392049 - RNA, 19 nt, Artificial Sequence
  Description of Artificial Sequence: Synthetic oligonucleotide
ccaggcuccuuaagcuaug

SEQ ID NO: 1392050 - RNA, 19 nt, Artificial Sequence
  Description of Artificial Sequence: Synthetic oligonucleotide
ccguguagcuguccggcuc

SEQ ID NO: 1392051 - RNA, 19 nt, Artificial Sequence
  Description of Artificial Sequence: Synthetic oligonucleotide
gcgcccagagcaguaaaga

SEQ ID NO: 1392052 - RNA, 19 nt, Artificial Sequence
  Description of Artificial Sequence: Synthetic oligonucleotide
caggcuccuuaagcuauga

SEQ ID NO: 1392053 - RNA, 19 nt, Artificial Sequence
  Description of Artificial Sequence: Synthetic oligonucleotide
cacgcauucgggcccaauu

SEQ ID NO: 1392054 - RNA, 19 nt, Artificial Sequence
  Description of Artificial Sequence: Synthetic oligonucleotide
ccccauggaaguucacaca

SEQ ID NO: 1392055 - RNA, 19 nt, Artificial Sequence
  Description of Artificial Sequence: Synthetic oligonucleotide
cggcccggcucauugacac

SEQ ID NO: 1392056 - RNA, 19 nt, Artificial Sequence
  Description of Artificial Sequence: Synthetic oligonucleotide
cauacucccgggguccugu

SEQ ID NO: 1392057 - RNA, 19 nt, Artificial Sequence
  Description of Artificial Sequence: Synthetic oligonucleotide
ggguucgagacagggcaga

SEQ ID NO: 1392058 - RNA, 19 nt, Artificial Sequence
  Description of Artificial Sequence: Synthetic oligonucleotide
cuagggcgacagucaugca

SEQ ID NO: 1392059 - RNA, 19 nt, Artificial Sequence
  Description of Artificial Sequence: Synthetic oligonucleotide
ggcuagggcgacagucaug

SEQ ID NO: 1392060 - RNA, 19 nt, Artificial Sequence
  Description of Artificial Sequence: Synthetic oligonucleotide
cgauaucacugcaggagaa

SEQ ID NO: 1392061 - RNA, 19 nt, Artificial Sequence
  Description of Artificial Sequence: Synthetic oligonucleotide
gcguugcucacauggggcu

SEQ ID NO: 1392062 - RNA, 19 nt, Artificial Sequence
  Description of Artificial Sequence: Synthetic oligonucleotide
acacuggugugcaccuguu

SEQ ID NO: 1392063 - RNA, 19 nt, Artificial Sequence
  Description of Artificial Sequence: Synthetic oligonucleotide
cgauacuggcagagguaac

SEQ ID NO: 1392064 - RNA, 19 nt, Artificial Sequence
  Description of Artificial Sequence: Synthetic oligonucleotide
acgcaacgguuggugucca

SEQ ID NO: 1392065 - RNA, 19 nt, Artificial Sequence
  Description of Artificial Sequence: Synthetic oligonucleotide
cccugcguguuuccagcac

SEQ ID NO: 1392066 - RNA, 19 nt, Artificial Sequence
  Description of Artificial Sequence: Synthetic oligonucleotide
ccccauagugguugaugca

SEQ ID NO: 1392067 - RNA, 19 nt, Artificial Sequence
  Description of Artificial Sequence: Synthetic oligonucleotide
cacggaucugaaaggcauu

SEQ ID NO: 1392068 - RNA, 19 nt, Artificial Sequence
  Description of Artificial Sequence: Synthetic oligonucleotide
agccgcagaucgaggcaga

SEQ ID NO: 1392069 - RNA, 19 nt, Artificial Sequence
  Description of Artificial Sequence: Synthetic oligonucleotide
cccggcucauugacacagc

SEQ ID NO: 1392070 - RNA, 19 nt, Artificial Sequence
  Description of Artificial Sequence: Synthetic oligonucleotide
aggagcgcccagagcagua

SEQ ID NO: 1392071 - RNA, 19 nt, Artificial Sequence
  Description of Artificial Sequence: Synthetic oligonucleotide
guccacgcauucgggccca

SEQ ID NO: 1392072 - RNA, 19 nt, Artificial Sequence
  Description of Artificial Sequence: Synthetic oligonucleotide
gggccuucgccauguagau

SEQ ID NO: 1392073 - RNA, 19 nt, Artificial Sequence
  Description of Artificial Sequence: Synthetic oligonucleotide
cuguccggcucuuccgaau

SEQ ID NO: 1392074 - RNA, 19 nt, Artificial Sequence
  Description of Artificial Sequence: Synthetic oligonucleotide
gcuguccggcucuuccgaa

SEQ ID NO: 1392075 - RNA, 19 nt, Artificial Sequence
  Description of Artificial Sequence: Synthetic oligonucleotide
ggccucggggauggucagg

SEQ ID NO: 1392076 - RNA, 19 nt, Artificial Sequence
  Description of Artificial Sequence: Synthetic oligonucleotide
caauaucgguagcgacacu

SEQ ID NO: 1392077 - RNA, 19 nt, Artificial Sequence
  Description of Artificial Sequence: Synthetic oligonucleotide
cucuccuguucaucagguu

SEQ ID NO: 1392078 - RNA, 19 nt, Artificial Sequence
  Description of Artificial Sequence: Synthetic oligonucleotide
gcucauugacacagcgaua

SEQ ID NO: 1392079 - RNA, 19 nt, Artificial Sequence
  Description of Artificial Sequence: Synthetic oligonucleotide
gccgcagaucgaggcagac

SEQ ID NO: 1392080 - RNA, 19 nt, Artificial Sequence
  Description of Artificial Sequence: Synthetic oligonucleotide
agcuggcccgauagcucau

SEQ ID NO: 1392081 - RNA, 19 nt, Artificial Sequence
  Description of Artificial Sequence: Synthetic oligonucleotide
ggccuucgccauguagauc

SEQ ID NO: 1392082 - RNA, 19 nt, Artificial Sequence
  Description of Artificial Sequence: Synthetic oligonucleotide
cgauagcucauaagagagu

SEQ ID NO: 1392083 - RNA, 19 nt, Artificial Sequence
  Description of Artificial Sequence: Synthetic oligonucleotide
ggcucccaugucacacuca

SEQ ID NO: 1392084 - RNA, 19 nt, Artificial Sequence
  Description of Artificial Sequence: Synthetic oligonucleotide
uccacgcauucgggcccaa

SEQ ID NO: 1392085 - RNA, 19 nt, Artificial Sequence
  Description of Artificial Sequence: Synthetic oligonucleotide
gcgucccacucauagccau

SEQ ID NO: 1392086 - RNA, 19 nt, Artificial Sequence
  Description of Artificial Sequence: Synthetic oligonucleotide
cgccauguagaucauuaau

SEQ ID NO: 1392087 - RNA, 19 nt, Artificial Sequence
  Description of Artificial Sequence: Synthetic oligonucleotide
gggcagaagcagcgguugu

SEQ ID NO: 1392088 - RNA, 19 nt, Artificial Sequence
  Description of Artificial Sequence: Synthetic oligonucleotide
ggcccggcucauugacaca

SEQ ID NO: 1392089 - RNA, 19 nt, Artificial Sequence
  Description of Artificial Sequence: Synthetic oligonucleotide
gggagcauccuggggucgu

SEQ ID NO: 1392090 - RNA, 19 nt, Artificial Sequence
  Description of Artificial Sequence: Synthetic oligonucleotide
ccccugcguguuuccagca

SEQ ID NO: 1392091 - RNA, 19 nt, Artificial Sequence
  Description of Artificial Sequence: Synthetic oligonucleotide
ccgcagaucgaggcagaca

SEQ ID NO: 1392092 - RNA, 19 nt, Artificial Sequence
  Description of Artificial Sequence: Synthetic oligonucleotide
cuucgccauguagaucauu

SEQ ID NO: 1392093 - RNA, 19 nt, Artificial Sequence
  Description of Artificial Sequence: Synthetic oligonucleotide
ccaggcagguuaugacagu

SEQ ID NO: 1392094 - RNA, 19 nt, Artificial Sequence
  Description of Artificial Sequence: Synthetic oligonucleotide
cgcaacgguugguguccac

SEQ ID NO: 1392095 - RNA, 19 nt, Artificial Sequence
  Description of Artificial Sequence: Synthetic oligonucleotide
gcggugcacaauggaugaa

SEQ ID NO: 1392096 - RNA, 19 nt, Artificial Sequence
  Description of Artificial Sequence: Synthetic oligonucleotide
ccucggggauggucaggca

SEQ ID NO: 1392097 - RNA, 19 nt, Artificial Sequence
  Description of Artificial Sequence: Synthetic oligonucleotide
gcuggcccgauagcucaua

SEQ ID NO: 1392098 - RNA, 19 nt, Artificial Sequence
  Description of Artificial Sequence: Synthetic oligonucleotide
ccacacaagaacgguuguu

SEQ ID NO: 1392099 - RNA, 19 nt, Artificial Sequence
  Description of Artificial Sequence: Synthetic oligonucleotide
cgcauucgggcccaauuuu

SEQ ID NO: 1392100 - RNA, 19 nt, Artificial Sequence
  Description of Artificial Sequence: Synthetic oligonucleotide
cgacacaagaaggucccau

SEQ ID NO: 1392101 - RNA, 19 nt, Artificial Sequence
  Description of Artificial Sequence: Synthetic oligonucleotide
ggagggccuucgccaugua

SEQ ID NO: 1392102 - RNA, 19 nt, Artificial Sequence
  Description of Artificial Sequence: Synthetic oligonucleotide
ccuucgccauguagaucau

SEQ ID NO: 1392103 - RNA, 19 nt, Artificial Sequence
  Description of Artificial Sequence: Synthetic oligonucleotide
cgguagcgacacucgucua

SEQ ID NO: 1392104 - RNA, 19 nt, Artificial Sequence
  Description of Artificial Sequence: Synthetic oligonucleotide
ccacgcauucgggcccaau

SEQ ID NO: 1392105 - RNA, 19 nt, Artificial Sequence
  Description of Artificial Sequence: Synthetic oligonucleotide
ugggaaaugaucaugaacg

SEQ ID NO: 1392106 - RNA, 19 nt, Artificial Sequence
  Description of Artificial Sequence: Synthetic oligonucleotide
aagaauacaagucagucug

SEQ ID NO: 1392107 - RNA, 19 nt, Artificial Sequence
  Description of Artificial Sequence: Synthetic oligonucleotide
ugaucaugaacgaagaggg

SEQ ID NO: 1392108 - RNA, 19 nt, Artificial Sequence
  Description of Artificial Sequence: Synthetic oligonucleotide
acagagguaacucuuaucg

SEQ ID NO: 1392109 - RNA, 19 nt, Artificial Sequence
  Description of Artificial Sequence: Synthetic oligonucleotide
aauugucacagucuucagc

SEQ ID NO: 1392110 - RNA, 19 nt, Artificial Sequence
  Description of Artificial Sequence: Synthetic oligonucleotide
aacagcaucaacacgagac

SEQ ID NO: 1392111 - RNA, 19 nt, Artificial Sequence
  Description of Artificial Sequence: Synthetic oligonucleotide
agguuaaggauaaagauac

SEQ ID NO: 1392112 - RNA, 19 nt, Artificial Sequence
  Description of Artificial Sequence: Synthetic oligonucleotide
aacugugcaucauacuccc

SEQ ID NO: 1392113 - RNA, 19 nt, Artificial Sequence
  Description of Artificial Sequence: Synthetic oligonucleotide
aauacaagucagucugggc

SEQ ID NO: 1392114 - RNA, 19 nt, Artificial Sequence
  Description of Artificial Sequence: Synthetic oligonucleotide
aguaccaccuaucuucucc

SEQ ID NO: 1392115 - RNA, 19 nt, Artificial Sequence
  Description of Artificial Sequence: Synthetic oligonucleotide
uccucaauaacauagucac

SEQ ID NO: 1392116 - RNA, 19 nt, Artificial Sequence
  Description of Artificial Sequence: Synthetic oligonucleotide
aauguccccgcccacagac

SEQ ID NO: 1392117 - RNA, 19 nt, Artificial Sequence
  Description of Artificial Sequence: Synthetic oligonucleotide
uuaacuccaaaucacgaca

SEQ ID NO: 1392118 - RNA, 19 nt, Artificial Sequence
  Description of Artificial Sequence: Synthetic oligonucleotide
cuuacugucuacaucaaac

SEQ ID NO: 1392119 - RNA, 19 nt, Artificial Sequence
  Description of Artificial Sequence: Synthetic oligonucleotide
caaaucacgacacaccagg

SEQ ID NO: 1392120 - RNA, 19 nt, Artificial Sequence
  Description of Artificial Sequence: Synthetic oligonucleotide
ucugacaggacauaagugu

SEQ ID NO: 1392121 - RNA, 19 nt, Artificial Sequence
  Description of Artificial Sequence: Synthetic oligonucleotide
agcaaugugaaccuucauc

SEQ ID NO: 1392122 - RNA, 19 nt, Artificial Sequence
  Description of Artificial Sequence: Synthetic oligonucleotide
caugaucacaucauagugg

SEQ ID NO: 1392123 - RNA, 19 nt, Artificial Sequence
  Description of Artificial Sequence: Synthetic oligonucleotide
uccauaaucaucccugggc

SEQ ID NO: 1392124 - RNA, 19 nt, Artificial Sequence
  Description of Artificial Sequence: Synthetic oligonucleotide
cuuuuaacuccaaaucacg

SEQ ID NO: 1392125 - RNA, 19 nt, Artificial Sequence
  Description of Artificial Sequence: Synthetic oligonucleotide
augaucaugaacgaagagg

SEQ ID NO: 1392126 - RNA, 19 nt, Artificial Sequence
  Description of Artificial Sequence: Synthetic oligonucleotide
aucaacacgagacucuggg

SEQ ID NO: 1392127 - RNA, 19 nt, Artificial Sequence
  Description of Artificial Sequence: Synthetic oligonucleotide
gaugcuuuugaccuucugc

SEQ ID NO: 1392128 - RNA, 19 nt, Artificial Sequence
  Description of Artificial Sequence: Synthetic oligonucleotide
agcuccaugacucugguug

SEQ ID NO: 1392129 - RNA, 19 nt, Artificial Sequence
  Description of Artificial Sequence: Synthetic oligonucleotide
auggcaaaaugacuguccc

SEQ ID NO: 1392130 - RNA, 19 nt, Artificial Sequence
  Description of Artificial Sequence: Synthetic oligonucleotide
uguuccaaaagaacugugc

SEQ ID NO: 1392131 - RNA, 19 nt, Artificial Sequence
  Description of Artificial Sequence: Synthetic oligonucleotide
ugagacacauccuucagca

SEQ ID NO: 1392132 - RNA, 19 nt, Artificial Sequence
  Description of Artificial Sequence: Synthetic oligonucleotide
auacaagucagucugggca

SEQ ID NO: 1392133 - RNA, 19 nt, Artificial Sequence
  Description of Artificial Sequence: Synthetic oligonucleotide
uuuuaacuccaaaucacga

SEQ ID NO: 1392134 - RNA, 19 nt, Artificial Sequence
  Description of Artificial Sequence: Synthetic oligonucleotide
uguagcaaguuucugcucu

SEQ ID NO: 1392135 - RNA, 19 nt, Artificial Sequence
  Description of Artificial Sequence: Synthetic oligonucleotide
aguaucagcaggucgaugu

SEQ ID NO: 1392136 - RNA, 19 nt, Artificial Sequence
  Description of Artificial Sequence: Synthetic oligonucleotide
ugaguaugaaaccaagaaa

SEQ ID NO: 1392137 - RNA, 19 nt, Artificial Sequence
  Description of Artificial Sequence: Synthetic oligonucleotide
aaugaucaugaacgaagag

SEQ ID NO: 1392138 - RNA, 19 nt, Artificial Sequence
  Description of Artificial Sequence: Synthetic oligonucleotide
ucaguggagucucuaagag

SEQ ID NO: 1392139 - RNA, 19 nt, Artificial Sequence
  Description of Artificial Sequence: Synthetic oligonucleotide
uuuaacuccaaaucacgac

SEQ ID NO: 1392140 - RNA, 19 nt, Artificial Sequence
  Description of Artificial Sequence: Synthetic oligonucleotide
ucgaugaagagccacugug

SEQ ID NO: 1392141 - RNA, 19 nt, Artificial Sequence
  Description of Artificial Sequence: Synthetic oligonucleotide
gacggaucaaucucaacag

SEQ ID NO: 1392142 - RNA, 19 nt, Artificial Sequence
  Description of Artificial Sequence: Synthetic oligonucleotide
acaugaucacaucauagug

SEQ ID NO: 1392143 - RNA, 19 nt, Artificial Sequence
  Description of Artificial Sequence: Synthetic oligonucleotide
auaaucaucccugggcugc

SEQ ID NO: 1392144 - RNA, 19 nt, Artificial Sequence
  Description of Artificial Sequence: Synthetic oligonucleotide
caggacauaagugucaucc

SEQ ID NO: 1392145 - RNA, 19 nt, Artificial Sequence
  Description of Artificial Sequence: Synthetic oligonucleotide
acaaaacaggaucucguuc

SEQ ID NO: 1392146 - RNA, 19 nt, Artificial Sequence
  Description of Artificial Sequence: Synthetic oligonucleotide
ucccaaucccaaaagguag

SEQ ID NO: 1392147 - RNA, 19 nt, Artificial Sequence
  Description of Artificial Sequence: Synthetic oligonucleotide
uuaaggauaaagauaccuu

SEQ ID NO: 1392148 - RNA, 19 nt, Artificial Sequence
  Description of Artificial Sequence: Synthetic oligonucleotide
aacucuuaucgauggacug

SEQ ID NO: 1392149 - RNA, 19 nt, Artificial Sequence
  Description of Artificial Sequence: Synthetic oligonucleotide
aaugacugucccgcgaugg

SEQ ID NO: 1392150 - RNA, 19 nt, Artificial Sequence
  Description of Artificial Sequence: Synthetic oligonucleotide
ugguguucacaacagaggu

SEQ ID NO: 1392151 - RNA, 19 nt, Artificial Sequence
  Description of Artificial Sequence: Synthetic oligonucleotide
agcacugagucuuuuaacu

SEQ ID NO: 1392152 - RNA, 19 nt, Artificial Sequence
  Description of Artificial Sequence: Synthetic oligonucleotide
agcgaucauggcuuuaugg

SEQ ID NO: 1392153 - RNA, 19 nt, Artificial Sequence
  Description of Artificial Sequence: Synthetic oligonucleotide
ugaaccuucauccggucac

SEQ ID NO: 1392154 - RNA, 19 nt, Artificial Sequence
  Description of Artificial Sequence: Synthetic oligonucleotide
gaagccaaaccacugggug

SEQ ID NO: 1392155 - RNA, 19 nt, Artificial Sequence
  Description of Artificial Sequence: Synthetic oligonucleotide
caaagagccacucagucuc

SEQ ID NO: 1392156 - RNA, 19 nt, Artificial Sequence
  Description of Artificial Sequence: Synthetic oligonucleotide
agguaacucuuaucgaugg

SEQ ID NO: 1392157 - RNA, 19 nt, Artificial Sequence
  Description of Artificial Sequence: Synthetic oligonucleotide
uugaaugcuuuccaugcca

SEQ ID NO: 1392158 - RNA, 19 nt, Artificial Sequence
  Description of Artificial Sequence: Synthetic oligonucleotide
ugacaaaacaggaucucgu

SEQ ID NO: 1392159 - RNA, 19 nt, Artificial Sequence
  Description of Artificial Sequence: Synthetic oligonucleotide
ugguguagcaaguuucugc

SEQ ID NO: 1392160 - RNA, 19 nt, Artificial Sequence
  Description of Artificial Sequence: Synthetic oligonucleotide
aaaaugacugucccgcgau

SEQ ID NO: 1392161 - RNA, 19 nt, Artificial Sequence
  Description of Artificial Sequence: Synthetic oligonucleotide
ugucaguggagucucuaag

SEQ ID NO: 1392162 - RNA, 19 nt, Artificial Sequence
  Description of Artificial Sequence: Synthetic oligonucleotide
uaucgauggacuguccugg

SEQ ID NO: 1392163 - RNA, 19 nt, Artificial Sequence
  Description of Artificial Sequence: Synthetic oligonucleotide
aguggagucucuaagagcu

SEQ ID NO: 1392164 - RNA, 19 nt, Artificial Sequence
  Description of Artificial Sequence: Synthetic oligonucleotide
aggacauaagugucauccc

SEQ ID NO: 1392165 - RNA, 19 nt, Artificial Sequence
  Description of Artificial Sequence: Synthetic oligonucleotide
cacugagucuuuuaacucc

SEQ ID NO: 1392166 - RNA, 19 nt, Artificial Sequence
  Description of Artificial Sequence: Synthetic oligonucleotide
agagguaacucuuaucgau

SEQ ID NO: 1392167 - RNA, 19 nt, Artificial Sequence
  Description of Artificial Sequence: Synthetic oligonucleotide
uaacucuuaucgauggacu

SEQ ID NO: 1392168 - RNA, 19 nt, Artificial Sequence
  Description of Artificial Sequence: Synthetic oligonucleotide
guugcagcugacaaaacag

SEQ ID NO: 1392169 - RNA, 19 nt, Artificial Sequence
  Description of Artificial Sequence: Synthetic oligonucleotide
aacaguccggacuccaaug

SEQ ID NO: 1392170 - RNA, 19 nt, Artificial Sequence
  Description of Artificial Sequence: Synthetic oligonucleotide
uguaguccaggccaucagc

SEQ ID NO: 1392171 - RNA, 19 nt, Artificial Sequence
  Description of Artificial Sequence: Synthetic oligonucleotide
uuaucgauggacuguccug

SEQ ID NO: 1392172 - RNA, 19 nt, Artificial Sequence
  Description of Artificial Sequence: Synthetic oligonucleotide
caaaacaggaucucguuca

SEQ ID NO: 1392173 - RNA, 19 nt, Artificial Sequence
  Description of Artificial Sequence: Synthetic oligonucleotide
auaaugucaguggagucuc

SEQ ID NO: 1392174 - RNA, 19 nt, Artificial Sequence
  Description of Artificial Sequence: Synthetic oligonucleotide
cauccggucacucugugag

SEQ ID NO: 1392175 - RNA, 19 nt, Artificial Sequence
  Description of Artificial Sequence: Synthetic oligonucleotide
ugcagcugacaaaacagga

SEQ ID NO: 1392176 - RNA, 19 nt, Artificial Sequence
  Description of Artificial Sequence: Synthetic oligonucleotide
agcccaagaauacaaguca

SEQ ID NO: 1392177 - RNA, 19 nt, Artificial Sequence
  Description of Artificial Sequence: Synthetic oligonucleotide
gaggacaacucauucccag

SEQ ID NO: 1392178 - RNA, 19 nt, Artificial Sequence
  Description of Artificial Sequence: Synthetic oligonucleotide
acggaucaaucucaacagc

SEQ ID NO: 1392179 - RNA, 19 nt, Artificial Sequence
  Description of Artificial Sequence: Synthetic oligonucleotide
ugcaucauacucccagcag

SEQ ID NO: 1392180 - RNA, 19 nt, Artificial Sequence
  Description of Artificial Sequence: Synthetic oligonucleotide
ugugagacacauccuucag

SEQ ID NO: 1392181 - RNA, 19 nt, Artificial Sequence
  Description of Artificial Sequence: Synthetic oligonucleotide
accaccaauaaugucagug

SEQ ID NO: 1392182 - RNA, 19 nt, Artificial Sequence
  Description of Artificial Sequence: Synthetic oligonucleotide
cauacuguuggccucgaug

SEQ ID NO: 1392183 - RNA, 19 nt, Artificial Sequence
  Description of Artificial Sequence: Synthetic oligonucleotide
ugaggaagaugagacgccg

SEQ ID NO: 1392184 - RNA, 19 nt, Artificial Sequence
  Description of Artificial Sequence: Synthetic oligonucleotide
uaacuccaaaucacgacac

SEQ ID NO: 1392185 - RNA, 19 nt, Artificial Sequence
  Description of Artificial Sequence: Synthetic oligonucleotide
cugguaauguaguccaggc

SEQ ID NO: 1392186 - RNA, 19 nt, Artificial Sequence
  Description of Artificial Sequence: Synthetic oligonucleotide
auauguuccaaaagaacug

SEQ ID NO: 1392187 - RNA, 19 nt, Artificial Sequence
  Description of Artificial Sequence: Synthetic oligonucleotide
gugaccagccuccugaagc

SEQ ID NO: 1392188 - RNA, 19 nt, Artificial Sequence
  Description of Artificial Sequence: Synthetic oligonucleotide
guuccaaaagaacugugca

SEQ ID NO: 1392189 - RNA, 19 nt, Artificial Sequence
  Description of Artificial Sequence: Synthetic oligonucleotide
uucucagcagggcaaggcc

SEQ ID NO: 1392190 - RNA, 19 nt, Artificial Sequence
  Description of Artificial Sequence: Synthetic oligonucleotide
gaacugugcaucauacucc

SEQ ID NO: 1392191 - RNA, 19 nt, Artificial Sequence
  Description of Artificial Sequence: Synthetic oligonucleotide
auaacauagucaccacuca

SEQ ID NO: 1392192 - RNA, 19 nt, Artificial Sequence
  Description of Artificial Sequence: Synthetic oligonucleotide
ugguaauguaguccaggcc

SEQ ID NO: 1392193 - RNA, 19 nt, Artificial Sequence
  Description of Artificial Sequence: Synthetic oligonucleotide
aucacaucauagugggguc

SEQ ID NO: 1392194 - RNA, 19 nt, Artificial Sequence
  Description of Artificial Sequence: Synthetic oligonucleotide
cuuccauaaucaucccugg

SEQ ID NO: 1392195 - RNA, 19 nt, Artificial Sequence
  Description of Artificial Sequence: Synthetic oligonucleotide
ugagacgccgaaaguacca

SEQ ID NO: 1392196 - RNA, 19 nt, Artificial Sequence
  Description of Artificial Sequence: Synthetic oligonucleotide
gccacuuccaacauggacg

SEQ ID NO: 1392197 - RNA, 19 nt, Artificial Sequence
  Description of Artificial Sequence: Synthetic oligonucleotide
uaacauagucaccacucaa

SEQ ID NO: 1392198 - RNA, 19 nt, Artificial Sequence
  Description of Artificial Sequence: Synthetic oligonucleotide
ugacaggacauaaguguca

SEQ ID NO: 1392199 - RNA, 19 nt, Artificial Sequence
  Description of Artificial Sequence: Synthetic oligonucleotide
aagaacugugcaucauacu

SEQ ID NO: 1392200 - RNA, 19 nt, Artificial Sequence
  Description of Artificial Sequence: Synthetic oligonucleotide
cuaggcugaguaugaaacc

SEQ ID NO: 1392201 - RNA, 19 nt, Artificial Sequence
  Description of Artificial Sequence: Synthetic oligonucleotide
aguccggacuccaaugucc

SEQ ID NO: 1392202 - RNA, 19 nt, Artificial Sequence
  Description of Artificial Sequence: Synthetic oligonucleotide
ucaauaacauagucaccac

SEQ ID NO: 1392203 - RNA, 19 nt, Artificial Sequence
  Description of Artificial Sequence: Synthetic oligonucleotide
caggaucucguucacuucc

SEQ ID NO: 1392204 - RNA, 19 nt, Artificial Sequence
  Description of Artificial Sequence: Synthetic oligonucleotide
gaugagacgccgaaaguac

SEQ ID NO: 1392205 - RNA, 19 nt, Artificial Sequence
  Description of Artificial Sequence: Synthetic oligonucleotide
agauaccuucaugagacag

SEQ ID NO: 1392206 - RNA, 19 nt, Artificial Sequence
  Description of Artificial Sequence: Synthetic oligonucleotide
uaggcugaguaugaaacca

SEQ ID NO: 1392207 - RNA, 19 nt, Artificial Sequence
  Description of Artificial Sequence: Synthetic oligonucleotide
aucacgacacaccagguua

SEQ ID NO: 1392208 - RNA, 19 nt, Artificial Sequence
  Description of Artificial Sequence: Synthetic oligonucleotide
ugcugaacaguccggacuc

SEQ ID NO: 1392209 - RNA, 19 nt, Artificial Sequence
  Description of Artificial Sequence: Synthetic oligonucleotide
ucgccggacauacaggaga

SEQ ID NO: 1392210 - RNA, 19 nt, Artificial Sequence
  Description of Artificial Sequence: Synthetic oligonucleotide
cucugugagaagccaaacc

SEQ ID NO: 1392211 - RNA, 19 nt, Artificial Sequence
  Description of Artificial Sequence: Synthetic oligonucleotide
cuguccugaacucacuuug

SEQ ID NO: 1392212 - RNA, 19 nt, Artificial Sequence
  Description of Artificial Sequence: Synthetic oligonucleotide
uggcaaaaugacugucccg

SEQ ID NO: 1392213 - RNA, 19 nt, Artificial Sequence
  Description of Artificial Sequence: Synthetic oligonucleotide
caacucauucccagugucg

SEQ ID NO: 1392214 - RNA, 19 nt, Artificial Sequence
  Description of Artificial Sequence: Synthetic oligonucleotide
cucaauucgccggacauac

SEQ ID NO: 1392215 - RNA, 19 nt, Artificial Sequence
  Description of Artificial Sequence: Synthetic oligonucleotide
aucccaacccugcccaggc

SEQ ID NO: 1392216 - RNA, 19 nt, Artificial Sequence
  Description of Artificial Sequence: Synthetic oligonucleotide
ugcuuuugaccuucugcag

SEQ ID NO: 1392217 - RNA, 19 nt, Artificial Sequence
  Description of Artificial Sequence: Synthetic oligonucleotide
auucgccggacauacagga

SEQ ID NO: 1392218 - RNA, 19 nt, Artificial Sequence
  Description of Artificial Sequence: Synthetic oligonucleotide
cagaggauccauuugccuc

SEQ ID NO: 1392219 - RNA, 19 nt, Artificial Sequence
  Description of Artificial Sequence: Synthetic oligonucleotide
aaucacgacacaccagguu

SEQ ID NO: 1392220 - RNA, 19 nt, Artificial Sequence
  Description of Artificial Sequence: Synthetic oligonucleotide
uuccaaaagaacugugcau

SEQ ID NO: 1392221 - RNA, 19 nt, Artificial Sequence
  Description of Artificial Sequence: Synthetic oligonucleotide
caggaguaucagcaggucg

SEQ ID NO: 1392222 - RNA, 19 nt, Artificial Sequence
  Description of Artificial Sequence: Synthetic oligonucleotide
agacgccgaaaguaccacc

SEQ ID NO: 1392223 - RNA, 19 nt, Artificial Sequence
  Description of Artificial Sequence: Synthetic oligonucleotide
ggacggaucaaucucaaca

SEQ ID NO: 1392224 - RNA, 19 nt, Artificial Sequence
  Description of Artificial Sequence: Synthetic oligonucleotide
ucacaucauaguggggucg

SEQ ID NO: 1392225 - RNA, 19 nt, Artificial Sequence
  Description of Artificial Sequence: Synthetic oligonucleotide
ggcaaaaugacugucccgc

SEQ ID NO: 1392226 - RNA, 19 nt, Artificial Sequence
  Description of Artificial Sequence: Synthetic oligonucleotide
cugacaggacauaaguguc

SEQ ID NO: 1392227 - RNA, 19 nt, Artificial Sequence
  Description of Artificial Sequence: Synthetic oligonucleotide
aggcccaccaccaauaaug

SEQ ID NO: 1392228 - RNA, 19 nt, Artificial Sequence
  Description of Artificial Sequence: Synthetic oligonucleotide
gggcagaaagcugagaggg

SEQ ID NO: 1392229 - RNA, 19 nt, Artificial Sequence
  Description of Artificial Sequence: Synthetic oligonucleotide
agucucuaagagcugcucu

SEQ ID NO: 1392230 - RNA, 19 nt, Artificial Sequence
  Description of Artificial Sequence: Synthetic oligonucleotide
aaaugacugucccgcgaug

SEQ ID NO: 1392231 - RNA, 19 nt, Artificial Sequence
  Description of Artificial Sequence: Synthetic oligonucleotide
ugaucacaucauagugggg

SEQ ID NO: 1392232 - RNA, 19 nt, Artificial Sequence
  Description of Artificial Sequence: Synthetic oligonucleotide
ucgauggacuguccugggg

SEQ ID NO: 1392233 - RNA, 19 nt, Artificial Sequence
  Description of Artificial Sequence: Synthetic oligonucleotide
aucagcaaugugaaccuuc

SEQ ID NO: 1392234 - RNA, 19 nt, Artificial Sequence
  Description of Artificial Sequence: Synthetic oligonucleotide
aaagguagggagggacuag

SEQ ID NO: 1392235 - RNA, 19 nt, Artificial Sequence
  Description of Artificial Sequence: Synthetic oligonucleotide
accaaucacacaauuguca

SEQ ID NO: 1392236 - RNA, 19 nt, Artificial Sequence
  Description of Artificial Sequence: Synthetic oligonucleotide
aggucgauguuucuuccug

SEQ ID NO: 1392237 - RNA, 19 nt, Artificial Sequence
  Description of Artificial Sequence: Synthetic oligonucleotide
auaccuucaugagacagga

SEQ ID NO: 1392238 - RNA, 19 nt, Artificial Sequence
  Description of Artificial Sequence: Synthetic oligonucleotide
gagguaacucuuaucgaug

SEQ ID NO: 1392239 - RNA, 19 nt, Artificial Sequence
  Description of Artificial Sequence: Synthetic oligonucleotide
guggucuuggugcugaaca

SEQ ID NO: 1392240 - RNA, 19 nt, Artificial Sequence
  Description of Artificial Sequence: Synthetic oligonucleotide
accacguuccuguugcuga

SEQ ID NO: 1392241 - RNA, 19 nt, Artificial Sequence
  Description of Artificial Sequence: Synthetic oligonucleotide
gaucaugaacgaagagggg

SEQ ID NO: 1392242 - RNA, 19 nt, Artificial Sequence
  Description of Artificial Sequence: Synthetic oligonucleotide
cagcccaagaauacaaguc

SEQ ID NO: 1392243 - RNA, 19 nt, Artificial Sequence
  Description of Artificial Sequence: Synthetic oligonucleotide
cagcauaucugacaggaca

SEQ ID NO: 1392244 - RNA, 19 nt, Artificial Sequence
  Description of Artificial Sequence: Synthetic oligonucleotide
caauaaugucaguggaguc

SEQ ID NO: 1392245 - RNA, 19 nt, Artificial Sequence
  Description of Artificial Sequence: Synthetic oligonucleotide
agugucggauccuuacugu

SEQ ID NO: 1392246 - RNA, 19 nt, Artificial Sequence
  Description of Artificial Sequence: Synthetic oligonucleotide
cuuuugaccuucugcagga

SEQ ID NO: 1392247 - RNA, 19 nt, Artificial Sequence
  Description of Artificial Sequence: Synthetic oligonucleotide
ucccgcgaugguuucacag

SEQ ID NO: 1392248 - RNA, 19 nt, Artificial Sequence
  Description of Artificial Sequence: Synthetic oligonucleotide
cugagccauuucuaggagc

SEQ ID NO: 1392249 - RNA, 19 nt, Artificial Sequence
  Description of Artificial Sequence: Synthetic oligonucleotide
cucgaacucacagaggauc

SEQ ID NO: 1392250 - RNA, 19 nt, Artificial Sequence
  Description of Artificial Sequence: Synthetic oligonucleotide
uccuugcacauccucaaua

SEQ ID NO: 1392251 - RNA, 19 nt, Artificial Sequence
  Description of Artificial Sequence: Synthetic oligonucleotide
ucuaggagcucugguguag

SEQ ID NO: 1392252 - RNA, 19 nt, Artificial Sequence
  Description of Artificial Sequence: Synthetic oligonucleotide
caucauacuguuggccucg

SEQ ID NO: 1392253 - RNA, 19 nt, Artificial Sequence
  Description of Artificial Sequence: Synthetic oligonucleotide
aggaguaucagcaggucga

SEQ ID NO: 1392254 - RNA, 19 nt, Artificial Sequence
  Description of Artificial Sequence: Synthetic oligonucleotide
caguggagucucuaagagc

SEQ ID NO: 1392255 - RNA, 19 nt, Artificial Sequence
  Description of Artificial Sequence: Synthetic oligonucleotide
cuacaucaaacaugaucac

SEQ ID NO: 1392256 - RNA, 19 nt, Artificial Sequence
  Description of Artificial Sequence: Synthetic oligonucleotide
augagacgccgaaaguacc

SEQ ID NO: 1392257 - RNA, 19 nt, Artificial Sequence
  Description of Artificial Sequence: Synthetic oligonucleotide
ggagcucugguguagcaag

SEQ ID NO: 1392258 - RNA, 19 nt, Artificial Sequence
  Description of Artificial Sequence: Synthetic oligonucleotide
ucugggcucugugagacac

SEQ ID NO: 1392259 - RNA, 19 nt, Artificial Sequence
  Description of Artificial Sequence: Synthetic oligonucleotide
caccagguuaaggauaaag

SEQ ID NO: 1392260 - RNA, 19 nt, Artificial Sequence
  Description of Artificial Sequence: Synthetic oligonucleotide
cugcuuccggcccucaucc

SEQ ID NO: 1392261 - RNA, 19 nt, Artificial Sequence
  Description of Artificial Sequence: Synthetic oligonucleotide
agggacuaggcugaguaug

SEQ ID NO: 1392262 - RNA, 19 nt, Artificial Sequence
  Description of Artificial Sequence: Synthetic oligonucleotide
acaguccggacuccaaugu

SEQ ID NO: 1392263 - RNA, 19 nt, Artificial Sequence
  Description of Artificial Sequence: Synthetic oligonucleotide
accaccuaucuucuccuug

SEQ ID NO: 1392264 - RNA, 19 nt, Artificial Sequence
  Description of Artificial Sequence: Synthetic oligonucleotide
agcugagagggcugacugg

SEQ ID NO: 1392265 - RNA, 19 nt, Artificial Sequence
  Description of Artificial Sequence: Synthetic oligonucleotide
gaguccagccagcacugag

SEQ ID NO: 1392266 - RNA, 19 nt, Artificial Sequence
  Description of Artificial Sequence: Synthetic oligonucleotide
agaugagacgccgaaagua

SEQ ID NO: 1392267 - RNA, 19 nt, Artificial Sequence
  Description of Artificial Sequence: Synthetic oligonucleotide
cucuaagagcugcucuggg

SEQ ID NO: 1392268 - RNA, 19 nt, Artificial Sequence
  Description of Artificial Sequence: Synthetic oligonucleotide
aucauacucccagcagccc

SEQ ID NO: 1392269 - RNA, 19 nt, Artificial Sequence
  Description of Artificial Sequence: Synthetic oligonucleotide
gaggcaucccggcuggggc

SEQ ID NO: 1392270 - RNA, 19 nt, Artificial Sequence
  Description of Artificial Sequence: Synthetic oligonucleotide
aggcaucccggcuggggcc

SEQ ID NO: 1392271 - RNA, 19 nt, Artificial Sequence
  Description of Artificial Sequence: Synthetic oligonucleotide
acucugugagaagccaaac

SEQ ID NO: 1392272 - RNA, 19 nt, Artificial Sequence
  Description of Artificial Sequence: Synthetic oligonucleotide
cagugucggauccuuacug

SEQ ID NO: 1392273 - RNA, 19 nt, Artificial Sequence
  Description of Artificial Sequence: Synthetic oligonucleotide
acucccagcagcccaagaa

SEQ ID NO: 1392274 - RNA, 19 nt, Artificial Sequence
  Description of Artificial Sequence: Synthetic oligonucleotide
caccaaucacacaauuguc

SEQ ID NO: 1392275 - RNA, 19 nt, Artificial Sequence
  Description of Artificial Sequence: Synthetic oligonucleotide
ggacaacucauucccagug

SEQ ID NO: 1392276 - RNA, 19 nt, Artificial Sequence
  Description of Artificial Sequence: Synthetic oligonucleotide
aucgauggacuguccuggg

SEQ ID NO: 1392277 - RNA, 19 nt, Artificial Sequence
  Description of Artificial Sequence: Synthetic oligonucleotide
ucacgacacaccagguuaa

SEQ ID NO: 1392278 - RNA, 19 nt, Artificial Sequence
  Description of Artificial Sequence: Synthetic oligonucleotide
aggaaaagcugguccacaa

SEQ ID NO: 1392279 - RNA, 19 nt, Artificial Sequence
  Description of Artificial Sequence: Synthetic oligonucleotide
uucgccggacauacaggag

SEQ ID NO: 1392280 - RNA, 19 nt, Artificial Sequence
  Description of Artificial Sequence: Synthetic oligonucleotide
acucuuaucgauggacugu

SEQ ID NO: 1392281 - RNA, 19 nt, Artificial Sequence
  Description of Artificial Sequence: Synthetic oligonucleotide
aggacaacucauucccagu

SEQ ID NO: 1392282 - RNA, 19 nt, Artificial Sequence
  Description of Artificial Sequence: Synthetic oligonucleotide
aucugacaggacauaagug

SEQ ID NO: 1392283 - RNA, 19 nt, Artificial Sequence
  Description of Artificial Sequence: Synthetic oligonucleotide
agucuucagcauaucugac

SEQ ID NO: 1392284 - RNA, 19 nt, Artificial Sequence
  Description of Artificial Sequence: Synthetic oligonucleotide
aggaucucguucacuuccc

SEQ ID NO: 1392285 - RNA, 19 nt, Artificial Sequence
  Description of Artificial Sequence: Synthetic oligonucleotide
ugaacaguccggacuccaa

SEQ ID NO: 1392286 - RNA, 19 nt, Artificial Sequence
  Description of Artificial Sequence: Synthetic oligonucleotide
aucauaguggggucggcuu

SEQ ID NO: 1392287 - RNA, 19 nt, Artificial Sequence
  Description of Artificial Sequence: Synthetic oligonucleotide
agcaaguuucugcucuggu

SEQ ID NO: 1392288 - RNA, 19 nt, Artificial Sequence
  Description of Artificial Sequence: Synthetic oligonucleotide
uucauccggucacucugug

SEQ ID NO: 1392289 - RNA, 19 nt, Artificial Sequence
  Description of Artificial Sequence: Synthetic oligonucleotide
aaaucacgacacaccaggu

SEQ ID NO: 1392290 - RNA, 19 nt, Artificial Sequence
  Description of Artificial Sequence: Synthetic oligonucleotide
guagcaaguuucugcucug

SEQ ID NO: 1392291 - RNA, 19 nt, Artificial Sequence
  Description of Artificial Sequence: Synthetic oligonucleotide
ccacuuccaacauggacgg

SEQ ID NO: 1392292 - RNA, 19 nt, Artificial Sequence
  Description of Artificial Sequence: Synthetic oligonucleotide
gacauaagugucaucccaa

SEQ ID NO: 1392293 - RNA, 19 nt, Artificial Sequence
  Description of Artificial Sequence: Synthetic oligonucleotide
ggacauaagugucauccca

SEQ ID NO: 1392294 - RNA, 19 nt, Artificial Sequence
  Description of Artificial Sequence: Synthetic oligonucleotide
aaccuucauccggucacuc

SEQ ID NO: 1392295 - RNA, 19 nt, Artificial Sequence
  Description of Artificial Sequence: Synthetic oligonucleotide
cucuuaucgauggacuguc

SEQ ID NO: 1392296 - RNA, 19 nt, Artificial Sequence
  Description of Artificial Sequence: Synthetic oligonucleotide
acugagucuuuuaacucca

SEQ ID NO: 1392297 - RNA, 19 nt, Artificial Sequence
  Description of Artificial Sequence: Synthetic oligonucleotide
aaugucaguggagucucua

SEQ ID NO: 1392298 - RNA, 19 nt, Artificial Sequence
  Description of Artificial Sequence: Synthetic oligonucleotide
gagagggaaggcugccuug

SEQ ID NO: 1392299 - RNA, 19 nt, Artificial Sequence
  Description of Artificial Sequence: Synthetic oligonucleotide
uugacagcucugcuugaau

SEQ ID NO: 1392300 - RNA, 19 nt, Artificial Sequence
  Description of Artificial Sequence: Synthetic oligonucleotide
cugugagacacauccuuca

SEQ ID NO: 1392301 - RNA, 19 nt, Artificial Sequence
  Description of Artificial Sequence: Synthetic oligonucleotide
caccaauaaugucagugga

SEQ ID NO: 1392302 - RNA, 19 nt, Artificial Sequence
  Description of Artificial Sequence: Synthetic oligonucleotide
ucccagcagcccaagaaua

SEQ ID NO: 1392303 - RNA, 19 nt, Artificial Sequence
  Description of Artificial Sequence: Synthetic oligonucleotide
aaacaggaucucguucacu

SEQ ID NO: 1392304 - RNA, 19 nt, Artificial Sequence
  Description of Artificial Sequence: Synthetic oligonucleotide
cagcacugagucuuuuaac

SEQ ID NO: 1392305 - RNA, 19 nt, Artificial Sequence
  Description of Artificial Sequence: Synthetic oligonucleotide
gcugguaauguaguccagg

SEQ ID NO: 1392306 - RNA, 19 nt, Artificial Sequence
  Description of Artificial Sequence: Synthetic oligonucleotide
caaaaugacugucccgcga

SEQ ID NO: 1392307 - RNA, 19 nt, Artificial Sequence
  Description of Artificial Sequence: Synthetic oligonucleotide
uguucacaacagagguaac

SEQ ID NO: 1392308 - RNA, 19 nt, Artificial Sequence
  Description of Artificial Sequence: Synthetic oligonucleotide
acguuccuguugcugagga

SEQ ID NO: 1392309 - RNA, 19 nt, Artificial Sequence
  Description of Artificial Sequence: Synthetic oligonucleotide
acgacacaccagguuaagg

SEQ ID NO: 1392310 - RNA, 19 nt, Artificial Sequence
  Description of Artificial Sequence: Synthetic oligonucleotide
gcaaaaugacugucccgcg

SEQ ID NO: 1392311 - RNA, 19 nt, Artificial Sequence
  Description of Artificial Sequence: Synthetic oligonucleotide
agggcugacuggccccacc

SEQ ID NO: 1392312 - RNA, 19 nt, Artificial Sequence
  Description of Artificial Sequence: Synthetic oligonucleotide
ucauccggucacucuguga

SEQ ID NO: 1392313 - RNA, 19 nt, Artificial Sequence
  Description of Artificial Sequence: Synthetic oligonucleotide
cacacaauugucacagucu

SEQ ID NO: 1392314 - RNA, 19 nt, Artificial Sequence
  Description of Artificial Sequence: Synthetic oligonucleotide
caaacaugaucacaucaua

SEQ ID NO: 1392315 - RNA, 19 nt, Artificial Sequence
  Description of Artificial Sequence: Synthetic oligonucleotide
agcaucaacacgagacucu

SEQ ID NO: 1392316 - RNA, 19 nt, Artificial Sequence
  Description of Artificial Sequence: Synthetic oligonucleotide
cacaccagguuaaggauaa

SEQ ID NO: 1392317 - RNA, 19 nt, Artificial Sequence
  Description of Artificial Sequence: Synthetic oligonucleotide
uccggucacucugugagaa

SEQ ID NO: 1392318 - RNA, 19 nt, Artificial Sequence
  Description of Artificial Sequence: Synthetic oligonucleotide
augucaguggagucucuaa

SEQ ID NO: 1392319 - RNA, 19 nt, Artificial Sequence
  Description of Artificial Sequence: Synthetic oligonucleotide
uggcuuuaugguguucaca

SEQ ID NO: 1392320 - RNA, 19 nt, Artificial Sequence
  Description of Artificial Sequence: Synthetic oligonucleotide
guaguccaggccaucagca

SEQ ID NO: 1392321 - RNA, 19 nt, Artificial Sequence
  Description of Artificial Sequence: Synthetic oligonucleotide
acugucccgcgaugguuuc

SEQ ID NO: 1392322 - RNA, 19 nt, Artificial Sequence
  Description of Artificial Sequence: Synthetic oligonucleotide
acaucauaguggggucggc

SEQ ID NO: 1392323 - RNA, 19 nt, Artificial Sequence
  Description of Artificial Sequence: Synthetic oligonucleotide
ccggacauacaggagaggg

SEQ ID NO: 1392324 - RNA, 19 nt, Artificial Sequence
  Description of Artificial Sequence: Synthetic oligonucleotide
ccaccuaucuucuccuugc

SEQ ID NO: 1392325 - RNA, 19 nt, Artificial Sequence
  Description of Artificial Sequence: Synthetic oligonucleotide
gguguagcaaguuucugcu

SEQ ID NO: 1392326 - RNA, 19 nt, Artificial Sequence
  Description of Artificial Sequence: Synthetic oligonucleotide
uggugcugaacaguccgga

SEQ ID NO: 1392327 - RNA, 19 nt, Artificial Sequence
  Description of Artificial Sequence: Synthetic oligonucleotide
agggcaaggccagcgauca

SEQ ID NO: 1392328 - RNA, 19 nt, Artificial Sequence
  Description of Artificial Sequence: Synthetic oligonucleotide
augugaaccuucauccggu

SEQ ID NO: 1392329 - RNA, 19 nt, Artificial Sequence
  Description of Artificial Sequence: Synthetic oligonucleotide
cccaaucccaaaagguagg

SEQ ID NO: 1392330 - RNA, 19 nt, Artificial Sequence
  Description of Artificial Sequence: Synthetic oligonucleotide
cagucucucggcccugggg

SEQ ID NO: 1392331 - RNA, 19 nt, Artificial Sequence
  Description of Artificial Sequence: Synthetic oligonucleotide
ggccccaccaaucacacaa

SEQ ID NO: 1392332 - RNA, 19 nt, Artificial Sequence
  Description of Artificial Sequence: Synthetic oligonucleotide
cugcuggggaggcaucccg

SEQ ID NO: 1392333 - RNA, 19 nt, Artificial Sequence
  Description of Artificial Sequence: Synthetic oligonucleotide
auguuccaaaagaacugug

SEQ ID NO: 1392334 - RNA, 19 nt, Artificial Sequence
  Description of Artificial Sequence: Synthetic oligonucleotide
uccuuacugucuacaucaa

SEQ ID NO: 1392335 - RNA, 19 nt, Artificial Sequence
  Description of Artificial Sequence: Synthetic oligonucleotide
gacaaaacaggaucucguu

SEQ ID NO: 1392336 - RNA, 19 nt, Artificial Sequence
  Description of Artificial Sequence: Synthetic oligonucleotide
augacugucccgcgauggu

SEQ ID NO: 1392337 - RNA, 19 nt, Artificial Sequence
  Description of Artificial Sequence: Synthetic oligonucleotide
gacucugguugacagcucu

SEQ ID NO: 1392338 - RNA, 19 nt, Artificial Sequence
  Description of Artificial Sequence: Synthetic oligonucleotide
uacuguuggccucgaugaa

SEQ ID NO: 1392339 - RNA, 19 nt, Artificial Sequence
  Description of Artificial Sequence: Synthetic oligonucleotide
ucagcaggucgauguuucu

SEQ ID NO: 1392340 - RNA, 19 nt, Artificial Sequence
  Description of Artificial Sequence: Synthetic oligonucleotide
uaaucaucccugggcugcc

SEQ ID NO: 1392341 - RNA, 19 nt, Artificial Sequence
  Description of Artificial Sequence: Synthetic oligonucleotide
cagagguaacucuuaucga

SEQ ID NO: 1392342 - RNA, 19 nt, Artificial Sequence
  Description of Artificial Sequence: Synthetic oligonucleotide
cuaggagcucugguguagc

SEQ ID NO: 1392343 - RNA, 19 nt, Artificial Sequence
  Description of Artificial Sequence: Synthetic oligonucleotide
cuuaucgauggacuguccu

SEQ ID NO: 1392344 - RNA, 19 nt, Artificial Sequence
  Description of Artificial Sequence: Synthetic oligonucleotide
ggagggacuaggcugagua

SEQ ID NO: 1392345 - RNA, 19 nt, Artificial Sequence
  Description of Artificial Sequence: Synthetic oligonucleotide
uccguuucuucugggcucu

SEQ ID NO: 1392346 - RNA, 19 nt, Artificial Sequence
  Description of Artificial Sequence: Synthetic oligonucleotide
gcaaggccagcgaucaugg

SEQ ID NO: 1392347 - RNA, 19 nt, Artificial Sequence
  Description of Artificial Sequence: Synthetic oligonucleotide
acgagacucugggaaauga

SEQ ID NO: 1392348 - RNA, 19 nt, Artificial Sequence
  Description of Artificial Sequence: Synthetic oligonucleotide
caauaacauagucaccacu

SEQ ID NO: 1392349 - RNA, 19 nt, Artificial Sequence
  Description of Artificial Sequence: Synthetic oligonucleotide
uuccggcccucauccaugc

SEQ ID NO: 1392350 - RNA, 19 nt, Artificial Sequence
  Description of Artificial Sequence: Synthetic oligonucleotide
ucaggaguaucagcagguc

SEQ ID NO: 1392351 - RNA, 19 nt, Artificial Sequence
  Description of Artificial Sequence: Synthetic oligonucleotide
augcuuuccaugccaucau

SEQ ID NO: 1392352 - RNA, 19 nt, Artificial Sequence
  Description of Artificial Sequence: Synthetic oligonucleotide
uccaugccaaagagccacu

SEQ ID NO: 1392353 - RNA, 19 nt, Artificial Sequence
  Description of Artificial Sequence: Synthetic oligonucleotide
uggacggaucaaucucaac

SEQ ID NO: 1392354 - RNA, 19 nt, Artificial Sequence
  Description of Artificial Sequence: Synthetic oligonucleotide
caucccaacccugcccagg

SEQ ID NO: 1392355 - RNA, 19 nt, Artificial Sequence
  Description of Artificial Sequence: Synthetic oligonucleotide
ugucccgcgaugguuucac

SEQ ID NO: 1392356 - RNA, 19 nt, Artificial Sequence
  Description of Artificial Sequence: Synthetic oligonucleotide
ccaaaagguagggagggac

SEQ ID NO: 1392357 - RNA, 19 nt, Artificial Sequence
  Description of Artificial Sequence: Synthetic oligonucleotide
gagacgccgaaaguaccac

SEQ ID NO: 1392358 - RNA, 19 nt, Artificial Sequence
  Description of Artificial Sequence: Synthetic oligonucleotide
aaagagccacucagucucu

SEQ ID NO: 1392359 - RNA, 19 nt, Artificial Sequence
  Description of Artificial Sequence: Synthetic oligonucleotide
uaguggggucggcuucucc

SEQ ID NO: 1392360 - RNA, 19 nt, Artificial Sequence
  Description of Artificial Sequence: Synthetic oligonucleotide
aucacacaauugucacagu

SEQ ID NO: 1392361 - RNA, 19 nt, Artificial Sequence
  Description of Artificial Sequence: Synthetic oligonucleotide
gcacugagucuuuuaacuc

SEQ ID NO: 1392362 - RNA, 19 nt, Artificial Sequence
  Description of Artificial Sequence: Synthetic oligonucleotide
ccaaaucacgacacaccag

SEQ ID NO: 1392363 - RNA, 19 nt, Artificial Sequence
  Description of Artificial Sequence: Synthetic oligonucleotide
cgaucauggcuuuauggug

SEQ ID NO: 1392364 - RNA, 19 nt, Artificial Sequence
  Description of Artificial Sequence: Synthetic oligonucleotide
ccucaauaacauagucacc

SEQ ID NO: 1392365 - RNA, 19 nt, Artificial Sequence
  Description of Artificial Sequence: Synthetic oligonucleotide
cuaagagcugcucuggguu

SEQ ID NO: 1392366 - RNA, 19 nt, Artificial Sequence
  Description of Artificial Sequence: Synthetic oligonucleotide
guccggacuccaauguccc

SEQ ID NO: 1392367 - RNA, 19 nt, Artificial Sequence
  Description of Artificial Sequence: Synthetic oligonucleotide
cacucugugagaagccaaa

SEQ ID NO: 1392368 - RNA, 19 nt, Artificial Sequence
  Description of Artificial Sequence: Synthetic oligonucleotide
gacgccgaaaguaccaccu

SEQ ID NO: 1392369 - RNA, 19 nt, Artificial Sequence
  Description of Artificial Sequence: Synthetic oligonucleotide
uccggacuccaaugucccc

SEQ ID NO: 1392370 - RNA, 19 nt, Artificial Sequence
  Description of Artificial Sequence: Synthetic oligonucleotide
gaguaucagcaggucgaug

SEQ ID NO: 1392371 - RNA, 19 nt, Artificial Sequence
  Description of Artificial Sequence: Synthetic oligonucleotide
uacucccagcagcccaaga

SEQ ID NO: 1392372 - RNA, 19 nt, Artificial Sequence
  Description of Artificial Sequence: Synthetic oligonucleotide
uaauguaguccaggccauc

SEQ ID NO: 1392373 - RNA, 19 nt, Artificial Sequence
  Description of Artificial Sequence: Synthetic oligonucleotide
gcgaucauggcuuuauggu

SEQ ID NO: 1392374 - RNA, 19 nt, Artificial Sequence
  Description of Artificial Sequence: Synthetic oligonucleotide
ucggauccuuacugucuac

SEQ ID NO: 1392375 - RNA, 19 nt, Artificial Sequence
  Description of Artificial Sequence: Synthetic oligonucleotide
agggaaguccucaggagua

SEQ ID NO: 1392376 - RNA, 19 nt, Artificial Sequence
  Description of Artificial Sequence: Synthetic oligonucleotide
gguuaaggauaaagauacc

SEQ ID NO: 1392377 - RNA, 19 nt, Artificial Sequence
  Description of Artificial Sequence: Synthetic oligonucleotide
ccaaucccaaaagguaggg

SEQ ID NO: 1392378 - RNA, 19 nt, Artificial Sequence
  Description of Artificial Sequence: Synthetic oligonucleotide
ccaaaagaacugugcauca

SEQ ID NO: 1392379 - RNA, 19 nt, Artificial Sequence
  Description of Artificial Sequence: Synthetic oligonucleotide
gcuuuaugguguucacaac

SEQ ID NO: 1392380 - RNA, 19 nt, Artificial Sequence
  Description of Artificial Sequence: Synthetic oligonucleotide
ugucuacaucaaacaugau

SEQ ID NO: 1392381 - RNA, 19 nt, Artificial Sequence
  Description of Artificial Sequence: Synthetic oligonucleotide
cagcagcccaagaauacaa

SEQ ID NO: 1392382 - RNA, 19 nt, Artificial Sequence
  Description of Artificial Sequence: Synthetic oligonucleotide
acacgagacucugggaaau

SEQ ID NO: 1392383 - RNA, 19 nt, Artificial Sequence
  Description of Artificial Sequence: Synthetic oligonucleotide
cugguguagcaaguuucug

SEQ ID NO: 1392384 - RNA, 19 nt, Artificial Sequence
  Description of Artificial Sequence: Synthetic oligonucleotide
ucauacuguuggccucgau

SEQ ID NO: 1392385 - RNA, 19 nt, Artificial Sequence
  Description of Artificial Sequence: Synthetic oligonucleotide
gaacaguccggacuccaau

SEQ ID NO: 1392386 - RNA, 19 nt, Artificial Sequence
  Description of Artificial Sequence: Synthetic oligonucleotide
cacagucuucagcauaucu

SEQ ID NO: 1392387 - RNA, 19 nt, Artificial Sequence
  Description of Artificial Sequence: Synthetic oligonucleotide
agggaaccugcugcugggg

SEQ ID NO: 1392388 - RNA, 19 nt, Artificial Sequence
  Description of Artificial Sequence: Synthetic oligonucleotide
ucggcccugggguaugaua

SEQ ID NO: 1392389 - RNA, 19 nt, Artificial Sequence
  Description of Artificial Sequence: Synthetic oligonucleotide
aaucaucccugggcugccu

SEQ ID NO: 1392390 - RNA, 19 nt, Artificial Sequence
  Description of Artificial Sequence: Synthetic oligonucleotide
caguccggacuccaauguc

SEQ ID NO: 1392391 - RNA, 19 nt, Artificial Sequence
  Description of Artificial Sequence: Synthetic oligonucleotide
guaccaccuaucuucuccu

SEQ ID NO: 1392392 - RNA, 19 nt, Artificial Sequence
  Description of Artificial Sequence: Synthetic oligonucleotide
cacguuccuguugcugagg

SEQ ID NO: 1392393 - RNA, 19 nt, Artificial Sequence
  Description of Artificial Sequence: Synthetic oligonucleotide
ugacugucccgcgaugguu

SEQ ID NO: 1392394 - RNA, 19 nt, Artificial Sequence
  Description of Artificial Sequence: Synthetic oligonucleotide
cauccaugccaaagagcca

SEQ ID NO: 1392395 - RNA, 19 nt, Artificial Sequence
  Description of Artificial Sequence: Synthetic oligonucleotide
cacgacacaccagguuaag

SEQ ID NO: 1392396 - RNA, 19 nt, Artificial Sequence
  Description of Artificial Sequence: Synthetic oligonucleotide
auccggucacucugugaga

SEQ ID NO: 1392397 - RNA, 19 nt, Artificial Sequence
  Description of Artificial Sequence: Synthetic oligonucleotide
cauuucuaggagcucuggu

SEQ ID NO: 1392398 - RNA, 19 nt, Artificial Sequence
  Description of Artificial Sequence: Synthetic oligonucleotide
ccggacuccaauguccccg

SEQ ID NO: 1392399 - RNA, 19 nt, Artificial Sequence
  Description of Artificial Sequence: Synthetic oligonucleotide
cagcgaucauggcuuuaug

SEQ ID NO: 1392400 - RNA, 19 nt, Artificial Sequence
  Description of Artificial Sequence: Synthetic oligonucleotide
uaccuucaugagacaggau

SEQ ID NO: 1392401 - RNA, 19 nt, Artificial Sequence
  Description of Artificial Sequence: Synthetic oligonucleotide
ccaauguccccgcccacag

SEQ ID NO: 1392402 - RNA, 19 nt, Artificial Sequence
  Description of Artificial Sequence: Synthetic oligonucleotide
gaggauccauuugccucug

SEQ ID NO: 1392403 - RNA, 19 nt, Artificial Sequence
  Description of Artificial Sequence: Synthetic oligonucleotide
aggagcucugguguagcaa

SEQ ID NO: 1392404 - RNA, 19 nt, Artificial Sequence
  Description of Artificial Sequence: Synthetic oligonucleotide
auaguggggucggcuucuc

SEQ ID NO: 1392405 - RNA, 19 nt, Artificial Sequence
  Description of Artificial Sequence: Synthetic oligonucleotide
caccacguuccuguugcug

SEQ ID NO: 1392406 - RNA, 19 nt, Artificial Sequence
  Description of Artificial Sequence: Synthetic oligonucleotide
gucacagucuucagcauau

SEQ ID NO: 1392407 - RNA, 19 nt, Artificial Sequence
  Description of Artificial Sequence: Synthetic oligonucleotide
aggagagggaaggcugccu

SEQ ID NO: 1392408 - RNA, 19 nt, Artificial Sequence
  Description of Artificial Sequence: Synthetic oligonucleotide
aggcugaguaugaaaccaa

SEQ ID NO: 1392409 - RNA, 19 nt, Artificial Sequence
  Description of Artificial Sequence: Synthetic oligonucleotide
gcagcccaagaauacaagu

SEQ ID NO: 1392410 - RNA, 19 nt, Artificial Sequence
  Description of Artificial Sequence: Synthetic oligonucleotide
cacgagacucugggaaaug

SEQ ID NO: 1392411 - RNA, 19 nt, Artificial Sequence
  Description of Artificial Sequence: Synthetic oligonucleotide
ccaauaaugucaguggagu

SEQ ID NO: 1392412 - RNA, 19 nt, Artificial Sequence
  Description of Artificial Sequence: Synthetic oligonucleotide
auucccagugucggauccu

SEQ ID NO: 1392413 - RNA, 19 nt, Artificial Sequence
  Description of Artificial Sequence: Synthetic oligonucleotide
cugaacaguccggacucca

SEQ ID NO: 1392414 - RNA, 19 nt, Artificial Sequence
  Description of Artificial Sequence: Synthetic oligonucleotide
acugcaccacguuccuguu

SEQ ID NO: 1392415 - RNA, 19 nt, Artificial Sequence
  Description of Artificial Sequence: Synthetic oligonucleotide
ccauaaucaucccugggcu

SEQ ID NO: 1392416 - RNA, 19 nt, Artificial Sequence
  Description of Artificial Sequence: Synthetic oligonucleotide
uaccaccuaucuucuccuu

SEQ ID NO: 1392417 - RNA, 19 nt, Artificial Sequence
  Description of Artificial Sequence: Synthetic oligonucleotide
cacuuccauaaucaucccu

SEQ ID NO: 1392418 - RNA, 19 nt, Artificial Sequence
  Description of Artificial Sequence: Synthetic oligonucleotide
uggcuuccgacugcaccac

SEQ ID NO: 1392419 - RNA, 19 nt, Artificial Sequence
  Description of Artificial Sequence: Synthetic oligonucleotide
uccggcccucauccaugcc

SEQ ID NO: 1392420 - RNA, 19 nt, Artificial Sequence
  Description of Artificial Sequence: Synthetic oligonucleotide
gggacuaggcugaguauga

SEQ ID NO: 1392421 - RNA, 19 nt, Artificial Sequence
  Description of Artificial Sequence: Synthetic oligonucleotide
auggacggaucaaucucaa

SEQ ID NO: 1392422 - RNA, 19 nt, Artificial Sequence
  Description of Artificial Sequence: Synthetic oligonucleotide
ucccagugucggauccuua

SEQ ID NO: 1392423 - RNA, 19 nt, Artificial Sequence
  Description of Artificial Sequence: Synthetic oligonucleotide
agcucugguguagcaaguu

SEQ ID NO: 1392424 - RNA, 19 nt, Artificial Sequence
  Description of Artificial Sequence: Synthetic oligonucleotide
uggccucgaugaagagcca

SEQ ID NO: 1392425 - RNA, 19 nt, Artificial Sequence
  Description of Artificial Sequence: Synthetic oligonucleotide
acgccgaaaguaccaccua

SEQ ID NO: 1392426 - RNA, 19 nt, Artificial Sequence
  Description of Artificial Sequence: Synthetic oligonucleotide
cuucauccggucacucugu

SEQ ID NO: 1392427 - RNA, 19 nt, Artificial Sequence
  Description of Artificial Sequence: Synthetic oligonucleotide
caacagagguaacucuuau

SEQ ID NO: 1392428 - RNA, 19 nt, Artificial Sequence
  Description of Artificial Sequence: Synthetic oligonucleotide
ggcuuccgacugcaccacg

SEQ ID NO: 1392429 - RNA, 19 nt, Artificial Sequence
  Description of Artificial Sequence: Synthetic oligonucleotide
cuccaauguccccgcccac

SEQ ID NO: 1392430 - RNA, 19 nt, Artificial Sequence
  Description of Artificial Sequence: Synthetic oligonucleotide
gagggacuaggcugaguau

SEQ ID NO: 1392431 - RNA, 19 nt, Artificial Sequence
  Description of Artificial Sequence: Synthetic oligonucleotide
ccucccaaucccaaaaggu

SEQ ID NO: 1392432 - RNA, 19 nt, Artificial Sequence
  Description of Artificial Sequence: Synthetic oligonucleotide
cucauucccagugucggau

SEQ ID NO: 1392433 - RNA, 19 nt, Artificial Sequence
  Description of Artificial Sequence: Synthetic oligonucleotide
caucauaguggggucggcu

SEQ ID NO: 1392434 - RNA, 19 nt, Artificial Sequence
  Description of Artificial Sequence: Synthetic oligonucleotide
gcaaguuucugcucugguu

SEQ ID NO: 1392435 - RNA, 19 nt, Artificial Sequence
  Description of Artificial Sequence: Synthetic oligonucleotide
ggucgauguuucuuccugu

SEQ ID NO: 1392436 - RNA, 19 nt, Artificial Sequence
  Description of Artificial Sequence: Synthetic oligonucleotide
guaucagcaggucgauguu

SEQ ID NO: 1392437 - RNA, 19 nt, Artificial Sequence
  Description of Artificial Sequence: Synthetic oligonucleotide
cgccggacauacaggagag

SEQ ID NO: 1392438 - RNA, 19 nt, Artificial Sequence
  Description of Artificial Sequence: Synthetic oligonucleotide
caaaagaacugugcaucau

SEQ ID NO: 1392439 - RNA, 19 nt, Artificial Sequence
  Description of Artificial Sequence: Synthetic oligonucleotide
gacugucccgcgaugguuu

SEQ ID NO: 1392440 - RNA, 19 nt, Artificial Sequence
  Description of Artificial Sequence: Synthetic oligonucleotide
cugcuugaaugcuuuccau

SEQ ID NO: 1392441 - RNA, 19 nt, Artificial Sequence
  Description of Artificial Sequence: Synthetic oligonucleotide
gggcugacuggccccacca

SEQ ID NO: 1392442 - RNA, 19 nt, Artificial Sequence
  Description of Artificial Sequence: Synthetic oligonucleotide
ccaacccugcccaggcuuc

SEQ ID NO: 1392443 - RNA, 19 nt, Artificial Sequence
  Description of Artificial Sequence: Synthetic oligonucleotide
ggcugguaauguaguccag

SEQ ID NO: 1392444 - RNA, 19 nt, Artificial Sequence
  Description of Artificial Sequence: Synthetic oligonucleotide
caauguccccgcccacaga

SEQ ID NO: 1392445 - RNA, 19 nt, Artificial Sequence
  Description of Artificial Sequence: Synthetic oligonucleotide
caggucgauguuucuuccu

SEQ ID NO: 1392446 - RNA, 19 nt, Artificial Sequence
  Description of Artificial Sequence: Synthetic oligonucleotide
cauaguggggucggcuucu

SEQ ID NO: 1392447 - RNA, 19 nt, Artificial Sequence
  Description of Artificial Sequence: Synthetic oligonucleotide
gcugaacaguccggacucc

SEQ ID NO: 1392448 - RNA, 19 nt, Artificial Sequence
  Description of Artificial Sequence: Synthetic oligonucleotide
gccugcacuugcugccagc

SEQ ID NO: 1392449 - RNA, 19 nt, Artificial Sequence
  Description of Artificial Sequence: Synthetic oligonucleotide
gccggacauacaggagagg

SEQ ID NO: 1392450 - RNA, 19 nt, Artificial Sequence
  Description of Artificial Sequence: Synthetic oligonucleotide
ccaugccaucauacuguug

SEQ ID NO: 1392451 - RNA, 19 nt, Artificial Sequence
  Description of Artificial Sequence: Synthetic oligonucleotide
cggacuccaauguccccgc

SEQ ID NO: 1392452 - RNA, 19 nt, Artificial Sequence
  Description of Artificial Sequence: Synthetic oligonucleotide
ggagagggaaggcugccuu

SEQ ID NO: 1392453 - RNA, 19 nt, Artificial Sequence
  Description of Artificial Sequence: Synthetic oligonucleotide
aucccggcuggggccagcu

SEQ ID NO: 1392454 - RNA, 19 nt, Artificial Sequence
  Description of Artificial Sequence: Synthetic oligonucleotide
ccggucacucugugagaag

SEQ ID NO: 1392455 - RNA, 19 nt, Artificial Sequence
  Description of Artificial Sequence: Synthetic oligonucleotide
gcccaccaccaauaauguc

SEQ ID NO: 1392456 - RNA, 19 nt, Artificial Sequence
  Description of Artificial Sequence: Synthetic oligonucleotide
gccagcacugagucuuuua

SEQ ID NO: 1392457 - RNA, 19 nt, Artificial Sequence
  Description of Artificial Sequence: Synthetic oligonucleotide
gcuguccugaacucacuuu

SEQ ID NO: 1392458 - RNA, 19 nt, Artificial Sequence
  Description of Artificial Sequence: Synthetic oligonucleotide
gucccgcgaugguuucaca

SEQ ID NO: 1392459 - RNA, 19 nt, Artificial Sequence
  Description of Artificial Sequence: Synthetic oligonucleotide
gagggcugacuggccccac

SEQ ID NO: 1392460 - RNA, 19 nt, Artificial Sequence
  Description of Artificial Sequence: Synthetic oligonucleotide
ggacuaggcugaguaugaa

SEQ ID NO: 1392461 - RNA, 19 nt, Artificial Sequence
  Description of Artificial Sequence: Synthetic oligonucleotide
ggcccugggguaugauaaa

SEQ ID NO: 1392462 - RNA, 19 nt, Artificial Sequence
  Description of Artificial Sequence: Synthetic oligonucleotide
cuguggucuuggugcugaa

SEQ ID NO: 1392463 - RNA, 19 nt, Artificial Sequence
  Description of Artificial Sequence: Synthetic oligonucleotide
ggcccaccaccaauaaugu

SEQ ID NO: 1392464 - RNA, 19 nt, Artificial Sequence
  Description of Artificial Sequence: Synthetic oligonucleotide
cuccuugcacauccucaau

SEQ ID NO: 1392465 - RNA, 19 nt, Artificial Sequence
  Description of Artificial Sequence: Synthetic oligonucleotide
cugucccgcgaugguuuca

SEQ ID NO: 1392466 - RNA, 19 nt, Artificial Sequence
  Description of Artificial Sequence: Synthetic oligonucleotide
gccucgaugaagagccacu

SEQ ID NO: 1392467 - RNA, 19 nt, Artificial Sequence
  Description of Artificial Sequence: Synthetic oligonucleotide
gccaaaccacuggguggcc

SEQ ID NO: 1392468 - RNA, 19 nt, Artificial Sequence
  Description of Artificial Sequence: Synthetic oligonucleotide
cccucaauucgccggacau

SEQ ID NO: 1392469 - RNA, 19 nt, Artificial Sequence
  Description of Artificial Sequence: Synthetic oligonucleotide
ccagugucggauccuuacu

SEQ ID NO: 1392470 - RNA, 19 nt, Artificial Sequence
  Description of Artificial Sequence: Synthetic oligonucleotide
caggcccaccaccaauaau

SEQ ID NO: 1392471 - RNA, 19 nt, Artificial Sequence
  Description of Artificial Sequence: Synthetic oligonucleotide
cccaaaagguagggaggga

SEQ ID NO: 1392472 - RNA, 19 nt, Artificial Sequence
  Description of Artificial Sequence: Synthetic oligonucleotide
ccccucaauucgccggaca

SEQ ID NO: 1392473 - RNA, 19 nt, Artificial Sequence
  Description of Artificial Sequence: Synthetic oligonucleotide
gggaaguccucaggaguau

SEQ ID NO: 1392474 - RNA, 19 nt, Artificial Sequence
  Description of Artificial Sequence: Synthetic oligonucleotide
ccagcgaucauggcuuuau

SEQ ID NO: 1392475 - RNA, 19 nt, Artificial Sequence
  Description of Artificial Sequence: Synthetic oligonucleotide
ccugcacuugcugccagcu

SEQ ID NO: 1392476 - RNA, 19 nt, Artificial Sequence
  Description of Artificial Sequence: Synthetic oligonucleotide
ccaccacuuccauaaucau

SEQ ID NO: 1392477 - RNA, 19 nt, Artificial Sequence
  Description of Artificial Sequence: Synthetic oligonucleotide
cccaacccugcccaggcuu

SEQ ID NO: 1392478 - RNA, 19 nt, Artificial Sequence
  Description of Artificial Sequence: Synthetic oligonucleotide
cgccgaaaguaccaccuau

SEQ ID NO: 1392479 - RNA, 19 nt, Artificial Sequence
  Description of Artificial Sequence: Synthetic oligonucleotide
gcaucccggcuggggccag

SEQ ID NO: 1392480 - RNA, 19 nt, Artificial Sequence
  Description of Artificial Sequence: Synthetic oligonucleotide
ccgacugcaccacguuccu

SEQ ID NO: 1392481 - RNA, 19 nt, Artificial Sequence
  Description of Artificial Sequence: Synthetic oligonucleotide
gcaccacguuccuguugcu

SEQ ID NO: 1392482 - RNA, 19 nt, Artificial Sequence
  Description of Artificial Sequence: Synthetic oligonucleotide
ccccaccaaucacacaauu

SEQ ID NO: 1392483 - RNA, 19 nt, Artificial Sequence
  Description of Artificial Sequence: Synthetic oligonucleotide
gccagcgaucauggcuuua

SEQ ID NO: 1392484 - RNA, 19 nt, Artificial Sequence
  Description of Artificial Sequence: Synthetic oligonucleotide
ggccagcgaucauggcuuu

SEQ ID NO: 1392485 - RNA, 19 nt, Artificial Sequence
  Description of Artificial Sequence: Synthetic oligonucleotide
cccugggcugccucccaau

SEQ ID NO: 1392486 - RNA, 19 nt, Artificial Sequence
  Description of Artificial Sequence: Synthetic oligonucleotide
uuauauaucuccuucaccg

SEQ ID NO: 1392487 - RNA, 19 nt, Artificial Sequence
  Description of Artificial Sequence: Synthetic oligonucleotide
ucugcuaacauauuaaugc

SEQ ID NO: 1392488 - RNA, 19 nt, Artificial Sequence
  Description of Artificial Sequence: Synthetic oligonucleotide
aaccacaugaccuaguuuc

SEQ ID NO: 1392489 - RNA, 19 nt, Artificial Sequence
  Description of Artificial Sequence: Synthetic oligonucleotide
aaagucaaaguuaacauac

SEQ ID NO: 1392490 - RNA, 19 nt, Artificial Sequence
  Description of Artificial Sequence: Synthetic oligonucleotide
uuuaguagaagccagaauc

SEQ ID NO: 1392491 - RNA, 19 nt, Artificial Sequence
  Description of Artificial Sequence: Synthetic oligonucleotide
aauagcgaagaauaugugg

SEQ ID NO: 1392492 - RNA, 19 nt, Artificial Sequence
  Description of Artificial Sequence: Synthetic oligonucleotide
uuuguagacguccauagcg

SEQ ID NO: 1392493 - RNA, 19 nt, Artificial Sequence
  Description of Artificial Sequence: Synthetic oligonucleotide
aauuguccaaaauuuauag

SEQ ID NO: 1392494 - RNA, 19 nt, Artificial Sequence
  Description of Artificial Sequence: Synthetic oligonucleotide
aauauguggacacauuguc

SEQ ID NO: 1392495 - RNA, 19 nt, Artificial Sequence
  Description of Artificial Sequence: Synthetic oligonucleotide
uuuggcuucuaaaagaaag

SEQ ID NO: 1392496 - RNA, 19 nt, Artificial Sequence
  Description of Artificial Sequence: Synthetic oligonucleotide
aaaguuucaaauaugaaga

SEQ ID NO: 1392497 - RNA, 19 nt, Artificial Sequence
  Description of Artificial Sequence: Synthetic oligonucleotide
agucaaauaacauccgacc

SEQ ID NO: 1392498 - RNA, 19 nt, Artificial Sequence
  Description of Artificial Sequence: Synthetic oligonucleotide
aauaacauccgaccauccc

SEQ ID NO: 1392499 - RNA, 19 nt, Artificial Sequence
  Description of Artificial Sequence: Synthetic oligonucleotide
aucaauaauauuaucacgg

SEQ ID NO: 1392500 - RNA, 19 nt, Artificial Sequence
  Description of Artificial Sequence: Synthetic oligonucleotide
aauaauauuaucacggccu

SEQ ID NO: 1392501 - RNA, 19 nt, Artificial Sequence
  Description of Artificial Sequence: Synthetic oligonucleotide
uuucgagucaaucuuggcg

SEQ ID NO: 1392502 - RNA, 19 nt, Artificial Sequence
  Description of Artificial Sequence: Synthetic oligonucleotide
aaugaaugagccauguucg

SEQ ID NO: 1392503 - RNA, 19 nt, Artificial Sequence
  Description of Artificial Sequence: Synthetic oligonucleotide
aaauaaagauacucugcgg

SEQ ID NO: 1392504 - RNA, 19 nt, Artificial Sequence
  Description of Artificial Sequence: Synthetic oligonucleotide
uauauaaugguuacugugu

SEQ ID NO: 1392505 - RNA, 19 nt, Artificial Sequence
  Description of Artificial Sequence: Synthetic oligonucleotide
uguaucuaaauacucuugc

SEQ ID NO: 1392506 - RNA, 19 nt, Artificial Sequence
  Description of Artificial Sequence: Synthetic oligonucleotide
ucuauggucucuuuuaacc

SEQ ID NO: 1392507 - RNA, 19 nt, Artificial Sequence
  Description of Artificial Sequence: Synthetic oligonucleotide
auuauauaucuccuucacc

SEQ ID NO: 1392508 - RNA, 19 nt, Artificial Sequence
  Description of Artificial Sequence: Synthetic oligonucleotide
uuuucgauauucauggcca

SEQ ID NO: 1392509 - RNA, 19 nt, Artificial Sequence
  Description of Artificial Sequence: Synthetic oligonucleotide
uuuuaaccgagucaggucu

SEQ ID NO: 1392510 - RNA, 19 nt, Artificial Sequence
  Description of Artificial Sequence: Synthetic oligonucleotide
uauuaaugcugauacacug

SEQ ID NO: 1392511 - RNA, 19 nt, Artificial Sequence
  Description of Artificial Sequence: Synthetic oligonucleotide
aaauucacaauccaucuuu

SEQ ID NO: 1392512 - RNA, 19 nt, Artificial Sequence
  Description of Artificial Sequence: Synthetic oligonucleotide
uucacaauccaucuuucag

SEQ ID NO: 1392513 - RNA, 19 nt, Artificial Sequence
  Description of Artificial Sequence: Synthetic oligonucleotide
ucucuuuuaaccgagucag

SEQ ID NO: 1392514 - RNA, 19 nt, Artificial Sequence
  Description of Artificial Sequence: Synthetic oligonucleotide
uuccuaaucaaauucacaa

SEQ ID NO: 1392515 - RNA, 19 nt, Artificial Sequence
  Description of Artificial Sequence: Synthetic oligonucleotide
gaagagaucaauaauauua

SEQ ID NO: 1392516 - RNA, 19 nt, Artificial Sequence
  Description of Artificial Sequence: Synthetic oligonucleotide
acaucuucacaauugguuc

SEQ ID NO: 1392517 - RNA, 19 nt, Artificial Sequence
  Description of Artificial Sequence: Synthetic oligonucleotide
cauauuaaugcugauacac

SEQ ID NO: 1392518 - RNA, 19 nt, Artificial Sequence
  Description of Artificial Sequence: Synthetic oligonucleotide
aaauucuguaauugggucu

SEQ ID NO: 1392519 - RNA, 19 nt, Artificial Sequence
  Description of Artificial Sequence: Synthetic oligonucleotide
agaauauguggacacauug

SEQ ID NO: 1392520 - RNA, 19 nt, Artificial Sequence
  Description of Artificial Sequence: Synthetic oligonucleotide
uauuaucacggccuuuugg

SEQ ID NO: 1392521 - RNA, 19 nt, Artificial Sequence
  Description of Artificial Sequence: Synthetic oligonucleotide
uuaacauacaagcauucaa

SEQ ID NO: 1392522 - RNA, 19 nt, Artificial Sequence
  Description of Artificial Sequence: Synthetic oligonucleotide
aauaugaagagacgggcau

SEQ ID NO: 1392523 - RNA, 19 nt, Artificial Sequence
  Description of Artificial Sequence: Synthetic oligonucleotide
cacccuuuauauauaaugg

SEQ ID NO: 1392524 - RNA, 19 nt, Artificial Sequence
  Description of Artificial Sequence: Synthetic oligonucleotide
ucaauaauauuaucacggc

SEQ ID NO: 1392525 - RNA, 19 nt, Artificial Sequence
  Description of Artificial Sequence: Synthetic oligonucleotide
caaugaaugagccauguuc

SEQ ID NO: 1392526 - RNA, 19 nt, Artificial Sequence
  Description of Artificial Sequence: Synthetic oligonucleotide
agucauauucaguuuaucu

SEQ ID NO: 1392527 - RNA, 19 nt, Artificial Sequence
  Description of Artificial Sequence: Synthetic oligonucleotide
cugauuaagcuucuuuucg

SEQ ID NO: 1392528 - RNA, 19 nt, Artificial Sequence
  Description of Artificial Sequence: Synthetic oligonucleotide
gguaucacuaagaagaucc

SEQ ID NO: 1392529 - RNA, 19 nt, Artificial Sequence
  Description of Artificial Sequence: Synthetic oligonucleotide
uguaauugggucuuuguau

SEQ ID NO: 1392530 - RNA, 19 nt, Artificial Sequence
  Description of Artificial Sequence: Synthetic oligonucleotide
uuaguagaagccagaaucu

SEQ ID NO: 1392531 - RNA, 19 nt, Artificial Sequence
  Description of Artificial Sequence: Synthetic oligonucleotide
ucacaauccaucuuucagc

SEQ ID NO: 1392532 - RNA, 19 nt, Artificial Sequence
  Description of Artificial Sequence: Synthetic oligonucleotide
uauggcacccuuuauauau

SEQ ID NO: 1392533 - RNA, 19 nt, Artificial Sequence
  Description of Artificial Sequence: Synthetic oligonucleotide
ugaccuacuguucugauua

SEQ ID NO: 1392534 - RNA, 19 nt, Artificial Sequence
  Description of Artificial Sequence: Synthetic oligonucleotide
ugcauuccuaaucaaauuc

SEQ ID NO: 1392535 - RNA, 19 nt, Artificial Sequence
  Description of Artificial Sequence: Synthetic oligonucleotide
auuaucacggccuuuugga

SEQ ID NO: 1392536 - RNA, 19 nt, Artificial Sequence
  Description of Artificial Sequence: Synthetic oligonucleotide
uguguaagacuccuguuga

SEQ ID NO: 1392537 - RNA, 19 nt, Artificial Sequence
  Description of Artificial Sequence: Synthetic oligonucleotide
auugcguuaagguacugug

SEQ ID NO: 1392538 - RNA, 19 nt, Artificial Sequence
  Description of Artificial Sequence: Synthetic oligonucleotide
ugugcaacaacugugguuc

SEQ ID NO: 1392539 - RNA, 19 nt, Artificial Sequence
  Description of Artificial Sequence: Synthetic oligonucleotide
gagacgggcauuuucaaug

SEQ ID NO: 1392540 - RNA, 19 nt, Artificial Sequence
  Description of Artificial Sequence: Synthetic oligonucleotide
gaugcggguggucaggucg

SEQ ID NO: 1392541 - RNA, 19 nt, Artificial Sequence
  Description of Artificial Sequence: Synthetic oligonucleotide
uauaauucuuuaguagaag

SEQ ID NO: 1392542 - RNA, 19 nt, Artificial Sequence
  Description of Artificial Sequence: Synthetic oligonucleotide
cuggauugcguuaagguac

SEQ ID NO: 1392543 - RNA, 19 nt, Artificial Sequence
  Description of Artificial Sequence: Synthetic oligonucleotide
aaaucaaucacagccaauu

SEQ ID NO: 1392544 - RNA, 19 nt, Artificial Sequence
  Description of Artificial Sequence: Synthetic oligonucleotide
uucgagucaaucuuggcgu

SEQ ID NO: 1392545 - RNA, 19 nt, Artificial Sequence
  Description of Artificial Sequence: Synthetic oligonucleotide
cuauggucucuuuuaaccg

SEQ ID NO: 1392546 - RNA, 19 nt, Artificial Sequence
  Description of Artificial Sequence: Synthetic oligonucleotide
auaacauccgaccaucccu

SEQ ID NO: 1392547 - RNA, 19 nt, Artificial Sequence
  Description of Artificial Sequence: Synthetic oligonucleotide
agcaaaugucaauuguuuc

SEQ ID NO: 1392548 - RNA, 19 nt, Artificial Sequence
  Description of Artificial Sequence: Synthetic oligonucleotide
aaccuugcauuccuaauca

SEQ ID NO: 1392549 - RNA, 19 nt, Artificial Sequence
  Description of Artificial Sequence: Synthetic oligonucleotide
ucaaauaacauccgaccau

SEQ ID NO: 1392550 - RNA, 19 nt, Artificial Sequence
  Description of Artificial Sequence: Synthetic oligonucleotide
uggaauuuugcguaucugu

SEQ ID NO: 1392551 - RNA, 19 nt, Artificial Sequence
  Description of Artificial Sequence: Synthetic oligonucleotide
uuugcguaucuguacagug

SEQ ID NO: 1392552 - RNA, 19 nt, Artificial Sequence
  Description of Artificial Sequence: Synthetic oligonucleotide
guaauugggucuuuguaug

SEQ ID NO: 1392553 - RNA, 19 nt, Artificial Sequence
  Description of Artificial Sequence: Synthetic oligonucleotide
uugccuaaacccaugcuug

SEQ ID NO: 1392554 - RNA, 19 nt, Artificial Sequence
  Description of Artificial Sequence: Synthetic oligonucleotide
auguguaagacuccuguug

SEQ ID NO: 1392555 - RNA, 19 nt, Artificial Sequence
  Description of Artificial Sequence: Synthetic oligonucleotide
ugcguuaagguacuguggu

SEQ ID NO: 1392556 - RNA, 19 nt, Artificial Sequence
  Description of Artificial Sequence: Synthetic oligonucleotide
auauaucuccuucaccgag

SEQ ID NO: 1392557 - RNA, 19 nt, Artificial Sequence
  Description of Artificial Sequence: Synthetic oligonucleotide
ugcuaacauauuaaugcug

SEQ ID NO: 1392558 - RNA, 19 nt, Artificial Sequence
  Description of Artificial Sequence: Synthetic oligonucleotide
ucaguugugcaacaacugu

SEQ ID NO: 1392559 - RNA, 19 nt, Artificial Sequence
  Description of Artificial Sequence: Synthetic oligonucleotide
uguauggcacccuuuauau

SEQ ID NO: 1392560 - RNA, 19 nt, Artificial Sequence
  Description of Artificial Sequence: Synthetic oligonucleotide
uuggcuucuaaaagaaaga

SEQ ID NO: 1392561 - RNA, 19 nt, Artificial Sequence
  Description of Artificial Sequence: Synthetic oligonucleotide
ucugauuaagcuucuuuuc

SEQ ID NO: 1392562 - RNA, 19 nt, Artificial Sequence
  Description of Artificial Sequence: Synthetic oligonucleotide
ugauuaagcuucuuuucga

SEQ ID NO: 1392563 - RNA, 19 nt, Artificial Sequence
  Description of Artificial Sequence: Synthetic oligonucleotide
ucuuucagaacuugccggc

SEQ ID NO: 1392564 - RNA, 19 nt, Artificial Sequence
  Description of Artificial Sequence: Synthetic oligonucleotide
cugugguugguaaaggaag

SEQ ID NO: 1392565 - RNA, 19 nt, Artificial Sequence
  Description of Artificial Sequence: Synthetic oligonucleotide
augaaugagccauguucgc

SEQ ID NO: 1392566 - RNA, 19 nt, Artificial Sequence
  Description of Artificial Sequence: Synthetic oligonucleotide
guaucuaaauacucuugcc

SEQ ID NO: 1392567 - RNA, 19 nt, Artificial Sequence
  Description of Artificial Sequence: Synthetic oligonucleotide
auauucauggccaacauuu

SEQ ID NO: 1392568 - RNA, 19 nt, Artificial Sequence
  Description of Artificial Sequence: Synthetic oligonucleotide
uugcguuaagguacugugg

SEQ ID NO: 1392569 - RNA, 19 nt, Artificial Sequence
  Description of Artificial Sequence: Synthetic oligonucleotide
guuaagguacugugguugg

SEQ ID NO: 1392570 - RNA, 19 nt, Artificial Sequence
  Description of Artificial Sequence: Synthetic oligonucleotide
uuuguauguguaagacucc

SEQ ID NO: 1392571 - RNA, 19 nt, Artificial Sequence
  Description of Artificial Sequence: Synthetic oligonucleotide
aauucacaauccaucuuuc

SEQ ID NO: 1392572 - RNA, 19 nt, Artificial Sequence
  Description of Artificial Sequence: Synthetic oligonucleotide
auagcgaagaauaugugga

SEQ ID NO: 1392573 - RNA, 19 nt, Artificial Sequence
  Description of Artificial Sequence: Synthetic oligonucleotide
ugugguugguaaaggaaga

SEQ ID NO: 1392574 - RNA, 19 nt, Artificial Sequence
  Description of Artificial Sequence: Synthetic oligonucleotide
agagaccaaugaaugagcc

SEQ ID NO: 1392575 - RNA, 19 nt, Artificial Sequence
  Description of Artificial Sequence: Synthetic oligonucleotide
uguuaugacagcagugguc

SEQ ID NO: 1392576 - RNA, 19 nt, Artificial Sequence
  Description of Artificial Sequence: Synthetic oligonucleotide
agcacggauucacauuccc

SEQ ID NO: 1392577 - RNA, 19 nt, Artificial Sequence
  Description of Artificial Sequence: Synthetic oligonucleotide
ugcuagguagucaaauaac

SEQ ID NO: 1392578 - RNA, 19 nt, Artificial Sequence
  Description of Artificial Sequence: Synthetic oligonucleotide
agcuuagugcauuucuauc

SEQ ID NO: 1392579 - RNA, 19 nt, Artificial Sequence
  Description of Artificial Sequence: Synthetic oligonucleotide
accgagaggaacucgagca

SEQ ID NO: 1392580 - RNA, 19 nt, Artificial Sequence
  Description of Artificial Sequence: Synthetic oligonucleotide
aagacuccuguugaauaac

SEQ ID NO: 1392581 - RNA, 19 nt, Artificial Sequence
  Description of Artificial Sequence: Synthetic oligonucleotide
aguuuaucugcuaacauau

SEQ ID NO: 1392582 - RNA, 19 nt, Artificial Sequence
  Description of Artificial Sequence: Synthetic oligonucleotide
uaacauccgaccaucccug

SEQ ID NO: 1392583 - RNA, 19 nt, Artificial Sequence
  Description of Artificial Sequence: Synthetic oligonucleotide
aauuuauagcaaaugucaa

SEQ ID NO: 1392584 - RNA, 19 nt, Artificial Sequence
  Description of Artificial Sequence: Synthetic oligonucleotide
uuguagacguccauagcga

SEQ ID NO: 1392585 - RNA, 19 nt, Artificial Sequence
  Description of Artificial Sequence: Synthetic oligonucleotide
aguugugcaacaacugugg

SEQ ID NO: 1392586 - RNA, 19 nt, Artificial Sequence
  Description of Artificial Sequence: Synthetic oligonucleotide
cauacaagcauucaacaaa

SEQ ID NO: 1392587 - RNA, 19 nt, Artificial Sequence
  Description of Artificial Sequence: Synthetic oligonucleotide
uauauaucuccuucaccga

SEQ ID NO: 1392588 - RNA, 19 nt, Artificial Sequence
  Description of Artificial Sequence: Synthetic oligonucleotide
aacuugccggcguuuccgc

SEQ ID NO: 1392589 - RNA, 19 nt, Artificial Sequence
  Description of Artificial Sequence: Synthetic oligonucleotide
aucuaaauacucuugccua

SEQ ID NO: 1392590 - RNA, 19 nt, Artificial Sequence
  Description of Artificial Sequence: Synthetic oligonucleotide
uguucgcugcugaagagac

SEQ ID NO: 1392591 - RNA, 19 nt, Artificial Sequence
  Description of Artificial Sequence: Synthetic oligonucleotide
caaauagcgaagaauaugu

SEQ ID NO: 1392592 - RNA, 19 nt, Artificial Sequence
  Description of Artificial Sequence: Synthetic oligonucleotide
agcgaaguccaccauguug

SEQ ID NO: 1392593 - RNA, 19 nt, Artificial Sequence
  Description of Artificial Sequence: Synthetic oligonucleotide
uggagcggagaacucacag

SEQ ID NO: 1392594 - RNA, 19 nt, Artificial Sequence
  Description of Artificial Sequence: Synthetic oligonucleotide
ucauucacaagcacggauu

SEQ ID NO: 1392595 - RNA, 19 nt, Artificial Sequence
  Description of Artificial Sequence: Synthetic oligonucleotide
agaaucuuggguugcccag

SEQ ID NO: 1392596 - RNA, 19 nt, Artificial Sequence
  Description of Artificial Sequence: Synthetic oligonucleotide
uaaauacucuugccuaaac

SEQ ID NO: 1392597 - RNA, 19 nt, Artificial Sequence
  Description of Artificial Sequence: Synthetic oligonucleotide
guuaugacagcagugguca

SEQ ID NO: 1392598 - RNA, 19 nt, Artificial Sequence
  Description of Artificial Sequence: Synthetic oligonucleotide
ucguacucggccaucuugc

SEQ ID NO: 1392599 - RNA, 19 nt, Artificial Sequence
  Description of Artificial Sequence: Synthetic oligonucleotide
ucuggauugcguuaaggua

SEQ ID NO: 1392600 - RNA, 19 nt, Artificial Sequence
  Description of Artificial Sequence: Synthetic oligonucleotide
uaucacggccuuuuggaug

SEQ ID NO: 1392601 - RNA, 19 nt, Artificial Sequence
  Description of Artificial Sequence: Synthetic oligonucleotide
acccuuuauauauaauggu

SEQ ID NO: 1392602 - RNA, 19 nt, Artificial Sequence
  Description of Artificial Sequence: Synthetic oligonucleotide
cagcaguggucaaauagcg

SEQ ID NO: 1392603 - RNA, 19 nt, Artificial Sequence
  Description of Artificial Sequence: Synthetic oligonucleotide
caagcacggauucacauuc

SEQ ID NO: 1392604 - RNA, 19 nt, Artificial Sequence
  Description of Artificial Sequence: Synthetic oligonucleotide
uggagucauauucaguuua

SEQ ID NO: 1392605 - RNA, 19 nt, Artificial Sequence
  Description of Artificial Sequence: Synthetic oligonucleotide
uaguuucgagucaaucuug

SEQ ID NO: 1392606 - RNA, 19 nt, Artificial Sequence
  Description of Artificial Sequence: Synthetic oligonucleotide
ucgauauucauggccaaca

SEQ ID NO: 1392607 - RNA, 19 nt, Artificial Sequence
  Description of Artificial Sequence: Synthetic oligonucleotide
gucaaauaacauccgacca

SEQ ID NO: 1392608 - RNA, 19 nt, Artificial Sequence
  Description of Artificial Sequence: Synthetic oligonucleotide
agaccaaugaaugagccau

SEQ ID NO: 1392609 - RNA, 19 nt, Artificial Sequence
  Description of Artificial Sequence: Synthetic oligonucleotide
uucacaagcacggauucac

SEQ ID NO: 1392610 - RNA, 19 nt, Artificial Sequence
  Description of Artificial Sequence: Synthetic oligonucleotide
cuuagugcauuucuaucug

SEQ ID NO: 1392611 - RNA, 19 nt, Artificial Sequence
  Description of Artificial Sequence: Synthetic oligonucleotide
agccccaucaaagucaaag

SEQ ID NO: 1392612 - RNA, 19 nt, Artificial Sequence
  Description of Artificial Sequence: Synthetic oligonucleotide
ugucauccgaauaaagguu

SEQ ID NO: 1392613 - RNA, 19 nt, Artificial Sequence
  Description of Artificial Sequence: Synthetic oligonucleotide
aauugggucuuuguaugug

SEQ ID NO: 1392614 - RNA, 19 nt, Artificial Sequence
  Description of Artificial Sequence: Synthetic oligonucleotide
auagggugagacugcauug

SEQ ID NO: 1392615 - RNA, 19 nt, Artificial Sequence
  Description of Artificial Sequence: Synthetic oligonucleotide
ugcccauaaccacaugacc

SEQ ID NO: 1392616 - RNA, 19 nt, Artificial Sequence
  Description of Artificial Sequence: Synthetic oligonucleotide
uucuuuaguagaagccaga

SEQ ID NO: 1392617 - RNA, 19 nt, Artificial Sequence
  Description of Artificial Sequence: Synthetic oligonucleotide
aaauuguccaaaauuuaua

SEQ ID NO: 1392618 - RNA, 19 nt, Artificial Sequence
  Description of Artificial Sequence: Synthetic oligonucleotide
uucacaauugguuccguuu

SEQ ID NO: 1392619 - RNA, 19 nt, Artificial Sequence
  Description of Artificial Sequence: Synthetic oligonucleotide
caugaccuaguuucgaguc

SEQ ID NO: 1392620 - RNA, 19 nt, Artificial Sequence
  Description of Artificial Sequence: Synthetic oligonucleotide
auuuugcguaucuguacag

SEQ ID NO: 1392621 - RNA, 19 nt, Artificial Sequence
  Description of Artificial Sequence: Synthetic oligonucleotide
uguauguguaagacuccug

SEQ ID NO: 1392622 - RNA, 19 nt, Artificial Sequence
  Description of Artificial Sequence: Synthetic oligonucleotide
uugcccauaaccacaugac

SEQ ID NO: 1392623 - RNA, 19 nt, Artificial Sequence
  Description of Artificial Sequence: Synthetic oligonucleotide
aaucacagccaauuuuauu

SEQ ID NO: 1392624 - RNA, 19 nt, Artificial Sequence
  Description of Artificial Sequence: Synthetic oligonucleotide
acauacaagcauucaacaa

SEQ ID NO: 1392625 - RNA, 19 nt, Artificial Sequence
  Description of Artificial Sequence: Synthetic oligonucleotide
uucaacaaauucuguaauu

SEQ ID NO: 1392626 - RNA, 19 nt, Artificial Sequence
  Description of Artificial Sequence: Synthetic oligonucleotide
aaucuuggcguccaaccuu

SEQ ID NO: 1392627 - RNA, 19 nt, Artificial Sequence
  Description of Artificial Sequence: Synthetic oligonucleotide
aaguuaacauacaagcauu

SEQ ID NO: 1392628 - RNA, 19 nt, Artificial Sequence
  Description of Artificial Sequence: Synthetic oligonucleotide
uuguuaugacagcaguggu

SEQ ID NO: 1392629 - RNA, 19 nt, Artificial Sequence
  Description of Artificial Sequence: Synthetic oligonucleotide
cacggauucacauucccuc

SEQ ID NO: 1392630 - RNA, 19 nt, Artificial Sequence
  Description of Artificial Sequence: Synthetic oligonucleotide
aguuucaaauaugaagaga

SEQ ID NO: 1392631 - RNA, 19 nt, Artificial Sequence
  Description of Artificial Sequence: Synthetic oligonucleotide
uaacauauuaaugcugaua

SEQ ID NO: 1392632 - RNA, 19 nt, Artificial Sequence
  Description of Artificial Sequence: Synthetic oligonucleotide
uagacguccauagcgaagu

SEQ ID NO: 1392633 - RNA, 19 nt, Artificial Sequence
  Description of Artificial Sequence: Synthetic oligonucleotide
auacucugcggcuccagag

SEQ ID NO: 1392634 - RNA, 19 nt, Artificial Sequence
  Description of Artificial Sequence: Synthetic oligonucleotide
guugcccauaaccacauga

SEQ ID NO: 1392635 - RNA, 19 nt, Artificial Sequence
  Description of Artificial Sequence: Synthetic oligonucleotide
acuggaauuuugcguaucu

SEQ ID NO: 1392636 - RNA, 19 nt, Artificial Sequence
  Description of Artificial Sequence: Synthetic oligonucleotide
caguugugcaacaacugug

SEQ ID NO: 1392637 - RNA, 19 nt, Artificial Sequence
  Description of Artificial Sequence: Synthetic oligonucleotide
uggguugcccaguugggag

SEQ ID NO: 1392638 - RNA, 19 nt, Artificial Sequence
  Description of Artificial Sequence: Synthetic oligonucleotide
aaauagcgaagaauaugug

SEQ ID NO: 1392639 - RNA, 19 nt, Artificial Sequence
  Description of Artificial Sequence: Synthetic oligonucleotide
gaagagacgggcauuuuca

SEQ ID NO: 1392640 - RNA, 19 nt, Artificial Sequence
  Description of Artificial Sequence: Synthetic oligonucleotide
auaauauuaucacggccuu

SEQ ID NO: 1392641 - RNA, 19 nt, Artificial Sequence
  Description of Artificial Sequence: Synthetic oligonucleotide
cauagcgaaguccaccaug

SEQ ID NO: 1392642 - RNA, 19 nt, Artificial Sequence
  Description of Artificial Sequence: Synthetic oligonucleotide
uugcguaucuguacagugu

SEQ ID NO: 1392643 - RNA, 19 nt, Artificial Sequence
  Description of Artificial Sequence: Synthetic oligonucleotide
auugggucuuuguaugugu

SEQ ID NO: 1392644 - RNA, 19 nt, Artificial Sequence
  Description of Artificial Sequence: Synthetic oligonucleotide
acucacagaauuguugucu

SEQ ID NO: 1392645 - RNA, 19 nt, Artificial Sequence
  Description of Artificial Sequence: Synthetic oligonucleotide
ugcguaucuguacagugua

SEQ ID NO: 1392646 - RNA, 19 nt, Artificial Sequence
  Description of Artificial Sequence: Synthetic oligonucleotide
aguuucgagucaaucuugg

SEQ ID NO: 1392647 - RNA, 19 nt, Artificial Sequence
  Description of Artificial Sequence: Synthetic oligonucleotide
aacauccgaccaucccugg

SEQ ID NO: 1392648 - RNA, 19 nt, Artificial Sequence
  Description of Artificial Sequence: Synthetic oligonucleotide
auaaugguuacugugucuu

SEQ ID NO: 1392649 - RNA, 19 nt, Artificial Sequence
  Description of Artificial Sequence: Synthetic oligonucleotide
aagguacugugguugguaa

SEQ ID NO: 1392650 - RNA, 19 nt, Artificial Sequence
  Description of Artificial Sequence: Synthetic oligonucleotide
aguccucaagacaagccac

SEQ ID NO: 1392651 - RNA, 19 nt, Artificial Sequence
  Description of Artificial Sequence: Synthetic oligonucleotide
ugucuggauugcguuaagg

SEQ ID NO: 1392652 - RNA, 19 nt, Artificial Sequence
  Description of Artificial Sequence: Synthetic oligonucleotide
aaacccaugcuugucugcu

SEQ ID NO: 1392653 - RNA, 19 nt, Artificial Sequence
  Description of Artificial Sequence: Synthetic oligonucleotide
auggcugcaucccaauucu

SEQ ID NO: 1392654 - RNA, 19 nt, Artificial Sequence
  Description of Artificial Sequence: Synthetic oligonucleotide
caagaagaagucauucaca

SEQ ID NO: 1392655 - RNA, 19 nt, Artificial Sequence
  Description of Artificial Sequence: Synthetic oligonucleotide
cacaugaccuaguuucgag

SEQ ID NO: 1392656 - RNA, 19 nt, Artificial Sequence
  Description of Artificial Sequence: Synthetic oligonucleotide
guagucaaauaacauccga

SEQ ID NO: 1392657 - RNA, 19 nt, Artificial Sequence
  Description of Artificial Sequence: Synthetic oligonucleotide
ugauacacugguggauacg

SEQ ID NO: 1392658 - RNA, 19 nt, Artificial Sequence
  Description of Artificial Sequence: Synthetic oligonucleotide
cuaaacccaugcuugucug

SEQ ID NO: 1392659 - RNA, 19 nt, Artificial Sequence
  Description of Artificial Sequence: Synthetic oligonucleotide
caaagcaugagggauguca

SEQ ID NO: 1392660 - RNA, 19 nt, Artificial Sequence
  Description of Artificial Sequence: Synthetic oligonucleotide
auauuaaugcugauacacu

SEQ ID NO: 1392661 - RNA, 19 nt, Artificial Sequence
  Description of Artificial Sequence: Synthetic oligonucleotide
auaaccacaugaccuaguu

SEQ ID NO: 1392662 - RNA, 19 nt, Artificial Sequence
  Description of Artificial Sequence: Synthetic oligonucleotide
uuguauguguaagacuccu

SEQ ID NO: 1392663 - RNA, 19 nt, Artificial Sequence
  Description of Artificial Sequence: Synthetic oligonucleotide
uaauugggucuuuguaugu

SEQ ID NO: 1392664 - RNA, 19 nt, Artificial Sequence
  Description of Artificial Sequence: Synthetic oligonucleotide
uuagugcauuucuaucugu

SEQ ID NO: 1392665 - RNA, 19 nt, Artificial Sequence
  Description of Artificial Sequence: Synthetic oligonucleotide
ucugcuagguagucaaaua

SEQ ID NO: 1392666 - RNA, 19 nt, Artificial Sequence
  Description of Artificial Sequence: Synthetic oligonucleotide
aaucacuugcugauagggu

SEQ ID NO: 1392667 - RNA, 19 nt, Artificial Sequence
  Description of Artificial Sequence: Synthetic oligonucleotide
acaugaccuaguuucgagu

SEQ ID NO: 1392668 - RNA, 19 nt, Artificial Sequence
  Description of Artificial Sequence: Synthetic oligonucleotide
uucagaggccaguuuuccc

SEQ ID NO: 1392669 - RNA, 19 nt, Artificial Sequence
  Description of Artificial Sequence: Synthetic oligonucleotide
cuuggguugcccaguuggg

SEQ ID NO: 1392670 - RNA, 19 nt, Artificial Sequence
  Description of Artificial Sequence: Synthetic oligonucleotide
ugaaugagccauguucgcu

SEQ ID NO: 1392671 - RNA, 19 nt, Artificial Sequence
  Description of Artificial Sequence: Synthetic oligonucleotide
caaacagagaccaaugaau

SEQ ID NO: 1392672 - RNA, 19 nt, Artificial Sequence
  Description of Artificial Sequence: Synthetic oligonucleotide
ugguugguaaaggaagaga

SEQ ID NO: 1392673 - RNA, 19 nt, Artificial Sequence
  Description of Artificial Sequence: Synthetic oligonucleotide
uggauugcguuaagguacu

SEQ ID NO: 1392674 - RNA, 19 nt, Artificial Sequence
  Description of Artificial Sequence: Synthetic oligonucleotide
auguauggcacccuuuaua

SEQ ID NO: 1392675 - RNA, 19 nt, Artificial Sequence
  Description of Artificial Sequence: Synthetic oligonucleotide
ucuugccuaaacccaugcu

SEQ ID NO: 1392676 - RNA, 19 nt, Artificial Sequence
  Description of Artificial Sequence: Synthetic oligonucleotide
uacucuugccuaaacccau

SEQ ID NO: 1392677 - RNA, 19 nt, Artificial Sequence
  Description of Artificial Sequence: Synthetic oligonucleotide
auauuaucacggccuuuug

SEQ ID NO: 1392678 - RNA, 19 nt, Artificial Sequence
  Description of Artificial Sequence: Synthetic oligonucleotide
ugccuuguaguuucugggu

SEQ ID NO: 1392679 - RNA, 19 nt, Artificial Sequence
  Description of Artificial Sequence: Synthetic oligonucleotide
guauguguaagacuccugu

SEQ ID NO: 1392680 - RNA, 19 nt, Artificial Sequence
  Description of Artificial Sequence: Synthetic oligonucleotide
auuaagcuucuuuucgaua

SEQ ID NO: 1392681 - RNA, 19 nt, Artificial Sequence
  Description of Artificial Sequence: Synthetic oligonucleotide
uuuugcguaucuguacagu

SEQ ID NO: 1392682 - RNA, 19 nt, Artificial Sequence
  Description of Artificial Sequence: Synthetic oligonucleotide
auacaagcauucaacaaau

SEQ ID NO: 1392683 - RNA, 19 nt, Artificial Sequence
  Description of Artificial Sequence: Synthetic oligonucleotide
uuuccgcacaucuuuguuu

SEQ ID NO: 1392684 - RNA, 19 nt, Artificial Sequence
  Description of Artificial Sequence: Synthetic oligonucleotide
uacucugcggcuccagagu

SEQ ID NO: 1392685 - RNA, 19 nt, Artificial Sequence
  Description of Artificial Sequence: Synthetic oligonucleotide
aguggucaaauagcgaaga

SEQ ID NO: 1392686 - RNA, 19 nt, Artificial Sequence
  Description of Artificial Sequence: Synthetic oligonucleotide
auagcgaaguccaccaugu

SEQ ID NO: 1392687 - RNA, 19 nt, Artificial Sequence
  Description of Artificial Sequence: Synthetic oligonucleotide
aagagacgggcauuuucaa

SEQ ID NO: 1392688 - RNA, 19 nt, Artificial Sequence
  Description of Artificial Sequence: Synthetic oligonucleotide
accuaguuucgagucaauc

SEQ ID NO: 1392689 - RNA, 19 nt, Artificial Sequence
  Description of Artificial Sequence: Synthetic oligonucleotide
aagucaaaguuaacauaca

SEQ ID NO: 1392690 - RNA, 19 nt, Artificial Sequence
  Description of Artificial Sequence: Synthetic oligonucleotide
ggucaaauagcgaagaaua

SEQ ID NO: 1392691 - RNA, 19 nt, Artificial Sequence
  Description of Artificial Sequence: Synthetic oligonucleotide
caguggucaaauagcgaag

SEQ ID NO: 1392692 - RNA, 19 nt, Artificial Sequence
  Description of Artificial Sequence: Synthetic oligonucleotide
uauguguaagacuccuguu

SEQ ID NO: 1392693 - RNA, 19 nt, Artificial Sequence
  Description of Artificial Sequence: Synthetic oligonucleotide
gcuaacauauuaaugcuga

SEQ ID NO: 1392694 - RNA, 19 nt, Artificial Sequence
  Description of Artificial Sequence: Synthetic oligonucleotide
gagaccaaugaaugagcca

SEQ ID NO: 1392695 - RNA, 19 nt, Artificial Sequence
  Description of Artificial Sequence: Synthetic oligonucleotide
aagcacggauucacauucc

SEQ ID NO: 1392696 - RNA, 19 nt, Artificial Sequence
  Description of Artificial Sequence: Synthetic oligonucleotide
guacucggccaucuugccg

SEQ ID NO: 1392697 - RNA, 19 nt, Artificial Sequence
  Description of Artificial Sequence: Synthetic oligonucleotide
acuggagcggagaacucac

SEQ ID NO: 1392698 - RNA, 19 nt, Artificial Sequence
  Description of Artificial Sequence: Synthetic oligonucleotide
guguaucuaaauacucuug

SEQ ID NO: 1392699 - RNA, 19 nt, Artificial Sequence
  Description of Artificial Sequence: Synthetic oligonucleotide
uugugcaacaacugugguu

SEQ ID NO: 1392700 - RNA, 19 nt, Artificial Sequence
  Description of Artificial Sequence: Synthetic oligonucleotide
uccaaccuugcauuccuaa

SEQ ID NO: 1392701 - RNA, 19 nt, Artificial Sequence
  Description of Artificial Sequence: Synthetic oligonucleotide
ugagccccaucaaagucaa

SEQ ID NO: 1392702 - RNA, 19 nt, Artificial Sequence
  Description of Artificial Sequence: Synthetic oligonucleotide
uugcauuccuaaucaaauu

SEQ ID NO: 1392703 - RNA, 19 nt, Artificial Sequence
  Description of Artificial Sequence: Synthetic oligonucleotide
agagacuggagcggagaac

SEQ ID NO: 1392704 - RNA, 19 nt, Artificial Sequence
  Description of Artificial Sequence: Synthetic oligonucleotide
gucguacucggccaucuug

SEQ ID NO: 1392705 - RNA, 19 nt, Artificial Sequence
  Description of Artificial Sequence: Synthetic oligonucleotide
auauguggacacauugucu

SEQ ID NO: 1392706 - RNA, 19 nt, Artificial Sequence
  Description of Artificial Sequence: Synthetic oligonucleotide
cauguucgcugcugaagag

SEQ ID NO: 1392707 - RNA, 19 nt, Artificial Sequence
  Description of Artificial Sequence: Synthetic oligonucleotide
uuaucacggccuuuuggau

SEQ ID NO: 1392708 - RNA, 19 nt, Artificial Sequence
  Description of Artificial Sequence: Synthetic oligonucleotide
auuccuaaucaaauucaca

SEQ ID NO: 1392709 - RNA, 19 nt, Artificial Sequence
  Description of Artificial Sequence: Synthetic oligonucleotide
cucuugccuaaacccaugc

SEQ ID NO: 1392710 - RNA, 19 nt, Artificial Sequence
  Description of Artificial Sequence: Synthetic oligonucleotide
cugauacacugguggauac

SEQ ID NO: 1392711 - RNA, 19 nt, Artificial Sequence
  Description of Artificial Sequence: Synthetic oligonucleotide
uugcuggaaccaaaacccu

SEQ ID NO: 1392712 - RNA, 19 nt, Artificial Sequence
  Description of Artificial Sequence: Synthetic oligonucleotide
guuucgagucaaucuuggc

SEQ ID NO: 1392713 - RNA, 19 nt, Artificial Sequence
  Description of Artificial Sequence: Synthetic oligonucleotide
gguagucaaauaacauccg

SEQ ID NO: 1392714 - RNA, 19 nt, Artificial Sequence
  Description of Artificial Sequence: Synthetic oligonucleotide
agacgggcauuuucaauga

SEQ ID NO: 1392715 - RNA, 19 nt, Artificial Sequence
  Description of Artificial Sequence: Synthetic oligonucleotide
augaccuaguuucgaguca

SEQ ID NO: 1392716 - RNA, 19 nt, Artificial Sequence
  Description of Artificial Sequence: Synthetic oligonucleotide
uuucgauauucauggccaa

SEQ ID NO: 1392717 - RNA, 19 nt, Artificial Sequence
  Description of Artificial Sequence: Synthetic oligonucleotide
auuguugucuauggucucu

SEQ ID NO: 1392718 - RNA, 19 nt, Artificial Sequence
  Description of Artificial Sequence: Synthetic oligonucleotide
gcaguggucaaauagcgaa

SEQ ID NO: 1392719 - RNA, 19 nt, Artificial Sequence
  Description of Artificial Sequence: Synthetic oligonucleotide
ugaccuaguuucgagucaa

SEQ ID NO: 1392720 - RNA, 19 nt, Artificial Sequence
  Description of Artificial Sequence: Synthetic oligonucleotide
gcgaagaauauguggacac

SEQ ID NO: 1392721 - RNA, 19 nt, Artificial Sequence
  Description of Artificial Sequence: Synthetic oligonucleotide
acgggcauuuucaaugaag

SEQ ID NO: 1392722 - RNA, 19 nt, Artificial Sequence
  Description of Artificial Sequence: Synthetic oligonucleotide
aucccugguugacugcauc

SEQ ID NO: 1392723 - RNA, 19 nt, Artificial Sequence
  Description of Artificial Sequence: Synthetic oligonucleotide
gauuaagcuucuuuucgau

SEQ ID NO: 1392724 - RNA, 19 nt, Artificial Sequence
  Description of Artificial Sequence: Synthetic oligonucleotide
agccaauuuuauucaaauu

SEQ ID NO: 1392725 - RNA, 19 nt, Artificial Sequence
  Description of Artificial Sequence: Synthetic oligonucleotide
auugucuggauugcguuaa

SEQ ID NO: 1392726 - RNA, 19 nt, Artificial Sequence
  Description of Artificial Sequence: Synthetic oligonucleotide
acaagcacggauucacauu

SEQ ID NO: 1392727 - RNA, 19 nt, Artificial Sequence
  Description of Artificial Sequence: Synthetic oligonucleotide
gaauauguggacacauugu

SEQ ID NO: 1392728 - RNA, 19 nt, Artificial Sequence
  Description of Artificial Sequence: Synthetic oligonucleotide
uaagguacugugguuggua

SEQ ID NO: 1392729 - RNA, 19 nt, Artificial Sequence
  Description of Artificial Sequence: Synthetic oligonucleotide
uucgauauucauggccaac

SEQ ID NO: 1392730 - RNA, 19 nt, Artificial Sequence
  Description of Artificial Sequence: Synthetic oligonucleotide
uagggugagacugcauugu

SEQ ID NO: 1392731 - RNA, 19 nt, Artificial Sequence
  Description of Artificial Sequence: Synthetic oligonucleotide
cugcuagguagucaaauaa

SEQ ID NO: 1392732 - RNA, 19 nt, Artificial Sequence
  Description of Artificial Sequence: Synthetic oligonucleotide
acugguggauacgacaaaa

SEQ ID NO: 1392733 - RNA, 19 nt, Artificial Sequence
  Description of Artificial Sequence: Synthetic oligonucleotide
accaaugaaugagccaugu

SEQ ID NO: 1392734 - RNA, 19 nt, Artificial Sequence
  Description of Artificial Sequence: Synthetic oligonucleotide
guugguaaaggaagagauc

SEQ ID NO: 1392735 - RNA, 19 nt, Artificial Sequence
  Description of Artificial Sequence: Synthetic oligonucleotide
uuuaaccgagucaggucuu

SEQ ID NO: 1392736 - RNA, 19 nt, Artificial Sequence
  Description of Artificial Sequence: Synthetic oligonucleotide
gagacuggagcggagaacu

SEQ ID NO: 1392737 - RNA, 19 nt, Artificial Sequence
  Description of Artificial Sequence: Synthetic oligonucleotide
gugguugguaaaggaagag

SEQ ID NO: 1392738 - RNA, 19 nt, Artificial Sequence
  Description of Artificial Sequence: Synthetic oligonucleotide
ugccuaaacccaugcuugu

SEQ ID NO: 1392739 - RNA, 19 nt, Artificial Sequence
  Description of Artificial Sequence: Synthetic oligonucleotide
guagacguccauagcgaag

SEQ ID NO: 1392740 - RNA, 19 nt, Artificial Sequence
  Description of Artificial Sequence: Synthetic oligonucleotide
agagacgggcauuuucaau

SEQ ID NO: 1392741 - RNA, 19 nt, Artificial Sequence
  Description of Artificial Sequence: Synthetic oligonucleotide
gggucuuuguauguguaag

SEQ ID NO: 1392742 - RNA, 19 nt, Artificial Sequence
  Description of Artificial Sequence: Synthetic oligonucleotide
gaagaauauguggacacau

SEQ ID NO: 1392743 - RNA, 19 nt, Artificial Sequence
  Description of Artificial Sequence: Synthetic oligonucleotide
auggucucuuuuaaccgag

SEQ ID NO: 1392744 - RNA, 19 nt, Artificial Sequence
  Description of Artificial Sequence: Synthetic oligonucleotide
uugucuggauugcguuaag

SEQ ID NO: 1392745 - RNA, 19 nt, Artificial Sequence
  Description of Artificial Sequence: Synthetic oligonucleotide
gcuagguagucaaauaaca

SEQ ID NO: 1392746 - RNA, 19 nt, Artificial Sequence
  Description of Artificial Sequence: Synthetic oligonucleotide
cuaucuguugcuggaacca

SEQ ID NO: 1392747 - RNA, 19 nt, Artificial Sequence
  Description of Artificial Sequence: Synthetic oligonucleotide
ugcgcgaugcgggugguca

SEQ ID NO: 1392748 - RNA, 19 nt, Artificial Sequence
  Description of Artificial Sequence: Synthetic oligonucleotide
ugguuacugugucuuuaau

SEQ ID NO: 1392749 - RNA, 19 nt, Artificial Sequence
  Description of Artificial Sequence: Synthetic oligonucleotide
gaacucgagcagcgggaag

SEQ ID NO: 1392750 - RNA, 19 nt, Artificial Sequence
  Description of Artificial Sequence: Synthetic oligonucleotide
uacaagcauucaacaaauu

SEQ ID NO: 1392751 - RNA, 19 nt, Artificial Sequence
  Description of Artificial Sequence: Synthetic oligonucleotide
auacacugguggauacgac

SEQ ID NO: 1392752 - RNA, 19 nt, Artificial Sequence
  Description of Artificial Sequence: Synthetic oligonucleotide
accuacuguucugauuaag

SEQ ID NO: 1392753 - RNA, 19 nt, Artificial Sequence
  Description of Artificial Sequence: Synthetic oligonucleotide
cuguaauugggucuuugua

SEQ ID NO: 1392754 - RNA, 19 nt, Artificial Sequence
  Description of Artificial Sequence: Synthetic oligonucleotide
cuaguuucgagucaaucuu

SEQ ID NO: 1392755 - RNA, 19 nt, Artificial Sequence
  Description of Artificial Sequence: Synthetic oligonucleotide
ucugaccuacuguucugau

SEQ ID NO: 1392756 - RNA, 19 nt, Artificial Sequence
  Description of Artificial Sequence: Synthetic oligonucleotide
uuaagguacugugguuggu

SEQ ID NO: 1392757 - RNA, 19 nt, Artificial Sequence
  Description of Artificial Sequence: Synthetic oligonucleotide
aucuuggcguccaaccuug

SEQ ID NO: 1392758 - RNA, 19 nt, Artificial Sequence
  Description of Artificial Sequence: Synthetic oligonucleotide
cuagguagucaaauaacau

SEQ ID NO: 1392759 - RNA, 19 nt, Artificial Sequence
  Description of Artificial Sequence: Synthetic oligonucleotide
cuggaauuuugcguaucug

SEQ ID NO: 1392760 - RNA, 19 nt, Artificial Sequence
  Description of Artificial Sequence: Synthetic oligonucleotide
acucgagcagcgggaagac

SEQ ID NO: 1392761 - RNA, 19 nt, Artificial Sequence
  Description of Artificial Sequence: Synthetic oligonucleotide
agacguccauagcgaaguc

SEQ ID NO: 1392762 - RNA, 19 nt, Artificial Sequence
  Description of Artificial Sequence: Synthetic oligonucleotide
uaguagaagccagaaucuu

SEQ ID NO: 1392763 - RNA, 19 nt, Artificial Sequence
  Description of Artificial Sequence: Synthetic oligonucleotide
auguucgcugcugaagaga

SEQ ID NO: 1392764 - RNA, 19 nt, Artificial Sequence
  Description of Artificial Sequence: Synthetic oligonucleotide
uaaccgagucaggucuucc

SEQ ID NO: 1392765 - RNA, 19 nt, Artificial Sequence
  Description of Artificial Sequence: Synthetic oligonucleotide
ggauucacauucccucagc

SEQ ID NO: 1392766 - RNA, 19 nt, Artificial Sequence
  Description of Artificial Sequence: Synthetic oligonucleotide
uaaugguuacugugucuuu

SEQ ID NO: 1392767 - RNA, 19 nt, Artificial Sequence
  Description of Artificial Sequence: Synthetic oligonucleotide
ugguaucacuaagaagauc

SEQ ID NO: 1392768 - RNA, 19 nt, Artificial Sequence
  Description of Artificial Sequence: Synthetic oligonucleotide
gagucauauucaguuuauc

SEQ ID NO: 1392769 - RNA, 19 nt, Artificial Sequence
  Description of Artificial Sequence: Synthetic oligonucleotide
cuugccuaaacccaugcuu

SEQ ID NO: 1392770 - RNA, 19 nt, Artificial Sequence
  Description of Artificial Sequence: Synthetic oligonucleotide
uggucucuuuuaaccgagu

SEQ ID NO: 1392771 - RNA, 19 nt, Artificial Sequence
  Description of Artificial Sequence: Synthetic oligonucleotide
ucgagucaaucuuggcguc

SEQ ID NO: 1392772 - RNA, 19 nt, Artificial Sequence
  Description of Artificial Sequence: Synthetic oligonucleotide
gagcuuagugcauuucuau

SEQ ID NO: 1392773 - RNA, 19 nt, Artificial Sequence
  Description of Artificial Sequence: Synthetic oligonucleotide
cuucaccgagaggaacucg

SEQ ID NO: 1392774 - RNA, 19 nt, Artificial Sequence
  Description of Artificial Sequence: Synthetic oligonucleotide
gaccaaugaaugagccaug

SEQ ID NO: 1392775 - RNA, 19 nt, Artificial Sequence
  Description of Artificial Sequence: Synthetic oligonucleotide
gagucaaucuuggcgucca

SEQ ID NO: 1392776 - RNA, 19 nt, Artificial Sequence
  Description of Artificial Sequence: Synthetic oligonucleotide
uuaaccgagucaggucuuc

SEQ ID NO: 1392777 - RNA, 19 nt, Artificial Sequence
  Description of Artificial Sequence: Synthetic oligonucleotide
caugagggaugucauccga

SEQ ID NO: 1392778 - RNA, 19 nt, Artificial Sequence
  Description of Artificial Sequence: Synthetic oligonucleotide
ucugcggcuccagaguaau

SEQ ID NO: 1392779 - RNA, 19 nt, Artificial Sequence
  Description of Artificial Sequence: Synthetic oligonucleotide
cuccagaguaauucccaca

SEQ ID NO: 1392780 - RNA, 19 nt, Artificial Sequence
  Description of Artificial Sequence: Synthetic oligonucleotide
gauugcguuaagguacugu

SEQ ID NO: 1392781 - RNA, 19 nt, Artificial Sequence
  Description of Artificial Sequence: Synthetic oligonucleotide
guaucacuaagaagaucca

SEQ ID NO: 1392782 - RNA, 19 nt, Artificial Sequence
  Description of Artificial Sequence: Synthetic oligonucleotide
uugccggcguuuccgcaca

SEQ ID NO: 1392783 - RNA, 19 nt, Artificial Sequence
  Description of Artificial Sequence: Synthetic oligonucleotide
ugucugcuagguagucaaa

SEQ ID NO: 1392784 - RNA, 19 nt, Artificial Sequence
  Description of Artificial Sequence: Synthetic oligonucleotide
gguugguaaaggaagagau

SEQ ID NO: 1392785 - RNA, 19 nt, Artificial Sequence
  Description of Artificial Sequence: Synthetic oligonucleotide
acggccuuuuggaugguug

SEQ ID NO: 1392786 - RNA, 19 nt, Artificial Sequence
  Description of Artificial Sequence: Synthetic oligonucleotide
cguuaagguacugugguug

SEQ ID NO: 1392787 - RNA, 19 nt, Artificial Sequence
  Description of Artificial Sequence: Synthetic oligonucleotide
uccauggcugcaucccaau

SEQ ID NO: 1392788 - RNA, 19 nt, Artificial Sequence
  Description of Artificial Sequence: Synthetic oligonucleotide
aggaacucgagcagcggga

SEQ ID NO: 1392789 - RNA, 19 nt, Artificial Sequence
  Description of Artificial Sequence: Synthetic oligonucleotide
ggaauuuugcguaucugua

SEQ ID NO: 1392790 - RNA, 19 nt, Artificial Sequence
  Description of Artificial Sequence: Synthetic oligonucleotide
aagauacucugcggcucca

SEQ ID NO: 1392791 - RNA, 19 nt, Artificial Sequence
  Description of Artificial Sequence: Synthetic oligonucleotide
gaagugcgcgaugcgggug

SEQ ID NO: 1392792 - RNA, 19 nt, Artificial Sequence
  Description of Artificial Sequence: Synthetic oligonucleotide
cauugucuggauugcguua

SEQ ID NO: 1392793 - RNA, 19 nt, Artificial Sequence
  Description of Artificial Sequence: Synthetic oligonucleotide
cacauugucuggauugcgu

SEQ ID NO: 1392794 - RNA, 19 nt, Artificial Sequence
  Description of Artificial Sequence: Synthetic oligonucleotide
uccgaccaucccugguuga

SEQ ID NO: 1392795 - RNA, 19 nt, Artificial Sequence
  Description of Artificial Sequence: Synthetic oligonucleotide
agcaguggucaaauagcga

SEQ ID NO: 1392796 - RNA, 19 nt, Artificial Sequence
  Description of Artificial Sequence: Synthetic oligonucleotide
accuugcauuccuaaucaa

SEQ ID NO: 1392797 - RNA, 19 nt, Artificial Sequence
  Description of Artificial Sequence: Synthetic oligonucleotide
ggagcggagaacucacaga

SEQ ID NO: 1392798 - RNA, 19 nt, Artificial Sequence
  Description of Artificial Sequence: Synthetic oligonucleotide
agggugagacugcauuguu

SEQ ID NO: 1392799 - RNA, 19 nt, Artificial Sequence
  Description of Artificial Sequence: Synthetic oligonucleotide
acuugccggcguuuccgca

SEQ ID NO: 1392800 - RNA, 19 nt, Artificial Sequence
  Description of Artificial Sequence: Synthetic oligonucleotide
guguaagacuccuguugaa

SEQ ID NO: 1392801 - RNA, 19 nt, Artificial Sequence
  Description of Artificial Sequence: Synthetic oligonucleotide
acucuugccuaaacccaug

SEQ ID NO: 1392802 - RNA, 19 nt, Artificial Sequence
  Description of Artificial Sequence: Synthetic oligonucleotide
gcugauagggugagacugc

SEQ ID NO: 1392803 - RNA, 19 nt, Artificial Sequence
  Description of Artificial Sequence: Synthetic oligonucleotide
gccauguucgcugcugaag

SEQ ID NO: 1392804 - RNA, 19 nt, Artificial Sequence
  Description of Artificial Sequence: Synthetic oligonucleotide
uccgcacaucuuuguuugu

SEQ ID NO: 1392805 - RNA, 19 nt, Artificial Sequence
  Description of Artificial Sequence: Synthetic oligonucleotide
caaucuuggcguccaaccu

SEQ ID NO: 1392806 - RNA, 19 nt, Artificial Sequence
  Description of Artificial Sequence: Synthetic oligonucleotide
cuuggcguccaaccuugca

SEQ ID NO: 1392807 - RNA, 19 nt, Artificial Sequence
  Description of Artificial Sequence: Synthetic oligonucleotide
ccauguucgcugcugaaga

SEQ ID NO: 1392808 - RNA, 19 nt, Artificial Sequence
  Description of Artificial Sequence: Synthetic oligonucleotide
ggguugcccaguugggagc

SEQ ID NO: 1392809 - RNA, 19 nt, Artificial Sequence
  Description of Artificial Sequence: Synthetic oligonucleotide
gucaaauagcgaagaauau

SEQ ID NO: 1392810 - RNA, 19 nt, Artificial Sequence
  Description of Artificial Sequence: Synthetic oligonucleotide
cuaacauauuaaugcugau

SEQ ID NO: 1392811 - RNA, 19 nt, Artificial Sequence
  Description of Artificial Sequence: Synthetic oligonucleotide
gaaucuuggguugcccagu

SEQ ID NO: 1392812 - RNA, 19 nt, Artificial Sequence
  Description of Artificial Sequence: Synthetic oligonucleotide
cugauagggugagacugca

SEQ ID NO: 1392813 - RNA, 19 nt, Artificial Sequence
  Description of Artificial Sequence: Synthetic oligonucleotide
guauggcacccuuuauaua

SEQ ID NO: 1392814 - RNA, 19 nt, Artificial Sequence
  Description of Artificial Sequence: Synthetic oligonucleotide
cacaagcacggauucacau

SEQ ID NO: 1392815 - RNA, 19 nt, Artificial Sequence
  Description of Artificial Sequence: Synthetic oligonucleotide
agccauguucgcugcugaa

SEQ ID NO: 1392816 - RNA, 19 nt, Artificial Sequence
  Description of Artificial Sequence: Synthetic oligonucleotide
cucugaccuacuguucuga

SEQ ID NO: 1392817 - RNA, 19 nt, Artificial Sequence
  Description of Artificial Sequence: Synthetic oligonucleotide
gcccauaaccacaugaccu

SEQ ID NO: 1392818 - RNA, 19 nt, Artificial Sequence
  Description of Artificial Sequence: Synthetic oligonucleotide
ggcuucuaaaagaaagacu

SEQ ID NO: 1392819 - RNA, 19 nt, Artificial Sequence
  Description of Artificial Sequence: Synthetic oligonucleotide
gcagcgggaagaccaggug

SEQ ID NO: 1392820 - RNA, 19 nt, Artificial Sequence
  Description of Artificial Sequence: Synthetic oligonucleotide
ccauaaccacaugaccuag

SEQ ID NO: 1392821 - RNA, 19 nt, Artificial Sequence
  Description of Artificial Sequence: Synthetic oligonucleotide
ccgagaggaacucgagcag

SEQ ID NO: 1392822 - RNA, 19 nt, Artificial Sequence
  Description of Artificial Sequence: Synthetic oligonucleotide
gaaguccaccauguuggua

SEQ ID NO: 1392823 - RNA, 19 nt, Artificial Sequence
  Description of Artificial Sequence: Synthetic oligonucleotide
cucgagcagcgggaagacc

SEQ ID NO: 1392824 - RNA, 19 nt, Artificial Sequence
  Description of Artificial Sequence: Synthetic oligonucleotide
gagaacucacagaauuguu

SEQ ID NO: 1392825 - RNA, 19 nt, Artificial Sequence
  Description of Artificial Sequence: Synthetic oligonucleotide
ccagaaucuuggguugccc

SEQ ID NO: 1392826 - RNA, 19 nt, Artificial Sequence
  Description of Artificial Sequence: Synthetic oligonucleotide
ucaaagcaugagggauguc

SEQ ID NO: 1392827 - RNA, 19 nt, Artificial Sequence
  Description of Artificial Sequence: Synthetic oligonucleotide
ccccagagugagcuuagug

SEQ ID NO: 1392828 - RNA, 19 nt, Artificial Sequence
  Description of Artificial Sequence: Synthetic oligonucleotide
ggguggucaggucguacuc

SEQ ID NO: 1392829 - RNA, 19 nt, Artificial Sequence
  Description of Artificial Sequence: Synthetic oligonucleotide
ggcguuuccgcacaucuuu

SEQ ID NO: 1392830 - RNA, 19 nt, Artificial Sequence
  Description of Artificial Sequence: Synthetic oligonucleotide
cccauaaccacaugaccua

SEQ ID NO: 1392831 - RNA, 19 nt, Artificial Sequence
  Description of Artificial Sequence: Synthetic oligonucleotide
ccucugaccuacuguucug

SEQ ID NO: 1392832 - RNA, 19 nt, Artificial Sequence
  Description of Artificial Sequence: Synthetic oligonucleotide
cuggagcggagaacucaca

SEQ ID NO: 1392833 - RNA, 19 nt, Artificial Sequence
  Description of Artificial Sequence: Synthetic oligonucleotide
ggcguccaaccuugcauuc

SEQ ID NO: 1392834 - RNA, 19 nt, Artificial Sequence
  Description of Artificial Sequence: Synthetic oligonucleotide
gagugagcuuagugcauuu

SEQ ID NO: 1392835 - RNA, 19 nt, Artificial Sequence
  Description of Artificial Sequence: Synthetic oligonucleotide
auggcacccuuuauauaua

SEQ ID NO: 1392836 - RNA, 19 nt, Artificial Sequence
  Description of Artificial Sequence: Synthetic oligonucleotide
uccccagagugagcuuagu

SEQ ID NO: 1392837 - RNA, 19 nt, Artificial Sequence
  Description of Artificial Sequence: Synthetic oligonucleotide
gcguccaaccuugcauucc

SEQ ID NO: 1392838 - RNA, 19 nt, Artificial Sequence
  Description of Artificial Sequence: Synthetic oligonucleotide
cucugcggcuccagaguaa

SEQ ID NO: 1392839 - RNA, 19 nt, Artificial Sequence
  Description of Artificial Sequence: Synthetic oligonucleotide
cugaccuacuguucugauu

SEQ ID NO: 1392840 - RNA, 19 nt, Artificial Sequence
  Description of Artificial Sequence: Synthetic oligonucleotide
gcguuuccgcacaucuuug

SEQ ID NO: 1392841 - RNA, 19 nt, Artificial Sequence
  Description of Artificial Sequence: Synthetic oligonucleotide
gcgggaagaccagguggcg

SEQ ID NO: 1392842 - RNA, 19 nt, Artificial Sequence
  Description of Artificial Sequence: Synthetic oligonucleotide
ggaacucgagcagcgggaa

SEQ ID NO: 1392843 - RNA, 19 nt, Artificial Sequence
  Description of Artificial Sequence: Synthetic oligonucleotide
gccuaaacccaugcuuguc

SEQ ID NO: 1392844 - RNA, 19 nt, Artificial Sequence
  Description of Artificial Sequence: Synthetic oligonucleotide
ccuucaccgagaggaacuc

SEQ ID NO: 1392845 - RNA, 19 nt, Artificial Sequence
  Description of Artificial Sequence: Synthetic oligonucleotide
cgagucaaucuuggcgucc

SEQ ID NO: 1392846 - RNA, 19 nt, Artificial Sequence
  Description of Artificial Sequence: Synthetic oligonucleotide
ggauugcguuaagguacug

SEQ ID NO: 1392847 - RNA, 19 nt, Artificial Sequence
  Description of Artificial Sequence: Synthetic oligonucleotide
ccgaccaucccugguugac

SEQ ID NO: 1392848 - RNA, 19 nt, Artificial Sequence
  Description of Artificial Sequence: Synthetic oligonucleotide
ggccuuuuggaugguugaa

SEQ ID NO: 1392849 - RNA, 19 nt, Artificial Sequence
  Description of Artificial Sequence: Synthetic oligonucleotide
ugccggcguuuccgcacau

SEQ ID NO: 1392850 - RNA, 19 nt, Artificial Sequence
  Description of Artificial Sequence: Synthetic oligonucleotide
cgaagaauauguggacaca

SEQ ID NO: 1392851 - RNA, 19 nt, Artificial Sequence
  Description of Artificial Sequence: Synthetic oligonucleotide
ucacggccuuuuggauggu

SEQ ID NO: 1392852 - RNA, 19 nt, Artificial Sequence
  Description of Artificial Sequence: Synthetic oligonucleotide
gcacggauucacauucccu

SEQ ID NO: 1392853 - RNA, 19 nt, Artificial Sequence
  Description of Artificial Sequence: Synthetic oligonucleotide
cggccuuuuggaugguuga

SEQ ID NO: 1392854 - RNA, 19 nt, Artificial Sequence
  Description of Artificial Sequence: Synthetic oligonucleotide
ccggcguuuccgcacaucu

SEQ ID NO: 1392855 - RNA, 19 nt, Artificial Sequence
  Description of Artificial Sequence: Synthetic oligonucleotide
ggccaguuuuccccagagu

SEQ ID NO: 1392856 - RNA, 19 nt, Artificial Sequence
  Description of Artificial Sequence: Synthetic oligonucleotide
guccaaccuugcauuccua

SEQ ID NO: 1392857 - RNA, 19 nt, Artificial Sequence
  Description of Artificial Sequence: Synthetic oligonucleotide
gaccuaguuucgagucaau

SEQ ID NO: 1392858 - RNA, 19 nt, Artificial Sequence
  Description of Artificial Sequence: Synthetic oligonucleotide
cgcgaugcggguggucagg

SEQ ID NO: 1392859 - RNA, 19 nt, Artificial Sequence
  Description of Artificial Sequence: Synthetic oligonucleotide
cguccaaccuugcauuccu

SEQ ID NO: 1392860 - RNA, 19 nt, Artificial Sequence
  Description of Artificial Sequence: Synthetic oligonucleotide
cgauauucauggccaacau

SEQ ID NO: 1392861 - RNA, 19 nt, Artificial Sequence
  Description of Artificial Sequence: Synthetic oligonucleotide
ccaaugaaugagccauguu

SEQ ID NO: 1392862 - RNA, 19 nt, Artificial Sequence
  Description of Artificial Sequence: Synthetic oligonucleotide
cguuuccgcacaucuuugu

SEQ ID NO: 1392863 - RNA, 19 nt, Artificial Sequence
  Description of Artificial Sequence: Synthetic oligonucleotide
gugcgcgaugcgggugguc

SEQ ID NO: 1392864 - RNA, 19 nt, Artificial Sequence
  Description of Artificial Sequence: Synthetic oligonucleotide
cgaugcggguggucagguc

SEQ ID NO: 1392865 - RNA, 19 nt, Artificial Sequence
  Description of Artificial Sequence: Synthetic oligonucleotide
gccggcguuuccgcacauc

SEQ ID NO: 1392866 - RNA, 19 nt, Artificial Sequence
  Description of Artificial Sequence: Synthetic oligonucleotide
cguuucugccuggagcugu

SEQ ID NO: 1392867 - RNA, 19 nt, Artificial Sequence
  Description of Artificial Sequence: Synthetic oligonucleotide
gcgaugcggguggucaggu

SEQ ID NO: 1392868 - RNA, 19 nt, Artificial Sequence
  Description of Artificial Sequence: Synthetic oligonucleotide
ccauagcgaaguccaccau

SEQ ID NO: 1392869 - RNA, 19 nt, Artificial Sequence
  Description of Artificial Sequence: Synthetic oligonucleotide
ccauggcugcaucccaauu

SEQ ID NO: 1392870 - RNA, 19 nt, Artificial Sequence
  Description of Artificial Sequence: Synthetic oligonucleotide
cacggccuuuuggaugguu

SEQ ID NO: 1392871 - RNA, 19 nt, Artificial Sequence
  Description of Artificial Sequence: Synthetic oligonucleotide
ccgcacaucuuuguuuguu

SEQ ID NO: 1392872 - RNA, 19 nt, Artificial Sequence
  Description of Artificial Sequence: Synthetic oligonucleotide
ggccaacauuuggcuucua

SEQ ID NO: 1392873 - RNA, 19 nt, Artificial Sequence
  Description of Artificial Sequence: Synthetic oligonucleotide
cggcguuuccgcacaucuu

SEQ ID NO: 1392874 - RNA, 19 nt, Artificial Sequence
  Description of Artificial Sequence: Synthetic oligonucleotide
aauacuuagaaccaggcug

SEQ ID NO: 1392875 - RNA, 19 nt, Artificial Sequence
  Description of Artificial Sequence: Synthetic oligonucleotide
agggauaaaacuaaggagc

SEQ ID NO: 1392876 - RNA, 19 nt, Artificial Sequence
  Description of Artificial Sequence: Synthetic oligonucleotide
aaucucauagauucgguug

SEQ ID NO: 1392877 - RNA, 19 nt, Artificial Sequence
  Description of Artificial Sequence: Synthetic oligonucleotide
acuuguacgauucccgugc

SEQ ID NO: 1392878 - RNA, 19 nt, Artificial Sequence
  Description of Artificial Sequence: Synthetic oligonucleotide
uggaauaaacagaugaaug

SEQ ID NO: 1392879 - RNA, 19 nt, Artificial Sequence
  Description of Artificial Sequence: Synthetic oligonucleotide
auaagggcaaauguaagcc

SEQ ID NO: 1392880 - RNA, 19 nt, Artificial Sequence
  Description of Artificial Sequence: Synthetic oligonucleotide
aacauuacguuccugcuca

SEQ ID NO: 1392881 - RNA, 19 nt, Artificial Sequence
  Description of Artificial Sequence: Synthetic oligonucleotide
ugugcgaacauuacguucc

SEQ ID NO: 1392882 - RNA, 19 nt, Artificial Sequence
  Description of Artificial Sequence: Synthetic oligonucleotide
auuacguuccugcucaaac

SEQ ID NO: 1392883 - RNA, 19 nt, Artificial Sequence
  Description of Artificial Sequence: Synthetic oligonucleotide
ugaacaauacuuagaacca

SEQ ID NO: 1392884 - RNA, 19 nt, Artificial Sequence
  Description of Artificial Sequence: Synthetic oligonucleotide
agcacgaagaaugauggcc

SEQ ID NO: 1392885 - RNA, 19 nt, Artificial Sequence
  Description of Artificial Sequence: Synthetic oligonucleotide
acagggauaaaacuaagga

SEQ ID NO: 1392886 - RNA, 19 nt, Artificial Sequence
  Description of Artificial Sequence: Synthetic oligonucleotide
cagagucccauuaauaagg

SEQ ID NO: 1392887 - RNA, 19 nt, Artificial Sequence
  Description of Artificial Sequence: Synthetic oligonucleotide
aucacguacaaguggacac

SEQ ID NO: 1392888 - RNA, 19 nt, Artificial Sequence
  Description of Artificial Sequence: Synthetic oligonucleotide
aggacauagcaccuggagc

SEQ ID NO: 1392889 - RNA, 19 nt, Artificial Sequence
  Description of Artificial Sequence: Synthetic oligonucleotide
cuagguguagccacuaagg

SEQ ID NO: 1392890 - RNA, 19 nt, Artificial Sequence
  Description of Artificial Sequence: Synthetic oligonucleotide
agaacauagauggacacag

SEQ ID NO: 1392891 - RNA, 19 nt, Artificial Sequence
  Description of Artificial Sequence: Synthetic oligonucleotide
uaaacagaugaauggagga

SEQ ID NO: 1392892 - RNA, 19 nt, Artificial Sequence
  Description of Artificial Sequence: Synthetic oligonucleotide
ugugacgcaaggcaacacg

SEQ ID NO: 1392893 - RNA, 19 nt, Artificial Sequence
  Description of Artificial Sequence: Synthetic oligonucleotide
uaauaagggcaaauguaag

SEQ ID NO: 1392894 - RNA, 19 nt, Artificial Sequence
  Description of Artificial Sequence: Synthetic oligonucleotide
cuuagcacgaagaaugaug

SEQ ID NO: 1392895 - RNA, 19 nt, Artificial Sequence
  Description of Artificial Sequence: Synthetic oligonucleotide
cacacauucgggcugaccg

SEQ ID NO: 1392896 - RNA, 19 nt, Artificial Sequence
  Description of Artificial Sequence: Synthetic oligonucleotide
aucucauagauucgguugg

SEQ ID NO: 1392897 - RNA, 19 nt, Artificial Sequence
  Description of Artificial Sequence: Synthetic oligonucleotide
cugcuuagcacgaagaaug

SEQ ID NO: 1392898 - RNA, 19 nt, Artificial Sequence
  Description of Artificial Sequence: Synthetic oligonucleotide
acacucaccacacauucgg

SEQ ID NO: 1392899 - RNA, 19 nt, Artificial Sequence
  Description of Artificial Sequence: Synthetic oligonucleotide
cauagauucgguuggcugc

SEQ ID NO: 1392900 - RNA, 19 nt, Artificial Sequence
  Description of Artificial Sequence: Synthetic oligonucleotide
aagauuuguggggcgaagc

SEQ ID NO: 1392901 - RNA, 19 nt, Artificial Sequence
  Description of Artificial Sequence: Synthetic oligonucleotide
aagggaaguacuuguacga

SEQ ID NO: 1392902 - RNA, 19 nt, Artificial Sequence
  Description of Artificial Sequence: Synthetic oligonucleotide
agugggucauguuggaucg

SEQ ID NO: 1392903 - RNA, 19 nt, Artificial Sequence
  Description of Artificial Sequence: Synthetic oligonucleotide
ugaccguuugauuuguugc

SEQ ID NO: 1392904 - RNA, 19 nt, Artificial Sequence
  Description of Artificial Sequence: Synthetic oligonucleotide
uguacgauucccgugcccg

SEQ ID NO: 1392905 - RNA, 19 nt, Artificial Sequence
  Description of Artificial Sequence: Synthetic oligonucleotide
uacguuccugcucaaacag

SEQ ID NO: 1392906 - RNA, 19 nt, Artificial Sequence
  Description of Artificial Sequence: Synthetic oligonucleotide
acucaccacacauucgggc

SEQ ID NO: 1392907 - RNA, 19 nt, Artificial Sequence
  Description of Artificial Sequence: Synthetic oligonucleotide
acggauacgccccagcuuc

SEQ ID NO: 1392908 - RNA, 19 nt, Artificial Sequence
  Description of Artificial Sequence: Synthetic oligonucleotide
ggagcaguggaauaaacag

SEQ ID NO: 1392909 - RNA, 19 nt, Artificial Sequence
  Description of Artificial Sequence: Synthetic oligonucleotide
ugcgugugggguacgaugg

SEQ ID NO: 1392910 - RNA, 19 nt, Artificial Sequence
  Description of Artificial Sequence: Synthetic oligonucleotide
agacaucacguacaagugg

SEQ ID NO: 1392911 - RNA, 19 nt, Artificial Sequence
  Description of Artificial Sequence: Synthetic oligonucleotide
auagcaacgcuccauguga

SEQ ID NO: 1392912 - RNA, 19 nt, Artificial Sequence
  Description of Artificial Sequence: Synthetic oligonucleotide
ugugucgucacugucauuc

SEQ ID NO: 1392913 - RNA, 19 nt, Artificial Sequence
  Description of Artificial Sequence: Synthetic oligonucleotide
cuuacaguauguuuugcuc

SEQ ID NO: 1392914 - RNA, 19 nt, Artificial Sequence
  Description of Artificial Sequence: Synthetic oligonucleotide
agcacuagaucgaaggucg

SEQ ID NO: 1392915 - RNA, 19 nt, Artificial Sequence
  Description of Artificial Sequence: Synthetic oligonucleotide
ucauagauucgguuggcug

SEQ ID NO: 1392916 - RNA, 19 nt, Artificial Sequence
  Description of Artificial Sequence: Synthetic oligonucleotide
uuauaccacacccggacac

SEQ ID NO: 1392917 - RNA, 19 nt, Artificial Sequence
  Description of Artificial Sequence: Synthetic oligonucleotide
aagaucuguagaucugugu

SEQ ID NO: 1392918 - RNA, 19 nt, Artificial Sequence
  Description of Artificial Sequence: Synthetic oligonucleotide
ggacauagcaccuggagcc

SEQ ID NO: 1392919 - RNA, 19 nt, Artificial Sequence
  Description of Artificial Sequence: Synthetic oligonucleotide
ucaucagcgggcacuuugg

SEQ ID NO: 1392920 - RNA, 19 nt, Artificial Sequence
  Description of Artificial Sequence: Synthetic oligonucleotide
aaggucgguagugaguggg

SEQ ID NO: 1392921 - RNA, 19 nt, Artificial Sequence
  Description of Artificial Sequence: Synthetic oligonucleotide
cacggcagaaaucacagug

SEQ ID NO: 1392922 - RNA, 19 nt, Artificial Sequence
  Description of Artificial Sequence: Synthetic oligonucleotide
aauccugcucgguugguca

SEQ ID NO: 1392923 - RNA, 19 nt, Artificial Sequence
  Description of Artificial Sequence: Synthetic oligonucleotide
cuugaagacggguucgggc

SEQ ID NO: 1392924 - RNA, 19 nt, Artificial Sequence
  Description of Artificial Sequence: Synthetic oligonucleotide
ucggguagccccuucaaug

SEQ ID NO: 1392925 - RNA, 19 nt, Artificial Sequence
  Description of Artificial Sequence: Synthetic oligonucleotide
aaugccagguccucaucug

SEQ ID NO: 1392926 - RNA, 19 nt, Artificial Sequence
  Description of Artificial Sequence: Synthetic oligonucleotide
auagauucgguuggcugcc

SEQ ID NO: 1392927 - RNA, 19 nt, Artificial Sequence
  Description of Artificial Sequence: Synthetic oligonucleotide
aagggcaaauguaagccag

SEQ ID NO: 1392928 - RNA, 19 nt, Artificial Sequence
  Description of Artificial Sequence: Synthetic oligonucleotide
cuaaguccacuucugcacg

SEQ ID NO: 1392929 - RNA, 19 nt, Artificial Sequence
  Description of Artificial Sequence: Synthetic oligonucleotide
uauguuuugcucuggggau

SEQ ID NO: 1392930 - RNA, 19 nt, Artificial Sequence
  Description of Artificial Sequence: Synthetic oligonucleotide
guacgauggacccaaagga

SEQ ID NO: 1392931 - RNA, 19 nt, Artificial Sequence
  Description of Artificial Sequence: Synthetic oligonucleotide
gaucguuuggugcagcauc

SEQ ID NO: 1392932 - RNA, 19 nt, Artificial Sequence
  Description of Artificial Sequence: Synthetic oligonucleotide
auaauggcgauugcacugg

SEQ ID NO: 1392933 - RNA, 19 nt, Artificial Sequence
  Description of Artificial Sequence: Synthetic oligonucleotide
uuacguuccugcucaaaca

SEQ ID NO: 1392934 - RNA, 19 nt, Artificial Sequence
  Description of Artificial Sequence: Synthetic oligonucleotide
ucagcggucagcacuagau

SEQ ID NO: 1392935 - RNA, 19 nt, Artificial Sequence
  Description of Artificial Sequence: Synthetic oligonucleotide
uccccuaacuggaaugcag

SEQ ID NO: 1392936 - RNA, 19 nt, Artificial Sequence
  Description of Artificial Sequence: Synthetic oligonucleotide
ugugggguacgauggaccc

SEQ ID NO: 1392937 - RNA, 19 nt, Artificial Sequence
  Description of Artificial Sequence: Synthetic oligonucleotide
uaagggcaaauguaagcca

SEQ ID NO: 1392938 - RNA, 19 nt, Artificial Sequence
  Description of Artificial Sequence: Synthetic oligonucleotide
ucugagaguggcucgggug

SEQ ID NO: 1392939 - RNA, 19 nt, Artificial Sequence
  Description of Artificial Sequence: Synthetic oligonucleotide
uggcugugcgaacauuacg

SEQ ID NO: 1392940 - RNA, 19 nt, Artificial Sequence
  Description of Artificial Sequence: Synthetic oligonucleotide
aucuucacggauacgcccc

SEQ ID NO: 1392941 - RNA, 19 nt, Artificial Sequence
  Description of Artificial Sequence: Synthetic oligonucleotide
cugcgggagaaucucauag

SEQ ID NO: 1392942 - RNA, 19 nt, Artificial Sequence
  Description of Artificial Sequence: Synthetic oligonucleotide
acuccccuaacuggaaugc

SEQ ID NO: 1392943 - RNA, 19 nt, Artificial Sequence
  Description of Artificial Sequence: Synthetic oligonucleotide
gacaucacguacaagugga

SEQ ID NO: 1392944 - RNA, 19 nt, Artificial Sequence
  Description of Artificial Sequence: Synthetic oligonucleotide
cuggcgcuuaggcagacgg

SEQ ID NO: 1392945 - RNA, 19 nt, Artificial Sequence
  Description of Artificial Sequence: Synthetic oligonucleotide
augcuggcuagguguagcc

SEQ ID NO: 1392946 - RNA, 19 nt, Artificial Sequence
  Description of Artificial Sequence: Synthetic oligonucleotide
gaacauuacguuccugcuc

SEQ ID NO: 1392947 - RNA, 19 nt, Artificial Sequence
  Description of Artificial Sequence: Synthetic oligonucleotide
aucagcgggcacuuugggg

SEQ ID NO: 1392948 - RNA, 19 nt, Artificial Sequence
  Description of Artificial Sequence: Synthetic oligonucleotide
cauagcaacgcuccaugug

SEQ ID NO: 1392949 - RNA, 19 nt, Artificial Sequence
  Description of Artificial Sequence: Synthetic oligonucleotide
ugccggaucuuguugggcc

SEQ ID NO: 1392950 - RNA, 19 nt, Artificial Sequence
  Description of Artificial Sequence: Synthetic oligonucleotide
agcaguggaauaaacagau

SEQ ID NO: 1392951 - RNA, 19 nt, Artificial Sequence
  Description of Artificial Sequence: Synthetic oligonucleotide
uacuuguacgauucccgug

SEQ ID NO: 1392952 - RNA, 19 nt, Artificial Sequence
  Description of Artificial Sequence: Synthetic oligonucleotide
uucugcacgccgaagcuuc

SEQ ID NO: 1392953 - RNA, 19 nt, Artificial Sequence
  Description of Artificial Sequence: Synthetic oligonucleotide
acagaagagucggguagcc

SEQ ID NO: 1392954 - RNA, 19 nt, Artificial Sequence
  Description of Artificial Sequence: Synthetic oligonucleotide
gauacgccccagcuucugg

SEQ ID NO: 1392955 - RNA, 19 nt, Artificial Sequence
  Description of Artificial Sequence: Synthetic oligonucleotide
gaaguacuuguacgauucc

SEQ ID NO: 1392956 - RNA, 19 nt, Artificial Sequence
  Description of Artificial Sequence: Synthetic oligonucleotide
aucgaaggucgguagugag

SEQ ID NO: 1392957 - RNA, 19 nt, Artificial Sequence
  Description of Artificial Sequence: Synthetic oligonucleotide
gauuuguggggcgaagcug

SEQ ID NO: 1392958 - RNA, 19 nt, Artificial Sequence
  Description of Artificial Sequence: Synthetic oligonucleotide
cugaccguuugauuuguug

SEQ ID NO: 1392959 - RNA, 19 nt, Artificial Sequence
  Description of Artificial Sequence: Synthetic oligonucleotide
ucaccacacauucgggcug

SEQ ID NO: 1392960 - RNA, 19 nt, Artificial Sequence
  Description of Artificial Sequence: Synthetic oligonucleotide
ucguccagcuuauaccaca

SEQ ID NO: 1392961 - RNA, 19 nt, Artificial Sequence
  Description of Artificial Sequence: Synthetic oligonucleotide
aaggaugucuggcucucau

SEQ ID NO: 1392962 - RNA, 19 nt, Artificial Sequence
  Description of Artificial Sequence: Synthetic oligonucleotide
caggacauagcaccuggag

SEQ ID NO: 1392963 - RNA, 19 nt, Artificial Sequence
  Description of Artificial Sequence: Synthetic oligonucleotide
gggauuguagacgucacag

SEQ ID NO: 1392964 - RNA, 19 nt, Artificial Sequence
  Description of Artificial Sequence: Synthetic oligonucleotide
gaaagccggugaugcaggg

SEQ ID NO: 1392965 - RNA, 19 nt, Artificial Sequence
  Description of Artificial Sequence: Synthetic oligonucleotide
gcaacacguggguugaugg

SEQ ID NO: 1392966 - RNA, 19 nt, Artificial Sequence
  Description of Artificial Sequence: Synthetic oligonucleotide
caguauguuuugcucuggg

SEQ ID NO: 1392967 - RNA, 19 nt, Artificial Sequence
  Description of Artificial Sequence: Synthetic oligonucleotide
ugcugcuuagcacgaagaa

SEQ ID NO: 1392968 - RNA, 19 nt, Artificial Sequence
  Description of Artificial Sequence: Synthetic oligonucleotide
uugacgugguugguggccg

SEQ ID NO: 1392969 - RNA, 19 nt, Artificial Sequence
  Description of Artificial Sequence: Synthetic oligonucleotide
agagucccauuaauaaggg

SEQ ID NO: 1392970 - RNA, 19 nt, Artificial Sequence
  Description of Artificial Sequence: Synthetic oligonucleotide
gauucgguuggcugccagc

SEQ ID NO: 1392971 - RNA, 19 nt, Artificial Sequence
  Description of Artificial Sequence: Synthetic oligonucleotide
ggcgucaccggcgagagcg

SEQ ID NO: 1392972 - RNA, 19 nt, Artificial Sequence
  Description of Artificial Sequence: Synthetic oligonucleotide
caacacguggguugauggg

SEQ ID NO: 1392973 - RNA, 19 nt, Artificial Sequence
  Description of Artificial Sequence: Synthetic oligonucleotide
ucgaaggucgguagugagu

SEQ ID NO: 1392974 - RNA, 19 nt, Artificial Sequence
  Description of Artificial Sequence: Synthetic oligonucleotide
aaacuaaggagcaguggaa

SEQ ID NO: 1392975 - RNA, 19 nt, Artificial Sequence
  Description of Artificial Sequence: Synthetic oligonucleotide
auuuguggggcgaagcuga

SEQ ID NO: 1392976 - RNA, 19 nt, Artificial Sequence
  Description of Artificial Sequence: Synthetic oligonucleotide
caucugaacaauacuuaga

SEQ ID NO: 1392977 - RNA, 19 nt, Artificial Sequence
  Description of Artificial Sequence: Synthetic oligonucleotide
uuuggggucccgugagugc

SEQ ID NO: 1392978 - RNA, 19 nt, Artificial Sequence
  Description of Artificial Sequence: Synthetic oligonucleotide
augcgugugggguacgaug

SEQ ID NO: 1392979 - RNA, 19 nt, Artificial Sequence
  Description of Artificial Sequence: Synthetic oligonucleotide
gcuccuuacccacagauga

SEQ ID NO: 1392980 - RNA, 19 nt, Artificial Sequence
  Description of Artificial Sequence: Synthetic oligonucleotide
ugagugcucaggacauagc

SEQ ID NO: 1392981 - RNA, 19 nt, Artificial Sequence
  Description of Artificial Sequence: Synthetic oligonucleotide
ugcgggagaaucucauaga

SEQ ID NO: 1392982 - RNA, 19 nt, Artificial Sequence
  Description of Artificial Sequence: Synthetic oligonucleotide
aucagggcaaguaauccug

SEQ ID NO: 1392983 - RNA, 19 nt, Artificial Sequence
  Description of Artificial Sequence: Synthetic oligonucleotide
uccuuacccacagaugaca

SEQ ID NO: 1392984 - RNA, 19 nt, Artificial Sequence
  Description of Artificial Sequence: Synthetic oligonucleotide
agcaaugcaggggcuuugc

SEQ ID NO: 1392985 - RNA, 19 nt, Artificial Sequence
  Description of Artificial Sequence: Synthetic oligonucleotide
aguccacuucugcacgccg

SEQ ID NO: 1392986 - RNA, 19 nt, Artificial Sequence
  Description of Artificial Sequence: Synthetic oligonucleotide
agaucgaaggucgguagug

SEQ ID NO: 1392987 - RNA, 19 nt, Artificial Sequence
  Description of Artificial Sequence: Synthetic oligonucleotide
cugugcgaacauuacguuc

SEQ ID NO: 1392988 - RNA, 19 nt, Artificial Sequence
  Description of Artificial Sequence: Synthetic oligonucleotide
gacauagcaccuggagccg

SEQ ID NO: 1392989 - RNA, 19 nt, Artificial Sequence
  Description of Artificial Sequence: Synthetic oligonucleotide
agaaagccggugaugcagg

SEQ ID NO: 1392990 - RNA, 19 nt, Artificial Sequence
  Description of Artificial Sequence: Synthetic oligonucleotide
gugagugcucaggacauag

SEQ ID NO: 1392991 - RNA, 19 nt, Artificial Sequence
  Description of Artificial Sequence: Synthetic oligonucleotide
gcuagguguagccacuaag

SEQ ID NO: 1392992 - RNA, 19 nt, Artificial Sequence
  Description of Artificial Sequence: Synthetic oligonucleotide
acgcucuaaguccacuucu

SEQ ID NO: 1392993 - RNA, 19 nt, Artificial Sequence
  Description of Artificial Sequence: Synthetic oligonucleotide
gacggguucgggcacucug

SEQ ID NO: 1392994 - RNA, 19 nt, Artificial Sequence
  Description of Artificial Sequence: Synthetic oligonucleotide
gaaggucgguagugagugg

SEQ ID NO: 1392995 - RNA, 19 nt, Artificial Sequence
  Description of Artificial Sequence: Synthetic oligonucleotide
ugaagacggguucgggcac

SEQ ID NO: 1392996 - RNA, 19 nt, Artificial Sequence
  Description of Artificial Sequence: Synthetic oligonucleotide
uuuguggggcgaagcugag

SEQ ID NO: 1392997 - RNA, 19 nt, Artificial Sequence
  Description of Artificial Sequence: Synthetic oligonucleotide
agaguggcucggguguugc

SEQ ID NO: 1392998 - RNA, 19 nt, Artificial Sequence
  Description of Artificial Sequence: Synthetic oligonucleotide
uuguacgauucccgugccc

SEQ ID NO: 1392999 - RNA, 19 nt, Artificial Sequence
  Description of Artificial Sequence: Synthetic oligonucleotide
acgauggacccaaaggaug

SEQ ID NO: 1393000 - RNA, 19 nt, Artificial Sequence
  Description of Artificial Sequence: Synthetic oligonucleotide
accggcgagagcgaggaag

SEQ ID NO: 1393001 - RNA, 19 nt, Artificial Sequence
  Description of Artificial Sequence: Synthetic oligonucleotide
uggaucguuuggugcagca

SEQ ID NO: 1393002 - RNA, 19 nt, Artificial Sequence
  Description of Artificial Sequence: Synthetic oligonucleotide
cacucaccacacauucggg

SEQ ID NO: 1393003 - RNA, 19 nt, Artificial Sequence
  Description of Artificial Sequence: Synthetic oligonucleotide
uggggauuguagacgucac

SEQ ID NO: 1393004 - RNA, 19 nt, Artificial Sequence
  Description of Artificial Sequence: Synthetic oligonucleotide
ucucauagauucgguuggc

SEQ ID NO: 1393005 - RNA, 19 nt, Artificial Sequence
  Description of Artificial Sequence: Synthetic oligonucleotide
acaguauguuuugcucugg

SEQ ID NO: 1393006 - RNA, 19 nt, Artificial Sequence
  Description of Artificial Sequence: Synthetic oligonucleotide
uaauggcgauugcacuggc

SEQ ID NO: 1393007 - RNA, 19 nt, Artificial Sequence
  Description of Artificial Sequence: Synthetic oligonucleotide
cacuccccuaacuggaaug

SEQ ID NO: 1393008 - RNA, 19 nt, Artificial Sequence
  Description of Artificial Sequence: Synthetic oligonucleotide
cuuguacgauucccgugcc

SEQ ID NO: 1393009 - RNA, 19 nt, Artificial Sequence
  Description of Artificial Sequence: Synthetic oligonucleotide
auucgguuggcugccagcu

SEQ ID NO: 1393010 - RNA, 19 nt, Artificial Sequence
  Description of Artificial Sequence: Synthetic oligonucleotide
uacuuagaaccaggcuggg

SEQ ID NO: 1393011 - RNA, 19 nt, Artificial Sequence
  Description of Artificial Sequence: Synthetic oligonucleotide
ugucgucacugucauucuc

SEQ ID NO: 1393012 - RNA, 19 nt, Artificial Sequence
  Description of Artificial Sequence: Synthetic oligonucleotide
auggcugugcgaacauuac

SEQ ID NO: 1393013 - RNA, 19 nt, Artificial Sequence
  Description of Artificial Sequence: Synthetic oligonucleotide
uagcaacgcuccaugugac

SEQ ID NO: 1393014 - RNA, 19 nt, Artificial Sequence
  Description of Artificial Sequence: Synthetic oligonucleotide
uagcacgaagaaugauggc

SEQ ID NO: 1393015 - RNA, 19 nt, Artificial Sequence
  Description of Artificial Sequence: Synthetic oligonucleotide
ucaccggcgagagcgagga

SEQ ID NO: 1393016 - RNA, 19 nt, Artificial Sequence
  Description of Artificial Sequence: Synthetic oligonucleotide
cacguacaaguggacaccc

SEQ ID NO: 1393017 - RNA, 19 nt, Artificial Sequence
  Description of Artificial Sequence: Synthetic oligonucleotide
ucggguguugcuguagccu

SEQ ID NO: 1393018 - RNA, 19 nt, Artificial Sequence
  Description of Artificial Sequence: Synthetic oligonucleotide
acggcggaugcguuccagg

SEQ ID NO: 1393019 - RNA, 19 nt, Artificial Sequence
  Description of Artificial Sequence: Synthetic oligonucleotide
acacauucgggcugaccgu

SEQ ID NO: 1393020 - RNA, 19 nt, Artificial Sequence
  Description of Artificial Sequence: Synthetic oligonucleotide
acggguucgggcacucugc

SEQ ID NO: 1393021 - RNA, 19 nt, Artificial Sequence
  Description of Artificial Sequence: Synthetic oligonucleotide
ggcaaguaauccugcucgg

SEQ ID NO: 1393022 - RNA, 19 nt, Artificial Sequence
  Description of Artificial Sequence: Synthetic oligonucleotide
acaucacguacaaguggac

SEQ ID NO: 1393023 - RNA, 19 nt, Artificial Sequence
  Description of Artificial Sequence: Synthetic oligonucleotide
acaaguggacacccacaga

SEQ ID NO: 1393024 - RNA, 19 nt, Artificial Sequence
  Description of Artificial Sequence: Synthetic oligonucleotide
gagaagauuuguggggcga

SEQ ID NO: 1393025 - RNA, 19 nt, Artificial Sequence
  Description of Artificial Sequence: Synthetic oligonucleotide
gaaucucauagauucgguu

SEQ ID NO: 1393026 - RNA, 19 nt, Artificial Sequence
  Description of Artificial Sequence: Synthetic oligonucleotide
gaugcgcugcgggagaauc

SEQ ID NO: 1393027 - RNA, 19 nt, Artificial Sequence
  Description of Artificial Sequence: Synthetic oligonucleotide
cagcacuagaucgaagguc

SEQ ID NO: 1393028 - RNA, 19 nt, Artificial Sequence
  Description of Artificial Sequence: Synthetic oligonucleotide
gggauaaaacuaaggagca

SEQ ID NO: 1393029 - RNA, 19 nt, Artificial Sequence
  Description of Artificial Sequence: Synthetic oligonucleotide
gcggaugcguuccaggagc

SEQ ID NO: 1393030 - RNA, 19 nt, Artificial Sequence
  Description of Artificial Sequence: Synthetic oligonucleotide
cuuauaccacacccggaca

SEQ ID NO: 1393031 - RNA, 19 nt, Artificial Sequence
  Description of Artificial Sequence: Synthetic oligonucleotide
cucggguguugcuguagcc

SEQ ID NO: 1393032 - RNA, 19 nt, Artificial Sequence
  Description of Artificial Sequence: Synthetic oligonucleotide
augugacgcaaggcaacac

SEQ ID NO: 1393033 - RNA, 19 nt, Artificial Sequence
  Description of Artificial Sequence: Synthetic oligonucleotide
gucgguagugaguggguca

SEQ ID NO: 1393034 - RNA, 19 nt, Artificial Sequence
  Description of Artificial Sequence: Synthetic oligonucleotide
cacgcucuaaguccacuuc

SEQ ID NO: 1393035 - RNA, 19 nt, Artificial Sequence
  Description of Artificial Sequence: Synthetic oligonucleotide
guuggaucguuuggugcag

SEQ ID NO: 1393036 - RNA, 19 nt, Artificial Sequence
  Description of Artificial Sequence: Synthetic oligonucleotide
gugugggguacgauggacc

SEQ ID NO: 1393037 - RNA, 19 nt, Artificial Sequence
  Description of Artificial Sequence: Synthetic oligonucleotide
aucguuuggugcagcauca

SEQ ID NO: 1393038 - RNA, 19 nt, Artificial Sequence
  Description of Artificial Sequence: Synthetic oligonucleotide
ugacgugguugguggccgg

SEQ ID NO: 1393039 - RNA, 19 nt, Artificial Sequence
  Description of Artificial Sequence: Synthetic oligonucleotide
uggcgauugcacuggcgcu

SEQ ID NO: 1393040 - RNA, 19 nt, Artificial Sequence
  Description of Artificial Sequence: Synthetic oligonucleotide
gugguugguggccggcggg

SEQ ID NO: 1393041 - RNA, 19 nt, Artificial Sequence
  Description of Artificial Sequence: Synthetic oligonucleotide
cacgaagaaugauggccuc

SEQ ID NO: 1393042 - RNA, 19 nt, Artificial Sequence
  Description of Artificial Sequence: Synthetic oligonucleotide
uggcgcuuaggcagacggc

SEQ ID NO: 1393043 - RNA, 19 nt, Artificial Sequence
  Description of Artificial Sequence: Synthetic oligonucleotide
cacccggacacgcucuaag

SEQ ID NO: 1393044 - RNA, 19 nt, Artificial Sequence
  Description of Artificial Sequence: Synthetic oligonucleotide
gagcgaggaagggaaguac

SEQ ID NO: 1393045 - RNA, 19 nt, Artificial Sequence
  Description of Artificial Sequence: Synthetic oligonucleotide
agcgaggaagggaaguacu

SEQ ID NO: 1393046 - RNA, 19 nt, Artificial Sequence
  Description of Artificial Sequence: Synthetic oligonucleotide
ucgguagugagugggucau

SEQ ID NO: 1393047 - RNA, 19 nt, Artificial Sequence
  Description of Artificial Sequence: Synthetic oligonucleotide
gccucugagggcgucaccg

SEQ ID NO: 1393048 - RNA, 19 nt, Artificial Sequence
  Description of Artificial Sequence: Synthetic oligonucleotide
aaaggaugucuggcucuca

SEQ ID NO: 1393049 - RNA, 19 nt, Artificial Sequence
  Description of Artificial Sequence: Synthetic oligonucleotide
gcaacgcuccaugugacgc

SEQ ID NO: 1393050 - RNA, 19 nt, Artificial Sequence
  Description of Artificial Sequence: Synthetic oligonucleotide
cccuaacuggaaugcaggg

SEQ ID NO: 1393051 - RNA, 19 nt, Artificial Sequence
  Description of Artificial Sequence: Synthetic oligonucleotide
aaugcgugugggguacgau

SEQ ID NO: 1393052 - RNA, 19 nt, Artificial Sequence
  Description of Artificial Sequence: Synthetic oligonucleotide
caucacguacaaguggaca

SEQ ID NO: 1393053 - RNA, 19 nt, Artificial Sequence
  Description of Artificial Sequence: Synthetic oligonucleotide
ggcaaauguaagccagaac

SEQ ID NO: 1393054 - RNA, 19 nt, Artificial Sequence
  Description of Artificial Sequence: Synthetic oligonucleotide
caauacuuagaaccaggcu

SEQ ID NO: 1393055 - RNA, 19 nt, Artificial Sequence
  Description of Artificial Sequence: Synthetic oligonucleotide
agccgcuuacaguauguuu

SEQ ID NO: 1393056 - RNA, 19 nt, Artificial Sequence
  Description of Artificial Sequence: Synthetic oligonucleotide
acacgcucuaaguccacuu

SEQ ID NO: 1393057 - RNA, 19 nt, Artificial Sequence
  Description of Artificial Sequence: Synthetic oligonucleotide
ucuguagaucugugucguc

SEQ ID NO: 1393058 - RNA, 19 nt, Artificial Sequence
  Description of Artificial Sequence: Synthetic oligonucleotide
acgaagaaugauggccuca

SEQ ID NO: 1393059 - RNA, 19 nt, Artificial Sequence
  Description of Artificial Sequence: Synthetic oligonucleotide
acccggacacgcucuaagu

SEQ ID NO: 1393060 - RNA, 19 nt, Artificial Sequence
  Description of Artificial Sequence: Synthetic oligonucleotide
ggauuguagacgucacaga

SEQ ID NO: 1393061 - RNA, 19 nt, Artificial Sequence
  Description of Artificial Sequence: Synthetic oligonucleotide
guacuuguacgauucccgu

SEQ ID NO: 1393062 - RNA, 19 nt, Artificial Sequence
  Description of Artificial Sequence: Synthetic oligonucleotide
gccggcaugccucacacuc

SEQ ID NO: 1393063 - RNA, 19 nt, Artificial Sequence
  Description of Artificial Sequence: Synthetic oligonucleotide
acguggguugaugggaugu

SEQ ID NO: 1393064 - RNA, 19 nt, Artificial Sequence
  Description of Artificial Sequence: Synthetic oligonucleotide
agaagauuuguggggcgaa

SEQ ID NO: 1393065 - RNA, 19 nt, Artificial Sequence
  Description of Artificial Sequence: Synthetic oligonucleotide
cuggugaagcucagcgguc

SEQ ID NO: 1393066 - RNA, 19 nt, Artificial Sequence
  Description of Artificial Sequence: Synthetic oligonucleotide
cagaacauagauggacaca

SEQ ID NO: 1393067 - RNA, 19 nt, Artificial Sequence
  Description of Artificial Sequence: Synthetic oligonucleotide
cucaccacacauucgggcu

SEQ ID NO: 1393068 - RNA, 19 nt, Artificial Sequence
  Description of Artificial Sequence: Synthetic oligonucleotide
cucguccagcuuauaccac

SEQ ID NO: 1393069 - RNA, 19 nt, Artificial Sequence
  Description of Artificial Sequence: Synthetic oligonucleotide
ucagugcgccggcaugccu

SEQ ID NO: 1393070 - RNA, 19 nt, Artificial Sequence
  Description of Artificial Sequence: Synthetic oligonucleotide
ggguagccccuucaaugcg

SEQ ID NO: 1393071 - RNA, 19 nt, Artificial Sequence
  Description of Artificial Sequence: Synthetic oligonucleotide
ggguacgauggacccaaag

SEQ ID NO: 1393072 - RNA, 19 nt, Artificial Sequence
  Description of Artificial Sequence: Synthetic oligonucleotide
agggaaguacuuguacgau

SEQ ID NO: 1393073 - RNA, 19 nt, Artificial Sequence
  Description of Artificial Sequence: Synthetic oligonucleotide
gguucgggcacucugcugu

SEQ ID NO: 1393074 - RNA, 19 nt, Artificial Sequence
  Description of Artificial Sequence: Synthetic oligonucleotide
uuggaucguuuggugcagc

SEQ ID NO: 1393075 - RNA, 19 nt, Artificial Sequence
  Description of Artificial Sequence: Synthetic oligonucleotide
gcucgguuggucauggcug

SEQ ID NO: 1393076 - RNA, 19 nt, Artificial Sequence
  Description of Artificial Sequence: Synthetic oligonucleotide
caucagggcaaguaauccu

SEQ ID NO: 1393077 - RNA, 19 nt, Artificial Sequence
  Description of Artificial Sequence: Synthetic oligonucleotide
gacacuggcgaagccggca

SEQ ID NO: 1393078 - RNA, 19 nt, Artificial Sequence
  Description of Artificial Sequence: Synthetic oligonucleotide
ugcgaacauuacguuccug

SEQ ID NO: 1393079 - RNA, 19 nt, Artificial Sequence
  Description of Artificial Sequence: Synthetic oligonucleotide
agucggguagccccuucaa

SEQ ID NO: 1393080 - RNA, 19 nt, Artificial Sequence
  Description of Artificial Sequence: Synthetic oligonucleotide
uguucacggcggaugcguu

SEQ ID NO: 1393081 - RNA, 19 nt, Artificial Sequence
  Description of Artificial Sequence: Synthetic oligonucleotide
auagauggacacagggaua

SEQ ID NO: 1393082 - RNA, 19 nt, Artificial Sequence
  Description of Artificial Sequence: Synthetic oligonucleotide
agugcgccggcaugccuca

SEQ ID NO: 1393083 - RNA, 19 nt, Artificial Sequence
  Description of Artificial Sequence: Synthetic oligonucleotide
gccucaaguucauggaauc

SEQ ID NO: 1393084 - RNA, 19 nt, Artificial Sequence
  Description of Artificial Sequence: Synthetic oligonucleotide
agagcgaggaagggaagua

SEQ ID NO: 1393085 - RNA, 19 nt, Artificial Sequence
  Description of Artificial Sequence: Synthetic oligonucleotide
cuucaaugcguguggggua

SEQ ID NO: 1393086 - RNA, 19 nt, Artificial Sequence
  Description of Artificial Sequence: Synthetic oligonucleotide
cugagaguggcucgggugu

SEQ ID NO: 1393087 - RNA, 19 nt, Artificial Sequence
  Description of Artificial Sequence: Synthetic oligonucleotide
ggcggaugcguuccaggag

SEQ ID NO: 1393088 - RNA, 19 nt, Artificial Sequence
  Description of Artificial Sequence: Synthetic oligonucleotide
acgugguugguggccggcg

SEQ ID NO: 1393089 - RNA, 19 nt, Artificial Sequence
  Description of Artificial Sequence: Synthetic oligonucleotide
ccggcgagagcgaggaagg

SEQ ID NO: 1393090 - RNA, 19 nt, Artificial Sequence
  Description of Artificial Sequence: Synthetic oligonucleotide
ggucccgugagugcucagg

SEQ ID NO: 1393091 - RNA, 19 nt, Artificial Sequence
  Description of Artificial Sequence: Synthetic oligonucleotide
uuguggggcgaagcugagc

SEQ ID NO: 1393092 - RNA, 19 nt, Artificial Sequence
  Description of Artificial Sequence: Synthetic oligonucleotide
cgaaggucgguagugagug

SEQ ID NO: 1393093 - RNA, 19 nt, Artificial Sequence
  Description of Artificial Sequence: Synthetic oligonucleotide
ggugaagcucagcggucag

SEQ ID NO: 1393094 - RNA, 19 nt, Artificial Sequence
  Description of Artificial Sequence: Synthetic oligonucleotide
gggcugaccguuugauuug

SEQ ID NO: 1393095 - RNA, 19 nt, Artificial Sequence
  Description of Artificial Sequence: Synthetic oligonucleotide
ugagggcgucaccggcgag

SEQ ID NO: 1393096 - RNA, 19 nt, Artificial Sequence
  Description of Artificial Sequence: Synthetic oligonucleotide
ggcgcuuaggcagacggca

SEQ ID NO: 1393097 - RNA, 19 nt, Artificial Sequence
  Description of Artificial Sequence: Synthetic oligonucleotide
cacguggguugaugggaug

SEQ ID NO: 1393098 - RNA, 19 nt, Artificial Sequence
  Description of Artificial Sequence: Synthetic oligonucleotide
agggcaaauguaagccaga

SEQ ID NO: 1393099 - RNA, 19 nt, Artificial Sequence
  Description of Artificial Sequence: Synthetic oligonucleotide
caacgcuccaugugacgca

SEQ ID NO: 1393100 - RNA, 19 nt, Artificial Sequence
  Description of Artificial Sequence: Synthetic oligonucleotide
ggcugugcgaacauuacgu

SEQ ID NO: 1393101 - RNA, 19 nt, Artificial Sequence
  Description of Artificial Sequence: Synthetic oligonucleotide
cccaaaggaugucuggcuc

SEQ ID NO: 1393102 - RNA, 19 nt, Artificial Sequence
  Description of Artificial Sequence: Synthetic oligonucleotide
uccugcucgguuggucaug

SEQ ID NO: 1393103 - RNA, 19 nt, Artificial Sequence
  Description of Artificial Sequence: Synthetic oligonucleotide
gacgugguugguggccggc

SEQ ID NO: 1393104 - RNA, 19 nt, Artificial Sequence
  Description of Artificial Sequence: Synthetic oligonucleotide
acuggcgcuuaggcagacg

SEQ ID NO: 1393105 - RNA, 19 nt, Artificial Sequence
  Description of Artificial Sequence: Synthetic oligonucleotide
ucgggcugaccguuugauu

SEQ ID NO: 1393106 - RNA, 19 nt, Artificial Sequence
  Description of Artificial Sequence: Synthetic oligonucleotide
uucgguuggcugccagcuu

SEQ ID NO: 1393107 - RNA, 19 nt, Artificial Sequence
  Description of Artificial Sequence: Synthetic oligonucleotide
gaccucaucagcgggcacu

SEQ ID NO: 1393108 - RNA, 19 nt, Artificial Sequence
  Description of Artificial Sequence: Synthetic oligonucleotide
cggguagccccuucaaugc

SEQ ID NO: 1393109 - RNA, 19 nt, Artificial Sequence
  Description of Artificial Sequence: Synthetic oligonucleotide
ccgcuuacaguauguuuug

SEQ ID NO: 1393110 - RNA, 19 nt, Artificial Sequence
  Description of Artificial Sequence: Synthetic oligonucleotide
cucagugcgccggcaugcc

SEQ ID NO: 1393111 - RNA, 19 nt, Artificial Sequence
  Description of Artificial Sequence: Synthetic oligonucleotide
gugacgcaaggcaacacgu

SEQ ID NO: 1393112 - RNA, 19 nt, Artificial Sequence
  Description of Artificial Sequence: Synthetic oligonucleotide
acauuacguuccugcucaa

SEQ ID NO: 1393113 - RNA, 19 nt, Artificial Sequence
  Description of Artificial Sequence: Synthetic oligonucleotide
guccccucaucuucacgga

SEQ ID NO: 1393114 - RNA, 19 nt, Artificial Sequence
  Description of Artificial Sequence: Synthetic oligonucleotide
gaagagucggguagccccu

SEQ ID NO: 1393115 - RNA, 19 nt, Artificial Sequence
  Description of Artificial Sequence: Synthetic oligonucleotide
uagauucgguuggcugcca

SEQ ID NO: 1393116 - RNA, 19 nt, Artificial Sequence
  Description of Artificial Sequence: Synthetic oligonucleotide
gauucccgugcccgcagcu

SEQ ID NO: 1393117 - RNA, 19 nt, Artificial Sequence
  Description of Artificial Sequence: Synthetic oligonucleotide
cuucacggauacgccccag

SEQ ID NO: 1393118 - RNA, 19 nt, Artificial Sequence
  Description of Artificial Sequence: Synthetic oligonucleotide
acuggcgaagccggcacuu

SEQ ID NO: 1393119 - RNA, 19 nt, Artificial Sequence
  Description of Artificial Sequence: Synthetic oligonucleotide
ucgguuggucauggcugug

SEQ ID NO: 1393120 - RNA, 19 nt, Artificial Sequence
  Description of Artificial Sequence: Synthetic oligonucleotide
agcucagcggucagcacua

SEQ ID NO: 1393121 - RNA, 19 nt, Artificial Sequence
  Description of Artificial Sequence: Synthetic oligonucleotide
cugagggcgucaccggcga

SEQ ID NO: 1393122 - RNA, 19 nt, Artificial Sequence
  Description of Artificial Sequence: Synthetic oligonucleotide
gcacuuuggggucccguga

SEQ ID NO: 1393123 - RNA, 19 nt, Artificial Sequence
  Description of Artificial Sequence: Synthetic oligonucleotide
cccggacacgcucuaaguc

SEQ ID NO: 1393124 - RNA, 19 nt, Artificial Sequence
  Description of Artificial Sequence: Synthetic oligonucleotide
acgccccagcuucugggau

SEQ ID NO: 1393125 - RNA, 19 nt, Artificial Sequence
  Description of Artificial Sequence: Synthetic oligonucleotide
gcacuagaucgaaggucgg

SEQ ID NO: 1393126 - RNA, 19 nt, Artificial Sequence
  Description of Artificial Sequence: Synthetic oligonucleotide
acguacaaguggacaccca

SEQ ID NO: 1393127 - RNA, 19 nt, Artificial Sequence
  Description of Artificial Sequence: Synthetic oligonucleotide
guggcucggguguugcugu

SEQ ID NO: 1393128 - RNA, 19 nt, Artificial Sequence
  Description of Artificial Sequence: Synthetic oligonucleotide
guggacacccacagaccuc

SEQ ID NO: 1393129 - RNA, 19 nt, Artificial Sequence
  Description of Artificial Sequence: Synthetic oligonucleotide
cauuacguuccugcucaaa

SEQ ID NO: 1393130 - RNA, 19 nt, Artificial Sequence
  Description of Artificial Sequence: Synthetic oligonucleotide
uggcuagguguagccacua

SEQ ID NO: 1393131 - RNA, 19 nt, Artificial Sequence
  Description of Artificial Sequence: Synthetic oligonucleotide
gccgcuuacaguauguuuu

SEQ ID NO: 1393132 - RNA, 19 nt, Artificial Sequence
  Description of Artificial Sequence: Synthetic oligonucleotide
augcgcugcgggagaaucu

SEQ ID NO: 1393133 - RNA, 19 nt, Artificial Sequence
  Description of Artificial Sequence: Synthetic oligonucleotide
ggucgguagugaguggguc

SEQ ID NO: 1393134 - RNA, 19 nt, Artificial Sequence
  Description of Artificial Sequence: Synthetic oligonucleotide
ccuuacccacagaugacaa

SEQ ID NO: 1393135 - RNA, 19 nt, Artificial Sequence
  Description of Artificial Sequence: Synthetic oligonucleotide
cuguucacggcggaugcgu

SEQ ID NO: 1393136 - RNA, 19 nt, Artificial Sequence
  Description of Artificial Sequence: Synthetic oligonucleotide
cuggcuagguguagccacu

SEQ ID NO: 1393137 - RNA, 19 nt, Artificial Sequence
  Description of Artificial Sequence: Synthetic oligonucleotide
caaugcgugugggguacga

SEQ ID NO: 1393138 - RNA, 19 nt, Artificial Sequence
  Description of Artificial Sequence: Synthetic oligonucleotide
caccacacauucgggcuga

SEQ ID NO: 1393139 - RNA, 19 nt, Artificial Sequence
  Description of Artificial Sequence: Synthetic oligonucleotide
ccuucaaugcguguggggu

SEQ ID NO: 1393140 - RNA, 19 nt, Artificial Sequence
  Description of Artificial Sequence: Synthetic oligonucleotide
ggauacgccccagcuucug

SEQ ID NO: 1393141 - RNA, 19 nt, Artificial Sequence
  Description of Artificial Sequence: Synthetic oligonucleotide
cuccccuaacuggaaugca

SEQ ID NO: 1393142 - RNA, 19 nt, Artificial Sequence
  Description of Artificial Sequence: Synthetic oligonucleotide
gggcuguggagaagauuug

SEQ ID NO: 1393143 - RNA, 19 nt, Artificial Sequence
  Description of Artificial Sequence: Synthetic oligonucleotide
ggcucggguguugcuguag

SEQ ID NO: 1393144 - RNA, 19 nt, Artificial Sequence
  Description of Artificial Sequence: Synthetic oligonucleotide
ccaaaggaugucuggcucu

SEQ ID NO: 1393145 - RNA, 19 nt, Artificial Sequence
  Description of Artificial Sequence: Synthetic oligonucleotide
gucggguagccccuucaau

SEQ ID NO: 1393146 - RNA, 19 nt, Artificial Sequence
  Description of Artificial Sequence: Synthetic oligonucleotide
cacuagaucgaaggucggu

SEQ ID NO: 1393147 - RNA, 19 nt, Artificial Sequence
  Description of Artificial Sequence: Synthetic oligonucleotide
gugcgaacauuacguuccu

SEQ ID NO: 1393148 - RNA, 19 nt, Artificial Sequence
  Description of Artificial Sequence: Synthetic oligonucleotide
gcugcuuagcacgaagaau

SEQ ID NO: 1393149 - RNA, 19 nt, Artificial Sequence
  Description of Artificial Sequence: Synthetic oligonucleotide
gcgccggcaugccucacac

SEQ ID NO: 1393150 - RNA, 19 nt, Artificial Sequence
  Description of Artificial Sequence: Synthetic oligonucleotide
cugcacgccgaagcuucuc

SEQ ID NO: 1393151 - RNA, 19 nt, Artificial Sequence
  Description of Artificial Sequence: Synthetic oligonucleotide
ccccgaacuucuucauguc

SEQ ID NO: 1393152 - RNA, 19 nt, Artificial Sequence
  Description of Artificial Sequence: Synthetic oligonucleotide
gguagccccuucaaugcgu

SEQ ID NO: 1393153 - RNA, 19 nt, Artificial Sequence
  Description of Artificial Sequence: Synthetic oligonucleotide
acauucgggcugaccguuu

SEQ ID NO: 1393154 - RNA, 19 nt, Artificial Sequence
  Description of Artificial Sequence: Synthetic oligonucleotide
agacggguucgggcacucu

SEQ ID NO: 1393155 - RNA, 19 nt, Artificial Sequence
  Description of Artificial Sequence: Synthetic oligonucleotide
cacuggcgcuuaggcagac

SEQ ID NO: 1393156 - RNA, 19 nt, Artificial Sequence
  Description of Artificial Sequence: Synthetic oligonucleotide
cgauggacccaaaggaugu

SEQ ID NO: 1393157 - RNA, 19 nt, Artificial Sequence
  Description of Artificial Sequence: Synthetic oligonucleotide
ggccucaaguucauggaau

SEQ ID NO: 1393158 - RNA, 19 nt, Artificial Sequence
  Description of Artificial Sequence: Synthetic oligonucleotide
gcugugcgaacauuacguu

SEQ ID NO: 1393159 - RNA, 19 nt, Artificial Sequence
  Description of Artificial Sequence: Synthetic oligonucleotide
cacggauacgccccagcuu

SEQ ID NO: 1393160 - RNA, 19 nt, Artificial Sequence
  Description of Artificial Sequence: Synthetic oligonucleotide
guaauccugcucgguuggu

SEQ ID NO: 1393161 - RNA, 19 nt, Artificial Sequence
  Description of Artificial Sequence: Synthetic oligonucleotide
gcaaugcaggggcuuugcu

SEQ ID NO: 1393162 - RNA, 19 nt, Artificial Sequence
  Description of Artificial Sequence: Synthetic oligonucleotide
cgccgaagcuucucccagc

SEQ ID NO: 1393163 - RNA, 19 nt, Artificial Sequence
  Description of Artificial Sequence: Synthetic oligonucleotide
gagccgcuuacaguauguu

SEQ ID NO: 1393164 - RNA, 19 nt, Artificial Sequence
  Description of Artificial Sequence: Synthetic oligonucleotide
cacacccggacacgcucua

SEQ ID NO: 1393165 - RNA, 19 nt, Artificial Sequence
  Description of Artificial Sequence: Synthetic oligonucleotide
ccggcaugccucacacuca

SEQ ID NO: 1393166 - RNA, 19 nt, Artificial Sequence
  Description of Artificial Sequence: Synthetic oligonucleotide
gccggugaugcagggccac

SEQ ID NO: 1393167 - RNA, 19 nt, Artificial Sequence
  Description of Artificial Sequence: Synthetic oligonucleotide
ggaucguuuggugcagcau

SEQ ID NO: 1393168 - RNA, 19 nt, Artificial Sequence
  Description of Artificial Sequence: Synthetic oligonucleotide
cuggagccgcuuacaguau

SEQ ID NO: 1393169 - RNA, 19 nt, Artificial Sequence
  Description of Artificial Sequence: Synthetic oligonucleotide
cgauucccgugcccgcagc

SEQ ID NO: 1393170 - RNA, 19 nt, Artificial Sequence
  Description of Artificial Sequence: Synthetic oligonucleotide
ggggucccgugagugcuca

SEQ ID NO: 1393171 - RNA, 19 nt, Artificial Sequence
  Description of Artificial Sequence: Synthetic oligonucleotide
ggcugaccguuugauuugu

SEQ ID NO: 1393172 - RNA, 19 nt, Artificial Sequence
  Description of Artificial Sequence: Synthetic oligonucleotide
cacuggcgaagccggcacu

SEQ ID NO: 1393173 - RNA, 19 nt, Artificial Sequence
  Description of Artificial Sequence: Synthetic oligonucleotide
ggcgauugcacuggcgcuu

SEQ ID NO: 1393174 - RNA, 19 nt, Artificial Sequence
  Description of Artificial Sequence: Synthetic oligonucleotide
ccgugagugcucaggacau

SEQ ID NO: 1393175 - RNA, 19 nt, Artificial Sequence
  Description of Artificial Sequence: Synthetic oligonucleotide
gcgauugcacuggcgcuua

SEQ ID NO: 1393176 - RNA, 19 nt, Artificial Sequence
  Description of Artificial Sequence: Synthetic oligonucleotide
gcgcuuaggcagacggcaa

SEQ ID NO: 1393177 - RNA, 19 nt, Artificial Sequence
  Description of Artificial Sequence: Synthetic oligonucleotide
gguacaggucaggguccaa

SEQ ID NO: 1393178 - RNA, 19 nt, Artificial Sequence
  Description of Artificial Sequence: Synthetic oligonucleotide
gggcgucaccggcgagagc

SEQ ID NO: 1393179 - RNA, 19 nt, Artificial Sequence
  Description of Artificial Sequence: Synthetic oligonucleotide
gugggucauguuggaucgu

SEQ ID NO: 1393180 - RNA, 19 nt, Artificial Sequence
  Description of Artificial Sequence: Synthetic oligonucleotide
cggcgagagcgaggaaggg

SEQ ID NO: 1393181 - RNA, 19 nt, Artificial Sequence
  Description of Artificial Sequence: Synthetic oligonucleotide
ccacacccggacacgcucu

SEQ ID NO: 1393182 - RNA, 19 nt, Artificial Sequence
  Description of Artificial Sequence: Synthetic oligonucleotide
cgggagaaucucauagauu

SEQ ID NO: 1393183 - RNA, 19 nt, Artificial Sequence
  Description of Artificial Sequence: Synthetic oligonucleotide
gcgucaccggcgagagcga

SEQ ID NO: 1393184 - RNA, 19 nt, Artificial Sequence
  Description of Artificial Sequence: Synthetic oligonucleotide
caccggcgagagcgaggaa

SEQ ID NO: 1393185 - RNA, 19 nt, Artificial Sequence
  Description of Artificial Sequence: Synthetic oligonucleotide
ggaugcguuccaggagcuu

SEQ ID NO: 1393186 - RNA, 19 nt, Artificial Sequence
  Description of Artificial Sequence: Synthetic oligonucleotide
cggaugcguuccaggagcu

SEQ ID NO: 1393187 - RNA, 19 nt, Artificial Sequence
  Description of Artificial Sequence: Synthetic oligonucleotide
cacgcacagccugcugcuu

SEQ ID NO: 1393188 - RNA, 19 nt, Artificial Sequence
  Description of Artificial Sequence: Synthetic oligonucleotide
gggguacgauggacccaaa

SEQ ID NO: 1393189 - RNA, 19 nt, Artificial Sequence
  Description of Artificial Sequence: Synthetic oligonucleotide
cgugcccgcagcugacacu

SEQ ID NO: 1393190 - RNA, 19 nt, Artificial Sequence
  Description of Artificial Sequence: Synthetic oligonucleotide
cccgugcccgcagcugaca

SEQ ID NO: 1393191 - RNA, 19 nt, Artificial Sequence
  Description of Artificial Sequence: Synthetic oligonucleotide
gcugaccguuugauuuguu

SEQ ID NO: 1393192 - RNA, 19 nt, Artificial Sequence
  Description of Artificial Sequence: Synthetic oligonucleotide
ccggugaugcagggccacu

SEQ ID NO: 1393193 - RNA, 19 nt, Artificial Sequence
  Description of Artificial Sequence: Synthetic oligonucleotide
aacaguaaccgccaaaugg

SEQ ID NO: 1393194 - RNA, 19 nt, Artificial Sequence
  Description of Artificial Sequence: Synthetic oligonucleotide
ucugaauccagcaaggccg

SEQ ID NO: 1393195 - RNA, 19 nt, Artificial Sequence
  Description of Artificial Sequence: Synthetic oligonucleotide
auaaacgacaauuucuccc

SEQ ID NO: 1393196 - RNA, 19 nt, Artificial Sequence
  Description of Artificial Sequence: Synthetic oligonucleotide
aguuuuaauagcuucauug

SEQ ID NO: 1393197 - RNA, 19 nt, Artificial Sequence
  Description of Artificial Sequence: Synthetic oligonucleotide
aaugauguaaagaagcuug

SEQ ID NO: 1393198 - RNA, 19 nt, Artificial Sequence
  Description of Artificial Sequence: Synthetic oligonucleotide
agcuuuacaauguuccucc

SEQ ID NO: 1393199 - RNA, 19 nt, Artificial Sequence
  Description of Artificial Sequence: Synthetic oligonucleotide
gaaaugucgguacaaagag

SEQ ID NO: 1393200 - RNA, 19 nt, Artificial Sequence
  Description of Artificial Sequence: Synthetic oligonucleotide
aaacuuccuagucugacag

SEQ ID NO: 1393201 - RNA, 19 nt, Artificial Sequence
  Description of Artificial Sequence: Synthetic oligonucleotide
uuuacuauuuccauuuggu

SEQ ID NO: 1393202 - RNA, 19 nt, Artificial Sequence
  Description of Artificial Sequence: Synthetic oligonucleotide
caaauuauggugcagauga

SEQ ID NO: 1393203 - RNA, 19 nt, Artificial Sequence
  Description of Artificial Sequence: Synthetic oligonucleotide
cuaucugcggcaaacacgg

SEQ ID NO: 1393204 - RNA, 19 nt, Artificial Sequence
  Description of Artificial Sequence: Synthetic oligonucleotide
aagauaagcguguugguga

SEQ ID NO: 1393205 - RNA, 19 nt, Artificial Sequence
  Description of Artificial Sequence: Synthetic oligonucleotide
aauuucaguaagaugguag

SEQ ID NO: 1393206 - RNA, 19 nt, Artificial Sequence
  Description of Artificial Sequence: Synthetic oligonucleotide
aaugggaacggcugcgccc

SEQ ID NO: 1393207 - RNA, 19 nt, Artificial Sequence
  Description of Artificial Sequence: Synthetic oligonucleotide
gaugacauaguccuuucag

SEQ ID NO: 1393208 - RNA, 19 nt, Artificial Sequence
  Description of Artificial Sequence: Synthetic oligonucleotide
aaacauuaaacuuccuagu

SEQ ID NO: 1393209 - RNA, 19 nt, Artificial Sequence
  Description of Artificial Sequence: Synthetic oligonucleotide
guaaccuugacuucuuggg

SEQ ID NO: 1393210 - RNA, 19 nt, Artificial Sequence
  Description of Artificial Sequence: Synthetic oligonucleotide
aucugaauccagcaaggcc

SEQ ID NO: 1393211 - RNA, 19 nt, Artificial Sequence
  Description of Artificial Sequence: Synthetic oligonucleotide
aaggguauaaaggccaagg

SEQ ID NO: 1393212 - RNA, 19 nt, Artificial Sequence
  Description of Artificial Sequence: Synthetic oligonucleotide
ucugacagauuauacaacu

SEQ ID NO: 1393213 - RNA, 19 nt, Artificial Sequence
  Description of Artificial Sequence: Synthetic oligonucleotide
uuuacaauguuccuccgaa

SEQ ID NO: 1393214 - RNA, 19 nt, Artificial Sequence
  Description of Artificial Sequence: Synthetic oligonucleotide
aaaaggacaaugggaacgg

SEQ ID NO: 1393215 - RNA, 19 nt, Artificial Sequence
  Description of Artificial Sequence: Synthetic oligonucleotide
uguaaccuugacuucuugg

SEQ ID NO: 1393216 - RNA, 19 nt, Artificial Sequence
  Description of Artificial Sequence: Synthetic oligonucleotide
uccuaaauaaaaugaaauc

SEQ ID NO: 1393217 - RNA, 19 nt, Artificial Sequence
  Description of Artificial Sequence: Synthetic oligonucleotide
cauuaaacuuccuagucug

SEQ ID NO: 1393218 - RNA, 19 nt, Artificial Sequence
  Description of Artificial Sequence: Synthetic oligonucleotide
agaugacaaauuauggugc

SEQ ID NO: 1393219 - RNA, 19 nt, Artificial Sequence
  Description of Artificial Sequence: Synthetic oligonucleotide
cuuuugaucuaucugcggc

SEQ ID NO: 1393220 - RNA, 19 nt, Artificial Sequence
  Description of Artificial Sequence: Synthetic oligonucleotide
acaguaaccgccaaauggc

SEQ ID NO: 1393221 - RNA, 19 nt, Artificial Sequence
  Description of Artificial Sequence: Synthetic oligonucleotide
uaaacgacaauuucuccca

SEQ ID NO: 1393222 - RNA, 19 nt, Artificial Sequence
  Description of Artificial Sequence: Synthetic oligonucleotide
auguaaagaagcuuguaga

SEQ ID NO: 1393223 - RNA, 19 nt, Artificial Sequence
  Description of Artificial Sequence: Synthetic oligonucleotide
uccuuuaaucccauggagc

SEQ ID NO: 1393224 - RNA, 19 nt, Artificial Sequence
  Description of Artificial Sequence: Synthetic oligonucleotide
aguaagaugguaguauuuc

SEQ ID NO: 1393225 - RNA, 19 nt, Artificial Sequence
  Description of Artificial Sequence: Synthetic oligonucleotide
agauaaacgacaauuucuc

SEQ ID NO: 1393226 - RNA, 19 nt, Artificial Sequence
  Description of Artificial Sequence: Synthetic oligonucleotide
uccuccgaaguuuuaauag

SEQ ID NO: 1393227 - RNA, 19 nt, Artificial Sequence
  Description of Artificial Sequence: Synthetic oligonucleotide
gaaugugccacuuuugauc

SEQ ID NO: 1393228 - RNA, 19 nt, Artificial Sequence
  Description of Artificial Sequence: Synthetic oligonucleotide
aaaugaaaucacaggcagc

SEQ ID NO: 1393229 - RNA, 19 nt, Artificial Sequence
  Description of Artificial Sequence: Synthetic oligonucleotide
agcacuuucagaaaccagg

SEQ ID NO: 1393230 - RNA, 19 nt, Artificial Sequence
  Description of Artificial Sequence: Synthetic oligonucleotide
gguauaaaggccaaggaag

SEQ ID NO: 1393231 - RNA, 19 nt, Artificial Sequence
  Description of Artificial Sequence: Synthetic oligonucleotide
uacaauguuccuccgaagu

SEQ ID NO: 1393232 - RNA, 19 nt, Artificial Sequence
  Description of Artificial Sequence: Synthetic oligonucleotide
uuucccauugcucacucca

SEQ ID NO: 1393233 - RNA, 19 nt, Artificial Sequence
  Description of Artificial Sequence: Synthetic oligonucleotide
uguaaagaagcuuguagau

SEQ ID NO: 1393234 - RNA, 19 nt, Artificial Sequence
  Description of Artificial Sequence: Synthetic oligonucleotide
agugcuacaucagucacgg

SEQ ID NO: 1393235 - RNA, 19 nt, Artificial Sequence
  Description of Artificial Sequence: Synthetic oligonucleotide
uguuuacuuuacuauuucc

SEQ ID NO: 1393236 - RNA, 19 nt, Artificial Sequence
  Description of Artificial Sequence: Synthetic oligonucleotide
ugauacaacuuccuaaaua

SEQ ID NO: 1393237 - RNA, 19 nt, Artificial Sequence
  Description of Artificial Sequence: Synthetic oligonucleotide
uguucuucuugguugacac

SEQ ID NO: 1393238 - RNA, 19 nt, Artificial Sequence
  Description of Artificial Sequence: Synthetic oligonucleotide
agucugacagauuauacaa

SEQ ID NO: 1393239 - RNA, 19 nt, Artificial Sequence
  Description of Artificial Sequence: Synthetic oligonucleotide
gcuaagauaagcguguugg

SEQ ID NO: 1393240 - RNA, 19 nt, Artificial Sequence
  Description of Artificial Sequence: Synthetic oligonucleotide
caucagucacggaagaagg

SEQ ID NO: 1393241 - RNA, 19 nt, Artificial Sequence
  Description of Artificial Sequence: Synthetic oligonucleotide
auuuugaugauguuuggua

SEQ ID NO: 1393242 - RNA, 19 nt, Artificial Sequence
  Description of Artificial Sequence: Synthetic oligonucleotide
uggcaagucacuauucuga

SEQ ID NO: 1393243 - RNA, 19 nt, Artificial Sequence
  Description of Artificial Sequence: Synthetic oligonucleotide
gauaaacgacaauuucucc

SEQ ID NO: 1393244 - RNA, 19 nt, Artificial Sequence
  Description of Artificial Sequence: Synthetic oligonucleotide
uuucgaauccuaugaaugu

SEQ ID NO: 1393245 - RNA, 19 nt, Artificial Sequence
  Description of Artificial Sequence: Synthetic oligonucleotide
acacaagcuggucucuucc

SEQ ID NO: 1393246 - RNA, 19 nt, Artificial Sequence
  Description of Artificial Sequence: Synthetic oligonucleotide
aauuauggugcagaugaca

SEQ ID NO: 1393247 - RNA, 19 nt, Artificial Sequence
  Description of Artificial Sequence: Synthetic oligonucleotide
uuuuaauagcuucauuguu

SEQ ID NO: 1393248 - RNA, 19 nt, Artificial Sequence
  Description of Artificial Sequence: Synthetic oligonucleotide
uaguauuucugaaaagaau

SEQ ID NO: 1393249 - RNA, 19 nt, Artificial Sequence
  Description of Artificial Sequence: Synthetic oligonucleotide
ugucgguacaaagagagcu

SEQ ID NO: 1393250 - RNA, 19 nt, Artificial Sequence
  Description of Artificial Sequence: Synthetic oligonucleotide
uuuugaucuaucugcggca

SEQ ID NO: 1393251 - RNA, 19 nt, Artificial Sequence
  Description of Artificial Sequence: Synthetic oligonucleotide
ugacauaguccuuucagaa

SEQ ID NO: 1393252 - RNA, 19 nt, Artificial Sequence
  Description of Artificial Sequence: Synthetic oligonucleotide
uaagauaagcguguuggug

SEQ ID NO: 1393253 - RNA, 19 nt, Artificial Sequence
  Description of Artificial Sequence: Synthetic oligonucleotide
aacgacaauuucucccauc

SEQ ID NO: 1393254 - RNA, 19 nt, Artificial Sequence
  Description of Artificial Sequence: Synthetic oligonucleotide
aauuuugaugauguuuggu

SEQ ID NO: 1393255 - RNA, 19 nt, Artificial Sequence
  Description of Artificial Sequence: Synthetic oligonucleotide
uuccuagucugacagauua

SEQ ID NO: 1393256 - RNA, 19 nt, Artificial Sequence
  Description of Artificial Sequence: Synthetic oligonucleotide
acagccaugaagcgacuac

SEQ ID NO: 1393257 - RNA, 19 nt, Artificial Sequence
  Description of Artificial Sequence: Synthetic oligonucleotide
uuuaaucccauggagcagu

SEQ ID NO: 1393258 - RNA, 19 nt, Artificial Sequence
  Description of Artificial Sequence: Synthetic oligonucleotide
uguuugguaucucccagac

SEQ ID NO: 1393259 - RNA, 19 nt, Artificial Sequence
  Description of Artificial Sequence: Synthetic oligonucleotide
ucauucguuccucaucuga

SEQ ID NO: 1393260 - RNA, 19 nt, Artificial Sequence
  Description of Artificial Sequence: Synthetic oligonucleotide
cacggaagaaggaacauuc

SEQ ID NO: 1393261 - RNA, 19 nt, Artificial Sequence
  Description of Artificial Sequence: Synthetic oligonucleotide
gguuauuugcugauggucg

SEQ ID NO: 1393262 - RNA, 19 nt, Artificial Sequence
  Description of Artificial Sequence: Synthetic oligonucleotide
ucgccagagaaucaugaug

SEQ ID NO: 1393263 - RNA, 19 nt, Artificial Sequence
  Description of Artificial Sequence: Synthetic oligonucleotide
ugacaaauuauggugcaga

SEQ ID NO: 1393264 - RNA, 19 nt, Artificial Sequence
  Description of Artificial Sequence: Synthetic oligonucleotide
acgacaauuucucccauca

SEQ ID NO: 1393265 - RNA, 19 nt, Artificial Sequence
  Description of Artificial Sequence: Synthetic oligonucleotide
caaauggcaucauccaccc

SEQ ID NO: 1393266 - RNA, 19 nt, Artificial Sequence
  Description of Artificial Sequence: Synthetic oligonucleotide
guuauauuaaaagacagau

SEQ ID NO: 1393267 - RNA, 19 nt, Artificial Sequence
  Description of Artificial Sequence: Synthetic oligonucleotide
ucgaauccuaugaaugugu

SEQ ID NO: 1393268 - RNA, 19 nt, Artificial Sequence
  Description of Artificial Sequence: Synthetic oligonucleotide
aguccuuucagaaacauua

SEQ ID NO: 1393269 - RNA, 19 nt, Artificial Sequence
  Description of Artificial Sequence: Synthetic oligonucleotide
uucaaaucgucuuccugug

SEQ ID NO: 1393270 - RNA, 19 nt, Artificial Sequence
  Description of Artificial Sequence: Synthetic oligonucleotide
gcuaccgccaucuucacag

SEQ ID NO: 1393271 - RNA, 19 nt, Artificial Sequence
  Description of Artificial Sequence: Synthetic oligonucleotide
caucacugauacaacuucc

SEQ ID NO: 1393272 - RNA, 19 nt, Artificial Sequence
  Description of Artificial Sequence: Synthetic oligonucleotide
cauuguuugagucaggcua

SEQ ID NO: 1393273 - RNA, 19 nt, Artificial Sequence
  Description of Artificial Sequence: Synthetic oligonucleotide
auuggaaugugccacuuuu

SEQ ID NO: 1393274 - RNA, 19 nt, Artificial Sequence
  Description of Artificial Sequence: Synthetic oligonucleotide
uccuagagaugacaaauua

SEQ ID NO: 1393275 - RNA, 19 nt, Artificial Sequence
  Description of Artificial Sequence: Synthetic oligonucleotide
cuagucugacagauuauac

SEQ ID NO: 1393276 - RNA, 19 nt, Artificial Sequence
  Description of Artificial Sequence: Synthetic oligonucleotide
gagauuuuccaaauaugac

SEQ ID NO: 1393277 - RNA, 19 nt, Artificial Sequence
  Description of Artificial Sequence: Synthetic oligonucleotide
guauaaaggccaaggaagc

SEQ ID NO: 1393278 - RNA, 19 nt, Artificial Sequence
  Description of Artificial Sequence: Synthetic oligonucleotide
ccugauacuagccaucucc

SEQ ID NO: 1393279 - RNA, 19 nt, Artificial Sequence
  Description of Artificial Sequence: Synthetic oligonucleotide
augacauaguccuuucaga

SEQ ID NO: 1393280 - RNA, 19 nt, Artificial Sequence
  Description of Artificial Sequence: Synthetic oligonucleotide
ugaucauucguuccucauc

SEQ ID NO: 1393281 - RNA, 19 nt, Artificial Sequence
  Description of Artificial Sequence: Synthetic oligonucleotide
cacugcuaagauaagcgug

SEQ ID NO: 1393282 - RNA, 19 nt, Artificial Sequence
  Description of Artificial Sequence: Synthetic oligonucleotide
gacaauuucucccaucacu

SEQ ID NO: 1393283 - RNA, 19 nt, Artificial Sequence
  Description of Artificial Sequence: Synthetic oligonucleotide
gaucacaaggcucuccauc

SEQ ID NO: 1393284 - RNA, 19 nt, Artificial Sequence
  Description of Artificial Sequence: Synthetic oligonucleotide
gaucauucguuccucaucu

SEQ ID NO: 1393285 - RNA, 19 nt, Artificial Sequence
  Description of Artificial Sequence: Synthetic oligonucleotide
aaaaggcaaaccucugguu

SEQ ID NO: 1393286 - RNA, 19 nt, Artificial Sequence
  Description of Artificial Sequence: Synthetic oligonucleotide
aagugcuacaucagucacg

SEQ ID NO: 1393287 - RNA, 19 nt, Artificial Sequence
  Description of Artificial Sequence: Synthetic oligonucleotide
uucgaauccuaugaaugug

SEQ ID NO: 1393288 - RNA, 19 nt, Artificial Sequence
  Description of Artificial Sequence: Synthetic oligonucleotide
agauguaaccuugacuucu

SEQ ID NO: 1393289 - RNA, 19 nt, Artificial Sequence
  Description of Artificial Sequence: Synthetic oligonucleotide
ugcaagauguaaccuugac

SEQ ID NO: 1393290 - RNA, 19 nt, Artificial Sequence
  Description of Artificial Sequence: Synthetic oligonucleotide
gaauguguucucaguaagc

SEQ ID NO: 1393291 - RNA, 19 nt, Artificial Sequence
  Description of Artificial Sequence: Synthetic oligonucleotide
gcaaucagcacuuucagaa

SEQ ID NO: 1393292 - RNA, 19 nt, Artificial Sequence
  Description of Artificial Sequence: Synthetic oligonucleotide
cauuguagcaaucagcacu

SEQ ID NO: 1393293 - RNA, 19 nt, Artificial Sequence
  Description of Artificial Sequence: Synthetic oligonucleotide
ugaucuaucugcggcaaac

SEQ ID NO: 1393294 - RNA, 19 nt, Artificial Sequence
  Description of Artificial Sequence: Synthetic oligonucleotide
uuacuauuuccauuugguu

SEQ ID NO: 1393295 - RNA, 19 nt, Artificial Sequence
  Description of Artificial Sequence: Synthetic oligonucleotide
uucguuccucaucugaauc

SEQ ID NO: 1393296 - RNA, 19 nt, Artificial Sequence
  Description of Artificial Sequence: Synthetic oligonucleotide
cauugccuccuuuaauccc

SEQ ID NO: 1393297 - RNA, 19 nt, Artificial Sequence
  Description of Artificial Sequence: Synthetic oligonucleotide
aguccgacuggcaagucac

SEQ ID NO: 1393298 - RNA, 19 nt, Artificial Sequence
  Description of Artificial Sequence: Synthetic oligonucleotide
uauaaaggccaaggaagca

SEQ ID NO: 1393299 - RNA, 19 nt, Artificial Sequence
  Description of Artificial Sequence: Synthetic oligonucleotide
gaaaaggcaaaccucuggu

SEQ ID NO: 1393300 - RNA, 19 nt, Artificial Sequence
  Description of Artificial Sequence: Synthetic oligonucleotide
agucaggcuaaugaauauc

SEQ ID NO: 1393301 - RNA, 19 nt, Artificial Sequence
  Description of Artificial Sequence: Synthetic oligonucleotide
ugguaucucccagacaagc

SEQ ID NO: 1393302 - RNA, 19 nt, Artificial Sequence
  Description of Artificial Sequence: Synthetic oligonucleotide
ucuacccacuucaaaucgu

SEQ ID NO: 1393303 - RNA, 19 nt, Artificial Sequence
  Description of Artificial Sequence: Synthetic oligonucleotide
aggaucauggaaaacagua

SEQ ID NO: 1393304 - RNA, 19 nt, Artificial Sequence
  Description of Artificial Sequence: Synthetic oligonucleotide
acugcuaagauaagcgugu

SEQ ID NO: 1393305 - RNA, 19 nt, Artificial Sequence
  Description of Artificial Sequence: Synthetic oligonucleotide
aggguauaaaggccaagga

SEQ ID NO: 1393306 - RNA, 19 nt, Artificial Sequence
  Description of Artificial Sequence: Synthetic oligonucleotide
ugguuauuugcugaugguc

SEQ ID NO: 1393307 - RNA, 19 nt, Artificial Sequence
  Description of Artificial Sequence: Synthetic oligonucleotide
ugacuucuugggaaacuga

SEQ ID NO: 1393308 - RNA, 19 nt, Artificial Sequence
  Description of Artificial Sequence: Synthetic oligonucleotide
acagaucacaaggcucucc

SEQ ID NO: 1393309 - RNA, 19 nt, Artificial Sequence
  Description of Artificial Sequence: Synthetic oligonucleotide
ugugaucauucguuccuca

SEQ ID NO: 1393310 - RNA, 19 nt, Artificial Sequence
  Description of Artificial Sequence: Synthetic oligonucleotide
augggaacggcugcgcccc

SEQ ID NO: 1393311 - RNA, 19 nt, Artificial Sequence
  Description of Artificial Sequence: Synthetic oligonucleotide
aagugugugaucauucguu

SEQ ID NO: 1393312 - RNA, 19 nt, Artificial Sequence
  Description of Artificial Sequence: Synthetic oligonucleotide
cugaauccagcaaggccgg

SEQ ID NO: 1393313 - RNA, 19 nt, Artificial Sequence
  Description of Artificial Sequence: Synthetic oligonucleotide
cuucaaaucgucuuccugu

SEQ ID NO: 1393314 - RNA, 19 nt, Artificial Sequence
  Description of Artificial Sequence: Synthetic oligonucleotide
auacaacugaacaggaagu

SEQ ID NO: 1393315 - RNA, 19 nt, Artificial Sequence
  Description of Artificial Sequence: Synthetic oligonucleotide
aacugaacaggaaguucag

SEQ ID NO: 1393316 - RNA, 19 nt, Artificial Sequence
  Description of Artificial Sequence: Synthetic oligonucleotide
aggcucuccaucaaauuuc

SEQ ID NO: 1393317 - RNA, 19 nt, Artificial Sequence
  Description of Artificial Sequence: Synthetic oligonucleotide
guaaccgccaaauggcauc

SEQ ID NO: 1393318 - RNA, 19 nt, Artificial Sequence
  Description of Artificial Sequence: Synthetic oligonucleotide
acaaugggaacggcugcgc

SEQ ID NO: 1393319 - RNA, 19 nt, Artificial Sequence
  Description of Artificial Sequence: Synthetic oligonucleotide
gccacugcuaagauaagcg

SEQ ID NO: 1393320 - RNA, 19 nt, Artificial Sequence
  Description of Artificial Sequence: Synthetic oligonucleotide
aucugcggcaaacacgggu

SEQ ID NO: 1393321 - RNA, 19 nt, Artificial Sequence
  Description of Artificial Sequence: Synthetic oligonucleotide
gaagccacgcagcuaccgc

SEQ ID NO: 1393322 - RNA, 19 nt, Artificial Sequence
  Description of Artificial Sequence: Synthetic oligonucleotide
uuaaucccauggagcagug

SEQ ID NO: 1393323 - RNA, 19 nt, Artificial Sequence
  Description of Artificial Sequence: Synthetic oligonucleotide
agugcagaagacugacaca

SEQ ID NO: 1393324 - RNA, 19 nt, Artificial Sequence
  Description of Artificial Sequence: Synthetic oligonucleotide
acugaaagauaaacgacaa

SEQ ID NO: 1393325 - RNA, 19 nt, Artificial Sequence
  Description of Artificial Sequence: Synthetic oligonucleotide
aggacaaugggaacggcug

SEQ ID NO: 1393326 - RNA, 19 nt, Artificial Sequence
  Description of Artificial Sequence: Synthetic oligonucleotide
caaacacgggugcuggccc

SEQ ID NO: 1393327 - RNA, 19 nt, Artificial Sequence
  Description of Artificial Sequence: Synthetic oligonucleotide
accgccaaauggcaucauc

SEQ ID NO: 1393328 - RNA, 19 nt, Artificial Sequence
  Description of Artificial Sequence: Synthetic oligonucleotide
cacugauacaacuuccuaa

SEQ ID NO: 1393329 - RNA, 19 nt, Artificial Sequence
  Description of Artificial Sequence: Synthetic oligonucleotide
acuuccuagucugacagau

SEQ ID NO: 1393330 - RNA, 19 nt, Artificial Sequence
  Description of Artificial Sequence: Synthetic oligonucleotide
ucaaaucgucuuccugugu

SEQ ID NO: 1393331 - RNA, 19 nt, Artificial Sequence
  Description of Artificial Sequence: Synthetic oligonucleotide
auaagcguguuggugaaau

SEQ ID NO: 1393332 - RNA, 19 nt, Artificial Sequence
  Description of Artificial Sequence: Synthetic oligonucleotide
cagucacggaagaaggaac

SEQ ID NO: 1393333 - RNA, 19 nt, Artificial Sequence
  Description of Artificial Sequence: Synthetic oligonucleotide
cagaaaccagguuauauua

SEQ ID NO: 1393334 - RNA, 19 nt, Artificial Sequence
  Description of Artificial Sequence: Synthetic oligonucleotide
aggauaucaaugauguaaa

SEQ ID NO: 1393335 - RNA, 19 nt, Artificial Sequence
  Description of Artificial Sequence: Synthetic oligonucleotide
gagaaucaugaugacaaaa

SEQ ID NO: 1393336 - RNA, 19 nt, Artificial Sequence
  Description of Artificial Sequence: Synthetic oligonucleotide
uuugaucuaucugcggcaa

SEQ ID NO: 1393337 - RNA, 19 nt, Artificial Sequence
  Description of Artificial Sequence: Synthetic oligonucleotide
ucucaguaagcuguucuuc

SEQ ID NO: 1393338 - RNA, 19 nt, Artificial Sequence
  Description of Artificial Sequence: Synthetic oligonucleotide
aacuuccuagucugacaga

SEQ ID NO: 1393339 - RNA, 19 nt, Artificial Sequence
  Description of Artificial Sequence: Synthetic oligonucleotide
ggaagugcuacaucaguca

SEQ ID NO: 1393340 - RNA, 19 nt, Artificial Sequence
  Description of Artificial Sequence: Synthetic oligonucleotide
agcguguuggugaaauguc

SEQ ID NO: 1393341 - RNA, 19 nt, Artificial Sequence
  Description of Artificial Sequence: Synthetic oligonucleotide
ggaaggauaucaaugaugu

SEQ ID NO: 1393342 - RNA, 19 nt, Artificial Sequence
  Description of Artificial Sequence: Synthetic oligonucleotide
uccccgacggcauuggaau

SEQ ID NO: 1393343 - RNA, 19 nt, Artificial Sequence
  Description of Artificial Sequence: Synthetic oligonucleotide
ggcuaaugaauauccacca

SEQ ID NO: 1393344 - RNA, 19 nt, Artificial Sequence
  Description of Artificial Sequence: Synthetic oligonucleotide
uaagcguguuggugaaaug

SEQ ID NO: 1393345 - RNA, 19 nt, Artificial Sequence
  Description of Artificial Sequence: Synthetic oligonucleotide
gucuuaauuuugaugaugu

SEQ ID NO: 1393346 - RNA, 19 nt, Artificial Sequence
  Description of Artificial Sequence: Synthetic oligonucleotide
agaugacauaguccuuuca

SEQ ID NO: 1393347 - RNA, 19 nt, Artificial Sequence
  Description of Artificial Sequence: Synthetic oligonucleotide
ccugaagccacgcagcuac

SEQ ID NO: 1393348 - RNA, 19 nt, Artificial Sequence
  Description of Artificial Sequence: Synthetic oligonucleotide
aaacgacaauuucucccau

SEQ ID NO: 1393349 - RNA, 19 nt, Artificial Sequence
  Description of Artificial Sequence: Synthetic oligonucleotide
agauaagcguguuggugaa

SEQ ID NO: 1393350 - RNA, 19 nt, Artificial Sequence
  Description of Artificial Sequence: Synthetic oligonucleotide
gcuaaugaauauccaccag

SEQ ID NO: 1393351 - RNA, 19 nt, Artificial Sequence
  Description of Artificial Sequence: Synthetic oligonucleotide
augacaaauuauggugcag

SEQ ID NO: 1393352 - RNA, 19 nt, Artificial Sequence
  Description of Artificial Sequence: Synthetic oligonucleotide
ggugcagaugacauagucc

SEQ ID NO: 1393353 - RNA, 19 nt, Artificial Sequence
  Description of Artificial Sequence: Synthetic oligonucleotide
gguuauauuaaaagacaga

SEQ ID NO: 1393354 - RNA, 19 nt, Artificial Sequence
  Description of Artificial Sequence: Synthetic oligonucleotide
aaacacgggugcuggcccu

SEQ ID NO: 1393355 - RNA, 19 nt, Artificial Sequence
  Description of Artificial Sequence: Synthetic oligonucleotide
guagaucucauuguagcaa

SEQ ID NO: 1393356 - RNA, 19 nt, Artificial Sequence
  Description of Artificial Sequence: Synthetic oligonucleotide
guaagaugguaguauuucu

SEQ ID NO: 1393357 - RNA, 19 nt, Artificial Sequence
  Description of Artificial Sequence: Synthetic oligonucleotide
uucccugauacuagccauc

SEQ ID NO: 1393358 - RNA, 19 nt, Artificial Sequence
  Description of Artificial Sequence: Synthetic oligonucleotide
ugauguaaagaagcuugua

SEQ ID NO: 1393359 - RNA, 19 nt, Artificial Sequence
  Description of Artificial Sequence: Synthetic oligonucleotide
caauggugaaaaggcaaac

SEQ ID NO: 1393360 - RNA, 19 nt, Artificial Sequence
  Description of Artificial Sequence: Synthetic oligonucleotide
augaagcgacuacccaaag

SEQ ID NO: 1393361 - RNA, 19 nt, Artificial Sequence
  Description of Artificial Sequence: Synthetic oligonucleotide
agucacggaagaaggaaca

SEQ ID NO: 1393362 - RNA, 19 nt, Artificial Sequence
  Description of Artificial Sequence: Synthetic oligonucleotide
augucgguacaaagagagc

SEQ ID NO: 1393363 - RNA, 19 nt, Artificial Sequence
  Description of Artificial Sequence: Synthetic oligonucleotide
uugguuccugcuugguacu

SEQ ID NO: 1393364 - RNA, 19 nt, Artificial Sequence
  Description of Artificial Sequence: Synthetic oligonucleotide
uaaccgccaaauggcauca

SEQ ID NO: 1393365 - RNA, 19 nt, Artificial Sequence
  Description of Artificial Sequence: Synthetic oligonucleotide
ccuccgaaguuuuaauagc

SEQ ID NO: 1393366 - RNA, 19 nt, Artificial Sequence
  Description of Artificial Sequence: Synthetic oligonucleotide
caucgguuccuucugcuca

SEQ ID NO: 1393367 - RNA, 19 nt, Artificial Sequence
  Description of Artificial Sequence: Synthetic oligonucleotide
cauucguuccucaucugaa

SEQ ID NO: 1393368 - RNA, 19 nt, Artificial Sequence
  Description of Artificial Sequence: Synthetic oligonucleotide
agcaucgguuccuucugcu

SEQ ID NO: 1393369 - RNA, 19 nt, Artificial Sequence
  Description of Artificial Sequence: Synthetic oligonucleotide
augauguaaagaagcuugu

SEQ ID NO: 1393370 - RNA, 19 nt, Artificial Sequence
  Description of Artificial Sequence: Synthetic oligonucleotide
cagaucacaaggcucucca

SEQ ID NO: 1393371 - RNA, 19 nt, Artificial Sequence
  Description of Artificial Sequence: Synthetic oligonucleotide
ucccugauacuagccaucu

SEQ ID NO: 1393372 - RNA, 19 nt, Artificial Sequence
  Description of Artificial Sequence: Synthetic oligonucleotide
auaguccuuucagaaacau

SEQ ID NO: 1393373 - RNA, 19 nt, Artificial Sequence
  Description of Artificial Sequence: Synthetic oligonucleotide
uggucgccagagaaucaug

SEQ ID NO: 1393374 - RNA, 19 nt, Artificial Sequence
  Description of Artificial Sequence: Synthetic oligonucleotide
uaucugcggcaaacacggg

SEQ ID NO: 1393375 - RNA, 19 nt, Artificial Sequence
  Description of Artificial Sequence: Synthetic oligonucleotide
cagaugacauaguccuuuc

SEQ ID NO: 1393376 - RNA, 19 nt, Artificial Sequence
  Description of Artificial Sequence: Synthetic oligonucleotide
gaucuaucugcggcaaaca

SEQ ID NO: 1393377 - RNA, 19 nt, Artificial Sequence
  Description of Artificial Sequence: Synthetic oligonucleotide
aaggccggaagugcuacau

SEQ ID NO: 1393378 - RNA, 19 nt, Artificial Sequence
  Description of Artificial Sequence: Synthetic oligonucleotide
uccuagucugacagauuau

SEQ ID NO: 1393379 - RNA, 19 nt, Artificial Sequence
  Description of Artificial Sequence: Synthetic oligonucleotide
cauaguccuuucagaaaca

SEQ ID NO: 1393380 - RNA, 19 nt, Artificial Sequence
  Description of Artificial Sequence: Synthetic oligonucleotide
cguguuggugaaaugucgg

SEQ ID NO: 1393381 - RNA, 19 nt, Artificial Sequence
  Description of Artificial Sequence: Synthetic oligonucleotide
aucauucguuccucaucug

SEQ ID NO: 1393382 - RNA, 19 nt, Artificial Sequence
  Description of Artificial Sequence: Synthetic oligonucleotide
ucgguacaaagagagcuuu

SEQ ID NO: 1393383 - RNA, 19 nt, Artificial Sequence
  Description of Artificial Sequence: Synthetic oligonucleotide
ucacaaggcucuccaucaa

SEQ ID NO: 1393384 - RNA, 19 nt, Artificial Sequence
  Description of Artificial Sequence: Synthetic oligonucleotide
caacacguagguugcaaaa

SEQ ID NO: 1393385 - RNA, 19 nt, Artificial Sequence
  Description of Artificial Sequence: Synthetic oligonucleotide
gguaucucccagacaagcc

SEQ ID NO: 1393386 - RNA, 19 nt, Artificial Sequence
  Description of Artificial Sequence: Synthetic oligonucleotide
uugaucuaucugcggcaaa

SEQ ID NO: 1393387 - RNA, 19 nt, Artificial Sequence
  Description of Artificial Sequence: Synthetic oligonucleotide
ucacggaagaaggaacauu

SEQ ID NO: 1393388 - RNA, 19 nt, Artificial Sequence
  Description of Artificial Sequence: Synthetic oligonucleotide
cucccaucacugauacaac

SEQ ID NO: 1393389 - RNA, 19 nt, Artificial Sequence
  Description of Artificial Sequence: Synthetic oligonucleotide
aggccggaagugcuacauc

SEQ ID NO: 1393390 - RNA, 19 nt, Artificial Sequence
  Description of Artificial Sequence: Synthetic oligonucleotide
gcguguuggugaaaugucg

SEQ ID NO: 1393391 - RNA, 19 nt, Artificial Sequence
  Description of Artificial Sequence: Synthetic oligonucleotide
aacagucaugaugggguuu

SEQ ID NO: 1393392 - RNA, 19 nt, Artificial Sequence
  Description of Artificial Sequence: Synthetic oligonucleotide
cuacaucagucacggaaga

SEQ ID NO: 1393393 - RNA, 19 nt, Artificial Sequence
  Description of Artificial Sequence: Synthetic oligonucleotide
gacaacacguagguugcaa

SEQ ID NO: 1393394 - RNA, 19 nt, Artificial Sequence
  Description of Artificial Sequence: Synthetic oligonucleotide
agaucacaaggcucuccau

SEQ ID NO: 1393395 - RNA, 19 nt, Artificial Sequence
  Description of Artificial Sequence: Synthetic oligonucleotide
guuugguaucucccagaca

SEQ ID NO: 1393396 - RNA, 19 nt, Artificial Sequence
  Description of Artificial Sequence: Synthetic oligonucleotide
gggacaacacguagguugc

SEQ ID NO: 1393397 - RNA, 19 nt, Artificial Sequence
  Description of Artificial Sequence: Synthetic oligonucleotide
aucagucacggaagaagga

SEQ ID NO: 1393398 - RNA, 19 nt, Artificial Sequence
  Description of Artificial Sequence: Synthetic oligonucleotide
gcaagauguaaccuugacu

SEQ ID NO: 1393399 - RNA, 19 nt, Artificial Sequence
  Description of Artificial Sequence: Synthetic oligonucleotide
cugcggcaaacacgggugc

SEQ ID NO: 1393400 - RNA, 19 nt, Artificial Sequence
  Description of Artificial Sequence: Synthetic oligonucleotide
aguaaccgccaaauggcau

SEQ ID NO: 1393401 - RNA, 19 nt, Artificial Sequence
  Description of Artificial Sequence: Synthetic oligonucleotide
cuaagauaagcguguuggu

SEQ ID NO: 1393402 - RNA, 19 nt, Artificial Sequence
  Description of Artificial Sequence: Synthetic oligonucleotide
gguuguccagaugaugaac

SEQ ID NO: 1393403 - RNA, 19 nt, Artificial Sequence
  Description of Artificial Sequence: Synthetic oligonucleotide
ggagacaccugaagccacg

SEQ ID NO: 1393404 - RNA, 19 nt, Artificial Sequence
  Description of Artificial Sequence: Synthetic oligonucleotide
cuaggaaagccaaggguau

SEQ ID NO: 1393405 - RNA, 19 nt, Artificial Sequence
  Description of Artificial Sequence: Synthetic oligonucleotide
cagcaucgguuccuucugc

SEQ ID NO: 1393406 - RNA, 19 nt, Artificial Sequence
  Description of Artificial Sequence: Synthetic oligonucleotide
uccgacuggcaagucacua

SEQ ID NO: 1393407 - RNA, 19 nt, Artificial Sequence
  Description of Artificial Sequence: Synthetic oligonucleotide
acggaagaaggaacauucu

SEQ ID NO: 1393408 - RNA, 19 nt, Artificial Sequence
  Description of Artificial Sequence: Synthetic oligonucleotide
cugcuccuagagaugacaa

SEQ ID NO: 1393409 - RNA, 19 nt, Artificial Sequence
  Description of Artificial Sequence: Synthetic oligonucleotide
cccacuucaaaucgucuuc

SEQ ID NO: 1393410 - RNA, 19 nt, Artificial Sequence
  Description of Artificial Sequence: Synthetic oligonucleotide
gcaagucacuauucugaac

SEQ ID NO: 1393411 - RNA, 19 nt, Artificial Sequence
  Description of Artificial Sequence: Synthetic oligonucleotide
ggaucauggaaaacaguaa

SEQ ID NO: 1393412 - RNA, 19 nt, Artificial Sequence
  Description of Artificial Sequence: Synthetic oligonucleotide
guaaagaagcuuguagauu

SEQ ID NO: 1393413 - RNA, 19 nt, Artificial Sequence
  Description of Artificial Sequence: Synthetic oligonucleotide
caaaucgucuuccuguguu

SEQ ID NO: 1393414 - RNA, 19 nt, Artificial Sequence
  Description of Artificial Sequence: Synthetic oligonucleotide
gauggucgccagagaauca

SEQ ID NO: 1393415 - RNA, 19 nt, Artificial Sequence
  Description of Artificial Sequence: Synthetic oligonucleotide
guuccugcuugguacuucu

SEQ ID NO: 1393416 - RNA, 19 nt, Artificial Sequence
  Description of Artificial Sequence: Synthetic oligonucleotide
ccacuucaaaucgucuucc

SEQ ID NO: 1393417 - RNA, 19 nt, Artificial Sequence
  Description of Artificial Sequence: Synthetic oligonucleotide
ggugaaaugucgguacaaa

SEQ ID NO: 1393418 - RNA, 19 nt, Artificial Sequence
  Description of Artificial Sequence: Synthetic oligonucleotide
ugcggcaaacacgggugcu

SEQ ID NO: 1393419 - RNA, 19 nt, Artificial Sequence
  Description of Artificial Sequence: Synthetic oligonucleotide
caguccgacuggcaaguca

SEQ ID NO: 1393420 - RNA, 19 nt, Artificial Sequence
  Description of Artificial Sequence: Synthetic oligonucleotide
acacgggugcuggcccugc

SEQ ID NO: 1393421 - RNA, 19 nt, Artificial Sequence
  Description of Artificial Sequence: Synthetic oligonucleotide
cugguuauuugcugauggu

SEQ ID NO: 1393422 - RNA, 19 nt, Artificial Sequence
  Description of Artificial Sequence: Synthetic oligonucleotide
ggucgccagagaaucauga

SEQ ID NO: 1393423 - RNA, 19 nt, Artificial Sequence
  Description of Artificial Sequence: Synthetic oligonucleotide
cggaagugcuacaucaguc

SEQ ID NO: 1393424 - RNA, 19 nt, Artificial Sequence
  Description of Artificial Sequence: Synthetic oligonucleotide
ugccuccuuuaaucccaug

SEQ ID NO: 1393425 - RNA, 19 nt, Artificial Sequence
  Description of Artificial Sequence: Synthetic oligonucleotide
gugaucauucguuccucau

SEQ ID NO: 1393426 - RNA, 19 nt, Artificial Sequence
  Description of Artificial Sequence: Synthetic oligonucleotide
gauaagcguguuggugaaa

SEQ ID NO: 1393427 - RNA, 19 nt, Artificial Sequence
  Description of Artificial Sequence: Synthetic oligonucleotide
cugaaagauaaacgacaau

SEQ ID NO: 1393428 - RNA, 19 nt, Artificial Sequence
  Description of Artificial Sequence: Synthetic oligonucleotide
gcaucgguuccuucugcuc

SEQ ID NO: 1393429 - RNA, 19 nt, Artificial Sequence
  Description of Artificial Sequence: Synthetic oligonucleotide
cuccuagagaugacaaauu

SEQ ID NO: 1393430 - RNA, 19 nt, Artificial Sequence
  Description of Artificial Sequence: Synthetic oligonucleotide
cacgcagcuaccgccaucu

SEQ ID NO: 1393431 - RNA, 19 nt, Artificial Sequence
  Description of Artificial Sequence: Synthetic oligonucleotide
gucgccagagaaucaugau

SEQ ID NO: 1393432 - RNA, 19 nt, Artificial Sequence
  Description of Artificial Sequence: Synthetic oligonucleotide
gcggcaaacacgggugcug

SEQ ID NO: 1393433 - RNA, 19 nt, Artificial Sequence
  Description of Artificial Sequence: Synthetic oligonucleotide
ggcauuggaaugugccacu

SEQ ID NO: 1393434 - RNA, 19 nt, Artificial Sequence
  Description of Artificial Sequence: Synthetic oligonucleotide
caaggcucuccaucaaauu

SEQ ID NO: 1393435 - RNA, 19 nt, Artificial Sequence
  Description of Artificial Sequence: Synthetic oligonucleotide
ggaaagccaaggguauaaa

SEQ ID NO: 1393436 - RNA, 19 nt, Artificial Sequence
  Description of Artificial Sequence: Synthetic oligonucleotide
cagcaaggccggaagugcu

SEQ ID NO: 1393437 - RNA, 19 nt, Artificial Sequence
  Description of Artificial Sequence: Synthetic oligonucleotide
aaccgccaaauggcaucau

SEQ ID NO: 1393438 - RNA, 19 nt, Artificial Sequence
  Description of Artificial Sequence: Synthetic oligonucleotide
gucgguacaaagagagcuu

SEQ ID NO: 1393439 - RNA, 19 nt, Artificial Sequence
  Description of Artificial Sequence: Synthetic oligonucleotide
agcucccgccaguccgacu

SEQ ID NO: 1393440 - RNA, 19 nt, Artificial Sequence
  Description of Artificial Sequence: Synthetic oligonucleotide
cgacaauuucucccaucac

SEQ ID NO: 1393441 - RNA, 19 nt, Artificial Sequence
  Description of Artificial Sequence: Synthetic oligonucleotide
ccacugcuaagauaagcgu

SEQ ID NO: 1393442 - RNA, 19 nt, Artificial Sequence
  Description of Artificial Sequence: Synthetic oligonucleotide
cauuggaaugugccacuuu

SEQ ID NO: 1393443 - RNA, 19 nt, Artificial Sequence
  Description of Artificial Sequence: Synthetic oligonucleotide
cgccaguccgacuggcaag

SEQ ID NO: 1393444 - RNA, 19 nt, Artificial Sequence
  Description of Artificial Sequence: Synthetic oligonucleotide
cuuccuagucugacagauu

SEQ ID NO: 1393445 - RNA, 19 nt, Artificial Sequence
  Description of Artificial Sequence: Synthetic oligonucleotide
cacagccaugaagcgacua

SEQ ID NO: 1393446 - RNA, 19 nt, Artificial Sequence
  Description of Artificial Sequence: Synthetic oligonucleotide
caguuucccauugcucacu

SEQ ID NO: 1393447 - RNA, 19 nt, Artificial Sequence
  Description of Artificial Sequence: Synthetic oligonucleotide
gggcagugucuaggaaagc

SEQ ID NO: 1393448 - RNA, 19 nt, Artificial Sequence
  Description of Artificial Sequence: Synthetic oligonucleotide
auguuccuccgaaguuuua

SEQ ID NO: 1393449 - RNA, 19 nt, Artificial Sequence
  Description of Artificial Sequence: Synthetic oligonucleotide
cgacggcauuggaaugugc

SEQ ID NO: 1393450 - RNA, 19 nt, Artificial Sequence
  Description of Artificial Sequence: Synthetic oligonucleotide
ccgacggcauuggaaugug

SEQ ID NO: 1393451 - RNA, 19 nt, Artificial Sequence
  Description of Artificial Sequence: Synthetic oligonucleotide
ccccgacggcauuggaaug

SEQ ID NO: 1393452 - RNA, 19 nt, Artificial Sequence
  Description of Artificial Sequence: Synthetic oligonucleotide
ggacaacacguagguugca

SEQ ID NO: 1393453 - RNA, 19 nt, Artificial Sequence
  Description of Artificial Sequence: Synthetic oligonucleotide
cccugauacuagccaucuc

SEQ ID NO: 1393454 - RNA, 19 nt, Artificial Sequence
  Description of Artificial Sequence: Synthetic oligonucleotide
cagcucccgccaguccgac

SEQ ID NO: 1393455 - RNA, 19 nt, Artificial Sequence
  Description of Artificial Sequence: Synthetic oligonucleotide
cacgggugcuggcccugca

SEQ ID NO: 1393456 - RNA, 19 nt, Artificial Sequence
  Description of Artificial Sequence: Synthetic oligonucleotide
gccaguccgacuggcaagu

SEQ ID NO: 1393457 - RNA, 19 nt, Artificial Sequence
  Description of Artificial Sequence: Synthetic oligonucleotide
ccgccaguccgacuggcaa

SEQ ID NO: 1393458 - RNA, 19 nt, Artificial Sequence
  Description of Artificial Sequence: Synthetic oligonucleotide
ccgacuggcaagucacuau

SEQ ID NO: 1393459 - RNA, 19 nt, Artificial Sequence
  Description of Artificial Sequence: Synthetic oligonucleotide
ccacgcagcuaccgccauc

SEQ ID NO: 1393460 - RNA, 19 nt, Artificial Sequence
  Description of Artificial Sequence: Synthetic oligonucleotide
guccgacuggcaagucacu

SEQ ID NO: 1393461 - RNA, 19 nt, Artificial Sequence
  Description of Artificial Sequence: Synthetic oligonucleotide
gcauuggaaugugccacuu

SEQ ID NO: 1393462 - RNA, 19 nt, Artificial Sequence
  Description of Artificial Sequence: Synthetic oligonucleotide
cccgacggcauuggaaugu

SEQ ID NO: 1393463 - RNA, 19 nt, Artificial Sequence
  Description of Artificial Sequence: Synthetic oligonucleotide
cgacuggcaagucacuauu

SEQ ID NO: 1393464 - RNA, 19 nt, Artificial Sequence
  Description of Artificial Sequence: Synthetic oligonucleotide
ccaguccgacuggcaaguc

SEQ ID NO: 1393465 - RNA, 19 nt, Artificial Sequence
  Description of Artificial Sequence: Synthetic oligonucleotide
cagggacaacacguagguu

SEQ ID NO: 1393466 - RNA, 19 nt, Artificial Sequence
  Description of Artificial Sequence: Synthetic oligonucleotide
gccacgcagcuaccgccau

SEQ ID NO: 1393467 - RNA, 19 nt, Artificial Sequence
  Description of Artificial Sequence: Synthetic oligonucleotide
aaagcaaguaguuucuagc

SEQ ID NO: 1393468 - RNA, 19 nt, Artificial Sequence
  Description of Artificial Sequence: Synthetic oligonucleotide
agcucuaucaaucaaaggg

SEQ ID NO: 1393469 - RNA, 19 nt, Artificial Sequence
  Description of Artificial Sequence: Synthetic oligonucleotide
aaagaugaagucuaauuuc

SEQ ID NO: 1393470 - RNA, 19 nt, Artificial Sequence
  Description of Artificial Sequence: Synthetic oligonucleotide
cauauaaaguaaaauaagg

SEQ ID NO: 1393471 - RNA, 19 nt, Artificial Sequence
  Description of Artificial Sequence: Synthetic oligonucleotide
uguauuuuaauccucucag

SEQ ID NO: 1393472 - RNA, 19 nt, Artificial Sequence
  Description of Artificial Sequence: Synthetic oligonucleotide
uaauuauacauaguaaugg

SEQ ID NO: 1393473 - RNA, 19 nt, Artificial Sequence
  Description of Artificial Sequence: Synthetic oligonucleotide
aagcaaucacaacaaaagc

SEQ ID NO: 1393474 - RNA, 19 nt, Artificial Sequence
  Description of Artificial Sequence: Synthetic oligonucleotide
uuuauuauacaauucagau

SEQ ID NO: 1393475 - RNA, 19 nt, Artificial Sequence
  Description of Artificial Sequence: Synthetic oligonucleotide
uguauaauguauuuugagc

SEQ ID NO: 1393476 - RNA, 19 nt, Artificial Sequence
  Description of Artificial Sequence: Synthetic oligonucleotide
cauuuuauccaauaagucc

SEQ ID NO: 1393477 - RNA, 19 nt, Artificial Sequence
  Description of Artificial Sequence: Synthetic oligonucleotide
gaaaauagcagauaugguc

SEQ ID NO: 1393478 - RNA, 19 nt, Artificial Sequence
  Description of Artificial Sequence: Synthetic oligonucleotide
uucacugacauuuucauac

SEQ ID NO: 1393479 - RNA, 19 nt, Artificial Sequence
  Description of Artificial Sequence: Synthetic oligonucleotide
aauuauacauaguaauggu

SEQ ID NO: 1393480 - RNA, 19 nt, Artificial Sequence
  Description of Artificial Sequence: Synthetic oligonucleotide
uucaacauaauuucuggag

SEQ ID NO: 1393481 - RNA, 19 nt, Artificial Sequence
  Description of Artificial Sequence: Synthetic oligonucleotide
agauuuauuauacaauuca

SEQ ID NO: 1393482 - RNA, 19 nt, Artificial Sequence
  Description of Artificial Sequence: Synthetic oligonucleotide
uauuuuaauccucucagga

SEQ ID NO: 1393483 - RNA, 19 nt, Artificial Sequence
  Description of Artificial Sequence: Synthetic oligonucleotide
uuugggaacagccuguucc

SEQ ID NO: 1393484 - RNA, 19 nt, Artificial Sequence
  Description of Artificial Sequence: Synthetic oligonucleotide
uguugugucuucaagagcu

SEQ ID NO: 1393485 - RNA, 19 nt, Artificial Sequence
  Description of Artificial Sequence: Synthetic oligonucleotide
uccaugucaaacuugaaug

SEQ ID NO: 1393486 - RNA, 19 nt, Artificial Sequence
  Description of Artificial Sequence: Synthetic oligonucleotide
auauuaauuauacauagua

SEQ ID NO: 1393487 - RNA, 19 nt, Artificial Sequence
  Description of Artificial Sequence: Synthetic oligonucleotide
acauguauaauguauuuug

SEQ ID NO: 1393488 - RNA, 19 nt, Artificial Sequence
  Description of Artificial Sequence: Synthetic oligonucleotide
gaagcaaucacaacaaaag

SEQ ID NO: 1393489 - RNA, 19 nt, Artificial Sequence
  Description of Artificial Sequence: Synthetic oligonucleotide
ugauacagaaaauagcaga

SEQ ID NO: 1393490 - RNA, 19 nt, Artificial Sequence
  Description of Artificial Sequence: Synthetic oligonucleotide
ucaacauaauuucuggagc

SEQ ID NO: 1393491 - RNA, 19 nt, Artificial Sequence
  Description of Artificial Sequence: Synthetic oligonucleotide
aaguucuagauaccugacc

SEQ ID NO: 1393492 - RNA, 19 nt, Artificial Sequence
  Description of Artificial Sequence: Synthetic oligonucleotide
accacaaccagccagcaac

SEQ ID NO: 1393493 - RNA, 19 nt, Artificial Sequence
  Description of Artificial Sequence: Synthetic oligonucleotide
uuuugugugggagagaaag

SEQ ID NO: 1393494 - RNA, 19 nt, Artificial Sequence
  Description of Artificial Sequence: Synthetic oligonucleotide
aauacccaggauaugauuc

SEQ ID NO: 1393495 - RNA, 19 nt, Artificial Sequence
  Description of Artificial Sequence: Synthetic oligonucleotide
uuuaacuuguaccaucucu

SEQ ID NO: 1393496 - RNA, 19 nt, Artificial Sequence
  Description of Artificial Sequence: Synthetic oligonucleotide
cauaguaaugguuucacug

SEQ ID NO: 1393497 - RNA, 19 nt, Artificial Sequence
  Description of Artificial Sequence: Synthetic oligonucleotide
auaucaauggacuugguau

SEQ ID NO: 1393498 - RNA, 19 nt, Artificial Sequence
  Description of Artificial Sequence: Synthetic oligonucleotide
uauaguuaaaguucuagau

SEQ ID NO: 1393499 - RNA, 19 nt, Artificial Sequence
  Description of Artificial Sequence: Synthetic oligonucleotide
auugaugccgaugauauuc

SEQ ID NO: 1393500 - RNA, 19 nt, Artificial Sequence
  Description of Artificial Sequence: Synthetic oligonucleotide
uuuuaauccucucaggauc

SEQ ID NO: 1393501 - RNA, 19 nt, Artificial Sequence
  Description of Artificial Sequence: Synthetic oligonucleotide
aauggacuugguauaaccc

SEQ ID NO: 1393502 - RNA, 19 nt, Artificial Sequence
  Description of Artificial Sequence: Synthetic oligonucleotide
aaguuauuuucucacauau

SEQ ID NO: 1393503 - RNA, 19 nt, Artificial Sequence
  Description of Artificial Sequence: Synthetic oligonucleotide
uaaucugugaaagaugaag

SEQ ID NO: 1393504 - RNA, 19 nt, Artificial Sequence
  Description of Artificial Sequence: Synthetic oligonucleotide
uucauuugcucaaugguug

SEQ ID NO: 1393505 - RNA, 19 nt, Artificial Sequence
  Description of Artificial Sequence: Synthetic oligonucleotide
aacuuguaccaucucuccc

SEQ ID NO: 1393506 - RNA, 19 nt, Artificial Sequence
  Description of Artificial Sequence: Synthetic oligonucleotide
ucagcauuugggaacagcc

SEQ ID NO: 1393507 - RNA, 19 nt, Artificial Sequence
  Description of Artificial Sequence: Synthetic oligonucleotide
uuauccaauaaguccagag

SEQ ID NO: 1393508 - RNA, 19 nt, Artificial Sequence
  Description of Artificial Sequence: Synthetic oligonucleotide
uauccaauaaguccagagc

SEQ ID NO: 1393509 - RNA, 19 nt, Artificial Sequence
  Description of Artificial Sequence: Synthetic oligonucleotide
acuugaauggugcuucagc

SEQ ID NO: 1393510 - RNA, 19 nt, Artificial Sequence
  Description of Artificial Sequence: Synthetic oligonucleotide
uuacacaauagaaauucug

SEQ ID NO: 1393511 - RNA, 19 nt, Artificial Sequence
  Description of Artificial Sequence: Synthetic oligonucleotide
uguauaguuaaaguucuag

SEQ ID NO: 1393512 - RNA, 19 nt, Artificial Sequence
  Description of Artificial Sequence: Synthetic oligonucleotide
acaaaaguuacacaauaga

SEQ ID NO: 1393513 - RNA, 19 nt, Artificial Sequence
  Description of Artificial Sequence: Synthetic oligonucleotide
cuuguaaagaucugucucc

SEQ ID NO: 1393514 - RNA, 19 nt, Artificial Sequence
  Description of Artificial Sequence: Synthetic oligonucleotide
gauucaaucccuaacacca

SEQ ID NO: 1393515 - RNA, 19 nt, Artificial Sequence
  Description of Artificial Sequence: Synthetic oligonucleotide
ucauacauguauaauguau

SEQ ID NO: 1393516 - RNA, 19 nt, Artificial Sequence
  Description of Artificial Sequence: Synthetic oligonucleotide
ugucaaacuugaauggugc

SEQ ID NO: 1393517 - RNA, 19 nt, Artificial Sequence
  Description of Artificial Sequence: Synthetic oligonucleotide
uuaacuuguaccaucucuc

SEQ ID NO: 1393518 - RNA, 19 nt, Artificial Sequence
  Description of Artificial Sequence: Synthetic oligonucleotide
aagaauacccaggauauga

SEQ ID NO: 1393519 - RNA, 19 nt, Artificial Sequence
  Description of Artificial Sequence: Synthetic oligonucleotide
uacuauauauacaucuuuc

SEQ ID NO: 1393520 - RNA, 19 nt, Artificial Sequence
  Description of Artificial Sequence: Synthetic oligonucleotide
auuuuauccaauaagucca

SEQ ID NO: 1393521 - RNA, 19 nt, Artificial Sequence
  Description of Artificial Sequence: Synthetic oligonucleotide
gaucugauacagaaaauag

SEQ ID NO: 1393522 - RNA, 19 nt, Artificial Sequence
  Description of Artificial Sequence: Synthetic oligonucleotide
ugugugaucaugauccgga

SEQ ID NO: 1393523 - RNA, 19 nt, Artificial Sequence
  Description of Artificial Sequence: Synthetic oligonucleotide
uuagcuguauaguuaaagu

SEQ ID NO: 1393524 - RNA, 19 nt, Artificial Sequence
  Description of Artificial Sequence: Synthetic oligonucleotide
caaccagccagcaacaacc

SEQ ID NO: 1393525 - RNA, 19 nt, Artificial Sequence
  Description of Artificial Sequence: Synthetic oligonucleotide
auauucacccguuauccuc

SEQ ID NO: 1393526 - RNA, 19 nt, Artificial Sequence
  Description of Artificial Sequence: Synthetic oligonucleotide
aguaguuucuagcuuuuag

SEQ ID NO: 1393527 - RNA, 19 nt, Artificial Sequence
  Description of Artificial Sequence: Synthetic oligonucleotide
ugcaacacgggcaaggcca

SEQ ID NO: 1393528 - RNA, 19 nt, Artificial Sequence
  Description of Artificial Sequence: Synthetic oligonucleotide
uaacccuuggaauucaaca

SEQ ID NO: 1393529 - RNA, 19 nt, Artificial Sequence
  Description of Artificial Sequence: Synthetic oligonucleotide
aauaaguccagagcuuuag

SEQ ID NO: 1393530 - RNA, 19 nt, Artificial Sequence
  Description of Artificial Sequence: Synthetic oligonucleotide
aagcaaguaguuucuagcu

SEQ ID NO: 1393531 - RNA, 19 nt, Artificial Sequence
  Description of Artificial Sequence: Synthetic oligonucleotide
agaccaaauaucaauggac

SEQ ID NO: 1393532 - RNA, 19 nt, Artificial Sequence
  Description of Artificial Sequence: Synthetic oligonucleotide
ugaaagaugaagucuaauu

SEQ ID NO: 1393533 - RNA, 19 nt, Artificial Sequence
  Description of Artificial Sequence: Synthetic oligonucleotide
uacucugucaagaacccug

SEQ ID NO: 1393534 - RNA, 19 nt, Artificial Sequence
  Description of Artificial Sequence: Synthetic oligonucleotide
auaguaaugguuucacuga

SEQ ID NO: 1393535 - RNA, 19 nt, Artificial Sequence
  Description of Artificial Sequence: Synthetic oligonucleotide
gauaugauucagcugguca

SEQ ID NO: 1393536 - RNA, 19 nt, Artificial Sequence
  Description of Artificial Sequence: Synthetic oligonucleotide
guaugggugggccagagcc

SEQ ID NO: 1393537 - RNA, 19 nt, Artificial Sequence
  Description of Artificial Sequence: Synthetic oligonucleotide
ugagcuucuccuuagguaa

SEQ ID NO: 1393538 - RNA, 19 nt, Artificial Sequence
  Description of Artificial Sequence: Synthetic oligonucleotide
ugauggagauccaagaaua

SEQ ID NO: 1393539 - RNA, 19 nt, Artificial Sequence
  Description of Artificial Sequence: Synthetic oligonucleotide
acuugggucauaauacugc

SEQ ID NO: 1393540 - RNA, 19 nt, Artificial Sequence
  Description of Artificial Sequence: Synthetic oligonucleotide
cuuaagaucgcaaguggug

SEQ ID NO: 1393541 - RNA, 19 nt, Artificial Sequence
  Description of Artificial Sequence: Synthetic oligonucleotide
agcauauucacccguuauc

SEQ ID NO: 1393542 - RNA, 19 nt, Artificial Sequence
  Description of Artificial Sequence: Synthetic oligonucleotide
ugaggguugaaugucaaca

SEQ ID NO: 1393543 - RNA, 19 nt, Artificial Sequence
  Description of Artificial Sequence: Synthetic oligonucleotide
aaucugugaaagaugaagu

SEQ ID NO: 1393544 - RNA, 19 nt, Artificial Sequence
  Description of Artificial Sequence: Synthetic oligonucleotide
agucuaauuucuucauuuc

SEQ ID NO: 1393545 - RNA, 19 nt, Artificial Sequence
  Description of Artificial Sequence: Synthetic oligonucleotide
aacuucaauccucuuguga

SEQ ID NO: 1393546 - RNA, 19 nt, Artificial Sequence
  Description of Artificial Sequence: Synthetic oligonucleotide
auuagcugaauguauguau

SEQ ID NO: 1393547 - RNA, 19 nt, Artificial Sequence
  Description of Artificial Sequence: Synthetic oligonucleotide
ucucuuaggguucucuggc

SEQ ID NO: 1393548 - RNA, 19 nt, Artificial Sequence
  Description of Artificial Sequence: Synthetic oligonucleotide
uccucauaaucugugaaag

SEQ ID NO: 1393549 - RNA, 19 nt, Artificial Sequence
  Description of Artificial Sequence: Synthetic oligonucleotide
aacauuagcugaauguaug

SEQ ID NO: 1393550 - RNA, 19 nt, Artificial Sequence
  Description of Artificial Sequence: Synthetic oligonucleotide
guauuuuaauccucucagg

SEQ ID NO: 1393551 - RNA, 19 nt, Artificial Sequence
  Description of Artificial Sequence: Synthetic oligonucleotide
auguauguauuuuaauccu

SEQ ID NO: 1393552 - RNA, 19 nt, Artificial Sequence
  Description of Artificial Sequence: Synthetic oligonucleotide
aagaugaagucuaauuucu

SEQ ID NO: 1393553 - RNA, 19 nt, Artificial Sequence
  Description of Artificial Sequence: Synthetic oligonucleotide
gucauauaaaguaaaauaa

SEQ ID NO: 1393554 - RNA, 19 nt, Artificial Sequence
  Description of Artificial Sequence: Synthetic oligonucleotide
guauuuugagcauauucac

SEQ ID NO: 1393555 - RNA, 19 nt, Artificial Sequence
  Description of Artificial Sequence: Synthetic oligonucleotide
ucugugaaagaugaagucu

SEQ ID NO: 1393556 - RNA, 19 nt, Artificial Sequence
  Description of Artificial Sequence: Synthetic oligonucleotide
acaauucagaucuuccugu

SEQ ID NO: 1393557 - RNA, 19 nt, Artificial Sequence
  Description of Artificial Sequence: Synthetic oligonucleotide
gacauuuucauacauguau

SEQ ID NO: 1393558 - RNA, 19 nt, Artificial Sequence
  Description of Artificial Sequence: Synthetic oligonucleotide
cacaaaaguuacacaauag

SEQ ID NO: 1393559 - RNA, 19 nt, Artificial Sequence
  Description of Artificial Sequence: Synthetic oligonucleotide
aagucuuaggaguguagcu

SEQ ID NO: 1393560 - RNA, 19 nt, Artificial Sequence
  Description of Artificial Sequence: Synthetic oligonucleotide
acccguuauccucuuaccc

SEQ ID NO: 1393561 - RNA, 19 nt, Artificial Sequence
  Description of Artificial Sequence: Synthetic oligonucleotide
gucuuaggaguguagcucg

SEQ ID NO: 1393562 - RNA, 19 nt, Artificial Sequence
  Description of Artificial Sequence: Synthetic oligonucleotide
aaaguucuagauaccugac

SEQ ID NO: 1393563 - RNA, 19 nt, Artificial Sequence
  Description of Artificial Sequence: Synthetic oligonucleotide
auguauuuuaauccucuca

SEQ ID NO: 1393564 - RNA, 19 nt, Artificial Sequence
  Description of Artificial Sequence: Synthetic oligonucleotide
aagcucuaucaaucaaagg

SEQ ID NO: 1393565 - RNA, 19 nt, Artificial Sequence
  Description of Artificial Sequence: Synthetic oligonucleotide
caauggacuugguauaacc

SEQ ID NO: 1393566 - RNA, 19 nt, Artificial Sequence
  Description of Artificial Sequence: Synthetic oligonucleotide
uauaauguauuuugagcau

SEQ ID NO: 1393567 - RNA, 19 nt, Artificial Sequence
  Description of Artificial Sequence: Synthetic oligonucleotide
uguauguauuuuaauccuc

SEQ ID NO: 1393568 - RNA, 19 nt, Artificial Sequence
  Description of Artificial Sequence: Synthetic oligonucleotide
ucuuaggguucucuggcag

SEQ ID NO: 1393569 - RNA, 19 nt, Artificial Sequence
  Description of Artificial Sequence: Synthetic oligonucleotide
agcauuugggaacagccug

SEQ ID NO: 1393570 - RNA, 19 nt, Artificial Sequence
  Description of Artificial Sequence: Synthetic oligonucleotide
uucucaagucuuaggagug

SEQ ID NO: 1393571 - RNA, 19 nt, Artificial Sequence
  Description of Artificial Sequence: Synthetic oligonucleotide
uuaagaucuguauccuggc

SEQ ID NO: 1393572 - RNA, 19 nt, Artificial Sequence
  Description of Artificial Sequence: Synthetic oligonucleotide
aacccuuggaauucaacau

SEQ ID NO: 1393573 - RNA, 19 nt, Artificial Sequence
  Description of Artificial Sequence: Synthetic oligonucleotide
uaguuucuagcuuuuagau

SEQ ID NO: 1393574 - RNA, 19 nt, Artificial Sequence
  Description of Artificial Sequence: Synthetic oligonucleotide
cuugguauaacccuuggaa

SEQ ID NO: 1393575 - RNA, 19 nt, Artificial Sequence
  Description of Artificial Sequence: Synthetic oligonucleotide
ucaugucugaaacgcagca

SEQ ID NO: 1393576 - RNA, 19 nt, Artificial Sequence
  Description of Artificial Sequence: Synthetic oligonucleotide
auaccugaccaauuuaaga

SEQ ID NO: 1393577 - RNA, 19 nt, Artificial Sequence
  Description of Artificial Sequence: Synthetic oligonucleotide
aaugguuggugcccggaug

SEQ ID NO: 1393578 - RNA, 19 nt, Artificial Sequence
  Description of Artificial Sequence: Synthetic oligonucleotide
accugaccaauuuaagauc

SEQ ID NO: 1393579 - RNA, 19 nt, Artificial Sequence
  Description of Artificial Sequence: Synthetic oligonucleotide
ugugauggagauccaagaa

SEQ ID NO: 1393580 - RNA, 19 nt, Artificial Sequence
  Description of Artificial Sequence: Synthetic oligonucleotide
acuuguaccaucucucccu

SEQ ID NO: 1393581 - RNA, 19 nt, Artificial Sequence
  Description of Artificial Sequence: Synthetic oligonucleotide
ucuugugaggguugaaugu

SEQ ID NO: 1393582 - RNA, 19 nt, Artificial Sequence
  Description of Artificial Sequence: Synthetic oligonucleotide
auuuuaauccucucaggau

SEQ ID NO: 1393583 - RNA, 19 nt, Artificial Sequence
  Description of Artificial Sequence: Synthetic oligonucleotide
guauaguuaaaguucuaga

SEQ ID NO: 1393584 - RNA, 19 nt, Artificial Sequence
  Description of Artificial Sequence: Synthetic oligonucleotide
ccuaacaccacaaccagcc

SEQ ID NO: 1393585 - RNA, 19 nt, Artificial Sequence
  Description of Artificial Sequence: Synthetic oligonucleotide
uuaagaucgcaaguggugu

SEQ ID NO: 1393586 - RNA, 19 nt, Artificial Sequence
  Description of Artificial Sequence: Synthetic oligonucleotide
agucuuaggaguguagcuc

SEQ ID NO: 1393587 - RNA, 19 nt, Artificial Sequence
  Description of Artificial Sequence: Synthetic oligonucleotide
auaugauucagcuggucaa

SEQ ID NO: 1393588 - RNA, 19 nt, Artificial Sequence
  Description of Artificial Sequence: Synthetic oligonucleotide
auuuaagaucuguauccug

SEQ ID NO: 1393589 - RNA, 19 nt, Artificial Sequence
  Description of Artificial Sequence: Synthetic oligonucleotide
uuuaucucucuuaggguuc

SEQ ID NO: 1393590 - RNA, 19 nt, Artificial Sequence
  Description of Artificial Sequence: Synthetic oligonucleotide
ucaagucuuaggaguguag

SEQ ID NO: 1393591 - RNA, 19 nt, Artificial Sequence
  Description of Artificial Sequence: Synthetic oligonucleotide
uauucacccguuauccucu

SEQ ID NO: 1393592 - RNA, 19 nt, Artificial Sequence
  Description of Artificial Sequence: Synthetic oligonucleotide
caagguagugcuucccugg

SEQ ID NO: 1393593 - RNA, 19 nt, Artificial Sequence
  Description of Artificial Sequence: Synthetic oligonucleotide
guaguuucuagcuuuuaga

SEQ ID NO: 1393594 - RNA, 19 nt, Artificial Sequence
  Description of Artificial Sequence: Synthetic oligonucleotide
uuugugugggagagaaagc

SEQ ID NO: 1393595 - RNA, 19 nt, Artificial Sequence
  Description of Artificial Sequence: Synthetic oligonucleotide
uuagguaagucauccaauu

SEQ ID NO: 1393596 - RNA, 19 nt, Artificial Sequence
  Description of Artificial Sequence: Synthetic oligonucleotide
uuugagcuucuccuuaggu

SEQ ID NO: 1393597 - RNA, 19 nt, Artificial Sequence
  Description of Artificial Sequence: Synthetic oligonucleotide
uuagcugaauguauguauu

SEQ ID NO: 1393598 - RNA, 19 nt, Artificial Sequence
  Description of Artificial Sequence: Synthetic oligonucleotide
uggauucaaucccuaacac

SEQ ID NO: 1393599 - RNA, 19 nt, Artificial Sequence
  Description of Artificial Sequence: Synthetic oligonucleotide
acacaauagaaauucugaa

SEQ ID NO: 1393600 - RNA, 19 nt, Artificial Sequence
  Description of Artificial Sequence: Synthetic oligonucleotide
cuucaauccucuugugagg

SEQ ID NO: 1393601 - RNA, 19 nt, Artificial Sequence
  Description of Artificial Sequence: Synthetic oligonucleotide
uugguauaacccuuggaau

SEQ ID NO: 1393602 - RNA, 19 nt, Artificial Sequence
  Description of Artificial Sequence: Synthetic oligonucleotide
aaaugccucaaagcuguuc

SEQ ID NO: 1393603 - RNA, 19 nt, Artificial Sequence
  Description of Artificial Sequence: Synthetic oligonucleotide
cucucuuaggguucucugg

SEQ ID NO: 1393604 - RNA, 19 nt, Artificial Sequence
  Description of Artificial Sequence: Synthetic oligonucleotide
uugugugggagagaaagca

SEQ ID NO: 1393605 - RNA, 19 nt, Artificial Sequence
  Description of Artificial Sequence: Synthetic oligonucleotide
ucccuaacaccacaaccag

SEQ ID NO: 1393606 - RNA, 19 nt, Artificial Sequence
  Description of Artificial Sequence: Synthetic oligonucleotide
auucaacauaauuucugga

SEQ ID NO: 1393607 - RNA, 19 nt, Artificial Sequence
  Description of Artificial Sequence: Synthetic oligonucleotide
ggaacagccuguuccaugg

SEQ ID NO: 1393608 - RNA, 19 nt, Artificial Sequence
  Description of Artificial Sequence: Synthetic oligonucleotide
ugguauaacccuuggaauu

SEQ ID NO: 1393609 - RNA, 19 nt, Artificial Sequence
  Description of Artificial Sequence: Synthetic oligonucleotide
cuugaauggugcuucagca

SEQ ID NO: 1393610 - RNA, 19 nt, Artificial Sequence
  Description of Artificial Sequence: Synthetic oligonucleotide
caucucucccuuucuaggg

SEQ ID NO: 1393611 - RNA, 19 nt, Artificial Sequence
  Description of Artificial Sequence: Synthetic oligonucleotide
uagcuguauaguuaaaguu

SEQ ID NO: 1393612 - RNA, 19 nt, Artificial Sequence
  Description of Artificial Sequence: Synthetic oligonucleotide
uaauacugcuccagguaug

SEQ ID NO: 1393613 - RNA, 19 nt, Artificial Sequence
  Description of Artificial Sequence: Synthetic oligonucleotide
uuuauuucauguccucaua

SEQ ID NO: 1393614 - RNA, 19 nt, Artificial Sequence
  Description of Artificial Sequence: Synthetic oligonucleotide
ucacccguuauccucuuac

SEQ ID NO: 1393615 - RNA, 19 nt, Artificial Sequence
  Description of Artificial Sequence: Synthetic oligonucleotide
cacgaugcagaacauuagc

SEQ ID NO: 1393616 - RNA, 19 nt, Artificial Sequence
  Description of Artificial Sequence: Synthetic oligonucleotide
ucgcaagugguguucagca

SEQ ID NO: 1393617 - RNA, 19 nt, Artificial Sequence
  Description of Artificial Sequence: Synthetic oligonucleotide
uaucaauggacuugguaua

SEQ ID NO: 1393618 - RNA, 19 nt, Artificial Sequence
  Description of Artificial Sequence: Synthetic oligonucleotide
ugucacggugucuaagagc

SEQ ID NO: 1393619 - RNA, 19 nt, Artificial Sequence
  Description of Artificial Sequence: Synthetic oligonucleotide
aacguguggcuacguacuc

SEQ ID NO: 1393620 - RNA, 19 nt, Artificial Sequence
  Description of Artificial Sequence: Synthetic oligonucleotide
ugaagucuaauuucuucau

SEQ ID NO: 1393621 - RNA, 19 nt, Artificial Sequence
  Description of Artificial Sequence: Synthetic oligonucleotide
uacauaguaaugguuucac

SEQ ID NO: 1393622 - RNA, 19 nt, Artificial Sequence
  Description of Artificial Sequence: Synthetic oligonucleotide
ucaagguagugcuucccug

SEQ ID NO: 1393623 - RNA, 19 nt, Artificial Sequence
  Description of Artificial Sequence: Synthetic oligonucleotide
ucugaaacgcagcaagauu

SEQ ID NO: 1393624 - RNA, 19 nt, Artificial Sequence
  Description of Artificial Sequence: Synthetic oligonucleotide
ucuuaggaguguagcucgg

SEQ ID NO: 1393625 - RNA, 19 nt, Artificial Sequence
  Description of Artificial Sequence: Synthetic oligonucleotide
augauauucucaugucuga

SEQ ID NO: 1393626 - RNA, 19 nt, Artificial Sequence
  Description of Artificial Sequence: Synthetic oligonucleotide
uaagaucuguauccuggcu

SEQ ID NO: 1393627 - RNA, 19 nt, Artificial Sequence
  Description of Artificial Sequence: Synthetic oligonucleotide
agcucggugguauagcacu

SEQ ID NO: 1393628 - RNA, 19 nt, Artificial Sequence
  Description of Artificial Sequence: Synthetic oligonucleotide
auacauguauaauguauuu

SEQ ID NO: 1393629 - RNA, 19 nt, Artificial Sequence
  Description of Artificial Sequence: Synthetic oligonucleotide
caagucuuaggaguguagc

SEQ ID NO: 1393630 - RNA, 19 nt, Artificial Sequence
  Description of Artificial Sequence: Synthetic oligonucleotide
gcucuaucaaucaaagggg

SEQ ID NO: 1393631 - RNA, 19 nt, Artificial Sequence
  Description of Artificial Sequence: Synthetic oligonucleotide
cuguacuauauauacaucu

SEQ ID NO: 1393632 - RNA, 19 nt, Artificial Sequence
  Description of Artificial Sequence: Synthetic oligonucleotide
gacuugguauaacccuugg

SEQ ID NO: 1393633 - RNA, 19 nt, Artificial Sequence
  Description of Artificial Sequence: Synthetic oligonucleotide
acugucacggugucuaaga

SEQ ID NO: 1393634 - RNA, 19 nt, Artificial Sequence
  Description of Artificial Sequence: Synthetic oligonucleotide
aaucuagcagucucuucaa

SEQ ID NO: 1393635 - RNA, 19 nt, Artificial Sequence
  Description of Artificial Sequence: Synthetic oligonucleotide
agaacauuagcugaaugua

SEQ ID NO: 1393636 - RNA, 19 nt, Artificial Sequence
  Description of Artificial Sequence: Synthetic oligonucleotide
uacguacucugucaagaac

SEQ ID NO: 1393637 - RNA, 19 nt, Artificial Sequence
  Description of Artificial Sequence: Synthetic oligonucleotide
aucgcaagugguguucagc

SEQ ID NO: 1393638 - RNA, 19 nt, Artificial Sequence
  Description of Artificial Sequence: Synthetic oligonucleotide
ucucucuuaggguucucug

SEQ ID NO: 1393639 - RNA, 19 nt, Artificial Sequence
  Description of Artificial Sequence: Synthetic oligonucleotide
gcaagugguguucagcagg

SEQ ID NO: 1393640 - RNA, 19 nt, Artificial Sequence
  Description of Artificial Sequence: Synthetic oligonucleotide
agagcuuguaaagaucugu

SEQ ID NO: 1393641 - RNA, 19 nt, Artificial Sequence
  Description of Artificial Sequence: Synthetic oligonucleotide
caugauccggaucugcaac

SEQ ID NO: 1393642 - RNA, 19 nt, Artificial Sequence
  Description of Artificial Sequence: Synthetic oligonucleotide
gcuuuuagauuuauuauac

SEQ ID NO: 1393643 - RNA, 19 nt, Artificial Sequence
  Description of Artificial Sequence: Synthetic oligonucleotide
ugugaaagaugaagucuaa

SEQ ID NO: 1393644 - RNA, 19 nt, Artificial Sequence
  Description of Artificial Sequence: Synthetic oligonucleotide
uugaugccgaugauauucu

SEQ ID NO: 1393645 - RNA, 19 nt, Artificial Sequence
  Description of Artificial Sequence: Synthetic oligonucleotide
aaacuugaauggugcuuca

SEQ ID NO: 1393646 - RNA, 19 nt, Artificial Sequence
  Description of Artificial Sequence: Synthetic oligonucleotide
uuguaaagaucugucucca

SEQ ID NO: 1393647 - RNA, 19 nt, Artificial Sequence
  Description of Artificial Sequence: Synthetic oligonucleotide
uguggcuacguacucuguc

SEQ ID NO: 1393648 - RNA, 19 nt, Artificial Sequence
  Description of Artificial Sequence: Synthetic oligonucleotide
auacccaggauaugauuca

SEQ ID NO: 1393649 - RNA, 19 nt, Artificial Sequence
  Description of Artificial Sequence: Synthetic oligonucleotide
ucggugguauagcacuugc

SEQ ID NO: 1393650 - RNA, 19 nt, Artificial Sequence
  Description of Artificial Sequence: Synthetic oligonucleotide
ugugaucaugauccggauc

SEQ ID NO: 1393651 - RNA, 19 nt, Artificial Sequence
  Description of Artificial Sequence: Synthetic oligonucleotide
augccucaaagcuguuccc

SEQ ID NO: 1393652 - RNA, 19 nt, Artificial Sequence
  Description of Artificial Sequence: Synthetic oligonucleotide
uagagucagcauuugggaa

SEQ ID NO: 1393653 - RNA, 19 nt, Artificial Sequence
  Description of Artificial Sequence: Synthetic oligonucleotide
augccgaugauauucucau

SEQ ID NO: 1393654 - RNA, 19 nt, Artificial Sequence
  Description of Artificial Sequence: Synthetic oligonucleotide
uccggaucugcaacacggg

SEQ ID NO: 1393655 - RNA, 19 nt, Artificial Sequence
  Description of Artificial Sequence: Synthetic oligonucleotide
uucagaucuuccugugaug

SEQ ID NO: 1393656 - RNA, 19 nt, Artificial Sequence
  Description of Artificial Sequence: Synthetic oligonucleotide
ucuagauaccugaccaauu

SEQ ID NO: 1393657 - RNA, 19 nt, Artificial Sequence
  Description of Artificial Sequence: Synthetic oligonucleotide
uuucccucucccauuaauu

SEQ ID NO: 1393658 - RNA, 19 nt, Artificial Sequence
  Description of Artificial Sequence: Synthetic oligonucleotide
uugaauggugcuucagcaa

SEQ ID NO: 1393659 - RNA, 19 nt, Artificial Sequence
  Description of Artificial Sequence: Synthetic oligonucleotide
auaacccuuggaauucaac

SEQ ID NO: 1393660 - RNA, 19 nt, Artificial Sequence
  Description of Artificial Sequence: Synthetic oligonucleotide
uucauacauguauaaugua

SEQ ID NO: 1393661 - RNA, 19 nt, Artificial Sequence
  Description of Artificial Sequence: Synthetic oligonucleotide
uccaauaaguccagagcuu

SEQ ID NO: 1393662 - RNA, 19 nt, Artificial Sequence
  Description of Artificial Sequence: Synthetic oligonucleotide
uguuccauggcaccuuauu

SEQ ID NO: 1393663 - RNA, 19 nt, Artificial Sequence
  Description of Artificial Sequence: Synthetic oligonucleotide
auuauacauaguaaugguu

SEQ ID NO: 1393664 - RNA, 19 nt, Artificial Sequence
  Description of Artificial Sequence: Synthetic oligonucleotide
gcauauucacccguuaucc

SEQ ID NO: 1393665 - RNA, 19 nt, Artificial Sequence
  Description of Artificial Sequence: Synthetic oligonucleotide
augguuggugcccggauga

SEQ ID NO: 1393666 - RNA, 19 nt, Artificial Sequence
  Description of Artificial Sequence: Synthetic oligonucleotide
aacuugaauggugcuucag

SEQ ID NO: 1393667 - RNA, 19 nt, Artificial Sequence
  Description of Artificial Sequence: Synthetic oligonucleotide
caauucagaucuuccugug

SEQ ID NO: 1393668 - RNA, 19 nt, Artificial Sequence
  Description of Artificial Sequence: Synthetic oligonucleotide
gauucagcuggucaaggua

SEQ ID NO: 1393669 - RNA, 19 nt, Artificial Sequence
  Description of Artificial Sequence: Synthetic oligonucleotide
acagaaaauagcagauaug

SEQ ID NO: 1393670 - RNA, 19 nt, Artificial Sequence
  Description of Artificial Sequence: Synthetic oligonucleotide
uacauguauaauguauuuu

SEQ ID NO: 1393671 - RNA, 19 nt, Artificial Sequence
  Description of Artificial Sequence: Synthetic oligonucleotide
augcaugaggccuuggauu

SEQ ID NO: 1393672 - RNA, 19 nt, Artificial Sequence
  Description of Artificial Sequence: Synthetic oligonucleotide
accaaauaucaauggacuu

SEQ ID NO: 1393673 - RNA, 19 nt, Artificial Sequence
  Description of Artificial Sequence: Synthetic oligonucleotide
uagauaccugaccaauuua

SEQ ID NO: 1393674 - RNA, 19 nt, Artificial Sequence
  Description of Artificial Sequence: Synthetic oligonucleotide
gcaaucacaacaaaagcuc

SEQ ID NO: 1393675 - RNA, 19 nt, Artificial Sequence
  Description of Artificial Sequence: Synthetic oligonucleotide
auacauaguaaugguuuca

SEQ ID NO: 1393676 - RNA, 19 nt, Artificial Sequence
  Description of Artificial Sequence: Synthetic oligonucleotide
guuaaaguucuagauaccu

SEQ ID NO: 1393677 - RNA, 19 nt, Artificial Sequence
  Description of Artificial Sequence: Synthetic oligonucleotide
uucauaccaggaagcaauc

SEQ ID NO: 1393678 - RNA, 19 nt, Artificial Sequence
  Description of Artificial Sequence: Synthetic oligonucleotide
ucaaacuugaauggugcuu

SEQ ID NO: 1393679 - RNA, 19 nt, Artificial Sequence
  Description of Artificial Sequence: Synthetic oligonucleotide
uguucccucccacaaguua

SEQ ID NO: 1393680 - RNA, 19 nt, Artificial Sequence
  Description of Artificial Sequence: Synthetic oligonucleotide
ucacaacaaaagcucuauc

SEQ ID NO: 1393681 - RNA, 19 nt, Artificial Sequence
  Description of Artificial Sequence: Synthetic oligonucleotide
acuugguauaacccuugga

SEQ ID NO: 1393682 - RNA, 19 nt, Artificial Sequence
  Description of Artificial Sequence: Synthetic oligonucleotide
cugugaaagaugaagucua

SEQ ID NO: 1393683 - RNA, 19 nt, Artificial Sequence
  Description of Artificial Sequence: Synthetic oligonucleotide
ugugaggguugaaugucaa

SEQ ID NO: 1393684 - RNA, 19 nt, Artificial Sequence
  Description of Artificial Sequence: Synthetic oligonucleotide
uguagcucggugguauagc

SEQ ID NO: 1393685 - RNA, 19 nt, Artificial Sequence
  Description of Artificial Sequence: Synthetic oligonucleotide
aguuauuuucucacauaug

SEQ ID NO: 1393686 - RNA, 19 nt, Artificial Sequence
  Description of Artificial Sequence: Synthetic oligonucleotide
ucugcaacacgggcaaggc

SEQ ID NO: 1393687 - RNA, 19 nt, Artificial Sequence
  Description of Artificial Sequence: Synthetic oligonucleotide
ucaagaacccugugugauc

SEQ ID NO: 1393688 - RNA, 19 nt, Artificial Sequence
  Description of Artificial Sequence: Synthetic oligonucleotide
gaccaaauaucaauggacu

SEQ ID NO: 1393689 - RNA, 19 nt, Artificial Sequence
  Description of Artificial Sequence: Synthetic oligonucleotide
guaaugguuucacugacau

SEQ ID NO: 1393690 - RNA, 19 nt, Artificial Sequence
  Description of Artificial Sequence: Synthetic oligonucleotide
aucacaacaaaagcucuau

SEQ ID NO: 1393691 - RNA, 19 nt, Artificial Sequence
  Description of Artificial Sequence: Synthetic oligonucleotide
augauccggaucugcaaca

SEQ ID NO: 1393692 - RNA, 19 nt, Artificial Sequence
  Description of Artificial Sequence: Synthetic oligonucleotide
auaccaggaagcaaucaca

SEQ ID NO: 1393693 - RNA, 19 nt, Artificial Sequence
  Description of Artificial Sequence: Synthetic oligonucleotide
ugagcauauucacccguua

SEQ ID NO: 1393694 - RNA, 19 nt, Artificial Sequence
  Description of Artificial Sequence: Synthetic oligonucleotide
uaugggugggccagagccu

SEQ ID NO: 1393695 - RNA, 19 nt, Artificial Sequence
  Description of Artificial Sequence: Synthetic oligonucleotide
cacuuuauuucauguccuc

SEQ ID NO: 1393696 - RNA, 19 nt, Artificial Sequence
  Description of Artificial Sequence: Synthetic oligonucleotide
acgaugcagaacauuagcu

SEQ ID NO: 1393697 - RNA, 19 nt, Artificial Sequence
  Description of Artificial Sequence: Synthetic oligonucleotide
uugagcauauucacccguu

SEQ ID NO: 1393698 - RNA, 19 nt, Artificial Sequence
  Description of Artificial Sequence: Synthetic oligonucleotide
agcaaguaguuucuagcuu

SEQ ID NO: 1393699 - RNA, 19 nt, Artificial Sequence
  Description of Artificial Sequence: Synthetic oligonucleotide
ucccucucccauuaauuuc

SEQ ID NO: 1393700 - RNA, 19 nt, Artificial Sequence
  Description of Artificial Sequence: Synthetic oligonucleotide
ucccacaaguuauuuucuc

SEQ ID NO: 1393701 - RNA, 19 nt, Artificial Sequence
  Description of Artificial Sequence: Synthetic oligonucleotide
ccacaaguuauuuucucac

SEQ ID NO: 1393702 - RNA, 19 nt, Artificial Sequence
  Description of Artificial Sequence: Synthetic oligonucleotide
cauaucacugucacggugu

SEQ ID NO: 1393703 - RNA, 19 nt, Artificial Sequence
  Description of Artificial Sequence: Synthetic oligonucleotide
guggcuacguacucuguca

SEQ ID NO: 1393704 - RNA, 19 nt, Artificial Sequence
  Description of Artificial Sequence: Synthetic oligonucleotide
uggucaagguagugcuucc

SEQ ID NO: 1393705 - RNA, 19 nt, Artificial Sequence
  Description of Artificial Sequence: Synthetic oligonucleotide
guugaaugucaacauuuua

SEQ ID NO: 1393706 - RNA, 19 nt, Artificial Sequence
  Description of Artificial Sequence: Synthetic oligonucleotide
cccguuauccucuuacccc

SEQ ID NO: 1393707 - RNA, 19 nt, Artificial Sequence
  Description of Artificial Sequence: Synthetic oligonucleotide
guagcucggugguauagca

SEQ ID NO: 1393708 - RNA, 19 nt, Artificial Sequence
  Description of Artificial Sequence: Synthetic oligonucleotide
uccuuagguaagucaucca

SEQ ID NO: 1393709 - RNA, 19 nt, Artificial Sequence
  Description of Artificial Sequence: Synthetic oligonucleotide
uguaaagaucugucuccau

SEQ ID NO: 1393710 - RNA, 19 nt, Artificial Sequence
  Description of Artificial Sequence: Synthetic oligonucleotide
cugaaacgcagcaagauuu

SEQ ID NO: 1393711 - RNA, 19 nt, Artificial Sequence
  Description of Artificial Sequence: Synthetic oligonucleotide
cccucucccauuaauuucc

SEQ ID NO: 1393712 - RNA, 19 nt, Artificial Sequence
  Description of Artificial Sequence: Synthetic oligonucleotide
gucacgaugcagaacauua

SEQ ID NO: 1393713 - RNA, 19 nt, Artificial Sequence
  Description of Artificial Sequence: Synthetic oligonucleotide
auggugcuucagcaauggg

SEQ ID NO: 1393714 - RNA, 19 nt, Artificial Sequence
  Description of Artificial Sequence: Synthetic oligonucleotide
caaucccuaacaccacaac

SEQ ID NO: 1393715 - RNA, 19 nt, Artificial Sequence
  Description of Artificial Sequence: Synthetic oligonucleotide
cuggucaagguagugcuuc

SEQ ID NO: 1393716 - RNA, 19 nt, Artificial Sequence
  Description of Artificial Sequence: Synthetic oligonucleotide
gaucgcaagugguguucag

SEQ ID NO: 1393717 - RNA, 19 nt, Artificial Sequence
  Description of Artificial Sequence: Synthetic oligonucleotide
acccuuggaauucaacaua

SEQ ID NO: 1393718 - RNA, 19 nt, Artificial Sequence
  Description of Artificial Sequence: Synthetic oligonucleotide
caagaacccugugugauca

SEQ ID NO: 1393719 - RNA, 19 nt, Artificial Sequence
  Description of Artificial Sequence: Synthetic oligonucleotide
ccugugauggagauccaag

SEQ ID NO: 1393720 - RNA, 19 nt, Artificial Sequence
  Description of Artificial Sequence: Synthetic oligonucleotide
gguauaacccuuggaauuc

SEQ ID NO: 1393721 - RNA, 19 nt, Artificial Sequence
  Description of Artificial Sequence: Synthetic oligonucleotide
guccucauaaucugugaaa

SEQ ID NO: 1393722 - RNA, 19 nt, Artificial Sequence
  Description of Artificial Sequence: Synthetic oligonucleotide
cugaccaauuuaagaucug

SEQ ID NO: 1393723 - RNA, 19 nt, Artificial Sequence
  Description of Artificial Sequence: Synthetic oligonucleotide
uuaggguucucuggcagua

SEQ ID NO: 1393724 - RNA, 19 nt, Artificial Sequence
  Description of Artificial Sequence: Synthetic oligonucleotide
cacccguuauccucuuacc

SEQ ID NO: 1393725 - RNA, 19 nt, Artificial Sequence
  Description of Artificial Sequence: Synthetic oligonucleotide
cccaauacauaucacuguc

SEQ ID NO: 1393726 - RNA, 19 nt, Artificial Sequence
  Description of Artificial Sequence: Synthetic oligonucleotide
uggcuacguacucugucaa

SEQ ID NO: 1393727 - RNA, 19 nt, Artificial Sequence
  Description of Artificial Sequence: Synthetic oligonucleotide
caaguuauuuucucacaua

SEQ ID NO: 1393728 - RNA, 19 nt, Artificial Sequence
  Description of Artificial Sequence: Synthetic oligonucleotide
ggugucuaagagcugccac

SEQ ID NO: 1393729 - RNA, 19 nt, Artificial Sequence
  Description of Artificial Sequence: Synthetic oligonucleotide
ucaaugguuggugcccgga

SEQ ID NO: 1393730 - RNA, 19 nt, Artificial Sequence
  Description of Artificial Sequence: Synthetic oligonucleotide
agaacccugugugaucaug

SEQ ID NO: 1393731 - RNA, 19 nt, Artificial Sequence
  Description of Artificial Sequence: Synthetic oligonucleotide
uagcucggugguauagcac

SEQ ID NO: 1393732 - RNA, 19 nt, Artificial Sequence
  Description of Artificial Sequence: Synthetic oligonucleotide
aucaauggacuugguauaa

SEQ ID NO: 1393733 - RNA, 19 nt, Artificial Sequence
  Description of Artificial Sequence: Synthetic oligonucleotide
ccaacguguggcuacguac

SEQ ID NO: 1393734 - RNA, 19 nt, Artificial Sequence
  Description of Artificial Sequence: Synthetic oligonucleotide
gagaaagcaaguaguuucu

SEQ ID NO: 1393735 - RNA, 19 nt, Artificial Sequence
  Description of Artificial Sequence: Synthetic oligonucleotide
ugauccggaucugcaacac

SEQ ID NO: 1393736 - RNA, 19 nt, Artificial Sequence
  Description of Artificial Sequence: Synthetic oligonucleotide
cagcaacaaccacacaguc

SEQ ID NO: 1393737 - RNA, 19 nt, Artificial Sequence
  Description of Artificial Sequence: Synthetic oligonucleotide
aggccacaaaaguuacaca

SEQ ID NO: 1393738 - RNA, 19 nt, Artificial Sequence
  Description of Artificial Sequence: Synthetic oligonucleotide
cucaaugguuggugcccgg

SEQ ID NO: 1393739 - RNA, 19 nt, Artificial Sequence
  Description of Artificial Sequence: Synthetic oligonucleotide
gcagaacauuagcugaaug

SEQ ID NO: 1393740 - RNA, 19 nt, Artificial Sequence
  Description of Artificial Sequence: Synthetic oligonucleotide
gaccaauuuaagaucugua

SEQ ID NO: 1393741 - RNA, 19 nt, Artificial Sequence
  Description of Artificial Sequence: Synthetic oligonucleotide
guaccaacguguggcuacg

SEQ ID NO: 1393742 - RNA, 19 nt, Artificial Sequence
  Description of Artificial Sequence: Synthetic oligonucleotide
caacuucaauccucuugug

SEQ ID NO: 1393743 - RNA, 19 nt, Artificial Sequence
  Description of Artificial Sequence: Synthetic oligonucleotide
cgaugcagaacauuagcug

SEQ ID NO: 1393744 - RNA, 19 nt, Artificial Sequence
  Description of Artificial Sequence: Synthetic oligonucleotide
gcugaauguauguauuuua

SEQ ID NO: 1393745 - RNA, 19 nt, Artificial Sequence
  Description of Artificial Sequence: Synthetic oligonucleotide
guucuagauaccugaccaa

SEQ ID NO: 1393746 - RNA, 19 nt, Artificial Sequence
  Description of Artificial Sequence: Synthetic oligonucleotide
acggugucuaagagcugcc

SEQ ID NO: 1393747 - RNA, 19 nt, Artificial Sequence
  Description of Artificial Sequence: Synthetic oligonucleotide
agaauacccaggauaugau

SEQ ID NO: 1393748 - RNA, 19 nt, Artificial Sequence
  Description of Artificial Sequence: Synthetic oligonucleotide
ggguuagcuguauaguuaa

SEQ ID NO: 1393749 - RNA, 19 nt, Artificial Sequence
  Description of Artificial Sequence: Synthetic oligonucleotide
gccgaugauauucucaugu

SEQ ID NO: 1393750 - RNA, 19 nt, Artificial Sequence
  Description of Artificial Sequence: Synthetic oligonucleotide
ugaugccgaugauauucuc

SEQ ID NO: 1393751 - RNA, 19 nt, Artificial Sequence
  Description of Artificial Sequence: Synthetic oligonucleotide
caagaauacccaggauaug

SEQ ID NO: 1393752 - RNA, 19 nt, Artificial Sequence
  Description of Artificial Sequence: Synthetic oligonucleotide
gagcugccacuuuauuuca

SEQ ID NO: 1393753 - RNA, 19 nt, Artificial Sequence
  Description of Artificial Sequence: Synthetic oligonucleotide
ugcagaacauuagcugaau

SEQ ID NO: 1393754 - RNA, 19 nt, Artificial Sequence
  Description of Artificial Sequence: Synthetic oligonucleotide
gaagucuaauuucuucauu

SEQ ID NO: 1393755 - RNA, 19 nt, Artificial Sequence
  Description of Artificial Sequence: Synthetic oligonucleotide
gucauugaugccgaugaua

SEQ ID NO: 1393756 - RNA, 19 nt, Artificial Sequence
  Description of Artificial Sequence: Synthetic oligonucleotide
cuagauaccugaccaauuu

SEQ ID NO: 1393757 - RNA, 19 nt, Artificial Sequence
  Description of Artificial Sequence: Synthetic oligonucleotide
gcuacguacucugucaaga

SEQ ID NO: 1393758 - RNA, 19 nt, Artificial Sequence
  Description of Artificial Sequence: Synthetic oligonucleotide
cuacguacucugucaagaa

SEQ ID NO: 1393759 - RNA, 19 nt, Artificial Sequence
  Description of Artificial Sequence: Synthetic oligonucleotide
guuggugcccggaugaugu

SEQ ID NO: 1393760 - RNA, 19 nt, Artificial Sequence
  Description of Artificial Sequence: Synthetic oligonucleotide
augagguccuguacuauau

SEQ ID NO: 1393761 - RNA, 19 nt, Artificial Sequence
  Description of Artificial Sequence: Synthetic oligonucleotide
uccugugauggagauccaa

SEQ ID NO: 1393762 - RNA, 19 nt, Artificial Sequence
  Description of Artificial Sequence: Synthetic oligonucleotide
uucuagcuuuuagauuuau

SEQ ID NO: 1393763 - RNA, 19 nt, Artificial Sequence
  Description of Artificial Sequence: Synthetic oligonucleotide
gagcauauucacccguuau

SEQ ID NO: 1393764 - RNA, 19 nt, Artificial Sequence
  Description of Artificial Sequence: Synthetic oligonucleotide
agaucgcaagugguguuca

SEQ ID NO: 1393765 - RNA, 19 nt, Artificial Sequence
  Description of Artificial Sequence: Synthetic oligonucleotide
gggaacagccuguuccaug

SEQ ID NO: 1393766 - RNA, 19 nt, Artificial Sequence
  Description of Artificial Sequence: Synthetic oligonucleotide
ucaucacuugggucauaau

SEQ ID NO: 1393767 - RNA, 19 nt, Artificial Sequence
  Description of Artificial Sequence: Synthetic oligonucleotide
uggaaggcuugaggucacg

SEQ ID NO: 1393768 - RNA, 19 nt, Artificial Sequence
  Description of Artificial Sequence: Synthetic oligonucleotide
ggugguauagcacuugcuu

SEQ ID NO: 1393769 - RNA, 19 nt, Artificial Sequence
  Description of Artificial Sequence: Synthetic oligonucleotide
guauaacccuuggaauuca

SEQ ID NO: 1393770 - RNA, 19 nt, Artificial Sequence
  Description of Artificial Sequence: Synthetic oligonucleotide
ccaggauaugauucagcug

SEQ ID NO: 1393771 - RNA, 19 nt, Artificial Sequence
  Description of Artificial Sequence: Synthetic oligonucleotide
gucaagguagugcuucccu

SEQ ID NO: 1393772 - RNA, 19 nt, Artificial Sequence
  Description of Artificial Sequence: Synthetic oligonucleotide
caacguguggcuacguacu

SEQ ID NO: 1393773 - RNA, 19 nt, Artificial Sequence
  Description of Artificial Sequence: Synthetic oligonucleotide
gucaaacuugaauggugcu

SEQ ID NO: 1393774 - RNA, 19 nt, Artificial Sequence
  Description of Artificial Sequence: Synthetic oligonucleotide
ccuguacuauauauacauc

SEQ ID NO: 1393775 - RNA, 19 nt, Artificial Sequence
  Description of Artificial Sequence: Synthetic oligonucleotide
cacugucacggugucuaag

SEQ ID NO: 1393776 - RNA, 19 nt, Artificial Sequence
  Description of Artificial Sequence: Synthetic oligonucleotide
ucuuccugugauggagauc

SEQ ID NO: 1393777 - RNA, 19 nt, Artificial Sequence
  Description of Artificial Sequence: Synthetic oligonucleotide
cauauucacccguuauccu

SEQ ID NO: 1393778 - RNA, 19 nt, Artificial Sequence
  Description of Artificial Sequence: Synthetic oligonucleotide
cauuagcugaauguaugua

SEQ ID NO: 1393779 - RNA, 19 nt, Artificial Sequence
  Description of Artificial Sequence: Synthetic oligonucleotide
gcaaguaguuucuagcuuu

SEQ ID NO: 1393780 - RNA, 19 nt, Artificial Sequence
  Description of Artificial Sequence: Synthetic oligonucleotide
ggcuacguacucugucaag

SEQ ID NO: 1393781 - RNA, 19 nt, Artificial Sequence
  Description of Artificial Sequence: Synthetic oligonucleotide
cuaacaccacaaccagcca

SEQ ID NO: 1393782 - RNA, 19 nt, Artificial Sequence
  Description of Artificial Sequence: Synthetic oligonucleotide
guccuguacuauauauaca

SEQ ID NO: 1393783 - RNA, 19 nt, Artificial Sequence
  Description of Artificial Sequence: Synthetic oligonucleotide
agguaugggugggccagag

SEQ ID NO: 1393784 - RNA, 19 nt, Artificial Sequence
  Description of Artificial Sequence: Synthetic oligonucleotide
ccugugugaucaugauccg

SEQ ID NO: 1393785 - RNA, 19 nt, Artificial Sequence
  Description of Artificial Sequence: Synthetic oligonucleotide
ccaauacauaucacuguca

SEQ ID NO: 1393786 - RNA, 19 nt, Artificial Sequence
  Description of Artificial Sequence: Synthetic oligonucleotide
ccaagaauacccaggauau

SEQ ID NO: 1393787 - RNA, 19 nt, Artificial Sequence
  Description of Artificial Sequence: Synthetic oligonucleotide
cucggugguauagcacuug

SEQ ID NO: 1393788 - RNA, 19 nt, Artificial Sequence
  Description of Artificial Sequence: Synthetic oligonucleotide
cccacaaguuauuuucuca

SEQ ID NO: 1393789 - RNA, 19 nt, Artificial Sequence
  Description of Artificial Sequence: Synthetic oligonucleotide
caauaaguccagagcuuua

SEQ ID NO: 1393790 - RNA, 19 nt, Artificial Sequence
  Description of Artificial Sequence: Synthetic oligonucleotide
cucucccauuaauuuccuc

SEQ ID NO: 1393791 - RNA, 19 nt, Artificial Sequence
  Description of Artificial Sequence: Synthetic oligonucleotide
aucuguauccuggcuggaa

SEQ ID NO: 1393792 - RNA, 19 nt, Artificial Sequence
  Description of Artificial Sequence: Synthetic oligonucleotide
uaaaugccucaaagcuguu

SEQ ID NO: 1393793 - RNA, 19 nt, Artificial Sequence
  Description of Artificial Sequence: Synthetic oligonucleotide
cuggaaucuagcagucucu

SEQ ID NO: 1393794 - RNA, 19 nt, Artificial Sequence
  Description of Artificial Sequence: Synthetic oligonucleotide
gcucaaugguuggugcccg

SEQ ID NO: 1393795 - RNA, 19 nt, Artificial Sequence
  Description of Artificial Sequence: Synthetic oligonucleotide
ucacugucacggugucuaa

SEQ ID NO: 1393796 - RNA, 19 nt, Artificial Sequence
  Description of Artificial Sequence: Synthetic oligonucleotide
aguguagcucggugguaua

SEQ ID NO: 1393797 - RNA, 19 nt, Artificial Sequence
  Description of Artificial Sequence: Synthetic oligonucleotide
ccgaugauauucucauguc

SEQ ID NO: 1393798 - RNA, 19 nt, Artificial Sequence
  Description of Artificial Sequence: Synthetic oligonucleotide
aggauaugauucagcuggu

SEQ ID NO: 1393799 - RNA, 19 nt, Artificial Sequence
  Description of Artificial Sequence: Synthetic oligonucleotide
gaucugcaacacgggcaag

SEQ ID NO: 1393800 - RNA, 19 nt, Artificial Sequence
  Description of Artificial Sequence: Synthetic oligonucleotide
caugcaugaggccuuggau

SEQ ID NO: 1393801 - RNA, 19 nt, Artificial Sequence
  Description of Artificial Sequence: Synthetic oligonucleotide
cccuaacaccacaaccagc

SEQ ID NO: 1393802 - RNA, 19 nt, Artificial Sequence
  Description of Artificial Sequence: Synthetic oligonucleotide
caugucugaaacgcagcaa

SEQ ID NO: 1393803 - RNA, 19 nt, Artificial Sequence
  Description of Artificial Sequence: Synthetic oligonucleotide
gucauugcugagguguugu

SEQ ID NO: 1393804 - RNA, 19 nt, Artificial Sequence
  Description of Artificial Sequence: Synthetic oligonucleotide
agccuguuccauggcaccu

SEQ ID NO: 1393805 - RNA, 19 nt, Artificial Sequence
  Description of Artificial Sequence: Synthetic oligonucleotide
cuuaggguucucuggcagu

SEQ ID NO: 1393806 - RNA, 19 nt, Artificial Sequence
  Description of Artificial Sequence: Synthetic oligonucleotide
ccggaucugcaacacgggc

SEQ ID NO: 1393807 - RNA, 19 nt, Artificial Sequence
  Description of Artificial Sequence: Synthetic oligonucleotide
uucacccguuauccucuua

SEQ ID NO: 1393808 - RNA, 19 nt, Artificial Sequence
  Description of Artificial Sequence: Synthetic oligonucleotide
gguaugggugggccagagc

SEQ ID NO: 1393809 - RNA, 19 nt, Artificial Sequence
  Description of Artificial Sequence: Synthetic oligonucleotide
cuguauaguuaaaguucua

SEQ ID NO: 1393810 - RNA, 19 nt, Artificial Sequence
  Description of Artificial Sequence: Synthetic oligonucleotide
cagcauuugggaacagccu

SEQ ID NO: 1393811 - RNA, 19 nt, Artificial Sequence
  Description of Artificial Sequence: Synthetic oligonucleotide
gucugaaacgcagcaagau

SEQ ID NO: 1393812 - RNA, 19 nt, Artificial Sequence
  Description of Artificial Sequence: Synthetic oligonucleotide
ccucauaaucugugaaaga

SEQ ID NO: 1393813 - RNA, 19 nt, Artificial Sequence
  Description of Artificial Sequence: Synthetic oligonucleotide
uuggugcccggaugauguc

SEQ ID NO: 1393814 - RNA, 19 nt, Artificial Sequence
  Description of Artificial Sequence: Synthetic oligonucleotide
cucaagucuuaggagugua

SEQ ID NO: 1393815 - RNA, 19 nt, Artificial Sequence
  Description of Artificial Sequence: Synthetic oligonucleotide
ggauaugauucagcugguc

SEQ ID NO: 1393816 - RNA, 19 nt, Artificial Sequence
  Description of Artificial Sequence: Synthetic oligonucleotide
ggguugaaugucaacauuu

SEQ ID NO: 1393817 - RNA, 19 nt, Artificial Sequence
  Description of Artificial Sequence: Synthetic oligonucleotide
cauugcugagguguugugu

SEQ ID NO: 1393818 - RNA, 19 nt, Artificial Sequence
  Description of Artificial Sequence: Synthetic oligonucleotide
gagccuguucaacuucaau

SEQ ID NO: 1393819 - RNA, 19 nt, Artificial Sequence
  Description of Artificial Sequence: Synthetic oligonucleotide
gguuggugcccggaugaug

SEQ ID NO: 1393820 - RNA, 19 nt, Artificial Sequence
  Description of Artificial Sequence: Synthetic oligonucleotide
gggguuagcuguauaguua

SEQ ID NO: 1393821 - RNA, 19 nt, Artificial Sequence
  Description of Artificial Sequence: Synthetic oligonucleotide
cuuucccucucccauuaau

SEQ ID NO: 1393822 - RNA, 19 nt, Artificial Sequence
  Description of Artificial Sequence: Synthetic oligonucleotide
auucacccguuauccucuu

SEQ ID NO: 1393823 - RNA, 19 nt, Artificial Sequence
  Description of Artificial Sequence: Synthetic oligonucleotide
ggaaggcuugaggucacga

SEQ ID NO: 1393824 - RNA, 19 nt, Artificial Sequence
  Description of Artificial Sequence: Synthetic oligonucleotide
ucccucccacaaguuauuu

SEQ ID NO: 1393825 - RNA, 19 nt, Artificial Sequence
  Description of Artificial Sequence: Synthetic oligonucleotide
cacugacauuuucauacau

SEQ ID NO: 1393826 - RNA, 19 nt, Artificial Sequence
  Description of Artificial Sequence: Synthetic oligonucleotide
uaccaacguguggcuacgu

SEQ ID NO: 1393827 - RNA, 19 nt, Artificial Sequence
  Description of Artificial Sequence: Synthetic oligonucleotide
ggagagaaagcaaguaguu

SEQ ID NO: 1393828 - RNA, 19 nt, Artificial Sequence
  Description of Artificial Sequence: Synthetic oligonucleotide
ugguuggugcccggaugau

SEQ ID NO: 1393829 - RNA, 19 nt, Artificial Sequence
  Description of Artificial Sequence: Synthetic oligonucleotide
cgcaagugguguucagcag

SEQ ID NO: 1393830 - RNA, 19 nt, Artificial Sequence
  Description of Artificial Sequence: Synthetic oligonucleotide
guauccuggcuggaaucua

SEQ ID NO: 1393831 - RNA, 19 nt, Artificial Sequence
  Description of Artificial Sequence: Synthetic oligonucleotide
caauccucuugugaggguu

SEQ ID NO: 1393832 - RNA, 19 nt, Artificial Sequence
  Description of Artificial Sequence: Synthetic oligonucleotide
gguugaaugucaacauuuu

SEQ ID NO: 1393833 - RNA, 19 nt, Artificial Sequence
  Description of Artificial Sequence: Synthetic oligonucleotide
gcuucuccuuagguaaguc

SEQ ID NO: 1393834 - RNA, 19 nt, Artificial Sequence
  Description of Artificial Sequence: Synthetic oligonucleotide
ccuuggauucaaucccuaa

SEQ ID NO: 1393835 - RNA, 19 nt, Artificial Sequence
  Description of Artificial Sequence: Synthetic oligonucleotide
agcugccacuuuauuucau

SEQ ID NO: 1393836 - RNA, 19 nt, Artificial Sequence
  Description of Artificial Sequence: Synthetic oligonucleotide
ccacaaccagccagcaaca

SEQ ID NO: 1393837 - RNA, 19 nt, Artificial Sequence
  Description of Artificial Sequence: Synthetic oligonucleotide
cgaugauauucucaugucu

SEQ ID NO: 1393838 - RNA, 19 nt, Artificial Sequence
  Description of Artificial Sequence: Synthetic oligonucleotide
caaugguuggugcccggau

SEQ ID NO: 1393839 - RNA, 19 nt, Artificial Sequence
  Description of Artificial Sequence: Synthetic oligonucleotide
guacucugucaagaacccu

SEQ ID NO: 1393840 - RNA, 19 nt, Artificial Sequence
  Description of Artificial Sequence: Synthetic oligonucleotide
gcauuugggaacagccugu

SEQ ID NO: 1393841 - RNA, 19 nt, Artificial Sequence
  Description of Artificial Sequence: Synthetic oligonucleotide
caccacaaccagccagcaa

SEQ ID NO: 1393842 - RNA, 19 nt, Artificial Sequence
  Description of Artificial Sequence: Synthetic oligonucleotide
cauugaugccgaugauauu

SEQ ID NO: 1393843 - RNA, 19 nt, Artificial Sequence
  Description of Artificial Sequence: Synthetic oligonucleotide
cuguaccaacguguggcua

SEQ ID NO: 1393844 - RNA, 19 nt, Artificial Sequence
  Description of Artificial Sequence: Synthetic oligonucleotide
gguuagcuguauaguuaaa

SEQ ID NO: 1393845 - RNA, 19 nt, Artificial Sequence
  Description of Artificial Sequence: Synthetic oligonucleotide
augaggccuuggauucaau

SEQ ID NO: 1393846 - RNA, 19 nt, Artificial Sequence
  Description of Artificial Sequence: Synthetic oligonucleotide
cauuugggaacagccuguu

SEQ ID NO: 1393847 - RNA, 19 nt, Artificial Sequence
  Description of Artificial Sequence: Synthetic oligonucleotide
ggccuuggauucaaucccu

SEQ ID NO: 1393848 - RNA, 19 nt, Artificial Sequence
  Description of Artificial Sequence: Synthetic oligonucleotide
gugcuucccugggaagaua

SEQ ID NO: 1393849 - RNA, 19 nt, Artificial Sequence
  Description of Artificial Sequence: Synthetic oligonucleotide
ggucacgaugcagaacauu

SEQ ID NO: 1393850 - RNA, 19 nt, Artificial Sequence
  Description of Artificial Sequence: Synthetic oligonucleotide
guguggcuacguacucugu

SEQ ID NO: 1393851 - RNA, 19 nt, Artificial Sequence
  Description of Artificial Sequence: Synthetic oligonucleotide
ggcuggaaucuagcagucu

SEQ ID NO: 1393852 - RNA, 19 nt, Artificial Sequence
  Description of Artificial Sequence: Synthetic oligonucleotide
gccuuggauucaaucccua

SEQ ID NO: 1393853 - RNA, 19 nt, Artificial Sequence
  Description of Artificial Sequence: Synthetic oligonucleotide
ccucucccauuaauuuccu

SEQ ID NO: 1393854 - RNA, 19 nt, Artificial Sequence
  Description of Artificial Sequence: Synthetic oligonucleotide
cccucccacaaguuauuuu

SEQ ID NO: 1393855 - RNA, 19 nt, Artificial Sequence
  Description of Artificial Sequence: Synthetic oligonucleotide
cggugucuaagagcugcca

SEQ ID NO: 1393856 - RNA, 19 nt, Artificial Sequence
  Description of Artificial Sequence: Synthetic oligonucleotide
gcucggugguauagcacuu

SEQ ID NO: 1393857 - RNA, 19 nt, Artificial Sequence
  Description of Artificial Sequence: Synthetic oligonucleotide
aauuaaugaauccaagagg

SEQ ID NO: 1393858 - RNA, 19 nt, Artificial Sequence
  Description of Artificial Sequence: Synthetic oligonucleotide
aaaaugauccuuaaugucc

SEQ ID NO: 1393859 - RNA, 19 nt, Artificial Sequence
  Description of Artificial Sequence: Synthetic oligonucleotide
aauaacgaucacuaaauag

SEQ ID NO: 1393860 - RNA, 19 nt, Artificial Sequence
  Description of Artificial Sequence: Synthetic oligonucleotide
guaagaauaauccaucugg

SEQ ID NO: 1393861 - RNA, 19 nt, Artificial Sequence
  Description of Artificial Sequence: Synthetic oligonucleotide
aauccuagguacuugaguc

SEQ ID NO: 1393862 - RNA, 19 nt, Artificial Sequence
  Description of Artificial Sequence: Synthetic oligonucleotide
aauacuauaaaaucaguaa

SEQ ID NO: 1393863 - RNA, 19 nt, Artificial Sequence
  Description of Artificial Sequence: Synthetic oligonucleotide
uauccuagaaacauaaaag

SEQ ID NO: 1393864 - RNA, 19 nt, Artificial Sequence
  Description of Artificial Sequence: Synthetic oligonucleotide
ugugggaugaauaaaacca

SEQ ID NO: 1393865 - RNA, 19 nt, Artificial Sequence
  Description of Artificial Sequence: Synthetic oligonucleotide
aguauuagguauuauggac

SEQ ID NO: 1393866 - RNA, 19 nt, Artificial Sequence
  Description of Artificial Sequence: Synthetic oligonucleotide
uuuaagguuaacaucagac

SEQ ID NO: 1393867 - RNA, 19 nt, Artificial Sequence
  Description of Artificial Sequence: Synthetic oligonucleotide
uauuaguuauccuagaaac

SEQ ID NO: 1393868 - RNA, 19 nt, Artificial Sequence
  Description of Artificial Sequence: Synthetic oligonucleotide
aagcaaaucaguauggugg

SEQ ID NO: 1393869 - RNA, 19 nt, Artificial Sequence
  Description of Artificial Sequence: Synthetic oligonucleotide
aauugauacauacugaguu

SEQ ID NO: 1393870 - RNA, 19 nt, Artificial Sequence
  Description of Artificial Sequence: Synthetic oligonucleotide
auaucuaggaauuuaaggu

SEQ ID NO: 1393871 - RNA, 19 nt, Artificial Sequence
  Description of Artificial Sequence: Synthetic oligonucleotide
ucuaugaaaaccuuugugu

SEQ ID NO: 1393872 - RNA, 19 nt, Artificial Sequence
  Description of Artificial Sequence: Synthetic oligonucleotide
uuaacuauugugcuggaca

SEQ ID NO: 1393873 - RNA, 19 nt, Artificial Sequence
  Description of Artificial Sequence: Synthetic oligonucleotide
auacuauaaaaucaguaag

SEQ ID NO: 1393874 - RNA, 19 nt, Artificial Sequence
  Description of Artificial Sequence: Synthetic oligonucleotide
auuaucuacaguuaugacu

SEQ ID NO: 1393875 - RNA, 19 nt, Artificial Sequence
  Description of Artificial Sequence: Synthetic oligonucleotide
agacaacuaauauauaauc

SEQ ID NO: 1393876 - RNA, 19 nt, Artificial Sequence
  Description of Artificial Sequence: Synthetic oligonucleotide
cauaaaagauaccaaacag

SEQ ID NO: 1393877 - RNA, 19 nt, Artificial Sequence
  Description of Artificial Sequence: Synthetic oligonucleotide
ugugaggaaaccgugaagg

SEQ ID NO: 1393878 - RNA, 19 nt, Artificial Sequence
  Description of Artificial Sequence: Synthetic oligonucleotide
ucacuaaauaguaagaaua

SEQ ID NO: 1393879 - RNA, 19 nt, Artificial Sequence
  Description of Artificial Sequence: Synthetic oligonucleotide
aauaguaagaauaauccau

SEQ ID NO: 1393880 - RNA, 19 nt, Artificial Sequence
  Description of Artificial Sequence: Synthetic oligonucleotide
uaaggcaugcaaaauacug

SEQ ID NO: 1393881 - RNA, 19 nt, Artificial Sequence
  Description of Artificial Sequence: Synthetic oligonucleotide
aacuguagcucacugguag

SEQ ID NO: 1393882 - RNA, 19 nt, Artificial Sequence
  Description of Artificial Sequence: Synthetic oligonucleotide
uaagguuaacaucagacaa

SEQ ID NO: 1393883 - RNA, 19 nt, Artificial Sequence
  Description of Artificial Sequence: Synthetic oligonucleotide
gaaaacaauuaaugaaucc

SEQ ID NO: 1393884 - RNA, 19 nt, Artificial Sequence
  Description of Artificial Sequence: Synthetic oligonucleotide
acuguucuaaucuacagcu

SEQ ID NO: 1393885 - RNA, 19 nt, Artificial Sequence
  Description of Artificial Sequence: Synthetic oligonucleotide
auugagaaucggaagaugc

SEQ ID NO: 1393886 - RNA, 19 nt, Artificial Sequence
  Description of Artificial Sequence: Synthetic oligonucleotide
acuuauaugccaauguuac

SEQ ID NO: 1393887 - RNA, 19 nt, Artificial Sequence
  Description of Artificial Sequence: Synthetic oligonucleotide
uauuuuagaguccuuuuac

SEQ ID NO: 1393888 - RNA, 19 nt, Artificial Sequence
  Description of Artificial Sequence: Synthetic oligonucleotide
caaguuaaauauaucuagg

SEQ ID NO: 1393889 - RNA, 19 nt, Artificial Sequence
  Description of Artificial Sequence: Synthetic oligonucleotide
acuuuaacuauugugcugg

SEQ ID NO: 1393890 - RNA, 19 nt, Artificial Sequence
  Description of Artificial Sequence: Synthetic oligonucleotide
ucagacaacuaauauauaa

SEQ ID NO: 1393891 - RNA, 19 nt, Artificial Sequence
  Description of Artificial Sequence: Synthetic oligonucleotide
uuauggaccaaggaaaucc

SEQ ID NO: 1393892 - RNA, 19 nt, Artificial Sequence
  Description of Artificial Sequence: Synthetic oligonucleotide
acgaucacuaaauaguaag

SEQ ID NO: 1393893 - RNA, 19 nt, Artificial Sequence
  Description of Artificial Sequence: Synthetic oligonucleotide
guaaguaaaauccagauau

SEQ ID NO: 1393894 - RNA, 19 nt, Artificial Sequence
  Description of Artificial Sequence: Synthetic oligonucleotide
ucauuauaauucuaaagaa

SEQ ID NO: 1393895 - RNA, 19 nt, Artificial Sequence
  Description of Artificial Sequence: Synthetic oligonucleotide
aaaauaacgaucacuaaau

SEQ ID NO: 1393896 - RNA, 19 nt, Artificial Sequence
  Description of Artificial Sequence: Synthetic oligonucleotide
auuaaggcaugcaaaauac

SEQ ID NO: 1393897 - RNA, 19 nt, Artificial Sequence
  Description of Artificial Sequence: Synthetic oligonucleotide
auaccaaacaguuuaagau

SEQ ID NO: 1393898 - RNA, 19 nt, Artificial Sequence
  Description of Artificial Sequence: Synthetic oligonucleotide
uuaagguuaacaucagaca

SEQ ID NO: 1393899 - RNA, 19 nt, Artificial Sequence
  Description of Artificial Sequence: Synthetic oligonucleotide
auauuuauuccagucauag

SEQ ID NO: 1393900 - RNA, 19 nt, Artificial Sequence
  Description of Artificial Sequence: Synthetic oligonucleotide
aauguuacuuaagaacauc

SEQ ID NO: 1393901 - RNA, 19 nt, Artificial Sequence
  Description of Artificial Sequence: Synthetic oligonucleotide
ugcauugagaaucggaaga

SEQ ID NO: 1393902 - RNA, 19 nt, Artificial Sequence
  Description of Artificial Sequence: Synthetic oligonucleotide
uucaguaugaauugauaca

SEQ ID NO: 1393903 - RNA, 19 nt, Artificial Sequence
  Description of Artificial Sequence: Synthetic oligonucleotide
cugucugaaaguaugacug

SEQ ID NO: 1393904 - RNA, 19 nt, Artificial Sequence
  Description of Artificial Sequence: Synthetic oligonucleotide
uccaguauuagguauuaug

SEQ ID NO: 1393905 - RNA, 19 nt, Artificial Sequence
  Description of Artificial Sequence: Synthetic oligonucleotide
cuucaguaugaauugauac

SEQ ID NO: 1393906 - RNA, 19 nt, Artificial Sequence
  Description of Artificial Sequence: Synthetic oligonucleotide
aaagucgagaaaauuagca

SEQ ID NO: 1393907 - RNA, 19 nt, Artificial Sequence
  Description of Artificial Sequence: Synthetic oligonucleotide
gauuguuugauccccagca

SEQ ID NO: 1393908 - RNA, 19 nt, Artificial Sequence
  Description of Artificial Sequence: Synthetic oligonucleotide
aggaauuuaagguuaacau

SEQ ID NO: 1393909 - RNA, 19 nt, Artificial Sequence
  Description of Artificial Sequence: Synthetic oligonucleotide
uaugcuuuuacuacuuuaa

SEQ ID NO: 1393910 - RNA, 19 nt, Artificial Sequence
  Description of Artificial Sequence: Synthetic oligonucleotide
uccuuaauguccaaguuaa

SEQ ID NO: 1393911 - RNA, 19 nt, Artificial Sequence
  Description of Artificial Sequence: Synthetic oligonucleotide
auaacgaucacuaaauagu

SEQ ID NO: 1393912 - RNA, 19 nt, Artificial Sequence
  Description of Artificial Sequence: Synthetic oligonucleotide
auugugaggccucauaucu

SEQ ID NO: 1393913 - RNA, 19 nt, Artificial Sequence
  Description of Artificial Sequence: Synthetic oligonucleotide
ucuacaguuaugacuaccu

SEQ ID NO: 1393914 - RNA, 19 nt, Artificial Sequence
  Description of Artificial Sequence: Synthetic oligonucleotide
uguucuaaucuacagcuaa

SEQ ID NO: 1393915 - RNA, 19 nt, Artificial Sequence
  Description of Artificial Sequence: Synthetic oligonucleotide
uuagguauuauggaccaag

SEQ ID NO: 1393916 - RNA, 19 nt, Artificial Sequence
  Description of Artificial Sequence: Synthetic oligonucleotide
auccuagaaacauaaaaga

SEQ ID NO: 1393917 - RNA, 19 nt, Artificial Sequence
  Description of Artificial Sequence: Synthetic oligonucleotide
ucaguaaguaaaauccaga

SEQ ID NO: 1393918 - RNA, 19 nt, Artificial Sequence
  Description of Artificial Sequence: Synthetic oligonucleotide
uguuuugaugguacugagg

SEQ ID NO: 1393919 - RNA, 19 nt, Artificial Sequence
  Description of Artificial Sequence: Synthetic oligonucleotide
uuuuacaugugcagaaagu

SEQ ID NO: 1393920 - RNA, 19 nt, Artificial Sequence
  Description of Artificial Sequence: Synthetic oligonucleotide
agucaaucuauuuuaaaau

SEQ ID NO: 1393921 - RNA, 19 nt, Artificial Sequence
  Description of Artificial Sequence: Synthetic oligonucleotide
uacucauuccaguauuagg

SEQ ID NO: 1393922 - RNA, 19 nt, Artificial Sequence
  Description of Artificial Sequence: Synthetic oligonucleotide
gauaccaaacaguuuaaga

SEQ ID NO: 1393923 - RNA, 19 nt, Artificial Sequence
  Description of Artificial Sequence: Synthetic oligonucleotide
uuucuugcauugagaaucg

SEQ ID NO: 1393924 - RNA, 19 nt, Artificial Sequence
  Description of Artificial Sequence: Synthetic oligonucleotide
aaauccuagguacuugagu

SEQ ID NO: 1393925 - RNA, 19 nt, Artificial Sequence
  Description of Artificial Sequence: Synthetic oligonucleotide
uuauucuaggucaggauaa

SEQ ID NO: 1393926 - RNA, 19 nt, Artificial Sequence
  Description of Artificial Sequence: Synthetic oligonucleotide
ugcuuuuacuacuuuaacu

SEQ ID NO: 1393927 - RNA, 19 nt, Artificial Sequence
  Description of Artificial Sequence: Synthetic oligonucleotide
uuaguuauccuagaaacau

SEQ ID NO: 1393928 - RNA, 19 nt, Artificial Sequence
  Description of Artificial Sequence: Synthetic oligonucleotide
aaaugaguauggucaucac

SEQ ID NO: 1393929 - RNA, 19 nt, Artificial Sequence
  Description of Artificial Sequence: Synthetic oligonucleotide
uacuguucuaaucuacagc

SEQ ID NO: 1393930 - RNA, 19 nt, Artificial Sequence
  Description of Artificial Sequence: Synthetic oligonucleotide
agaaucggaagaugcauag

SEQ ID NO: 1393931 - RNA, 19 nt, Artificial Sequence
  Description of Artificial Sequence: Synthetic oligonucleotide
uggaccaaggaaauccuag

SEQ ID NO: 1393932 - RNA, 19 nt, Artificial Sequence
  Description of Artificial Sequence: Synthetic oligonucleotide
uaagcaaaucaguauggug

SEQ ID NO: 1393933 - RNA, 19 nt, Artificial Sequence
  Description of Artificial Sequence: Synthetic oligonucleotide
aauuauucuaggucaggau

SEQ ID NO: 1393934 - RNA, 19 nt, Artificial Sequence
  Description of Artificial Sequence: Synthetic oligonucleotide
auaguaagaauaauccauc

SEQ ID NO: 1393935 - RNA, 19 nt, Artificial Sequence
  Description of Artificial Sequence: Synthetic oligonucleotide
uguaguauaugauacuguu

SEQ ID NO: 1393936 - RNA, 19 nt, Artificial Sequence
  Description of Artificial Sequence: Synthetic oligonucleotide
uuaggugugaggaaaccgu

SEQ ID NO: 1393937 - RNA, 19 nt, Artificial Sequence
  Description of Artificial Sequence: Synthetic oligonucleotide
auuaauaaaugacugccuu

SEQ ID NO: 1393938 - RNA, 19 nt, Artificial Sequence
  Description of Artificial Sequence: Synthetic oligonucleotide
ccaguauuagguauuaugg

SEQ ID NO: 1393939 - RNA, 19 nt, Artificial Sequence
  Description of Artificial Sequence: Synthetic oligonucleotide
agaaagucgagaaaauuag

SEQ ID NO: 1393940 - RNA, 19 nt, Artificial Sequence
  Description of Artificial Sequence: Synthetic oligonucleotide
augacuaccugucugagaa

SEQ ID NO: 1393941 - RNA, 19 nt, Artificial Sequence
  Description of Artificial Sequence: Synthetic oligonucleotide
aaacuugugggaugaauaa

SEQ ID NO: 1393942 - RNA, 19 nt, Artificial Sequence
  Description of Artificial Sequence: Synthetic oligonucleotide
aucaguaugguggagagca

SEQ ID NO: 1393943 - RNA, 19 nt, Artificial Sequence
  Description of Artificial Sequence: Synthetic oligonucleotide
aacaauuaaugaauccaag

SEQ ID NO: 1393944 - RNA, 19 nt, Artificial Sequence
  Description of Artificial Sequence: Synthetic oligonucleotide
uagguauuauggaccaagg

SEQ ID NO: 1393945 - RNA, 19 nt, Artificial Sequence
  Description of Artificial Sequence: Synthetic oligonucleotide
uacaguuaugacuaccugu

SEQ ID NO: 1393946 - RNA, 19 nt, Artificial Sequence
  Description of Artificial Sequence: Synthetic oligonucleotide
caucaauuauucuagguca

SEQ ID NO: 1393947 - RNA, 19 nt, Artificial Sequence
  Description of Artificial Sequence: Synthetic oligonucleotide
uugugggaugaauaaaacc

SEQ ID NO: 1393948 - RNA, 19 nt, Artificial Sequence
  Description of Artificial Sequence: Synthetic oligonucleotide
uucucauuugugcuagugc

SEQ ID NO: 1393949 - RNA, 19 nt, Artificial Sequence
  Description of Artificial Sequence: Synthetic oligonucleotide
aguuaugacuaccugucug

SEQ ID NO: 1393950 - RNA, 19 nt, Artificial Sequence
  Description of Artificial Sequence: Synthetic oligonucleotide
uuuacaugugcagaaaguc

SEQ ID NO: 1393951 - RNA, 19 nt, Artificial Sequence
  Description of Artificial Sequence: Synthetic oligonucleotide
gaguauggucaucacagag

SEQ ID NO: 1393952 - RNA, 19 nt, Artificial Sequence
  Description of Artificial Sequence: Synthetic oligonucleotide
auuauucuaggucaggaua

SEQ ID NO: 1393953 - RNA, 19 nt, Artificial Sequence
  Description of Artificial Sequence: Synthetic oligonucleotide
uuauaugccaauguuacuu

SEQ ID NO: 1393954 - RNA, 19 nt, Artificial Sequence
  Description of Artificial Sequence: Synthetic oligonucleotide
ugauccuuaauguccaagu

SEQ ID NO: 1393955 - RNA, 19 nt, Artificial Sequence
  Description of Artificial Sequence: Synthetic oligonucleotide
uaauccaucugguucaaaa

SEQ ID NO: 1393956 - RNA, 19 nt, Artificial Sequence
  Description of Artificial Sequence: Synthetic oligonucleotide
uuaccagcaaaugaguaug

SEQ ID NO: 1393957 - RNA, 19 nt, Artificial Sequence
  Description of Artificial Sequence: Synthetic oligonucleotide
auacauacugaguuaggug

SEQ ID NO: 1393958 - RNA, 19 nt, Artificial Sequence
  Description of Artificial Sequence: Synthetic oligonucleotide
ugaauaaaaccauucccau

SEQ ID NO: 1393959 - RNA, 19 nt, Artificial Sequence
  Description of Artificial Sequence: Synthetic oligonucleotide
cuuggguacaugauguuug

SEQ ID NO: 1393960 - RNA, 19 nt, Artificial Sequence
  Description of Artificial Sequence: Synthetic oligonucleotide
caaaacuguagcucacugg

SEQ ID NO: 1393961 - RNA, 19 nt, Artificial Sequence
  Description of Artificial Sequence: Synthetic oligonucleotide
uaaccaucauuaucuacag

SEQ ID NO: 1393962 - RNA, 19 nt, Artificial Sequence
  Description of Artificial Sequence: Synthetic oligonucleotide
agaacaucuaugaaaaccu

SEQ ID NO: 1393963 - RNA, 19 nt, Artificial Sequence
  Description of Artificial Sequence: Synthetic oligonucleotide
guauuagguauuauggacc

SEQ ID NO: 1393964 - RNA, 19 nt, Artificial Sequence
  Description of Artificial Sequence: Synthetic oligonucleotide
ucuugcauugagaaucgga

SEQ ID NO: 1393965 - RNA, 19 nt, Artificial Sequence
  Description of Artificial Sequence: Synthetic oligonucleotide
auugugcuggacaucauac

SEQ ID NO: 1393966 - RNA, 19 nt, Artificial Sequence
  Description of Artificial Sequence: Synthetic oligonucleotide
acuaauauauaaucaucau

SEQ ID NO: 1393967 - RNA, 19 nt, Artificial Sequence
  Description of Artificial Sequence: Synthetic oligonucleotide
aaacaauuaaugaauccaa

SEQ ID NO: 1393968 - RNA, 19 nt, Artificial Sequence
  Description of Artificial Sequence: Synthetic oligonucleotide
auaggguucuccuccauug

SEQ ID NO: 1393969 - RNA, 19 nt, Artificial Sequence
  Description of Artificial Sequence: Synthetic oligonucleotide
ugugcuagugcuuggguac

SEQ ID NO: 1393970 - RNA, 19 nt, Artificial Sequence
  Description of Artificial Sequence: Synthetic oligonucleotide
ucauuucuguaaagaaacc

SEQ ID NO: 1393971 - RNA, 19 nt, Artificial Sequence
  Description of Artificial Sequence: Synthetic oligonucleotide
aguauggucaucacagagg

SEQ ID NO: 1393972 - RNA, 19 nt, Artificial Sequence
  Description of Artificial Sequence: Synthetic oligonucleotide
uauaugauacuguucuaau

SEQ ID NO: 1393973 - RNA, 19 nt, Artificial Sequence
  Description of Artificial Sequence: Synthetic oligonucleotide
aucacuaaauaguaagaau

SEQ ID NO: 1393974 - RNA, 19 nt, Artificial Sequence
  Description of Artificial Sequence: Synthetic oligonucleotide
aagaugauagaaagcaggu

SEQ ID NO: 1393975 - RNA, 19 nt, Artificial Sequence
  Description of Artificial Sequence: Synthetic oligonucleotide
gaacagguuaagaauuuag

SEQ ID NO: 1393976 - RNA, 19 nt, Artificial Sequence
  Description of Artificial Sequence: Synthetic oligonucleotide
uauuauggaccaaggaaau

SEQ ID NO: 1393977 - RNA, 19 nt, Artificial Sequence
  Description of Artificial Sequence: Synthetic oligonucleotide
uccugggauuguuugaucc

SEQ ID NO: 1393978 - RNA, 19 nt, Artificial Sequence
  Description of Artificial Sequence: Synthetic oligonucleotide
uaucuuacacacuuuggau

SEQ ID NO: 1393979 - RNA, 19 nt, Artificial Sequence
  Description of Artificial Sequence: Synthetic oligonucleotide
aaguaaaauccagauauua

SEQ ID NO: 1393980 - RNA, 19 nt, Artificial Sequence
  Description of Artificial Sequence: Synthetic oligonucleotide
uaccucauuauaauucuaa

SEQ ID NO: 1393981 - RNA, 19 nt, Artificial Sequence
  Description of Artificial Sequence: Synthetic oligonucleotide
uguuugauccccagcaauc

SEQ ID NO: 1393982 - RNA, 19 nt, Artificial Sequence
  Description of Artificial Sequence: Synthetic oligonucleotide
acugaguuaggugugagga

SEQ ID NO: 1393983 - RNA, 19 nt, Artificial Sequence
  Description of Artificial Sequence: Synthetic oligonucleotide
uacuuuaacuauugugcug

SEQ ID NO: 1393984 - RNA, 19 nt, Artificial Sequence
  Description of Artificial Sequence: Synthetic oligonucleotide
uugagaaucggaagaugca

SEQ ID NO: 1393985 - RNA, 19 nt, Artificial Sequence
  Description of Artificial Sequence: Synthetic oligonucleotide
ucgagaaaauuagcaaagg

SEQ ID NO: 1393986 - RNA, 19 nt, Artificial Sequence
  Description of Artificial Sequence: Synthetic oligonucleotide
aaucaguaaguaaaaucca

SEQ ID NO: 1393987 - RNA, 19 nt, Artificial Sequence
  Description of Artificial Sequence: Synthetic oligonucleotide
aggaauacaaggaaaacaa

SEQ ID NO: 1393988 - RNA, 19 nt, Artificial Sequence
  Description of Artificial Sequence: Synthetic oligonucleotide
uugcauugagaaucggaag

SEQ ID NO: 1393989 - RNA, 19 nt, Artificial Sequence
  Description of Artificial Sequence: Synthetic oligonucleotide
acaucauacucauuucugu

SEQ ID NO: 1393990 - RNA, 19 nt, Artificial Sequence
  Description of Artificial Sequence: Synthetic oligonucleotide
agaguccuuuuacucauuc

SEQ ID NO: 1393991 - RNA, 19 nt, Artificial Sequence
  Description of Artificial Sequence: Synthetic oligonucleotide
acaguuuaagaugauagaa

SEQ ID NO: 1393992 - RNA, 19 nt, Artificial Sequence
  Description of Artificial Sequence: Synthetic oligonucleotide
aaauaacgaucacuaaaua

SEQ ID NO: 1393993 - RNA, 19 nt, Artificial Sequence
  Description of Artificial Sequence: Synthetic oligonucleotide
gaggaauacaaggaaaaca

SEQ ID NO: 1393994 - RNA, 19 nt, Artificial Sequence
  Description of Artificial Sequence: Synthetic oligonucleotide
uucuaucuaauaagcaaau

SEQ ID NO: 1393995 - RNA, 19 nt, Artificial Sequence
  Description of Artificial Sequence: Synthetic oligonucleotide
acuauugugcuggacauca

SEQ ID NO: 1393996 - RNA, 19 nt, Artificial Sequence
  Description of Artificial Sequence: Synthetic oligonucleotide
aggaauuuuacuucacaau

SEQ ID NO: 1393997 - RNA, 19 nt, Artificial Sequence
  Description of Artificial Sequence: Synthetic oligonucleotide
acaucagacaacuaauaua

SEQ ID NO: 1393998 - RNA, 19 nt, Artificial Sequence
  Description of Artificial Sequence: Synthetic oligonucleotide
aaucaguaugguggagagc

SEQ ID NO: 1393999 - RNA, 19 nt, Artificial Sequence
  Description of Artificial Sequence: Synthetic oligonucleotide
auaucugucugaaaguaug

SEQ ID NO: 1394000 - RNA, 19 nt, Artificial Sequence
  Description of Artificial Sequence: Synthetic oligonucleotide
gauuauuaaggcaugcaaa

SEQ ID NO: 1394001 - RNA, 19 nt, Artificial Sequence
  Description of Artificial Sequence: Synthetic oligonucleotide
ucauuugugcuagugcuug

SEQ ID NO: 1394002 - RNA, 19 nt, Artificial Sequence
  Description of Artificial Sequence: Synthetic oligonucleotide
gucgagaaaauuagcaaag

SEQ ID NO: 1394003 - RNA, 19 nt, Artificial Sequence
  Description of Artificial Sequence: Synthetic oligonucleotide
gagucuuaccagcaaauga

SEQ ID NO: 1394004 - RNA, 19 nt, Artificial Sequence
  Description of Artificial Sequence: Synthetic oligonucleotide
uuagaguccuuuuacucau

SEQ ID NO: 1394005 - RNA, 19 nt, Artificial Sequence
  Description of Artificial Sequence: Synthetic oligonucleotide
guacuugagucuuaccagc

SEQ ID NO: 1394006 - RNA, 19 nt, Artificial Sequence
  Description of Artificial Sequence: Synthetic oligonucleotide
aucuacaguuaugacuacc

SEQ ID NO: 1394007 - RNA, 19 nt, Artificial Sequence
  Description of Artificial Sequence: Synthetic oligonucleotide
gguacuugagucuuaccag

SEQ ID NO: 1394008 - RNA, 19 nt, Artificial Sequence
  Description of Artificial Sequence: Synthetic oligonucleotide
uugauccccagcaaucaca

SEQ ID NO: 1394009 - RNA, 19 nt, Artificial Sequence
  Description of Artificial Sequence: Synthetic oligonucleotide
aguaugguggagagcauac

SEQ ID NO: 1394010 - RNA, 19 nt, Artificial Sequence
  Description of Artificial Sequence: Synthetic oligonucleotide
cuugcauugagaaucggaa

SEQ ID NO: 1394011 - RNA, 19 nt, Artificial Sequence
  Description of Artificial Sequence: Synthetic oligonucleotide
aaaccuuugugugagcaaa

SEQ ID NO: 1394012 - RNA, 19 nt, Artificial Sequence
  Description of Artificial Sequence: Synthetic oligonucleotide
gacaucauacucauuucug

SEQ ID NO: 1394013 - RNA, 19 nt, Artificial Sequence
  Description of Artificial Sequence: Synthetic oligonucleotide
guuaggugugaggaaaccg

SEQ ID NO: 1394014 - RNA, 19 nt, Artificial Sequence
  Description of Artificial Sequence: Synthetic oligonucleotide
acuauaaaaucaguaagua

SEQ ID NO: 1394015 - RNA, 19 nt, Artificial Sequence
  Description of Artificial Sequence: Synthetic oligonucleotide
caucagacaacuaauauau

SEQ ID NO: 1394016 - RNA, 19 nt, Artificial Sequence
  Description of Artificial Sequence: Synthetic oligonucleotide
aaaaccauucccauauuua

SEQ ID NO: 1394017 - RNA, 19 nt, Artificial Sequence
  Description of Artificial Sequence: Synthetic oligonucleotide
guuaugacuaccugucuga

SEQ ID NO: 1394018 - RNA, 19 nt, Artificial Sequence
  Description of Artificial Sequence: Synthetic oligonucleotide
uuacucauuccaguauuag

SEQ ID NO: 1394019 - RNA, 19 nt, Artificial Sequence
  Description of Artificial Sequence: Synthetic oligonucleotide
cuugugggaugaauaaaac

SEQ ID NO: 1394020 - RNA, 19 nt, Artificial Sequence
  Description of Artificial Sequence: Synthetic oligonucleotide
gaaagucgagaaaauuagc

SEQ ID NO: 1394021 - RNA, 19 nt, Artificial Sequence
  Description of Artificial Sequence: Synthetic oligonucleotide
gauugaaaccaggaucuug

SEQ ID NO: 1394022 - RNA, 19 nt, Artificial Sequence
  Description of Artificial Sequence: Synthetic oligonucleotide
ggguacaugauguuuggag

SEQ ID NO: 1394023 - RNA, 19 nt, Artificial Sequence
  Description of Artificial Sequence: Synthetic oligonucleotide
aacuuauaugccaauguua

SEQ ID NO: 1394024 - RNA, 19 nt, Artificial Sequence
  Description of Artificial Sequence: Synthetic oligonucleotide
ugauccccagcaaucacac

SEQ ID NO: 1394025 - RNA, 19 nt, Artificial Sequence
  Description of Artificial Sequence: Synthetic oligonucleotide
aaauaaccaucauuaucua

SEQ ID NO: 1394026 - RNA, 19 nt, Artificial Sequence
  Description of Artificial Sequence: Synthetic oligonucleotide
uccuuuuacucauuccagu

SEQ ID NO: 1394027 - RNA, 19 nt, Artificial Sequence
  Description of Artificial Sequence: Synthetic oligonucleotide
ucuaggaauuuaagguuaa

SEQ ID NO: 1394028 - RNA, 19 nt, Artificial Sequence
  Description of Artificial Sequence: Synthetic oligonucleotide
ugugcagaaagucgagaaa

SEQ ID NO: 1394029 - RNA, 19 nt, Artificial Sequence
  Description of Artificial Sequence: Synthetic oligonucleotide
agcaaaucaguauggugga

SEQ ID NO: 1394030 - RNA, 19 nt, Artificial Sequence
  Description of Artificial Sequence: Synthetic oligonucleotide
aaaguaugacugauuaaaa

SEQ ID NO: 1394031 - RNA, 19 nt, Artificial Sequence
  Description of Artificial Sequence: Synthetic oligonucleotide
gaagaugcauagcaaaacu

SEQ ID NO: 1394032 - RNA, 19 nt, Artificial Sequence
  Description of Artificial Sequence: Synthetic oligonucleotide
gauacuguucuaaucuaca

SEQ ID NO: 1394033 - RNA, 19 nt, Artificial Sequence
  Description of Artificial Sequence: Synthetic oligonucleotide
ugaaaguaugacugauuaa

SEQ ID NO: 1394034 - RNA, 19 nt, Artificial Sequence
  Description of Artificial Sequence: Synthetic oligonucleotide
aguaaaauccagauauuaa

SEQ ID NO: 1394035 - RNA, 19 nt, Artificial Sequence
  Description of Artificial Sequence: Synthetic oligonucleotide
uacuugagucuuaccagca

SEQ ID NO: 1394036 - RNA, 19 nt, Artificial Sequence
  Description of Artificial Sequence: Synthetic oligonucleotide
uggagagcauaccucauua

SEQ ID NO: 1394037 - RNA, 19 nt, Artificial Sequence
  Description of Artificial Sequence: Synthetic oligonucleotide
uuguuugauccccagcaau

SEQ ID NO: 1394038 - RNA, 19 nt, Artificial Sequence
  Description of Artificial Sequence: Synthetic oligonucleotide
cacuaaauaguaagaauaa

SEQ ID NO: 1394039 - RNA, 19 nt, Artificial Sequence
  Description of Artificial Sequence: Synthetic oligonucleotide
ggaucuuguacacugcuac

SEQ ID NO: 1394040 - RNA, 19 nt, Artificial Sequence
  Description of Artificial Sequence: Synthetic oligonucleotide
agggguuucuugcauugag

SEQ ID NO: 1394041 - RNA, 19 nt, Artificial Sequence
  Description of Artificial Sequence: Synthetic oligonucleotide
uauaugccaauguuacuua

SEQ ID NO: 1394042 - RNA, 19 nt, Artificial Sequence
  Description of Artificial Sequence: Synthetic oligonucleotide
uauugugcuggacaucaua

SEQ ID NO: 1394043 - RNA, 19 nt, Artificial Sequence
  Description of Artificial Sequence: Synthetic oligonucleotide
ccaauguuacuuaagaaca

SEQ ID NO: 1394044 - RNA, 19 nt, Artificial Sequence
  Description of Artificial Sequence: Synthetic oligonucleotide
uucuaaucuacagcuaaaa

SEQ ID NO: 1394045 - RNA, 19 nt, Artificial Sequence
  Description of Artificial Sequence: Synthetic oligonucleotide
agaaaacaaaagaaaugcu

SEQ ID NO: 1394046 - RNA, 19 nt, Artificial Sequence
  Description of Artificial Sequence: Synthetic oligonucleotide
auuaguuauccuagaaaca

SEQ ID NO: 1394047 - RNA, 19 nt, Artificial Sequence
  Description of Artificial Sequence: Synthetic oligonucleotide
auguuacuuaagaacaucu

SEQ ID NO: 1394048 - RNA, 19 nt, Artificial Sequence
  Description of Artificial Sequence: Synthetic oligonucleotide
gguucaaaacuguagcuca

SEQ ID NO: 1394049 - RNA, 19 nt, Artificial Sequence
  Description of Artificial Sequence: Synthetic oligonucleotide
augugcagaaagucgagaa

SEQ ID NO: 1394050 - RNA, 19 nt, Artificial Sequence
  Description of Artificial Sequence: Synthetic oligonucleotide
auuauggaccaaggaaauc

SEQ ID NO: 1394051 - RNA, 19 nt, Artificial Sequence
  Description of Artificial Sequence: Synthetic oligonucleotide
cugaaaguaugacugauua

SEQ ID NO: 1394052 - RNA, 19 nt, Artificial Sequence
  Description of Artificial Sequence: Synthetic oligonucleotide
uaaguaaaauccagauauu

SEQ ID NO: 1394053 - RNA, 19 nt, Artificial Sequence
  Description of Artificial Sequence: Synthetic oligonucleotide
agguauuauggaccaagga

SEQ ID NO: 1394054 - RNA, 19 nt, Artificial Sequence
  Description of Artificial Sequence: Synthetic oligonucleotide
gaguccuuuuacucauucc

SEQ ID NO: 1394055 - RNA, 19 nt, Artificial Sequence
  Description of Artificial Sequence: Synthetic oligonucleotide
ugagaaucggaagaugcau

SEQ ID NO: 1394056 - RNA, 19 nt, Artificial Sequence
  Description of Artificial Sequence: Synthetic oligonucleotide
uuacuacuuuaacuauugu

SEQ ID NO: 1394057 - RNA, 19 nt, Artificial Sequence
  Description of Artificial Sequence: Synthetic oligonucleotide
ugccuuuauuuuagagucc

SEQ ID NO: 1394058 - RNA, 19 nt, Artificial Sequence
  Description of Artificial Sequence: Synthetic oligonucleotide
aucugguucaaaacuguag

SEQ ID NO: 1394059 - RNA, 19 nt, Artificial Sequence
  Description of Artificial Sequence: Synthetic oligonucleotide
guagggguuucuugcauug

SEQ ID NO: 1394060 - RNA, 19 nt, Artificial Sequence
  Description of Artificial Sequence: Synthetic oligonucleotide
uuaugacuaccugucugag

SEQ ID NO: 1394061 - RNA, 19 nt, Artificial Sequence
  Description of Artificial Sequence: Synthetic oligonucleotide
uaugacuaccugucugaga

SEQ ID NO: 1394062 - RNA, 19 nt, Artificial Sequence
  Description of Artificial Sequence: Synthetic oligonucleotide
acuaaauaguaagaauaau

SEQ ID NO: 1394063 - RNA, 19 nt, Artificial Sequence
  Description of Artificial Sequence: Synthetic oligonucleotide
ucuaucuaauaagcaaauc

SEQ ID NO: 1394064 - RNA, 19 nt, Artificial Sequence
  Description of Artificial Sequence: Synthetic oligonucleotide
agagcauaccucauuauaa

SEQ ID NO: 1394065 - RNA, 19 nt, Artificial Sequence
  Description of Artificial Sequence: Synthetic oligonucleotide
uacaugauguuuggaguca

SEQ ID NO: 1394066 - RNA, 19 nt, Artificial Sequence
  Description of Artificial Sequence: Synthetic oligonucleotide
ugcagaaagucgagaaaau

SEQ ID NO: 1394067 - RNA, 19 nt, Artificial Sequence
  Description of Artificial Sequence: Synthetic oligonucleotide
aaccgugaaggcuuuccaa

SEQ ID NO: 1394068 - RNA, 19 nt, Artificial Sequence
  Description of Artificial Sequence: Synthetic oligonucleotide
caguauuagguauuaugga

SEQ ID NO: 1394069 - RNA, 19 nt, Artificial Sequence
  Description of Artificial Sequence: Synthetic oligonucleotide
ggaccaaggaaauccuagg

SEQ ID NO: 1394070 - RNA, 19 nt, Artificial Sequence
  Description of Artificial Sequence: Synthetic oligonucleotide
aagaugcauagcaaaacuu

SEQ ID NO: 1394071 - RNA, 19 nt, Artificial Sequence
  Description of Artificial Sequence: Synthetic oligonucleotide
acuugugggaugaauaaaa

SEQ ID NO: 1394072 - RNA, 19 nt, Artificial Sequence
  Description of Artificial Sequence: Synthetic oligonucleotide
agauaccaaacaguuuaag

SEQ ID NO: 1394073 - RNA, 19 nt, Artificial Sequence
  Description of Artificial Sequence: Synthetic oligonucleotide
agcagguacccaaacauca

SEQ ID NO: 1394074 - RNA, 19 nt, Artificial Sequence
  Description of Artificial Sequence: Synthetic oligonucleotide
agagugcuugcauacuccu

SEQ ID NO: 1394075 - RNA, 19 nt, Artificial Sequence
  Description of Artificial Sequence: Synthetic oligonucleotide
cuaauaagcaaaucaguau

SEQ ID NO: 1394076 - RNA, 19 nt, Artificial Sequence
  Description of Artificial Sequence: Synthetic oligonucleotide
guauaugauacuguucuaa

SEQ ID NO: 1394077 - RNA, 19 nt, Artificial Sequence
  Description of Artificial Sequence: Synthetic oligonucleotide
ucccauacuccauuucuuc

SEQ ID NO: 1394078 - RNA, 19 nt, Artificial Sequence
  Description of Artificial Sequence: Synthetic oligonucleotide
uuuaacuauugugcuggac

SEQ ID NO: 1394079 - RNA, 19 nt, Artificial Sequence
  Description of Artificial Sequence: Synthetic oligonucleotide
ggauuauuaaggcaugcaa

SEQ ID NO: 1394080 - RNA, 19 nt, Artificial Sequence
  Description of Artificial Sequence: Synthetic oligonucleotide
ggucaggauaacugaacag

SEQ ID NO: 1394081 - RNA, 19 nt, Artificial Sequence
  Description of Artificial Sequence: Synthetic oligonucleotide
cuacaguuaugacuaccug

SEQ ID NO: 1394082 - RNA, 19 nt, Artificial Sequence
  Description of Artificial Sequence: Synthetic oligonucleotide
cacuccaccuaucccauac

SEQ ID NO: 1394083 - RNA, 19 nt, Artificial Sequence
  Description of Artificial Sequence: Synthetic oligonucleotide
auuguuugauccccagcaa

SEQ ID NO: 1394084 - RNA, 19 nt, Artificial Sequence
  Description of Artificial Sequence: Synthetic oligonucleotide
gaucuuguacacugcuaca

SEQ ID NO: 1394085 - RNA, 19 nt, Artificial Sequence
  Description of Artificial Sequence: Synthetic oligonucleotide
agcauaccucauuauaauu

SEQ ID NO: 1394086 - RNA, 19 nt, Artificial Sequence
  Description of Artificial Sequence: Synthetic oligonucleotide
cugggauuguuugaucccc

SEQ ID NO: 1394087 - RNA, 19 nt, Artificial Sequence
  Description of Artificial Sequence: Synthetic oligonucleotide
augauccuuaauguccaag

SEQ ID NO: 1394088 - RNA, 19 nt, Artificial Sequence
  Description of Artificial Sequence: Synthetic oligonucleotide
agugcacauucccauggga

SEQ ID NO: 1394089 - RNA, 19 nt, Artificial Sequence
  Description of Artificial Sequence: Synthetic oligonucleotide
ugcuggacaucauacucau

SEQ ID NO: 1394090 - RNA, 19 nt, Artificial Sequence
  Description of Artificial Sequence: Synthetic oligonucleotide
cuagugcuuggguacauga

SEQ ID NO: 1394091 - RNA, 19 nt, Artificial Sequence
  Description of Artificial Sequence: Synthetic oligonucleotide
aacuugugggaugaauaaa

SEQ ID NO: 1394092 - RNA, 19 nt, Artificial Sequence
  Description of Artificial Sequence: Synthetic oligonucleotide
caauuauucuaggucagga

SEQ ID NO: 1394093 - RNA, 19 nt, Artificial Sequence
  Description of Artificial Sequence: Synthetic oligonucleotide
auccuagguacuugagucu

SEQ ID NO: 1394094 - RNA, 19 nt, Artificial Sequence
  Description of Artificial Sequence: Synthetic oligonucleotide
augauacuguucuaaucua

SEQ ID NO: 1394095 - RNA, 19 nt, Artificial Sequence
  Description of Artificial Sequence: Synthetic oligonucleotide
ggaauuuuacuucacaauu

SEQ ID NO: 1394096 - RNA, 19 nt, Artificial Sequence
  Description of Artificial Sequence: Synthetic oligonucleotide
ugggauuguuugaucccca

SEQ ID NO: 1394097 - RNA, 19 nt, Artificial Sequence
  Description of Artificial Sequence: Synthetic oligonucleotide
caaaucaguaugguggaga

SEQ ID NO: 1394098 - RNA, 19 nt, Artificial Sequence
  Description of Artificial Sequence: Synthetic oligonucleotide
aacgaucacuaaauaguaa

SEQ ID NO: 1394099 - RNA, 19 nt, Artificial Sequence
  Description of Artificial Sequence: Synthetic oligonucleotide
ccuagaaacauaaaagaua

SEQ ID NO: 1394100 - RNA, 19 nt, Artificial Sequence
  Description of Artificial Sequence: Synthetic oligonucleotide
cuagguacuugagucuuac

SEQ ID NO: 1394101 - RNA, 19 nt, Artificial Sequence
  Description of Artificial Sequence: Synthetic oligonucleotide
uacuccugggauuguuuga

SEQ ID NO: 1394102 - RNA, 19 nt, Artificial Sequence
  Description of Artificial Sequence: Synthetic oligonucleotide
cuaccugucugagaaaaca

SEQ ID NO: 1394103 - RNA, 19 nt, Artificial Sequence
  Description of Artificial Sequence: Synthetic oligonucleotide
ggaaauccuagguacuuga

SEQ ID NO: 1394104 - RNA, 19 nt, Artificial Sequence
  Description of Artificial Sequence: Synthetic oligonucleotide
gaaucggaagaugcauagc

SEQ ID NO: 1394105 - RNA, 19 nt, Artificial Sequence
  Description of Artificial Sequence: Synthetic oligonucleotide
cuggacaucauacucauuu

SEQ ID NO: 1394106 - RNA, 19 nt, Artificial Sequence
  Description of Artificial Sequence: Synthetic oligonucleotide
gcauaccucauuauaauuc

SEQ ID NO: 1394107 - RNA, 19 nt, Artificial Sequence
  Description of Artificial Sequence: Synthetic oligonucleotide
uguagggguuucuugcauu

SEQ ID NO: 1394108 - RNA, 19 nt, Artificial Sequence
  Description of Artificial Sequence: Synthetic oligonucleotide
gugugaggaaaccgugaag

SEQ ID NO: 1394109 - RNA, 19 nt, Artificial Sequence
  Description of Artificial Sequence: Synthetic oligonucleotide
gacuaccugucugagaaaa

SEQ ID NO: 1394110 - RNA, 19 nt, Artificial Sequence
  Description of Artificial Sequence: Synthetic oligonucleotide
cuacuuuaacuauugugcu

SEQ ID NO: 1394111 - RNA, 19 nt, Artificial Sequence
  Description of Artificial Sequence: Synthetic oligonucleotide
agcaaaggacuucccacau

SEQ ID NO: 1394112 - RNA, 19 nt, Artificial Sequence
  Description of Artificial Sequence: Synthetic oligonucleotide
uuguagggguuucuugcau

SEQ ID NO: 1394113 - RNA, 19 nt, Artificial Sequence
  Description of Artificial Sequence: Synthetic oligonucleotide
ugaacagguuaagaauuua

SEQ ID NO: 1394114 - RNA, 19 nt, Artificial Sequence
  Description of Artificial Sequence: Synthetic oligonucleotide
uguuuggagucagacugaa

SEQ ID NO: 1394115 - RNA, 19 nt, Artificial Sequence
  Description of Artificial Sequence: Synthetic oligonucleotide
acuaccugucugagaaaac

SEQ ID NO: 1394116 - RNA, 19 nt, Artificial Sequence
  Description of Artificial Sequence: Synthetic oligonucleotide
acuugagucuuaccagcaa

SEQ ID NO: 1394117 - RNA, 19 nt, Artificial Sequence
  Description of Artificial Sequence: Synthetic oligonucleotide
caucauacucauuucugua

SEQ ID NO: 1394118 - RNA, 19 nt, Artificial Sequence
  Description of Artificial Sequence: Synthetic oligonucleotide
guuugauccccagcaauca

SEQ ID NO: 1394119 - RNA, 19 nt, Artificial Sequence
  Description of Artificial Sequence: Synthetic oligonucleotide
gaauugauacauacugagu

SEQ ID NO: 1394120 - RNA, 19 nt, Artificial Sequence
  Description of Artificial Sequence: Synthetic oligonucleotide
auucuaggucaggauaacu

SEQ ID NO: 1394121 - RNA, 19 nt, Artificial Sequence
  Description of Artificial Sequence: Synthetic oligonucleotide
auacugaguuaggugugag

SEQ ID NO: 1394122 - RNA, 19 nt, Artificial Sequence
  Description of Artificial Sequence: Synthetic oligonucleotide
cuuaccagcaaaugaguau

SEQ ID NO: 1394123 - RNA, 19 nt, Artificial Sequence
  Description of Artificial Sequence: Synthetic oligonucleotide
cuccaccuaucccauacuc

SEQ ID NO: 1394124 - RNA, 19 nt, Artificial Sequence
  Description of Artificial Sequence: Synthetic oligonucleotide
uucuugcauugagaaucgg

SEQ ID NO: 1394125 - RNA, 19 nt, Artificial Sequence
  Description of Artificial Sequence: Synthetic oligonucleotide
ggguuucuugcauugagaa

SEQ ID NO: 1394126 - RNA, 19 nt, Artificial Sequence
  Description of Artificial Sequence: Synthetic oligonucleotide
cuaucccauacuccauuuc

SEQ ID NO: 1394127 - RNA, 19 nt, Artificial Sequence
  Description of Artificial Sequence: Synthetic oligonucleotide
gagcauaccucauuauaau

SEQ ID NO: 1394128 - RNA, 19 nt, Artificial Sequence
  Description of Artificial Sequence: Synthetic oligonucleotide
gguacccaaacaucaauua

SEQ ID NO: 1394129 - RNA, 19 nt, Artificial Sequence
  Description of Artificial Sequence: Synthetic oligonucleotide
accuaucccauacuccauu

SEQ ID NO: 1394130 - RNA, 19 nt, Artificial Sequence
  Description of Artificial Sequence: Synthetic oligonucleotide
uccuagguacuugagucuu

SEQ ID NO: 1394131 - RNA, 19 nt, Artificial Sequence
  Description of Artificial Sequence: Synthetic oligonucleotide
agaugauagaaagcaggua

SEQ ID NO: 1394132 - RNA, 19 nt, Artificial Sequence
  Description of Artificial Sequence: Synthetic oligonucleotide
augggauuauuaaggcaug

SEQ ID NO: 1394133 - RNA, 19 nt, Artificial Sequence
  Description of Artificial Sequence: Synthetic oligonucleotide
cugucucacagucugugaa

SEQ ID NO: 1394134 - RNA, 19 nt, Artificial Sequence
  Description of Artificial Sequence: Synthetic oligonucleotide
ugacugccuuuauuuuaga

SEQ ID NO: 1394135 - RNA, 19 nt, Artificial Sequence
  Description of Artificial Sequence: Synthetic oligonucleotide
acuccugggauuguuugau

SEQ ID NO: 1394136 - RNA, 19 nt, Artificial Sequence
  Description of Artificial Sequence: Synthetic oligonucleotide
gagaaucggaagaugcaua

SEQ ID NO: 1394137 - RNA, 19 nt, Artificial Sequence
  Description of Artificial Sequence: Synthetic oligonucleotide
ccugggauuguuugauccc

SEQ ID NO: 1394138 - RNA, 19 nt, Artificial Sequence
  Description of Artificial Sequence: Synthetic oligonucleotide
caaacaguuuaagaugaua

SEQ ID NO: 1394139 - RNA, 19 nt, Artificial Sequence
  Description of Artificial Sequence: Synthetic oligonucleotide
ggaauacacuucacuguag

SEQ ID NO: 1394140 - RNA, 19 nt, Artificial Sequence
  Description of Artificial Sequence: Synthetic oligonucleotide
guacccaaacaucaauuau

SEQ ID NO: 1394141 - RNA, 19 nt, Artificial Sequence
  Description of Artificial Sequence: Synthetic oligonucleotide
ggugugaggaaaccgugaa

SEQ ID NO: 1394142 - RNA, 19 nt, Artificial Sequence
  Description of Artificial Sequence: Synthetic oligonucleotide
cugguucaaaacuguagcu

SEQ ID NO: 1394143 - RNA, 19 nt, Artificial Sequence
  Description of Artificial Sequence: Synthetic oligonucleotide
uggguacaugauguuugga

SEQ ID NO: 1394144 - RNA, 19 nt, Artificial Sequence
  Description of Artificial Sequence: Synthetic oligonucleotide
cuuauaugccaauguuacu

SEQ ID NO: 1394145 - RNA, 19 nt, Artificial Sequence
  Description of Artificial Sequence: Synthetic oligonucleotide
uugcauacaaagggcuuuu

SEQ ID NO: 1394146 - RNA, 19 nt, Artificial Sequence
  Description of Artificial Sequence: Synthetic oligonucleotide
aaccuuugugugagcaaaa

SEQ ID NO: 1394147 - RNA, 19 nt, Artificial Sequence
  Description of Artificial Sequence: Synthetic oligonucleotide
caugauguuuggagucaga

SEQ ID NO: 1394148 - RNA, 19 nt, Artificial Sequence
  Description of Artificial Sequence: Synthetic oligonucleotide
caaggaaauccuagguacu

SEQ ID NO: 1394149 - RNA, 19 nt, Artificial Sequence
  Description of Artificial Sequence: Synthetic oligonucleotide
ugacuaccugucugagaaa

SEQ ID NO: 1394150 - RNA, 19 nt, Artificial Sequence
  Description of Artificial Sequence: Synthetic oligonucleotide
aggccucauaucugucuga

SEQ ID NO: 1394151 - RNA, 19 nt, Artificial Sequence
  Description of Artificial Sequence: Synthetic oligonucleotide
cugaguuaggugugaggaa

SEQ ID NO: 1394152 - RNA, 19 nt, Artificial Sequence
  Description of Artificial Sequence: Synthetic oligonucleotide
caaaauacugaaaguccuu

SEQ ID NO: 1394153 - RNA, 19 nt, Artificial Sequence
  Description of Artificial Sequence: Synthetic oligonucleotide
aggugugaggaaaccguga

SEQ ID NO: 1394154 - RNA, 19 nt, Artificial Sequence
  Description of Artificial Sequence: Synthetic oligonucleotide
cgagaaaauuagcaaagga

SEQ ID NO: 1394155 - RNA, 19 nt, Artificial Sequence
  Description of Artificial Sequence: Synthetic oligonucleotide
caucugguucaaaacugua

SEQ ID NO: 1394156 - RNA, 19 nt, Artificial Sequence
  Description of Artificial Sequence: Synthetic oligonucleotide
ugcuuggguacaugauguu

SEQ ID NO: 1394157 - RNA, 19 nt, Artificial Sequence
  Description of Artificial Sequence: Synthetic oligonucleotide
gugcuuggguacaugaugu

SEQ ID NO: 1394158 - RNA, 19 nt, Artificial Sequence
  Description of Artificial Sequence: Synthetic oligonucleotide
ccuuuuacucauuccagua

SEQ ID NO: 1394159 - RNA, 19 nt, Artificial Sequence
  Description of Artificial Sequence: Synthetic oligonucleotide
uuccaguauuagguauuau

SEQ ID NO: 1394160 - RNA, 19 nt, Artificial Sequence
  Description of Artificial Sequence: Synthetic oligonucleotide
cuguucuaaucuacagcua

SEQ ID NO: 1394161 - RNA, 19 nt, Artificial Sequence
  Description of Artificial Sequence: Synthetic oligonucleotide
gugggaugaauaaaaccau

SEQ ID NO: 1394162 - RNA, 19 nt, Artificial Sequence
  Description of Artificial Sequence: Synthetic oligonucleotide
ccaugggauuauuaaggca

SEQ ID NO: 1394163 - RNA, 19 nt, Artificial Sequence
  Description of Artificial Sequence: Synthetic oligonucleotide
gcuugcauacuccugggau

SEQ ID NO: 1394164 - RNA, 19 nt, Artificial Sequence
  Description of Artificial Sequence: Synthetic oligonucleotide
gcaaaucaguaugguggag

SEQ ID NO: 1394165 - RNA, 19 nt, Artificial Sequence
  Description of Artificial Sequence: Synthetic oligonucleotide
aggaucuuguacacugcua

SEQ ID NO: 1394166 - RNA, 19 nt, Artificial Sequence
  Description of Artificial Sequence: Synthetic oligonucleotide
caggaucuuguacacugcu

SEQ ID NO: 1394167 - RNA, 19 nt, Artificial Sequence
  Description of Artificial Sequence: Synthetic oligonucleotide
caaaacuugugggaugaau

SEQ ID NO: 1394168 - RNA, 19 nt, Artificial Sequence
  Description of Artificial Sequence: Synthetic oligonucleotide
auacugucucacagucugu

SEQ ID NO: 1394169 - RNA, 19 nt, Artificial Sequence
  Description of Artificial Sequence: Synthetic oligonucleotide
ugcauacuccugggauugu

SEQ ID NO: 1394170 - RNA, 19 nt, Artificial Sequence
  Description of Artificial Sequence: Synthetic oligonucleotide
aucagacaacuaauauaua

SEQ ID NO: 1394171 - RNA, 19 nt, Artificial Sequence
  Description of Artificial Sequence: Synthetic oligonucleotide
gccuuuauuuuagaguccu

SEQ ID NO: 1394172 - RNA, 19 nt, Artificial Sequence
  Description of Artificial Sequence: Synthetic oligonucleotide
ccacauaucuuacacacuu

SEQ ID NO: 1394173 - RNA, 19 nt, Artificial Sequence
  Description of Artificial Sequence: Synthetic oligonucleotide
cacaggcacuccaccuauc

SEQ ID NO: 1394174 - RNA, 19 nt, Artificial Sequence
  Description of Artificial Sequence: Synthetic oligonucleotide
ugcuagugcuuggguacau

SEQ ID NO: 1394175 - RNA, 19 nt, Artificial Sequence
  Description of Artificial Sequence: Synthetic oligonucleotide
gggguuucuugcauugaga

SEQ ID NO: 1394176 - RNA, 19 nt, Artificial Sequence
  Description of Artificial Sequence: Synthetic oligonucleotide
caguaugguggagagcaua

SEQ ID NO: 1394177 - RNA, 19 nt, Artificial Sequence
  Description of Artificial Sequence: Synthetic oligonucleotide
ccagucaaucuauuuuaaa

SEQ ID NO: 1394178 - RNA, 19 nt, Artificial Sequence
  Description of Artificial Sequence: Synthetic oligonucleotide
gcaaaugaguauggucauc

SEQ ID NO: 1394179 - RNA, 19 nt, Artificial Sequence
  Description of Artificial Sequence: Synthetic oligonucleotide
cagguacccaaacaucaau

SEQ ID NO: 1394180 - RNA, 19 nt, Artificial Sequence
  Description of Artificial Sequence: Synthetic oligonucleotide
gcuagugcuuggguacaug

SEQ ID NO: 1394181 - RNA, 19 nt, Artificial Sequence
  Description of Artificial Sequence: Synthetic oligonucleotide
gugcuagugcuuggguaca

SEQ ID NO: 1394182 - RNA, 19 nt, Artificial Sequence
  Description of Artificial Sequence: Synthetic oligonucleotide
caguuaugacuaccugucu

SEQ ID NO: 1394183 - RNA, 19 nt, Artificial Sequence
  Description of Artificial Sequence: Synthetic oligonucleotide
guggagagcauaccucauu

SEQ ID NO: 1394184 - RNA, 19 nt, Artificial Sequence
  Description of Artificial Sequence: Synthetic oligonucleotide
ggccucauaucugucugaa

SEQ ID NO: 1394185 - RNA, 19 nt, Artificial Sequence
  Description of Artificial Sequence: Synthetic oligonucleotide
ggagagcauaccucauuau

SEQ ID NO: 1394186 - RNA, 19 nt, Artificial Sequence
  Description of Artificial Sequence: Synthetic oligonucleotide
cuauugugcuggacaucau

SEQ ID NO: 1394187 - RNA, 19 nt, Artificial Sequence
  Description of Artificial Sequence: Synthetic oligonucleotide
gguuaacaucagacaacua

SEQ ID NO: 1394188 - RNA, 19 nt, Artificial Sequence
  Description of Artificial Sequence: Synthetic oligonucleotide
caccuaucccauacuccau

SEQ ID NO: 1394189 - RNA, 19 nt, Artificial Sequence
  Description of Artificial Sequence: Synthetic oligonucleotide
ccucaaauuuguagggguu

SEQ ID NO: 1394190 - RNA, 19 nt, Artificial Sequence
  Description of Artificial Sequence: Synthetic oligonucleotide
cuuacacacuuuggauuuu

SEQ ID NO: 1394191 - RNA, 19 nt, Artificial Sequence
  Description of Artificial Sequence: Synthetic oligonucleotide
ccuaucccauacuccauuu

SEQ ID NO: 1394192 - RNA, 19 nt, Artificial Sequence
  Description of Artificial Sequence: Synthetic oligonucleotide
gcauacuccugggauuguu

SEQ ID NO: 1394193 - RNA, 19 nt, Artificial Sequence
  Description of Artificial Sequence: Synthetic oligonucleotide
aagaaagcuuaacaggucg

SEQ ID NO: 1394194 - RNA, 19 nt, Artificial Sequence
  Description of Artificial Sequence: Synthetic oligonucleotide
ucuaccaagagccugacac

SEQ ID NO: 1394195 - RNA, 19 nt, Artificial Sequence
  Description of Artificial Sequence: Synthetic oligonucleotide
aaagacaccaaggaauugg

SEQ ID NO: 1394196 - RNA, 19 nt, Artificial Sequence
  Description of Artificial Sequence: Synthetic oligonucleotide
auaacuagaaacgacagug

SEQ ID NO: 1394197 - RNA, 19 nt, Artificial Sequence
  Description of Artificial Sequence: Synthetic oligonucleotide
auuagguauguccugagag

SEQ ID NO: 1394198 - RNA, 19 nt, Artificial Sequence
  Description of Artificial Sequence: Synthetic oligonucleotide
aaaguuuccggagaaacag

SEQ ID NO: 1394199 - RNA, 19 nt, Artificial Sequence
  Description of Artificial Sequence: Synthetic oligonucleotide
aguugugccagaugaaccc

SEQ ID NO: 1394200 - RNA, 19 nt, Artificial Sequence
  Description of Artificial Sequence: Synthetic oligonucleotide
gauauauauguccagguga

SEQ ID NO: 1394201 - RNA, 19 nt, Artificial Sequence
  Description of Artificial Sequence: Synthetic oligonucleotide
aagcuuaacaggucggagg

SEQ ID NO: 1394202 - RNA, 19 nt, Artificial Sequence
  Description of Artificial Sequence: Synthetic oligonucleotide
uaguacauuagguaugucc

SEQ ID NO: 1394203 - RNA, 19 nt, Artificial Sequence
  Description of Artificial Sequence: Synthetic oligonucleotide
ucuucgauauauaugucca

SEQ ID NO: 1394204 - RNA, 19 nt, Artificial Sequence
  Description of Artificial Sequence: Synthetic oligonucleotide
ucggcgaagagucagaggu

SEQ ID NO: 1394205 - RNA, 19 nt, Artificial Sequence
  Description of Artificial Sequence: Synthetic oligonucleotide
agauaucuaguacauuagg

SEQ ID NO: 1394206 - RNA, 19 nt, Artificial Sequence
  Description of Artificial Sequence: Synthetic oligonucleotide
aauaacuagaaacgacagu

SEQ ID NO: 1394207 - RNA, 19 nt, Artificial Sequence
  Description of Artificial Sequence: Synthetic oligonucleotide
gaccggaauaacuagaaac

SEQ ID NO: 1394208 - RNA, 19 nt, Artificial Sequence
  Description of Artificial Sequence: Synthetic oligonucleotide
auauauguccaggugaggg

SEQ ID NO: 1394209 - RNA, 19 nt, Artificial Sequence
  Description of Artificial Sequence: Synthetic oligonucleotide
uaacuagaaacgacagugg

SEQ ID NO: 1394210 - RNA, 19 nt, Artificial Sequence
  Description of Artificial Sequence: Synthetic oligonucleotide
cuagaaacgacaguggggc

SEQ ID NO: 1394211 - RNA, 19 nt, Artificial Sequence
  Description of Artificial Sequence: Synthetic oligonucleotide
acuggcuaggacucaaccc

SEQ ID NO: 1394212 - RNA, 19 nt, Artificial Sequence
  Description of Artificial Sequence: Synthetic oligonucleotide
caggacaaggacuaugugg

SEQ ID NO: 1394213 - RNA, 19 nt, Artificial Sequence
  Description of Artificial Sequence: Synthetic oligonucleotide
uucgauauauauguccagg

SEQ ID NO: 1394214 - RNA, 19 nt, Artificial Sequence
  Description of Artificial Sequence: Synthetic oligonucleotide
ugaugguuccuacagguca

SEQ ID NO: 1394215 - RNA, 19 nt, Artificial Sequence
  Description of Artificial Sequence: Synthetic oligonucleotide
uauauguccaggugagggg

SEQ ID NO: 1394216 - RNA, 19 nt, Artificial Sequence
  Description of Artificial Sequence: Synthetic oligonucleotide
uaucuaguacauuagguau

SEQ ID NO: 1394217 - RNA, 19 nt, Artificial Sequence
  Description of Artificial Sequence: Synthetic oligonucleotide
aggacuauguggcaagagg

SEQ ID NO: 1394218 - RNA, 19 nt, Artificial Sequence
  Description of Artificial Sequence: Synthetic oligonucleotide
agaauggaaaccaucgaac

SEQ ID NO: 1394219 - RNA, 19 nt, Artificial Sequence
  Description of Artificial Sequence: Synthetic oligonucleotide
aaccaucgaacugaagggc

SEQ ID NO: 1394220 - RNA, 19 nt, Artificial Sequence
  Description of Artificial Sequence: Synthetic oligonucleotide
aacaacaguaaacaauguu

SEQ ID NO: 1394221 - RNA, 19 nt, Artificial Sequence
  Description of Artificial Sequence: Synthetic oligonucleotide
aaggaguccuauuugggga

SEQ ID NO: 1394222 - RNA, 19 nt, Artificial Sequence
  Description of Artificial Sequence: Synthetic oligonucleotide
ugacaaaauuucagcagag

SEQ ID NO: 1394223 - RNA, 19 nt, Artificial Sequence
  Description of Artificial Sequence: Synthetic oligonucleotide
uuuaacagccccagcauuc

SEQ ID NO: 1394224 - RNA, 19 nt, Artificial Sequence
  Description of Artificial Sequence: Synthetic oligonucleotide
gcuacuguuagcuucacgc

SEQ ID NO: 1394225 - RNA, 19 nt, Artificial Sequence
  Description of Artificial Sequence: Synthetic oligonucleotide
uccgugacaaaauuucagc

SEQ ID NO: 1394226 - RNA, 19 nt, Artificial Sequence
  Description of Artificial Sequence: Synthetic oligonucleotide
auaucuaguacauuaggua

SEQ ID NO: 1394227 - RNA, 19 nt, Artificial Sequence
  Description of Artificial Sequence: Synthetic oligonucleotide
accggaauaacuagaaacg

SEQ ID NO: 1394228 - RNA, 19 nt, Artificial Sequence
  Description of Artificial Sequence: Synthetic oligonucleotide
aacaauguugaaucuggaa

SEQ ID NO: 1394229 - RNA, 19 nt, Artificial Sequence
  Description of Artificial Sequence: Synthetic oligonucleotide
agggucucuuuucaagugc

SEQ ID NO: 1394230 - RNA, 19 nt, Artificial Sequence
  Description of Artificial Sequence: Synthetic oligonucleotide
gagaaguugucacuaagca

SEQ ID NO: 1394231 - RNA, 19 nt, Artificial Sequence
  Description of Artificial Sequence: Synthetic oligonucleotide
acgacaguggggcuguagc

SEQ ID NO: 1394232 - RNA, 19 nt, Artificial Sequence
  Description of Artificial Sequence: Synthetic oligonucleotide
gagguaguggccuggaaug

SEQ ID NO: 1394233 - RNA, 19 nt, Artificial Sequence
  Description of Artificial Sequence: Synthetic oligonucleotide
aguacauuagguauguccu

SEQ ID NO: 1394234 - RNA, 19 nt, Artificial Sequence
  Description of Artificial Sequence: Synthetic oligonucleotide
gacccaagguccucgaggg

SEQ ID NO: 1394235 - RNA, 19 nt, Artificial Sequence
  Description of Artificial Sequence: Synthetic oligonucleotide
aacugcaaggccacucucc

SEQ ID NO: 1394236 - RNA, 19 nt, Artificial Sequence
  Description of Artificial Sequence: Synthetic oligonucleotide
auauauauguccaggugag

SEQ ID NO: 1394237 - RNA, 19 nt, Artificial Sequence
  Description of Artificial Sequence: Synthetic oligonucleotide
uccgaagccuuuaaacugc

SEQ ID NO: 1394238 - RNA, 19 nt, Artificial Sequence
  Description of Artificial Sequence: Synthetic oligonucleotide
cuuuuggacagugaggcag

SEQ ID NO: 1394239 - RNA, 19 nt, Artificial Sequence
  Description of Artificial Sequence: Synthetic oligonucleotide
aaguguggaucuucgauau

SEQ ID NO: 1394240 - RNA, 19 nt, Artificial Sequence
  Description of Artificial Sequence: Synthetic oligonucleotide
uguagcucgugacugcagc

SEQ ID NO: 1394241 - RNA, 19 nt, Artificial Sequence
  Description of Artificial Sequence: Synthetic oligonucleotide
ucgauauauauguccaggu

SEQ ID NO: 1394242 - RNA, 19 nt, Artificial Sequence
  Description of Artificial Sequence: Synthetic oligonucleotide
uaaacugcaaggccacucu

SEQ ID NO: 1394243 - RNA, 19 nt, Artificial Sequence
  Description of Artificial Sequence: Synthetic oligonucleotide
uucacgccuguuuuaacag

SEQ ID NO: 1394244 - RNA, 19 nt, Artificial Sequence
  Description of Artificial Sequence: Synthetic oligonucleotide
aaagcuuaacaggucggag

SEQ ID NO: 1394245 - RNA, 19 nt, Artificial Sequence
  Description of Artificial Sequence: Synthetic oligonucleotide
ucucaggccuuauucggcg

SEQ ID NO: 1394246 - RNA, 19 nt, Artificial Sequence
  Description of Artificial Sequence: Synthetic oligonucleotide
gaaccaacguucaugcugc

SEQ ID NO: 1394247 - RNA, 19 nt, Artificial Sequence
  Description of Artificial Sequence: Synthetic oligonucleotide
ucacauaguauccgugaca

SEQ ID NO: 1394248 - RNA, 19 nt, Artificial Sequence
  Description of Artificial Sequence: Synthetic oligonucleotide
uuaacaggucggaggacag

SEQ ID NO: 1394249 - RNA, 19 nt, Artificial Sequence
  Description of Artificial Sequence: Synthetic oligonucleotide
cugagagcucccaaguucc

SEQ ID NO: 1394250 - RNA, 19 nt, Artificial Sequence
  Description of Artificial Sequence: Synthetic oligonucleotide
agauguggggcagaggaac

SEQ ID NO: 1394251 - RNA, 19 nt, Artificial Sequence
  Description of Artificial Sequence: Synthetic oligonucleotide
gagauaucuaguacauuag

SEQ ID NO: 1394252 - RNA, 19 nt, Artificial Sequence
  Description of Artificial Sequence: Synthetic oligonucleotide
uuauucggcgaagagucag

SEQ ID NO: 1394253 - RNA, 19 nt, Artificial Sequence
  Description of Artificial Sequence: Synthetic oligonucleotide
ucuaguacauuagguaugu

SEQ ID NO: 1394254 - RNA, 19 nt, Artificial Sequence
  Description of Artificial Sequence: Synthetic oligonucleotide
uucuaguggggugacauca

SEQ ID NO: 1394255 - RNA, 19 nt, Artificial Sequence
  Description of Artificial Sequence: Synthetic oligonucleotide
agcuuaacaggucggagga

SEQ ID NO: 1394256 - RNA, 19 nt, Artificial Sequence
  Description of Artificial Sequence: Synthetic oligonucleotide
uccuauuuggggaggcaag

SEQ ID NO: 1394257 - RNA, 19 nt, Artificial Sequence
  Description of Artificial Sequence: Synthetic oligonucleotide
ucaugcugcgacuugcugu

SEQ ID NO: 1394258 - RNA, 19 nt, Artificial Sequence
  Description of Artificial Sequence: Synthetic oligonucleotide
gaaacagggccaaagguuc

SEQ ID NO: 1394259 - RNA, 19 nt, Artificial Sequence
  Description of Artificial Sequence: Synthetic oligonucleotide
gaaguggucggccggaaac

SEQ ID NO: 1394260 - RNA, 19 nt, Artificial Sequence
  Description of Artificial Sequence: Synthetic oligonucleotide
aguuuccggagaaacaggg

SEQ ID NO: 1394261 - RNA, 19 nt, Artificial Sequence
  Description of Artificial Sequence: Synthetic oligonucleotide
ggaucuucgauauauaugu

SEQ ID NO: 1394262 - RNA, 19 nt, Artificial Sequence
  Description of Artificial Sequence: Synthetic oligonucleotide
cagucaagaggaagcagcg

SEQ ID NO: 1394263 - RNA, 19 nt, Artificial Sequence
  Description of Artificial Sequence: Synthetic oligonucleotide
acuauguggcaagagguag

SEQ ID NO: 1394264 - RNA, 19 nt, Artificial Sequence
  Description of Artificial Sequence: Synthetic oligonucleotide
uggucggccggaaacaaca

SEQ ID NO: 1394265 - RNA, 19 nt, Artificial Sequence
  Description of Artificial Sequence: Synthetic oligonucleotide
uccuagcccgaucugagga

SEQ ID NO: 1394266 - RNA, 19 nt, Artificial Sequence
  Description of Artificial Sequence: Synthetic oligonucleotide
gguucauggguuuugcuug

SEQ ID NO: 1394267 - RNA, 19 nt, Artificial Sequence
  Description of Artificial Sequence: Synthetic oligonucleotide
cuccgaagccuuuaaacug

SEQ ID NO: 1394268 - RNA, 19 nt, Artificial Sequence
  Description of Artificial Sequence: Synthetic oligonucleotide
cacgccuguuuuaacagcc

SEQ ID NO: 1394269 - RNA, 19 nt, Artificial Sequence
  Description of Artificial Sequence: Synthetic oligonucleotide
cacgugaugguuccuacag

SEQ ID NO: 1394270 - RNA, 19 nt, Artificial Sequence
  Description of Artificial Sequence: Synthetic oligonucleotide
ggagauaucuaguacauua

SEQ ID NO: 1394271 - RNA, 19 nt, Artificial Sequence
  Description of Artificial Sequence: Synthetic oligonucleotide
cuaaaguggacucgggcuc

SEQ ID NO: 1394272 - RNA, 19 nt, Artificial Sequence
  Description of Artificial Sequence: Synthetic oligonucleotide
cauaguauccgugacaaaa

SEQ ID NO: 1394273 - RNA, 19 nt, Artificial Sequence
  Description of Artificial Sequence: Synthetic oligonucleotide
cuaggacucaacccuagug

SEQ ID NO: 1394274 - RNA, 19 nt, Artificial Sequence
  Description of Artificial Sequence: Synthetic oligonucleotide
uauauauguccaggugagg

SEQ ID NO: 1394275 - RNA, 19 nt, Artificial Sequence
  Description of Artificial Sequence: Synthetic oligonucleotide
guuccagucaagaggaagc

SEQ ID NO: 1394276 - RNA, 19 nt, Artificial Sequence
  Description of Artificial Sequence: Synthetic oligonucleotide
ccuuauucggcgaagaguc

SEQ ID NO: 1394277 - RNA, 19 nt, Artificial Sequence
  Description of Artificial Sequence: Synthetic oligonucleotide
ggccaaaggaagaugaggg

SEQ ID NO: 1394278 - RNA, 19 nt, Artificial Sequence
  Description of Artificial Sequence: Synthetic oligonucleotide
gucaagaggaagcagcgga

SEQ ID NO: 1394279 - RNA, 19 nt, Artificial Sequence
  Description of Artificial Sequence: Synthetic oligonucleotide
gacgacuacaccuccccug

SEQ ID NO: 1394280 - RNA, 19 nt, Artificial Sequence
  Description of Artificial Sequence: Synthetic oligonucleotide
ucggccggaaacaacagua

SEQ ID NO: 1394281 - RNA, 19 nt, Artificial Sequence
  Description of Artificial Sequence: Synthetic oligonucleotide
ucuaguggggugacaucag

SEQ ID NO: 1394282 - RNA, 19 nt, Artificial Sequence
  Description of Artificial Sequence: Synthetic oligonucleotide
cugugaggcccuuaggcag

SEQ ID NO: 1394283 - RNA, 19 nt, Artificial Sequence
  Description of Artificial Sequence: Synthetic oligonucleotide
gacucaacccuagugcugc

SEQ ID NO: 1394284 - RNA, 19 nt, Artificial Sequence
  Description of Artificial Sequence: Synthetic oligonucleotide
ggaauaacuagaaacgaca

SEQ ID NO: 1394285 - RNA, 19 nt, Artificial Sequence
  Description of Artificial Sequence: Synthetic oligonucleotide
cuucgauauauauguccag

SEQ ID NO: 1394286 - RNA, 19 nt, Artificial Sequence
  Description of Artificial Sequence: Synthetic oligonucleotide
acacuggaagugcugcagg

SEQ ID NO: 1394287 - RNA, 19 nt, Artificial Sequence
  Description of Artificial Sequence: Synthetic oligonucleotide
aggacucaacccuagugcu

SEQ ID NO: 1394288 - RNA, 19 nt, Artificial Sequence
  Description of Artificial Sequence: Synthetic oligonucleotide
accugcacggaaguggucg

SEQ ID NO: 1394289 - RNA, 19 nt, Artificial Sequence
  Description of Artificial Sequence: Synthetic oligonucleotide
aagcagcggaagcuucugg

SEQ ID NO: 1394290 - RNA, 19 nt, Artificial Sequence
  Description of Artificial Sequence: Synthetic oligonucleotide
aggaguccuauuuggggag

SEQ ID NO: 1394291 - RNA, 19 nt, Artificial Sequence
  Description of Artificial Sequence: Synthetic oligonucleotide
agaaagcuuaacaggucgg

SEQ ID NO: 1394292 - RNA, 19 nt, Artificial Sequence
  Description of Artificial Sequence: Synthetic oligonucleotide
acauuagguauguccugag

SEQ ID NO: 1394293 - RNA, 19 nt, Artificial Sequence
  Description of Artificial Sequence: Synthetic oligonucleotide
gcugaguugugccagauga

SEQ ID NO: 1394294 - RNA, 19 nt, Artificial Sequence
  Description of Artificial Sequence: Synthetic oligonucleotide
gaguugugccagaugaacc

SEQ ID NO: 1394295 - RNA, 19 nt, Artificial Sequence
  Description of Artificial Sequence: Synthetic oligonucleotide
uuccggagaaacagggcca

SEQ ID NO: 1394296 - RNA, 19 nt, Artificial Sequence
  Description of Artificial Sequence: Synthetic oligonucleotide
gagggucucuuuucaagug

SEQ ID NO: 1394297 - RNA, 19 nt, Artificial Sequence
  Description of Artificial Sequence: Synthetic oligonucleotide
ucacggaccugcacggaag

SEQ ID NO: 1394298 - RNA, 19 nt, Artificial Sequence
  Description of Artificial Sequence: Synthetic oligonucleotide
accacaaggcgguagacuu

SEQ ID NO: 1394299 - RNA, 19 nt, Artificial Sequence
  Description of Artificial Sequence: Synthetic oligonucleotide
guagcucgugacugcagcg

SEQ ID NO: 1394300 - RNA, 19 nt, Artificial Sequence
  Description of Artificial Sequence: Synthetic oligonucleotide
gaggacgcugaguugugcc

SEQ ID NO: 1394301 - RNA, 19 nt, Artificial Sequence
  Description of Artificial Sequence: Synthetic oligonucleotide
aggaacccuggcuuuguuc

SEQ ID NO: 1394302 - RNA, 19 nt, Artificial Sequence
  Description of Artificial Sequence: Synthetic oligonucleotide
uuaggcaguuccagucaag

SEQ ID NO: 1394303 - RNA, 19 nt, Artificial Sequence
  Description of Artificial Sequence: Synthetic oligonucleotide
uuacugccgucugagcugg

SEQ ID NO: 1394304 - RNA, 19 nt, Artificial Sequence
  Description of Artificial Sequence: Synthetic oligonucleotide
ccagucaagaggaagcagc

SEQ ID NO: 1394305 - RNA, 19 nt, Artificial Sequence
  Description of Artificial Sequence: Synthetic oligonucleotide
uucuagagcuacuguuagc

SEQ ID NO: 1394306 - RNA, 19 nt, Artificial Sequence
  Description of Artificial Sequence: Synthetic oligonucleotide
cugacgacuacaccucccc

SEQ ID NO: 1394307 - RNA, 19 nt, Artificial Sequence
  Description of Artificial Sequence: Synthetic oligonucleotide
gaagagucagaggugguuc

SEQ ID NO: 1394308 - RNA, 19 nt, Artificial Sequence
  Description of Artificial Sequence: Synthetic oligonucleotide
agacuugguugguacaaga

SEQ ID NO: 1394309 - RNA, 19 nt, Artificial Sequence
  Description of Artificial Sequence: Synthetic oligonucleotide
agaaacgacaguggggcug

SEQ ID NO: 1394310 - RNA, 19 nt, Artificial Sequence
  Description of Artificial Sequence: Synthetic oligonucleotide
aagguucauggguuuugcu

SEQ ID NO: 1394311 - RNA, 19 nt, Artificial Sequence
  Description of Artificial Sequence: Synthetic oligonucleotide
uauucggcgaagagucaga

SEQ ID NO: 1394312 - RNA, 19 nt, Artificial Sequence
  Description of Artificial Sequence: Synthetic oligonucleotide
guacauuagguauguccug

SEQ ID NO: 1394313 - RNA, 19 nt, Artificial Sequence
  Description of Artificial Sequence: Synthetic oligonucleotide
agguucauggguuuugcuu

SEQ ID NO: 1394314 - RNA, 19 nt, Artificial Sequence
  Description of Artificial Sequence: Synthetic oligonucleotide
cacaaggcgguagacuugg

SEQ ID NO: 1394315 - RNA, 19 nt, Artificial Sequence
  Description of Artificial Sequence: Synthetic oligonucleotide
cuucacgccuguuuuaaca

SEQ ID NO: 1394316 - RNA, 19 nt, Artificial Sequence
  Description of Artificial Sequence: Synthetic oligonucleotide
ugguucacauaguauccgu

SEQ ID NO: 1394317 - RNA, 19 nt, Artificial Sequence
  Description of Artificial Sequence: Synthetic oligonucleotide
uucggcgaagagucagagg

SEQ ID NO: 1394318 - RNA, 19 nt, Artificial Sequence
  Description of Artificial Sequence: Synthetic oligonucleotide
uggacaguuaugguccuga

SEQ ID NO: 1394319 - RNA, 19 nt, Artificial Sequence
  Description of Artificial Sequence: Synthetic oligonucleotide
ucgaacugaagggccaaag

SEQ ID NO: 1394320 - RNA, 19 nt, Artificial Sequence
  Description of Artificial Sequence: Synthetic oligonucleotide
gacucaggcagugcuuugg

SEQ ID NO: 1394321 - RNA, 19 nt, Artificial Sequence
  Description of Artificial Sequence: Synthetic oligonucleotide
uaguauccgugacaaaauu

SEQ ID NO: 1394322 - RNA, 19 nt, Artificial Sequence
  Description of Artificial Sequence: Synthetic oligonucleotide
uauucacagucauccauuu

SEQ ID NO: 1394323 - RNA, 19 nt, Artificial Sequence
  Description of Artificial Sequence: Synthetic oligonucleotide
aggaauuggagaaguuguc

SEQ ID NO: 1394324 - RNA, 19 nt, Artificial Sequence
  Description of Artificial Sequence: Synthetic oligonucleotide
ucugagcuggacaguuaug

SEQ ID NO: 1394325 - RNA, 19 nt, Artificial Sequence
  Description of Artificial Sequence: Synthetic oligonucleotide
gaaagcuuaacaggucgga

SEQ ID NO: 1394326 - RNA, 19 nt, Artificial Sequence
  Description of Artificial Sequence: Synthetic oligonucleotide
uuccgcagugccaucuucu

SEQ ID NO: 1394327 - RNA, 19 nt, Artificial Sequence
  Description of Artificial Sequence: Synthetic oligonucleotide
gugguucacauaguauccg

SEQ ID NO: 1394328 - RNA, 19 nt, Artificial Sequence
  Description of Artificial Sequence: Synthetic oligonucleotide
ucacgccuguuuuaacagc

SEQ ID NO: 1394329 - RNA, 19 nt, Artificial Sequence
  Description of Artificial Sequence: Synthetic oligonucleotide
ugagcuggacaguuauggu

SEQ ID NO: 1394330 - RNA, 19 nt, Artificial Sequence
  Description of Artificial Sequence: Synthetic oligonucleotide
uggcuaaaguggacucggg

SEQ ID NO: 1394331 - RNA, 19 nt, Artificial Sequence
  Description of Artificial Sequence: Synthetic oligonucleotide
agcuacuguuagcuucacg

SEQ ID NO: 1394332 - RNA, 19 nt, Artificial Sequence
  Description of Artificial Sequence: Synthetic oligonucleotide
aaccacaaggcgguagacu

SEQ ID NO: 1394333 - RNA, 19 nt, Artificial Sequence
  Description of Artificial Sequence: Synthetic oligonucleotide
cuuaacaggucggaggaca

SEQ ID NO: 1394334 - RNA, 19 nt, Artificial Sequence
  Description of Artificial Sequence: Synthetic oligonucleotide
agcucgugacugcagcguc

SEQ ID NO: 1394335 - RNA, 19 nt, Artificial Sequence
  Description of Artificial Sequence: Synthetic oligonucleotide
aguuaugguccugacgacu

SEQ ID NO: 1394336 - RNA, 19 nt, Artificial Sequence
  Description of Artificial Sequence: Synthetic oligonucleotide
uggcuuacugccgucugag

SEQ ID NO: 1394337 - RNA, 19 nt, Artificial Sequence
  Description of Artificial Sequence: Synthetic oligonucleotide
ggagaaguugucacuaagc

SEQ ID NO: 1394338 - RNA, 19 nt, Artificial Sequence
  Description of Artificial Sequence: Synthetic oligonucleotide
gaugguuccuacaggucac

SEQ ID NO: 1394339 - RNA, 19 nt, Artificial Sequence
  Description of Artificial Sequence: Synthetic oligonucleotide
uuaacagccccagcauucu

SEQ ID NO: 1394340 - RNA, 19 nt, Artificial Sequence
  Description of Artificial Sequence: Synthetic oligonucleotide
ggcgaagagucagaggugg

SEQ ID NO: 1394341 - RNA, 19 nt, Artificial Sequence
  Description of Artificial Sequence: Synthetic oligonucleotide
cuccccuggggagagaugc

SEQ ID NO: 1394342 - RNA, 19 nt, Artificial Sequence
  Description of Artificial Sequence: Synthetic oligonucleotide
uuaugguccugacgacuac

SEQ ID NO: 1394343 - RNA, 19 nt, Artificial Sequence
  Description of Artificial Sequence: Synthetic oligonucleotide
agucaagaggaagcagcgg

SEQ ID NO: 1394344 - RNA, 19 nt, Artificial Sequence
  Description of Artificial Sequence: Synthetic oligonucleotide
aaccaacguucaugcugcg

SEQ ID NO: 1394345 - RNA, 19 nt, Artificial Sequence
  Description of Artificial Sequence: Synthetic oligonucleotide
cacccggucaccuuggaga

SEQ ID NO: 1394346 - RNA, 19 nt, Artificial Sequence
  Description of Artificial Sequence: Synthetic oligonucleotide
uaugguccugacgacuaca

SEQ ID NO: 1394347 - RNA, 19 nt, Artificial Sequence
  Description of Artificial Sequence: Synthetic oligonucleotide
cacauaguauccgugacaa

SEQ ID NO: 1394348 - RNA, 19 nt, Artificial Sequence
  Description of Artificial Sequence: Synthetic oligonucleotide
ccaacguucaugcugcgac

SEQ ID NO: 1394349 - RNA, 19 nt, Artificial Sequence
  Description of Artificial Sequence: Synthetic oligonucleotide
augguccugacgacuacac

SEQ ID NO: 1394350 - RNA, 19 nt, Artificial Sequence
  Description of Artificial Sequence: Synthetic oligonucleotide
ugcugcgacuugcuguucu

SEQ ID NO: 1394351 - RNA, 19 nt, Artificial Sequence
  Description of Artificial Sequence: Synthetic oligonucleotide
acauuggcauugaggggcc

SEQ ID NO: 1394352 - RNA, 19 nt, Artificial Sequence
  Description of Artificial Sequence: Synthetic oligonucleotide
ugguccugacgacuacacc

SEQ ID NO: 1394353 - RNA, 19 nt, Artificial Sequence
  Description of Artificial Sequence: Synthetic oligonucleotide
ggcuccgaagccuuuaaac

SEQ ID NO: 1394354 - RNA, 19 nt, Artificial Sequence
  Description of Artificial Sequence: Synthetic oligonucleotide
uccugacgacuacaccucc

SEQ ID NO: 1394355 - RNA, 19 nt, Artificial Sequence
  Description of Artificial Sequence: Synthetic oligonucleotide
gauguggggcagaggaacc

SEQ ID NO: 1394356 - RNA, 19 nt, Artificial Sequence
  Description of Artificial Sequence: Synthetic oligonucleotide
cagcggaagcuucuggaag

SEQ ID NO: 1394357 - RNA, 19 nt, Artificial Sequence
  Description of Artificial Sequence: Synthetic oligonucleotide
aaaguggacucgggcuccg

SEQ ID NO: 1394358 - RNA, 19 nt, Artificial Sequence
  Description of Artificial Sequence: Synthetic oligonucleotide
agaggacgcugaguugugc

SEQ ID NO: 1394359 - RNA, 19 nt, Artificial Sequence
  Description of Artificial Sequence: Synthetic oligonucleotide
agagucagaggugguucac

SEQ ID NO: 1394360 - RNA, 19 nt, Artificial Sequence
  Description of Artificial Sequence: Synthetic oligonucleotide
caaguguggaucuucgaua

SEQ ID NO: 1394361 - RNA, 19 nt, Artificial Sequence
  Description of Artificial Sequence: Synthetic oligonucleotide
caagaauggaaaccaucga

SEQ ID NO: 1394362 - RNA, 19 nt, Artificial Sequence
  Description of Artificial Sequence: Synthetic oligonucleotide
auaguauccgugacaaaau

SEQ ID NO: 1394363 - RNA, 19 nt, Artificial Sequence
  Description of Artificial Sequence: Synthetic oligonucleotide
aacgacaguggggcuguag

SEQ ID NO: 1394364 - RNA, 19 nt, Artificial Sequence
  Description of Artificial Sequence: Synthetic oligonucleotide
aaguggucggccggaaaca

SEQ ID NO: 1394365 - RNA, 19 nt, Artificial Sequence
  Description of Artificial Sequence: Synthetic oligonucleotide
auucggcgaagagucagag

SEQ ID NO: 1394366 - RNA, 19 nt, Artificial Sequence
  Description of Artificial Sequence: Synthetic oligonucleotide
ucaggccuuauucggcgaa

SEQ ID NO: 1394367 - RNA, 19 nt, Artificial Sequence
  Description of Artificial Sequence: Synthetic oligonucleotide
ggcuaaaguggacucgggc

SEQ ID NO: 1394368 - RNA, 19 nt, Artificial Sequence
  Description of Artificial Sequence: Synthetic oligonucleotide
uagcccgaucugaggaaag

SEQ ID NO: 1394369 - RNA, 19 nt, Artificial Sequence
  Description of Artificial Sequence: Synthetic oligonucleotide
uccagaggacgcugaguug

SEQ ID NO: 1394370 - RNA, 19 nt, Artificial Sequence
  Description of Artificial Sequence: Synthetic oligonucleotide
cuauuuggggaggcaagug

SEQ ID NO: 1394371 - RNA, 19 nt, Artificial Sequence
  Description of Artificial Sequence: Synthetic oligonucleotide
guccucgagggccaccuag

SEQ ID NO: 1394372 - RNA, 19 nt, Artificial Sequence
  Description of Artificial Sequence: Synthetic oligonucleotide
aguauccgugacaaaauuu

SEQ ID NO: 1394373 - RNA, 19 nt, Artificial Sequence
  Description of Artificial Sequence: Synthetic oligonucleotide
gacucgggcuccgggaagg

SEQ ID NO: 1394374 - RNA, 19 nt, Artificial Sequence
  Description of Artificial Sequence: Synthetic oligonucleotide
ugacgacuacaccuccccu

SEQ ID NO: 1394375 - RNA, 19 nt, Artificial Sequence
  Description of Artificial Sequence: Synthetic oligonucleotide
cugucacaaaguuuccgga

SEQ ID NO: 1394376 - RNA, 19 nt, Artificial Sequence
  Description of Artificial Sequence: Synthetic oligonucleotide
aggacgcugaguugugcca

SEQ ID NO: 1394377 - RNA, 19 nt, Artificial Sequence
  Description of Artificial Sequence: Synthetic oligonucleotide
cuggcuaggacucaacccu

SEQ ID NO: 1394378 - RNA, 19 nt, Artificial Sequence
  Description of Artificial Sequence: Synthetic oligonucleotide
uucuaccaagagccugaca

SEQ ID NO: 1394379 - RNA, 19 nt, Artificial Sequence
  Description of Artificial Sequence: Synthetic oligonucleotide
aggcaaguguggaucuucg

SEQ ID NO: 1394380 - RNA, 19 nt, Artificial Sequence
  Description of Artificial Sequence: Synthetic oligonucleotide
cuggccuggcuuacugccg

SEQ ID NO: 1394381 - RNA, 19 nt, Artificial Sequence
  Description of Artificial Sequence: Synthetic oligonucleotide
aauggcacccggucaccuu

SEQ ID NO: 1394382 - RNA, 19 nt, Artificial Sequence
  Description of Artificial Sequence: Synthetic oligonucleotide
ggaauuggagaaguuguca

SEQ ID NO: 1394383 - RNA, 19 nt, Artificial Sequence
  Description of Artificial Sequence: Synthetic oligonucleotide
cuccuagcccgaucugagg

SEQ ID NO: 1394384 - RNA, 19 nt, Artificial Sequence
  Description of Artificial Sequence: Synthetic oligonucleotide
uggccuggcuuacugccgu

SEQ ID NO: 1394385 - RNA, 19 nt, Artificial Sequence
  Description of Artificial Sequence: Synthetic oligonucleotide
aaacagggccaaagguuca

SEQ ID NO: 1394386 - RNA, 19 nt, Artificial Sequence
  Description of Artificial Sequence: Synthetic oligonucleotide
guagacuugguugguacaa

SEQ ID NO: 1394387 - RNA, 19 nt, Artificial Sequence
  Description of Artificial Sequence: Synthetic oligonucleotide
cauuagguauguccugaga

SEQ ID NO: 1394388 - RNA, 19 nt, Artificial Sequence
  Description of Artificial Sequence: Synthetic oligonucleotide
acgccuguuuuaacagccc

SEQ ID NO: 1394389 - RNA, 19 nt, Artificial Sequence
  Description of Artificial Sequence: Synthetic oligonucleotide
uagaaacgacaguggggcu

SEQ ID NO: 1394390 - RNA, 19 nt, Artificial Sequence
  Description of Artificial Sequence: Synthetic oligonucleotide
gcuaaaguggacucgggcu

SEQ ID NO: 1394391 - RNA, 19 nt, Artificial Sequence
  Description of Artificial Sequence: Synthetic oligonucleotide
ccucaaauaacauuggcau

SEQ ID NO: 1394392 - RNA, 19 nt, Artificial Sequence
  Description of Artificial Sequence: Synthetic oligonucleotide
uccugagagcucccaaguu

SEQ ID NO: 1394393 - RNA, 19 nt, Artificial Sequence
  Description of Artificial Sequence: Synthetic oligonucleotide
gccucaaauaacauuggca

SEQ ID NO: 1394394 - RNA, 19 nt, Artificial Sequence
  Description of Artificial Sequence: Synthetic oligonucleotide
gaguccuauuuggggaggc

SEQ ID NO: 1394395 - RNA, 19 nt, Artificial Sequence
  Description of Artificial Sequence: Synthetic oligonucleotide
caguuaugguccugacgac

SEQ ID NO: 1394396 - RNA, 19 nt, Artificial Sequence
  Description of Artificial Sequence: Synthetic oligonucleotide
ggaaccacaaggcgguaga

SEQ ID NO: 1394397 - RNA, 19 nt, Artificial Sequence
  Description of Artificial Sequence: Synthetic oligonucleotide
guuaugguccugacgacua

SEQ ID NO: 1394398 - RNA, 19 nt, Artificial Sequence
  Description of Artificial Sequence: Synthetic oligonucleotide
gccggaaacaacaguaaac

SEQ ID NO: 1394399 - RNA, 19 nt, Artificial Sequence
  Description of Artificial Sequence: Synthetic oligonucleotide
uagcucgugacugcagcgu

SEQ ID NO: 1394400 - RNA, 19 nt, Artificial Sequence
  Description of Artificial Sequence: Synthetic oligonucleotide
ggcugucacaaaguuuccg

SEQ ID NO: 1394401 - RNA, 19 nt, Artificial Sequence
  Description of Artificial Sequence: Synthetic oligonucleotide
ggaaggauggggagcuccg

SEQ ID NO: 1394402 - RNA, 19 nt, Artificial Sequence
  Description of Artificial Sequence: Synthetic oligonucleotide
cgauauauauguccaggug

SEQ ID NO: 1394403 - RNA, 19 nt, Artificial Sequence
  Description of Artificial Sequence: Synthetic oligonucleotide
cuuauucggcgaagaguca

SEQ ID NO: 1394404 - RNA, 19 nt, Artificial Sequence
  Description of Artificial Sequence: Synthetic oligonucleotide
gacuauguggcaagaggua

SEQ ID NO: 1394405 - RNA, 19 nt, Artificial Sequence
  Description of Artificial Sequence: Synthetic oligonucleotide
ccaagagccugacacuggc

SEQ ID NO: 1394406 - RNA, 19 nt, Artificial Sequence
  Description of Artificial Sequence: Synthetic oligonucleotide
aggcgggcggguucuagug

SEQ ID NO: 1394407 - RNA, 19 nt, Artificial Sequence
  Description of Artificial Sequence: Synthetic oligonucleotide
cuuaggcaguuccagucaa

SEQ ID NO: 1394408 - RNA, 19 nt, Artificial Sequence
  Description of Artificial Sequence: Synthetic oligonucleotide
ggugacaucagagggucuc

SEQ ID NO: 1394409 - RNA, 19 nt, Artificial Sequence
  Description of Artificial Sequence: Synthetic oligonucleotide
gguugguacaagaauggaa

SEQ ID NO: 1394410 - RNA, 19 nt, Artificial Sequence
  Description of Artificial Sequence: Synthetic oligonucleotide
cccgaucugaggaaagaac

SEQ ID NO: 1394411 - RNA, 19 nt, Artificial Sequence
  Description of Artificial Sequence: Synthetic oligonucleotide
gcuggcuaaaguggacucg

SEQ ID NO: 1394412 - RNA, 19 nt, Artificial Sequence
  Description of Artificial Sequence: Synthetic oligonucleotide
aggguccacuccuuuugga

SEQ ID NO: 1394413 - RNA, 19 nt, Artificial Sequence
  Description of Artificial Sequence: Synthetic oligonucleotide
accagccggagccugggau

SEQ ID NO: 1394414 - RNA, 19 nt, Artificial Sequence
  Description of Artificial Sequence: Synthetic oligonucleotide
guucuaguggggugacauc

SEQ ID NO: 1394415 - RNA, 19 nt, Artificial Sequence
  Description of Artificial Sequence: Synthetic oligonucleotide
uccggagaaacagggccaa

SEQ ID NO: 1394416 - RNA, 19 nt, Artificial Sequence
  Description of Artificial Sequence: Synthetic oligonucleotide
ggauauucacagucaucca

SEQ ID NO: 1394417 - RNA, 19 nt, Artificial Sequence
  Description of Artificial Sequence: Synthetic oligonucleotide
acccggucaccuuggagaa

SEQ ID NO: 1394418 - RNA, 19 nt, Artificial Sequence
  Description of Artificial Sequence: Synthetic oligonucleotide
gaaccacaaggcgguagac

SEQ ID NO: 1394419 - RNA, 19 nt, Artificial Sequence
  Description of Artificial Sequence: Synthetic oligonucleotide
ggccuuauucggcgaagag

SEQ ID NO: 1394420 - RNA, 19 nt, Artificial Sequence
  Description of Artificial Sequence: Synthetic oligonucleotide
agggccaaaggaagaugag

SEQ ID NO: 1394421 - RNA, 19 nt, Artificial Sequence
  Description of Artificial Sequence: Synthetic oligonucleotide
ggagacucugucugggcuc

SEQ ID NO: 1394422 - RNA, 19 nt, Artificial Sequence
  Description of Artificial Sequence: Synthetic oligonucleotide
acauaguauccgugacaaa

SEQ ID NO: 1394423 - RNA, 19 nt, Artificial Sequence
  Description of Artificial Sequence: Synthetic oligonucleotide
ccgugacaaaauuucagca

SEQ ID NO: 1394424 - RNA, 19 nt, Artificial Sequence
  Description of Artificial Sequence: Synthetic oligonucleotide
gcagcgucugggcuccugg

SEQ ID NO: 1394425 - RNA, 19 nt, Artificial Sequence
  Description of Artificial Sequence: Synthetic oligonucleotide
aguugucacuaagcaggug

SEQ ID NO: 1394426 - RNA, 19 nt, Artificial Sequence
  Description of Artificial Sequence: Synthetic oligonucleotide
gaaacgacaguggggcugu

SEQ ID NO: 1394427 - RNA, 19 nt, Artificial Sequence
  Description of Artificial Sequence: Synthetic oligonucleotide
cucgugacugcagcgucug

SEQ ID NO: 1394428 - RNA, 19 nt, Artificial Sequence
  Description of Artificial Sequence: Synthetic oligonucleotide
gcuuacugccgucugagcu

SEQ ID NO: 1394429 - RNA, 19 nt, Artificial Sequence
  Description of Artificial Sequence: Synthetic oligonucleotide
cccuuaggcaguuccaguc

SEQ ID NO: 1394430 - RNA, 19 nt, Artificial Sequence
  Description of Artificial Sequence: Synthetic oligonucleotide
gccggaccggaauaacuag

SEQ ID NO: 1394431 - RNA, 19 nt, Artificial Sequence
  Description of Artificial Sequence: Synthetic oligonucleotide
agcgucugggcuccuggaa

SEQ ID NO: 1394432 - RNA, 19 nt, Artificial Sequence
  Description of Artificial Sequence: Synthetic oligonucleotide
cuauguggcaagagguagu

SEQ ID NO: 1394433 - RNA, 19 nt, Artificial Sequence
  Description of Artificial Sequence: Synthetic oligonucleotide
gguaguggccuggaauggc

SEQ ID NO: 1394434 - RNA, 19 nt, Artificial Sequence
  Description of Artificial Sequence: Synthetic oligonucleotide
uggagauaucuaguacauu

SEQ ID NO: 1394435 - RNA, 19 nt, Artificial Sequence
  Description of Artificial Sequence: Synthetic oligonucleotide
gcacggaaguggucggccg

SEQ ID NO: 1394436 - RNA, 19 nt, Artificial Sequence
  Description of Artificial Sequence: Synthetic oligonucleotide
aguccuauuuggggaggca

SEQ ID NO: 1394437 - RNA, 19 nt, Artificial Sequence
  Description of Artificial Sequence: Synthetic oligonucleotide
cagaggacgcugaguugug

SEQ ID NO: 1394438 - RNA, 19 nt, Artificial Sequence
  Description of Artificial Sequence: Synthetic oligonucleotide
gacgcugaguugugccaga

SEQ ID NO: 1394439 - RNA, 19 nt, Artificial Sequence
  Description of Artificial Sequence: Synthetic oligonucleotide
ggacuauguggcaagaggu

SEQ ID NO: 1394440 - RNA, 19 nt, Artificial Sequence
  Description of Artificial Sequence: Synthetic oligonucleotide
gccaaaggaagaugaggga

SEQ ID NO: 1394441 - RNA, 19 nt, Artificial Sequence
  Description of Artificial Sequence: Synthetic oligonucleotide
ccuccuagcccgaucugag

SEQ ID NO: 1394442 - RNA, 19 nt, Artificial Sequence
  Description of Artificial Sequence: Synthetic oligonucleotide
cuucuaccaagagccugac

SEQ ID NO: 1394443 - RNA, 19 nt, Artificial Sequence
  Description of Artificial Sequence: Synthetic oligonucleotide
gugaugguuccuacagguc

SEQ ID NO: 1394444 - RNA, 19 nt, Artificial Sequence
  Description of Artificial Sequence: Synthetic oligonucleotide
guccuauuuggggaggcaa

SEQ ID NO: 1394445 - RNA, 19 nt, Artificial Sequence
  Description of Artificial Sequence: Synthetic oligonucleotide
aggccuuauucggcgaaga

SEQ ID NO: 1394446 - RNA, 19 nt, Artificial Sequence
  Description of Artificial Sequence: Synthetic oligonucleotide
caggucacuguggcuuccg

SEQ ID NO: 1394447 - RNA, 19 nt, Artificial Sequence
  Description of Artificial Sequence: Synthetic oligonucleotide
ggacgcugaguugugccag

SEQ ID NO: 1394448 - RNA, 19 nt, Artificial Sequence
  Description of Artificial Sequence: Synthetic oligonucleotide
uccgggaaggaguccuauu

SEQ ID NO: 1394449 - RNA, 19 nt, Artificial Sequence
  Description of Artificial Sequence: Synthetic oligonucleotide
ccugacgacuacaccuccc

SEQ ID NO: 1394450 - RNA, 19 nt, Artificial Sequence
  Description of Artificial Sequence: Synthetic oligonucleotide
accaacguucaugcugcga

SEQ ID NO: 1394451 - RNA, 19 nt, Artificial Sequence
  Description of Artificial Sequence: Synthetic oligonucleotide
agcccgaucugaggaaaga

SEQ ID NO: 1394452 - RNA, 19 nt, Artificial Sequence
  Description of Artificial Sequence: Synthetic oligonucleotide
ugccacgugaugguuccua

SEQ ID NO: 1394453 - RNA, 19 nt, Artificial Sequence
  Description of Artificial Sequence: Synthetic oligonucleotide
caggccuuauucggcgaag

SEQ ID NO: 1394454 - RNA, 19 nt, Artificial Sequence
  Description of Artificial Sequence: Synthetic oligonucleotide
aguguggaucuucgauaua

SEQ ID NO: 1394455 - RNA, 19 nt, Artificial Sequence
  Description of Artificial Sequence: Synthetic oligonucleotide
aguggucggccggaaacaa

SEQ ID NO: 1394456 - RNA, 19 nt, Artificial Sequence
  Description of Artificial Sequence: Synthetic oligonucleotide
ggcgggcggguucuagugg

SEQ ID NO: 1394457 - RNA, 19 nt, Artificial Sequence
  Description of Artificial Sequence: Synthetic oligonucleotide
ugacacuggccuggcuuac

SEQ ID NO: 1394458 - RNA, 19 nt, Artificial Sequence
  Description of Artificial Sequence: Synthetic oligonucleotide
agcugggcugucacaaagu

SEQ ID NO: 1394459 - RNA, 19 nt, Artificial Sequence
  Description of Artificial Sequence: Synthetic oligonucleotide
ccaccuaggagugcaggcc

SEQ ID NO: 1394460 - RNA, 19 nt, Artificial Sequence
  Description of Artificial Sequence: Synthetic oligonucleotide
cuggcuuacugccgucuga

SEQ ID NO: 1394461 - RNA, 19 nt, Artificial Sequence
  Description of Artificial Sequence: Synthetic oligonucleotide
cuaguacauuagguauguc

SEQ ID NO: 1394462 - RNA, 19 nt, Artificial Sequence
  Description of Artificial Sequence: Synthetic oligonucleotide
gggccaaagguucaugggu

SEQ ID NO: 1394463 - RNA, 19 nt, Artificial Sequence
  Description of Artificial Sequence: Synthetic oligonucleotide
ccugcacggaaguggucgg

SEQ ID NO: 1394464 - RNA, 19 nt, Artificial Sequence
  Description of Artificial Sequence: Synthetic oligonucleotide
caugcugcgacuugcuguu

SEQ ID NO: 1394465 - RNA, 19 nt, Artificial Sequence
  Description of Artificial Sequence: Synthetic oligonucleotide
cucacggaccugcacggaa

SEQ ID NO: 1394466 - RNA, 19 nt, Artificial Sequence
  Description of Artificial Sequence: Synthetic oligonucleotide
aggccggaccggaauaacu

SEQ ID NO: 1394467 - RNA, 19 nt, Artificial Sequence
  Description of Artificial Sequence: Synthetic oligonucleotide
ggucggaggacagcugggc

SEQ ID NO: 1394468 - RNA, 19 nt, Artificial Sequence
  Description of Artificial Sequence: Synthetic oligonucleotide
gggucagcgaggacucagg

SEQ ID NO: 1394469 - RNA, 19 nt, Artificial Sequence
  Description of Artificial Sequence: Synthetic oligonucleotide
aggcaggccggaccggaau

SEQ ID NO: 1394470 - RNA, 19 nt, Artificial Sequence
  Description of Artificial Sequence: Synthetic oligonucleotide
cuagugcugcugccacgug

SEQ ID NO: 1394471 - RNA, 19 nt, Artificial Sequence
  Description of Artificial Sequence: Synthetic oligonucleotide
gaggugguucacauaguau

SEQ ID NO: 1394472 - RNA, 19 nt, Artificial Sequence
  Description of Artificial Sequence: Synthetic oligonucleotide
guauguccugagagcuccc

SEQ ID NO: 1394473 - RNA, 19 nt, Artificial Sequence
  Description of Artificial Sequence: Synthetic oligonucleotide
ggccggaaacaacaguaaa

SEQ ID NO: 1394474 - RNA, 19 nt, Artificial Sequence
  Description of Artificial Sequence: Synthetic oligonucleotide
cgguagacuugguugguac

SEQ ID NO: 1394475 - RNA, 19 nt, Artificial Sequence
  Description of Artificial Sequence: Synthetic oligonucleotide
cucaggccuuauucggcga

SEQ ID NO: 1394476 - RNA, 19 nt, Artificial Sequence
  Description of Artificial Sequence: Synthetic oligonucleotide
cugcacggaaguggucggc

SEQ ID NO: 1394477 - RNA, 19 nt, Artificial Sequence
  Description of Artificial Sequence: Synthetic oligonucleotide
ggcuaggacucaacccuag

SEQ ID NO: 1394478 - RNA, 19 nt, Artificial Sequence
  Description of Artificial Sequence: Synthetic oligonucleotide
cccgugcacauucuaggac

SEQ ID NO: 1394479 - RNA, 19 nt, Artificial Sequence
  Description of Artificial Sequence: Synthetic oligonucleotide
gguucuaguggggugacau

SEQ ID NO: 1394480 - RNA, 19 nt, Artificial Sequence
  Description of Artificial Sequence: Synthetic oligonucleotide
ggcuuacugccgucugagc

SEQ ID NO: 1394481 - RNA, 19 nt, Artificial Sequence
  Description of Artificial Sequence: Synthetic oligonucleotide
cgaucugaggaaagaacca

SEQ ID NO: 1394482 - RNA, 19 nt, Artificial Sequence
  Description of Artificial Sequence: Synthetic oligonucleotide
cguucaugcugcgacuugc

SEQ ID NO: 1394483 - RNA, 19 nt, Artificial Sequence
  Description of Artificial Sequence: Synthetic oligonucleotide
gccacgugaugguuccuac

SEQ ID NO: 1394484 - RNA, 19 nt, Artificial Sequence
  Description of Artificial Sequence: Synthetic oligonucleotide
ugcagcgucugggcuccug

SEQ ID NO: 1394485 - RNA, 19 nt, Artificial Sequence
  Description of Artificial Sequence: Synthetic oligonucleotide
ggcaaguguggaucuucga

SEQ ID NO: 1394486 - RNA, 19 nt, Artificial Sequence
  Description of Artificial Sequence: Synthetic oligonucleotide
ccggaauaacuagaaacga

SEQ ID NO: 1394487 - RNA, 19 nt, Artificial Sequence
  Description of Artificial Sequence: Synthetic oligonucleotide
ggacucaggcagugcuuug

SEQ ID NO: 1394488 - RNA, 19 nt, Artificial Sequence
  Description of Artificial Sequence: Synthetic oligonucleotide
ggggauauucacagucauc

SEQ ID NO: 1394489 - RNA, 19 nt, Artificial Sequence
  Description of Artificial Sequence: Synthetic oligonucleotide
ccagcuggcuaaaguggac

SEQ ID NO: 1394490 - RNA, 19 nt, Artificial Sequence
  Description of Artificial Sequence: Synthetic oligonucleotide
ccuuaggcaguuccaguca

SEQ ID NO: 1394491 - RNA, 19 nt, Artificial Sequence
  Description of Artificial Sequence: Synthetic oligonucleotide
ggaccggaauaacuagaaa

SEQ ID NO: 1394492 - RNA, 19 nt, Artificial Sequence
  Description of Artificial Sequence: Synthetic oligonucleotide
acggaccugcacggaagug

SEQ ID NO: 1394493 - RNA, 19 nt, Artificial Sequence
  Description of Artificial Sequence: Synthetic oligonucleotide
aucgaacugaagggccaaa

SEQ ID NO: 1394494 - RNA, 19 nt, Artificial Sequence
  Description of Artificial Sequence: Synthetic oligonucleotide
cuccggcuccugcagagaa

SEQ ID NO: 1394495 - RNA, 19 nt, Artificial Sequence
  Description of Artificial Sequence: Synthetic oligonucleotide
ggucaccuuggagaaguuc

SEQ ID NO: 1394496 - RNA, 19 nt, Artificial Sequence
  Description of Artificial Sequence: Synthetic oligonucleotide
caacguucaugcugcgacu

SEQ ID NO: 1394497 - RNA, 19 nt, Artificial Sequence
  Description of Artificial Sequence: Synthetic oligonucleotide
caccuaggagugcaggccu

SEQ ID NO: 1394498 - RNA, 19 nt, Artificial Sequence
  Description of Artificial Sequence: Synthetic oligonucleotide
gccccagcauucucaggcc

SEQ ID NO: 1394499 - RNA, 19 nt, Artificial Sequence
  Description of Artificial Sequence: Synthetic oligonucleotide
gagcuacuguuagcuucac

SEQ ID NO: 1394500 - RNA, 19 nt, Artificial Sequence
  Description of Artificial Sequence: Synthetic oligonucleotide
guggucggccggaaacaac

SEQ ID NO: 1394501 - RNA, 19 nt, Artificial Sequence
  Description of Artificial Sequence: Synthetic oligonucleotide
ggucggccggaaacaacag

SEQ ID NO: 1394502 - RNA, 19 nt, Artificial Sequence
  Description of Artificial Sequence: Synthetic oligonucleotide
guacaagaauggaaaccau

SEQ ID NO: 1394503 - RNA, 19 nt, Artificial Sequence
  Description of Artificial Sequence: Synthetic oligonucleotide
caucgaacugaagggccaa

SEQ ID NO: 1394504 - RNA, 19 nt, Artificial Sequence
  Description of Artificial Sequence: Synthetic oligonucleotide
caggccuccuagcccgauc

SEQ ID NO: 1394505 - RNA, 19 nt, Artificial Sequence
  Description of Artificial Sequence: Synthetic oligonucleotide
ggaaagaaccaacguucau

SEQ ID NO: 1394506 - RNA, 19 nt, Artificial Sequence
  Description of Artificial Sequence: Synthetic oligonucleotide
cccuagugcugcugccacg

SEQ ID NO: 1394507 - RNA, 19 nt, Artificial Sequence
  Description of Artificial Sequence: Synthetic oligonucleotide
gccuuauucggcgaagagu

SEQ ID NO: 1394508 - RNA, 19 nt, Artificial Sequence
  Description of Artificial Sequence: Synthetic oligonucleotide
gugugccagccaguuccag

SEQ ID NO: 1394509 - RNA, 19 nt, Artificial Sequence
  Description of Artificial Sequence: Synthetic oligonucleotide
aaggcaggccggaccggaa

SEQ ID NO: 1394510 - RNA, 19 nt, Artificial Sequence
  Description of Artificial Sequence: Synthetic oligonucleotide
caggccggaccggaauaac

SEQ ID NO: 1394511 - RNA, 19 nt, Artificial Sequence
  Description of Artificial Sequence: Synthetic oligonucleotide
ccuggcuuacugccgucug

SEQ ID NO: 1394512 - RNA, 19 nt, Artificial Sequence
  Description of Artificial Sequence: Synthetic oligonucleotide
gggagaccugugauccuug

SEQ ID NO: 1394513 - RNA, 19 nt, Artificial Sequence
  Description of Artificial Sequence: Synthetic oligonucleotide
gcggguucuagugggguga

SEQ ID NO: 1394514 - RNA, 19 nt, Artificial Sequence
  Description of Artificial Sequence: Synthetic oligonucleotide
acgcugaguugugccagau

SEQ ID NO: 1394515 - RNA, 19 nt, Artificial Sequence
  Description of Artificial Sequence: Synthetic oligonucleotide
caaggcgguagacuugguu

SEQ ID NO: 1394516 - RNA, 19 nt, Artificial Sequence
  Description of Artificial Sequence: Synthetic oligonucleotide
gcuuaacaggucggaggac

SEQ ID NO: 1394517 - RNA, 19 nt, Artificial Sequence
  Description of Artificial Sequence: Synthetic oligonucleotide
ggaaguggucggccggaaa

SEQ ID NO: 1394518 - RNA, 19 nt, Artificial Sequence
  Description of Artificial Sequence: Synthetic oligonucleotide
ccggaccggaauaacuaga

SEQ ID NO: 1394519 - RNA, 19 nt, Artificial Sequence
  Description of Artificial Sequence: Synthetic oligonucleotide
ggccggaccggaauaacua

SEQ ID NO: 1394520 - RNA, 19 nt, Artificial Sequence
  Description of Artificial Sequence: Synthetic oligonucleotide
ccagaggacgcugaguugu

SEQ ID NO: 1394521 - RNA, 19 nt, Artificial Sequence
  Description of Artificial Sequence: Synthetic oligonucleotide
gcagacccaagguccucga

SEQ ID NO: 1394522 - RNA, 19 nt, Artificial Sequence
  Description of Artificial Sequence: Synthetic oligonucleotide
ccagaugaacccucugccu

SEQ ID NO: 1394523 - RNA, 19 nt, Artificial Sequence
  Description of Artificial Sequence: Synthetic oligonucleotide
gcugggcugucacaaaguu

SEQ ID NO: 1394524 - RNA, 19 nt, Artificial Sequence
  Description of Artificial Sequence: Synthetic oligonucleotide
cggaccggaauaacuagaa

SEQ ID NO: 1394525 - RNA, 19 nt, Artificial Sequence
  Description of Artificial Sequence: Synthetic oligonucleotide
cgagggccaccuaggagug

SEQ ID NO: 1394526 - RNA, 19 nt, Artificial Sequence
  Description of Artificial Sequence: Synthetic oligonucleotide
cacggaccugcacggaagu

SEQ ID NO: 1394527 - RNA, 19 nt, Artificial Sequence
  Description of Artificial Sequence: Synthetic oligonucleotide
uggcuuccgcagugccauc

SEQ ID NO: 1394528 - RNA, 19 nt, Artificial Sequence
  Description of Artificial Sequence: Synthetic oligonucleotide
ccccgugcacauucuagga

SEQ ID NO: 1394529 - RNA, 19 nt, Artificial Sequence
  Description of Artificial Sequence: Synthetic oligonucleotide
ccgaagccuuuaaacugca

SEQ ID NO: 1394530 - RNA, 19 nt, Artificial Sequence
  Description of Artificial Sequence: Synthetic oligonucleotide
gcuaggacucaacccuagu

SEQ ID NO: 1394531 - RNA, 19 nt, Artificial Sequence
  Description of Artificial Sequence: Synthetic oligonucleotide
ggaccugcacggaaguggu

SEQ ID NO: 1394532 - RNA, 19 nt, Artificial Sequence
  Description of Artificial Sequence: Synthetic oligonucleotide
gaggaacccuggcuuuguu

SEQ ID NO: 1394533 - RNA, 19 nt, Artificial Sequence
  Description of Artificial Sequence: Synthetic oligonucleotide
gcccgaucugaggaaagaa

SEQ ID NO: 1394534 - RNA, 19 nt, Artificial Sequence
  Description of Artificial Sequence: Synthetic oligonucleotide
ggcaggccggaccggaaua

SEQ ID NO: 1394535 - RNA, 19 nt, Artificial Sequence
  Description of Artificial Sequence: Synthetic oligonucleotide
aaacgacaguggggcugua

SEQ ID NO: 1394536 - RNA, 19 nt, Artificial Sequence
  Description of Artificial Sequence: Synthetic oligonucleotide
cauuggcauugaggggcca

SEQ ID NO: 1394537 - RNA, 19 nt, Artificial Sequence
  Description of Artificial Sequence: Synthetic oligonucleotide
ccuauuuggggaggcaagu

SEQ ID NO: 1394538 - RNA, 19 nt, Artificial Sequence
  Description of Artificial Sequence: Synthetic oligonucleotide
cggcgaagagucagaggug

SEQ ID NO: 1394539 - RNA, 19 nt, Artificial Sequence
  Description of Artificial Sequence: Synthetic oligonucleotide
gggcuccgaagccuuuaaa

SEQ ID NO: 1394540 - RNA, 19 nt, Artificial Sequence
  Description of Artificial Sequence: Synthetic oligonucleotide
agccggagccugggauuca

SEQ ID NO: 1394541 - RNA, 19 nt, Artificial Sequence
  Description of Artificial Sequence: Synthetic oligonucleotide
ccuagugcugcugccacgu

SEQ ID NO: 1394542 - RNA, 19 nt, Artificial Sequence
  Description of Artificial Sequence: Synthetic oligonucleotide
cuaggagugcaggccuccu

SEQ ID NO: 1394543 - RNA, 19 nt, Artificial Sequence
  Description of Artificial Sequence: Synthetic oligonucleotide
cgaggacucaggcagugcu

SEQ ID NO: 1394544 - RNA, 19 nt, Artificial Sequence
  Description of Artificial Sequence: Synthetic oligonucleotide
ccgggaaggaguccuauuu

SEQ ID NO: 1394545 - RNA, 19 nt, Artificial Sequence
  Description of Artificial Sequence: Synthetic oligonucleotide
gcaggccggaccggaauaa

SEQ ID NO: 1394546 - RNA, 19 nt, Artificial Sequence
  Description of Artificial Sequence: Synthetic oligonucleotide
cagcgaggacucaggcagu

SEQ ID NO: 1394547 - RNA, 19 nt, Artificial Sequence
  Description of Artificial Sequence: Synthetic oligonucleotide
ggguucuaguggggugaca

SEQ ID NO: 1394548 - RNA, 19 nt, Artificial Sequence
  Description of Artificial Sequence: Synthetic oligonucleotide
gcgguagacuugguuggua

SEQ ID NO: 1394549 - RNA, 19 nt, Artificial Sequence
  Description of Artificial Sequence: Synthetic oligonucleotide
cggccggaaacaacaguaa

SEQ ID NO: 1394550 - RNA, 19 nt, Artificial Sequence
  Description of Artificial Sequence: Synthetic oligonucleotide
gcucgugacugcagcgucu

SEQ ID NO: 1394551 - RNA, 19 nt, Artificial Sequence
  Description of Artificial Sequence: Synthetic oligonucleotide
ggcgguagacuugguuggu

SEQ ID NO: 1394552 - RNA, 19 nt, Artificial Sequence
  Description of Artificial Sequence: Synthetic oligonucleotide
gcucacggaccugcacgga

SEQ ID NO: 1394553 - RNA, 19 nt, Artificial Sequence
  Description of Artificial Sequence: Synthetic oligonucleotide
cccggucaccuuggagaag

SEQ ID NO: 1394554 - RNA, 19 nt, Artificial Sequence
  Description of Artificial Sequence: Synthetic oligonucleotide
gggcuccgggaaggagucc

SEQ ID NO: 1394555 - RNA, 19 nt, Artificial Sequence
  Description of Artificial Sequence: Synthetic oligonucleotide
gcgaagagucagagguggu

SEQ ID NO: 1394556 - RNA, 19 nt, Artificial Sequence
  Description of Artificial Sequence: Synthetic oligonucleotide
ggacugugugccagccagu

SEQ ID NO: 1394557 - RNA, 19 nt, Artificial Sequence
  Description of Artificial Sequence: Synthetic oligonucleotide
gggcggguucuaguggggu

SEQ ID NO: 1394558 - RNA, 19 nt, Artificial Sequence
  Description of Artificial Sequence: Synthetic oligonucleotide
cggguucuaguggggugac

SEQ ID NO: 1394559 - RNA, 19 nt, Artificial Sequence
  Description of Artificial Sequence: Synthetic oligonucleotide
gccuggaauggcacccggu

SEQ ID NO: 1394560 - RNA, 19 nt, Artificial Sequence
  Description of Artificial Sequence: Synthetic oligonucleotide
cggagccugggauucacuu

SEQ ID NO: 1394561 - RNA, 19 nt, Artificial Sequence
  Description of Artificial Sequence: Synthetic oligonucleotide
gccgucugagcuggacagu

SEQ ID NO: 1394562 - RNA, 19 nt, Artificial Sequence
  Description of Artificial Sequence: Synthetic oligonucleotide
ccgucugagcuggacaguu

SEQ ID NO: 1394563 - RNA, 19 nt, Artificial Sequence
  Description of Artificial Sequence: Synthetic oligonucleotide
ccggagaaacagggccaaa

SEQ ID NO: 1394564 - RNA, 19 nt, Artificial Sequence
  Description of Artificial Sequence: Synthetic oligonucleotide
ccggagccugggauucacu

SEQ ID NO: 1394565 - RNA, 19 nt, Artificial Sequence
  Description of Artificial Sequence: Synthetic oligonucleotide
cggaagcuucuggaaggau

SEQ ID NO: 1394566 - RNA, 19 nt, Artificial Sequence
  Description of Artificial Sequence: Synthetic oligonucleotide
cugcagcgucugggcuccu

SEQ ID NO: 1394567 - RNA, 19 nt, Artificial Sequence
  Description of Artificial Sequence: Synthetic oligonucleotide
cuuuauuacagucauacag

SEQ ID NO: 1394568 - RNA, 19 nt, Artificial Sequence
  Description of Artificial Sequence: Synthetic oligonucleotide
aaagcuguaacaaaauaac

SEQ ID NO: 1394569 - RNA, 19 nt, Artificial Sequence
  Description of Artificial Sequence: Synthetic oligonucleotide
aaugaagcgguccuugugg

SEQ ID NO: 1394570 - RNA, 19 nt, Artificial Sequence
  Description of Artificial Sequence: Synthetic oligonucleotide
uuuauuacagucauacaga

SEQ ID NO: 1394571 - RNA, 19 nt, Artificial Sequence
  Description of Artificial Sequence: Synthetic oligonucleotide
aauaacaucaaaggaaaug

SEQ ID NO: 1394572 - RNA, 19 nt, Artificial Sequence
  Description of Artificial Sequence: Synthetic oligonucleotide
aguagggagaacuacuccc

SEQ ID NO: 1394573 - RNA, 19 nt, Artificial Sequence
  Description of Artificial Sequence: Synthetic oligonucleotide
aaccacuggagacagcucc

SEQ ID NO: 1394574 - RNA, 19 nt, Artificial Sequence
  Description of Artificial Sequence: Synthetic oligonucleotide
aucgcaaagacacacuggc

SEQ ID NO: 1394575 - RNA, 19 nt, Artificial Sequence
  Description of Artificial Sequence: Synthetic oligonucleotide
acacacagcauucaaauuc

SEQ ID NO: 1394576 - RNA, 19 nt, Artificial Sequence
  Description of Artificial Sequence: Synthetic oligonucleotide
cuagguacugcacagagcc

SEQ ID NO: 1394577 - RNA, 19 nt, Artificial Sequence
  Description of Artificial Sequence: Synthetic oligonucleotide
aaguuguagccccugcugc

SEQ ID NO: 1394578 - RNA, 19 nt, Artificial Sequence
  Description of Artificial Sequence: Synthetic oligonucleotide
cauucaaauucauagaauc

SEQ ID NO: 1394579 - RNA, 19 nt, Artificial Sequence
  Description of Artificial Sequence: Synthetic oligonucleotide
uuauuacagucauacagag

SEQ ID NO: 1394580 - RNA, 19 nt, Artificial Sequence
  Description of Artificial Sequence: Synthetic oligonucleotide
agaacuuuuagggaugucg

SEQ ID NO: 1394581 - RNA, 19 nt, Artificial Sequence
  Description of Artificial Sequence: Synthetic oligonucleotide
gaucucucggucaaaaucg

SEQ ID NO: 1394582 - RNA, 19 nt, Artificial Sequence
  Description of Artificial Sequence: Synthetic oligonucleotide
cagacuauggcacaagggg

SEQ ID NO: 1394583 - RNA, 19 nt, Artificial Sequence
  Description of Artificial Sequence: Synthetic oligonucleotide
aacuagguacugcacagag

SEQ ID NO: 1394584 - RNA, 19 nt, Artificial Sequence
  Description of Artificial Sequence: Synthetic oligonucleotide
aacuacucccuaucucucc

SEQ ID NO: 1394585 - RNA, 19 nt, Artificial Sequence
  Description of Artificial Sequence: Synthetic oligonucleotide
ucaacuagguacugcacag

SEQ ID NO: 1394586 - RNA, 19 nt, Artificial Sequence
  Description of Artificial Sequence: Synthetic oligonucleotide
aaucugucuccguagagga

SEQ ID NO: 1394587 - RNA, 19 nt, Artificial Sequence
  Description of Artificial Sequence: Synthetic oligonucleotide
aguccagccccuuuagucc

SEQ ID NO: 1394588 - RNA, 19 nt, Artificial Sequence
  Description of Artificial Sequence: Synthetic oligonucleotide
acugaggugguagaggacc

SEQ ID NO: 1394589 - RNA, 19 nt, Artificial Sequence
  Description of Artificial Sequence: Synthetic oligonucleotide
agcauuucagguuccacuc

SEQ ID NO: 1394590 - RNA, 19 nt, Artificial Sequence
  Description of Artificial Sequence: Synthetic oligonucleotide
aacguucucccuuaggggu

SEQ ID NO: 1394591 - RNA, 19 nt, Artificial Sequence
  Description of Artificial Sequence: Synthetic oligonucleotide
aguggggagaacuuuuagg

SEQ ID NO: 1394592 - RNA, 19 nt, Artificial Sequence
  Description of Artificial Sequence: Synthetic oligonucleotide
cuuuuagggaugucggugg

SEQ ID NO: 1394593 - RNA, 19 nt, Artificial Sequence
  Description of Artificial Sequence: Synthetic oligonucleotide
gaagcuguaaccuccggac

SEQ ID NO: 1394594 - RNA, 19 nt, Artificial Sequence
  Description of Artificial Sequence: Synthetic oligonucleotide
aagcuguaaccuccggacc

SEQ ID NO: 1394595 - RNA, 19 nt, Artificial Sequence
  Description of Artificial Sequence: Synthetic oligonucleotide
gaacuuuuagggaugucgg

SEQ ID NO: 1394596 - RNA, 19 nt, Artificial Sequence
  Description of Artificial Sequence: Synthetic oligonucleotide
auagaaucugucuccguag

SEQ ID NO: 1394597 - RNA, 19 nt, Artificial Sequence
  Description of Artificial Sequence: Synthetic oligonucleotide
agcauucaaauucauagaa

SEQ ID NO: 1394598 - RNA, 19 nt, Artificial Sequence
  Description of Artificial Sequence: Synthetic oligonucleotide
gaaucugucuccguagagg

SEQ ID NO: 1394599 - RNA, 19 nt, Artificial Sequence
  Description of Artificial Sequence: Synthetic oligonucleotide
gaacguucucccuuagggg

SEQ ID NO: 1394600 - RNA, 19 nt, Artificial Sequence
  Description of Artificial Sequence: Synthetic oligonucleotide
aguaacaguagcucugcug

SEQ ID NO: 1394601 - RNA, 19 nt, Artificial Sequence
  Description of Artificial Sequence: Synthetic oligonucleotide
aguuguagccccugcugcc

SEQ ID NO: 1394602 - RNA, 19 nt, Artificial Sequence
  Description of Artificial Sequence: Synthetic oligonucleotide
agucucuauacccaggggu

SEQ ID NO: 1394603 - RNA, 19 nt, Artificial Sequence
  Description of Artificial Sequence: Synthetic oligonucleotide
ugucgguugcucaagugcc

SEQ ID NO: 1394604 - RNA, 19 nt, Artificial Sequence
  Description of Artificial Sequence: Synthetic oligonucleotide
aauccuggaccaccacccc

SEQ ID NO: 1394605 - RNA, 19 nt, Artificial Sequence
  Description of Artificial Sequence: Synthetic oligonucleotide
agacacugaggccugcagc

SEQ ID NO: 1394606 - RNA, 19 nt, Artificial Sequence
  Description of Artificial Sequence: Synthetic oligonucleotide
gacagacuauggcacaagg

SEQ ID NO: 1394607 - RNA, 19 nt, Artificial Sequence
  Description of Artificial Sequence: Synthetic oligonucleotide
agagucuggaauccuggac

SEQ ID NO: 1394608 - RNA, 19 nt, Artificial Sequence
  Description of Artificial Sequence: Synthetic oligonucleotide
uucauagaaucugucuccg

SEQ ID NO: 1394609 - RNA, 19 nt, Artificial Sequence
  Description of Artificial Sequence: Synthetic oligonucleotide
uuucagguuccacuccccg

SEQ ID NO: 1394610 - RNA, 19 nt, Artificial Sequence
  Description of Artificial Sequence: Synthetic oligonucleotide
ucucggucaaaaucgaagu

SEQ ID NO: 1394611 - RNA, 19 nt, Artificial Sequence
  Description of Artificial Sequence: Synthetic oligonucleotide
agaguaacaguagcucugc

SEQ ID NO: 1394612 - RNA, 19 nt, Artificial Sequence
  Description of Artificial Sequence: Synthetic oligonucleotide
aaucgcaaagacacacugg

SEQ ID NO: 1394613 - RNA, 19 nt, Artificial Sequence
  Description of Artificial Sequence: Synthetic oligonucleotide
gaaggggaggaucucucgg

SEQ ID NO: 1394614 - RNA, 19 nt, Artificial Sequence
  Description of Artificial Sequence: Synthetic oligonucleotide
augaagcgguccuuguggc

SEQ ID NO: 1394615 - RNA, 19 nt, Artificial Sequence
  Description of Artificial Sequence: Synthetic oligonucleotide
uuuuaaucucccucccuga

SEQ ID NO: 1394616 - RNA, 19 nt, Artificial Sequence
  Description of Artificial Sequence: Synthetic oligonucleotide
gaauccuggaccaccaccc

SEQ ID NO: 1394617 - RNA, 19 nt, Artificial Sequence
  Description of Artificial Sequence: Synthetic oligonucleotide
gaaagugccagugugugga

SEQ ID NO: 1394618 - RNA, 19 nt, Artificial Sequence
  Description of Artificial Sequence: Synthetic oligonucleotide
ugaaagugccagugugugg

SEQ ID NO: 1394619 - RNA, 19 nt, Artificial Sequence
  Description of Artificial Sequence: Synthetic oligonucleotide
aguucucagaggcgaaggg

SEQ ID NO: 1394620 - RNA, 19 nt, Artificial Sequence
  Description of Artificial Sequence: Synthetic oligonucleotide
uacagagucuggaauccug

SEQ ID NO: 1394621 - RNA, 19 nt, Artificial Sequence
  Description of Artificial Sequence: Synthetic oligonucleotide
gauagcucugguuagggcu

SEQ ID NO: 1394622 - RNA, 19 nt, Artificial Sequence
  Description of Artificial Sequence: Synthetic oligonucleotide
guccauacggcagacagag

SEQ ID NO: 1394623 - RNA, 19 nt, Artificial Sequence
  Description of Artificial Sequence: Synthetic oligonucleotide
cauuucagguuccacuccc

SEQ ID NO: 1394624 - RNA, 19 nt, Artificial Sequence
  Description of Artificial Sequence: Synthetic oligonucleotide
cuuguggcuguugagggcg

SEQ ID NO: 1394625 - RNA, 19 nt, Artificial Sequence
  Description of Artificial Sequence: Synthetic oligonucleotide
caaucgcaaagacacacug

SEQ ID NO: 1394626 - RNA, 19 nt, Artificial Sequence
  Description of Artificial Sequence: Synthetic oligonucleotide
uauuacagucauacagagu

SEQ ID NO: 1394627 - RNA, 19 nt, Artificial Sequence
  Description of Artificial Sequence: Synthetic oligonucleotide
gacuauggcacaaggggag

SEQ ID NO: 1394628 - RNA, 19 nt, Artificial Sequence
  Description of Artificial Sequence: Synthetic oligonucleotide
acuuuuagggaugucggug

SEQ ID NO: 1394629 - RNA, 19 nt, Artificial Sequence
  Description of Artificial Sequence: Synthetic oligonucleotide
guccccucgagacagguag

SEQ ID NO: 1394630 - RNA, 19 nt, Artificial Sequence
  Description of Artificial Sequence: Synthetic oligonucleotide
uuuaaucucccucccugaa

SEQ ID NO: 1394631 - RNA, 19 nt, Artificial Sequence
  Description of Artificial Sequence: Synthetic oligonucleotide
cugucgguugcucaagugc

SEQ ID NO: 1394632 - RNA, 19 nt, Artificial Sequence
  Description of Artificial Sequence: Synthetic oligonucleotide
gacaggguccccucgagac

SEQ ID NO: 1394633 - RNA, 19 nt, Artificial Sequence
  Description of Artificial Sequence: Synthetic oligonucleotide
uagaaucugucuccguaga

SEQ ID NO: 1394634 - RNA, 19 nt, Artificial Sequence
  Description of Artificial Sequence: Synthetic oligonucleotide
uacugcacagagccgucgg

SEQ ID NO: 1394635 - RNA, 19 nt, Artificial Sequence
  Description of Artificial Sequence: Synthetic oligonucleotide
ucgcaaagacacacuggcg

SEQ ID NO: 1394636 - RNA, 19 nt, Artificial Sequence
  Description of Artificial Sequence: Synthetic oligonucleotide
cagaguaacaguagcucug

SEQ ID NO: 1394637 - RNA, 19 nt, Artificial Sequence
  Description of Artificial Sequence: Synthetic oligonucleotide
gccccuuuaguccauacgg

SEQ ID NO: 1394638 - RNA, 19 nt, Artificial Sequence
  Description of Artificial Sequence: Synthetic oligonucleotide
gguacaucccagcuguagg

SEQ ID NO: 1394639 - RNA, 19 nt, Artificial Sequence
  Description of Artificial Sequence: Synthetic oligonucleotide
aaagacacacuggcggcag

SEQ ID NO: 1394640 - RNA, 19 nt, Artificial Sequence
  Description of Artificial Sequence: Synthetic oligonucleotide
ucccuaucucuccagguac

SEQ ID NO: 1394641 - RNA, 19 nt, Artificial Sequence
  Description of Artificial Sequence: Synthetic oligonucleotide
agaaucugucuccguagag

SEQ ID NO: 1394642 - RNA, 19 nt, Artificial Sequence
  Description of Artificial Sequence: Synthetic oligonucleotide
ucggucaaaaucgaaguau

SEQ ID NO: 1394643 - RNA, 19 nt, Artificial Sequence
  Description of Artificial Sequence: Synthetic oligonucleotide
cuucaugcccagcauggcc

SEQ ID NO: 1394644 - RNA, 19 nt, Artificial Sequence
  Description of Artificial Sequence: Synthetic oligonucleotide
uuaaucucccucccugaaa

SEQ ID NO: 1394645 - RNA, 19 nt, Artificial Sequence
  Description of Artificial Sequence: Synthetic oligonucleotide
agcagacugucccaguucu

SEQ ID NO: 1394646 - RNA, 19 nt, Artificial Sequence
  Description of Artificial Sequence: Synthetic oligonucleotide
agcuguaaccuccggaccu

SEQ ID NO: 1394647 - RNA, 19 nt, Artificial Sequence
  Description of Artificial Sequence: Synthetic oligonucleotide
aaccuccggaccuucucag

SEQ ID NO: 1394648 - RNA, 19 nt, Artificial Sequence
  Description of Artificial Sequence: Synthetic oligonucleotide
agagaggaggacuucccca

SEQ ID NO: 1394649 - RNA, 19 nt, Artificial Sequence
  Description of Artificial Sequence: Synthetic oligonucleotide
acagacuauggcacaaggg

SEQ ID NO: 1394650 - RNA, 19 nt, Artificial Sequence
  Description of Artificial Sequence: Synthetic oligonucleotide
uauacccagggguuaaaua

SEQ ID NO: 1394651 - RNA, 19 nt, Artificial Sequence
  Description of Artificial Sequence: Synthetic oligonucleotide
agggcugucagaagaugcc

SEQ ID NO: 1394652 - RNA, 19 nt, Artificial Sequence
  Description of Artificial Sequence: Synthetic oligonucleotide
ugggccggaaguuguagcc

SEQ ID NO: 1394653 - RNA, 19 nt, Artificial Sequence
  Description of Artificial Sequence: Synthetic oligonucleotide
gacagcgggcgucuguggg

SEQ ID NO: 1394654 - RNA, 19 nt, Artificial Sequence
  Description of Artificial Sequence: Synthetic oligonucleotide
acuagguacugcacagagc

SEQ ID NO: 1394655 - RNA, 19 nt, Artificial Sequence
  Description of Artificial Sequence: Synthetic oligonucleotide
ugauagcucugguuagggc

SEQ ID NO: 1394656 - RNA, 19 nt, Artificial Sequence
  Description of Artificial Sequence: Synthetic oligonucleotide
acagcgggcgucugugggc

SEQ ID NO: 1394657 - RNA, 19 nt, Artificial Sequence
  Description of Artificial Sequence: Synthetic oligonucleotide
aacauccggauggggcugc

SEQ ID NO: 1394658 - RNA, 19 nt, Artificial Sequence
  Description of Artificial Sequence: Synthetic oligonucleotide
cagggcaugaaagugccag

SEQ ID NO: 1394659 - RNA, 19 nt, Artificial Sequence
  Description of Artificial Sequence: Synthetic oligonucleotide
agccccuuuaguccauacg

SEQ ID NO: 1394660 - RNA, 19 nt, Artificial Sequence
  Description of Artificial Sequence: Synthetic oligonucleotide
acccagcgaagcuguaacc

SEQ ID NO: 1394661 - RNA, 19 nt, Artificial Sequence
  Description of Artificial Sequence: Synthetic oligonucleotide
uacccagggguuaaauagu

SEQ ID NO: 1394662 - RNA, 19 nt, Artificial Sequence
  Description of Artificial Sequence: Synthetic oligonucleotide
gaguggggagaacuuuuag

SEQ ID NO: 1394663 - RNA, 19 nt, Artificial Sequence
  Description of Artificial Sequence: Synthetic oligonucleotide
auacggcagacagagcuuc

SEQ ID NO: 1394664 - RNA, 19 nt, Artificial Sequence
  Description of Artificial Sequence: Synthetic oligonucleotide
uccggaccuucucagggcc

SEQ ID NO: 1394665 - RNA, 19 nt, Artificial Sequence
  Description of Artificial Sequence: Synthetic oligonucleotide
caguccagccccuuuaguc

SEQ ID NO: 1394666 - RNA, 19 nt, Artificial Sequence
  Description of Artificial Sequence: Synthetic oligonucleotide
cacacagcauucaaauuca

SEQ ID NO: 1394667 - RNA, 19 nt, Artificial Sequence
  Description of Artificial Sequence: Synthetic oligonucleotide
ggaucucucggucaaaauc

SEQ ID NO: 1394668 - RNA, 19 nt, Artificial Sequence
  Description of Artificial Sequence: Synthetic oligonucleotide
ucugcugucgguugcucaa

SEQ ID NO: 1394669 - RNA, 19 nt, Artificial Sequence
  Description of Artificial Sequence: Synthetic oligonucleotide
cucaacuagguacugcaca

SEQ ID NO: 1394670 - RNA, 19 nt, Artificial Sequence
  Description of Artificial Sequence: Synthetic oligonucleotide
cacucaacuagguacugca

SEQ ID NO: 1394671 - RNA, 19 nt, Artificial Sequence
  Description of Artificial Sequence: Synthetic oligonucleotide
uauggcacaaggggagaag

SEQ ID NO: 1394672 - RNA, 19 nt, Artificial Sequence
  Description of Artificial Sequence: Synthetic oligonucleotide
gagggcugucagaagaugc

SEQ ID NO: 1394673 - RNA, 19 nt, Artificial Sequence
  Description of Artificial Sequence: Synthetic oligonucleotide
ucuccguagaggaggggcu

SEQ ID NO: 1394674 - RNA, 19 nt, Artificial Sequence
  Description of Artificial Sequence: Synthetic oligonucleotide
uccaggggugaccugucug

SEQ ID NO: 1394675 - RNA, 19 nt, Artificial Sequence
  Description of Artificial Sequence: Synthetic oligonucleotide
cugauagcucugguuaggg

SEQ ID NO: 1394676 - RNA, 19 nt, Artificial Sequence
  Description of Artificial Sequence: Synthetic oligonucleotide
acugcacagagccgucggg

SEQ ID NO: 1394677 - RNA, 19 nt, Artificial Sequence
  Description of Artificial Sequence: Synthetic oligonucleotide
caguagggagaacuacucc

SEQ ID NO: 1394678 - RNA, 19 nt, Artificial Sequence
  Description of Artificial Sequence: Synthetic oligonucleotide
aggacuuccccacuccccu

SEQ ID NO: 1394679 - RNA, 19 nt, Artificial Sequence
  Description of Artificial Sequence: Synthetic oligonucleotide
gggaacgugacaguccugg

SEQ ID NO: 1394680 - RNA, 19 nt, Artificial Sequence
  Description of Artificial Sequence: Synthetic oligonucleotide
cuuuaguccauacggcaga

SEQ ID NO: 1394681 - RNA, 19 nt, Artificial Sequence
  Description of Artificial Sequence: Synthetic oligonucleotide
ucgguugcucaagugcccg

SEQ ID NO: 1394682 - RNA, 19 nt, Artificial Sequence
  Description of Artificial Sequence: Synthetic oligonucleotide
ggaagcaaacauccggaug

SEQ ID NO: 1394683 - RNA, 19 nt, Artificial Sequence
  Description of Artificial Sequence: Synthetic oligonucleotide
cauagaaucugucuccgua

SEQ ID NO: 1394684 - RNA, 19 nt, Artificial Sequence
  Description of Artificial Sequence: Synthetic oligonucleotide
agaggcgaaggggaggauc

SEQ ID NO: 1394685 - RNA, 19 nt, Artificial Sequence
  Description of Artificial Sequence: Synthetic oligonucleotide
ugucuggaaaggccuggga

SEQ ID NO: 1394686 - RNA, 19 nt, Artificial Sequence
  Description of Artificial Sequence: Synthetic oligonucleotide
guugcucaagugcccggcg

SEQ ID NO: 1394687 - RNA, 19 nt, Artificial Sequence
  Description of Artificial Sequence: Synthetic oligonucleotide
cuucucagggccacccggc

SEQ ID NO: 1394688 - RNA, 19 nt, Artificial Sequence
  Description of Artificial Sequence: Synthetic oligonucleotide
uuuaguccauacggcagac

SEQ ID NO: 1394689 - RNA, 19 nt, Artificial Sequence
  Description of Artificial Sequence: Synthetic oligonucleotide
ggaauccuggaccaccacc

SEQ ID NO: 1394690 - RNA, 19 nt, Artificial Sequence
  Description of Artificial Sequence: Synthetic oligonucleotide
augugcccucuccuucucc

SEQ ID NO: 1394691 - RNA, 19 nt, Artificial Sequence
  Description of Artificial Sequence: Synthetic oligonucleotide
guagcucugcugucgguug

SEQ ID NO: 1394692 - RNA, 19 nt, Artificial Sequence
  Description of Artificial Sequence: Synthetic oligonucleotide
aggacccugacaggguccc

SEQ ID NO: 1394693 - RNA, 19 nt, Artificial Sequence
  Description of Artificial Sequence: Synthetic oligonucleotide
acagucauacagagucugg

SEQ ID NO: 1394694 - RNA, 19 nt, Artificial Sequence
  Description of Artificial Sequence: Synthetic oligonucleotide
ucauagaaucugucuccgu

SEQ ID NO: 1394695 - RNA, 19 nt, Artificial Sequence
  Description of Artificial Sequence: Synthetic oligonucleotide
cugucuccguagaggaggg

SEQ ID NO: 1394696 - RNA, 19 nt, Artificial Sequence
  Description of Artificial Sequence: Synthetic oligonucleotide
acuggcggcagacccagga

SEQ ID NO: 1394697 - RNA, 19 nt, Artificial Sequence
  Description of Artificial Sequence: Synthetic oligonucleotide
agacuauggcacaagggga

SEQ ID NO: 1394698 - RNA, 19 nt, Artificial Sequence
  Description of Artificial Sequence: Synthetic oligonucleotide
gguagccaaccccaccucg

SEQ ID NO: 1394699 - RNA, 19 nt, Artificial Sequence
  Description of Artificial Sequence: Synthetic oligonucleotide
gucagggcaugaaagugcc

SEQ ID NO: 1394700 - RNA, 19 nt, Artificial Sequence
  Description of Artificial Sequence: Synthetic oligonucleotide
cacugagugucuggaaagg

SEQ ID NO: 1394701 - RNA, 19 nt, Artificial Sequence
  Description of Artificial Sequence: Synthetic oligonucleotide
agggguuaaauaguuuuaa

SEQ ID NO: 1394702 - RNA, 19 nt, Artificial Sequence
  Description of Artificial Sequence: Synthetic oligonucleotide
guagccaaccccaccucgg

SEQ ID NO: 1394703 - RNA, 19 nt, Artificial Sequence
  Description of Artificial Sequence: Synthetic oligonucleotide
ggcuugcucagacacuggg

SEQ ID NO: 1394704 - RNA, 19 nt, Artificial Sequence
  Description of Artificial Sequence: Synthetic oligonucleotide
acucaacuagguacugcac

SEQ ID NO: 1394705 - RNA, 19 nt, Artificial Sequence
  Description of Artificial Sequence: Synthetic oligonucleotide
cagcauucaaauucauaga

SEQ ID NO: 1394706 - RNA, 19 nt, Artificial Sequence
  Description of Artificial Sequence: Synthetic oligonucleotide
uguaaccuccggaccuucu

SEQ ID NO: 1394707 - RNA, 19 nt, Artificial Sequence
  Description of Artificial Sequence: Synthetic oligonucleotide
ggagagggcugucagaaga

SEQ ID NO: 1394708 - RNA, 19 nt, Artificial Sequence
  Description of Artificial Sequence: Synthetic oligonucleotide
ccuuuaguccauacggcag

SEQ ID NO: 1394709 - RNA, 19 nt, Artificial Sequence
  Description of Artificial Sequence: Synthetic oligonucleotide
acucccuaucucuccaggu

SEQ ID NO: 1394710 - RNA, 19 nt, Artificial Sequence
  Description of Artificial Sequence: Synthetic oligonucleotide
gucuccguagaggaggggc

SEQ ID NO: 1394711 - RNA, 19 nt, Artificial Sequence
  Description of Artificial Sequence: Synthetic oligonucleotide
agacagguagccaacccca

SEQ ID NO: 1394712 - RNA, 19 nt, Artificial Sequence
  Description of Artificial Sequence: Synthetic oligonucleotide
cucgagacagguagccaac

SEQ ID NO: 1394713 - RNA, 19 nt, Artificial Sequence
  Description of Artificial Sequence: Synthetic oligonucleotide
uugcucaagugcccggcgu

SEQ ID NO: 1394714 - RNA, 19 nt, Artificial Sequence
  Description of Artificial Sequence: Synthetic oligonucleotide
ugugggccggaaguuguag

SEQ ID NO: 1394715 - RNA, 19 nt, Artificial Sequence
  Description of Artificial Sequence: Synthetic oligonucleotide
uguggaguuccagggguga

SEQ ID NO: 1394716 - RNA, 19 nt, Artificial Sequence
  Description of Artificial Sequence: Synthetic oligonucleotide
gcugggaagaacguucucc

SEQ ID NO: 1394717 - RNA, 19 nt, Artificial Sequence
  Description of Artificial Sequence: Synthetic oligonucleotide
cacccagcgaagcuguaac

SEQ ID NO: 1394718 - RNA, 19 nt, Artificial Sequence
  Description of Artificial Sequence: Synthetic oligonucleotide
ugagaaggaugagggucag

SEQ ID NO: 1394719 - RNA, 19 nt, Artificial Sequence
  Description of Artificial Sequence: Synthetic oligonucleotide
ugcucaagugcccggcguc

SEQ ID NO: 1394720 - RNA, 19 nt, Artificial Sequence
  Description of Artificial Sequence: Synthetic oligonucleotide
ugacaggguccccucgaga

SEQ ID NO: 1394721 - RNA, 19 nt, Artificial Sequence
  Description of Artificial Sequence: Synthetic oligonucleotide
gcacugagugucuggaaag

SEQ ID NO: 1394722 - RNA, 19 nt, Artificial Sequence
  Description of Artificial Sequence: Synthetic oligonucleotide
cagucucuauacccagggg

SEQ ID NO: 1394723 - RNA, 19 nt, Artificial Sequence
  Description of Artificial Sequence: Synthetic oligonucleotide
ucucucggucaaaaucgaa

SEQ ID NO: 1394724 - RNA, 19 nt, Artificial Sequence
  Description of Artificial Sequence: Synthetic oligonucleotide
aggaagcaaacauccggau

SEQ ID NO: 1394725 - RNA, 19 nt, Artificial Sequence
  Description of Artificial Sequence: Synthetic oligonucleotide
ucucuuuauuacagucaua

SEQ ID NO: 1394726 - RNA, 19 nt, Artificial Sequence
  Description of Artificial Sequence: Synthetic oligonucleotide
ugcccggcgucccagucca

SEQ ID NO: 1394727 - RNA, 19 nt, Artificial Sequence
  Description of Artificial Sequence: Synthetic oligonucleotide
ggcaaucgcaaagacacac

SEQ ID NO: 1394728 - RNA, 19 nt, Artificial Sequence
  Description of Artificial Sequence: Synthetic oligonucleotide
gugggccacauccacccag

SEQ ID NO: 1394729 - RNA, 19 nt, Artificial Sequence
  Description of Artificial Sequence: Synthetic oligonucleotide
uagccaaccccaccucgga

SEQ ID NO: 1394730 - RNA, 19 nt, Artificial Sequence
  Description of Artificial Sequence: Synthetic oligonucleotide
agggagaacuacucccuau

SEQ ID NO: 1394731 - RNA, 19 nt, Artificial Sequence
  Description of Artificial Sequence: Synthetic oligonucleotide
acacugaggccugcagcgc

SEQ ID NO: 1394732 - RNA, 19 nt, Artificial Sequence
  Description of Artificial Sequence: Synthetic oligonucleotide
ucgagacagguagccaacc

SEQ ID NO: 1394733 - RNA, 19 nt, Artificial Sequence
  Description of Artificial Sequence: Synthetic oligonucleotide
gaaaugaagcgguccuugu

SEQ ID NO: 1394734 - RNA, 19 nt, Artificial Sequence
  Description of Artificial Sequence: Synthetic oligonucleotide
ggguucacuguccccagag

SEQ ID NO: 1394735 - RNA, 19 nt, Artificial Sequence
  Description of Artificial Sequence: Synthetic oligonucleotide
ggucagggcaugaaagugc

SEQ ID NO: 1394736 - RNA, 19 nt, Artificial Sequence
  Description of Artificial Sequence: Synthetic oligonucleotide
cacccuccgagcgaggacc

SEQ ID NO: 1394737 - RNA, 19 nt, Artificial Sequence
  Description of Artificial Sequence: Synthetic oligonucleotide
accuccggaccuucucagg

SEQ ID NO: 1394738 - RNA, 19 nt, Artificial Sequence
  Description of Artificial Sequence: Synthetic oligonucleotide
guaaccuccggaccuucuc

SEQ ID NO: 1394739 - RNA, 19 nt, Artificial Sequence
  Description of Artificial Sequence: Synthetic oligonucleotide
aagacacacuggcggcaga

SEQ ID NO: 1394740 - RNA, 19 nt, Artificial Sequence
  Description of Artificial Sequence: Synthetic oligonucleotide
guagaggaggggcuugcuc

SEQ ID NO: 1394741 - RNA, 19 nt, Artificial Sequence
  Description of Artificial Sequence: Synthetic oligonucleotide
gcggcaaggagcugggaag

SEQ ID NO: 1394742 - RNA, 19 nt, Artificial Sequence
  Description of Artificial Sequence: Synthetic oligonucleotide
uggcaaucgcaaagacaca

SEQ ID NO: 1394743 - RNA, 19 nt, Artificial Sequence
  Description of Artificial Sequence: Synthetic oligonucleotide
cuacucccuaucucuccag

SEQ ID NO: 1394744 - RNA, 19 nt, Artificial Sequence
  Description of Artificial Sequence: Synthetic oligonucleotide
gguggaaggaagcaaacau

SEQ ID NO: 1394745 - RNA, 19 nt, Artificial Sequence
  Description of Artificial Sequence: Synthetic oligonucleotide
agacagacuauggcacaag

SEQ ID NO: 1394746 - RNA, 19 nt, Artificial Sequence
  Description of Artificial Sequence: Synthetic oligonucleotide
cuccggaccuucucagggc

SEQ ID NO: 1394747 - RNA, 19 nt, Artificial Sequence
  Description of Artificial Sequence: Synthetic oligonucleotide
gguuagggcuggugggugg

SEQ ID NO: 1394748 - RNA, 19 nt, Artificial Sequence
  Description of Artificial Sequence: Synthetic oligonucleotide
accacuggagacagcuccg

SEQ ID NO: 1394749 - RNA, 19 nt, Artificial Sequence
  Description of Artificial Sequence: Synthetic oligonucleotide
agggcaugaaagugccagu

SEQ ID NO: 1394750 - RNA, 19 nt, Artificial Sequence
  Description of Artificial Sequence: Synthetic oligonucleotide
aagcgguccuuguggcugu

SEQ ID NO: 1394751 - RNA, 19 nt, Artificial Sequence
  Description of Artificial Sequence: Synthetic oligonucleotide
guuguagccccugcugccc

SEQ ID NO: 1394752 - RNA, 19 nt, Artificial Sequence
  Description of Artificial Sequence: Synthetic oligonucleotide
cugcacagagccgucgggc

SEQ ID NO: 1394753 - RNA, 19 nt, Artificial Sequence
  Description of Artificial Sequence: Synthetic oligonucleotide
agcgaagcuguaaccuccg

SEQ ID NO: 1394754 - RNA, 19 nt, Artificial Sequence
  Description of Artificial Sequence: Synthetic oligonucleotide
ccuccagaguaacaguagc

SEQ ID NO: 1394755 - RNA, 19 nt, Artificial Sequence
  Description of Artificial Sequence: Synthetic oligonucleotide
uacggcagacagagcuuca

SEQ ID NO: 1394756 - RNA, 19 nt, Artificial Sequence
  Description of Artificial Sequence: Synthetic oligonucleotide
guacugcacagagccgucg

SEQ ID NO: 1394757 - RNA, 19 nt, Artificial Sequence
  Description of Artificial Sequence: Synthetic oligonucleotide
aguagcucugcugucgguu

SEQ ID NO: 1394758 - RNA, 19 nt, Artificial Sequence
  Description of Artificial Sequence: Synthetic oligonucleotide
cucccugaaaugaagcggu

SEQ ID NO: 1394759 - RNA, 19 nt, Artificial Sequence
  Description of Artificial Sequence: Synthetic oligonucleotide
ucucuauacccagggguua

SEQ ID NO: 1394760 - RNA, 19 nt, Artificial Sequence
  Description of Artificial Sequence: Synthetic oligonucleotide
uccauacggcagacagagc

SEQ ID NO: 1394761 - RNA, 19 nt, Artificial Sequence
  Description of Artificial Sequence: Synthetic oligonucleotide
uaggggugucugaaagcuc

SEQ ID NO: 1394762 - RNA, 19 nt, Artificial Sequence
  Description of Artificial Sequence: Synthetic oligonucleotide
cccucccugaaaugaagcg

SEQ ID NO: 1394763 - RNA, 19 nt, Artificial Sequence
  Description of Artificial Sequence: Synthetic oligonucleotide
ugcagcauuucagguucca

SEQ ID NO: 1394764 - RNA, 19 nt, Artificial Sequence
  Description of Artificial Sequence: Synthetic oligonucleotide
ugguuagggcuggugggug

SEQ ID NO: 1394765 - RNA, 19 nt, Artificial Sequence
  Description of Artificial Sequence: Synthetic oligonucleotide
ccucccugaaaugaagcgg

SEQ ID NO: 1394766 - RNA, 19 nt, Artificial Sequence
  Description of Artificial Sequence: Synthetic oligonucleotide
agaggaggacuuccccacu

SEQ ID NO: 1394767 - RNA, 19 nt, Artificial Sequence
  Description of Artificial Sequence: Synthetic oligonucleotide
cucguggaaccacuggaga

SEQ ID NO: 1394768 - RNA, 19 nt, Artificial Sequence
  Description of Artificial Sequence: Synthetic oligonucleotide
aggaucucucggucaaaau

SEQ ID NO: 1394769 - RNA, 19 nt, Artificial Sequence
  Description of Artificial Sequence: Synthetic oligonucleotide
uccccucgagacagguagc

SEQ ID NO: 1394770 - RNA, 19 nt, Artificial Sequence
  Description of Artificial Sequence: Synthetic oligonucleotide
ccugggaacgugacagucc

SEQ ID NO: 1394771 - RNA, 19 nt, Artificial Sequence
  Description of Artificial Sequence: Synthetic oligonucleotide
ccuccggaccuucucaggg

SEQ ID NO: 1394772 - RNA, 19 nt, Artificial Sequence
  Description of Artificial Sequence: Synthetic oligonucleotide
ucccugaaaugaagcgguc

SEQ ID NO: 1394773 - RNA, 19 nt, Artificial Sequence
  Description of Artificial Sequence: Synthetic oligonucleotide
acuauggcacaaggggaga

SEQ ID NO: 1394774 - RNA, 19 nt, Artificial Sequence
  Description of Artificial Sequence: Synthetic oligonucleotide
ggcacugagugucuggaaa

SEQ ID NO: 1394775 - RNA, 19 nt, Artificial Sequence
  Description of Artificial Sequence: Synthetic oligonucleotide
gagacagacuauggcacaa

SEQ ID NO: 1394776 - RNA, 19 nt, Artificial Sequence
  Description of Artificial Sequence: Synthetic oligonucleotide
gaggaucucucggucaaaa

SEQ ID NO: 1394777 - RNA, 19 nt, Artificial Sequence
  Description of Artificial Sequence: Synthetic oligonucleotide
aagccaauguggaguucca

SEQ ID NO: 1394778 - RNA, 19 nt, Artificial Sequence
  Description of Artificial Sequence: Synthetic oligonucleotide
ggggcuugcucagacacug

SEQ ID NO: 1394779 - RNA, 19 nt, Artificial Sequence
  Description of Artificial Sequence: Synthetic oligonucleotide
guaggugaggucagagguc

SEQ ID NO: 1394780 - RNA, 19 nt, Artificial Sequence
  Description of Artificial Sequence: Synthetic oligonucleotide
ggcauaggggcccuucuuc

SEQ ID NO: 1394781 - RNA, 19 nt, Artificial Sequence
  Description of Artificial Sequence: Synthetic oligonucleotide
caggagcagacugucccag

SEQ ID NO: 1394782 - RNA, 19 nt, Artificial Sequence
  Description of Artificial Sequence: Synthetic oligonucleotide
ggccggaaguuguagcccc

SEQ ID NO: 1394783 - RNA, 19 nt, Artificial Sequence
  Description of Artificial Sequence: Synthetic oligonucleotide
cagacacugaggugguaga

SEQ ID NO: 1394784 - RNA, 19 nt, Artificial Sequence
  Description of Artificial Sequence: Synthetic oligonucleotide
cagggguuaaauaguuuua

SEQ ID NO: 1394785 - RNA, 19 nt, Artificial Sequence
  Description of Artificial Sequence: Synthetic oligonucleotide
uguagccccugcugcccug

SEQ ID NO: 1394786 - RNA, 19 nt, Artificial Sequence
  Description of Artificial Sequence: Synthetic oligonucleotide
ucuauacccagggguuaaa

SEQ ID NO: 1394787 - RNA, 19 nt, Artificial Sequence
  Description of Artificial Sequence: Synthetic oligonucleotide
ccucguggaaccacuggag

SEQ ID NO: 1394788 - RNA, 19 nt, Artificial Sequence
  Description of Artificial Sequence: Synthetic oligonucleotide
uccgacacugcagcauuuc

SEQ ID NO: 1394789 - RNA, 19 nt, Artificial Sequence
  Description of Artificial Sequence: Synthetic oligonucleotide
gaugugcccucuccuucuc

SEQ ID NO: 1394790 - RNA, 19 nt, Artificial Sequence
  Description of Artificial Sequence: Synthetic oligonucleotide
ggagacagacuauggcaca

SEQ ID NO: 1394791 - RNA, 19 nt, Artificial Sequence
  Description of Artificial Sequence: Synthetic oligonucleotide
guguggacggggagguggg

SEQ ID NO: 1394792 - RNA, 19 nt, Artificial Sequence
  Description of Artificial Sequence: Synthetic oligonucleotide
ugggaacgugacaguccug

SEQ ID NO: 1394793 - RNA, 19 nt, Artificial Sequence
  Description of Artificial Sequence: Synthetic oligonucleotide
gggagaacuuuuagggaug

SEQ ID NO: 1394794 - RNA, 19 nt, Artificial Sequence
  Description of Artificial Sequence: Synthetic oligonucleotide
ugucuccguagaggagggg

SEQ ID NO: 1394795 - RNA, 19 nt, Artificial Sequence
  Description of Artificial Sequence: Synthetic oligonucleotide
ggaagaacguucucccuua

SEQ ID NO: 1394796 - RNA, 19 nt, Artificial Sequence
  Description of Artificial Sequence: Synthetic oligonucleotide
gacagguagccaaccccac

SEQ ID NO: 1394797 - RNA, 19 nt, Artificial Sequence
  Description of Artificial Sequence: Synthetic oligonucleotide
gucgguggggaagccaaug

SEQ ID NO: 1394798 - RNA, 19 nt, Artificial Sequence
  Description of Artificial Sequence: Synthetic oligonucleotide
guccagccccuuuagucca

SEQ ID NO: 1394799 - RNA, 19 nt, Artificial Sequence
  Description of Artificial Sequence: Synthetic oligonucleotide
ggccacccggcacacacag

SEQ ID NO: 1394800 - RNA, 19 nt, Artificial Sequence
  Description of Artificial Sequence: Synthetic oligonucleotide
cacagagccgucgggccgc

SEQ ID NO: 1394801 - RNA, 19 nt, Artificial Sequence
  Description of Artificial Sequence: Synthetic oligonucleotide
caaagacacacuggcggca

SEQ ID NO: 1394802 - RNA, 19 nt, Artificial Sequence
  Description of Artificial Sequence: Synthetic oligonucleotide
gucgguugcucaagugccc

SEQ ID NO: 1394803 - RNA, 19 nt, Artificial Sequence
  Description of Artificial Sequence: Synthetic oligonucleotide
aggagcagacugucccagu

SEQ ID NO: 1394804 - RNA, 19 nt, Artificial Sequence
  Description of Artificial Sequence: Synthetic oligonucleotide
gcacagagccgucgggccg

SEQ ID NO: 1394805 - RNA, 19 nt, Artificial Sequence
  Description of Artificial Sequence: Synthetic oligonucleotide
gcccugauagcucugguua

SEQ ID NO: 1394806 - RNA, 19 nt, Artificial Sequence
  Description of Artificial Sequence: Synthetic oligonucleotide
ccugauagcucugguuagg

SEQ ID NO: 1394807 - RNA, 19 nt, Artificial Sequence
  Description of Artificial Sequence: Synthetic oligonucleotide
cugggaacgugacaguccu

SEQ ID NO: 1394808 - RNA, 19 nt, Artificial Sequence
  Description of Artificial Sequence: Synthetic oligonucleotide
cucggucaaaaucgaagua

SEQ ID NO: 1394809 - RNA, 19 nt, Artificial Sequence
  Description of Artificial Sequence: Synthetic oligonucleotide
ccauacggcagacagagcu

SEQ ID NO: 1394810 - RNA, 19 nt, Artificial Sequence
  Description of Artificial Sequence: Synthetic oligonucleotide
aucucucggucaaaaucga

SEQ ID NO: 1394811 - RNA, 19 nt, Artificial Sequence
  Description of Artificial Sequence: Synthetic oligonucleotide
guagggagaacuacucccu

SEQ ID NO: 1394812 - RNA, 19 nt, Artificial Sequence
  Description of Artificial Sequence: Synthetic oligonucleotide
cagguagccaaccccaccu

SEQ ID NO: 1394813 - RNA, 19 nt, Artificial Sequence
  Description of Artificial Sequence: Synthetic oligonucleotide
auguggaguuccaggggug

SEQ ID NO: 1394814 - RNA, 19 nt, Artificial Sequence
  Description of Artificial Sequence: Synthetic oligonucleotide
gcaguagggagaacuacuc

SEQ ID NO: 1394815 - RNA, 19 nt, Artificial Sequence
  Description of Artificial Sequence: Synthetic oligonucleotide
gguugcucaagugcccggc

SEQ ID NO: 1394816 - RNA, 19 nt, Artificial Sequence
  Description of Artificial Sequence: Synthetic oligonucleotide
gcugucgguugcucaagug

SEQ ID NO: 1394817 - RNA, 19 nt, Artificial Sequence
  Description of Artificial Sequence: Synthetic oligonucleotide
gaugggagcuggggcugag

SEQ ID NO: 1394818 - RNA, 19 nt, Artificial Sequence
  Description of Artificial Sequence: Synthetic oligonucleotide
cucccuaucucuccaggua

SEQ ID NO: 1394819 - RNA, 19 nt, Artificial Sequence
  Description of Artificial Sequence: Synthetic oligonucleotide
uagggaugucgguggggaa

SEQ ID NO: 1394820 - RNA, 19 nt, Artificial Sequence
  Description of Artificial Sequence: Synthetic oligonucleotide
uggcuguugagggcggcaa

SEQ ID NO: 1394821 - RNA, 19 nt, Artificial Sequence
  Description of Artificial Sequence: Synthetic oligonucleotide
agccauugaguggggagaa

SEQ ID NO: 1394822 - RNA, 19 nt, Artificial Sequence
  Description of Artificial Sequence: Synthetic oligonucleotide
gagaacuuuuagggauguc

SEQ ID NO: 1394823 - RNA, 19 nt, Artificial Sequence
  Description of Artificial Sequence: Synthetic oligonucleotide
cccugaaaugaagcggucc

SEQ ID NO: 1394824 - RNA, 19 nt, Artificial Sequence
  Description of Artificial Sequence: Synthetic oligonucleotide
ugucgguggggaagccaau

SEQ ID NO: 1394825 - RNA, 19 nt, Artificial Sequence
  Description of Artificial Sequence: Synthetic oligonucleotide
ggauggggcugcugggcag

SEQ ID NO: 1394826 - RNA, 19 nt, Artificial Sequence
  Description of Artificial Sequence: Synthetic oligonucleotide
ggugcaggccucguggaac

SEQ ID NO: 1394827 - RNA, 19 nt, Artificial Sequence
  Description of Artificial Sequence: Synthetic oligonucleotide
gccucguggaaccacugga

SEQ ID NO: 1394828 - RNA, 19 nt, Artificial Sequence
  Description of Artificial Sequence: Synthetic oligonucleotide
acccuccgagcgaggaccc

SEQ ID NO: 1394829 - RNA, 19 nt, Artificial Sequence
  Description of Artificial Sequence: Synthetic oligonucleotide
ggagaacuacucccuaucu

SEQ ID NO: 1394830 - RNA, 19 nt, Artificial Sequence
  Description of Artificial Sequence: Synthetic oligonucleotide
ccagcgaagcuguaaccuc

SEQ ID NO: 1394831 - RNA, 19 nt, Artificial Sequence
  Description of Artificial Sequence: Synthetic oligonucleotide
cugggcaguagggagaacu

SEQ ID NO: 1394832 - RNA, 19 nt, Artificial Sequence
  Description of Artificial Sequence: Synthetic oligonucleotide
agcuccgacacugcagcau

SEQ ID NO: 1394833 - RNA, 19 nt, Artificial Sequence
  Description of Artificial Sequence: Synthetic oligonucleotide
gggaugucgguggggaagc

SEQ ID NO: 1394834 - RNA, 19 nt, Artificial Sequence
  Description of Artificial Sequence: Synthetic oligonucleotide
cagcgggcgucugugggcc

SEQ ID NO: 1394835 - RNA, 19 nt, Artificial Sequence
  Description of Artificial Sequence: Synthetic oligonucleotide
gggcugucagaagaugccc

SEQ ID NO: 1394836 - RNA, 19 nt, Artificial Sequence
  Description of Artificial Sequence: Synthetic oligonucleotide
ccuggauuccagccugggc

SEQ ID NO: 1394837 - RNA, 19 nt, Artificial Sequence
  Description of Artificial Sequence: Synthetic oligonucleotide
cagccccuuuaguccauac

SEQ ID NO: 1394838 - RNA, 19 nt, Artificial Sequence
  Description of Artificial Sequence: Synthetic oligonucleotide
cccaggaugugcccucucc

SEQ ID NO: 1394839 - RNA, 19 nt, Artificial Sequence
  Description of Artificial Sequence: Synthetic oligonucleotide
gaguaacaguagcucugcu

SEQ ID NO: 1394840 - RNA, 19 nt, Artificial Sequence
  Description of Artificial Sequence: Synthetic oligonucleotide
uguggacggggaggugggc

SEQ ID NO: 1394841 - RNA, 19 nt, Artificial Sequence
  Description of Artificial Sequence: Synthetic oligonucleotide
gauuccagccugggcagua

SEQ ID NO: 1394842 - RNA, 19 nt, Artificial Sequence
  Description of Artificial Sequence: Synthetic oligonucleotide
gugccaguguguggacggg

SEQ ID NO: 1394843 - RNA, 19 nt, Artificial Sequence
  Description of Artificial Sequence: Synthetic oligonucleotide
cugcugucgguugcucaag

SEQ ID NO: 1394844 - RNA, 19 nt, Artificial Sequence
  Description of Artificial Sequence: Synthetic oligonucleotide
uccgagcgaggacccugac

SEQ ID NO: 1394845 - RNA, 19 nt, Artificial Sequence
  Description of Artificial Sequence: Synthetic oligonucleotide
caggggucaugaaggggca

SEQ ID NO: 1394846 - RNA, 19 nt, Artificial Sequence
  Description of Artificial Sequence: Synthetic oligonucleotide
acccagggguuaaauaguu

SEQ ID NO: 1394847 - RNA, 19 nt, Artificial Sequence
  Description of Artificial Sequence: Synthetic oligonucleotide
ggcggcaaggagcugggaa

SEQ ID NO: 1394848 - RNA, 19 nt, Artificial Sequence
  Description of Artificial Sequence: Synthetic oligonucleotide
cucuauacccagggguuaa

SEQ ID NO: 1394849 - RNA, 19 nt, Artificial Sequence
  Description of Artificial Sequence: Synthetic oligonucleotide
cgagacagguagccaaccc

SEQ ID NO: 1394850 - RNA, 19 nt, Artificial Sequence
  Description of Artificial Sequence: Synthetic oligonucleotide
gucucuauacccagggguu

SEQ ID NO: 1394851 - RNA, 19 nt, Artificial Sequence
  Description of Artificial Sequence: Synthetic oligonucleotide
ccugaaaugaagcgguccu

SEQ ID NO: 1394852 - RNA, 19 nt, Artificial Sequence
  Description of Artificial Sequence: Synthetic oligonucleotide
cuauggcacaaggggagaa

SEQ ID NO: 1394853 - RNA, 19 nt, Artificial Sequence
  Description of Artificial Sequence: Synthetic oligonucleotide
cagcauggcccgggcauag

SEQ ID NO: 1394854 - RNA, 19 nt, Artificial Sequence
  Description of Artificial Sequence: Synthetic oligonucleotide
aggcgaaggggaggaucuc

SEQ ID NO: 1394855 - RNA, 19 nt, Artificial Sequence
  Description of Artificial Sequence: Synthetic oligonucleotide
ccucgagacagguagccaa

SEQ ID NO: 1394856 - RNA, 19 nt, Artificial Sequence
  Description of Artificial Sequence: Synthetic oligonucleotide
acggcagacagagcuucau

SEQ ID NO: 1394857 - RNA, 19 nt, Artificial Sequence
  Description of Artificial Sequence: Synthetic oligonucleotide
ccccuccccacucaacuag

SEQ ID NO: 1394858 - RNA, 19 nt, Artificial Sequence
  Description of Artificial Sequence: Synthetic oligonucleotide
guggacggggaggugggca

SEQ ID NO: 1394859 - RNA, 19 nt, Artificial Sequence
  Description of Artificial Sequence: Synthetic oligonucleotide
ccagaggucccugcagugc

SEQ ID NO: 1394860 - RNA, 19 nt, Artificial Sequence
  Description of Artificial Sequence: Synthetic oligonucleotide
ccacucaacuagguacugc

SEQ ID NO: 1394861 - RNA, 19 nt, Artificial Sequence
  Description of Artificial Sequence: Synthetic oligonucleotide
gggcaguagggagaacuac

SEQ ID NO: 1394862 - RNA, 19 nt, Artificial Sequence
  Description of Artificial Sequence: Synthetic oligonucleotide
ccccagucucuauacccag

SEQ ID NO: 1394863 - RNA, 19 nt, Artificial Sequence
  Description of Artificial Sequence: Synthetic oligonucleotide
ggcaugaaagugccagugu

SEQ ID NO: 1394864 - RNA, 19 nt, Artificial Sequence
  Description of Artificial Sequence: Synthetic oligonucleotide
gggaagaacguucucccuu

SEQ ID NO: 1394865 - RNA, 19 nt, Artificial Sequence
  Description of Artificial Sequence: Synthetic oligonucleotide
ggcgucugugggccggaag

SEQ ID NO: 1394866 - RNA, 19 nt, Artificial Sequence
  Description of Artificial Sequence: Synthetic oligonucleotide
cuguaaccuccggaccuuc

SEQ ID NO: 1394867 - RNA, 19 nt, Artificial Sequence
  Description of Artificial Sequence: Synthetic oligonucleotide
ccccucuugguggcaaucg

SEQ ID NO: 1394868 - RNA, 19 nt, Artificial Sequence
  Description of Artificial Sequence: Synthetic oligonucleotide
caugcccagcauggcccgg

SEQ ID NO: 1394869 - RNA, 19 nt, Artificial Sequence
  Description of Artificial Sequence: Synthetic oligonucleotide
gaggcgggguccgcgcgug

SEQ ID NO: 1394870 - RNA, 19 nt, Artificial Sequence
  Description of Artificial Sequence: Synthetic oligonucleotide
gacggggaggugggcagga

SEQ ID NO: 1394871 - RNA, 19 nt, Artificial Sequence
  Description of Artificial Sequence: Synthetic oligonucleotide
gcauucaaauucauagaau

SEQ ID NO: 1394872 - RNA, 19 nt, Artificial Sequence
  Description of Artificial Sequence: Synthetic oligonucleotide
ggggucaugaaggggcaga

SEQ ID NO: 1394873 - RNA, 19 nt, Artificial Sequence
  Description of Artificial Sequence: Synthetic oligonucleotide
ggacuuccccacuccccug

SEQ ID NO: 1394874 - RNA, 19 nt, Artificial Sequence
  Description of Artificial Sequence: Synthetic oligonucleotide
aggggcuugcucagacacu

SEQ ID NO: 1394875 - RNA, 19 nt, Artificial Sequence
  Description of Artificial Sequence: Synthetic oligonucleotide
ccaaccccaccucggacuc

SEQ ID NO: 1394876 - RNA, 19 nt, Artificial Sequence
  Description of Artificial Sequence: Synthetic oligonucleotide
uccacuccccggggccucc

SEQ ID NO: 1394877 - RNA, 19 nt, Artificial Sequence
  Description of Artificial Sequence: Synthetic oligonucleotide
ggaguuccaggggugaccu

SEQ ID NO: 1394878 - RNA, 19 nt, Artificial Sequence
  Description of Artificial Sequence: Synthetic oligonucleotide
guggcuguugagggcggca

SEQ ID NO: 1394879 - RNA, 19 nt, Artificial Sequence
  Description of Artificial Sequence: Synthetic oligonucleotide
ggagaacuuuuagggaugu

SEQ ID NO: 1394880 - RNA, 19 nt, Artificial Sequence
  Description of Artificial Sequence: Synthetic oligonucleotide
ccccucgagacagguagcc

SEQ ID NO: 1394881 - RNA, 19 nt, Artificial Sequence
  Description of Artificial Sequence: Synthetic oligonucleotide
cgaagcuguaaccuccgga

SEQ ID NO: 1394882 - RNA, 19 nt, Artificial Sequence
  Description of Artificial Sequence: Synthetic oligonucleotide
gccgcacccuccgagcgag

SEQ ID NO: 1394883 - RNA, 19 nt, Artificial Sequence
  Description of Artificial Sequence: Synthetic oligonucleotide
ggggugucugaaagcuccc

SEQ ID NO: 1394884 - RNA, 19 nt, Artificial Sequence
  Description of Artificial Sequence: Synthetic oligonucleotide
guuagggcugguggguggu

SEQ ID NO: 1394885 - RNA, 19 nt, Artificial Sequence
  Description of Artificial Sequence: Synthetic oligonucleotide
gggguccgcgcguggagac

SEQ ID NO: 1394886 - RNA, 19 nt, Artificial Sequence
  Description of Artificial Sequence: Synthetic oligonucleotide
cugguuagggcuggugggu

SEQ ID NO: 1394887 - RNA, 19 nt, Artificial Sequence
  Description of Artificial Sequence: Synthetic oligonucleotide
ggagacacugaggccugca

SEQ ID NO: 1394888 - RNA, 19 nt, Artificial Sequence
  Description of Artificial Sequence: Synthetic oligonucleotide
uuccacuccccggggccuc

SEQ ID NO: 1394889 - RNA, 19 nt, Artificial Sequence
  Description of Artificial Sequence: Synthetic oligonucleotide
cccugacaggguccccucg

SEQ ID NO: 1394890 - RNA, 19 nt, Artificial Sequence
  Description of Artificial Sequence: Synthetic oligonucleotide
cuauacccagggguuaaau

SEQ ID NO: 1394891 - RNA, 19 nt, Artificial Sequence
  Description of Artificial Sequence: Synthetic oligonucleotide
gguccgcgcguggagacca

SEQ ID NO: 1394892 - RNA, 19 nt, Artificial Sequence
  Description of Artificial Sequence: Synthetic oligonucleotide
gcucugguuagggcuggug

SEQ ID NO: 1394893 - RNA, 19 nt, Artificial Sequence
  Description of Artificial Sequence: Synthetic oligonucleotide
cccuaucucuccagguaca

SEQ ID NO: 1394894 - RNA, 19 nt, Artificial Sequence
  Description of Artificial Sequence: Synthetic oligonucleotide
uccgcgcguggagaccaaa

SEQ ID NO: 1394895 - RNA, 19 nt, Artificial Sequence
  Description of Artificial Sequence: Synthetic oligonucleotide
gcgaaggggaggaucucuc

SEQ ID NO: 1394896 - RNA, 19 nt, Artificial Sequence
  Description of Artificial Sequence: Synthetic oligonucleotide
ggucaaaaucgaaguauuu

SEQ ID NO: 1394897 - RNA, 19 nt, Artificial Sequence
  Description of Artificial Sequence: Synthetic oligonucleotide
cccugggaacgugacaguc

SEQ ID NO: 1394898 - RNA, 19 nt, Artificial Sequence
  Description of Artificial Sequence: Synthetic oligonucleotide
guagccccugcugcccuga

SEQ ID NO: 1394899 - RNA, 19 nt, Artificial Sequence
  Description of Artificial Sequence: Synthetic oligonucleotide
ccgacacugcagcauuuca

SEQ ID NO: 1394900 - RNA, 19 nt, Artificial Sequence
  Description of Artificial Sequence: Synthetic oligonucleotide
gcaaucgcaaagacacacu

SEQ ID NO: 1394901 - RNA, 19 nt, Artificial Sequence
  Description of Artificial Sequence: Synthetic oligonucleotide
ccggauggggcugcugggc

SEQ ID NO: 1394902 - RNA, 19 nt, Artificial Sequence
  Description of Artificial Sequence: Synthetic oligonucleotide
ggaacgugacaguccuggu

SEQ ID NO: 1394903 - RNA, 19 nt, Artificial Sequence
  Description of Artificial Sequence: Synthetic oligonucleotide
gcacccuccgagcgaggac

SEQ ID NO: 1394904 - RNA, 19 nt, Artificial Sequence
  Description of Artificial Sequence: Synthetic oligonucleotide
cugugggccggaaguugua

SEQ ID NO: 1394905 - RNA, 19 nt, Artificial Sequence
  Description of Artificial Sequence: Synthetic oligonucleotide
acauccggauggggcugcu

SEQ ID NO: 1394906 - RNA, 19 nt, Artificial Sequence
  Description of Artificial Sequence: Synthetic oligonucleotide
ccguagaggaggggcuugc

SEQ ID NO: 1394907 - RNA, 19 nt, Artificial Sequence
  Description of Artificial Sequence: Synthetic oligonucleotide
gcgggguccgcgcguggag

SEQ ID NO: 1394908 - RNA, 19 nt, Artificial Sequence
  Description of Artificial Sequence: Synthetic oligonucleotide
ggcggcagacccaggaugu

SEQ ID NO: 1394909 - RNA, 19 nt, Artificial Sequence
  Description of Artificial Sequence: Synthetic oligonucleotide
cccacucaacuagguacug

SEQ ID NO: 1394910 - RNA, 19 nt, Artificial Sequence
  Description of Artificial Sequence: Synthetic oligonucleotide
ggaccuucucagggccacc

SEQ ID NO: 1394911 - RNA, 19 nt, Artificial Sequence
  Description of Artificial Sequence: Synthetic oligonucleotide
gcuugcucagacacugggu

SEQ ID NO: 1394912 - RNA, 19 nt, Artificial Sequence
  Description of Artificial Sequence: Synthetic oligonucleotide
ggugggccacauccaccca

SEQ ID NO: 1394913 - RNA, 19 nt, Artificial Sequence
  Description of Artificial Sequence: Synthetic oligonucleotide
ccggucccuggagacagac

SEQ ID NO: 1394914 - RNA, 19 nt, Artificial Sequence
  Description of Artificial Sequence: Synthetic oligonucleotide
ccggaaguuguagccccug

SEQ ID NO: 1394915 - RNA, 19 nt, Artificial Sequence
  Description of Artificial Sequence: Synthetic oligonucleotide
gggugcaggccucguggaa

SEQ ID NO: 1394916 - RNA, 19 nt, Artificial Sequence
  Description of Artificial Sequence: Synthetic oligonucleotide
cccggcgucccaguccagc

SEQ ID NO: 1394917 - RNA, 19 nt, Artificial Sequence
  Description of Artificial Sequence: Synthetic oligonucleotide
gcuccgacacugcagcauu

SEQ ID NO: 1394918 - RNA, 19 nt, Artificial Sequence
  Description of Artificial Sequence: Synthetic oligonucleotide
cccagcgaagcuguaaccu

SEQ ID NO: 1394919 - RNA, 19 nt, Artificial Sequence
  Description of Artificial Sequence: Synthetic oligonucleotide
caguagcucugcugucggu

SEQ ID NO: 1394920 - RNA, 19 nt, Artificial Sequence
  Description of Artificial Sequence: Synthetic oligonucleotide
cagguacaucccagcugua

SEQ ID NO: 1394921 - RNA, 19 nt, Artificial Sequence
  Description of Artificial Sequence: Synthetic oligonucleotide
ccgagcgaggacccugaca

SEQ ID NO: 1394922 - RNA, 19 nt, Artificial Sequence
  Description of Artificial Sequence: Synthetic oligonucleotide
ccccacuccccuggauucc

SEQ ID NO: 1394923 - RNA, 19 nt, Artificial Sequence
  Description of Artificial Sequence: Synthetic oligonucleotide
ggccgcacccuccgagcga

SEQ ID NO: 1394924 - RNA, 19 nt, Artificial Sequence
  Description of Artificial Sequence: Synthetic oligonucleotide
cgggccgcacccuccgagc

SEQ ID NO: 1394925 - RNA, 19 nt, Artificial Sequence
  Description of Artificial Sequence: Synthetic oligonucleotide
ggaggaucucucggucaaa

SEQ ID NO: 1394926 - RNA, 19 nt, Artificial Sequence
  Description of Artificial Sequence: Synthetic oligonucleotide
gcggcagacccaggaugug

SEQ ID NO: 1394927 - RNA, 19 nt, Artificial Sequence
  Description of Artificial Sequence: Synthetic oligonucleotide
cggaccuucucagggccac

SEQ ID NO: 1394928 - RNA, 19 nt, Artificial Sequence
  Description of Artificial Sequence: Synthetic oligonucleotide
cccuuaggggugucugaaa

SEQ ID NO: 1394929 - RNA, 19 nt, Artificial Sequence
  Description of Artificial Sequence: Synthetic oligonucleotide
cggcgucccaguccagccc

SEQ ID NO: 1394930 - RNA, 19 nt, Artificial Sequence
  Description of Artificial Sequence: Synthetic oligonucleotide
gccgucgggccgcacccuc

SEQ ID NO: 1394931 - RNA, 19 nt, Artificial Sequence
  Description of Artificial Sequence: Synthetic oligonucleotide
cuccgacacugcagcauuu

SEQ ID NO: 1394932 - RNA, 19 nt, Artificial Sequence
  Description of Artificial Sequence: Synthetic oligonucleotide
cuuccccacuccccuggau

SEQ ID NO: 1394933 - RNA, 19 nt, Artificial Sequence
  Description of Artificial Sequence: Synthetic oligonucleotide
gcgguccuuguggcuguug

SEQ ID NO: 1394934 - RNA, 19 nt, Artificial Sequence
  Description of Artificial Sequence: Synthetic oligonucleotide
ggcgggguccgcgcgugga

SEQ ID NO: 1394935 - RNA, 19 nt, Artificial Sequence
  Description of Artificial Sequence: Synthetic oligonucleotide
ccggaccuucucagggcca

SEQ ID NO: 1394936 - RNA, 19 nt, Artificial Sequence
  Description of Artificial Sequence: Synthetic oligonucleotide
ccccggggccuccagagua

SEQ ID NO: 1394937 - RNA, 19 nt, Artificial Sequence
  Description of Artificial Sequence: Synthetic oligonucleotide
cagcgcccucugccuggug

SEQ ID NO: 1394938 - RNA, 19 nt, Artificial Sequence
  Description of Artificial Sequence: Synthetic oligonucleotide
cuccguagaggaggggcuu

SEQ ID NO: 1394939 - RNA, 19 nt, Artificial Sequence
  Description of Artificial Sequence: Synthetic oligonucleotide
cacccggcacacacagcau

SEQ ID NO: 1394940 - RNA, 19 nt, Artificial Sequence
  Description of Artificial Sequence: Synthetic oligonucleotide
ccgggcauaggggcccuuc

SEQ ID NO: 1394941 - RNA, 19 nt, Artificial Sequence
  Description of Artificial Sequence: Synthetic oligonucleotide
ggaggcgggguccgcgcgu

SEQ ID NO: 1394942 - RNA, 19 nt, Artificial Sequence
  Description of Artificial Sequence: Synthetic oligonucleotide
cccucgagacagguagcca

SEQ ID NO: 1394943 - RNA, 19 nt, Artificial Sequence
  Description of Artificial Sequence: Synthetic oligonucleotide
ccgcgcguggagaccaaaa

SEQ ID NO: 1394944 - RNA, 19 nt, Artificial Sequence
  Description of Artificial Sequence: Synthetic oligonucleotide
gcuguaaccuccggaccuu

SEQ ID NO: 1394945 - RNA, 19 nt, Artificial Sequence
  Description of Artificial Sequence: Synthetic oligonucleotide
ccuaucucuccagguacau

SEQ ID NO: 1394946 - RNA, 19 nt, Artificial Sequence
  Description of Artificial Sequence: Synthetic oligonucleotide
cagagccgucgggccgcac

SEQ ID NO: 1394947 - RNA, 19 nt, Artificial Sequence
  Description of Artificial Sequence: Synthetic oligonucleotide
ccgcacccuccgagcgagg

SEQ ID NO: 1394948 - RNA, 19 nt, Artificial Sequence
  Description of Artificial Sequence: Synthetic oligonucleotide
cgcacccuccgagcgagga

SEQ ID NO: 1394949 - RNA, 19 nt, Artificial Sequence
  Description of Artificial Sequence: Synthetic oligonucleotide
gccggaaguuguagccccu

SEQ ID NO: 1394950 - RNA, 19 nt, Artificial Sequence
  Description of Artificial Sequence: Synthetic oligonucleotide
guccgcgcguggagaccaa

SEQ ID NO: 1394951 - RNA, 19 nt, Artificial Sequence
  Description of Artificial Sequence: Synthetic oligonucleotide
gcuggggcccugggaacgu

SEQ ID NO: 1394952 - RNA, 19 nt, Artificial Sequence
  Description of Artificial Sequence: Synthetic oligonucleotide
cccggucccuggagacaga

SEQ ID NO: 1394953 - RNA, 19 nt, Artificial Sequence
  Description of Artificial Sequence: Synthetic oligonucleotide
cguucucccuuaggggugu

SEQ ID NO: 1394954 - RNA, 19 nt, Artificial Sequence
  Description of Artificial Sequence: Synthetic oligonucleotide
cgggcauaggggcccuucu

SEQ ID NO: 1394955 - RNA, 19 nt, Artificial Sequence
  Description of Artificial Sequence: Synthetic oligonucleotide
cgggguccgcgcguggaga

SEQ ID NO: 1394956 - RNA, 19 nt, Artificial Sequence
  Description of Artificial Sequence: Synthetic oligonucleotide
cgggcgucugugggccgga

SEQ ID NO: 1394957 - RNA, 19 nt, Artificial Sequence
  Description of Artificial Sequence: Synthetic oligonucleotide
cccuccgagcgaggacccu

SEQ ID NO: 1394958 - RNA, 19 nt, Artificial Sequence
  Description of Artificial Sequence: Synthetic oligonucleotide
agguaggugaaccacaugc

SEQ ID NO: 1394959 - RNA, 19 nt, Artificial Sequence
  Description of Artificial Sequence: Synthetic oligonucleotide
ugaaggguccauaauagag

SEQ ID NO: 1394960 - RNA, 19 nt, Artificial Sequence
  Description of Artificial Sequence: Synthetic oligonucleotide
uccauaauagagcagggca

SEQ ID NO: 1394961 - RNA, 19 nt, Artificial Sequence
  Description of Artificial Sequence: Synthetic oligonucleotide
aagaugacgaugaaggguc

SEQ ID NO: 1394962 - RNA, 19 nt, Artificial Sequence
  Description of Artificial Sequence: Synthetic oligonucleotide
cauagcaccauacacgaag

SEQ ID NO: 1394963 - RNA, 19 nt, Artificial Sequence
  Description of Artificial Sequence: Synthetic oligonucleotide
uuguccgaaaagcucauag

SEQ ID NO: 1394964 - RNA, 19 nt, Artificial Sequence
  Description of Artificial Sequence: Synthetic oligonucleotide
aguggcacagccugcaccc

SEQ ID NO: 1394965 - RNA, 19 nt, Artificial Sequence
  Description of Artificial Sequence: Synthetic oligonucleotide
uuaucuaccagagccaccc

SEQ ID NO: 1394966 - RNA, 19 nt, Artificial Sequence
  Description of Artificial Sequence: Synthetic oligonucleotide
aaagcucauagcaccauac

SEQ ID NO: 1394967 - RNA, 19 nt, Artificial Sequence
  Description of Artificial Sequence: Synthetic oligonucleotide
uaggugaaccacaugcccg

SEQ ID NO: 1394968 - RNA, 19 nt, Artificial Sequence
  Description of Artificial Sequence: Synthetic oligonucleotide
aaggguccauaauagagca

SEQ ID NO: 1394969 - RNA, 19 nt, Artificial Sequence
  Description of Artificial Sequence: Synthetic oligonucleotide
gauguuagccaccacggug

SEQ ID NO: 1394970 - RNA, 19 nt, Artificial Sequence
  Description of Artificial Sequence: Synthetic oligonucleotide
aucacccagugguagaagc

SEQ ID NO: 1394971 - RNA, 19 nt, Artificial Sequence
  Description of Artificial Sequence: Synthetic oligonucleotide
gugaacgcauaccugaggg

SEQ ID NO: 1394972 - RNA, 19 nt, Artificial Sequence
  Description of Artificial Sequence: Synthetic oligonucleotide
aaugcgaaugggccaaaug

SEQ ID NO: 1394973 - RNA, 19 nt, Artificial Sequence
  Description of Artificial Sequence: Synthetic oligonucleotide
uucuuggguaggcugagag

SEQ ID NO: 1394974 - RNA, 19 nt, Artificial Sequence
  Description of Artificial Sequence: Synthetic oligonucleotide
augcgaaugggccaaauga

SEQ ID NO: 1394975 - RNA, 19 nt, Artificial Sequence
  Description of Artificial Sequence: Synthetic oligonucleotide
ugaggugacaaggacagug

SEQ ID NO: 1394976 - RNA, 19 nt, Artificial Sequence
  Description of Artificial Sequence: Synthetic oligonucleotide
aggugaaccacaugcccgc

SEQ ID NO: 1394977 - RNA, 19 nt, Artificial Sequence
  Description of Artificial Sequence: Synthetic oligonucleotide
uacaccgugauguuagcca

SEQ ID NO: 1394978 - RNA, 19 nt, Artificial Sequence
  Description of Artificial Sequence: Synthetic oligonucleotide
gucguguugcccuagggag

SEQ ID NO: 1394979 - RNA, 19 nt, Artificial Sequence
  Description of Artificial Sequence: Synthetic oligonucleotide
acugauauccugcccagca

SEQ ID NO: 1394980 - RNA, 19 nt, Artificial Sequence
  Description of Artificial Sequence: Synthetic oligonucleotide
uggcgauaaacuucuuggg

SEQ ID NO: 1394981 - RNA, 19 nt, Artificial Sequence
  Description of Artificial Sequence: Synthetic oligonucleotide
gguagaagcccacacaggc

SEQ ID NO: 1394982 - RNA, 19 nt, Artificial Sequence
  Description of Artificial Sequence: Synthetic oligonucleotide
uccgaaaagcucauagcac

SEQ ID NO: 1394983 - RNA, 19 nt, Artificial Sequence
  Description of Artificial Sequence: Synthetic oligonucleotide
uguccgaaaagcucauagc

SEQ ID NO: 1394984 - RNA, 19 nt, Artificial Sequence
  Description of Artificial Sequence: Synthetic oligonucleotide
acaccgugauguuagccac

SEQ ID NO: 1394985 - RNA, 19 nt, Artificial Sequence
  Description of Artificial Sequence: Synthetic oligonucleotide
uccuugguacccaagugga

SEQ ID NO: 1394986 - RNA, 19 nt, Artificial Sequence
  Description of Artificial Sequence: Synthetic oligonucleotide
aaguggccgaccgcgaagc

SEQ ID NO: 1394987 - RNA, 19 nt, Artificial Sequence
  Description of Artificial Sequence: Synthetic oligonucleotide
gaaggaugagaggaagccg

SEQ ID NO: 1394988 - RNA, 19 nt, Artificial Sequence
  Description of Artificial Sequence: Synthetic oligonucleotide
gugauguuagccaccacgg

SEQ ID NO: 1394989 - RNA, 19 nt, Artificial Sequence
  Description of Artificial Sequence: Synthetic oligonucleotide
gaaacaccggcacauccug

SEQ ID NO: 1394990 - RNA, 19 nt, Artificial Sequence
  Description of Artificial Sequence: Synthetic oligonucleotide
guccgaaaagcucauagca

SEQ ID NO: 1394991 - RNA, 19 nt, Artificial Sequence
  Description of Artificial Sequence: Synthetic oligonucleotide
gaggaaguggccgaccgcg

SEQ ID NO: 1394992 - RNA, 19 nt, Artificial Sequence
  Description of Artificial Sequence: Synthetic oligonucleotide
cauaauagagcagggcagc

SEQ ID NO: 1394993 - RNA, 19 nt, Artificial Sequence
  Description of Artificial Sequence: Synthetic oligonucleotide
ugaaccacaugcccgcgca

SEQ ID NO: 1394994 - RNA, 19 nt, Artificial Sequence
  Description of Artificial Sequence: Synthetic oligonucleotide
cucguggucauguacagca

SEQ ID NO: 1394995 - RNA, 19 nt, Artificial Sequence
  Description of Artificial Sequence: Synthetic oligonucleotide
uacacgaaggcuccacugu

SEQ ID NO: 1394996 - RNA, 19 nt, Artificial Sequence
  Description of Artificial Sequence: Synthetic oligonucleotide
ugggcaaucugaguggcag

SEQ ID NO: 1394997 - RNA, 19 nt, Artificial Sequence
  Description of Artificial Sequence: Synthetic oligonucleotide
uucgaaugcgaaugggcca

SEQ ID NO: 1394998 - RNA, 19 nt, Artificial Sequence
  Description of Artificial Sequence: Synthetic oligonucleotide
cucauagcaccauacacga

SEQ ID NO: 1394999 - RNA, 19 nt, Artificial Sequence
  Description of Artificial Sequence: Synthetic oligonucleotide
guucgaaugcgaaugggcc

SEQ ID NO: 1395000 - RNA, 19 nt, Artificial Sequence
  Description of Artificial Sequence: Synthetic oligonucleotide
aaaagcucauagcaccaua

SEQ ID NO: 1395001 - RNA, 19 nt, Artificial Sequence
  Description of Artificial Sequence: Synthetic oligonucleotide
cagguacaucaccagaggg

SEQ ID NO: 1395002 - RNA, 19 nt, Artificial Sequence
  Description of Artificial Sequence: Synthetic oligonucleotide
auacacgaaggcuccacug

SEQ ID NO: 1395003 - RNA, 19 nt, Artificial Sequence
  Description of Artificial Sequence: Synthetic oligonucleotide
caugcccgcgcacaggucg

SEQ ID NO: 1395004 - RNA, 19 nt, Artificial Sequence
  Description of Artificial Sequence: Synthetic oligonucleotide
cauaccugagggcugugag

SEQ ID NO: 1395005 - RNA, 19 nt, Artificial Sequence
  Description of Artificial Sequence: Synthetic oligonucleotide
uguagccgcgcaccgagug

SEQ ID NO: 1395006 - RNA, 19 nt, Artificial Sequence
  Description of Artificial Sequence: Synthetic oligonucleotide
cuacagcacagcucggagg

SEQ ID NO: 1395007 - RNA, 19 nt, Artificial Sequence
  Description of Artificial Sequence: Synthetic oligonucleotide
uugguacccaaguggaaga

SEQ ID NO: 1395008 - RNA, 19 nt, Artificial Sequence
  Description of Artificial Sequence: Synthetic oligonucleotide
ugcucgucagguuccaucu

SEQ ID NO: 1395009 - RNA, 19 nt, Artificial Sequence
  Description of Artificial Sequence: Synthetic oligonucleotide
ccaccugauagaaagcugg

SEQ ID NO: 1395010 - RNA, 19 nt, Artificial Sequence
  Description of Artificial Sequence: Synthetic oligonucleotide
ugaacgcauaccugagggc

SEQ ID NO: 1395011 - RNA, 19 nt, Artificial Sequence
  Description of Artificial Sequence: Synthetic oligonucleotide
cucgucagguuccaucucc

SEQ ID NO: 1395012 - RNA, 19 nt, Artificial Sequence
  Description of Artificial Sequence: Synthetic oligonucleotide
gauauccugcccagcaugc

SEQ ID NO: 1395013 - RNA, 19 nt, Artificial Sequence
  Description of Artificial Sequence: Synthetic oligonucleotide
uggccgaccgcgaagcuca

SEQ ID NO: 1395014 - RNA, 19 nt, Artificial Sequence
  Description of Artificial Sequence: Synthetic oligonucleotide
accacggugaacgcauacc

SEQ ID NO: 1395015 - RNA, 19 nt, Artificial Sequence
  Description of Artificial Sequence: Synthetic oligonucleotide
aggaaggaugagaggaagc

SEQ ID NO: 1395016 - RNA, 19 nt, Artificial Sequence
  Description of Artificial Sequence: Synthetic oligonucleotide
uggcagcccagccaaacug

SEQ ID NO: 1395017 - RNA, 19 nt, Artificial Sequence
  Description of Artificial Sequence: Synthetic oligonucleotide
caugcgaggaucccugcag

SEQ ID NO: 1395018 - RNA, 19 nt, Artificial Sequence
  Description of Artificial Sequence: Synthetic oligonucleotide
ccgaaaagcucauagcacc

SEQ ID NO: 1395019 - RNA, 19 nt, Artificial Sequence
  Description of Artificial Sequence: Synthetic oligonucleotide
acaaugagccucgugguca

SEQ ID NO: 1395020 - RNA, 19 nt, Artificial Sequence
  Description of Artificial Sequence: Synthetic oligonucleotide
acggguucgaaugcgaaug

SEQ ID NO: 1395021 - RNA, 19 nt, Artificial Sequence
  Description of Artificial Sequence: Synthetic oligonucleotide
caggcggcaccguacaccg

SEQ ID NO: 1395022 - RNA, 19 nt, Artificial Sequence
  Description of Artificial Sequence: Synthetic oligonucleotide
cuuaucuaccagagccacc

SEQ ID NO: 1395023 - RNA, 19 nt, Artificial Sequence
  Description of Artificial Sequence: Synthetic oligonucleotide
cacaccaccggucacgguc

SEQ ID NO: 1395024 - RNA, 19 nt, Artificial Sequence
  Description of Artificial Sequence: Synthetic oligonucleotide
ugauguuagccaccacggu

SEQ ID NO: 1395025 - RNA, 19 nt, Artificial Sequence
  Description of Artificial Sequence: Synthetic oligonucleotide
gaccgcgaagcucagccgc

SEQ ID NO: 1395026 - RNA, 19 nt, Artificial Sequence
  Description of Artificial Sequence: Synthetic oligonucleotide
caccauacacgaaggcucc

SEQ ID NO: 1395027 - RNA, 19 nt, Artificial Sequence
  Description of Artificial Sequence: Synthetic oligonucleotide
accgagugcaggaagagca

SEQ ID NO: 1395028 - RNA, 19 nt, Artificial Sequence
  Description of Artificial Sequence: Synthetic oligonucleotide
ugccccauacacagccacg

SEQ ID NO: 1395029 - RNA, 19 nt, Artificial Sequence
  Description of Artificial Sequence: Synthetic oligonucleotide
ucgucguguugcccuaggg

SEQ ID NO: 1395030 - RNA, 19 nt, Artificial Sequence
  Description of Artificial Sequence: Synthetic oligonucleotide
cagguuccgaaacaccggc

SEQ ID NO: 1395031 - RNA, 19 nt, Artificial Sequence
  Description of Artificial Sequence: Synthetic oligonucleotide
gaaguggccgaccgcgaag

SEQ ID NO: 1395032 - RNA, 19 nt, Artificial Sequence
  Description of Artificial Sequence: Synthetic oligonucleotide
augaaggguccauaauaga

SEQ ID NO: 1395033 - RNA, 19 nt, Artificial Sequence
  Description of Artificial Sequence: Synthetic oligonucleotide
ccauaauagagcagggcag

SEQ ID NO: 1395034 - RNA, 19 nt, Artificial Sequence
  Description of Artificial Sequence: Synthetic oligonucleotide
agcccgcugaaguagguca

SEQ ID NO: 1395035 - RNA, 19 nt, Artificial Sequence
  Description of Artificial Sequence: Synthetic oligonucleotide
gacuagggugucugccugg

SEQ ID NO: 1395036 - RNA, 19 nt, Artificial Sequence
  Description of Artificial Sequence: Synthetic oligonucleotide
uucgucguguugcccuagg

SEQ ID NO: 1395037 - RNA, 19 nt, Artificial Sequence
  Description of Artificial Sequence: Synthetic oligonucleotide
guggucauguacagcaugc

SEQ ID NO: 1395038 - RNA, 19 nt, Artificial Sequence
  Description of Artificial Sequence: Synthetic oligonucleotide
ucgucagguuccaucuccc

SEQ ID NO: 1395039 - RNA, 19 nt, Artificial Sequence
  Description of Artificial Sequence: Synthetic oligonucleotide
ggucauguacagcaugccc

SEQ ID NO: 1395040 - RNA, 19 nt, Artificial Sequence
  Description of Artificial Sequence: Synthetic oligonucleotide
agcaugcgaggaucccugc

SEQ ID NO: 1395041 - RNA, 19 nt, Artificial Sequence
  Description of Artificial Sequence: Synthetic oligonucleotide
aggacacagacggugcccg

SEQ ID NO: 1395042 - RNA, 19 nt, Artificial Sequence
  Description of Artificial Sequence: Synthetic oligonucleotide
caccugauagaaagcuggc

SEQ ID NO: 1395043 - RNA, 19 nt, Artificial Sequence
  Description of Artificial Sequence: Synthetic oligonucleotide
cccaguacggguucgaaug

SEQ ID NO: 1395044 - RNA, 19 nt, Artificial Sequence
  Description of Artificial Sequence: Synthetic oligonucleotide
gaugagacucaggugggca

SEQ ID NO: 1395045 - RNA, 19 nt, Artificial Sequence
  Description of Artificial Sequence: Synthetic oligonucleotide
agguucacaaugagccucg

SEQ ID NO: 1395046 - RNA, 19 nt, Artificial Sequence
  Description of Artificial Sequence: Synthetic oligonucleotide
caccuuguccgaaaagcuc

SEQ ID NO: 1395047 - RNA, 19 nt, Artificial Sequence
  Description of Artificial Sequence: Synthetic oligonucleotide
aauguaggucugagacagg

SEQ ID NO: 1395048 - RNA, 19 nt, Artificial Sequence
  Description of Artificial Sequence: Synthetic oligonucleotide
cuacacugauauccugccc

SEQ ID NO: 1395049 - RNA, 19 nt, Artificial Sequence
  Description of Artificial Sequence: Synthetic oligonucleotide
ggugaacgcauaccugagg

SEQ ID NO: 1395050 - RNA, 19 nt, Artificial Sequence
  Description of Artificial Sequence: Synthetic oligonucleotide
ucgaaugcgaaugggccaa

SEQ ID NO: 1395051 - RNA, 19 nt, Artificial Sequence
  Description of Artificial Sequence: Synthetic oligonucleotide
cuaugcgccuguugacagg

SEQ ID NO: 1395052 - RNA, 19 nt, Artificial Sequence
  Description of Artificial Sequence: Synthetic oligonucleotide
gguucgaaugcgaaugggc

SEQ ID NO: 1395053 - RNA, 19 nt, Artificial Sequence
  Description of Artificial Sequence: Synthetic oligonucleotide
uguuccucccuaugcgccu

SEQ ID NO: 1395054 - RNA, 19 nt, Artificial Sequence
  Description of Artificial Sequence: Synthetic oligonucleotide
gugugggccaaugagguca

SEQ ID NO: 1395055 - RNA, 19 nt, Artificial Sequence
  Description of Artificial Sequence: Synthetic oligonucleotide
gcagcgagaagauggcucc

SEQ ID NO: 1395056 - RNA, 19 nt, Artificial Sequence
  Description of Artificial Sequence: Synthetic oligonucleotide
agaugacgaugaagggucc

SEQ ID NO: 1395057 - RNA, 19 nt, Artificial Sequence
  Description of Artificial Sequence: Synthetic oligonucleotide
cuucucguggucacugguc

SEQ ID NO: 1395058 - RNA, 19 nt, Artificial Sequence
  Description of Artificial Sequence: Synthetic oligonucleotide
guccauaauagagcagggc

SEQ ID NO: 1395059 - RNA, 19 nt, Artificial Sequence
  Description of Artificial Sequence: Synthetic oligonucleotide
aagcccgcugaaguagguc

SEQ ID NO: 1395060 - RNA, 19 nt, Artificial Sequence
  Description of Artificial Sequence: Synthetic oligonucleotide
gacucaggugggcaaucug

SEQ ID NO: 1395061 - RNA, 19 nt, Artificial Sequence
  Description of Artificial Sequence: Synthetic oligonucleotide
cucccuaugcgccuguuga

SEQ ID NO: 1395062 - RNA, 19 nt, Artificial Sequence
  Description of Artificial Sequence: Synthetic oligonucleotide
cagugaggugacaaggaca

SEQ ID NO: 1395063 - RNA, 19 nt, Artificial Sequence
  Description of Artificial Sequence: Synthetic oligonucleotide
aaccacaugcccgcgcaca

SEQ ID NO: 1395064 - RNA, 19 nt, Artificial Sequence
  Description of Artificial Sequence: Synthetic oligonucleotide
cagaagcccgcugaaguag

SEQ ID NO: 1395065 - RNA, 19 nt, Artificial Sequence
  Description of Artificial Sequence: Synthetic oligonucleotide
gaacgcauaccugagggcu

SEQ ID NO: 1395066 - RNA, 19 nt, Artificial Sequence
  Description of Artificial Sequence: Synthetic oligonucleotide
aaucugaguggcagcccag

SEQ ID NO: 1395067 - RNA, 19 nt, Artificial Sequence
  Description of Artificial Sequence: Synthetic oligonucleotide
cagguucacaaugagccuc

SEQ ID NO: 1395068 - RNA, 19 nt, Artificial Sequence
  Description of Artificial Sequence: Synthetic oligonucleotide
ugguacccaaguggaagag

SEQ ID NO: 1395069 - RNA, 19 nt, Artificial Sequence
  Description of Artificial Sequence: Synthetic oligonucleotide
uggucauguacagcaugcc

SEQ ID NO: 1395070 - RNA, 19 nt, Artificial Sequence
  Description of Artificial Sequence: Synthetic oligonucleotide
cagugguagaagcccacac

SEQ ID NO: 1395071 - RNA, 19 nt, Artificial Sequence
  Description of Artificial Sequence: Synthetic oligonucleotide
ugcgugugugggccaauga

SEQ ID NO: 1395072 - RNA, 19 nt, Artificial Sequence
  Description of Artificial Sequence: Synthetic oligonucleotide
aacgcauaccugagggcug

SEQ ID NO: 1395073 - RNA, 19 nt, Artificial Sequence
  Description of Artificial Sequence: Synthetic oligonucleotide
gaagcucagccgcgcggcg

SEQ ID NO: 1395074 - RNA, 19 nt, Artificial Sequence
  Description of Artificial Sequence: Synthetic oligonucleotide
aucuaccagagccacccau

SEQ ID NO: 1395075 - RNA, 19 nt, Artificial Sequence
  Description of Artificial Sequence: Synthetic oligonucleotide
gagcuguagccgcgcaccg

SEQ ID NO: 1395076 - RNA, 19 nt, Artificial Sequence
  Description of Artificial Sequence: Synthetic oligonucleotide
cacugugcgugugugggcc

SEQ ID NO: 1395077 - RNA, 19 nt, Artificial Sequence
  Description of Artificial Sequence: Synthetic oligonucleotide
augagacucaggugggcaa

SEQ ID NO: 1395078 - RNA, 19 nt, Artificial Sequence
  Description of Artificial Sequence: Synthetic oligonucleotide
cagcaugcgaggaucccug

SEQ ID NO: 1395079 - RNA, 19 nt, Artificial Sequence
  Description of Artificial Sequence: Synthetic oligonucleotide
uacggguucgaaugcgaau

SEQ ID NO: 1395080 - RNA, 19 nt, Artificial Sequence
  Description of Artificial Sequence: Synthetic oligonucleotide
guucacaaugagccucgug

SEQ ID NO: 1395081 - RNA, 19 nt, Artificial Sequence
  Description of Artificial Sequence: Synthetic oligonucleotide
cacggugaacgcauaccug

SEQ ID NO: 1395082 - RNA, 19 nt, Artificial Sequence
  Description of Artificial Sequence: Synthetic oligonucleotide
agagaguaggucagguaca

SEQ ID NO: 1395083 - RNA, 19 nt, Artificial Sequence
  Description of Artificial Sequence: Synthetic oligonucleotide
accaucacccagugguaga

SEQ ID NO: 1395084 - RNA, 19 nt, Artificial Sequence
  Description of Artificial Sequence: Synthetic oligonucleotide
gcgaaugggccaaaugagg

SEQ ID NO: 1395085 - RNA, 19 nt, Artificial Sequence
  Description of Artificial Sequence: Synthetic oligonucleotide
cacaaugagccucgugguc

SEQ ID NO: 1395086 - RNA, 19 nt, Artificial Sequence
  Description of Artificial Sequence: Synthetic oligonucleotide
aggcaugggcugaagauga

SEQ ID NO: 1395087 - RNA, 19 nt, Artificial Sequence
  Description of Artificial Sequence: Synthetic oligonucleotide
ccguacaccgugauguuag

SEQ ID NO: 1395088 - RNA, 19 nt, Artificial Sequence
  Description of Artificial Sequence: Synthetic oligonucleotide
gugcagagcccgucggccg

SEQ ID NO: 1395089 - RNA, 19 nt, Artificial Sequence
  Description of Artificial Sequence: Synthetic oligonucleotide
uuggguaggcugagagagu

SEQ ID NO: 1395090 - RNA, 19 nt, Artificial Sequence
  Description of Artificial Sequence: Synthetic oligonucleotide
cgaggaucccugcagaugc

SEQ ID NO: 1395091 - RNA, 19 nt, Artificial Sequence
  Description of Artificial Sequence: Synthetic oligonucleotide
gagccucguggucauguac

SEQ ID NO: 1395092 - RNA, 19 nt, Artificial Sequence
  Description of Artificial Sequence: Synthetic oligonucleotide
caguacggguucgaaugcg

SEQ ID NO: 1395093 - RNA, 19 nt, Artificial Sequence
  Description of Artificial Sequence: Synthetic oligonucleotide
agcaugcccaccugauaga

SEQ ID NO: 1395094 - RNA, 19 nt, Artificial Sequence
  Description of Artificial Sequence: Synthetic oligonucleotide
agcuuaucuaccagagcca

SEQ ID NO: 1395095 - RNA, 19 nt, Artificial Sequence
  Description of Artificial Sequence: Synthetic oligonucleotide
gcgugugugggccaaugag

SEQ ID NO: 1395096 - RNA, 19 nt, Artificial Sequence
  Description of Artificial Sequence: Synthetic oligonucleotide
guacaccgugauguuagcc

SEQ ID NO: 1395097 - RNA, 19 nt, Artificial Sequence
  Description of Artificial Sequence: Synthetic oligonucleotide
accagagggaugguggcga

SEQ ID NO: 1395098 - RNA, 19 nt, Artificial Sequence
  Description of Artificial Sequence: Synthetic oligonucleotide
augcgaggaucccugcaga

SEQ ID NO: 1395099 - RNA, 19 nt, Artificial Sequence
  Description of Artificial Sequence: Synthetic oligonucleotide
ucccuaugcgccuguugac

SEQ ID NO: 1395100 - RNA, 19 nt, Artificial Sequence
  Description of Artificial Sequence: Synthetic oligonucleotide
accgugauguuagccacca

SEQ ID NO: 1395101 - RNA, 19 nt, Artificial Sequence
  Description of Artificial Sequence: Synthetic oligonucleotide
cacggucaccaucacccag

SEQ ID NO: 1395102 - RNA, 19 nt, Artificial Sequence
  Description of Artificial Sequence: Synthetic oligonucleotide
gcaccauacacgaaggcuc

SEQ ID NO: 1395103 - RNA, 19 nt, Artificial Sequence
  Description of Artificial Sequence: Synthetic oligonucleotide
cacgcccagcuuaucuacc

SEQ ID NO: 1395104 - RNA, 19 nt, Artificial Sequence
  Description of Artificial Sequence: Synthetic oligonucleotide
gaugacgaugaagggucca

SEQ ID NO: 1395105 - RNA, 19 nt, Artificial Sequence
  Description of Artificial Sequence: Synthetic oligonucleotide
acacagacggugcccgcca

SEQ ID NO: 1395106 - RNA, 19 nt, Artificial Sequence
  Description of Artificial Sequence: Synthetic oligonucleotide
ucggccgccuggccgagca

SEQ ID NO: 1395107 - RNA, 19 nt, Artificial Sequence
  Description of Artificial Sequence: Synthetic oligonucleotide
ucucguggucacuggucac

SEQ ID NO: 1395108 - RNA, 19 nt, Artificial Sequence
  Description of Artificial Sequence: Synthetic oligonucleotide
ugugugggccaaugagguc

SEQ ID NO: 1395109 - RNA, 19 nt, Artificial Sequence
  Description of Artificial Sequence: Synthetic oligonucleotide
caccgugauguuagccacc

SEQ ID NO: 1395110 - RNA, 19 nt, Artificial Sequence
  Description of Artificial Sequence: Synthetic oligonucleotide
uagcccacgagcggcgugc

SEQ ID NO: 1395111 - RNA, 19 nt, Artificial Sequence
  Description of Artificial Sequence: Synthetic oligonucleotide
ggccucguagcccacgagc

SEQ ID NO: 1395112 - RNA, 19 nt, Artificial Sequence
  Description of Artificial Sequence: Synthetic oligonucleotide
ugcgaggaucccugcagau

SEQ ID NO: 1395113 - RNA, 19 nt, Artificial Sequence
  Description of Artificial Sequence: Synthetic oligonucleotide
auggccagugaggugacaa

SEQ ID NO: 1395114 - RNA, 19 nt, Artificial Sequence
  Description of Artificial Sequence: Synthetic oligonucleotide
gugcucgucagguuccauc

SEQ ID NO: 1395115 - RNA, 19 nt, Artificial Sequence
  Description of Artificial Sequence: Synthetic oligonucleotide
guagccgcgcaccgagugc

SEQ ID NO: 1395116 - RNA, 19 nt, Artificial Sequence
  Description of Artificial Sequence: Synthetic oligonucleotide
caggugccaggccuugcgg

SEQ ID NO: 1395117 - RNA, 19 nt, Artificial Sequence
  Description of Artificial Sequence: Synthetic oligonucleotide
ggcgcggucggccucguag

SEQ ID NO: 1395118 - RNA, 19 nt, Artificial Sequence
  Description of Artificial Sequence: Synthetic oligonucleotide
caccuacacugauauccug

SEQ ID NO: 1395119 - RNA, 19 nt, Artificial Sequence
  Description of Artificial Sequence: Synthetic oligonucleotide
agccucguggucauguaca

SEQ ID NO: 1395120 - RNA, 19 nt, Artificial Sequence
  Description of Artificial Sequence: Synthetic oligonucleotide
aguacggguucgaaugcga

SEQ ID NO: 1395121 - RNA, 19 nt, Artificial Sequence
  Description of Artificial Sequence: Synthetic oligonucleotide
ccuaugcgccuguugacag

SEQ ID NO: 1395122 - RNA, 19 nt, Artificial Sequence
  Description of Artificial Sequence: Synthetic oligonucleotide
guacagcaugcccaccuga

SEQ ID NO: 1395123 - RNA, 19 nt, Artificial Sequence
  Description of Artificial Sequence: Synthetic oligonucleotide
gcaauguaggucugagaca

SEQ ID NO: 1395124 - RNA, 19 nt, Artificial Sequence
  Description of Artificial Sequence: Synthetic oligonucleotide
cacccaugcugcgaaggcc

SEQ ID NO: 1395125 - RNA, 19 nt, Artificial Sequence
  Description of Artificial Sequence: Synthetic oligonucleotide
ggcggcaccguacaccgug

SEQ ID NO: 1395126 - RNA, 19 nt, Artificial Sequence
  Description of Artificial Sequence: Synthetic oligonucleotide
uagccgcgcaccgagugca

SEQ ID NO: 1395127 - RNA, 19 nt, Artificial Sequence
  Description of Artificial Sequence: Synthetic oligonucleotide
ucguggucauguacagcau

SEQ ID NO: 1395128 - RNA, 19 nt, Artificial Sequence
  Description of Artificial Sequence: Synthetic oligonucleotide
gccucguagcccacgagcg

SEQ ID NO: 1395129 - RNA, 19 nt, Artificial Sequence
  Description of Artificial Sequence: Synthetic oligonucleotide
gcuuaucuaccagagccac

SEQ ID NO: 1395130 - RNA, 19 nt, Artificial Sequence
  Description of Artificial Sequence: Synthetic oligonucleotide
ugcccagcaugcgaggauc

SEQ ID NO: 1395131 - RNA, 19 nt, Artificial Sequence
  Description of Artificial Sequence: Synthetic oligonucleotide
ccgaaacaccggcacaucc

SEQ ID NO: 1395132 - RNA, 19 nt, Artificial Sequence
  Description of Artificial Sequence: Synthetic oligonucleotide
ggcgauaaacuucuugggu

SEQ ID NO: 1395133 - RNA, 19 nt, Artificial Sequence
  Description of Artificial Sequence: Synthetic oligonucleotide
ggacuagggugucugccug

SEQ ID NO: 1395134 - RNA, 19 nt, Artificial Sequence
  Description of Artificial Sequence: Synthetic oligonucleotide
acuagggugucugccuggu

SEQ ID NO: 1395135 - RNA, 19 nt, Artificial Sequence
  Description of Artificial Sequence: Synthetic oligonucleotide
acggucaccaucacccagu

SEQ ID NO: 1395136 - RNA, 19 nt, Artificial Sequence
  Description of Artificial Sequence: Synthetic oligonucleotide
agcgagaagauggcuccca

SEQ ID NO: 1395137 - RNA, 19 nt, Artificial Sequence
  Description of Artificial Sequence: Synthetic oligonucleotide
agagccacccaugcugcga

SEQ ID NO: 1395138 - RNA, 19 nt, Artificial Sequence
  Description of Artificial Sequence: Synthetic oligonucleotide
ugacgaugaaggguccaua

SEQ ID NO: 1395139 - RNA, 19 nt, Artificial Sequence
  Description of Artificial Sequence: Synthetic oligonucleotide
gaaccacaugcccgcgcac

SEQ ID NO: 1395140 - RNA, 19 nt, Artificial Sequence
  Description of Artificial Sequence: Synthetic oligonucleotide
agccaggcggcaccguaca

SEQ ID NO: 1395141 - RNA, 19 nt, Artificial Sequence
  Description of Artificial Sequence: Synthetic oligonucleotide
gagcguccgcggcggaccg

SEQ ID NO: 1395142 - RNA, 19 nt, Artificial Sequence
  Description of Artificial Sequence: Synthetic oligonucleotide
agcccacucagggguggcc

SEQ ID NO: 1395143 - RNA, 19 nt, Artificial Sequence
  Description of Artificial Sequence: Synthetic oligonucleotide
gguacauggcaauguaggu

SEQ ID NO: 1395144 - RNA, 19 nt, Artificial Sequence
  Description of Artificial Sequence: Synthetic oligonucleotide
uggccaccuuguccgaaaa

SEQ ID NO: 1395145 - RNA, 19 nt, Artificial Sequence
  Description of Artificial Sequence: Synthetic oligonucleotide
agggguggccuccccgcag

SEQ ID NO: 1395146 - RNA, 19 nt, Artificial Sequence
  Description of Artificial Sequence: Synthetic oligonucleotide
aaugagccucguggucaug

SEQ ID NO: 1395147 - RNA, 19 nt, Artificial Sequence
  Description of Artificial Sequence: Synthetic oligonucleotide
gagccacccaugcugcgaa

SEQ ID NO: 1395148 - RNA, 19 nt, Artificial Sequence
  Description of Artificial Sequence: Synthetic oligonucleotide
ugagccucguggucaugua

SEQ ID NO: 1395149 - RNA, 19 nt, Artificial Sequence
  Description of Artificial Sequence: Synthetic oligonucleotide
ggggcgacaucgcaaccgc

SEQ ID NO: 1395150 - RNA, 19 nt, Artificial Sequence
  Description of Artificial Sequence: Synthetic oligonucleotide
uagccaccacggugaacgc

SEQ ID NO: 1395151 - RNA, 19 nt, Artificial Sequence
  Description of Artificial Sequence: Synthetic oligonucleotide
acggugcccgccaggugcc

SEQ ID NO: 1395152 - RNA, 19 nt, Artificial Sequence
  Description of Artificial Sequence: Synthetic oligonucleotide
gugugugggccaaugaggu

SEQ ID NO: 1395153 - RNA, 19 nt, Artificial Sequence
  Description of Artificial Sequence: Synthetic oligonucleotide
gcgaagcucagccgcgcgg

SEQ ID NO: 1395154 - RNA, 19 nt, Artificial Sequence
  Description of Artificial Sequence: Synthetic oligonucleotide
ccaguacggguucgaaugc

SEQ ID NO: 1395155 - RNA, 19 nt, Artificial Sequence
  Description of Artificial Sequence: Synthetic oligonucleotide
gcaccguacaccgugaugu

SEQ ID NO: 1395156 - RNA, 19 nt, Artificial Sequence
  Description of Artificial Sequence: Synthetic oligonucleotide
aggguccauaauagagcag

SEQ ID NO: 1395157 - RNA, 19 nt, Artificial Sequence
  Description of Artificial Sequence: Synthetic oligonucleotide
gccucguggucauguacag

SEQ ID NO: 1395158 - RNA, 19 nt, Artificial Sequence
  Description of Artificial Sequence: Synthetic oligonucleotide
guacaucaccagagggaug

SEQ ID NO: 1395159 - RNA, 19 nt, Artificial Sequence
  Description of Artificial Sequence: Synthetic oligonucleotide
aggaugagaggaagccgcu

SEQ ID NO: 1395160 - RNA, 19 nt, Artificial Sequence
  Description of Artificial Sequence: Synthetic oligonucleotide
guugcccuagggagccggg

SEQ ID NO: 1395161 - RNA, 19 nt, Artificial Sequence
  Description of Artificial Sequence: Synthetic oligonucleotide
gaaaagcucauagcaccau

SEQ ID NO: 1395162 - RNA, 19 nt, Artificial Sequence
  Description of Artificial Sequence: Synthetic oligonucleotide
acgcauaccugagggcugu

SEQ ID NO: 1395163 - RNA, 19 nt, Artificial Sequence
  Description of Artificial Sequence: Synthetic oligonucleotide
uccgaaacaccggcacauc

SEQ ID NO: 1395164 - RNA, 19 nt, Artificial Sequence
  Description of Artificial Sequence: Synthetic oligonucleotide
accaccggucacggucacc

SEQ ID NO: 1395165 - RNA, 19 nt, Artificial Sequence
  Description of Artificial Sequence: Synthetic oligonucleotide
guagcccacgagcggcgug

SEQ ID NO: 1395166 - RNA, 19 nt, Artificial Sequence
  Description of Artificial Sequence: Synthetic oligonucleotide
acgagcguccgcggcggac

SEQ ID NO: 1395167 - RNA, 19 nt, Artificial Sequence
  Description of Artificial Sequence: Synthetic oligonucleotide
ggcaccguacaccgugaug

SEQ ID NO: 1395168 - RNA, 19 nt, Artificial Sequence
  Description of Artificial Sequence: Synthetic oligonucleotide
cccaccugauagaaagcug

SEQ ID NO: 1395169 - RNA, 19 nt, Artificial Sequence
  Description of Artificial Sequence: Synthetic oligonucleotide
cauacacgaaggcuccacu

SEQ ID NO: 1395170 - RNA, 19 nt, Artificial Sequence
  Description of Artificial Sequence: Synthetic oligonucleotide
gccacccaugcugcgaagg

SEQ ID NO: 1395171 - RNA, 19 nt, Artificial Sequence
  Description of Artificial Sequence: Synthetic oligonucleotide
agguuucaugaggaaggau

SEQ ID NO: 1395172 - RNA, 19 nt, Artificial Sequence
  Description of Artificial Sequence: Synthetic oligonucleotide
cugucauggccagugaggu

SEQ ID NO: 1395173 - RNA, 19 nt, Artificial Sequence
  Description of Artificial Sequence: Synthetic oligonucleotide
agacggugcccgccaggug

SEQ ID NO: 1395174 - RNA, 19 nt, Artificial Sequence
  Description of Artificial Sequence: Synthetic oligonucleotide
ggugaaccacaugcccgcg

SEQ ID NO: 1395175 - RNA, 19 nt, Artificial Sequence
  Description of Artificial Sequence: Synthetic oligonucleotide
cacagacggugcccgccag

SEQ ID NO: 1395176 - RNA, 19 nt, Artificial Sequence
  Description of Artificial Sequence: Synthetic oligonucleotide
gaagccgcucagguacauc

SEQ ID NO: 1395177 - RNA, 19 nt, Artificial Sequence
  Description of Artificial Sequence: Synthetic oligonucleotide
aguggccgaccgcgaagcu

SEQ ID NO: 1395178 - RNA, 19 nt, Artificial Sequence
  Description of Artificial Sequence: Synthetic oligonucleotide
uuccucccuaugcgccugu

SEQ ID NO: 1395179 - RNA, 19 nt, Artificial Sequence
  Description of Artificial Sequence: Synthetic oligonucleotide
acccagugguagaagccca

SEQ ID NO: 1395180 - RNA, 19 nt, Artificial Sequence
  Description of Artificial Sequence: Synthetic oligonucleotide
agccacccaugcugcgaag

SEQ ID NO: 1395181 - RNA, 19 nt, Artificial Sequence
  Description of Artificial Sequence: Synthetic oligonucleotide
cuugcggggcccgcagcgc

SEQ ID NO: 1395182 - RNA, 19 nt, Artificial Sequence
  Description of Artificial Sequence: Synthetic oligonucleotide
cgaugaaggguccauaaua

SEQ ID NO: 1395183 - RNA, 19 nt, Artificial Sequence
  Description of Artificial Sequence: Synthetic oligonucleotide
cuucgucguguugcccuag

SEQ ID NO: 1395184 - RNA, 19 nt, Artificial Sequence
  Description of Artificial Sequence: Synthetic oligonucleotide
acagccacgcccagcuuau

SEQ ID NO: 1395185 - RNA, 19 nt, Artificial Sequence
  Description of Artificial Sequence: Synthetic oligonucleotide
ggaugagacucaggugggc

SEQ ID NO: 1395186 - RNA, 19 nt, Artificial Sequence
  Description of Artificial Sequence: Synthetic oligonucleotide
caugcccaccugauagaaa

SEQ ID NO: 1395187 - RNA, 19 nt, Artificial Sequence
  Description of Artificial Sequence: Synthetic oligonucleotide
cguggucauguacagcaug

SEQ ID NO: 1395188 - RNA, 19 nt, Artificial Sequence
  Description of Artificial Sequence: Synthetic oligonucleotide
cagcgagaagauggcuccc

SEQ ID NO: 1395189 - RNA, 19 nt, Artificial Sequence
  Description of Artificial Sequence: Synthetic oligonucleotide
agcccacacaggcccuaca

SEQ ID NO: 1395190 - RNA, 19 nt, Artificial Sequence
  Description of Artificial Sequence: Synthetic oligonucleotide
acaggucguugaggaagug

SEQ ID NO: 1395191 - RNA, 19 nt, Artificial Sequence
  Description of Artificial Sequence: Synthetic oligonucleotide
cuagggugucugccugguc

SEQ ID NO: 1395192 - RNA, 19 nt, Artificial Sequence
  Description of Artificial Sequence: Synthetic oligonucleotide
accguacaccgugauguua

SEQ ID NO: 1395193 - RNA, 19 nt, Artificial Sequence
  Description of Artificial Sequence: Synthetic oligonucleotide
agccaccacggugaacgca

SEQ ID NO: 1395194 - RNA, 19 nt, Artificial Sequence
  Description of Artificial Sequence: Synthetic oligonucleotide
ccacgagcggcgugcagag

SEQ ID NO: 1395195 - RNA, 19 nt, Artificial Sequence
  Description of Artificial Sequence: Synthetic oligonucleotide
gugcgugugugggccaaug

SEQ ID NO: 1395196 - RNA, 19 nt, Artificial Sequence
  Description of Artificial Sequence: Synthetic oligonucleotide
ggacgagcguccgcggcgg

SEQ ID NO: 1395197 - RNA, 19 nt, Artificial Sequence
  Description of Artificial Sequence: Synthetic oligonucleotide
gcaaucugaguggcagccc

SEQ ID NO: 1395198 - RNA, 19 nt, Artificial Sequence
  Description of Artificial Sequence: Synthetic oligonucleotide
cagcccggcgccccgcgag

SEQ ID NO: 1395199 - RNA, 19 nt, Artificial Sequence
  Description of Artificial Sequence: Synthetic oligonucleotide
agcuguagccgcgcaccga

SEQ ID NO: 1395200 - RNA, 19 nt, Artificial Sequence
  Description of Artificial Sequence: Synthetic oligonucleotide
gcgaggaucccugcagaug

SEQ ID NO: 1395201 - RNA, 19 nt, Artificial Sequence
  Description of Artificial Sequence: Synthetic oligonucleotide
acaugcccgcgcacagguc

SEQ ID NO: 1395202 - RNA, 19 nt, Artificial Sequence
  Description of Artificial Sequence: Synthetic oligonucleotide
ggaaguggccgaccgcgaa

SEQ ID NO: 1395203 - RNA, 19 nt, Artificial Sequence
  Description of Artificial Sequence: Synthetic oligonucleotide
guggccgaccgcgaagcuc

SEQ ID NO: 1395204 - RNA, 19 nt, Artificial Sequence
  Description of Artificial Sequence: Synthetic oligonucleotide
ugugcucgucagguuccau

SEQ ID NO: 1395205 - RNA, 19 nt, Artificial Sequence
  Description of Artificial Sequence: Synthetic oligonucleotide
gcaugcgaggaucccugca

SEQ ID NO: 1395206 - RNA, 19 nt, Artificial Sequence
  Description of Artificial Sequence: Synthetic oligonucleotide
gccaaugaggucagcuguc

SEQ ID NO: 1395207 - RNA, 19 nt, Artificial Sequence
  Description of Artificial Sequence: Synthetic oligonucleotide
cccgucggccgccuggccg

SEQ ID NO: 1395208 - RNA, 19 nt, Artificial Sequence
  Description of Artificial Sequence: Synthetic oligonucleotide
aggaaguggccgaccgcga

SEQ ID NO: 1395209 - RNA, 19 nt, Artificial Sequence
  Description of Artificial Sequence: Synthetic oligonucleotide
guccgcggcggaccgggac

SEQ ID NO: 1395210 - RNA, 19 nt, Artificial Sequence
  Description of Artificial Sequence: Synthetic oligonucleotide
ggaugagaggaagccgcuc

SEQ ID NO: 1395211 - RNA, 19 nt, Artificial Sequence
  Description of Artificial Sequence: Synthetic oligonucleotide
cggugaacgcauaccugag

SEQ ID NO: 1395212 - RNA, 19 nt, Artificial Sequence
  Description of Artificial Sequence: Synthetic oligonucleotide
ccaaggcaugggcugaaga

SEQ ID NO: 1395213 - RNA, 19 nt, Artificial Sequence
  Description of Artificial Sequence: Synthetic oligonucleotide
gcgcggucggccucguagc

SEQ ID NO: 1395214 - RNA, 19 nt, Artificial Sequence
  Description of Artificial Sequence: Synthetic oligonucleotide
gagggaugguggcgauaaa

SEQ ID NO: 1395215 - RNA, 19 nt, Artificial Sequence
  Description of Artificial Sequence: Synthetic oligonucleotide
ugugcgugugugggccaau

SEQ ID NO: 1395216 - RNA, 19 nt, Artificial Sequence
  Description of Artificial Sequence: Synthetic oligonucleotide
cguacaccgugauguuagc

SEQ ID NO: 1395217 - RNA, 19 nt, Artificial Sequence
  Description of Artificial Sequence: Synthetic oligonucleotide
ccaccggucacggucacca

SEQ ID NO: 1395218 - RNA, 19 nt, Artificial Sequence
  Description of Artificial Sequence: Synthetic oligonucleotide
ggagccgggucagggccgg

SEQ ID NO: 1395219 - RNA, 19 nt, Artificial Sequence
  Description of Artificial Sequence: Synthetic oligonucleotide
cgccccgcgagcuguagcc

SEQ ID NO: 1395220 - RNA, 19 nt, Artificial Sequence
  Description of Artificial Sequence: Synthetic oligonucleotide
caaugagccucguggucau

SEQ ID NO: 1395221 - RNA, 19 nt, Artificial Sequence
  Description of Artificial Sequence: Synthetic oligonucleotide
ccucccuaugcgccuguug

SEQ ID NO: 1395222 - RNA, 19 nt, Artificial Sequence
  Description of Artificial Sequence: Synthetic oligonucleotide
gcaugcccaccugauagaa

SEQ ID NO: 1395223 - RNA, 19 nt, Artificial Sequence
  Description of Artificial Sequence: Synthetic oligonucleotide
gccacgcccagcuuaucua

SEQ ID NO: 1395224 - RNA, 19 nt, Artificial Sequence
  Description of Artificial Sequence: Synthetic oligonucleotide
ccaaguggaagagcagcga

SEQ ID NO: 1395225 - RNA, 19 nt, Artificial Sequence
  Description of Artificial Sequence: Synthetic oligonucleotide
cuuguccgaaaagcucaua

SEQ ID NO: 1395226 - RNA, 19 nt, Artificial Sequence
  Description of Artificial Sequence: Synthetic oligonucleotide
gcauaccugagggcuguga

SEQ ID NO: 1395227 - RNA, 19 nt, Artificial Sequence
  Description of Artificial Sequence: Synthetic oligonucleotide
caccaccggucacggucac

SEQ ID NO: 1395228 - RNA, 19 nt, Artificial Sequence
  Description of Artificial Sequence: Synthetic oligonucleotide
gcgccuguugacagguuuc

SEQ ID NO: 1395229 - RNA, 19 nt, Artificial Sequence
  Description of Artificial Sequence: Synthetic oligonucleotide
gcucgucagguuccaucuc

SEQ ID NO: 1395230 - RNA, 19 nt, Artificial Sequence
  Description of Artificial Sequence: Synthetic oligonucleotide
cacgagcggcgugcagagc

SEQ ID NO: 1395231 - RNA, 19 nt, Artificial Sequence
  Description of Artificial Sequence: Synthetic oligonucleotide
ccacaugcccgcgcacagg

SEQ ID NO: 1395232 - RNA, 19 nt, Artificial Sequence
  Description of Artificial Sequence: Synthetic oligonucleotide
cccuaugcgccuguugaca

SEQ ID NO: 1395233 - RNA, 19 nt, Artificial Sequence
  Description of Artificial Sequence: Synthetic oligonucleotide
augcccgcgcacaggucgu

SEQ ID NO: 1395234 - RNA, 19 nt, Artificial Sequence
  Description of Artificial Sequence: Synthetic oligonucleotide
caggccuugcggggcccgc

SEQ ID NO: 1395235 - RNA, 19 nt, Artificial Sequence
  Description of Artificial Sequence: Synthetic oligonucleotide
cgcggccacacccacacca

SEQ ID NO: 1395236 - RNA, 19 nt, Artificial Sequence
  Description of Artificial Sequence: Synthetic oligonucleotide
gacgagcguccgcggcgga

SEQ ID NO: 1395237 - RNA, 19 nt, Artificial Sequence
  Description of Artificial Sequence: Synthetic oligonucleotide
ggcggaccgggacccgcgc

SEQ ID NO: 1395238 - RNA, 19 nt, Artificial Sequence
  Description of Artificial Sequence: Synthetic oligonucleotide
cugugcucgucagguucca

SEQ ID NO: 1395239 - RNA, 19 nt, Artificial Sequence
  Description of Artificial Sequence: Synthetic oligonucleotide
cgagcggcgugcagagccc

SEQ ID NO: 1395240 - RNA, 19 nt, Artificial Sequence
  Description of Artificial Sequence: Synthetic oligonucleotide
cccacgagcggcgugcaga

SEQ ID NO: 1395241 - RNA, 19 nt, Artificial Sequence
  Description of Artificial Sequence: Synthetic oligonucleotide
gccgccccuccuugguacc

SEQ ID NO: 1395242 - RNA, 19 nt, Artificial Sequence
  Description of Artificial Sequence: Synthetic oligonucleotide
ccgcgcacaggucguugag

SEQ ID NO: 1395243 - RNA, 19 nt, Artificial Sequence
  Description of Artificial Sequence: Synthetic oligonucleotide
ccccgcagccaaggcaugg

SEQ ID NO: 1395244 - RNA, 19 nt, Artificial Sequence
  Description of Artificial Sequence: Synthetic oligonucleotide
gcggucggccucguagccc

SEQ ID NO: 1395245 - RNA, 19 nt, Artificial Sequence
  Description of Artificial Sequence: Synthetic oligonucleotide
cgcgaagcucagccgcgcg

SEQ ID NO: 1395246 - RNA, 19 nt, Artificial Sequence
  Description of Artificial Sequence: Synthetic oligonucleotide
gcggaccgggacccgcgcc

SEQ ID NO: 1395247 - RNA, 19 nt, Artificial Sequence
  Description of Artificial Sequence: Synthetic oligonucleotide
uccucccuaugcgccuguu

SEQ ID NO: 1395248 - RNA, 19 nt, Artificial Sequence
  Description of Artificial Sequence: Synthetic oligonucleotide
cgagcguccgcggcggacc

SEQ ID NO: 1395249 - RNA, 19 nt, Artificial Sequence
  Description of Artificial Sequence: Synthetic oligonucleotide
gcgccccgcgagcuguagc

SEQ ID NO: 1395250 - RNA, 19 nt, Artificial Sequence
  Description of Artificial Sequence: Synthetic oligonucleotide
gcccuacagcacagcucgg

SEQ ID NO: 1395251 - RNA, 19 nt, Artificial Sequence
  Description of Artificial Sequence: Synthetic oligonucleotide
cccgcgcacaggucguuga

SEQ ID NO: 1395252 - RNA, 19 nt, Artificial Sequence
  Description of Artificial Sequence: Synthetic oligonucleotide
caccguacaccgugauguu

SEQ ID NO: 1395253 - RNA, 19 nt, Artificial Sequence
  Description of Artificial Sequence: Synthetic oligonucleotide
ccgugauguuagccaccac

SEQ ID NO: 1395254 - RNA, 19 nt, Artificial Sequence
  Description of Artificial Sequence: Synthetic oligonucleotide
gcccacgagcggcgugcag

SEQ ID NO: 1395255 - RNA, 19 nt, Artificial Sequence
  Description of Artificial Sequence: Synthetic oligonucleotide
ccuucgucguguugcccua

SEQ ID NO: 1395256 - RNA, 19 nt, Artificial Sequence
  Description of Artificial Sequence: Synthetic oligonucleotide
ggcaugggcugaagaugaa

SEQ ID NO: 1395257 - RNA, 19 nt, Artificial Sequence
  Description of Artificial Sequence: Synthetic oligonucleotide
cggcggaccgggacccgcg

SEQ ID NO: 1395258 - RNA, 19 nt, Artificial Sequence
  Description of Artificial Sequence: Synthetic oligonucleotide
gggcgacaucgcaaccgca

SEQ ID NO: 1395259 - RNA, 19 nt, Artificial Sequence
  Description of Artificial Sequence: Synthetic oligonucleotide
ggcgccccgcgagcuguag

SEQ ID NO: 1395260 - RNA, 19 nt, Artificial Sequence
  Description of Artificial Sequence: Synthetic oligonucleotide
ccuuguccgaaaagcucau

SEQ ID NO: 1395261 - RNA, 19 nt, Artificial Sequence
  Description of Artificial Sequence: Synthetic oligonucleotide
gcggcaccguacaccguga

SEQ ID NO: 1395262 - RNA, 19 nt, Artificial Sequence
  Description of Artificial Sequence: Synthetic oligonucleotide
ccgccccuccuugguaccc

SEQ ID NO: 1395263 - RNA, 19 nt, Artificial Sequence
  Description of Artificial Sequence: Synthetic oligonucleotide
cgccuguugacagguuuca

SEQ ID NO: 1395264 - RNA, 19 nt, Artificial Sequence
  Description of Artificial Sequence: Synthetic oligonucleotide
gucggccgccuggccgagc

SEQ ID NO: 1395265 - RNA, 19 nt, Artificial Sequence
  Description of Artificial Sequence: Synthetic oligonucleotide
ccggcacauccuggacucc

SEQ ID NO: 1395266 - RNA, 19 nt, Artificial Sequence
  Description of Artificial Sequence: Synthetic oligonucleotide
aggcggcaccguacaccgu

SEQ ID NO: 1395267 - RNA, 19 nt, Artificial Sequence
  Description of Artificial Sequence: Synthetic oligonucleotide
gguucacaaugagccucgu

SEQ ID NO: 1395268 - RNA, 19 nt, Artificial Sequence
  Description of Artificial Sequence: Synthetic oligonucleotide
gcccacucagggguggccu

SEQ ID NO: 1395269 - RNA, 19 nt, Artificial Sequence
  Description of Artificial Sequence: Synthetic oligonucleotide
ccgcugaaguaggucaugu

SEQ ID NO: 1395270 - RNA, 19 nt, Artificial Sequence
  Description of Artificial Sequence: Synthetic oligonucleotide
ggccgaccgcgaagcucag

SEQ ID NO: 1395271 - RNA, 19 nt, Artificial Sequence
  Description of Artificial Sequence: Synthetic oligonucleotide
cggccucguagcccacgag

SEQ ID NO: 1395272 - RNA, 19 nt, Artificial Sequence
  Description of Artificial Sequence: Synthetic oligonucleotide
ggacagggccgccgccccu

SEQ ID NO: 1395273 - RNA, 19 nt, Artificial Sequence
  Description of Artificial Sequence: Synthetic oligonucleotide
cccagccaaacuggaagau

SEQ ID NO: 1395274 - RNA, 19 nt, Artificial Sequence
  Description of Artificial Sequence: Synthetic oligonucleotide
gcccgcugaaguaggucau

SEQ ID NO: 1395275 - RNA, 19 nt, Artificial Sequence
  Description of Artificial Sequence: Synthetic oligonucleotide
cgaaugcgaaugggccaaa

SEQ ID NO: 1395276 - RNA, 19 nt, Artificial Sequence
  Description of Artificial Sequence: Synthetic oligonucleotide
cgcgcaccgagugcaggaa

SEQ ID NO: 1395277 - RNA, 19 nt, Artificial Sequence
  Description of Artificial Sequence: Synthetic oligonucleotide
cggccgccuggccgagcag

SEQ ID NO: 1395278 - RNA, 19 nt, Artificial Sequence
  Description of Artificial Sequence: Synthetic oligonucleotide
cgccccuccuugguaccca

SEQ ID NO: 1395279 - RNA, 19 nt, Artificial Sequence
  Description of Artificial Sequence: Synthetic oligonucleotide
ccgccgccccuccuuggua

SEQ ID NO: 1395280 - RNA, 19 nt, Artificial Sequence
  Description of Artificial Sequence: Synthetic oligonucleotide
cgucggccgccuggccgag

SEQ ID NO: 1395281 - RNA, 19 nt, Artificial Sequence
  Description of Artificial Sequence: Synthetic oligonucleotide
cguagcccacgagcggcgu

SEQ ID NO: 1395282 - RNA, 19 nt, Artificial Sequence
  Description of Artificial Sequence: Synthetic oligonucleotide
cggcaccguacaccgugau

SEQ ID NO: 1395283 - RNA, 19 nt, Artificial Sequence
  Description of Artificial Sequence: Synthetic oligonucleotide
ccggcgcggucggccucgu

SEQ ID NO: 1395284 - RNA, 19 nt, Artificial Sequence
  Description of Artificial Sequence: Synthetic oligonucleotide
aauagugccguucugacac

SEQ ID NO: 1395285 - RNA, 19 nt, Artificial Sequence
  Description of Artificial Sequence: Synthetic oligonucleotide
aaagaaaucggguauuuuc

SEQ ID NO: 1395286 - RNA, 19 nt, Artificial Sequence
  Description of Artificial Sequence: Synthetic oligonucleotide
ugagauuuuaccaacaucu

SEQ ID NO: 1395287 - RNA, 19 nt, Artificial Sequence
  Description of Artificial Sequence: Synthetic oligonucleotide
aacccuaaauauuaaaagg

SEQ ID NO: 1395288 - RNA, 19 nt, Artificial Sequence
  Description of Artificial Sequence: Synthetic oligonucleotide
uuugcaaacaauauggaca

SEQ ID NO: 1395289 - RNA, 19 nt, Artificial Sequence
  Description of Artificial Sequence: Synthetic oligonucleotide
uccuuugcaaacaauaugg

SEQ ID NO: 1395290 - RNA, 19 nt, Artificial Sequence
  Description of Artificial Sequence: Synthetic oligonucleotide
ugaagaucuagccagauug

SEQ ID NO: 1395291 - RNA, 19 nt, Artificial Sequence
  Description of Artificial Sequence: Synthetic oligonucleotide
ugagauauaaacccuauca

SEQ ID NO: 1395292 - RNA, 19 nt, Artificial Sequence
  Description of Artificial Sequence: Synthetic oligonucleotide
aaaauuaccacagucuuag

SEQ ID NO: 1395293 - RNA, 19 nt, Artificial Sequence
  Description of Artificial Sequence: Synthetic oligonucleotide
aauuagauguucucuaaag

SEQ ID NO: 1395294 - RNA, 19 nt, Artificial Sequence
  Description of Artificial Sequence: Synthetic oligonucleotide
cuuucuacagcuuagggcc

SEQ ID NO: 1395295 - RNA, 19 nt, Artificial Sequence
  Description of Artificial Sequence: Synthetic oligonucleotide
aauuuaggucuguauauac

SEQ ID NO: 1395296 - RNA, 19 nt, Artificial Sequence
  Description of Artificial Sequence: Synthetic oligonucleotide
auauaaacccuaucaaccc

SEQ ID NO: 1395297 - RNA, 19 nt, Artificial Sequence
  Description of Artificial Sequence: Synthetic oligonucleotide
uagggaauuacacaaauca

SEQ ID NO: 1395298 - RNA, 19 nt, Artificial Sequence
  Description of Artificial Sequence: Synthetic oligonucleotide
auuagauguucucuaaagc

SEQ ID NO: 1395299 - RNA, 19 nt, Artificial Sequence
  Description of Artificial Sequence: Synthetic oligonucleotide
uuuauuaauuucaugugca

SEQ ID NO: 1395300 - RNA, 19 nt, Artificial Sequence
  Description of Artificial Sequence: Synthetic oligonucleotide
uuagauguucucuaaagcc

SEQ ID NO: 1395301 - RNA, 19 nt, Artificial Sequence
  Description of Artificial Sequence: Synthetic oligonucleotide
agauauaaacccuaucaac

SEQ ID NO: 1395302 - RNA, 19 nt, Artificial Sequence
  Description of Artificial Sequence: Synthetic oligonucleotide
aauguaaaauucagaaccc

SEQ ID NO: 1395303 - RNA, 19 nt, Artificial Sequence
  Description of Artificial Sequence: Synthetic oligonucleotide
aaguuaauacccuaucuug

SEQ ID NO: 1395304 - RNA, 19 nt, Artificial Sequence
  Description of Artificial Sequence: Synthetic oligonucleotide
gauauaaacccuaucaacc

SEQ ID NO: 1395305 - RNA, 19 nt, Artificial Sequence
  Description of Artificial Sequence: Synthetic oligonucleotide
aacauaucauuauuuaaca

SEQ ID NO: 1395306 - RNA, 19 nt, Artificial Sequence
  Description of Artificial Sequence: Synthetic oligonucleotide
ugcaugaagaucuagccag

SEQ ID NO: 1395307 - RNA, 19 nt, Artificial Sequence
  Description of Artificial Sequence: Synthetic oligonucleotide
aagaaaucggguauuuucc

SEQ ID NO: 1395308 - RNA, 19 nt, Artificial Sequence
  Description of Artificial Sequence: Synthetic oligonucleotide
uugauaguuaauaacugug

SEQ ID NO: 1395309 - RNA, 19 nt, Artificial Sequence
  Description of Artificial Sequence: Synthetic oligonucleotide
auaguuaauaacugugagg

SEQ ID NO: 1395310 - RNA, 19 nt, Artificial Sequence
  Description of Artificial Sequence: Synthetic oligonucleotide
aaaauacauguaaaugccc

SEQ ID NO: 1395311 - RNA, 19 nt, Artificial Sequence
  Description of Artificial Sequence: Synthetic oligonucleotide
gauaguuaauaacugugag

SEQ ID NO: 1395312 - RNA, 19 nt, Artificial Sequence
  Description of Artificial Sequence: Synthetic oligonucleotide
ucuauguugaaaucuaacu

SEQ ID NO: 1395313 - RNA, 19 nt, Artificial Sequence
  Description of Artificial Sequence: Synthetic oligonucleotide
uaugagagggcuauaaacu

SEQ ID NO: 1395314 - RNA, 19 nt, Artificial Sequence
  Description of Artificial Sequence: Synthetic oligonucleotide
uugcaaacaauauggacag

SEQ ID NO: 1395315 - RNA, 19 nt, Artificial Sequence
  Description of Artificial Sequence: Synthetic oligonucleotide
agacauuccucaaacaucc

SEQ ID NO: 1395316 - RNA, 19 nt, Artificial Sequence
  Description of Artificial Sequence: Synthetic oligonucleotide
uagaaaaccccuuucuuag

SEQ ID NO: 1395317 - RNA, 19 nt, Artificial Sequence
  Description of Artificial Sequence: Synthetic oligonucleotide
uguauauacucaaauaauu

SEQ ID NO: 1395318 - RNA, 19 nt, Artificial Sequence
  Description of Artificial Sequence: Synthetic oligonucleotide
cuuagacacaucaaaacug

SEQ ID NO: 1395319 - RNA, 19 nt, Artificial Sequence
  Description of Artificial Sequence: Synthetic oligonucleotide
ucuaacuucuacaaaugcu

SEQ ID NO: 1395320 - RNA, 19 nt, Artificial Sequence
  Description of Artificial Sequence: Synthetic oligonucleotide
cauuuucaaauccaguggg

SEQ ID NO: 1395321 - RNA, 19 nt, Artificial Sequence
  Description of Artificial Sequence: Synthetic oligonucleotide
ucuuucuacagcuuagggc

SEQ ID NO: 1395322 - RNA, 19 nt, Artificial Sequence
  Description of Artificial Sequence: Synthetic oligonucleotide
uuuaccaacaucucacuac

SEQ ID NO: 1395323 - RNA, 19 nt, Artificial Sequence
  Description of Artificial Sequence: Synthetic oligonucleotide
gaagaguccaucuaccuac

SEQ ID NO: 1395324 - RNA, 19 nt, Artificial Sequence
  Description of Artificial Sequence: Synthetic oligonucleotide
ugauaguuaauaacuguga

SEQ ID NO: 1395325 - RNA, 19 nt, Artificial Sequence
  Description of Artificial Sequence: Synthetic oligonucleotide
uugaaaucuaacuucuaca

SEQ ID NO: 1395326 - RNA, 19 nt, Artificial Sequence
  Description of Artificial Sequence: Synthetic oligonucleotide
uuuggaaggacgaaccaca

SEQ ID NO: 1395327 - RNA, 19 nt, Artificial Sequence
  Description of Artificial Sequence: Synthetic oligonucleotide
cuaucuuguuaaaaguucc

SEQ ID NO: 1395328 - RNA, 19 nt, Artificial Sequence
  Description of Artificial Sequence: Synthetic oligonucleotide
uuuaggucuguauauacuc

SEQ ID NO: 1395329 - RNA, 19 nt, Artificial Sequence
  Description of Artificial Sequence: Synthetic oligonucleotide
gauuuuaccaacaucucac

SEQ ID NO: 1395330 - RNA, 19 nt, Artificial Sequence
  Description of Artificial Sequence: Synthetic oligonucleotide
caacccuaaauauuaaaag

SEQ ID NO: 1395331 - RNA, 19 nt, Artificial Sequence
  Description of Artificial Sequence: Synthetic oligonucleotide
ucaggaucgucuuugagcu

SEQ ID NO: 1395332 - RNA, 19 nt, Artificial Sequence
  Description of Artificial Sequence: Synthetic oligonucleotide
aacccuaucaacccuaaau

SEQ ID NO: 1395333 - RNA, 19 nt, Artificial Sequence
  Description of Artificial Sequence: Synthetic oligonucleotide
uacccuaucuuguuaaaag

SEQ ID NO: 1395334 - RNA, 19 nt, Artificial Sequence
  Description of Artificial Sequence: Synthetic oligonucleotide
aaucggguauuuuccacuc

SEQ ID NO: 1395335 - RNA, 19 nt, Artificial Sequence
  Description of Artificial Sequence: Synthetic oligonucleotide
uuaucaaucuuaauacauc

SEQ ID NO: 1395336 - RNA, 19 nt, Artificial Sequence
  Description of Artificial Sequence: Synthetic oligonucleotide
cauuccucaaacauccucc

SEQ ID NO: 1395337 - RNA, 19 nt, Artificial Sequence
  Description of Artificial Sequence: Synthetic oligonucleotide
auugauaguuaauaacugu

SEQ ID NO: 1395338 - RNA, 19 nt, Artificial Sequence
  Description of Artificial Sequence: Synthetic oligonucleotide
acccuaaauauuaaaaggg

SEQ ID NO: 1395339 - RNA, 19 nt, Artificial Sequence
  Description of Artificial Sequence: Synthetic oligonucleotide
agauugauaguuaauaacu

SEQ ID NO: 1395340 - RNA, 19 nt, Artificial Sequence
  Description of Artificial Sequence: Synthetic oligonucleotide
uguguaugagcuuuugcug

SEQ ID NO: 1395341 - RNA, 19 nt, Artificial Sequence
  Description of Artificial Sequence: Synthetic oligonucleotide
aaauacauguaaaugccca

SEQ ID NO: 1395342 - RNA, 19 nt, Artificial Sequence
  Description of Artificial Sequence: Synthetic oligonucleotide
acauguauuuagcuuuugg

SEQ ID NO: 1395343 - RNA, 19 nt, Artificial Sequence
  Description of Artificial Sequence: Synthetic oligonucleotide
uagauguucucuaaagccu

SEQ ID NO: 1395344 - RNA, 19 nt, Artificial Sequence
  Description of Artificial Sequence: Synthetic oligonucleotide
uucuuucuacagcuuaggg

SEQ ID NO: 1395345 - RNA, 19 nt, Artificial Sequence
  Description of Artificial Sequence: Synthetic oligonucleotide
uuaccaacaucucacuaca

SEQ ID NO: 1395346 - RNA, 19 nt, Artificial Sequence
  Description of Artificial Sequence: Synthetic oligonucleotide
guaagugaaugacaaguag

SEQ ID NO: 1395347 - RNA, 19 nt, Artificial Sequence
  Description of Artificial Sequence: Synthetic oligonucleotide
aaaucggguauuuuccacu

SEQ ID NO: 1395348 - RNA, 19 nt, Artificial Sequence
  Description of Artificial Sequence: Synthetic oligonucleotide
ugaaugacaaguagccaug

SEQ ID NO: 1395349 - RNA, 19 nt, Artificial Sequence
  Description of Artificial Sequence: Synthetic oligonucleotide
ucgucuuugagcuccugcg

SEQ ID NO: 1395350 - RNA, 19 nt, Artificial Sequence
  Description of Artificial Sequence: Synthetic oligonucleotide
uuuagguggccauucagga

SEQ ID NO: 1395351 - RNA, 19 nt, Artificial Sequence
  Description of Artificial Sequence: Synthetic oligonucleotide
uuaccaaaucguaauacau

SEQ ID NO: 1395352 - RNA, 19 nt, Artificial Sequence
  Description of Artificial Sequence: Synthetic oligonucleotide
aagccuaagcacauccucc

SEQ ID NO: 1395353 - RNA, 19 nt, Artificial Sequence
  Description of Artificial Sequence: Synthetic oligonucleotide
aauccagugggucaccaga

SEQ ID NO: 1395354 - RNA, 19 nt, Artificial Sequence
  Description of Artificial Sequence: Synthetic oligonucleotide
gauugauaguuaauaacug

SEQ ID NO: 1395355 - RNA, 19 nt, Artificial Sequence
  Description of Artificial Sequence: Synthetic oligonucleotide
cagauugauaguuaauaac

SEQ ID NO: 1395356 - RNA, 19 nt, Artificial Sequence
  Description of Artificial Sequence: Synthetic oligonucleotide
ggacagaugagauauaaac

SEQ ID NO: 1395357 - RNA, 19 nt, Artificial Sequence
  Description of Artificial Sequence: Synthetic oligonucleotide
guaugagagggcuauaaac

SEQ ID NO: 1395358 - RNA, 19 nt, Artificial Sequence
  Description of Artificial Sequence: Synthetic oligonucleotide
ucucucaccuacauaaaac

SEQ ID NO: 1395359 - RNA, 19 nt, Artificial Sequence
  Description of Artificial Sequence: Synthetic oligonucleotide
aucucuauaugacggugac

SEQ ID NO: 1395360 - RNA, 19 nt, Artificial Sequence
  Description of Artificial Sequence: Synthetic oligonucleotide
uauuaauuucaugugcaca

SEQ ID NO: 1395361 - RNA, 19 nt, Artificial Sequence
  Description of Artificial Sequence: Synthetic oligonucleotide
aggaucgucuuugagcucc

SEQ ID NO: 1395362 - RNA, 19 nt, Artificial Sequence
  Description of Artificial Sequence: Synthetic oligonucleotide
ucuaccuaccgcacuaagc

SEQ ID NO: 1395363 - RNA, 19 nt, Artificial Sequence
  Description of Artificial Sequence: Synthetic oligonucleotide
aacugcaugcaugaauuag

SEQ ID NO: 1395364 - RNA, 19 nt, Artificial Sequence
  Description of Artificial Sequence: Synthetic oligonucleotide
uuuuaugaucauucucuug

SEQ ID NO: 1395365 - RNA, 19 nt, Artificial Sequence
  Description of Artificial Sequence: Synthetic oligonucleotide
caaacauccucccucacug

SEQ ID NO: 1395366 - RNA, 19 nt, Artificial Sequence
  Description of Artificial Sequence: Synthetic oligonucleotide
uuuguaagugaaugacaag

SEQ ID NO: 1395367 - RNA, 19 nt, Artificial Sequence
  Description of Artificial Sequence: Synthetic oligonucleotide
auaaacugaaauagugccg

SEQ ID NO: 1395368 - RNA, 19 nt, Artificial Sequence
  Description of Artificial Sequence: Synthetic oligonucleotide
acauuuagguuacugcaug

SEQ ID NO: 1395369 - RNA, 19 nt, Artificial Sequence
  Description of Artificial Sequence: Synthetic oligonucleotide
aagcacauccuccugaaua

SEQ ID NO: 1395370 - RNA, 19 nt, Artificial Sequence
  Description of Artificial Sequence: Synthetic oligonucleotide
ccaaaucucuauaugacgg

SEQ ID NO: 1395371 - RNA, 19 nt, Artificial Sequence
  Description of Artificial Sequence: Synthetic oligonucleotide
aaguuaacauaucauuauu

SEQ ID NO: 1395372 - RNA, 19 nt, Artificial Sequence
  Description of Artificial Sequence: Synthetic oligonucleotide
ugaaauagugccguucuga

SEQ ID NO: 1395373 - RNA, 19 nt, Artificial Sequence
  Description of Artificial Sequence: Synthetic oligonucleotide
aaaucucuauaugacggug

SEQ ID NO: 1395374 - RNA, 19 nt, Artificial Sequence
  Description of Artificial Sequence: Synthetic oligonucleotide
uuaggucuguauauacuca

SEQ ID NO: 1395375 - RNA, 19 nt, Artificial Sequence
  Description of Artificial Sequence: Synthetic oligonucleotide
ucacuagcacggcagaagc

SEQ ID NO: 1395376 - RNA, 19 nt, Artificial Sequence
  Description of Artificial Sequence: Synthetic oligonucleotide
aauauggacagaugagaua

SEQ ID NO: 1395377 - RNA, 19 nt, Artificial Sequence
  Description of Artificial Sequence: Synthetic oligonucleotide
gaaauagugccguucugac

SEQ ID NO: 1395378 - RNA, 19 nt, Artificial Sequence
  Description of Artificial Sequence: Synthetic oligonucleotide
accaaaucguaauacauua

SEQ ID NO: 1395379 - RNA, 19 nt, Artificial Sequence
  Description of Artificial Sequence: Synthetic oligonucleotide
aaacauugucuucuggcaa

SEQ ID NO: 1395380 - RNA, 19 nt, Artificial Sequence
  Description of Artificial Sequence: Synthetic oligonucleotide
aguccaucuaccuaccgca

SEQ ID NO: 1395381 - RNA, 19 nt, Artificial Sequence
  Description of Artificial Sequence: Synthetic oligonucleotide
uaaucaacuacuguacuau

SEQ ID NO: 1395382 - RNA, 19 nt, Artificial Sequence
  Description of Artificial Sequence: Synthetic oligonucleotide
ucucaccuacauaaaaccu

SEQ ID NO: 1395383 - RNA, 19 nt, Artificial Sequence
  Description of Artificial Sequence: Synthetic oligonucleotide
ucggguauuuuccacucgc

SEQ ID NO: 1395384 - RNA, 19 nt, Artificial Sequence
  Description of Artificial Sequence: Synthetic oligonucleotide
cagucuuagggaauuacac

SEQ ID NO: 1395385 - RNA, 19 nt, Artificial Sequence
  Description of Artificial Sequence: Synthetic oligonucleotide
augagauauaaacccuauc

SEQ ID NO: 1395386 - RNA, 19 nt, Artificial Sequence
  Description of Artificial Sequence: Synthetic oligonucleotide
uggaauaacccuaccccug

SEQ ID NO: 1395387 - RNA, 19 nt, Artificial Sequence
  Description of Artificial Sequence: Synthetic oligonucleotide
aauagcauuuuaugaucau

SEQ ID NO: 1395388 - RNA, 19 nt, Artificial Sequence
  Description of Artificial Sequence: Synthetic oligonucleotide
uauaugacggugaccuaca

SEQ ID NO: 1395389 - RNA, 19 nt, Artificial Sequence
  Description of Artificial Sequence: Synthetic oligonucleotide
cugacaugauccauucucc

SEQ ID NO: 1395390 - RNA, 19 nt, Artificial Sequence
  Description of Artificial Sequence: Synthetic oligonucleotide
caugucuggacugacagac

SEQ ID NO: 1395391 - RNA, 19 nt, Artificial Sequence
  Description of Artificial Sequence: Synthetic oligonucleotide
guuuagguggccauucagg

SEQ ID NO: 1395392 - RNA, 19 nt, Artificial Sequence
  Description of Artificial Sequence: Synthetic oligonucleotide
ugaauacugucacuagcac

SEQ ID NO: 1395393 - RNA, 19 nt, Artificial Sequence
  Description of Artificial Sequence: Synthetic oligonucleotide
ucaaacauccucccucacu

SEQ ID NO: 1395394 - RNA, 19 nt, Artificial Sequence
  Description of Artificial Sequence: Synthetic oligonucleotide
uaaccucccaccauaaaua

SEQ ID NO: 1395395 - RNA, 19 nt, Artificial Sequence
  Description of Artificial Sequence: Synthetic oligonucleotide
agggcuauaaacugaaaua

SEQ ID NO: 1395396 - RNA, 19 nt, Artificial Sequence
  Description of Artificial Sequence: Synthetic oligonucleotide
acaauauggacagaugaga

SEQ ID NO: 1395397 - RNA, 19 nt, Artificial Sequence
  Description of Artificial Sequence: Synthetic oligonucleotide
agucuuagggaauuacaca

SEQ ID NO: 1395398 - RNA, 19 nt, Artificial Sequence
  Description of Artificial Sequence: Synthetic oligonucleotide
aaauagugccguucugaca

SEQ ID NO: 1395399 - RNA, 19 nt, Artificial Sequence
  Description of Artificial Sequence: Synthetic oligonucleotide
ugaccuacagaagagucca

SEQ ID NO: 1395400 - RNA, 19 nt, Artificial Sequence
  Description of Artificial Sequence: Synthetic oligonucleotide
cuaucaacccuaaauauua

SEQ ID NO: 1395401 - RNA, 19 nt, Artificial Sequence
  Description of Artificial Sequence: Synthetic oligonucleotide
ucuggacugacagacauuc

SEQ ID NO: 1395402 - RNA, 19 nt, Artificial Sequence
  Description of Artificial Sequence: Synthetic oligonucleotide
aauccgguuaugaagugcu

SEQ ID NO: 1395403 - RNA, 19 nt, Artificial Sequence
  Description of Artificial Sequence: Synthetic oligonucleotide
agggguauguaucaaaaua

SEQ ID NO: 1395404 - RNA, 19 nt, Artificial Sequence
  Description of Artificial Sequence: Synthetic oligonucleotide
uccugcgccaaguacaugu

SEQ ID NO: 1395405 - RNA, 19 nt, Artificial Sequence
  Description of Artificial Sequence: Synthetic oligonucleotide
aaacauccucccucacugg

SEQ ID NO: 1395406 - RNA, 19 nt, Artificial Sequence
  Description of Artificial Sequence: Synthetic oligonucleotide
cauccaauggcuucaaaca

SEQ ID NO: 1395407 - RNA, 19 nt, Artificial Sequence
  Description of Artificial Sequence: Synthetic oligonucleotide
aauaacugugaggcaaaug

SEQ ID NO: 1395408 - RNA, 19 nt, Artificial Sequence
  Description of Artificial Sequence: Synthetic oligonucleotide
agcauuuuccccaucgauc

SEQ ID NO: 1395409 - RNA, 19 nt, Artificial Sequence
  Description of Artificial Sequence: Synthetic oligonucleotide
uuuucaaauccaguggguc

SEQ ID NO: 1395410 - RNA, 19 nt, Artificial Sequence
  Description of Artificial Sequence: Synthetic oligonucleotide
uuagggaauuacacaaauc

SEQ ID NO: 1395411 - RNA, 19 nt, Artificial Sequence
  Description of Artificial Sequence: Synthetic oligonucleotide
gucuuagggaauuacacaa

SEQ ID NO: 1395412 - RNA, 19 nt, Artificial Sequence
  Description of Artificial Sequence: Synthetic oligonucleotide
agcauuuuaugaucauucu

SEQ ID NO: 1395413 - RNA, 19 nt, Artificial Sequence
  Description of Artificial Sequence: Synthetic oligonucleotide
cuaccuaccgcacuaagca

SEQ ID NO: 1395414 - RNA, 19 nt, Artificial Sequence
  Description of Artificial Sequence: Synthetic oligonucleotide
agaacccaaaucucuauau

SEQ ID NO: 1395415 - RNA, 19 nt, Artificial Sequence
  Description of Artificial Sequence: Synthetic oligonucleotide
acuagcacggcagaagcag

SEQ ID NO: 1395416 - RNA, 19 nt, Artificial Sequence
  Description of Artificial Sequence: Synthetic oligonucleotide
uacaaaaguuaauacccua

SEQ ID NO: 1395417 - RNA, 19 nt, Artificial Sequence
  Description of Artificial Sequence: Synthetic oligonucleotide
uucccaguaaccucccacc

SEQ ID NO: 1395418 - RNA, 19 nt, Artificial Sequence
  Description of Artificial Sequence: Synthetic oligonucleotide
cauaucauuauuuaacaau

SEQ ID NO: 1395419 - RNA, 19 nt, Artificial Sequence
  Description of Artificial Sequence: Synthetic oligonucleotide
cuauaugacggugaccuac

SEQ ID NO: 1395420 - RNA, 19 nt, Artificial Sequence
  Description of Artificial Sequence: Synthetic oligonucleotide
gaguccaucuaccuaccgc

SEQ ID NO: 1395421 - RNA, 19 nt, Artificial Sequence
  Description of Artificial Sequence: Synthetic oligonucleotide
uguaugagagggcuauaaa

SEQ ID NO: 1395422 - RNA, 19 nt, Artificial Sequence
  Description of Artificial Sequence: Synthetic oligonucleotide
gaagccuaagcacauccuc

SEQ ID NO: 1395423 - RNA, 19 nt, Artificial Sequence
  Description of Artificial Sequence: Synthetic oligonucleotide
ucauaacaggaaguaaugu

SEQ ID NO: 1395424 - RNA, 19 nt, Artificial Sequence
  Description of Artificial Sequence: Synthetic oligonucleotide
uucucucaccuacauaaaa

SEQ ID NO: 1395425 - RNA, 19 nt, Artificial Sequence
  Description of Artificial Sequence: Synthetic oligonucleotide
agaaaucggguauuuucca

SEQ ID NO: 1395426 - RNA, 19 nt, Artificial Sequence
  Description of Artificial Sequence: Synthetic oligonucleotide
uuuuaccaacaucucacua

SEQ ID NO: 1395427 - RNA, 19 nt, Artificial Sequence
  Description of Artificial Sequence: Synthetic oligonucleotide
acauaucauuauuuaacaa

SEQ ID NO: 1395428 - RNA, 19 nt, Artificial Sequence
  Description of Artificial Sequence: Synthetic oligonucleotide
uagguuacugcaugaagau

SEQ ID NO: 1395429 - RNA, 19 nt, Artificial Sequence
  Description of Artificial Sequence: Synthetic oligonucleotide
gggcuauaaacugaaauag

SEQ ID NO: 1395430 - RNA, 19 nt, Artificial Sequence
  Description of Artificial Sequence: Synthetic oligonucleotide
aaauuuaggucuguauaua

SEQ ID NO: 1395431 - RNA, 19 nt, Artificial Sequence
  Description of Artificial Sequence: Synthetic oligonucleotide
gccaaguacauguauuuag

SEQ ID NO: 1395432 - RNA, 19 nt, Artificial Sequence
  Description of Artificial Sequence: Synthetic oligonucleotide
aucauaacaggaaguaaug

SEQ ID NO: 1395433 - RNA, 19 nt, Artificial Sequence
  Description of Artificial Sequence: Synthetic oligonucleotide
augaagugcuguuucuucu

SEQ ID NO: 1395434 - RNA, 19 nt, Artificial Sequence
  Description of Artificial Sequence: Synthetic oligonucleotide
aggcaaaugccauuuuacu

SEQ ID NO: 1395435 - RNA, 19 nt, Artificial Sequence
  Description of Artificial Sequence: Synthetic oligonucleotide
ucuuagggaauuacacaaa

SEQ ID NO: 1395436 - RNA, 19 nt, Artificial Sequence
  Description of Artificial Sequence: Synthetic oligonucleotide
cauaauccgguuaugaagu

SEQ ID NO: 1395437 - RNA, 19 nt, Artificial Sequence
  Description of Artificial Sequence: Synthetic oligonucleotide
aaucucuauaugacgguga

SEQ ID NO: 1395438 - RNA, 19 nt, Artificial Sequence
  Description of Artificial Sequence: Synthetic oligonucleotide
cuuuacuacaguuuuggcu

SEQ ID NO: 1395439 - RNA, 19 nt, Artificial Sequence
  Description of Artificial Sequence: Synthetic oligonucleotide
acaaaucauaacaggaagu

SEQ ID NO: 1395440 - RNA, 19 nt, Artificial Sequence
  Description of Artificial Sequence: Synthetic oligonucleotide
aagaguccaucuaccuacc

SEQ ID NO: 1395441 - RNA, 19 nt, Artificial Sequence
  Description of Artificial Sequence: Synthetic oligonucleotide
aguuaauacccuaucuugu

SEQ ID NO: 1395442 - RNA, 19 nt, Artificial Sequence
  Description of Artificial Sequence: Synthetic oligonucleotide
aagggguauguaucaaaau

SEQ ID NO: 1395443 - RNA, 19 nt, Artificial Sequence
  Description of Artificial Sequence: Synthetic oligonucleotide
guauuuagcuuuugguguc

SEQ ID NO: 1395444 - RNA, 19 nt, Artificial Sequence
  Description of Artificial Sequence: Synthetic oligonucleotide
cugacuccucauuucuugg

SEQ ID NO: 1395445 - RNA, 19 nt, Artificial Sequence
  Description of Artificial Sequence: Synthetic oligonucleotide
ugcccagacuguacaaaag

SEQ ID NO: 1395446 - RNA, 19 nt, Artificial Sequence
  Description of Artificial Sequence: Synthetic oligonucleotide
cagacuguacaaaaguuaa

SEQ ID NO: 1395447 - RNA, 19 nt, Artificial Sequence
  Description of Artificial Sequence: Synthetic oligonucleotide
uuccccaucgauccacuga

SEQ ID NO: 1395448 - RNA, 19 nt, Artificial Sequence
  Description of Artificial Sequence: Synthetic oligonucleotide
cuguacuauguaugagagg

SEQ ID NO: 1395449 - RNA, 19 nt, Artificial Sequence
  Description of Artificial Sequence: Synthetic oligonucleotide
uaauccgguuaugaagugc

SEQ ID NO: 1395450 - RNA, 19 nt, Artificial Sequence
  Description of Artificial Sequence: Synthetic oligonucleotide
ucucugcuaugcuauggug

SEQ ID NO: 1395451 - RNA, 19 nt, Artificial Sequence
  Description of Artificial Sequence: Synthetic oligonucleotide
ucuagccagauugauaguu

SEQ ID NO: 1395452 - RNA, 19 nt, Artificial Sequence
  Description of Artificial Sequence: Synthetic oligonucleotide
uuucuacagcuuagggccc

SEQ ID NO: 1395453 - RNA, 19 nt, Artificial Sequence
  Description of Artificial Sequence: Synthetic oligonucleotide
ccaacaucucacuacaaac

SEQ ID NO: 1395454 - RNA, 19 nt, Artificial Sequence
  Description of Artificial Sequence: Synthetic oligonucleotide
ugcuaugcuauggugcuga

SEQ ID NO: 1395455 - RNA, 19 nt, Artificial Sequence
  Description of Artificial Sequence: Synthetic oligonucleotide
cucuauaugacggugaccu

SEQ ID NO: 1395456 - RNA, 19 nt, Artificial Sequence
  Description of Artificial Sequence: Synthetic oligonucleotide
gugccguucugacacacag

SEQ ID NO: 1395457 - RNA, 19 nt, Artificial Sequence
  Description of Artificial Sequence: Synthetic oligonucleotide
auucaggaucgucuuugag

SEQ ID NO: 1395458 - RNA, 19 nt, Artificial Sequence
  Description of Artificial Sequence: Synthetic oligonucleotide
uaucaacccuaaauauuaa

SEQ ID NO: 1395459 - RNA, 19 nt, Artificial Sequence
  Description of Artificial Sequence: Synthetic oligonucleotide
acaaaaguuaauacccuau

SEQ ID NO: 1395460 - RNA, 19 nt, Artificial Sequence
  Description of Artificial Sequence: Synthetic oligonucleotide
aacccuaccccugucuaug

SEQ ID NO: 1395461 - RNA, 19 nt, Artificial Sequence
  Description of Artificial Sequence: Synthetic oligonucleotide
uaugagcuuuugcuguuaa

SEQ ID NO: 1395462 - RNA, 19 nt, Artificial Sequence
  Description of Artificial Sequence: Synthetic oligonucleotide
acuaagcaggacccauguc

SEQ ID NO: 1395463 - RNA, 19 nt, Artificial Sequence
  Description of Artificial Sequence: Synthetic oligonucleotide
cccaaaucucuauaugacg

SEQ ID NO: 1395464 - RNA, 19 nt, Artificial Sequence
  Description of Artificial Sequence: Synthetic oligonucleotide
auaauccgguuaugaagug

SEQ ID NO: 1395465 - RNA, 19 nt, Artificial Sequence
  Description of Artificial Sequence: Synthetic oligonucleotide
ccuaucuuguuaaaaguuc

SEQ ID NO: 1395466 - RNA, 19 nt, Artificial Sequence
  Description of Artificial Sequence: Synthetic oligonucleotide
accuacagaagaguccauc

SEQ ID NO: 1395467 - RNA, 19 nt, Artificial Sequence
  Description of Artificial Sequence: Synthetic oligonucleotide
ugugaggcaaaugccauuu

SEQ ID NO: 1395468 - RNA, 19 nt, Artificial Sequence
  Description of Artificial Sequence: Synthetic oligonucleotide
accuaccgcacuaagcagg

SEQ ID NO: 1395469 - RNA, 19 nt, Artificial Sequence
  Description of Artificial Sequence: Synthetic oligonucleotide
gguuaugaagugcuguuuc

SEQ ID NO: 1395470 - RNA, 19 nt, Artificial Sequence
  Description of Artificial Sequence: Synthetic oligonucleotide
cuguguaugagcuuuugcu

SEQ ID NO: 1395471 - RNA, 19 nt, Artificial Sequence
  Description of Artificial Sequence: Synthetic oligonucleotide
auguaaaauucagaaccca

SEQ ID NO: 1395472 - RNA, 19 nt, Artificial Sequence
  Description of Artificial Sequence: Synthetic oligonucleotide
aagaucuagccagauugau

SEQ ID NO: 1395473 - RNA, 19 nt, Artificial Sequence
  Description of Artificial Sequence: Synthetic oligonucleotide
uggacagaugagauauaaa

SEQ ID NO: 1395474 - RNA, 19 nt, Artificial Sequence
  Description of Artificial Sequence: Synthetic oligonucleotide
aucggguauuuuccacucg

SEQ ID NO: 1395475 - RNA, 19 nt, Artificial Sequence
  Description of Artificial Sequence: Synthetic oligonucleotide
uaccuaccgcacuaagcag

SEQ ID NO: 1395476 - RNA, 19 nt, Artificial Sequence
  Description of Artificial Sequence: Synthetic oligonucleotide
uaaacccuaucaacccuaa

SEQ ID NO: 1395477 - RNA, 19 nt, Artificial Sequence
  Description of Artificial Sequence: Synthetic oligonucleotide
uccaucuaccuaccgcacu

SEQ ID NO: 1395478 - RNA, 19 nt, Artificial Sequence
  Description of Artificial Sequence: Synthetic oligonucleotide
ugcgccaaguacauguauu

SEQ ID NO: 1395479 - RNA, 19 nt, Artificial Sequence
  Description of Artificial Sequence: Synthetic oligonucleotide
accuacauaaaaccuuguu

SEQ ID NO: 1395480 - RNA, 19 nt, Artificial Sequence
  Description of Artificial Sequence: Synthetic oligonucleotide
guucccaguaaccucccac

SEQ ID NO: 1395481 - RNA, 19 nt, Artificial Sequence
  Description of Artificial Sequence: Synthetic oligonucleotide
agccuaagcacauccuccu

SEQ ID NO: 1395482 - RNA, 19 nt, Artificial Sequence
  Description of Artificial Sequence: Synthetic oligonucleotide
gagggcuauaaacugaaau

SEQ ID NO: 1395483 - RNA, 19 nt, Artificial Sequence
  Description of Artificial Sequence: Synthetic oligonucleotide
ucguugacugagguuuagg

SEQ ID NO: 1395484 - RNA, 19 nt, Artificial Sequence
  Description of Artificial Sequence: Synthetic oligonucleotide
acauaauuaccaaaucgua

SEQ ID NO: 1395485 - RNA, 19 nt, Artificial Sequence
  Description of Artificial Sequence: Synthetic oligonucleotide
uccgguuaugaagugcugu

SEQ ID NO: 1395486 - RNA, 19 nt, Artificial Sequence
  Description of Artificial Sequence: Synthetic oligonucleotide
aggacgaaccacagugggc

SEQ ID NO: 1395487 - RNA, 19 nt, Artificial Sequence
  Description of Artificial Sequence: Synthetic oligonucleotide
ugacuccucauuucuuggu

SEQ ID NO: 1395488 - RNA, 19 nt, Artificial Sequence
  Description of Artificial Sequence: Synthetic oligonucleotide
ccauccaauggcuucaaac

SEQ ID NO: 1395489 - RNA, 19 nt, Artificial Sequence
  Description of Artificial Sequence: Synthetic oligonucleotide
ugacggugaccuacagaag

SEQ ID NO: 1395490 - RNA, 19 nt, Artificial Sequence
  Description of Artificial Sequence: Synthetic oligonucleotide
uggcuucaaacauuuucaa

SEQ ID NO: 1395491 - RNA, 19 nt, Artificial Sequence
  Description of Artificial Sequence: Synthetic oligonucleotide
aucuaccuaccgcacuaag

SEQ ID NO: 1395492 - RNA, 19 nt, Artificial Sequence
  Description of Artificial Sequence: Synthetic oligonucleotide
auggacagaugagauauaa

SEQ ID NO: 1395493 - RNA, 19 nt, Artificial Sequence
  Description of Artificial Sequence: Synthetic oligonucleotide
uguaugagcuuuugcuguu

SEQ ID NO: 1395494 - RNA, 19 nt, Artificial Sequence
  Description of Artificial Sequence: Synthetic oligonucleotide
ccugaauacugucacuagc

SEQ ID NO: 1395495 - RNA, 19 nt, Artificial Sequence
  Description of Artificial Sequence: Synthetic oligonucleotide
gcauuuuaugaucauucuc

SEQ ID NO: 1395496 - RNA, 19 nt, Artificial Sequence
  Description of Artificial Sequence: Synthetic oligonucleotide
uuagguggccauucaggau

SEQ ID NO: 1395497 - RNA, 19 nt, Artificial Sequence
  Description of Artificial Sequence: Synthetic oligonucleotide
uggaaggacgaaccacagu

SEQ ID NO: 1395498 - RNA, 19 nt, Artificial Sequence
  Description of Artificial Sequence: Synthetic oligonucleotide
guaaccucccaccauaaau

SEQ ID NO: 1395499 - RNA, 19 nt, Artificial Sequence
  Description of Artificial Sequence: Synthetic oligonucleotide
uauuuagcuuuuggugucu

SEQ ID NO: 1395500 - RNA, 19 nt, Artificial Sequence
  Description of Artificial Sequence: Synthetic oligonucleotide
ucucuauaugacggugacc

SEQ ID NO: 1395501 - RNA, 19 nt, Artificial Sequence
  Description of Artificial Sequence: Synthetic oligonucleotide
cauuuagguuacugcauga

SEQ ID NO: 1395502 - RNA, 19 nt, Artificial Sequence
  Description of Artificial Sequence: Synthetic oligonucleotide
auuuagguuacugcaugaa

SEQ ID NO: 1395503 - RNA, 19 nt, Artificial Sequence
  Description of Artificial Sequence: Synthetic oligonucleotide
gaagaucuagccagauuga

SEQ ID NO: 1395504 - RNA, 19 nt, Artificial Sequence
  Description of Artificial Sequence: Synthetic oligonucleotide
uucucuugaggauguuaaa

SEQ ID NO: 1395505 - RNA, 19 nt, Artificial Sequence
  Description of Artificial Sequence: Synthetic oligonucleotide
cauuucuguccuuuaagua

SEQ ID NO: 1395506 - RNA, 19 nt, Artificial Sequence
  Description of Artificial Sequence: Synthetic oligonucleotide
cuacuguacuauguaugag

SEQ ID NO: 1395507 - RNA, 19 nt, Artificial Sequence
  Description of Artificial Sequence: Synthetic oligonucleotide
guaaaugcccagacuguac

SEQ ID NO: 1395508 - RNA, 19 nt, Artificial Sequence
  Description of Artificial Sequence: Synthetic oligonucleotide
guguaugagcuuuugcugu

SEQ ID NO: 1395509 - RNA, 19 nt, Artificial Sequence
  Description of Artificial Sequence: Synthetic oligonucleotide
auacugucacuagcacggc

SEQ ID NO: 1395510 - RNA, 19 nt, Artificial Sequence
  Description of Artificial Sequence: Synthetic oligonucleotide
auguaugagagggcuauaa

SEQ ID NO: 1395511 - RNA, 19 nt, Artificial Sequence
  Description of Artificial Sequence: Synthetic oligonucleotide
uuccgucguugacugaggu

SEQ ID NO: 1395512 - RNA, 19 nt, Artificial Sequence
  Description of Artificial Sequence: Synthetic oligonucleotide
augaagaucuagccagauu

SEQ ID NO: 1395513 - RNA, 19 nt, Artificial Sequence
  Description of Artificial Sequence: Synthetic oligonucleotide
agggaauuacacaaaucau

SEQ ID NO: 1395514 - RNA, 19 nt, Artificial Sequence
  Description of Artificial Sequence: Synthetic oligonucleotide
aaacccuaucaacccuaaa

SEQ ID NO: 1395515 - RNA, 19 nt, Artificial Sequence
  Description of Artificial Sequence: Synthetic oligonucleotide
gggaauuacacaaaucaua

SEQ ID NO: 1395516 - RNA, 19 nt, Artificial Sequence
  Description of Artificial Sequence: Synthetic oligonucleotide
cccaugucuggacugacag

SEQ ID NO: 1395517 - RNA, 19 nt, Artificial Sequence
  Description of Artificial Sequence: Synthetic oligonucleotide
uauggacagaugagauaua

SEQ ID NO: 1395518 - RNA, 19 nt, Artificial Sequence
  Description of Artificial Sequence: Synthetic oligonucleotide
uuuccccaucgauccacug

SEQ ID NO: 1395519 - RNA, 19 nt, Artificial Sequence
  Description of Artificial Sequence: Synthetic oligonucleotide
ggacgaaccacagugggca

SEQ ID NO: 1395520 - RNA, 19 nt, Artificial Sequence
  Description of Artificial Sequence: Synthetic oligonucleotide
auaaacccuaucaacccua

SEQ ID NO: 1395521 - RNA, 19 nt, Artificial Sequence
  Description of Artificial Sequence: Synthetic oligonucleotide
cauaaaaccuuguuccuuu

SEQ ID NO: 1395522 - RNA, 19 nt, Artificial Sequence
  Description of Artificial Sequence: Synthetic oligonucleotide
cuaccccugucuauguuga

SEQ ID NO: 1395523 - RNA, 19 nt, Artificial Sequence
  Description of Artificial Sequence: Synthetic oligonucleotide
ucaaauccagugggucacc

SEQ ID NO: 1395524 - RNA, 19 nt, Artificial Sequence
  Description of Artificial Sequence: Synthetic oligonucleotide
cuggacugacagacauucc

SEQ ID NO: 1395525 - RNA, 19 nt, Artificial Sequence
  Description of Artificial Sequence: Synthetic oligonucleotide
gaauaacccuaccccuguc

SEQ ID NO: 1395526 - RNA, 19 nt, Artificial Sequence
  Description of Artificial Sequence: Synthetic oligonucleotide
agugggcauaauccgguua

SEQ ID NO: 1395527 - RNA, 19 nt, Artificial Sequence
  Description of Artificial Sequence: Synthetic oligonucleotide
guacuauguaugagagggc

SEQ ID NO: 1395528 - RNA, 19 nt, Artificial Sequence
  Description of Artificial Sequence: Synthetic oligonucleotide
ugcuguguaugagcuuuug

SEQ ID NO: 1395529 - RNA, 19 nt, Artificial Sequence
  Description of Artificial Sequence: Synthetic oligonucleotide
caauuacuuucccagacau

SEQ ID NO: 1395530 - RNA, 19 nt, Artificial Sequence
  Description of Artificial Sequence: Synthetic oligonucleotide
gcuguguaugagcuuuugc

SEQ ID NO: 1395531 - RNA, 19 nt, Artificial Sequence
  Description of Artificial Sequence: Synthetic oligonucleotide
aguaaccucccaccauaaa

SEQ ID NO: 1395532 - RNA, 19 nt, Artificial Sequence
  Description of Artificial Sequence: Synthetic oligonucleotide
uucuacagcuuagggccca

SEQ ID NO: 1395533 - RNA, 19 nt, Artificial Sequence
  Description of Artificial Sequence: Synthetic oligonucleotide
ucuauaugacggugaccua

SEQ ID NO: 1395534 - RNA, 19 nt, Artificial Sequence
  Description of Artificial Sequence: Synthetic oligonucleotide
gauguucucuaaagccuga

SEQ ID NO: 1395535 - RNA, 19 nt, Artificial Sequence
  Description of Artificial Sequence: Synthetic oligonucleotide
uaacccuaccccugucuau

SEQ ID NO: 1395536 - RNA, 19 nt, Artificial Sequence
  Description of Artificial Sequence: Synthetic oligonucleotide
ugccguucugacacacagu

SEQ ID NO: 1395537 - RNA, 19 nt, Artificial Sequence
  Description of Artificial Sequence: Synthetic oligonucleotide
gcuuccgucguugacugag

SEQ ID NO: 1395538 - RNA, 19 nt, Artificial Sequence
  Description of Artificial Sequence: Synthetic oligonucleotide
uaccaacaucucacuacaa

SEQ ID NO: 1395539 - RNA, 19 nt, Artificial Sequence
  Description of Artificial Sequence: Synthetic oligonucleotide
ccaucgauccacugacucc

SEQ ID NO: 1395540 - RNA, 19 nt, Artificial Sequence
  Description of Artificial Sequence: Synthetic oligonucleotide
gaugagauauaaacccuau

SEQ ID NO: 1395541 - RNA, 19 nt, Artificial Sequence
  Description of Artificial Sequence: Synthetic oligonucleotide
cuagccagauugauaguua

SEQ ID NO: 1395542 - RNA, 19 nt, Artificial Sequence
  Description of Artificial Sequence: Synthetic oligonucleotide
gcuguuuggaaggacgaac

SEQ ID NO: 1395543 - RNA, 19 nt, Artificial Sequence
  Description of Artificial Sequence: Synthetic oligonucleotide
cuggaauaacccuaccccu

SEQ ID NO: 1395544 - RNA, 19 nt, Artificial Sequence
  Description of Artificial Sequence: Synthetic oligonucleotide
cucaccuacauaaaaccuu

SEQ ID NO: 1395545 - RNA, 19 nt, Artificial Sequence
  Description of Artificial Sequence: Synthetic oligonucleotide
ggcaaaagaaaucggguau

SEQ ID NO: 1395546 - RNA, 19 nt, Artificial Sequence
  Description of Artificial Sequence: Synthetic oligonucleotide
ugguuuccugaagcuguag

SEQ ID NO: 1395547 - RNA, 19 nt, Artificial Sequence
  Description of Artificial Sequence: Synthetic oligonucleotide
ggugaccuacagaagaguc

SEQ ID NO: 1395548 - RNA, 19 nt, Artificial Sequence
  Description of Artificial Sequence: Synthetic oligonucleotide
agaagccuaagcacauccu

SEQ ID NO: 1395549 - RNA, 19 nt, Artificial Sequence
  Description of Artificial Sequence: Synthetic oligonucleotide
agaucuagccagauugaua

SEQ ID NO: 1395550 - RNA, 19 nt, Artificial Sequence
  Description of Artificial Sequence: Synthetic oligonucleotide
caaaucucuauaugacggu

SEQ ID NO: 1395551 - RNA, 19 nt, Artificial Sequence
  Description of Artificial Sequence: Synthetic oligonucleotide
agguggccauucaggaucg

SEQ ID NO: 1395552 - RNA, 19 nt, Artificial Sequence
  Description of Artificial Sequence: Synthetic oligonucleotide
ugucacuagcacggcagaa

SEQ ID NO: 1395553 - RNA, 19 nt, Artificial Sequence
  Description of Artificial Sequence: Synthetic oligonucleotide
ccuuuacuacaguuuuggc

SEQ ID NO: 1395554 - RNA, 19 nt, Artificial Sequence
  Description of Artificial Sequence: Synthetic oligonucleotide
guagccaugcaagcaacaa

SEQ ID NO: 1395555 - RNA, 19 nt, Artificial Sequence
  Description of Artificial Sequence: Synthetic oligonucleotide
ccagauugauaguuaauaa

SEQ ID NO: 1395556 - RNA, 19 nt, Artificial Sequence
  Description of Artificial Sequence: Synthetic oligonucleotide
cagcuguuuggaaggacga

SEQ ID NO: 1395557 - RNA, 19 nt, Artificial Sequence
  Description of Artificial Sequence: Synthetic oligonucleotide
gccagauugauaguuaaua

SEQ ID NO: 1395558 - RNA, 19 nt, Artificial Sequence
  Description of Artificial Sequence: Synthetic oligonucleotide
ugagguuuagguggccauu

SEQ ID NO: 1395559 - RNA, 19 nt, Artificial Sequence
  Description of Artificial Sequence: Synthetic oligonucleotide
augcuauggugcugaucug

SEQ ID NO: 1395560 - RNA, 19 nt, Artificial Sequence
  Description of Artificial Sequence: Synthetic oligonucleotide
cuauguaugagagggcuau

SEQ ID NO: 1395561 - RNA, 19 nt, Artificial Sequence
  Description of Artificial Sequence: Synthetic oligonucleotide
auagugccguucugacaca

SEQ ID NO: 1395562 - RNA, 19 nt, Artificial Sequence
  Description of Artificial Sequence: Synthetic oligonucleotide
agacuguacaaaaguuaau

SEQ ID NO: 1395563 - RNA, 19 nt, Artificial Sequence
  Description of Artificial Sequence: Synthetic oligonucleotide
gucguugacugagguuuag

SEQ ID NO: 1395564 - RNA, 19 nt, Artificial Sequence
  Description of Artificial Sequence: Synthetic oligonucleotide
cuaugcuauggugcugauc

SEQ ID NO: 1395565 - RNA, 19 nt, Artificial Sequence
  Description of Artificial Sequence: Synthetic oligonucleotide
uauguaugagagggcuaua

SEQ ID NO: 1395566 - RNA, 19 nt, Artificial Sequence
  Description of Artificial Sequence: Synthetic oligonucleotide
caucgauccacugacuccu

SEQ ID NO: 1395567 - RNA, 19 nt, Artificial Sequence
  Description of Artificial Sequence: Synthetic oligonucleotide
ccagacuguacaaaaguua

SEQ ID NO: 1395568 - RNA, 19 nt, Artificial Sequence
  Description of Artificial Sequence: Synthetic oligonucleotide
aguucccaguaaccuccca

SEQ ID NO: 1395569 - RNA, 19 nt, Artificial Sequence
  Description of Artificial Sequence: Synthetic oligonucleotide
acaucucacuacaaacauu

SEQ ID NO: 1395570 - RNA, 19 nt, Artificial Sequence
  Description of Artificial Sequence: Synthetic oligonucleotide
cagaacccaaaucucuaua

SEQ ID NO: 1395571 - RNA, 19 nt, Artificial Sequence
  Description of Artificial Sequence: Synthetic oligonucleotide
acuauguaugagagggcua

SEQ ID NO: 1395572 - RNA, 19 nt, Artificial Sequence
  Description of Artificial Sequence: Synthetic oligonucleotide
cccaucgauccacugacuc

SEQ ID NO: 1395573 - RNA, 19 nt, Artificial Sequence
  Description of Artificial Sequence: Synthetic oligonucleotide
cacuaagcaggacccaugu

SEQ ID NO: 1395574 - RNA, 19 nt, Artificial Sequence
  Description of Artificial Sequence: Synthetic oligonucleotide
aggucuguauauacucaaa

SEQ ID NO: 1395575 - RNA, 19 nt, Artificial Sequence
  Description of Artificial Sequence: Synthetic oligonucleotide
uugcuguguaugagcuuuu

SEQ ID NO: 1395576 - RNA, 19 nt, Artificial Sequence
  Description of Artificial Sequence: Synthetic oligonucleotide
auguucucuaaagccugaa

SEQ ID NO: 1395577 - RNA, 19 nt, Artificial Sequence
  Description of Artificial Sequence: Synthetic oligonucleotide
acccuaccccugucuaugu

SEQ ID NO: 1395578 - RNA, 19 nt, Artificial Sequence
  Description of Artificial Sequence: Synthetic oligonucleotide
ggaauaacccuaccccugu

SEQ ID NO: 1395579 - RNA, 19 nt, Artificial Sequence
  Description of Artificial Sequence: Synthetic oligonucleotide
agcuguuuggaaggacgaa

SEQ ID NO: 1395580 - RNA, 19 nt, Artificial Sequence
  Description of Artificial Sequence: Synthetic oligonucleotide
gggcauaauccgguuauga

SEQ ID NO: 1395581 - RNA, 19 nt, Artificial Sequence
  Description of Artificial Sequence: Synthetic oligonucleotide
cugucacuagcacggcaga

SEQ ID NO: 1395582 - RNA, 19 nt, Artificial Sequence
  Description of Artificial Sequence: Synthetic oligonucleotide
auccagugggucaccagaa

SEQ ID NO: 1395583 - RNA, 19 nt, Artificial Sequence
  Description of Artificial Sequence: Synthetic oligonucleotide
guggccauucaggaucguc

SEQ ID NO: 1395584 - RNA, 19 nt, Artificial Sequence
  Description of Artificial Sequence: Synthetic oligonucleotide
agccagauugauaguuaau

SEQ ID NO: 1395585 - RNA, 19 nt, Artificial Sequence
  Description of Artificial Sequence: Synthetic oligonucleotide
auaucacauuuagguuacu

SEQ ID NO: 1395586 - RNA, 19 nt, Artificial Sequence
  Description of Artificial Sequence: Synthetic oligonucleotide
aucgauccacugacuccuc

SEQ ID NO: 1395587 - RNA, 19 nt, Artificial Sequence
  Description of Artificial Sequence: Synthetic oligonucleotide
guccaucuaccuaccgcac

SEQ ID NO: 1395588 - RNA, 19 nt, Artificial Sequence
  Description of Artificial Sequence: Synthetic oligonucleotide
auccgguuaugaagugcug

SEQ ID NO: 1395589 - RNA, 19 nt, Artificial Sequence
  Description of Artificial Sequence: Synthetic oligonucleotide
caggaucgucuuugagcuc

SEQ ID NO: 1395590 - RNA, 19 nt, Artificial Sequence
  Description of Artificial Sequence: Synthetic oligonucleotide
augucuggacugacagaca

SEQ ID NO: 1395591 - RNA, 19 nt, Artificial Sequence
  Description of Artificial Sequence: Synthetic oligonucleotide
gcacuaagcaggacccaug

SEQ ID NO: 1395592 - RNA, 19 nt, Artificial Sequence
  Description of Artificial Sequence: Synthetic oligonucleotide
agugccguucugacacaca

SEQ ID NO: 1395593 - RNA, 19 nt, Artificial Sequence
  Description of Artificial Sequence: Synthetic oligonucleotide
gccuaagcacauccuccug

SEQ ID NO: 1395594 - RNA, 19 nt, Artificial Sequence
  Description of Artificial Sequence: Synthetic oligonucleotide
cagcauuuuccccaucgau

SEQ ID NO: 1395595 - RNA, 19 nt, Artificial Sequence
  Description of Artificial Sequence: Synthetic oligonucleotide
ccuaucaacccuaaauauu

SEQ ID NO: 1395596 - RNA, 19 nt, Artificial Sequence
  Description of Artificial Sequence: Synthetic oligonucleotide
cuagcacggcagaagcagu

SEQ ID NO: 1395597 - RNA, 19 nt, Artificial Sequence
  Description of Artificial Sequence: Synthetic oligonucleotide
ccaguaaccucccaccaua

SEQ ID NO: 1395598 - RNA, 19 nt, Artificial Sequence
  Description of Artificial Sequence: Synthetic oligonucleotide
guaugagcuuuugcuguua

SEQ ID NO: 1395599 - RNA, 19 nt, Artificial Sequence
  Description of Artificial Sequence: Synthetic oligonucleotide
cugagguuuagguggccau

SEQ ID NO: 1395600 - RNA, 19 nt, Artificial Sequence
  Description of Artificial Sequence: Synthetic oligonucleotide
cagaagcagucucugcuau

SEQ ID NO: 1395601 - RNA, 19 nt, Artificial Sequence
  Description of Artificial Sequence: Synthetic oligonucleotide
ccaucuaccuaccgcacua

SEQ ID NO: 1395602 - RNA, 19 nt, Artificial Sequence
  Description of Artificial Sequence: Synthetic oligonucleotide
gcaugaagaucuagccaga

SEQ ID NO: 1395603 - RNA, 19 nt, Artificial Sequence
  Description of Artificial Sequence: Synthetic oligonucleotide
cccuaucaacccuaaauau

SEQ ID NO: 1395604 - RNA, 19 nt, Artificial Sequence
  Description of Artificial Sequence: Synthetic oligonucleotide
caccuacauaaaaccuugu

SEQ ID NO: 1395605 - RNA, 19 nt, Artificial Sequence
  Description of Artificial Sequence: Synthetic oligonucleotide
caucuaccuaccgcacuaa

SEQ ID NO: 1395606 - RNA, 19 nt, Artificial Sequence
  Description of Artificial Sequence: Synthetic oligonucleotide
gcaaaagaaaucggguauu

SEQ ID NO: 1395607 - RNA, 19 nt, Artificial Sequence
  Description of Artificial Sequence: Synthetic oligonucleotide
cguugacugagguuuaggu

SEQ ID NO: 1395608 - RNA, 19 nt, Artificial Sequence
  Description of Artificial Sequence: Synthetic oligonucleotide
gacgaaccacagugggcau

SEQ ID NO: 1395609 - RNA, 19 nt, Artificial Sequence
  Description of Artificial Sequence: Synthetic oligonucleotide
gcgccaaguacauguauuu

SEQ ID NO: 1395610 - RNA, 19 nt, Artificial Sequence
  Description of Artificial Sequence: Synthetic oligonucleotide
gcuuagggcccaggacaag

SEQ ID NO: 1395611 - RNA, 19 nt, Artificial Sequence
  Description of Artificial Sequence: Synthetic oligonucleotide
cuccugcgccaaguacaug

SEQ ID NO: 1395612 - RNA, 19 nt, Artificial Sequence
  Description of Artificial Sequence: Synthetic oligonucleotide
ccgucguugacugagguuu

SEQ ID NO: 1395613 - RNA, 19 nt, Artificial Sequence
  Description of Artificial Sequence: Synthetic oligonucleotide
cugcgccaaguacauguau

SEQ ID NO: 1395614 - RNA, 19 nt, Artificial Sequence
  Description of Artificial Sequence: Synthetic oligonucleotide
cgaaccacagugggcauaa

SEQ ID NO: 1395615 - RNA, 19 nt, Artificial Sequence
  Description of Artificial Sequence: Synthetic oligonucleotide
ccgguuaugaagugcuguu

SEQ ID NO: 1395616 - RNA, 19 nt, Artificial Sequence
  Description of Artificial Sequence: Synthetic oligonucleotide
ccguucugacacacagugu

SEQ ID NO: 1395617 - RNA, 19 nt, Artificial Sequence
  Description of Artificial Sequence: Synthetic oligonucleotide
ggaucgucuuugagcuccu

SEQ ID NO: 1395618 - RNA, 19 nt, Artificial Sequence
  Description of Artificial Sequence: Synthetic oligonucleotide
cgauccacugacuccucau

SEQ ID NO: 1395619 - RNA, 19 nt, Artificial Sequence
  Description of Artificial Sequence: Synthetic oligonucleotide
cgucguugacugagguuua

SEQ ID NO: 1395620 - RNA, 19 nt, Artificial Sequence
  Description of Artificial Sequence: Synthetic oligonucleotide
ccgcacuaagcaggaccca

SEQ ID NO: 1395621 - RNA, 19 nt, Artificial Sequence
  Description of Artificial Sequence: Synthetic oligonucleotide
ccccaucgauccacugacu

SEQ ID NO: 1395622 - RNA, 19 nt, Artificial Sequence
  Description of Artificial Sequence: Synthetic oligonucleotide
cccuaccccugucuauguu

SEQ ID NO: 1395623 - RNA, 19 nt, Artificial Sequence
  Description of Artificial Sequence: Synthetic oligonucleotide
cccagacauuucuguccuu

SEQ ID NO: 1395624 - RNA, 19 nt, Artificial Sequence
  Description of Artificial Sequence: Synthetic oligonucleotide
aauaauauaacaccccucc

SEQ ID NO: 1395625 - RNA, 19 nt, Artificial Sequence
  Description of Artificial Sequence: Synthetic oligonucleotide
aaaugaauuaaucuuagac

SEQ ID NO: 1395626 - RNA, 19 nt, Artificial Sequence
  Description of Artificial Sequence: Synthetic oligonucleotide
auacgaacaagacauaucc

SEQ ID NO: 1395627 - RNA, 19 nt, Artificial Sequence
  Description of Artificial Sequence: Synthetic oligonucleotide
aaugaauuaaucuuagacu

SEQ ID NO: 1395628 - RNA, 19 nt, Artificial Sequence
  Description of Artificial Sequence: Synthetic oligonucleotide
uucaauacgaacaagacau

SEQ ID NO: 1395629 - RNA, 19 nt, Artificial Sequence
  Description of Artificial Sequence: Synthetic oligonucleotide
auuauuaccauguugcauc

SEQ ID NO: 1395630 - RNA, 19 nt, Artificial Sequence
  Description of Artificial Sequence: Synthetic oligonucleotide
ucugguauuagacaaauga

SEQ ID NO: 1395631 - RNA, 19 nt, Artificial Sequence
  Description of Artificial Sequence: Synthetic oligonucleotide
uggaauauuaugaaucagg

SEQ ID NO: 1395632 - RNA, 19 nt, Artificial Sequence
  Description of Artificial Sequence: Synthetic oligonucleotide
uuauugaucagguuaaggc

SEQ ID NO: 1395633 - RNA, 19 nt, Artificial Sequence
  Description of Artificial Sequence: Synthetic oligonucleotide
ugaagauacacaagggucg

SEQ ID NO: 1395634 - RNA, 19 nt, Artificial Sequence
  Description of Artificial Sequence: Synthetic oligonucleotide
augaauuaaucuuagacug

SEQ ID NO: 1395635 - RNA, 19 nt, Artificial Sequence
  Description of Artificial Sequence: Synthetic oligonucleotide
aaaguuguacaugacaaac

SEQ ID NO: 1395636 - RNA, 19 nt, Artificial Sequence
  Description of Artificial Sequence: Synthetic oligonucleotide
uagcuauuaaguuaggagg

SEQ ID NO: 1395637 - RNA, 19 nt, Artificial Sequence
  Description of Artificial Sequence: Synthetic oligonucleotide
ugauuagcuauuaaguuag

SEQ ID NO: 1395638 - RNA, 19 nt, Artificial Sequence
  Description of Artificial Sequence: Synthetic oligonucleotide
uuagcuauuaaguuaggag

SEQ ID NO: 1395639 - RNA, 19 nt, Artificial Sequence
  Description of Artificial Sequence: Synthetic oligonucleotide
aaacuagugaaguucacug

SEQ ID NO: 1395640 - RNA, 19 nt, Artificial Sequence
  Description of Artificial Sequence: Synthetic oligonucleotide
agacuuaguguuuacaaac

SEQ ID NO: 1395641 - RNA, 19 nt, Artificial Sequence
  Description of Artificial Sequence: Synthetic oligonucleotide
aaacaaacuagugaaguuc

SEQ ID NO: 1395642 - RNA, 19 nt, Artificial Sequence
  Description of Artificial Sequence: Synthetic oligonucleotide
aaucagggguuauaaaauc

SEQ ID NO: 1395643 - RNA, 19 nt, Artificial Sequence
  Description of Artificial Sequence: Synthetic oligonucleotide
cuguauuguacauaggugc

SEQ ID NO: 1395644 - RNA, 19 nt, Artificial Sequence
  Description of Artificial Sequence: Synthetic oligonucleotide
uuaacuguggaauuauuac

SEQ ID NO: 1395645 - RNA, 19 nt, Artificial Sequence
  Description of Artificial Sequence: Synthetic oligonucleotide
auuguaguccaaaaggacc

SEQ ID NO: 1395646 - RNA, 19 nt, Artificial Sequence
  Description of Artificial Sequence: Synthetic oligonucleotide
uucaaugugucuaaaauuu

SEQ ID NO: 1395647 - RNA, 19 nt, Artificial Sequence
  Description of Artificial Sequence: Synthetic oligonucleotide
aacccaauaaacaaacuag

SEQ ID NO: 1395648 - RNA, 19 nt, Artificial Sequence
  Description of Artificial Sequence: Synthetic oligonucleotide
aguaaauaaucucuguuca

SEQ ID NO: 1395649 - RNA, 19 nt, Artificial Sequence
  Description of Artificial Sequence: Synthetic oligonucleotide
caugauaauaaccaagcac

SEQ ID NO: 1395650 - RNA, 19 nt, Artificial Sequence
  Description of Artificial Sequence: Synthetic oligonucleotide
cuugaaugcgccgagaacg

SEQ ID NO: 1395651 - RNA, 19 nt, Artificial Sequence
  Description of Artificial Sequence: Synthetic oligonucleotide
cuuuagacacaguaggagg

SEQ ID NO: 1395652 - RNA, 19 nt, Artificial Sequence
  Description of Artificial Sequence: Synthetic oligonucleotide
auuaccauguugcaucuuc

SEQ ID NO: 1395653 - RNA, 19 nt, Artificial Sequence
  Description of Artificial Sequence: Synthetic oligonucleotide
ugguauuagacaaaugagu

SEQ ID NO: 1395654 - RNA, 19 nt, Artificial Sequence
  Description of Artificial Sequence: Synthetic oligonucleotide
uauuagacaaaugaguccu

SEQ ID NO: 1395655 - RNA, 19 nt, Artificial Sequence
  Description of Artificial Sequence: Synthetic oligonucleotide
gaggcucuuauacugacgg

SEQ ID NO: 1395656 - RNA, 19 nt, Artificial Sequence
  Description of Artificial Sequence: Synthetic oligonucleotide
auaauaaccaagcacucgu

SEQ ID NO: 1395657 - RNA, 19 nt, Artificial Sequence
  Description of Artificial Sequence: Synthetic oligonucleotide
aaaugaguccuggauacac

SEQ ID NO: 1395658 - RNA, 19 nt, Artificial Sequence
  Description of Artificial Sequence: Synthetic oligonucleotide
aauaggcugagccccugcc

SEQ ID NO: 1395659 - RNA, 19 nt, Artificial Sequence
  Description of Artificial Sequence: Synthetic oligonucleotide
augauaauaaccaagcacu

SEQ ID NO: 1395660 - RNA, 19 nt, Artificial Sequence
  Description of Artificial Sequence: Synthetic oligonucleotide
gauguuuuacuucuugaug

SEQ ID NO: 1395661 - RNA, 19 nt, Artificial Sequence
  Description of Artificial Sequence: Synthetic oligonucleotide
ugugucuaaaauuucuucu

SEQ ID NO: 1395662 - RNA, 19 nt, Artificial Sequence
  Description of Artificial Sequence: Synthetic oligonucleotide
uguacauaggugcagggac

SEQ ID NO: 1395663 - RNA, 19 nt, Artificial Sequence
  Description of Artificial Sequence: Synthetic oligonucleotide
uggaguagaagauacauua

SEQ ID NO: 1395664 - RNA, 19 nt, Artificial Sequence
  Description of Artificial Sequence: Synthetic oligonucleotide
uaucuaauuaggcaaccug

SEQ ID NO: 1395665 - RNA, 19 nt, Artificial Sequence
  Description of Artificial Sequence: Synthetic oligonucleotide
auugagauaauauuuucaa

SEQ ID NO: 1395666 - RNA, 19 nt, Artificial Sequence
  Description of Artificial Sequence: Synthetic oligonucleotide
agacugauuagcuauuaag

SEQ ID NO: 1395667 - RNA, 19 nt, Artificial Sequence
  Description of Artificial Sequence: Synthetic oligonucleotide
aucuaauuaggcaaccugc

SEQ ID NO: 1395668 - RNA, 19 nt, Artificial Sequence
  Description of Artificial Sequence: Synthetic oligonucleotide
agauugagauaauauuuuc

SEQ ID NO: 1395669 - RNA, 19 nt, Artificial Sequence
  Description of Artificial Sequence: Synthetic oligonucleotide
uuucaauaggacuugugac

SEQ ID NO: 1395670 - RNA, 19 nt, Artificial Sequence
  Description of Artificial Sequence: Synthetic oligonucleotide
uacaggugcagacuuagcc

SEQ ID NO: 1395671 - RNA, 19 nt, Artificial Sequence
  Description of Artificial Sequence: Synthetic oligonucleotide
agcagcacuauuucucucc

SEQ ID NO: 1395672 - RNA, 19 nt, Artificial Sequence
  Description of Artificial Sequence: Synthetic oligonucleotide
uuaugaaucaggucauuca

SEQ ID NO: 1395673 - RNA, 19 nt, Artificial Sequence
  Description of Artificial Sequence: Synthetic oligonucleotide
agcacuauuucucucccac

SEQ ID NO: 1395674 - RNA, 19 nt, Artificial Sequence
  Description of Artificial Sequence: Synthetic oligonucleotide
gauaauaaccaagcacucg

SEQ ID NO: 1395675 - RNA, 19 nt, Artificial Sequence
  Description of Artificial Sequence: Synthetic oligonucleotide
uucaauaggacuugugacu

SEQ ID NO: 1395676 - RNA, 19 nt, Artificial Sequence
  Description of Artificial Sequence: Synthetic oligonucleotide
uaauuaggcaaccugcuuc

SEQ ID NO: 1395677 - RNA, 19 nt, Artificial Sequence
  Description of Artificial Sequence: Synthetic oligonucleotide
uuuaacuguggaauuauua

SEQ ID NO: 1395678 - RNA, 19 nt, Artificial Sequence
  Description of Artificial Sequence: Synthetic oligonucleotide
aauuaggcaaccugcuuca

SEQ ID NO: 1395679 - RNA, 19 nt, Artificial Sequence
  Description of Artificial Sequence: Synthetic oligonucleotide
uagaauaucuaugauuaug

SEQ ID NO: 1395680 - RNA, 19 nt, Artificial Sequence
  Description of Artificial Sequence: Synthetic oligonucleotide
aauacgaacaagacauauc

SEQ ID NO: 1395681 - RNA, 19 nt, Artificial Sequence
  Description of Artificial Sequence: Synthetic oligonucleotide
agcuauuaaguuaggaggc

SEQ ID NO: 1395682 - RNA, 19 nt, Artificial Sequence
  Description of Artificial Sequence: Synthetic oligonucleotide
ugaugucauagucugaccu

SEQ ID NO: 1395683 - RNA, 19 nt, Artificial Sequence
  Description of Artificial Sequence: Synthetic oligonucleotide
aauagguggucgcacaagu

SEQ ID NO: 1395684 - RNA, 19 nt, Artificial Sequence
  Description of Artificial Sequence: Synthetic oligonucleotide
aauaaacaaacuagugaag

SEQ ID NO: 1395685 - RNA, 19 nt, Artificial Sequence
  Description of Artificial Sequence: Synthetic oligonucleotide
uguauuguacauaggugca

SEQ ID NO: 1395686 - RNA, 19 nt, Artificial Sequence
  Description of Artificial Sequence: Synthetic oligonucleotide
uaugaaucaggucauucaa

SEQ ID NO: 1395687 - RNA, 19 nt, Artificial Sequence
  Description of Artificial Sequence: Synthetic oligonucleotide
uggugugagaaacuuuuag

SEQ ID NO: 1395688 - RNA, 19 nt, Artificial Sequence
  Description of Artificial Sequence: Synthetic oligonucleotide
ucuaauuaggcaaccugcu

SEQ ID NO: 1395689 - RNA, 19 nt, Artificial Sequence
  Description of Artificial Sequence: Synthetic oligonucleotide
ucaccuuugauauuuggaa

SEQ ID NO: 1395690 - RNA, 19 nt, Artificial Sequence
  Description of Artificial Sequence: Synthetic oligonucleotide
augugucuaaaauuucuuc

SEQ ID NO: 1395691 - RNA, 19 nt, Artificial Sequence
  Description of Artificial Sequence: Synthetic oligonucleotide
cugguauuagacaaaugag

SEQ ID NO: 1395692 - RNA, 19 nt, Artificial Sequence
  Description of Artificial Sequence: Synthetic oligonucleotide
accuacauaaaguuguaca

SEQ ID NO: 1395693 - RNA, 19 nt, Artificial Sequence
  Description of Artificial Sequence: Synthetic oligonucleotide
auacugacggcguuuacag

SEQ ID NO: 1395694 - RNA, 19 nt, Artificial Sequence
  Description of Artificial Sequence: Synthetic oligonucleotide
aggaauaauauaacacccc

SEQ ID NO: 1395695 - RNA, 19 nt, Artificial Sequence
  Description of Artificial Sequence: Synthetic oligonucleotide
acggcaaacaaaagcaucc

SEQ ID NO: 1395696 - RNA, 19 nt, Artificial Sequence
  Description of Artificial Sequence: Synthetic oligonucleotide
uuguggaggcuucuaauag

SEQ ID NO: 1395697 - RNA, 19 nt, Artificial Sequence
  Description of Artificial Sequence: Synthetic oligonucleotide
uauuguacauaggugcagg

SEQ ID NO: 1395698 - RNA, 19 nt, Artificial Sequence
  Description of Artificial Sequence: Synthetic oligonucleotide
uugugacugguucaauacg

SEQ ID NO: 1395699 - RNA, 19 nt, Artificial Sequence
  Description of Artificial Sequence: Synthetic oligonucleotide
guauuagacaaaugagucc

SEQ ID NO: 1395700 - RNA, 19 nt, Artificial Sequence
  Description of Artificial Sequence: Synthetic oligonucleotide
aguaggaggaaguuucuug

SEQ ID NO: 1395701 - RNA, 19 nt, Artificial Sequence
  Description of Artificial Sequence: Synthetic oligonucleotide
uguauuaggacggcaaaca

SEQ ID NO: 1395702 - RNA, 19 nt, Artificial Sequence
  Description of Artificial Sequence: Synthetic oligonucleotide
aacuguggaauuauuacca

SEQ ID NO: 1395703 - RNA, 19 nt, Artificial Sequence
  Description of Artificial Sequence: Synthetic oligonucleotide
uuugcaagcauggaguaga

SEQ ID NO: 1395704 - RNA, 19 nt, Artificial Sequence
  Description of Artificial Sequence: Synthetic oligonucleotide
uguggaggcuucuaauagg

SEQ ID NO: 1395705 - RNA, 19 nt, Artificial Sequence
  Description of Artificial Sequence: Synthetic oligonucleotide
ugaauuaaucuuagacuga

SEQ ID NO: 1395706 - RNA, 19 nt, Artificial Sequence
  Description of Artificial Sequence: Synthetic oligonucleotide
uuagacaaaugaguccugg

SEQ ID NO: 1395707 - RNA, 19 nt, Artificial Sequence
  Description of Artificial Sequence: Synthetic oligonucleotide
uuggacguagugcucacag

SEQ ID NO: 1395708 - RNA, 19 nt, Artificial Sequence
  Description of Artificial Sequence: Synthetic oligonucleotide
aaaaggacccaacuggguu

SEQ ID NO: 1395709 - RNA, 19 nt, Artificial Sequence
  Description of Artificial Sequence: Synthetic oligonucleotide
uuuaagguggcaugccuug

SEQ ID NO: 1395710 - RNA, 19 nt, Artificial Sequence
  Description of Artificial Sequence: Synthetic oligonucleotide
agaauaucuaugauuaugu

SEQ ID NO: 1395711 - RNA, 19 nt, Artificial Sequence
  Description of Artificial Sequence: Synthetic oligonucleotide
agacauauccaauacuuaa

SEQ ID NO: 1395712 - RNA, 19 nt, Artificial Sequence
  Description of Artificial Sequence: Synthetic oligonucleotide
ucuaugauuaugugucgca

SEQ ID NO: 1395713 - RNA, 19 nt, Artificial Sequence
  Description of Artificial Sequence: Synthetic oligonucleotide
uagauugagauaauauuuu

SEQ ID NO: 1395714 - RNA, 19 nt, Artificial Sequence
  Description of Artificial Sequence: Synthetic oligonucleotide
ucaauaggacuugugacug

SEQ ID NO: 1395715 - RNA, 19 nt, Artificial Sequence
  Description of Artificial Sequence: Synthetic oligonucleotide
agccuuuguggcuuuagac

SEQ ID NO: 1395716 - RNA, 19 nt, Artificial Sequence
  Description of Artificial Sequence: Synthetic oligonucleotide
agucuuuucuugaaugcgc

SEQ ID NO: 1395717 - RNA, 19 nt, Artificial Sequence
  Description of Artificial Sequence: Synthetic oligonucleotide
uuuacaggugcagacuuag

SEQ ID NO: 1395718 - RNA, 19 nt, Artificial Sequence
  Description of Artificial Sequence: Synthetic oligonucleotide
cuugugacugguucaauac

SEQ ID NO: 1395719 - RNA, 19 nt, Artificial Sequence
  Description of Artificial Sequence: Synthetic oligonucleotide
uuugucucagacugauuag

SEQ ID NO: 1395720 - RNA, 19 nt, Artificial Sequence
  Description of Artificial Sequence: Synthetic oligonucleotide
acugacggcguuuacaggu

SEQ ID NO: 1395721 - RNA, 19 nt, Artificial Sequence
  Description of Artificial Sequence: Synthetic oligonucleotide
ucucagacugauuagcuau

SEQ ID NO: 1395722 - RNA, 19 nt, Artificial Sequence
  Description of Artificial Sequence: Synthetic oligonucleotide
aacuagugaaguucacugu

SEQ ID NO: 1395723 - RNA, 19 nt, Artificial Sequence
  Description of Artificial Sequence: Synthetic oligonucleotide
uguguaucugcgucggucc

SEQ ID NO: 1395724 - RNA, 19 nt, Artificial Sequence
  Description of Artificial Sequence: Synthetic oligonucleotide
acgaacaagacauauccaa

SEQ ID NO: 1395725 - RNA, 19 nt, Artificial Sequence
  Description of Artificial Sequence: Synthetic oligonucleotide
aauuaaucuuagacugaac

SEQ ID NO: 1395726 - RNA, 19 nt, Artificial Sequence
  Description of Artificial Sequence: Synthetic oligonucleotide
uauuaggacggcaaacaaa

SEQ ID NO: 1395727 - RNA, 19 nt, Artificial Sequence
  Description of Artificial Sequence: Synthetic oligonucleotide
aauaaccaagcacucguuu

SEQ ID NO: 1395728 - RNA, 19 nt, Artificial Sequence
  Description of Artificial Sequence: Synthetic oligonucleotide
cauaggugcagggacaacg

SEQ ID NO: 1395729 - RNA, 19 nt, Artificial Sequence
  Description of Artificial Sequence: Synthetic oligonucleotide
auagauugagauaauauuu

SEQ ID NO: 1395730 - RNA, 19 nt, Artificial Sequence
  Description of Artificial Sequence: Synthetic oligonucleotide
uaugugucgcaucucuuca

SEQ ID NO: 1395731 - RNA, 19 nt, Artificial Sequence
  Description of Artificial Sequence: Synthetic oligonucleotide
auuguacauaggugcaggg

SEQ ID NO: 1395732 - RNA, 19 nt, Artificial Sequence
  Description of Artificial Sequence: Synthetic oligonucleotide
ucugcgucgguccauauuu

SEQ ID NO: 1395733 - RNA, 19 nt, Artificial Sequence
  Description of Artificial Sequence: Synthetic oligonucleotide
ucuuuucuugaaugcgccg

SEQ ID NO: 1395734 - RNA, 19 nt, Artificial Sequence
  Description of Artificial Sequence: Synthetic oligonucleotide
acagacuuaguguuuacaa

SEQ ID NO: 1395735 - RNA, 19 nt, Artificial Sequence
  Description of Artificial Sequence: Synthetic oligonucleotide
guagaagauacauuauauc

SEQ ID NO: 1395736 - RNA, 19 nt, Artificial Sequence
  Description of Artificial Sequence: Synthetic oligonucleotide
ucuaauagguggucgcaca

SEQ ID NO: 1395737 - RNA, 19 nt, Artificial Sequence
  Description of Artificial Sequence: Synthetic oligonucleotide
uuugaaucagggguuauaa

SEQ ID NO: 1395738 - RNA, 19 nt, Artificial Sequence
  Description of Artificial Sequence: Synthetic oligonucleotide
uaaaugaauuaaucuuaga

SEQ ID NO: 1395739 - RNA, 19 nt, Artificial Sequence
  Description of Artificial Sequence: Synthetic oligonucleotide
ugauaauaaccaagcacuc

SEQ ID NO: 1395740 - RNA, 19 nt, Artificial Sequence
  Description of Artificial Sequence: Synthetic oligonucleotide
acgucagaccuacauaaag

SEQ ID NO: 1395741 - RNA, 19 nt, Artificial Sequence
  Description of Artificial Sequence: Synthetic oligonucleotide
auuaggacggcaaacaaaa

SEQ ID NO: 1395742 - RNA, 19 nt, Artificial Sequence
  Description of Artificial Sequence: Synthetic oligonucleotide
uauaucuaauuaggcaacc

SEQ ID NO: 1395743 - RNA, 19 nt, Artificial Sequence
  Description of Artificial Sequence: Synthetic oligonucleotide
agggucguggucuuuuaac

SEQ ID NO: 1395744 - RNA, 19 nt, Artificial Sequence
  Description of Artificial Sequence: Synthetic oligonucleotide
aguuguaaagucuuuucuu

SEQ ID NO: 1395745 - RNA, 19 nt, Artificial Sequence
  Description of Artificial Sequence: Synthetic oligonucleotide
agauguuuuacuucuugau

SEQ ID NO: 1395746 - RNA, 19 nt, Artificial Sequence
  Description of Artificial Sequence: Synthetic oligonucleotide
uauacugacggcguuuaca

SEQ ID NO: 1395747 - RNA, 19 nt, Artificial Sequence
  Description of Artificial Sequence: Synthetic oligonucleotide
uuucauacuuugcaagcau

SEQ ID NO: 1395748 - RNA, 19 nt, Artificial Sequence
  Description of Artificial Sequence: Synthetic oligonucleotide
uaaacaaacuagugaaguu

SEQ ID NO: 1395749 - RNA, 19 nt, Artificial Sequence
  Description of Artificial Sequence: Synthetic oligonucleotide
guucaauacgaacaagaca

SEQ ID NO: 1395750 - RNA, 19 nt, Artificial Sequence
  Description of Artificial Sequence: Synthetic oligonucleotide
gacugguucaauacgaaca

SEQ ID NO: 1395751 - RNA, 19 nt, Artificial Sequence
  Description of Artificial Sequence: Synthetic oligonucleotide
ggugugagaaacuuuuagc

SEQ ID NO: 1395752 - RNA, 19 nt, Artificial Sequence
  Description of Artificial Sequence: Synthetic oligonucleotide
aguagaagauacauuauau

SEQ ID NO: 1395753 - RNA, 19 nt, Artificial Sequence
  Description of Artificial Sequence: Synthetic oligonucleotide
acaagacauauccaauacu

SEQ ID NO: 1395754 - RNA, 19 nt, Artificial Sequence
  Description of Artificial Sequence: Synthetic oligonucleotide
ugucauagucugaccuugg

SEQ ID NO: 1395755 - RNA, 19 nt, Artificial Sequence
  Description of Artificial Sequence: Synthetic oligonucleotide
cuugguugcaugacccucc

SEQ ID NO: 1395756 - RNA, 19 nt, Artificial Sequence
  Description of Artificial Sequence: Synthetic oligonucleotide
ugucucagacugauuagcu

SEQ ID NO: 1395757 - RNA, 19 nt, Artificial Sequence
  Description of Artificial Sequence: Synthetic oligonucleotide
gaaguuucuugguugcuga

SEQ ID NO: 1395758 - RNA, 19 nt, Artificial Sequence
  Description of Artificial Sequence: Synthetic oligonucleotide
uuagguauguugucauccu

SEQ ID NO: 1395759 - RNA, 19 nt, Artificial Sequence
  Description of Artificial Sequence: Synthetic oligonucleotide
uggguaugucccuugguug

SEQ ID NO: 1395760 - RNA, 19 nt, Artificial Sequence
  Description of Artificial Sequence: Synthetic oligonucleotide
cucagcagcacuauuucuc

SEQ ID NO: 1395761 - RNA, 19 nt, Artificial Sequence
  Description of Artificial Sequence: Synthetic oligonucleotide
uugauauuuggaaccuuuc

SEQ ID NO: 1395762 - RNA, 19 nt, Artificial Sequence
  Description of Artificial Sequence: Synthetic oligonucleotide
uugagauaauauuuucaau

SEQ ID NO: 1395763 - RNA, 19 nt, Artificial Sequence
  Description of Artificial Sequence: Synthetic oligonucleotide
gguauuagacaaaugaguc

SEQ ID NO: 1395764 - RNA, 19 nt, Artificial Sequence
  Description of Artificial Sequence: Synthetic oligonucleotide
uguguucuuggacguagug

SEQ ID NO: 1395765 - RNA, 19 nt, Artificial Sequence
  Description of Artificial Sequence: Synthetic oligonucleotide
uugaaugcgccgagaacgc

SEQ ID NO: 1395766 - RNA, 19 nt, Artificial Sequence
  Description of Artificial Sequence: Synthetic oligonucleotide
uugggcugaacugaucuag

SEQ ID NO: 1395767 - RNA, 19 nt, Artificial Sequence
  Description of Artificial Sequence: Synthetic oligonucleotide
ugucuuuaagguggcaugc

SEQ ID NO: 1395768 - RNA, 19 nt, Artificial Sequence
  Description of Artificial Sequence: Synthetic oligonucleotide
cacuauuucucucccacug

SEQ ID NO: 1395769 - RNA, 19 nt, Artificial Sequence
  Description of Artificial Sequence: Synthetic oligonucleotide
accacaggaauaauauaac

SEQ ID NO: 1395770 - RNA, 19 nt, Artificial Sequence
  Description of Artificial Sequence: Synthetic oligonucleotide
auaauauaacaccccuccu

SEQ ID NO: 1395771 - RNA, 19 nt, Artificial Sequence
  Description of Artificial Sequence: Synthetic oligonucleotide
uccucaauauuuucuccca

SEQ ID NO: 1395772 - RNA, 19 nt, Artificial Sequence
  Description of Artificial Sequence: Synthetic oligonucleotide
acaggugcagacuuagccu

SEQ ID NO: 1395773 - RNA, 19 nt, Artificial Sequence
  Description of Artificial Sequence: Synthetic oligonucleotide
aaaggacccaacuggguuu

SEQ ID NO: 1395774 - RNA, 19 nt, Artificial Sequence
  Description of Artificial Sequence: Synthetic oligonucleotide
ugcaugacccuccucaaua

SEQ ID NO: 1395775 - RNA, 19 nt, Artificial Sequence
  Description of Artificial Sequence: Synthetic oligonucleotide
gaguagaagauacauuaua

SEQ ID NO: 1395776 - RNA, 19 nt, Artificial Sequence
  Description of Artificial Sequence: Synthetic oligonucleotide
uacgaacaagacauaucca

SEQ ID NO: 1395777 - RNA, 19 nt, Artificial Sequence
  Description of Artificial Sequence: Synthetic oligonucleotide
acuguauuguacauaggug

SEQ ID NO: 1395778 - RNA, 19 nt, Artificial Sequence
  Description of Artificial Sequence: Synthetic oligonucleotide
ucucccaacucagacaacu

SEQ ID NO: 1395779 - RNA, 19 nt, Artificial Sequence
  Description of Artificial Sequence: Synthetic oligonucleotide
ugggcugaacugaucuagg

SEQ ID NO: 1395780 - RNA, 19 nt, Artificial Sequence
  Description of Artificial Sequence: Synthetic oligonucleotide
gacaaaugaguccuggaua

SEQ ID NO: 1395781 - RNA, 19 nt, Artificial Sequence
  Description of Artificial Sequence: Synthetic oligonucleotide
gucgcaucucuucaauagg

SEQ ID NO: 1395782 - RNA, 19 nt, Artificial Sequence
  Description of Artificial Sequence: Synthetic oligonucleotide
uugucucagacugauuagc

SEQ ID NO: 1395783 - RNA, 19 nt, Artificial Sequence
  Description of Artificial Sequence: Synthetic oligonucleotide
ucagggguuauaaaaucuu

SEQ ID NO: 1395784 - RNA, 19 nt, Artificial Sequence
  Description of Artificial Sequence: Synthetic oligonucleotide
ucuugaaugcgccgagaac

SEQ ID NO: 1395785 - RNA, 19 nt, Artificial Sequence
  Description of Artificial Sequence: Synthetic oligonucleotide
uuccuuugccaguucuccg

SEQ ID NO: 1395786 - RNA, 19 nt, Artificial Sequence
  Description of Artificial Sequence: Synthetic oligonucleotide
auaaccaagcacucguuuu

SEQ ID NO: 1395787 - RNA, 19 nt, Artificial Sequence
  Description of Artificial Sequence: Synthetic oligonucleotide
auuagcuauuaaguuagga

SEQ ID NO: 1395788 - RNA, 19 nt, Artificial Sequence
  Description of Artificial Sequence: Synthetic oligonucleotide
uaggcaaccugcuucaguu

SEQ ID NO: 1395789 - RNA, 19 nt, Artificial Sequence
  Description of Artificial Sequence: Synthetic oligonucleotide
uauuaaguuaggaggccuu

SEQ ID NO: 1395790 - RNA, 19 nt, Artificial Sequence
  Description of Artificial Sequence: Synthetic oligonucleotide
uuaggacggcaaacaaaag

SEQ ID NO: 1395791 - RNA, 19 nt, Artificial Sequence
  Description of Artificial Sequence: Synthetic oligonucleotide
uagguauguugucauccug

SEQ ID NO: 1395792 - RNA, 19 nt, Artificial Sequence
  Description of Artificial Sequence: Synthetic oligonucleotide
uuacaaacuuggugguagc

SEQ ID NO: 1395793 - RNA, 19 nt, Artificial Sequence
  Description of Artificial Sequence: Synthetic oligonucleotide
uuaccauguugcaucuucu

SEQ ID NO: 1395794 - RNA, 19 nt, Artificial Sequence
  Description of Artificial Sequence: Synthetic oligonucleotide
ugcagggacaacgucagac

SEQ ID NO: 1395795 - RNA, 19 nt, Artificial Sequence
  Description of Artificial Sequence: Synthetic oligonucleotide
auagucugaccuuggaaau

SEQ ID NO: 1395796 - RNA, 19 nt, Artificial Sequence
  Description of Artificial Sequence: Synthetic oligonucleotide
ggcucuuauacugacggcg

SEQ ID NO: 1395797 - RNA, 19 nt, Artificial Sequence
  Description of Artificial Sequence: Synthetic oligonucleotide
aacugaucuaggaacaguu

SEQ ID NO: 1395798 - RNA, 19 nt, Artificial Sequence
  Description of Artificial Sequence: Synthetic oligonucleotide
uagacaaaugaguccugga

SEQ ID NO: 1395799 - RNA, 19 nt, Artificial Sequence
  Description of Artificial Sequence: Synthetic oligonucleotide
uaucuggcaguuguaaagu

SEQ ID NO: 1395800 - RNA, 19 nt, Artificial Sequence
  Description of Artificial Sequence: Synthetic oligonucleotide
uuaggcaaccugcuucagu

SEQ ID NO: 1395801 - RNA, 19 nt, Artificial Sequence
  Description of Artificial Sequence: Synthetic oligonucleotide
cauuguguaucugcgucgg

SEQ ID NO: 1395802 - RNA, 19 nt, Artificial Sequence
  Description of Artificial Sequence: Synthetic oligonucleotide
agaagauacauuauaucua

SEQ ID NO: 1395803 - RNA, 19 nt, Artificial Sequence
  Description of Artificial Sequence: Synthetic oligonucleotide
ugccagaauggccuucuca

SEQ ID NO: 1395804 - RNA, 19 nt, Artificial Sequence
  Description of Artificial Sequence: Synthetic oligonucleotide
uuuuagguauguugucauc

SEQ ID NO: 1395805 - RNA, 19 nt, Artificial Sequence
  Description of Artificial Sequence: Synthetic oligonucleotide
aggcucuuauacugacggc

SEQ ID NO: 1395806 - RNA, 19 nt, Artificial Sequence
  Description of Artificial Sequence: Synthetic oligonucleotide
gguuaaggcauucagaaau

SEQ ID NO: 1395807 - RNA, 19 nt, Artificial Sequence
  Description of Artificial Sequence: Synthetic oligonucleotide
ggacguagugcucacagac

SEQ ID NO: 1395808 - RNA, 19 nt, Artificial Sequence
  Description of Artificial Sequence: Synthetic oligonucleotide
ucuuauugaucagguuaag

SEQ ID NO: 1395809 - RNA, 19 nt, Artificial Sequence
  Description of Artificial Sequence: Synthetic oligonucleotide
cagaccuacauaaaguugu

SEQ ID NO: 1395810 - RNA, 19 nt, Artificial Sequence
  Description of Artificial Sequence: Synthetic oligonucleotide
uuguacauaggugcaggga

SEQ ID NO: 1395811 - RNA, 19 nt, Artificial Sequence
  Description of Artificial Sequence: Synthetic oligonucleotide
cauagauugagauaauauu

SEQ ID NO: 1395812 - RNA, 19 nt, Artificial Sequence
  Description of Artificial Sequence: Synthetic oligonucleotide
agggguuauaaaaucuuug

SEQ ID NO: 1395813 - RNA, 19 nt, Artificial Sequence
  Description of Artificial Sequence: Synthetic oligonucleotide
uuugacuuccuggguaugu

SEQ ID NO: 1395814 - RNA, 19 nt, Artificial Sequence
  Description of Artificial Sequence: Synthetic oligonucleotide
aaugcgccgagaacgccuc

SEQ ID NO: 1395815 - RNA, 19 nt, Artificial Sequence
  Description of Artificial Sequence: Synthetic oligonucleotide
uugaggcucuuauacugac

SEQ ID NO: 1395816 - RNA, 19 nt, Artificial Sequence
  Description of Artificial Sequence: Synthetic oligonucleotide
ugugucgcaucucuucaau

SEQ ID NO: 1395817 - RNA, 19 nt, Artificial Sequence
  Description of Artificial Sequence: Synthetic oligonucleotide
gauuagcuauuaaguuagg

SEQ ID NO: 1395818 - RNA, 19 nt, Artificial Sequence
  Description of Artificial Sequence: Synthetic oligonucleotide
acuugugacugguucaaua

SEQ ID NO: 1395819 - RNA, 19 nt, Artificial Sequence
  Description of Artificial Sequence: Synthetic oligonucleotide
agacuuagccuuuguggcu

SEQ ID NO: 1395820 - RNA, 19 nt, Artificial Sequence
  Description of Artificial Sequence: Synthetic oligonucleotide
auaucuaauuaggcaaccu

SEQ ID NO: 1395821 - RNA, 19 nt, Artificial Sequence
  Description of Artificial Sequence: Synthetic oligonucleotide
acccaauaaacaaacuagu

SEQ ID NO: 1395822 - RNA, 19 nt, Artificial Sequence
  Description of Artificial Sequence: Synthetic oligonucleotide
cacuguauuguacauaggu

SEQ ID NO: 1395823 - RNA, 19 nt, Artificial Sequence
  Description of Artificial Sequence: Synthetic oligonucleotide
uucuaauagguggucgcac

SEQ ID NO: 1395824 - RNA, 19 nt, Artificial Sequence
  Description of Artificial Sequence: Synthetic oligonucleotide
uuguguaucugcgucgguc

SEQ ID NO: 1395825 - RNA, 19 nt, Artificial Sequence
  Description of Artificial Sequence: Synthetic oligonucleotide
uaauaaccaagcacucguu

SEQ ID NO: 1395826 - RNA, 19 nt, Artificial Sequence
  Description of Artificial Sequence: Synthetic oligonucleotide
uuacaggugcagacuuagc

SEQ ID NO: 1395827 - RNA, 19 nt, Artificial Sequence
  Description of Artificial Sequence: Synthetic oligonucleotide
aucagggguuauaaaaucu

SEQ ID NO: 1395828 - RNA, 19 nt, Artificial Sequence
  Description of Artificial Sequence: Synthetic oligonucleotide
uacugacggcguuuacagg

SEQ ID NO: 1395829 - RNA, 19 nt, Artificial Sequence
  Description of Artificial Sequence: Synthetic oligonucleotide
cccaauaaacaaacuagug

SEQ ID NO: 1395830 - RNA, 19 nt, Artificial Sequence
  Description of Artificial Sequence: Synthetic oligonucleotide
aacuuggugguagcaguca

SEQ ID NO: 1395831 - RNA, 19 nt, Artificial Sequence
  Description of Artificial Sequence: Synthetic oligonucleotide
ggaauaauauaacaccccu

SEQ ID NO: 1395832 - RNA, 19 nt, Artificial Sequence
  Description of Artificial Sequence: Synthetic oligonucleotide
gcuucuaauagguggucgc

SEQ ID NO: 1395833 - RNA, 19 nt, Artificial Sequence
  Description of Artificial Sequence: Synthetic oligonucleotide
gacggcaaacaaaagcauc

SEQ ID NO: 1395834 - RNA, 19 nt, Artificial Sequence
  Description of Artificial Sequence: Synthetic oligonucleotide
aacgccucacuggugugag

SEQ ID NO: 1395835 - RNA, 19 nt, Artificial Sequence
  Description of Artificial Sequence: Synthetic oligonucleotide
ucaauacgaacaagacaua

SEQ ID NO: 1395836 - RNA, 19 nt, Artificial Sequence
  Description of Artificial Sequence: Synthetic oligonucleotide
agaauggccuucucauaga

SEQ ID NO: 1395837 - RNA, 19 nt, Artificial Sequence
  Description of Artificial Sequence: Synthetic oligonucleotide
guuuuacuucuugauggug

SEQ ID NO: 1395838 - RNA, 19 nt, Artificial Sequence
  Description of Artificial Sequence: Synthetic oligonucleotide
acaaacuagugaaguucac

SEQ ID NO: 1395839 - RNA, 19 nt, Artificial Sequence
  Description of Artificial Sequence: Synthetic oligonucleotide
uuuugaaucagggguuaua

SEQ ID NO: 1395840 - RNA, 19 nt, Artificial Sequence
  Description of Artificial Sequence: Synthetic oligonucleotide
ugagaaacuuuuagcucuu

SEQ ID NO: 1395841 - RNA, 19 nt, Artificial Sequence
  Description of Artificial Sequence: Synthetic oligonucleotide
cuccgcucagucauuggag

SEQ ID NO: 1395842 - RNA, 19 nt, Artificial Sequence
  Description of Artificial Sequence: Synthetic oligonucleotide
cuguauuaggacggcaaac

SEQ ID NO: 1395843 - RNA, 19 nt, Artificial Sequence
  Description of Artificial Sequence: Synthetic oligonucleotide
gguucaauacgaacaagac

SEQ ID NO: 1395844 - RNA, 19 nt, Artificial Sequence
  Description of Artificial Sequence: Synthetic oligonucleotide
ugguagcagucacacuuga

SEQ ID NO: 1395845 - RNA, 19 nt, Artificial Sequence
  Description of Artificial Sequence: Synthetic oligonucleotide
ucgguccauauuuucugac

SEQ ID NO: 1395846 - RNA, 19 nt, Artificial Sequence
  Description of Artificial Sequence: Synthetic oligonucleotide
caugccuugucugauguca

SEQ ID NO: 1395847 - RNA, 19 nt, Artificial Sequence
  Description of Artificial Sequence: Synthetic oligonucleotide
accauguugcaucuucuuu

SEQ ID NO: 1395848 - RNA, 19 nt, Artificial Sequence
  Description of Artificial Sequence: Synthetic oligonucleotide
gacaacgucagaccuacau

SEQ ID NO: 1395849 - RNA, 19 nt, Artificial Sequence
  Description of Artificial Sequence: Synthetic oligonucleotide
ugacggcguuuacaggugc

SEQ ID NO: 1395850 - RNA, 19 nt, Artificial Sequence
  Description of Artificial Sequence: Synthetic oligonucleotide
agguauguugucauccugu

SEQ ID NO: 1395851 - RNA, 19 nt, Artificial Sequence
  Description of Artificial Sequence: Synthetic oligonucleotide
ggguaugucccuugguugc

SEQ ID NO: 1395852 - RNA, 19 nt, Artificial Sequence
  Description of Artificial Sequence: Synthetic oligonucleotide
ucuuauacugacggcguuu

SEQ ID NO: 1395853 - RNA, 19 nt, Artificial Sequence
  Description of Artificial Sequence: Synthetic oligonucleotide
uuauacugacggcguuuac

SEQ ID NO: 1395854 - RNA, 19 nt, Artificial Sequence
  Description of Artificial Sequence: Synthetic oligonucleotide
guauuaggacggcaaacaa

SEQ ID NO: 1395855 - RNA, 19 nt, Artificial Sequence
  Description of Artificial Sequence: Synthetic oligonucleotide
uucuccgcucagucauugg

SEQ ID NO: 1395856 - RNA, 19 nt, Artificial Sequence
  Description of Artificial Sequence: Synthetic oligonucleotide
ugacccuccucaauauuuu

SEQ ID NO: 1395857 - RNA, 19 nt, Artificial Sequence
  Description of Artificial Sequence: Synthetic oligonucleotide
cuuugcaagcauggaguag

SEQ ID NO: 1395858 - RNA, 19 nt, Artificial Sequence
  Description of Artificial Sequence: Synthetic oligonucleotide
auaggcugagccccugcca

SEQ ID NO: 1395859 - RNA, 19 nt, Artificial Sequence
  Description of Artificial Sequence: Synthetic oligonucleotide
ucucauagauugagauaau

SEQ ID NO: 1395860 - RNA, 19 nt, Artificial Sequence
  Description of Artificial Sequence: Synthetic oligonucleotide
uugaucagguuaaggcauu

SEQ ID NO: 1395861 - RNA, 19 nt, Artificial Sequence
  Description of Artificial Sequence: Synthetic oligonucleotide
cagacuuaguguuuacaaa

SEQ ID NO: 1395862 - RNA, 19 nt, Artificial Sequence
  Description of Artificial Sequence: Synthetic oligonucleotide
aagauacacaagggucgug

SEQ ID NO: 1395863 - RNA, 19 nt, Artificial Sequence
  Description of Artificial Sequence: Synthetic oligonucleotide
ucagucauuggagcuuuuc

SEQ ID NO: 1395864 - RNA, 19 nt, Artificial Sequence
  Description of Artificial Sequence: Synthetic oligonucleotide
ggcguuuacaggugcagac

SEQ ID NO: 1395865 - RNA, 19 nt, Artificial Sequence
  Description of Artificial Sequence: Synthetic oligonucleotide
gccgagaacgccucacugg

SEQ ID NO: 1395866 - RNA, 19 nt, Artificial Sequence
  Description of Artificial Sequence: Synthetic oligonucleotide
uuugggcugaacugaucua

SEQ ID NO: 1395867 - RNA, 19 nt, Artificial Sequence
  Description of Artificial Sequence: Synthetic oligonucleotide
cugugguuucuuugggcug

SEQ ID NO: 1395868 - RNA, 19 nt, Artificial Sequence
  Description of Artificial Sequence: Synthetic oligonucleotide
uuucuugaaugcgccgaga

SEQ ID NO: 1395869 - RNA, 19 nt, Artificial Sequence
  Description of Artificial Sequence: Synthetic oligonucleotide
ucacagacuuaguguuuac

SEQ ID NO: 1395870 - RNA, 19 nt, Artificial Sequence
  Description of Artificial Sequence: Synthetic oligonucleotide
ucuuugggcugaacugauc

SEQ ID NO: 1395871 - RNA, 19 nt, Artificial Sequence
  Description of Artificial Sequence: Synthetic oligonucleotide
aggugcagggacaacguca

SEQ ID NO: 1395872 - RNA, 19 nt, Artificial Sequence
  Description of Artificial Sequence: Synthetic oligonucleotide
ugcgucgguccauauuuuc

SEQ ID NO: 1395873 - RNA, 19 nt, Artificial Sequence
  Description of Artificial Sequence: Synthetic oligonucleotide
uuugggcaucccuucuuau

SEQ ID NO: 1395874 - RNA, 19 nt, Artificial Sequence
  Description of Artificial Sequence: Synthetic oligonucleotide
ccauuguaguccaaaagga

SEQ ID NO: 1395875 - RNA, 19 nt, Artificial Sequence
  Description of Artificial Sequence: Synthetic oligonucleotide
aucuuagacugaacaaccu

SEQ ID NO: 1395876 - RNA, 19 nt, Artificial Sequence
  Description of Artificial Sequence: Synthetic oligonucleotide
ggcuucuaauagguggucg

SEQ ID NO: 1395877 - RNA, 19 nt, Artificial Sequence
  Description of Artificial Sequence: Synthetic oligonucleotide
auucagaaauugucuuguu

SEQ ID NO: 1395878 - RNA, 19 nt, Artificial Sequence
  Description of Artificial Sequence: Synthetic oligonucleotide
ucacuggugugagaaacuu

SEQ ID NO: 1395879 - RNA, 19 nt, Artificial Sequence
  Description of Artificial Sequence: Synthetic oligonucleotide
auuagacaaaugaguccug

SEQ ID NO: 1395880 - RNA, 19 nt, Artificial Sequence
  Description of Artificial Sequence: Synthetic oligonucleotide
cugacggcguuuacaggug

SEQ ID NO: 1395881 - RNA, 19 nt, Artificial Sequence
  Description of Artificial Sequence: Synthetic oligonucleotide
gaugucauagucugaccuu

SEQ ID NO: 1395882 - RNA, 19 nt, Artificial Sequence
  Description of Artificial Sequence: Synthetic oligonucleotide
ugaaugcgccgagaacgcc

SEQ ID NO: 1395883 - RNA, 19 nt, Artificial Sequence
  Description of Artificial Sequence: Synthetic oligonucleotide
uauugucuuuaagguggca

SEQ ID NO: 1395884 - RNA, 19 nt, Artificial Sequence
  Description of Artificial Sequence: Synthetic oligonucleotide
uagucugaccuuggaaauc

SEQ ID NO: 1395885 - RNA, 19 nt, Artificial Sequence
  Description of Artificial Sequence: Synthetic oligonucleotide
cuaauagguggucgcacaa

SEQ ID NO: 1395886 - RNA, 19 nt, Artificial Sequence
  Description of Artificial Sequence: Synthetic oligonucleotide
gaucagguuaaggcauuca

SEQ ID NO: 1395887 - RNA, 19 nt, Artificial Sequence
  Description of Artificial Sequence: Synthetic oligonucleotide
augacccuccucaauauuu

SEQ ID NO: 1395888 - RNA, 19 nt, Artificial Sequence
  Description of Artificial Sequence: Synthetic oligonucleotide
uugcaugacccuccucaau

SEQ ID NO: 1395889 - RNA, 19 nt, Artificial Sequence
  Description of Artificial Sequence: Synthetic oligonucleotide
uggcaugccuugucugaug

SEQ ID NO: 1395890 - RNA, 19 nt, Artificial Sequence
  Description of Artificial Sequence: Synthetic oligonucleotide
auagguggucgcacaagug

SEQ ID NO: 1395891 - RNA, 19 nt, Artificial Sequence
  Description of Artificial Sequence: Synthetic oligonucleotide
aacauaucuggcaguugua

SEQ ID NO: 1395892 - RNA, 19 nt, Artificial Sequence
  Description of Artificial Sequence: Synthetic oligonucleotide
uauuaugaaucaggucauu

SEQ ID NO: 1395893 - RNA, 19 nt, Artificial Sequence
  Description of Artificial Sequence: Synthetic oligonucleotide
agaacgccucacuggugug

SEQ ID NO: 1395894 - RNA, 19 nt, Artificial Sequence
  Description of Artificial Sequence: Synthetic oligonucleotide
caguuguaaagucuuuucu

SEQ ID NO: 1395895 - RNA, 19 nt, Artificial Sequence
  Description of Artificial Sequence: Synthetic oligonucleotide
gacucuucauuguuagaau

SEQ ID NO: 1395896 - RNA, 19 nt, Artificial Sequence
  Description of Artificial Sequence: Synthetic oligonucleotide
agguggucgcacaagugug

SEQ ID NO: 1395897 - RNA, 19 nt, Artificial Sequence
  Description of Artificial Sequence: Synthetic oligonucleotide
gucgguccauauuuucuga

SEQ ID NO: 1395898 - RNA, 19 nt, Artificial Sequence
  Description of Artificial Sequence: Synthetic oligonucleotide
ucccacugugucagucuca

SEQ ID NO: 1395899 - RNA, 19 nt, Artificial Sequence
  Description of Artificial Sequence: Synthetic oligonucleotide
ugauuaugugucgcaucuc

SEQ ID NO: 1395900 - RNA, 19 nt, Artificial Sequence
  Description of Artificial Sequence: Synthetic oligonucleotide
aggcuucuaauaggugguc

SEQ ID NO: 1395901 - RNA, 19 nt, Artificial Sequence
  Description of Artificial Sequence: Synthetic oligonucleotide
gaagauacacaagggucgu

SEQ ID NO: 1395902 - RNA, 19 nt, Artificial Sequence
  Description of Artificial Sequence: Synthetic oligonucleotide
acggcguuuacaggugcag

SEQ ID NO: 1395903 - RNA, 19 nt, Artificial Sequence
  Description of Artificial Sequence: Synthetic oligonucleotide
gcagcacuauuucucuccc

SEQ ID NO: 1395904 - RNA, 19 nt, Artificial Sequence
  Description of Artificial Sequence: Synthetic oligonucleotide
auuguguaucugcgucggu

SEQ ID NO: 1395905 - RNA, 19 nt, Artificial Sequence
  Description of Artificial Sequence: Synthetic oligonucleotide
gggacaacgucagaccuac

SEQ ID NO: 1395906 - RNA, 19 nt, Artificial Sequence
  Description of Artificial Sequence: Synthetic oligonucleotide
acauaggugcagggacaac

SEQ ID NO: 1395907 - RNA, 19 nt, Artificial Sequence
  Description of Artificial Sequence: Synthetic oligonucleotide
gucccagugaagauacaca

SEQ ID NO: 1395908 - RNA, 19 nt, Artificial Sequence
  Description of Artificial Sequence: Synthetic oligonucleotide
ccacaggaauaauauaaca

SEQ ID NO: 1395909 - RNA, 19 nt, Artificial Sequence
  Description of Artificial Sequence: Synthetic oligonucleotide
gaggcuucuaauagguggu

SEQ ID NO: 1395910 - RNA, 19 nt, Artificial Sequence
  Description of Artificial Sequence: Synthetic oligonucleotide
ggacucucaccuuugauau

SEQ ID NO: 1395911 - RNA, 19 nt, Artificial Sequence
  Description of Artificial Sequence: Synthetic oligonucleotide
cucauagauugagauaaua

SEQ ID NO: 1395912 - RNA, 19 nt, Artificial Sequence
  Description of Artificial Sequence: Synthetic oligonucleotide
auuaggcaaccugcuucag

SEQ ID NO: 1395913 - RNA, 19 nt, Artificial Sequence
  Description of Artificial Sequence: Synthetic oligonucleotide
aaggacccaacuggguuuu

SEQ ID NO: 1395914 - RNA, 19 nt, Artificial Sequence
  Description of Artificial Sequence: Synthetic oligonucleotide
guugcaugacccuccucaa

SEQ ID NO: 1395915 - RNA, 19 nt, Artificial Sequence
  Description of Artificial Sequence: Synthetic oligonucleotide
ggucauucaaugugucuaa

SEQ ID NO: 1395916 - RNA, 19 nt, Artificial Sequence
  Description of Artificial Sequence: Synthetic oligonucleotide
caaacuagugaaguucacu

SEQ ID NO: 1395917 - RNA, 19 nt, Artificial Sequence
  Description of Artificial Sequence: Synthetic oligonucleotide
gguggcaugccuugucuga

SEQ ID NO: 1395918 - RNA, 19 nt, Artificial Sequence
  Description of Artificial Sequence: Synthetic oligonucleotide
uguaucugcgucgguccau

SEQ ID NO: 1395919 - RNA, 19 nt, Artificial Sequence
  Description of Artificial Sequence: Synthetic oligonucleotide
cuuauacugacggcguuua

SEQ ID NO: 1395920 - RNA, 19 nt, Artificial Sequence
  Description of Artificial Sequence: Synthetic oligonucleotide
auccaauacuuaacaaguu

SEQ ID NO: 1395921 - RNA, 19 nt, Artificial Sequence
  Description of Artificial Sequence: Synthetic oligonucleotide
cacagacuuaguguuuaca

SEQ ID NO: 1395922 - RNA, 19 nt, Artificial Sequence
  Description of Artificial Sequence: Synthetic oligonucleotide
uggucgcacaaguguguuc

SEQ ID NO: 1395923 - RNA, 19 nt, Artificial Sequence
  Description of Artificial Sequence: Synthetic oligonucleotide
uggcaguuguaaagucuuu

SEQ ID NO: 1395924 - RNA, 19 nt, Artificial Sequence
  Description of Artificial Sequence: Synthetic oligonucleotide
gucugguauuagacaaaug

SEQ ID NO: 1395925 - RNA, 19 nt, Artificial Sequence
  Description of Artificial Sequence: Synthetic oligonucleotide
cuagugaaguucacuguau

SEQ ID NO: 1395926 - RNA, 19 nt, Artificial Sequence
  Description of Artificial Sequence: Synthetic oligonucleotide
cagucauuggagcuuuucu

SEQ ID NO: 1395927 - RNA, 19 nt, Artificial Sequence
  Description of Artificial Sequence: Synthetic oligonucleotide
gaaugcgccgagaacgccu

SEQ ID NO: 1395928 - RNA, 19 nt, Artificial Sequence
  Description of Artificial Sequence: Synthetic oligonucleotide
ugccuugucugaugucaua

SEQ ID NO: 1395929 - RNA, 19 nt, Artificial Sequence
  Description of Artificial Sequence: Synthetic oligonucleotide
ccucacuggugugagaaac

SEQ ID NO: 1395930 - RNA, 19 nt, Artificial Sequence
  Description of Artificial Sequence: Synthetic oligonucleotide
gaacgccucacugguguga

SEQ ID NO: 1395931 - RNA, 19 nt, Artificial Sequence
  Description of Artificial Sequence: Synthetic oligonucleotide
cagacugauuagcuauuaa

SEQ ID NO: 1395932 - RNA, 19 nt, Artificial Sequence
  Description of Artificial Sequence: Synthetic oligonucleotide
uggugguagcagucacacu

SEQ ID NO: 1395933 - RNA, 19 nt, Artificial Sequence
  Description of Artificial Sequence: Synthetic oligonucleotide
cacacuugaggcucuuaua

SEQ ID NO: 1395934 - RNA, 19 nt, Artificial Sequence
  Description of Artificial Sequence: Synthetic oligonucleotide
aucugcgucgguccauauu

SEQ ID NO: 1395935 - RNA, 19 nt, Artificial Sequence
  Description of Artificial Sequence: Synthetic oligonucleotide
guggaggcuucuaauaggu

SEQ ID NO: 1395936 - RNA, 19 nt, Artificial Sequence
  Description of Artificial Sequence: Synthetic oligonucleotide
guguaucugcgucggucca

SEQ ID NO: 1395937 - RNA, 19 nt, Artificial Sequence
  Description of Artificial Sequence: Synthetic oligonucleotide
ugcgccgagaacgccucac

SEQ ID NO: 1395938 - RNA, 19 nt, Artificial Sequence
  Description of Artificial Sequence: Synthetic oligonucleotide
ggcuuuagacacaguagga

SEQ ID NO: 1395939 - RNA, 19 nt, Artificial Sequence
  Description of Artificial Sequence: Synthetic oligonucleotide
aaguguguucuuggacgua

SEQ ID NO: 1395940 - RNA, 19 nt, Artificial Sequence
  Description of Artificial Sequence: Synthetic oligonucleotide
cuuuucuaucagucuggua

SEQ ID NO: 1395941 - RNA, 19 nt, Artificial Sequence
  Description of Artificial Sequence: Synthetic oligonucleotide
gggcacagugcuguauuag

SEQ ID NO: 1395942 - RNA, 19 nt, Artificial Sequence
  Description of Artificial Sequence: Synthetic oligonucleotide
caguucuccgcucagucau

SEQ ID NO: 1395943 - RNA, 19 nt, Artificial Sequence
  Description of Artificial Sequence: Synthetic oligonucleotide
cgucgguccauauuuucug

SEQ ID NO: 1395944 - RNA, 19 nt, Artificial Sequence
  Description of Artificial Sequence: Synthetic oligonucleotide
cacuugaggcucuuauacu

SEQ ID NO: 1395945 - RNA, 19 nt, Artificial Sequence
  Description of Artificial Sequence: Synthetic oligonucleotide
ggcauucagaaauugucuu

SEQ ID NO: 1395946 - RNA, 19 nt, Artificial Sequence
  Description of Artificial Sequence: Synthetic oligonucleotide
gugacugguucaauacgaa

SEQ ID NO: 1395947 - RNA, 19 nt, Artificial Sequence
  Description of Artificial Sequence: Synthetic oligonucleotide
ggucgcacaaguguguucu

SEQ ID NO: 1395948 - RNA, 19 nt, Artificial Sequence
  Description of Artificial Sequence: Synthetic oligonucleotide
gacggcguuuacaggugca

SEQ ID NO: 1395949 - RNA, 19 nt, Artificial Sequence
  Description of Artificial Sequence: Synthetic oligonucleotide
cuaauuaggcaaccugcuu

SEQ ID NO: 1395950 - RNA, 19 nt, Artificial Sequence
  Description of Artificial Sequence: Synthetic oligonucleotide
cucacuggugugagaaacu

SEQ ID NO: 1395951 - RNA, 19 nt, Artificial Sequence
  Description of Artificial Sequence: Synthetic oligonucleotide
caaaugaguccuggauaca

SEQ ID NO: 1395952 - RNA, 19 nt, Artificial Sequence
  Description of Artificial Sequence: Synthetic oligonucleotide
cagggacaacgucagaccu

SEQ ID NO: 1395953 - RNA, 19 nt, Artificial Sequence
  Description of Artificial Sequence: Synthetic oligonucleotide
uaucugcgucgguccauau

SEQ ID NO: 1395954 - RNA, 19 nt, Artificial Sequence
  Description of Artificial Sequence: Synthetic oligonucleotide
guuaaggcauucagaaauu

SEQ ID NO: 1395955 - RNA, 19 nt, Artificial Sequence
  Description of Artificial Sequence: Synthetic oligonucleotide
gugucgcaucucuucaaua

SEQ ID NO: 1395956 - RNA, 19 nt, Artificial Sequence
  Description of Artificial Sequence: Synthetic oligonucleotide
gacuuagccuuuguggcuu

SEQ ID NO: 1395957 - RNA, 19 nt, Artificial Sequence
  Description of Artificial Sequence: Synthetic oligonucleotide
ugguugcaugacccuccuc

SEQ ID NO: 1395958 - RNA, 19 nt, Artificial Sequence
  Description of Artificial Sequence: Synthetic oligonucleotide
ggaaccuuucuaaaugaau

SEQ ID NO: 1395959 - RNA, 19 nt, Artificial Sequence
  Description of Artificial Sequence: Synthetic oligonucleotide
cagggguuauaaaaucuuu

SEQ ID NO: 1395960 - RNA, 19 nt, Artificial Sequence
  Description of Artificial Sequence: Synthetic oligonucleotide
guggaauuauuaccauguu

SEQ ID NO: 1395961 - RNA, 19 nt, Artificial Sequence
  Description of Artificial Sequence: Synthetic oligonucleotide
gggcaucccuucuuauuga

SEQ ID NO: 1395962 - RNA, 19 nt, Artificial Sequence
  Description of Artificial Sequence: Synthetic oligonucleotide
ggucguggucuuuuaacau

SEQ ID NO: 1395963 - RNA, 19 nt, Artificial Sequence
  Description of Artificial Sequence: Synthetic oligonucleotide
augccuugucugaugucau

SEQ ID NO: 1395964 - RNA, 19 nt, Artificial Sequence
  Description of Artificial Sequence: Synthetic oligonucleotide
agggacaacgucagaccua

SEQ ID NO: 1395965 - RNA, 19 nt, Artificial Sequence
  Description of Artificial Sequence: Synthetic oligonucleotide
guaucugcgucgguccaua

SEQ ID NO: 1395966 - RNA, 19 nt, Artificial Sequence
  Description of Artificial Sequence: Synthetic oligonucleotide
ucucucccacugugucagu

SEQ ID NO: 1395967 - RNA, 19 nt, Artificial Sequence
  Description of Artificial Sequence: Synthetic oligonucleotide
gguaugucccuugguugca

SEQ ID NO: 1395968 - RNA, 19 nt, Artificial Sequence
  Description of Artificial Sequence: Synthetic oligonucleotide
ccuugguugcaugacccuc

SEQ ID NO: 1395969 - RNA, 19 nt, Artificial Sequence
  Description of Artificial Sequence: Synthetic oligonucleotide
ccauguugcaucuucuuuu

SEQ ID NO: 1395970 - RNA, 19 nt, Artificial Sequence
  Description of Artificial Sequence: Synthetic oligonucleotide
cuuggacguagugcucaca

SEQ ID NO: 1395971 - RNA, 19 nt, Artificial Sequence
  Description of Artificial Sequence: Synthetic oligonucleotide
cuuuugggcaucccuucuu

SEQ ID NO: 1395972 - RNA, 19 nt, Artificial Sequence
  Description of Artificial Sequence: Synthetic oligonucleotide
gcauggaguagaagauaca

SEQ ID NO: 1395973 - RNA, 19 nt, Artificial Sequence
  Description of Artificial Sequence: Synthetic oligonucleotide
gccuuguggaggcuucuaa

SEQ ID NO: 1395974 - RNA, 19 nt, Artificial Sequence
  Description of Artificial Sequence: Synthetic oligonucleotide
ggaguagaagauacauuau

SEQ ID NO: 1395975 - RNA, 19 nt, Artificial Sequence
  Description of Artificial Sequence: Synthetic oligonucleotide
cugccagaauggccuucuc

SEQ ID NO: 1395976 - RNA, 19 nt, Artificial Sequence
  Description of Artificial Sequence: Synthetic oligonucleotide
gcucuuauacugacggcgu

SEQ ID NO: 1395977 - RNA, 19 nt, Artificial Sequence
  Description of Artificial Sequence: Synthetic oligonucleotide
gcacuauuucucucccacu

SEQ ID NO: 1395978 - RNA, 19 nt, Artificial Sequence
  Description of Artificial Sequence: Synthetic oligonucleotide
ccuuugauauuuggaaccu

SEQ ID NO: 1395979 - RNA, 19 nt, Artificial Sequence
  Description of Artificial Sequence: Synthetic oligonucleotide
aguucuccgcucagucauu

SEQ ID NO: 1395980 - RNA, 19 nt, Artificial Sequence
  Description of Artificial Sequence: Synthetic oligonucleotide
cugucccagugaagauaca

SEQ ID NO: 1395981 - RNA, 19 nt, Artificial Sequence
  Description of Artificial Sequence: Synthetic oligonucleotide
cucuuauacugacggcguu

SEQ ID NO: 1395982 - RNA, 19 nt, Artificial Sequence
  Description of Artificial Sequence: Synthetic oligonucleotide
cacuggugugagaaacuuu

SEQ ID NO: 1395983 - RNA, 19 nt, Artificial Sequence
  Description of Artificial Sequence: Synthetic oligonucleotide
gcaugacccuccucaauau

SEQ ID NO: 1395984 - RNA, 19 nt, Artificial Sequence
  Description of Artificial Sequence: Synthetic oligonucleotide
caugacccuccucaauauu

SEQ ID NO: 1395985 - RNA, 19 nt, Artificial Sequence
  Description of Artificial Sequence: Synthetic oligonucleotide
cgaacaagacauauccaau

SEQ ID NO: 1395986 - RNA, 19 nt, Artificial Sequence
  Description of Artificial Sequence: Synthetic oligonucleotide
gugcagggacaacgucaga

SEQ ID NO: 1395987 - RNA, 19 nt, Artificial Sequence
  Description of Artificial Sequence: Synthetic oligonucleotide
ccgagaacgccucacuggu

SEQ ID NO: 1395988 - RNA, 19 nt, Artificial Sequence
  Description of Artificial Sequence: Synthetic oligonucleotide
cgccgagaacgccucacug

SEQ ID NO: 1395989 - RNA, 19 nt, Artificial Sequence
  Description of Artificial Sequence: Synthetic oligonucleotide
gcguuuacaggugcagacu

SEQ ID NO: 1395990 - RNA, 19 nt, Artificial Sequence
  Description of Artificial Sequence: Synthetic oligonucleotide
cagucacacuugaggcucu

SEQ ID NO: 1395991 - RNA, 19 nt, Artificial Sequence
  Description of Artificial Sequence: Synthetic oligonucleotide
ggacggcaaacaaaagcau

SEQ ID NO: 1395992 - RNA, 19 nt, Artificial Sequence
  Description of Artificial Sequence: Synthetic oligonucleotide
ccuuguggaggcuucuaau

SEQ ID NO: 1395993 - RNA, 19 nt, Artificial Sequence
  Description of Artificial Sequence: Synthetic oligonucleotide
cgagaacgccucacuggug

SEQ ID NO: 1395994 - RNA, 19 nt, Artificial Sequence
  Description of Artificial Sequence: Synthetic oligonucleotide
gcgucgguccauauuuucu

SEQ ID NO: 1395995 - RNA, 19 nt, Artificial Sequence
  Description of Artificial Sequence: Synthetic oligonucleotide
cuuagccuuuguggcuuua

SEQ ID NO: 1395996 - RNA, 19 nt, Artificial Sequence
  Description of Artificial Sequence: Synthetic oligonucleotide
ccuugucugaugucauagu

SEQ ID NO: 1395997 - RNA, 19 nt, Artificial Sequence
  Description of Artificial Sequence: Synthetic oligonucleotide
ggacccaacuggguuuucu

SEQ ID NO: 1395998 - RNA, 19 nt, Artificial Sequence
  Description of Artificial Sequence: Synthetic oligonucleotide
guggucgcacaaguguguu

SEQ ID NO: 1395999 - RNA, 19 nt, Artificial Sequence
  Description of Artificial Sequence: Synthetic oligonucleotide
caguaggaggaaguuucuu

SEQ ID NO: 1396000 - RNA, 19 nt, Artificial Sequence
  Description of Artificial Sequence: Synthetic oligonucleotide
ggauacacuuucagauguu

SEQ ID NO: 1396001 - RNA, 19 nt, Artificial Sequence
  Description of Artificial Sequence: Synthetic oligonucleotide
cugcgucgguccauauuuu

SEQ ID NO: 1396002 - RNA, 19 nt, Artificial Sequence
  Description of Artificial Sequence: Synthetic oligonucleotide
gucgcacaaguguguucuu

SEQ ID NO: 1396003 - RNA, 19 nt, Artificial Sequence
  Description of Artificial Sequence: Synthetic oligonucleotide
ccgcucagucauuggagcu

SEQ ID NO: 1396004 - RNA, 19 nt, Artificial Sequence
  Description of Artificial Sequence: Synthetic oligonucleotide
caguugcuccugccauugu

SEQ ID NO: 1396005 - RNA, 19 nt, Artificial Sequence
  Description of Artificial Sequence: Synthetic oligonucleotide
cccuuugucucagacugau

SEQ ID NO: 1396006 - RNA, 19 nt, Artificial Sequence
  Description of Artificial Sequence: Synthetic oligonucleotide
ccuggguaugucccuuggu

SEQ ID NO: 1396007 - RNA, 19 nt, Artificial Sequence
  Description of Artificial Sequence: Synthetic oligonucleotide
gcgccgagaacgccucacu

SEQ ID NO: 1396008 - RNA, 19 nt, Artificial Sequence
  Description of Artificial Sequence: Synthetic oligonucleotide
ggacaacgucagaccuaca

SEQ ID NO: 1396009 - RNA, 19 nt, Artificial Sequence
  Description of Artificial Sequence: Synthetic oligonucleotide
cggcguuuacaggugcaga

SEQ ID NO: 1396010 - RNA, 19 nt, Artificial Sequence
  Description of Artificial Sequence: Synthetic oligonucleotide
cacaagggucguggucuuu

SEQ ID NO: 1396011 - RNA, 19 nt, Artificial Sequence
  Description of Artificial Sequence: Synthetic oligonucleotide
gcugagccccugccagaau

SEQ ID NO: 1396012 - RNA, 19 nt, Artificial Sequence
  Description of Artificial Sequence: Synthetic oligonucleotide
aaacuaauuagcaaagucc

SEQ ID NO: 1396013 - RNA, 19 nt, Artificial Sequence
  Description of Artificial Sequence: Synthetic oligonucleotide
aaauaggguagguagacac

SEQ ID NO: 1396014 - RNA, 19 nt, Artificial Sequence
  Description of Artificial Sequence: Synthetic oligonucleotide
uuuggcuuaguauaggugg

SEQ ID NO: 1396015 - RNA, 19 nt, Artificial Sequence
  Description of Artificial Sequence: Synthetic oligonucleotide
aacuaauuagcaaaguccg

SEQ ID NO: 1396016 - RNA, 19 nt, Artificial Sequence
  Description of Artificial Sequence: Synthetic oligonucleotide
aacaggucucugcacaucc

SEQ ID NO: 1396017 - RNA, 19 nt, Artificial Sequence
  Description of Artificial Sequence: Synthetic oligonucleotide
gaacguuucaccauaaugc

SEQ ID NO: 1396018 - RNA, 19 nt, Artificial Sequence
  Description of Artificial Sequence: Synthetic oligonucleotide
acaacugugggucccaacc

SEQ ID NO: 1396019 - RNA, 19 nt, Artificial Sequence
  Description of Artificial Sequence: Synthetic oligonucleotide
agaacaaugggcucauugg

SEQ ID NO: 1396020 - RNA, 19 nt, Artificial Sequence
  Description of Artificial Sequence: Synthetic oligonucleotide
uucauaagaacguuucacc

SEQ ID NO: 1396021 - RNA, 19 nt, Artificial Sequence
  Description of Artificial Sequence: Synthetic oligonucleotide
uguccaaaacaacuguggg

SEQ ID NO: 1396022 - RNA, 19 nt, Artificial Sequence
  Description of Artificial Sequence: Synthetic oligonucleotide
uugaacgaaucccugaggc

SEQ ID NO: 1396023 - RNA, 19 nt, Artificial Sequence
  Description of Artificial Sequence: Synthetic oligonucleotide
agacgagucagcuuugugg

SEQ ID NO: 1396024 - RNA, 19 nt, Artificial Sequence
  Description of Artificial Sequence: Synthetic oligonucleotide
ugcacauccgucuagcaag

SEQ ID NO: 1396025 - RNA, 19 nt, Artificial Sequence
  Description of Artificial Sequence: Synthetic oligonucleotide
aagaaaguuugccuguucu

SEQ ID NO: 1396026 - RNA, 19 nt, Artificial Sequence
  Description of Artificial Sequence: Synthetic oligonucleotide
cauugauaggugcauaggg

SEQ ID NO: 1396027 - RNA, 19 nt, Artificial Sequence
  Description of Artificial Sequence: Synthetic oligonucleotide
aacugugggucccaacccc

SEQ ID NO: 1396028 - RNA, 19 nt, Artificial Sequence
  Description of Artificial Sequence: Synthetic oligonucleotide
uguaacaggucucugcaca

SEQ ID NO: 1396029 - RNA, 19 nt, Artificial Sequence
  Description of Artificial Sequence: Synthetic oligonucleotide
agaacguuucaccauaaug

SEQ ID NO: 1396030 - RNA, 19 nt, Artificial Sequence
  Description of Artificial Sequence: Synthetic oligonucleotide
uugauuggugucuuggugc

SEQ ID NO: 1396031 - RNA, 19 nt, Artificial Sequence
  Description of Artificial Sequence: Synthetic oligonucleotide
uuuuguaugccuugggcac

SEQ ID NO: 1396032 - RNA, 19 nt, Artificial Sequence
  Description of Artificial Sequence: Synthetic oligonucleotide
uugacgauaguugccaagg

SEQ ID NO: 1396033 - RNA, 19 nt, Artificial Sequence
  Description of Artificial Sequence: Synthetic oligonucleotide
uuugccuguucuuagccag

SEQ ID NO: 1396034 - RNA, 19 nt, Artificial Sequence
  Description of Artificial Sequence: Synthetic oligonucleotide
uggauaaaugaccucuuga

SEQ ID NO: 1396035 - RNA, 19 nt, Artificial Sequence
  Description of Artificial Sequence: Synthetic oligonucleotide
uuuugggcugaagaaaggg

SEQ ID NO: 1396036 - RNA, 19 nt, Artificial Sequence
  Description of Artificial Sequence: Synthetic oligonucleotide
cucaaacuaauuagcaaag

SEQ ID NO: 1396037 - RNA, 19 nt, Artificial Sequence
  Description of Artificial Sequence: Synthetic oligonucleotide
caaacuaauuagcaaaguc

SEQ ID NO: 1396038 - RNA, 19 nt, Artificial Sequence
  Description of Artificial Sequence: Synthetic oligonucleotide
ugagcuugaacgaaucccu

SEQ ID NO: 1396039 - RNA, 19 nt, Artificial Sequence
  Description of Artificial Sequence: Synthetic oligonucleotide
ucaugccagguuuugaacc

SEQ ID NO: 1396040 - RNA, 19 nt, Artificial Sequence
  Description of Artificial Sequence: Synthetic oligonucleotide
cuguccaaaacaacugugg

SEQ ID NO: 1396041 - RNA, 19 nt, Artificial Sequence
  Description of Artificial Sequence: Synthetic oligonucleotide
guuguauagggugagagac

SEQ ID NO: 1396042 - RNA, 19 nt, Artificial Sequence
  Description of Artificial Sequence: Synthetic oligonucleotide
auaggguagguagacacac

SEQ ID NO: 1396043 - RNA, 19 nt, Artificial Sequence
  Description of Artificial Sequence: Synthetic oligonucleotide
gagcaagaaaguuugccug

SEQ ID NO: 1396044 - RNA, 19 nt, Artificial Sequence
  Description of Artificial Sequence: Synthetic oligonucleotide
aucccuuuuacaaagggag

SEQ ID NO: 1396045 - RNA, 19 nt, Artificial Sequence
  Description of Artificial Sequence: Synthetic oligonucleotide
auaguugccaagggcagcc

SEQ ID NO: 1396046 - RNA, 19 nt, Artificial Sequence
  Description of Artificial Sequence: Synthetic oligonucleotide
ugggccuucgggcagcucg

SEQ ID NO: 1396047 - RNA, 19 nt, Artificial Sequence
  Description of Artificial Sequence: Synthetic oligonucleotide
caguaaauccagcaggaag

SEQ ID NO: 1396048 - RNA, 19 nt, Artificial Sequence
  Description of Artificial Sequence: Synthetic oligonucleotide
uaggguuuggcuuaguaua

SEQ ID NO: 1396049 - RNA, 19 nt, Artificial Sequence
  Description of Artificial Sequence: Synthetic oligonucleotide
uagguggggauguagaccu

SEQ ID NO: 1396050 - RNA, 19 nt, Artificial Sequence
  Description of Artificial Sequence: Synthetic oligonucleotide
agcaagacgagucagcuuu

SEQ ID NO: 1396051 - RNA, 19 nt, Artificial Sequence
  Description of Artificial Sequence: Synthetic oligonucleotide
uugauaggugcauaggguc

SEQ ID NO: 1396052 - RNA, 19 nt, Artificial Sequence
  Description of Artificial Sequence: Synthetic oligonucleotide
ugaguuagagccuuccuua

SEQ ID NO: 1396053 - RNA, 19 nt, Artificial Sequence
  Description of Artificial Sequence: Synthetic oligonucleotide
uagagccuuccuuaaagcc

SEQ ID NO: 1396054 - RNA, 19 nt, Artificial Sequence
  Description of Artificial Sequence: Synthetic oligonucleotide
ucuuugacgauaguugcca

SEQ ID NO: 1396055 - RNA, 19 nt, Artificial Sequence
  Description of Artificial Sequence: Synthetic oligonucleotide
uuugacgauaguugccaag

SEQ ID NO: 1396056 - RNA, 19 nt, Artificial Sequence
  Description of Artificial Sequence: Synthetic oligonucleotide
acauccgucuagcaagacg

SEQ ID NO: 1396057 - RNA, 19 nt, Artificial Sequence
  Description of Artificial Sequence: Synthetic oligonucleotide
caggguuuaguuucugacg

SEQ ID NO: 1396058 - RNA, 19 nt, Artificial Sequence
  Description of Artificial Sequence: Synthetic oligonucleotide
agcacaaagacgacacugc

SEQ ID NO: 1396059 - RNA, 19 nt, Artificial Sequence
  Description of Artificial Sequence: Synthetic oligonucleotide
gacgauaguugccaagggc

SEQ ID NO: 1396060 - RNA, 19 nt, Artificial Sequence
  Description of Artificial Sequence: Synthetic oligonucleotide
uaugccuugggcaccuacc

SEQ ID NO: 1396061 - RNA, 19 nt, Artificial Sequence
  Description of Artificial Sequence: Synthetic oligonucleotide
agcaacuuggcccgguuag

SEQ ID NO: 1396062 - RNA, 19 nt, Artificial Sequence
  Description of Artificial Sequence: Synthetic oligonucleotide
ugugagcuugaacgaaucc

SEQ ID NO: 1396063 - RNA, 19 nt, Artificial Sequence
  Description of Artificial Sequence: Synthetic oligonucleotide
acauguuuacucuuccccu

SEQ ID NO: 1396064 - RNA, 19 nt, Artificial Sequence
  Description of Artificial Sequence: Synthetic oligonucleotide
guuagcgcugguuguauag

SEQ ID NO: 1396065 - RNA, 19 nt, Artificial Sequence
  Description of Artificial Sequence: Synthetic oligonucleotide
auaagaacguuucaccaua

SEQ ID NO: 1396066 - RNA, 19 nt, Artificial Sequence
  Description of Artificial Sequence: Synthetic oligonucleotide
cuuuuguaugccuugggca

SEQ ID NO: 1396067 - RNA, 19 nt, Artificial Sequence
  Description of Artificial Sequence: Synthetic oligonucleotide
ugguuguauagggugagag

SEQ ID NO: 1396068 - RNA, 19 nt, Artificial Sequence
  Description of Artificial Sequence: Synthetic oligonucleotide
ugauuggugucuuggugcc

SEQ ID NO: 1396069 - RNA, 19 nt, Artificial Sequence
  Description of Artificial Sequence: Synthetic oligonucleotide
guagguugggccuucgggc

SEQ ID NO: 1396070 - RNA, 19 nt, Artificial Sequence
  Description of Artificial Sequence: Synthetic oligonucleotide
guugauuggugucuuggug

SEQ ID NO: 1396071 - RNA, 19 nt, Artificial Sequence
  Description of Artificial Sequence: Synthetic oligonucleotide
uggagcaagaaaguuugcc

SEQ ID NO: 1396072 - RNA, 19 nt, Artificial Sequence
  Description of Artificial Sequence: Synthetic oligonucleotide
ugaacgaaucccugaggcc

SEQ ID NO: 1396073 - RNA, 19 nt, Artificial Sequence
  Description of Artificial Sequence: Synthetic oligonucleotide
caugccagguuuugaaccc

SEQ ID NO: 1396074 - RNA, 19 nt, Artificial Sequence
  Description of Artificial Sequence: Synthetic oligonucleotide
ggagggugaauuuucagug

SEQ ID NO: 1396075 - RNA, 19 nt, Artificial Sequence
  Description of Artificial Sequence: Synthetic oligonucleotide
guagaccuguuucaguuug

SEQ ID NO: 1396076 - RNA, 19 nt, Artificial Sequence
  Description of Artificial Sequence: Synthetic oligonucleotide
cagaacaaugggcucauug

SEQ ID NO: 1396077 - RNA, 19 nt, Artificial Sequence
  Description of Artificial Sequence: Synthetic oligonucleotide
aaaguccggacaccggaca

SEQ ID NO: 1396078 - RNA, 19 nt, Artificial Sequence
  Description of Artificial Sequence: Synthetic oligonucleotide
cauaguuucauaagaacgu

SEQ ID NO: 1396079 - RNA, 19 nt, Artificial Sequence
  Description of Artificial Sequence: Synthetic oligonucleotide
uagcgcugguuguauaggg

SEQ ID NO: 1396080 - RNA, 19 nt, Artificial Sequence
  Description of Artificial Sequence: Synthetic oligonucleotide
caccuuagagcccucaaac

SEQ ID NO: 1396081 - RNA, 19 nt, Artificial Sequence
  Description of Artificial Sequence: Synthetic oligonucleotide
aguaaggcccuucuggaau

SEQ ID NO: 1396082 - RNA, 19 nt, Artificial Sequence
  Description of Artificial Sequence: Synthetic oligonucleotide
gaacgaaucccugaggcca

SEQ ID NO: 1396083 - RNA, 19 nt, Artificial Sequence
  Description of Artificial Sequence: Synthetic oligonucleotide
cuugaacgaaucccugagg

SEQ ID NO: 1396084 - RNA, 19 nt, Artificial Sequence
  Description of Artificial Sequence: Synthetic oligonucleotide
uuugguuucagaggugccu

SEQ ID NO: 1396085 - RNA, 19 nt, Artificial Sequence
  Description of Artificial Sequence: Synthetic oligonucleotide
agagcccucaaacuaauua

SEQ ID NO: 1396086 - RNA, 19 nt, Artificial Sequence
  Description of Artificial Sequence: Synthetic oligonucleotide
agagaaaccccaauuagaa

SEQ ID NO: 1396087 - RNA, 19 nt, Artificial Sequence
  Description of Artificial Sequence: Synthetic oligonucleotide
gugcauagggucuucgggc

SEQ ID NO: 1396088 - RNA, 19 nt, Artificial Sequence
  Description of Artificial Sequence: Synthetic oligonucleotide
ucaaacuaauuagcaaagu

SEQ ID NO: 1396089 - RNA, 19 nt, Artificial Sequence
  Description of Artificial Sequence: Synthetic oligonucleotide
ggugcauagggucuucggg

SEQ ID NO: 1396090 - RNA, 19 nt, Artificial Sequence
  Description of Artificial Sequence: Synthetic oligonucleotide
aagucggauagagccacuc

SEQ ID NO: 1396091 - RNA, 19 nt, Artificial Sequence
  Description of Artificial Sequence: Synthetic oligonucleotide
uguauagggugagagacuu

SEQ ID NO: 1396092 - RNA, 19 nt, Artificial Sequence
  Description of Artificial Sequence: Synthetic oligonucleotide
acgauaguugccaagggca

SEQ ID NO: 1396093 - RNA, 19 nt, Artificial Sequence
  Description of Artificial Sequence: Synthetic oligonucleotide
uguugauuggugucuuggu

SEQ ID NO: 1396094 - RNA, 19 nt, Artificial Sequence
  Description of Artificial Sequence: Synthetic oligonucleotide
acuaauuagcaaaguccgg

SEQ ID NO: 1396095 - RNA, 19 nt, Artificial Sequence
  Description of Artificial Sequence: Synthetic oligonucleotide
ccccaauuagaaaauaaag

SEQ ID NO: 1396096 - RNA, 19 nt, Artificial Sequence
  Description of Artificial Sequence: Synthetic oligonucleotide
gguagguugggccuucggg

SEQ ID NO: 1396097 - RNA, 19 nt, Artificial Sequence
  Description of Artificial Sequence: Synthetic oligonucleotide
ugcauagggucuucgggca

SEQ ID NO: 1396098 - RNA, 19 nt, Artificial Sequence
  Description of Artificial Sequence: Synthetic oligonucleotide
uuguauagggugagagacu

SEQ ID NO: 1396099 - RNA, 19 nt, Artificial Sequence
  Description of Artificial Sequence: Synthetic oligonucleotide
ucuguagugccccgagcug

SEQ ID NO: 1396100 - RNA, 19 nt, Artificial Sequence
  Description of Artificial Sequence: Synthetic oligonucleotide
aguauagguggggauguag

SEQ ID NO: 1396101 - RNA, 19 nt, Artificial Sequence
  Description of Artificial Sequence: Synthetic oligonucleotide
gagaaggggaccccugccc

SEQ ID NO: 1396102 - RNA, 19 nt, Artificial Sequence
  Description of Artificial Sequence: Synthetic oligonucleotide
ggcauugauaggugcauag

SEQ ID NO: 1396103 - RNA, 19 nt, Artificial Sequence
  Description of Artificial Sequence: Synthetic oligonucleotide
gcucucacaaguaaggccc

SEQ ID NO: 1396104 - RNA, 19 nt, Artificial Sequence
  Description of Artificial Sequence: Synthetic oligonucleotide
accggacaguaagagaaac

SEQ ID NO: 1396105 - RNA, 19 nt, Artificial Sequence
  Description of Artificial Sequence: Synthetic oligonucleotide
uaagaacguuucaccauaa

SEQ ID NO: 1396106 - RNA, 19 nt, Artificial Sequence
  Description of Artificial Sequence: Synthetic oligonucleotide
uguaggcuuuuguaugccu

SEQ ID NO: 1396107 - RNA, 19 nt, Artificial Sequence
  Description of Artificial Sequence: Synthetic oligonucleotide
aaaacaacuguggguccca

SEQ ID NO: 1396108 - RNA, 19 nt, Artificial Sequence
  Description of Artificial Sequence: Synthetic oligonucleotide
uuuguaugccuugggcacc

SEQ ID NO: 1396109 - RNA, 19 nt, Artificial Sequence
  Description of Artificial Sequence: Synthetic oligonucleotide
aggugcauagggucuucgg

SEQ ID NO: 1396110 - RNA, 19 nt, Artificial Sequence
  Description of Artificial Sequence: Synthetic oligonucleotide
ccccaaauaggguagguag

SEQ ID NO: 1396111 - RNA, 19 nt, Artificial Sequence
  Description of Artificial Sequence: Synthetic oligonucleotide
agggcagccgcaccggagg

SEQ ID NO: 1396112 - RNA, 19 nt, Artificial Sequence
  Description of Artificial Sequence: Synthetic oligonucleotide
gaaaguuugccuguucuua

SEQ ID NO: 1396113 - RNA, 19 nt, Artificial Sequence
  Description of Artificial Sequence: Synthetic oligonucleotide
augcucaauccuccagaac

SEQ ID NO: 1396114 - RNA, 19 nt, Artificial Sequence
  Description of Artificial Sequence: Synthetic oligonucleotide
uagguugggccuucgggca

SEQ ID NO: 1396115 - RNA, 19 nt, Artificial Sequence
  Description of Artificial Sequence: Synthetic oligonucleotide
agcucggcgcauuuccagg

SEQ ID NO: 1396116 - RNA, 19 nt, Artificial Sequence
  Description of Artificial Sequence: Synthetic oligonucleotide
aagagcgagcaugggcugg

SEQ ID NO: 1396117 - RNA, 19 nt, Artificial Sequence
  Description of Artificial Sequence: Synthetic oligonucleotide
agcuugaacgaaucccuga

SEQ ID NO: 1396118 - RNA, 19 nt, Artificial Sequence
  Description of Artificial Sequence: Synthetic oligonucleotide
uuagagcccucaaacuaau

SEQ ID NO: 1396119 - RNA, 19 nt, Artificial Sequence
  Description of Artificial Sequence: Synthetic oligonucleotide
gcuugaacgaaucccugag

SEQ ID NO: 1396120 - RNA, 19 nt, Artificial Sequence
  Description of Artificial Sequence: Synthetic oligonucleotide
gcuuuuguaugccuugggc

SEQ ID NO: 1396121 - RNA, 19 nt, Artificial Sequence
  Description of Artificial Sequence: Synthetic oligonucleotide
gacgagucagcuuuguggu

SEQ ID NO: 1396122 - RNA, 19 nt, Artificial Sequence
  Description of Artificial Sequence: Synthetic oligonucleotide
cuggauaaaugaccucuug

SEQ ID NO: 1396123 - RNA, 19 nt, Artificial Sequence
  Description of Artificial Sequence: Synthetic oligonucleotide
uggcuuaguauaggugggg

SEQ ID NO: 1396124 - RNA, 19 nt, Artificial Sequence
  Description of Artificial Sequence: Synthetic oligonucleotide
uuggcuguaacaggucucu

SEQ ID NO: 1396125 - RNA, 19 nt, Artificial Sequence
  Description of Artificial Sequence: Synthetic oligonucleotide
aaagacgacacugcauguu

SEQ ID NO: 1396126 - RNA, 19 nt, Artificial Sequence
  Description of Artificial Sequence: Synthetic oligonucleotide
caaguaaggcccuucugga

SEQ ID NO: 1396127 - RNA, 19 nt, Artificial Sequence
  Description of Artificial Sequence: Synthetic oligonucleotide
gacgcuuggcugcuggcug

SEQ ID NO: 1396128 - RNA, 19 nt, Artificial Sequence
  Description of Artificial Sequence: Synthetic oligonucleotide
caacugugggucccaaccc

SEQ ID NO: 1396129 - RNA, 19 nt, Artificial Sequence
  Description of Artificial Sequence: Synthetic oligonucleotide
uagaccuguuucaguuugc

SEQ ID NO: 1396130 - RNA, 19 nt, Artificial Sequence
  Description of Artificial Sequence: Synthetic oligonucleotide
agggucuucgggcagcccu

SEQ ID NO: 1396131 - RNA, 19 nt, Artificial Sequence
  Description of Artificial Sequence: Synthetic oligonucleotide
uucaagcuggguugggguc

SEQ ID NO: 1396132 - RNA, 19 nt, Artificial Sequence
  Description of Artificial Sequence: Synthetic oligonucleotide
caccuucaaggguagguug

SEQ ID NO: 1396133 - RNA, 19 nt, Artificial Sequence
  Description of Artificial Sequence: Synthetic oligonucleotide
caucccuuuuacaaaggga

SEQ ID NO: 1396134 - RNA, 19 nt, Artificial Sequence
  Description of Artificial Sequence: Synthetic oligonucleotide
accagaucuuugacgauag

SEQ ID NO: 1396135 - RNA, 19 nt, Artificial Sequence
  Description of Artificial Sequence: Synthetic oligonucleotide
cuuggcuguaacaggucuc

SEQ ID NO: 1396136 - RNA, 19 nt, Artificial Sequence
  Description of Artificial Sequence: Synthetic oligonucleotide
auaguuucauaagaacguu

SEQ ID NO: 1396137 - RNA, 19 nt, Artificial Sequence
  Description of Artificial Sequence: Synthetic oligonucleotide
aacgaaucccugaggccag

SEQ ID NO: 1396138 - RNA, 19 nt, Artificial Sequence
  Description of Artificial Sequence: Synthetic oligonucleotide
agucggauagagccacucu

SEQ ID NO: 1396139 - RNA, 19 nt, Artificial Sequence
  Description of Artificial Sequence: Synthetic oligonucleotide
guuuaguuucugacgcuug

SEQ ID NO: 1396140 - RNA, 19 nt, Artificial Sequence
  Description of Artificial Sequence: Synthetic oligonucleotide
ccucaaacuaauuagcaaa

SEQ ID NO: 1396141 - RNA, 19 nt, Artificial Sequence
  Description of Artificial Sequence: Synthetic oligonucleotide
gacaccggacaguaagaga

SEQ ID NO: 1396142 - RNA, 19 nt, Artificial Sequence
  Description of Artificial Sequence: Synthetic oligonucleotide
aguuagagccuuccuuaaa

SEQ ID NO: 1396143 - RNA, 19 nt, Artificial Sequence
  Description of Artificial Sequence: Synthetic oligonucleotide
cagguuuugaacccacaga

SEQ ID NO: 1396144 - RNA, 19 nt, Artificial Sequence
  Description of Artificial Sequence: Synthetic oligonucleotide
guauagguggggauguaga

SEQ ID NO: 1396145 - RNA, 19 nt, Artificial Sequence
  Description of Artificial Sequence: Synthetic oligonucleotide
agccuuaggaagucggaua

SEQ ID NO: 1396146 - RNA, 19 nt, Artificial Sequence
  Description of Artificial Sequence: Synthetic oligonucleotide
uaggugcauagggucuucg

SEQ ID NO: 1396147 - RNA, 19 nt, Artificial Sequence
  Description of Artificial Sequence: Synthetic oligonucleotide
aguaggcagcucucacaag

SEQ ID NO: 1396148 - RNA, 19 nt, Artificial Sequence
  Description of Artificial Sequence: Synthetic oligonucleotide
uaguaguaggcagcucuca

SEQ ID NO: 1396149 - RNA, 19 nt, Artificial Sequence
  Description of Artificial Sequence: Synthetic oligonucleotide
cuguaacaggucucugcac

SEQ ID NO: 1396150 - RNA, 19 nt, Artificial Sequence
  Description of Artificial Sequence: Synthetic oligonucleotide
ccagguuuugaacccacag

SEQ ID NO: 1396151 - RNA, 19 nt, Artificial Sequence
  Description of Artificial Sequence: Synthetic oligonucleotide
aaggguagguugggccuuc

SEQ ID NO: 1396152 - RNA, 19 nt, Artificial Sequence
  Description of Artificial Sequence: Synthetic oligonucleotide
uaaauccagcaggaagcac

SEQ ID NO: 1396153 - RNA, 19 nt, Artificial Sequence
  Description of Artificial Sequence: Synthetic oligonucleotide
gguuguauagggugagaga

SEQ ID NO: 1396154 - RNA, 19 nt, Artificial Sequence
  Description of Artificial Sequence: Synthetic oligonucleotide
gaguuagagccuuccuuaa

SEQ ID NO: 1396155 - RNA, 19 nt, Artificial Sequence
  Description of Artificial Sequence: Synthetic oligonucleotide
gagccacucugccuugaug

SEQ ID NO: 1396156 - RNA, 19 nt, Artificial Sequence
  Description of Artificial Sequence: Synthetic oligonucleotide
cugccuugauggcauuggc

SEQ ID NO: 1396157 - RNA, 19 nt, Artificial Sequence
  Description of Artificial Sequence: Synthetic oligonucleotide
uucgggcagcccuccuugg

SEQ ID NO: 1396158 - RNA, 19 nt, Artificial Sequence
  Description of Artificial Sequence: Synthetic oligonucleotide
uuggugucuuggugccccg

SEQ ID NO: 1396159 - RNA, 19 nt, Artificial Sequence
  Description of Artificial Sequence: Synthetic oligonucleotide
cauaagaacguuucaccau

SEQ ID NO: 1396160 - RNA, 19 nt, Artificial Sequence
  Description of Artificial Sequence: Synthetic oligonucleotide
uccgucuagcaagacgagu

SEQ ID NO: 1396161 - RNA, 19 nt, Artificial Sequence
  Description of Artificial Sequence: Synthetic oligonucleotide
cuggagcaagaaaguuugc

SEQ ID NO: 1396162 - RNA, 19 nt, Artificial Sequence
  Description of Artificial Sequence: Synthetic oligonucleotide
ccgucuagcaagacgaguc

SEQ ID NO: 1396163 - RNA, 19 nt, Artificial Sequence
  Description of Artificial Sequence: Synthetic oligonucleotide
uaccccucuaccucucauc

SEQ ID NO: 1396164 - RNA, 19 nt, Artificial Sequence
  Description of Artificial Sequence: Synthetic oligonucleotide
uuaaagcccuggucugguc

SEQ ID NO: 1396165 - RNA, 19 nt, Artificial Sequence
  Description of Artificial Sequence: Synthetic oligonucleotide
ugggcaccuaccccucuac

SEQ ID NO: 1396166 - RNA, 19 nt, Artificial Sequence
  Description of Artificial Sequence: Synthetic oligonucleotide
agcaaaguccggacaccgg

SEQ ID NO: 1396167 - RNA, 19 nt, Artificial Sequence
  Description of Artificial Sequence: Synthetic oligonucleotide
ccaaauaggguagguagac

SEQ ID NO: 1396168 - RNA, 19 nt, Artificial Sequence
  Description of Artificial Sequence: Synthetic oligonucleotide
uaaggcccuucuggaaucc

SEQ ID NO: 1396169 - RNA, 19 nt, Artificial Sequence
  Description of Artificial Sequence: Synthetic oligonucleotide
caccaccugacauguuuac

SEQ ID NO: 1396170 - RNA, 19 nt, Artificial Sequence
  Description of Artificial Sequence: Synthetic oligonucleotide
auaggugcauagggucuuc

SEQ ID NO: 1396171 - RNA, 19 nt, Artificial Sequence
  Description of Artificial Sequence: Synthetic oligonucleotide
cagcucggcgcauuuccag

SEQ ID NO: 1396172 - RNA, 19 nt, Artificial Sequence
  Description of Artificial Sequence: Synthetic oligonucleotide
guaugccuugggcaccuac

SEQ ID NO: 1396173 - RNA, 19 nt, Artificial Sequence
  Description of Artificial Sequence: Synthetic oligonucleotide
gggugaauuuucaguggcg

SEQ ID NO: 1396174 - RNA, 19 nt, Artificial Sequence
  Description of Artificial Sequence: Synthetic oligonucleotide
ggcagcucucacaaguaag

SEQ ID NO: 1396175 - RNA, 19 nt, Artificial Sequence
  Description of Artificial Sequence: Synthetic oligonucleotide
ccggacaccggacaguaag

SEQ ID NO: 1396176 - RNA, 19 nt, Artificial Sequence
  Description of Artificial Sequence: Synthetic oligonucleotide
agcccuccuuggcuguaac

SEQ ID NO: 1396177 - RNA, 19 nt, Artificial Sequence
  Description of Artificial Sequence: Synthetic oligonucleotide
cucacaaguaaggcccuuc

SEQ ID NO: 1396178 - RNA, 19 nt, Artificial Sequence
  Description of Artificial Sequence: Synthetic oligonucleotide
ggccgaacugccaucagug

SEQ ID NO: 1396179 - RNA, 19 nt, Artificial Sequence
  Description of Artificial Sequence: Synthetic oligonucleotide
uuucugacgcuuggcugcu

SEQ ID NO: 1396180 - RNA, 19 nt, Artificial Sequence
  Description of Artificial Sequence: Synthetic oligonucleotide
ugagagacuuugggcuuca

SEQ ID NO: 1396181 - RNA, 19 nt, Artificial Sequence
  Description of Artificial Sequence: Synthetic oligonucleotide
ggccagaggccuuccauug

SEQ ID NO: 1396182 - RNA, 19 nt, Artificial Sequence
  Description of Artificial Sequence: Synthetic oligonucleotide
gauuggugucuuggugccc

SEQ ID NO: 1396183 - RNA, 19 nt, Artificial Sequence
  Description of Artificial Sequence: Synthetic oligonucleotide
aggaagucggauagagcca

SEQ ID NO: 1396184 - RNA, 19 nt, Artificial Sequence
  Description of Artificial Sequence: Synthetic oligonucleotide
ccggacaguaagagaaacc

SEQ ID NO: 1396185 - RNA, 19 nt, Artificial Sequence
  Description of Artificial Sequence: Synthetic oligonucleotide
ggacaccggacaguaagag

SEQ ID NO: 1396186 - RNA, 19 nt, Artificial Sequence
  Description of Artificial Sequence: Synthetic oligonucleotide
aggcaaguuccuguaggcu

SEQ ID NO: 1396187 - RNA, 19 nt, Artificial Sequence
  Description of Artificial Sequence: Synthetic oligonucleotide
ugccccugccauaguuuca

SEQ ID NO: 1396188 - RNA, 19 nt, Artificial Sequence
  Description of Artificial Sequence: Synthetic oligonucleotide
gcagacuguguaguaguag

SEQ ID NO: 1396189 - RNA, 19 nt, Artificial Sequence
  Description of Artificial Sequence: Synthetic oligonucleotide
gugaguuagagccuuccuu

SEQ ID NO: 1396190 - RNA, 19 nt, Artificial Sequence
  Description of Artificial Sequence: Synthetic oligonucleotide
caaauaggguagguagaca

SEQ ID NO: 1396191 - RNA, 19 nt, Artificial Sequence
  Description of Artificial Sequence: Synthetic oligonucleotide
uugggcaccuaccccucua

SEQ ID NO: 1396192 - RNA, 19 nt, Artificial Sequence
  Description of Artificial Sequence: Synthetic oligonucleotide
uagcaagacgagucagcuu

SEQ ID NO: 1396193 - RNA, 19 nt, Artificial Sequence
  Description of Artificial Sequence: Synthetic oligonucleotide
uggcagccuuaggaagucg

SEQ ID NO: 1396194 - RNA, 19 nt, Artificial Sequence
  Description of Artificial Sequence: Synthetic oligonucleotide
gcacaaagacgacacugca

SEQ ID NO: 1396195 - RNA, 19 nt, Artificial Sequence
  Description of Artificial Sequence: Synthetic oligonucleotide
gcugguuguauagggugag

SEQ ID NO: 1396196 - RNA, 19 nt, Artificial Sequence
  Description of Artificial Sequence: Synthetic oligonucleotide
uagagcccucaaacuaauu

SEQ ID NO: 1396197 - RNA, 19 nt, Artificial Sequence
  Description of Artificial Sequence: Synthetic oligonucleotide
cuuugacgauaguugccaa

SEQ ID NO: 1396198 - RNA, 19 nt, Artificial Sequence
  Description of Artificial Sequence: Synthetic oligonucleotide
gguuggaugccaccuuaga

SEQ ID NO: 1396199 - RNA, 19 nt, Artificial Sequence
  Description of Artificial Sequence: Synthetic oligonucleotide
ggugaauuuucaguggcgu

SEQ ID NO: 1396200 - RNA, 19 nt, Artificial Sequence
  Description of Artificial Sequence: Synthetic oligonucleotide
agcgcugguuguauagggu

SEQ ID NO: 1396201 - RNA, 19 nt, Artificial Sequence
  Description of Artificial Sequence: Synthetic oligonucleotide
gccagaggccuuccauugg

SEQ ID NO: 1396202 - RNA, 19 nt, Artificial Sequence
  Description of Artificial Sequence: Synthetic oligonucleotide
gcccgguuagcgcugguug

SEQ ID NO: 1396203 - RNA, 19 nt, Artificial Sequence
  Description of Artificial Sequence: Synthetic oligonucleotide
cucggcgcauuuccaggug

SEQ ID NO: 1396204 - RNA, 19 nt, Artificial Sequence
  Description of Artificial Sequence: Synthetic oligonucleotide
ccuucaagcuggguugggg

SEQ ID NO: 1396205 - RNA, 19 nt, Artificial Sequence
  Description of Artificial Sequence: Synthetic oligonucleotide
cacaaagacgacacugcau

SEQ ID NO: 1396206 - RNA, 19 nt, Artificial Sequence
  Description of Artificial Sequence: Synthetic oligonucleotide
uggcuguaacaggucucug

SEQ ID NO: 1396207 - RNA, 19 nt, Artificial Sequence
  Description of Artificial Sequence: Synthetic oligonucleotide
auccgucuagcaagacgag

SEQ ID NO: 1396208 - RNA, 19 nt, Artificial Sequence
  Description of Artificial Sequence: Synthetic oligonucleotide
caaagacgacacugcaugu

SEQ ID NO: 1396209 - RNA, 19 nt, Artificial Sequence
  Description of Artificial Sequence: Synthetic oligonucleotide
cccaaauaggguagguaga

SEQ ID NO: 1396210 - RNA, 19 nt, Artificial Sequence
  Description of Artificial Sequence: Synthetic oligonucleotide
caccagaucuuugacgaua

SEQ ID NO: 1396211 - RNA, 19 nt, Artificial Sequence
  Description of Artificial Sequence: Synthetic oligonucleotide
accggagggugaauuuuca

SEQ ID NO: 1396212 - RNA, 19 nt, Artificial Sequence
  Description of Artificial Sequence: Synthetic oligonucleotide
guaccaccaccugacaugu

SEQ ID NO: 1396213 - RNA, 19 nt, Artificial Sequence
  Description of Artificial Sequence: Synthetic oligonucleotide
ggcuuaguauaggugggga

SEQ ID NO: 1396214 - RNA, 19 nt, Artificial Sequence
  Description of Artificial Sequence: Synthetic oligonucleotide
ggguagguugggccuucgg

SEQ ID NO: 1396215 - RNA, 19 nt, Artificial Sequence
  Description of Artificial Sequence: Synthetic oligonucleotide
cccucaaacuaauuagcaa

SEQ ID NO: 1396216 - RNA, 19 nt, Artificial Sequence
  Description of Artificial Sequence: Synthetic oligonucleotide
ggcaaguuccuguaggcuu

SEQ ID NO: 1396217 - RNA, 19 nt, Artificial Sequence
  Description of Artificial Sequence: Synthetic oligonucleotide
agcuggguuggggucuuca

SEQ ID NO: 1396218 - RNA, 19 nt, Artificial Sequence
  Description of Artificial Sequence: Synthetic oligonucleotide
aguggcgucuuggcagccu

SEQ ID NO: 1396219 - RNA, 19 nt, Artificial Sequence
  Description of Artificial Sequence: Synthetic oligonucleotide
uaguauagguggggaugua

SEQ ID NO: 1396220 - RNA, 19 nt, Artificial Sequence
  Description of Artificial Sequence: Synthetic oligonucleotide
ucucacaaguaaggcccuu

SEQ ID NO: 1396221 - RNA, 19 nt, Artificial Sequence
  Description of Artificial Sequence: Synthetic oligonucleotide
uccggacaccggacaguaa

SEQ ID NO: 1396222 - RNA, 19 nt, Artificial Sequence
  Description of Artificial Sequence: Synthetic oligonucleotide
ccggagggugaauuuucag

SEQ ID NO: 1396223 - RNA, 19 nt, Artificial Sequence
  Description of Artificial Sequence: Synthetic oligonucleotide
ggugccccgagguguuuug

SEQ ID NO: 1396224 - RNA, 19 nt, Artificial Sequence
  Description of Artificial Sequence: Synthetic oligonucleotide
aggguagguugggccuucg

SEQ ID NO: 1396225 - RNA, 19 nt, Artificial Sequence
  Description of Artificial Sequence: Synthetic oligonucleotide
ggugaguuagagccuuccu

SEQ ID NO: 1396226 - RNA, 19 nt, Artificial Sequence
  Description of Artificial Sequence: Synthetic oligonucleotide
gcgucuuggcagccuuagg

SEQ ID NO: 1396227 - RNA, 19 nt, Artificial Sequence
  Description of Artificial Sequence: Synthetic oligonucleotide
caguaagagaaaccccaau

SEQ ID NO: 1396228 - RNA, 19 nt, Artificial Sequence
  Description of Artificial Sequence: Synthetic oligonucleotide
gcaucagcaggguuuaguu

SEQ ID NO: 1396229 - RNA, 19 nt, Artificial Sequence
  Description of Artificial Sequence: Synthetic oligonucleotide
gagcaucagcaggguuuag

SEQ ID NO: 1396230 - RNA, 19 nt, Artificial Sequence
  Description of Artificial Sequence: Synthetic oligonucleotide
uggcgucuuggcagccuua

SEQ ID NO: 1396231 - RNA, 19 nt, Artificial Sequence
  Description of Artificial Sequence: Synthetic oligonucleotide
cacauccgucuagcaagac

SEQ ID NO: 1396232 - RNA, 19 nt, Artificial Sequence
  Description of Artificial Sequence: Synthetic oligonucleotide
caucagcaggguuuaguuu

SEQ ID NO: 1396233 - RNA, 19 nt, Artificial Sequence
  Description of Artificial Sequence: Synthetic oligonucleotide
uagggucuucgggcagccc

SEQ ID NO: 1396234 - RNA, 19 nt, Artificial Sequence
  Description of Artificial Sequence: Synthetic oligonucleotide
gcuuaguauagguggggau

SEQ ID NO: 1396235 - RNA, 19 nt, Artificial Sequence
  Description of Artificial Sequence: Synthetic oligonucleotide
gcucaauccuccagaacaa

SEQ ID NO: 1396236 - RNA, 19 nt, Artificial Sequence
  Description of Artificial Sequence: Synthetic oligonucleotide
cucucacaaguaaggcccu

SEQ ID NO: 1396237 - RNA, 19 nt, Artificial Sequence
  Description of Artificial Sequence: Synthetic oligonucleotide
gguuuaguuucugacgcuu

SEQ ID NO: 1396238 - RNA, 19 nt, Artificial Sequence
  Description of Artificial Sequence: Synthetic oligonucleotide
guccggacaccggacagua

SEQ ID NO: 1396239 - RNA, 19 nt, Artificial Sequence
  Description of Artificial Sequence: Synthetic oligonucleotide
gggagcaucagcaggguuu

SEQ ID NO: 1396240 - RNA, 19 nt, Artificial Sequence
  Description of Artificial Sequence: Synthetic oligonucleotide
caagggcagccgcaccgga

SEQ ID NO: 1396241 - RNA, 19 nt, Artificial Sequence
  Description of Artificial Sequence: Synthetic oligonucleotide
caccuaccccucuaccucu

SEQ ID NO: 1396242 - RNA, 19 nt, Artificial Sequence
  Description of Artificial Sequence: Synthetic oligonucleotide
ccccucuaccucucauccc

SEQ ID NO: 1396243 - RNA, 19 nt, Artificial Sequence
  Description of Artificial Sequence: Synthetic oligonucleotide
acgaaucccugaggccaga

SEQ ID NO: 1396244 - RNA, 19 nt, Artificial Sequence
  Description of Artificial Sequence: Synthetic oligonucleotide
gguuagcgcugguuguaua

SEQ ID NO: 1396245 - RNA, 19 nt, Artificial Sequence
  Description of Artificial Sequence: Synthetic oligonucleotide
ggguuuaguuucugacgcu

SEQ ID NO: 1396246 - RNA, 19 nt, Artificial Sequence
  Description of Artificial Sequence: Synthetic oligonucleotide
cccgagcugcuccuucaag

SEQ ID NO: 1396247 - RNA, 19 nt, Artificial Sequence
  Description of Artificial Sequence: Synthetic oligonucleotide
agccagcaacuuggcccgg

SEQ ID NO: 1396248 - RNA, 19 nt, Artificial Sequence
  Description of Artificial Sequence: Synthetic oligonucleotide
cccuaagaugcucaauccu

SEQ ID NO: 1396249 - RNA, 19 nt, Artificial Sequence
  Description of Artificial Sequence: Synthetic oligonucleotide
ccaccuuagagcccucaaa

SEQ ID NO: 1396250 - RNA, 19 nt, Artificial Sequence
  Description of Artificial Sequence: Synthetic oligonucleotide
gcacauccgucuagcaaga

SEQ ID NO: 1396251 - RNA, 19 nt, Artificial Sequence
  Description of Artificial Sequence: Synthetic oligonucleotide
gaagucggauagagccacu

SEQ ID NO: 1396252 - RNA, 19 nt, Artificial Sequence
  Description of Artificial Sequence: Synthetic oligonucleotide
agccgcaccggagggugaa

SEQ ID NO: 1396253 - RNA, 19 nt, Artificial Sequence
  Description of Artificial Sequence: Synthetic oligonucleotide
caucucccuccccuaagau

SEQ ID NO: 1396254 - RNA, 19 nt, Artificial Sequence
  Description of Artificial Sequence: Synthetic oligonucleotide
cgucuagcaagacgaguca

SEQ ID NO: 1396255 - RNA, 19 nt, Artificial Sequence
  Description of Artificial Sequence: Synthetic oligonucleotide
gggaagaaagagcgagcau

SEQ ID NO: 1396256 - RNA, 19 nt, Artificial Sequence
  Description of Artificial Sequence: Synthetic oligonucleotide
cuuggugccccgagguguu

SEQ ID NO: 1396257 - RNA, 19 nt, Artificial Sequence
  Description of Artificial Sequence: Synthetic oligonucleotide
uguaugccuugggcaccua

SEQ ID NO: 1396258 - RNA, 19 nt, Artificial Sequence
  Description of Artificial Sequence: Synthetic oligonucleotide
gggccgaacugccaucagu

SEQ ID NO: 1396259 - RNA, 19 nt, Artificial Sequence
  Description of Artificial Sequence: Synthetic oligonucleotide
ucgggcagcucggcgcauu

SEQ ID NO: 1396260 - RNA, 19 nt, Artificial Sequence
  Description of Artificial Sequence: Synthetic oligonucleotide
uggcccgguuagcgcuggu

SEQ ID NO: 1396261 - RNA, 19 nt, Artificial Sequence
  Description of Artificial Sequence: Synthetic oligonucleotide
agcaugggcugggguugga

SEQ ID NO: 1396262 - RNA, 19 nt, Artificial Sequence
  Description of Artificial Sequence: Synthetic oligonucleotide
gcgagcaugggcugggguu

SEQ ID NO: 1396263 - RNA, 19 nt, Artificial Sequence
  Description of Artificial Sequence: Synthetic oligonucleotide
gcucggcgcauuuccaggu

SEQ ID NO: 1396264 - RNA, 19 nt, Artificial Sequence
  Description of Artificial Sequence: Synthetic oligonucleotide
ccaccaccugacauguuua

SEQ ID NO: 1396265 - RNA, 19 nt, Artificial Sequence
  Description of Artificial Sequence: Synthetic oligonucleotide
guggcgucuuggcagccuu

SEQ ID NO: 1396266 - RNA, 19 nt, Artificial Sequence
  Description of Artificial Sequence: Synthetic oligonucleotide
gccgaacugccaucagugu

SEQ ID NO: 1396267 - RNA, 19 nt, Artificial Sequence
  Description of Artificial Sequence: Synthetic oligonucleotide
gcagcucggcgcauuucca

SEQ ID NO: 1396268 - RNA, 19 nt, Artificial Sequence
  Description of Artificial Sequence: Synthetic oligonucleotide
gcgcauuuccaggugaguu

SEQ ID NO: 1396269 - RNA, 19 nt, Artificial Sequence
  Description of Artificial Sequence: Synthetic oligonucleotide
caaggguagguugggccuu

SEQ ID NO: 1396270 - RNA, 19 nt, Artificial Sequence
  Description of Artificial Sequence: Synthetic oligonucleotide
gccccugccauaguuucau

SEQ ID NO: 1396271 - RNA, 19 nt, Artificial Sequence
  Description of Artificial Sequence: Synthetic oligonucleotide
guugggccuucgggcagcu

SEQ ID NO: 1396272 - RNA, 19 nt, Artificial Sequence
  Description of Artificial Sequence: Synthetic oligonucleotide
gcaccggagggugaauuuu

SEQ ID NO: 1396273 - RNA, 19 nt, Artificial Sequence
  Description of Artificial Sequence: Synthetic oligonucleotide
ccgguuagcgcugguugua

SEQ ID NO: 1396274 - RNA, 19 nt, Artificial Sequence
  Description of Artificial Sequence: Synthetic oligonucleotide
ggccuuccauuggcagaga

SEQ ID NO: 1396275 - RNA, 19 nt, Artificial Sequence
  Description of Artificial Sequence: Synthetic oligonucleotide
ccgagguguuuugguuuca

SEQ ID NO: 1396276 - RNA, 19 nt, Artificial Sequence
  Description of Artificial Sequence: Synthetic oligonucleotide
ccaccagaucuuugacgau

SEQ ID NO: 1396277 - RNA, 19 nt, Artificial Sequence
  Description of Artificial Sequence: Synthetic oligonucleotide
ccucuaccucucaucccau

SEQ ID NO: 1396278 - RNA, 19 nt, Artificial Sequence
  Description of Artificial Sequence: Synthetic oligonucleotide
gcauaccacugggcagacu

SEQ ID NO: 1396279 - RNA, 19 nt, Artificial Sequence
  Description of Artificial Sequence: Synthetic oligonucleotide
ggcccgguuagcgcugguu

SEQ ID NO: 1396280 - RNA, 19 nt, Artificial Sequence
  Description of Artificial Sequence: Synthetic oligonucleotide
ccccugccauaguuucaua

SEQ ID NO: 1396281 - RNA, 19 nt, Artificial Sequence
  Description of Artificial Sequence: Synthetic oligonucleotide
ccgcaccggagggugaauu

SEQ ID NO: 1396282 - RNA, 19 nt, Artificial Sequence
  Description of Artificial Sequence: Synthetic oligonucleotide
gccgcaccggagggugaau

SEQ ID NO: 1396283 - RNA, 19 nt, Artificial Sequence
  Description of Artificial Sequence: Synthetic oligonucleotide
ucuauaaucaguuugaggg

SEQ ID NO: 1396284 - RNA, 19 nt, Artificial Sequence
  Description of Artificial Sequence: Synthetic oligonucleotide
gaaaucuaaacuuagagug

SEQ ID NO: 1396285 - RNA, 19 nt, Artificial Sequence
  Description of Artificial Sequence: Synthetic oligonucleotide
aagcccucaaaucagaacc

SEQ ID NO: 1396286 - RNA, 19 nt, Artificial Sequence
  Description of Artificial Sequence: Synthetic oligonucleotide
uaagauaggauucuaguag

SEQ ID NO: 1396287 - RNA, 19 nt, Artificial Sequence
  Description of Artificial Sequence: Synthetic oligonucleotide
auaguuaacacacuuaugu

SEQ ID NO: 1396288 - RNA, 19 nt, Artificial Sequence
  Description of Artificial Sequence: Synthetic oligonucleotide
uauuucugaguaaacaggg

SEQ ID NO: 1396289 - RNA, 19 nt, Artificial Sequence
  Description of Artificial Sequence: Synthetic oligonucleotide
cuuaugaacauaaugguug

SEQ ID NO: 1396290 - RNA, 19 nt, Artificial Sequence
  Description of Artificial Sequence: Synthetic oligonucleotide
gaaaguaagucucuagagg

SEQ ID NO: 1396291 - RNA, 19 nt, Artificial Sequence
  Description of Artificial Sequence: Synthetic oligonucleotide
aagucauaauaguuaacac

SEQ ID NO: 1396292 - RNA, 19 nt, Artificial Sequence
  Description of Artificial Sequence: Synthetic oligonucleotide
aacguuagcaaguugagau

SEQ ID NO: 1396293 - RNA, 19 nt, Artificial Sequence
  Description of Artificial Sequence: Synthetic oligonucleotide
ucuuacaucaguuaagguc

SEQ ID NO: 1396294 - RNA, 19 nt, Artificial Sequence
  Description of Artificial Sequence: Synthetic oligonucleotide
gauguuuauggcuucaggc

SEQ ID NO: 1396295 - RNA, 19 nt, Artificial Sequence
  Description of Artificial Sequence: Synthetic oligonucleotide
aaagcuaguugccaggcag

SEQ ID NO: 1396296 - RNA, 19 nt, Artificial Sequence
  Description of Artificial Sequence: Synthetic oligonucleotide
uaauugaagaaguuaguca

SEQ ID NO: 1396297 - RNA, 19 nt, Artificial Sequence
  Description of Artificial Sequence: Synthetic oligonucleotide
acgacaaucacuuucaaaa

SEQ ID NO: 1396298 - RNA, 19 nt, Artificial Sequence
  Description of Artificial Sequence: Synthetic oligonucleotide
uaauaguuaacacacuuau

SEQ ID NO: 1396299 - RNA, 19 nt, Artificial Sequence
  Description of Artificial Sequence: Synthetic oligonucleotide
uuuacgacaaucacuuuca

SEQ ID NO: 1396300 - RNA, 19 nt, Artificial Sequence
  Description of Artificial Sequence: Synthetic oligonucleotide
uauaagauaggauucuagu

SEQ ID NO: 1396301 - RNA, 19 nt, Artificial Sequence
  Description of Artificial Sequence: Synthetic oligonucleotide
gacacuacugacaugaacc

SEQ ID NO: 1396302 - RNA, 19 nt, Artificial Sequence
  Description of Artificial Sequence: Synthetic oligonucleotide
uuucuuacaucaguuaagg

SEQ ID NO: 1396303 - RNA, 19 nt, Artificial Sequence
  Description of Artificial Sequence: Synthetic oligonucleotide
uagaacaaccuaaaggaug

SEQ ID NO: 1396304 - RNA, 19 nt, Artificial Sequence
  Description of Artificial Sequence: Synthetic oligonucleotide
auaauugaagaaguuaguc

SEQ ID NO: 1396305 - RNA, 19 nt, Artificial Sequence
  Description of Artificial Sequence: Synthetic oligonucleotide
uccaaguccucaaauacag

SEQ ID NO: 1396306 - RNA, 19 nt, Artificial Sequence
  Description of Artificial Sequence: Synthetic oligonucleotide
uaaacauaucuauaaucag

SEQ ID NO: 1396307 - RNA, 19 nt, Artificial Sequence
  Description of Artificial Sequence: Synthetic oligonucleotide
uauucaaugcugcagacua

SEQ ID NO: 1396308 - RNA, 19 nt, Artificial Sequence
  Description of Artificial Sequence: Synthetic oligonucleotide
uuagauuucuuacaucagu

SEQ ID NO: 1396309 - RNA, 19 nt, Artificial Sequence
  Description of Artificial Sequence: Synthetic oligonucleotide
acuccaaguccucaaauac

SEQ ID NO: 1396310 - RNA, 19 nt, Artificial Sequence
  Description of Artificial Sequence: Synthetic oligonucleotide
uagaaaguaagucucuaga

SEQ ID NO: 1396311 - RNA, 19 nt, Artificial Sequence
  Description of Artificial Sequence: Synthetic oligonucleotide
acauaauugaagaaguuag

SEQ ID NO: 1396312 - RNA, 19 nt, Artificial Sequence
  Description of Artificial Sequence: Synthetic oligonucleotide
agaaccuuagacugauacc

SEQ ID NO: 1396313 - RNA, 19 nt, Artificial Sequence
  Description of Artificial Sequence: Synthetic oligonucleotide
ucuuggugaaaucuaaacu

SEQ ID NO: 1396314 - RNA, 19 nt, Artificial Sequence
  Description of Artificial Sequence: Synthetic oligonucleotide
aaaucuaaacuuagagugg

SEQ ID NO: 1396315 - RNA, 19 nt, Artificial Sequence
  Description of Artificial Sequence: Synthetic oligonucleotide
aacuuuagauuucuuacau

SEQ ID NO: 1396316 - RNA, 19 nt, Artificial Sequence
  Description of Artificial Sequence: Synthetic oligonucleotide
aaguccccaacuuugacca

SEQ ID NO: 1396317 - RNA, 19 nt, Artificial Sequence
  Description of Artificial Sequence: Synthetic oligonucleotide
acuuauguguguucuguac

SEQ ID NO: 1396318 - RNA, 19 nt, Artificial Sequence
  Description of Artificial Sequence: Synthetic oligonucleotide
uaaaggauggagcuauuca

SEQ ID NO: 1396319 - RNA, 19 nt, Artificial Sequence
  Description of Artificial Sequence: Synthetic oligonucleotide
ugaaagaagucauaauagu

SEQ ID NO: 1396320 - RNA, 19 nt, Artificial Sequence
  Description of Artificial Sequence: Synthetic oligonucleotide
gugaagaauauguuggaag

SEQ ID NO: 1396321 - RNA, 19 nt, Artificial Sequence
  Description of Artificial Sequence: Synthetic oligonucleotide
cuaaacuuagagugguugg

SEQ ID NO: 1396322 - RNA, 19 nt, Artificial Sequence
  Description of Artificial Sequence: Synthetic oligonucleotide
acuggagucagcuuuacga

SEQ ID NO: 1396323 - RNA, 19 nt, Artificial Sequence
  Description of Artificial Sequence: Synthetic oligonucleotide
aaacauaucuauaaucagu

SEQ ID NO: 1396324 - RNA, 19 nt, Artificial Sequence
  Description of Artificial Sequence: Synthetic oligonucleotide
aaugaaaacguuagcaagu

SEQ ID NO: 1396325 - RNA, 19 nt, Artificial Sequence
  Description of Artificial Sequence: Synthetic oligonucleotide
acucguuccaucugagugc

SEQ ID NO: 1396326 - RNA, 19 nt, Artificial Sequence
  Description of Artificial Sequence: Synthetic oligonucleotide
acaaccuaaaggauggagc

SEQ ID NO: 1396327 - RNA, 19 nt, Artificial Sequence
  Description of Artificial Sequence: Synthetic oligonucleotide
aaguugagaugauuaaaca

SEQ ID NO: 1396328 - RNA, 19 nt, Artificial Sequence
  Description of Artificial Sequence: Synthetic oligonucleotide
aucaguuugagggauguac

SEQ ID NO: 1396329 - RNA, 19 nt, Artificial Sequence
  Description of Artificial Sequence: Synthetic oligonucleotide
aacacucccuagaacaacc

SEQ ID NO: 1396330 - RNA, 19 nt, Artificial Sequence
  Description of Artificial Sequence: Synthetic oligonucleotide
aucuauaaucaguuugagg

SEQ ID NO: 1396331 - RNA, 19 nt, Artificial Sequence
  Description of Artificial Sequence: Synthetic oligonucleotide
ucucuagaaaguaagucuc

SEQ ID NO: 1396332 - RNA, 19 nt, Artificial Sequence
  Description of Artificial Sequence: Synthetic oligonucleotide
gguauuucugaguaaacag

SEQ ID NO: 1396333 - RNA, 19 nt, Artificial Sequence
  Description of Artificial Sequence: Synthetic oligonucleotide
cuaguugccaggcaguggg

SEQ ID NO: 1396334 - RNA, 19 nt, Artificial Sequence
  Description of Artificial Sequence: Synthetic oligonucleotide
ugauccauuucuuacuaca

SEQ ID NO: 1396335 - RNA, 19 nt, Artificial Sequence
  Description of Artificial Sequence: Synthetic oligonucleotide
agucagaacagucugcucu

SEQ ID NO: 1396336 - RNA, 19 nt, Artificial Sequence
  Description of Artificial Sequence: Synthetic oligonucleotide
uuaugaacauaaugguugc

SEQ ID NO: 1396337 - RNA, 19 nt, Artificial Sequence
  Description of Artificial Sequence: Synthetic oligonucleotide
aaguuagucauaauagaug

SEQ ID NO: 1396338 - RNA, 19 nt, Artificial Sequence
  Description of Artificial Sequence: Synthetic oligonucleotide
ucaagugccuaccagggac

SEQ ID NO: 1396339 - RNA, 19 nt, Artificial Sequence
  Description of Artificial Sequence: Synthetic oligonucleotide
uguuuauggcuucaggccu

SEQ ID NO: 1396340 - RNA, 19 nt, Artificial Sequence
  Description of Artificial Sequence: Synthetic oligonucleotide
ucuaaacuuagagugguug

SEQ ID NO: 1396341 - RNA, 19 nt, Artificial Sequence
  Description of Artificial Sequence: Synthetic oligonucleotide
gucuugaaccaucaaaugc

SEQ ID NO: 1396342 - RNA, 19 nt, Artificial Sequence
  Description of Artificial Sequence: Synthetic oligonucleotide
guauuucugaguaaacagg

SEQ ID NO: 1396343 - RNA, 19 nt, Artificial Sequence
  Description of Artificial Sequence: Synthetic oligonucleotide
agaaguuagucauaauaga

SEQ ID NO: 1396344 - RNA, 19 nt, Artificial Sequence
  Description of Artificial Sequence: Synthetic oligonucleotide
ucaguuugagggauguacc

SEQ ID NO: 1396345 - RNA, 19 nt, Artificial Sequence
  Description of Artificial Sequence: Synthetic oligonucleotide
uggguaaaguaauucaaac

SEQ ID NO: 1396346 - RNA, 19 nt, Artificial Sequence
  Description of Artificial Sequence: Synthetic oligonucleotide
acuaugacacuacugacau

SEQ ID NO: 1396347 - RNA, 19 nt, Artificial Sequence
  Description of Artificial Sequence: Synthetic oligonucleotide
cuugaagucaguuagcuua

SEQ ID NO: 1396348 - RNA, 19 nt, Artificial Sequence
  Description of Artificial Sequence: Synthetic oligonucleotide
uggugaaaucuaaacuuag

SEQ ID NO: 1396349 - RNA, 19 nt, Artificial Sequence
  Description of Artificial Sequence: Synthetic oligonucleotide
uguucuguacaccaccaac

SEQ ID NO: 1396350 - RNA, 19 nt, Artificial Sequence
  Description of Artificial Sequence: Synthetic oligonucleotide
ggaacuuuagauuucuuac

SEQ ID NO: 1396351 - RNA, 19 nt, Artificial Sequence
  Description of Artificial Sequence: Synthetic oligonucleotide
agacuaugacacuacugac

SEQ ID NO: 1396352 - RNA, 19 nt, Artificial Sequence
  Description of Artificial Sequence: Synthetic oligonucleotide
uucuguacaccaccaaccc

SEQ ID NO: 1396353 - RNA, 19 nt, Artificial Sequence
  Description of Artificial Sequence: Synthetic oligonucleotide
acuuuaugggaguaguugu

SEQ ID NO: 1396354 - RNA, 19 nt, Artificial Sequence
  Description of Artificial Sequence: Synthetic oligonucleotide
acacuacugacaugaaccg

SEQ ID NO: 1396355 - RNA, 19 nt, Artificial Sequence
  Description of Artificial Sequence: Synthetic oligonucleotide
aguaagucucuagagggac

SEQ ID NO: 1396356 - RNA, 19 nt, Artificial Sequence
  Description of Artificial Sequence: Synthetic oligonucleotide
aaccaucaaaugcucucgg

SEQ ID NO: 1396357 - RNA, 19 nt, Artificial Sequence
  Description of Artificial Sequence: Synthetic oligonucleotide
ucuuacuacaguuucuuuu

SEQ ID NO: 1396358 - RNA, 19 nt, Artificial Sequence
  Description of Artificial Sequence: Synthetic oligonucleotide
ucauuuagacuugaaagaa

SEQ ID NO: 1396359 - RNA, 19 nt, Artificial Sequence
  Description of Artificial Sequence: Synthetic oligonucleotide
auuuagacuugaaagaagu

SEQ ID NO: 1396360 - RNA, 19 nt, Artificial Sequence
  Description of Artificial Sequence: Synthetic oligonucleotide
aaaacguuagcaaguugag

SEQ ID NO: 1396361 - RNA, 19 nt, Artificial Sequence
  Description of Artificial Sequence: Synthetic oligonucleotide
auaagauaggauucuagua

SEQ ID NO: 1396362 - RNA, 19 nt, Artificial Sequence
  Description of Artificial Sequence: Synthetic oligonucleotide
cuagaaaguaagucucuag

SEQ ID NO: 1396363 - RNA, 19 nt, Artificial Sequence
  Description of Artificial Sequence: Synthetic oligonucleotide
ugaaccgagacccggcuug

SEQ ID NO: 1396364 - RNA, 19 nt, Artificial Sequence
  Description of Artificial Sequence: Synthetic oligonucleotide
cauuuagacuugaaagaag

SEQ ID NO: 1396365 - RNA, 19 nt, Artificial Sequence
  Description of Artificial Sequence: Synthetic oligonucleotide
ucugcgaucugcagaaaga

SEQ ID NO: 1396366 - RNA, 19 nt, Artificial Sequence
  Description of Artificial Sequence: Synthetic oligonucleotide
cagaaccuuagacugauac

SEQ ID NO: 1396367 - RNA, 19 nt, Artificial Sequence
  Description of Artificial Sequence: Synthetic oligonucleotide
ugugcuaugugccuuccaa

SEQ ID NO: 1396368 - RNA, 19 nt, Artificial Sequence
  Description of Artificial Sequence: Synthetic oligonucleotide
gaacuuuagauuucuuaca

SEQ ID NO: 1396369 - RNA, 19 nt, Artificial Sequence
  Description of Artificial Sequence: Synthetic oligonucleotide
gaaagaugugcagacacac

SEQ ID NO: 1396370 - RNA, 19 nt, Artificial Sequence
  Description of Artificial Sequence: Synthetic oligonucleotide
gaagaggaucugcugcucg

SEQ ID NO: 1396371 - RNA, 19 nt, Artificial Sequence
  Description of Artificial Sequence: Synthetic oligonucleotide
acuacugacaugaaccgag

SEQ ID NO: 1396372 - RNA, 19 nt, Artificial Sequence
  Description of Artificial Sequence: Synthetic oligonucleotide
aauggguaaaguaauucaa

SEQ ID NO: 1396373 - RNA, 19 nt, Artificial Sequence
  Description of Artificial Sequence: Synthetic oligonucleotide
ccuagaacaaccuaaagga

SEQ ID NO: 1396374 - RNA, 19 nt, Artificial Sequence
  Description of Artificial Sequence: Synthetic oligonucleotide
agcuauucaaugcugcaga

SEQ ID NO: 1396375 - RNA, 19 nt, Artificial Sequence
  Description of Artificial Sequence: Synthetic oligonucleotide
ugucuugaaccaucaaaug

SEQ ID NO: 1396376 - RNA, 19 nt, Artificial Sequence
  Description of Artificial Sequence: Synthetic oligonucleotide
ucauaauagaugauccauu

SEQ ID NO: 1396377 - RNA, 19 nt, Artificial Sequence
  Description of Artificial Sequence: Synthetic oligonucleotide
uggagcuauucaaugcugc

SEQ ID NO: 1396378 - RNA, 19 nt, Artificial Sequence
  Description of Artificial Sequence: Synthetic oligonucleotide
uaagucucuagagggacag

SEQ ID NO: 1396379 - RNA, 19 nt, Artificial Sequence
  Description of Artificial Sequence: Synthetic oligonucleotide
auauauaagauaggauucu

SEQ ID NO: 1396380 - RNA, 19 nt, Artificial Sequence
  Description of Artificial Sequence: Synthetic oligonucleotide
guauuauauauaagauagg

SEQ ID NO: 1396381 - RNA, 19 nt, Artificial Sequence
  Description of Artificial Sequence: Synthetic oligonucleotide
ugaauggguaaaguaauuc

SEQ ID NO: 1396382 - RNA, 19 nt, Artificial Sequence
  Description of Artificial Sequence: Synthetic oligonucleotide
aaauuccuaacacucccua

SEQ ID NO: 1396383 - RNA, 19 nt, Artificial Sequence
  Description of Artificial Sequence: Synthetic oligonucleotide
auauaagauaggauucuag

SEQ ID NO: 1396384 - RNA, 19 nt, Artificial Sequence
  Description of Artificial Sequence: Synthetic oligonucleotide
auaggauucuaguaggcua

SEQ ID NO: 1396385 - RNA, 19 nt, Artificial Sequence
  Description of Artificial Sequence: Synthetic oligonucleotide
agucauaauagaugaucca

SEQ ID NO: 1396386 - RNA, 19 nt, Artificial Sequence
  Description of Artificial Sequence: Synthetic oligonucleotide
ugucucagaaccgucuucc

SEQ ID NO: 1396387 - RNA, 19 nt, Artificial Sequence
  Description of Artificial Sequence: Synthetic oligonucleotide
guuguuuccgugaaucugc

SEQ ID NO: 1396388 - RNA, 19 nt, Artificial Sequence
  Description of Artificial Sequence: Synthetic oligonucleotide
uuaagguccugacucguuc

SEQ ID NO: 1396389 - RNA, 19 nt, Artificial Sequence
  Description of Artificial Sequence: Synthetic oligonucleotide
aacuggagucagcuuuacg

SEQ ID NO: 1396390 - RNA, 19 nt, Artificial Sequence
  Description of Artificial Sequence: Synthetic oligonucleotide
uauaaucaguuugagggau

SEQ ID NO: 1396391 - RNA, 19 nt, Artificial Sequence
  Description of Artificial Sequence: Synthetic oligonucleotide
gguaucucuagaaaguaag

SEQ ID NO: 1396392 - RNA, 19 nt, Artificial Sequence
  Description of Artificial Sequence: Synthetic oligonucleotide
ugaaaacguuagcaaguug

SEQ ID NO: 1396393 - RNA, 19 nt, Artificial Sequence
  Description of Artificial Sequence: Synthetic oligonucleotide
ucauaauaguuaacacacu

SEQ ID NO: 1396394 - RNA, 19 nt, Artificial Sequence
  Description of Artificial Sequence: Synthetic oligonucleotide
aggauggagcuauucaaug

SEQ ID NO: 1396395 - RNA, 19 nt, Artificial Sequence
  Description of Artificial Sequence: Synthetic oligonucleotide
cugaaagcuaguugccagg

SEQ ID NO: 1396396 - RNA, 19 nt, Artificial Sequence
  Description of Artificial Sequence: Synthetic oligonucleotide
cccuagaacaaccuaaagg

SEQ ID NO: 1396397 - RNA, 19 nt, Artificial Sequence
  Description of Artificial Sequence: Synthetic oligonucleotide
gugccuuccaaauagugca

SEQ ID NO: 1396398 - RNA, 19 nt, Artificial Sequence
  Description of Artificial Sequence: Synthetic oligonucleotide
uacaccuuuggggaacugg

SEQ ID NO: 1396399 - RNA, 19 nt, Artificial Sequence
  Description of Artificial Sequence: Synthetic oligonucleotide
gagagcaugucuugaacca

SEQ ID NO: 1396400 - RNA, 19 nt, Artificial Sequence
  Description of Artificial Sequence: Synthetic oligonucleotide
gaaccuuagacugauaccu

SEQ ID NO: 1396401 - RNA, 19 nt, Artificial Sequence
  Description of Artificial Sequence: Synthetic oligonucleotide
gaagucaguuagcuuauga

SEQ ID NO: 1396402 - RNA, 19 nt, Artificial Sequence
  Description of Artificial Sequence: Synthetic oligonucleotide
aucaagcccaaagagaaga

SEQ ID NO: 1396403 - RNA, 19 nt, Artificial Sequence
  Description of Artificial Sequence: Synthetic oligonucleotide
aacuccacggccucugcga

SEQ ID NO: 1396404 - RNA, 19 nt, Artificial Sequence
  Description of Artificial Sequence: Synthetic oligonucleotide
auaggcgggcauuggaguc

SEQ ID NO: 1396405 - RNA, 19 nt, Artificial Sequence
  Description of Artificial Sequence: Synthetic oligonucleotide
accgagacccggcuugugc

SEQ ID NO: 1396406 - RNA, 19 nt, Artificial Sequence
  Description of Artificial Sequence: Synthetic oligonucleotide
guucuguacaccaccaacc

SEQ ID NO: 1396407 - RNA, 19 nt, Artificial Sequence
  Description of Artificial Sequence: Synthetic oligonucleotide
augauccauuucuuacuac

SEQ ID NO: 1396408 - RNA, 19 nt, Artificial Sequence
  Description of Artificial Sequence: Synthetic oligonucleotide
cuagagggacagcugaaag

SEQ ID NO: 1396409 - RNA, 19 nt, Artificial Sequence
  Description of Artificial Sequence: Synthetic oligonucleotide
agaaucaagcccaaagaga

SEQ ID NO: 1396410 - RNA, 19 nt, Artificial Sequence
  Description of Artificial Sequence: Synthetic oligonucleotide
cucgaguacuugaagucag

SEQ ID NO: 1396411 - RNA, 19 nt, Artificial Sequence
  Description of Artificial Sequence: Synthetic oligonucleotide
cacuuuaugggaguaguug

SEQ ID NO: 1396412 - RNA, 19 nt, Artificial Sequence
  Description of Artificial Sequence: Synthetic oligonucleotide
aagaggaucugcugcucga

SEQ ID NO: 1396413 - RNA, 19 nt, Artificial Sequence
  Description of Artificial Sequence: Synthetic oligonucleotide
guuugagggauguacccac

SEQ ID NO: 1396414 - RNA, 19 nt, Artificial Sequence
  Description of Artificial Sequence: Synthetic oligonucleotide
agcuuuacgacaaucacuu

SEQ ID NO: 1396415 - RNA, 19 nt, Artificial Sequence
  Description of Artificial Sequence: Synthetic oligonucleotide
aguuguuuccgugaaucug

SEQ ID NO: 1396416 - RNA, 19 nt, Artificial Sequence
  Description of Artificial Sequence: Synthetic oligonucleotide
ugcucgaguacuugaaguc

SEQ ID NO: 1396417 - RNA, 19 nt, Artificial Sequence
  Description of Artificial Sequence: Synthetic oligonucleotide
auagaugauccauuucuua

SEQ ID NO: 1396418 - RNA, 19 nt, Artificial Sequence
  Description of Artificial Sequence: Synthetic oligonucleotide
ugggucaagugccuaccag

SEQ ID NO: 1396419 - RNA, 19 nt, Artificial Sequence
  Description of Artificial Sequence: Synthetic oligonucleotide
uuaugggaguaguuguuuc

SEQ ID NO: 1396420 - RNA, 19 nt, Artificial Sequence
  Description of Artificial Sequence: Synthetic oligonucleotide
gauggagcuauucaaugcu

SEQ ID NO: 1396421 - RNA, 19 nt, Artificial Sequence
  Description of Artificial Sequence: Synthetic oligonucleotide
cuggagucagcuuuacgac

SEQ ID NO: 1396422 - RNA, 19 nt, Artificial Sequence
  Description of Artificial Sequence: Synthetic oligonucleotide
uccgugaaucugcucuggg

SEQ ID NO: 1396423 - RNA, 19 nt, Artificial Sequence
  Description of Artificial Sequence: Synthetic oligonucleotide
ugcgaucugcagaaagaug

SEQ ID NO: 1396424 - RNA, 19 nt, Artificial Sequence
  Description of Artificial Sequence: Synthetic oligonucleotide
aauagugcagaugggucaa

SEQ ID NO: 1396425 - RNA, 19 nt, Artificial Sequence
  Description of Artificial Sequence: Synthetic oligonucleotide
cuuagagugguuggccugg

SEQ ID NO: 1396426 - RNA, 19 nt, Artificial Sequence
  Description of Artificial Sequence: Synthetic oligonucleotide
ucccuagaacaaccuaaag

SEQ ID NO: 1396427 - RNA, 19 nt, Artificial Sequence
  Description of Artificial Sequence: Synthetic oligonucleotide
uuaacacacuuaugugugu

SEQ ID NO: 1396428 - RNA, 19 nt, Artificial Sequence
  Description of Artificial Sequence: Synthetic oligonucleotide
uguguguucuguacaccac

SEQ ID NO: 1396429 - RNA, 19 nt, Artificial Sequence
  Description of Artificial Sequence: Synthetic oligonucleotide
gagcuauucaaugcugcag

SEQ ID NO: 1396430 - RNA, 19 nt, Artificial Sequence
  Description of Artificial Sequence: Synthetic oligonucleotide
aaacguuagcaaguugaga

SEQ ID NO: 1396431 - RNA, 19 nt, Artificial Sequence
  Description of Artificial Sequence: Synthetic oligonucleotide
cuauaaucaguuugaggga

SEQ ID NO: 1396432 - RNA, 19 nt, Artificial Sequence
  Description of Artificial Sequence: Synthetic oligonucleotide
uauauaagauaggauucua

SEQ ID NO: 1396433 - RNA, 19 nt, Artificial Sequence
  Description of Artificial Sequence: Synthetic oligonucleotide
uucggaagaggaucugcug

SEQ ID NO: 1396434 - RNA, 19 nt, Artificial Sequence
  Description of Artificial Sequence: Synthetic oligonucleotide
guaaaguaauucaaacaga

SEQ ID NO: 1396435 - RNA, 19 nt, Artificial Sequence
  Description of Artificial Sequence: Synthetic oligonucleotide
guguguucuguacaccacc

SEQ ID NO: 1396436 - RNA, 19 nt, Artificial Sequence
  Description of Artificial Sequence: Synthetic oligonucleotide
aacagcuaggcugucugga

SEQ ID NO: 1396437 - RNA, 19 nt, Artificial Sequence
  Description of Artificial Sequence: Synthetic oligonucleotide
agauuucuuacaucaguua

SEQ ID NO: 1396438 - RNA, 19 nt, Artificial Sequence
  Description of Artificial Sequence: Synthetic oligonucleotide
gaacagcuaggcugucugg

SEQ ID NO: 1396439 - RNA, 19 nt, Artificial Sequence
  Description of Artificial Sequence: Synthetic oligonucleotide
acguuagcaaguugagaug

SEQ ID NO: 1396440 - RNA, 19 nt, Artificial Sequence
  Description of Artificial Sequence: Synthetic oligonucleotide
gggucaagugccuaccagg

SEQ ID NO: 1396441 - RNA, 19 nt, Artificial Sequence
  Description of Artificial Sequence: Synthetic oligonucleotide
agucucuagagggacagcu

SEQ ID NO: 1396442 - RNA, 19 nt, Artificial Sequence
  Description of Artificial Sequence: Synthetic oligonucleotide
caucaguuaagguccugac

SEQ ID NO: 1396443 - RNA, 19 nt, Artificial Sequence
  Description of Artificial Sequence: Synthetic oligonucleotide
ugagaugauuaaacauauc

SEQ ID NO: 1396444 - RNA, 19 nt, Artificial Sequence
  Description of Artificial Sequence: Synthetic oligonucleotide
uaugaacauaaugguugcc

SEQ ID NO: 1396445 - RNA, 19 nt, Artificial Sequence
  Description of Artificial Sequence: Synthetic oligonucleotide
ggauggagcuauucaaugc

SEQ ID NO: 1396446 - RNA, 19 nt, Artificial Sequence
  Description of Artificial Sequence: Synthetic oligonucleotide
uaugugccuuccaaauagu

SEQ ID NO: 1396447 - RNA, 19 nt, Artificial Sequence
  Description of Artificial Sequence: Synthetic oligonucleotide
ccucaaaucagaaccuuag

SEQ ID NO: 1396448 - RNA, 19 nt, Artificial Sequence
  Description of Artificial Sequence: Synthetic oligonucleotide
uauguguguucuguacacc

SEQ ID NO: 1396449 - RNA, 19 nt, Artificial Sequence
  Description of Artificial Sequence: Synthetic oligonucleotide
uccauggcggucacuaguc

SEQ ID NO: 1396450 - RNA, 19 nt, Artificial Sequence
  Description of Artificial Sequence: Synthetic oligonucleotide
uucuuacaucaguuaaggu

SEQ ID NO: 1396451 - RNA, 19 nt, Artificial Sequence
  Description of Artificial Sequence: Synthetic oligonucleotide
gggauguacccacuuacag

SEQ ID NO: 1396452 - RNA, 19 nt, Artificial Sequence
  Description of Artificial Sequence: Synthetic oligonucleotide
uguacccacuuacaguauu

SEQ ID NO: 1396453 - RNA, 19 nt, Artificial Sequence
  Description of Artificial Sequence: Synthetic oligonucleotide
auaauaguuaacacacuua

SEQ ID NO: 1396454 - RNA, 19 nt, Artificial Sequence
  Description of Artificial Sequence: Synthetic oligonucleotide
ucuagaaaguaagucucua

SEQ ID NO: 1396455 - RNA, 19 nt, Artificial Sequence
  Description of Artificial Sequence: Synthetic oligonucleotide
cuuagacugauaccuaaaa

SEQ ID NO: 1396456 - RNA, 19 nt, Artificial Sequence
  Description of Artificial Sequence: Synthetic oligonucleotide
cucugcgaucugcagaaag

SEQ ID NO: 1396457 - RNA, 19 nt, Artificial Sequence
  Description of Artificial Sequence: Synthetic oligonucleotide
aaucagaaccuuagacuga

SEQ ID NO: 1396458 - RNA, 19 nt, Artificial Sequence
  Description of Artificial Sequence: Synthetic oligonucleotide
aaggauggagcuauucaau

SEQ ID NO: 1396459 - RNA, 19 nt, Artificial Sequence
  Description of Artificial Sequence: Synthetic oligonucleotide
aagucucuagagggacagc

SEQ ID NO: 1396460 - RNA, 19 nt, Artificial Sequence
  Description of Artificial Sequence: Synthetic oligonucleotide
gaugggucaagugccuacc

SEQ ID NO: 1396461 - RNA, 19 nt, Artificial Sequence
  Description of Artificial Sequence: Synthetic oligonucleotide
accuaaaggauggagcuau

SEQ ID NO: 1396462 - RNA, 19 nt, Artificial Sequence
  Description of Artificial Sequence: Synthetic oligonucleotide
uuuaugggaguaguuguuu

SEQ ID NO: 1396463 - RNA, 19 nt, Artificial Sequence
  Description of Artificial Sequence: Synthetic oligonucleotide
uucccgggaaacuccaagu

SEQ ID NO: 1396464 - RNA, 19 nt, Artificial Sequence
  Description of Artificial Sequence: Synthetic oligonucleotide
ugcagcgucgguucagcca

SEQ ID NO: 1396465 - RNA, 19 nt, Artificial Sequence
  Description of Artificial Sequence: Synthetic oligonucleotide
uuugagggauguacccacu

SEQ ID NO: 1396466 - RNA, 19 nt, Artificial Sequence
  Description of Artificial Sequence: Synthetic oligonucleotide
uuacaucaguuaagguccu

SEQ ID NO: 1396467 - RNA, 19 nt, Artificial Sequence
  Description of Artificial Sequence: Synthetic oligonucleotide
cuucaggccucuccguggg

SEQ ID NO: 1396468 - RNA, 19 nt, Artificial Sequence
  Description of Artificial Sequence: Synthetic oligonucleotide
aaccgucuucccgggaaac

SEQ ID NO: 1396469 - RNA, 19 nt, Artificial Sequence
  Description of Artificial Sequence: Synthetic oligonucleotide
cagggacaaaacuggaguc

SEQ ID NO: 1396470 - RNA, 19 nt, Artificial Sequence
  Description of Artificial Sequence: Synthetic oligonucleotide
cauaauaguuaacacacuu

SEQ ID NO: 1396471 - RNA, 19 nt, Artificial Sequence
  Description of Artificial Sequence: Synthetic oligonucleotide
ugagggauguacccacuua

SEQ ID NO: 1396472 - RNA, 19 nt, Artificial Sequence
  Description of Artificial Sequence: Synthetic oligonucleotide
agguacaccuuuggggaac

SEQ ID NO: 1396473 - RNA, 19 nt, Artificial Sequence
  Description of Artificial Sequence: Synthetic oligonucleotide
aguuugagggauguaccca

SEQ ID NO: 1396474 - RNA, 19 nt, Artificial Sequence
  Description of Artificial Sequence: Synthetic oligonucleotide
augauuaaacauaucuaua

SEQ ID NO: 1396475 - RNA, 19 nt, Artificial Sequence
  Description of Artificial Sequence: Synthetic oligonucleotide
ggucaagugccuaccaggg

SEQ ID NO: 1396476 - RNA, 19 nt, Artificial Sequence
  Description of Artificial Sequence: Synthetic oligonucleotide
cagcugaaagcuaguugcc

SEQ ID NO: 1396477 - RNA, 19 nt, Artificial Sequence
  Description of Artificial Sequence: Synthetic oligonucleotide
aaaacuggagucagcuuua

SEQ ID NO: 1396478 - RNA, 19 nt, Artificial Sequence
  Description of Artificial Sequence: Synthetic oligonucleotide
ucccgggaaacuccaaguc

SEQ ID NO: 1396479 - RNA, 19 nt, Artificial Sequence
  Description of Artificial Sequence: Synthetic oligonucleotide
agggacaaaacuggaguca

SEQ ID NO: 1396480 - RNA, 19 nt, Artificial Sequence
  Description of Artificial Sequence: Synthetic oligonucleotide
caaccuaaaggauggagcu

SEQ ID NO: 1396481 - RNA, 19 nt, Artificial Sequence
  Description of Artificial Sequence: Synthetic oligonucleotide
cauaauagaugauccauuu

SEQ ID NO: 1396482 - RNA, 19 nt, Artificial Sequence
  Description of Artificial Sequence: Synthetic oligonucleotide
ucgaguacuugaagucagu

SEQ ID NO: 1396483 - RNA, 19 nt, Artificial Sequence
  Description of Artificial Sequence: Synthetic oligonucleotide
uaacacucccuagaacaac

SEQ ID NO: 1396484 - RNA, 19 nt, Artificial Sequence
  Description of Artificial Sequence: Synthetic oligonucleotide
gcagcgucgguucagccag

SEQ ID NO: 1396485 - RNA, 19 nt, Artificial Sequence
  Description of Artificial Sequence: Synthetic oligonucleotide
cauaauugaagaaguuagu

SEQ ID NO: 1396486 - RNA, 19 nt, Artificial Sequence
  Description of Artificial Sequence: Synthetic oligonucleotide
guagacaagguggcuucgg

SEQ ID NO: 1396487 - RNA, 19 nt, Artificial Sequence
  Description of Artificial Sequence: Synthetic oligonucleotide
acucccuagaacaaccuaa

SEQ ID NO: 1396488 - RNA, 19 nt, Artificial Sequence
  Description of Artificial Sequence: Synthetic oligonucleotide
uuccgugaaucugcucugg

SEQ ID NO: 1396489 - RNA, 19 nt, Artificial Sequence
  Description of Artificial Sequence: Synthetic oligonucleotide
gaaagcuaguugccaggca

SEQ ID NO: 1396490 - RNA, 19 nt, Artificial Sequence
  Description of Artificial Sequence: Synthetic oligonucleotide
gaguaguuguuuccgugaa

SEQ ID NO: 1396491 - RNA, 19 nt, Artificial Sequence
  Description of Artificial Sequence: Synthetic oligonucleotide
gagugcugaauggguaaag

SEQ ID NO: 1396492 - RNA, 19 nt, Artificial Sequence
  Description of Artificial Sequence: Synthetic oligonucleotide
cccugguaucucuagaaag

SEQ ID NO: 1396493 - RNA, 19 nt, Artificial Sequence
  Description of Artificial Sequence: Synthetic oligonucleotide
augaaaacguuagcaaguu

SEQ ID NO: 1396494 - RNA, 19 nt, Artificial Sequence
  Description of Artificial Sequence: Synthetic oligonucleotide
cucaaaucagaaccuuaga

SEQ ID NO: 1396495 - RNA, 19 nt, Artificial Sequence
  Description of Artificial Sequence: Synthetic oligonucleotide
cuaacacucccuagaacaa

SEQ ID NO: 1396496 - RNA, 19 nt, Artificial Sequence
  Description of Artificial Sequence: Synthetic oligonucleotide
uccugacucguuccaucug

SEQ ID NO: 1396497 - RNA, 19 nt, Artificial Sequence
  Description of Artificial Sequence: Synthetic oligonucleotide
ugggaguaguuguuuccgu

SEQ ID NO: 1396498 - RNA, 19 nt, Artificial Sequence
  Description of Artificial Sequence: Synthetic oligonucleotide
auaaucaguuugagggaug

SEQ ID NO: 1396499 - RNA, 19 nt, Artificial Sequence
  Description of Artificial Sequence: Synthetic oligonucleotide
acuugaagucaguuagcuu

SEQ ID NO: 1396500 - RNA, 19 nt, Artificial Sequence
  Description of Artificial Sequence: Synthetic oligonucleotide
cugcagacuaugacacuac

SEQ ID NO: 1396501 - RNA, 19 nt, Artificial Sequence
  Description of Artificial Sequence: Synthetic oligonucleotide
uugagggauguacccacuu

SEQ ID NO: 1396502 - RNA, 19 nt, Artificial Sequence
  Description of Artificial Sequence: Synthetic oligonucleotide
ggaguaguuguuuccguga

SEQ ID NO: 1396503 - RNA, 19 nt, Artificial Sequence
  Description of Artificial Sequence: Synthetic oligonucleotide
gucauaauagaugauccau

SEQ ID NO: 1396504 - RNA, 19 nt, Artificial Sequence
  Description of Artificial Sequence: Synthetic oligonucleotide
ugacucguuccaucugagu

SEQ ID NO: 1396505 - RNA, 19 nt, Artificial Sequence
  Description of Artificial Sequence: Synthetic oligonucleotide
gggaguaguuguuuccgug

SEQ ID NO: 1396506 - RNA, 19 nt, Artificial Sequence
  Description of Artificial Sequence: Synthetic oligonucleotide
gggaacuuuagauuucuua

SEQ ID NO: 1396507 - RNA, 19 nt, Artificial Sequence
  Description of Artificial Sequence: Synthetic oligonucleotide
uccucaaauacagcauuuu

SEQ ID NO: 1396508 - RNA, 19 nt, Artificial Sequence
  Description of Artificial Sequence: Synthetic oligonucleotide
guaaacaggggugggaacu

SEQ ID NO: 1396509 - RNA, 19 nt, Artificial Sequence
  Description of Artificial Sequence: Synthetic oligonucleotide
agcgggaccgcugucucag

SEQ ID NO: 1396510 - RNA, 19 nt, Artificial Sequence
  Description of Artificial Sequence: Synthetic oligonucleotide
uugugcuaugugccuucca

SEQ ID NO: 1396511 - RNA, 19 nt, Artificial Sequence
  Description of Artificial Sequence: Synthetic oligonucleotide
ugagugcugaauggguaaa

SEQ ID NO: 1396512 - RNA, 19 nt, Artificial Sequence
  Description of Artificial Sequence: Synthetic oligonucleotide
ccggcuugugcuaugugcc

SEQ ID NO: 1396513 - RNA, 19 nt, Artificial Sequence
  Description of Artificial Sequence: Synthetic oligonucleotide
aguccccaacuuugaccac

SEQ ID NO: 1396514 - RNA, 19 nt, Artificial Sequence
  Description of Artificial Sequence: Synthetic oligonucleotide
gugcugaauggguaaagua

SEQ ID NO: 1396515 - RNA, 19 nt, Artificial Sequence
  Description of Artificial Sequence: Synthetic oligonucleotide
cuaugacacuacugacaug

SEQ ID NO: 1396516 - RNA, 19 nt, Artificial Sequence
  Description of Artificial Sequence: Synthetic oligonucleotide
ggugaaaucuaaacuuaga

SEQ ID NO: 1396517 - RNA, 19 nt, Artificial Sequence
  Description of Artificial Sequence: Synthetic oligonucleotide
augggucaagugccuacca

SEQ ID NO: 1396518 - RNA, 19 nt, Artificial Sequence
  Description of Artificial Sequence: Synthetic oligonucleotide
aaccuaaaggauggagcua

SEQ ID NO: 1396519 - RNA, 19 nt, Artificial Sequence
  Description of Artificial Sequence: Synthetic oligonucleotide
gcuauucaaugcugcagac

SEQ ID NO: 1396520 - RNA, 19 nt, Artificial Sequence
  Description of Artificial Sequence: Synthetic oligonucleotide
agaugugcagacacacacu

SEQ ID NO: 1396521 - RNA, 19 nt, Artificial Sequence
  Description of Artificial Sequence: Synthetic oligonucleotide
gaaggagagagcaugucuu

SEQ ID NO: 1396522 - RNA, 19 nt, Artificial Sequence
  Description of Artificial Sequence: Synthetic oligonucleotide
acccugguaucucuagaaa

SEQ ID NO: 1396523 - RNA, 19 nt, Artificial Sequence
  Description of Artificial Sequence: Synthetic oligonucleotide
acaggggugggaacuuuag

SEQ ID NO: 1396524 - RNA, 19 nt, Artificial Sequence
  Description of Artificial Sequence: Synthetic oligonucleotide
accgcugucucagaaccgu

SEQ ID NO: 1396525 - RNA, 19 nt, Artificial Sequence
  Description of Artificial Sequence: Synthetic oligonucleotide
gcugcucgaguacuugaag

SEQ ID NO: 1396526 - RNA, 19 nt, Artificial Sequence
  Description of Artificial Sequence: Synthetic oligonucleotide
uacccacuuacaguauuau

SEQ ID NO: 1396527 - RNA, 19 nt, Artificial Sequence
  Description of Artificial Sequence: Synthetic oligonucleotide
acccacuuacaguauuaua

SEQ ID NO: 1396528 - RNA, 19 nt, Artificial Sequence
  Description of Artificial Sequence: Synthetic oligonucleotide
guuuauggcuucaggccuc

SEQ ID NO: 1396529 - RNA, 19 nt, Artificial Sequence
  Description of Artificial Sequence: Synthetic oligonucleotide
cacuuacaguauuauauau

SEQ ID NO: 1396530 - RNA, 19 nt, Artificial Sequence
  Description of Artificial Sequence: Synthetic oligonucleotide
cccacuuacaguauuauau

SEQ ID NO: 1396531 - RNA, 19 nt, Artificial Sequence
  Description of Artificial Sequence: Synthetic oligonucleotide
caagugccuaccagggaca

SEQ ID NO: 1396532 - RNA, 19 nt, Artificial Sequence
  Description of Artificial Sequence: Synthetic oligonucleotide
cagcuuuacgacaaucacu

SEQ ID NO: 1396533 - RNA, 19 nt, Artificial Sequence
  Description of Artificial Sequence: Synthetic oligonucleotide
ucccauuauuggagguaaa

SEQ ID NO: 1396534 - RNA, 19 nt, Artificial Sequence
  Description of Artificial Sequence: Synthetic oligonucleotide
cuacugacaugaaccgaga

SEQ ID NO: 1396535 - RNA, 19 nt, Artificial Sequence
  Description of Artificial Sequence: Synthetic oligonucleotide
gcgaucugcagaaagaugu

SEQ ID NO: 1396536 - RNA, 19 nt, Artificial Sequence
  Description of Artificial Sequence: Synthetic oligonucleotide
cuagaacaaccuaaaggau

SEQ ID NO: 1396537 - RNA, 19 nt, Artificial Sequence
  Description of Artificial Sequence: Synthetic oligonucleotide
gaccgcugucucagaaccg

SEQ ID NO: 1396538 - RNA, 19 nt, Artificial Sequence
  Description of Artificial Sequence: Synthetic oligonucleotide
caaacagaaucaagcccaa

SEQ ID NO: 1396539 - RNA, 19 nt, Artificial Sequence
  Description of Artificial Sequence: Synthetic oligonucleotide
cccgggaaacuccaagucc

SEQ ID NO: 1396540 - RNA, 19 nt, Artificial Sequence
  Description of Artificial Sequence: Synthetic oligonucleotide
ggaaggagagagcaugucu

SEQ ID NO: 1396541 - RNA, 19 nt, Artificial Sequence
  Description of Artificial Sequence: Synthetic oligonucleotide
cacccugguaucucuagaa

SEQ ID NO: 1396542 - RNA, 19 nt, Artificial Sequence
  Description of Artificial Sequence: Synthetic oligonucleotide
ggauguacccacuuacagu

SEQ ID NO: 1396543 - RNA, 19 nt, Artificial Sequence
  Description of Artificial Sequence: Synthetic oligonucleotide
cucuagaaaguaagucucu

SEQ ID NO: 1396544 - RNA, 19 nt, Artificial Sequence
  Description of Artificial Sequence: Synthetic oligonucleotide
ccgugaaucugcucugggc

SEQ ID NO: 1396545 - RNA, 19 nt, Artificial Sequence
  Description of Artificial Sequence: Synthetic oligonucleotide
cugcucgaguacuugaagu

SEQ ID NO: 1396546 - RNA, 19 nt, Artificial Sequence
  Description of Artificial Sequence: Synthetic oligonucleotide
uguccacuuuaugggagua

SEQ ID NO: 1396547 - RNA, 19 nt, Artificial Sequence
  Description of Artificial Sequence: Synthetic oligonucleotide
ucagaaccuuagacugaua

SEQ ID NO: 1396548 - RNA, 19 nt, Artificial Sequence
  Description of Artificial Sequence: Synthetic oligonucleotide
aaacaggggugggaacuuu

SEQ ID NO: 1396549 - RNA, 19 nt, Artificial Sequence
  Description of Artificial Sequence: Synthetic oligonucleotide
ccaaguccucaaauacagc

SEQ ID NO: 1396550 - RNA, 19 nt, Artificial Sequence
  Description of Artificial Sequence: Synthetic oligonucleotide
ggugaagaauauguuggaa

SEQ ID NO: 1396551 - RNA, 19 nt, Artificial Sequence
  Description of Artificial Sequence: Synthetic oligonucleotide
ggagucagcuuuacgacaa

SEQ ID NO: 1396552 - RNA, 19 nt, Artificial Sequence
  Description of Artificial Sequence: Synthetic oligonucleotide
cauaggcgggcauuggagu

SEQ ID NO: 1396553 - RNA, 19 nt, Artificial Sequence
  Description of Artificial Sequence: Synthetic oligonucleotide
aaucacccugguaucucua

SEQ ID NO: 1396554 - RNA, 19 nt, Artificial Sequence
  Description of Artificial Sequence: Synthetic oligonucleotide
accaacccaaauggauuga

SEQ ID NO: 1396555 - RNA, 19 nt, Artificial Sequence
  Description of Artificial Sequence: Synthetic oligonucleotide
gcuaguugccaggcagugg

SEQ ID NO: 1396556 - RNA, 19 nt, Artificial Sequence
  Description of Artificial Sequence: Synthetic oligonucleotide
cuuuaugggaguaguuguu

SEQ ID NO: 1396557 - RNA, 19 nt, Artificial Sequence
  Description of Artificial Sequence: Synthetic oligonucleotide
augaaccgagacccggcuu

SEQ ID NO: 1396558 - RNA, 19 nt, Artificial Sequence
  Description of Artificial Sequence: Synthetic oligonucleotide
agcgucgguucagccaguc

SEQ ID NO: 1396559 - RNA, 19 nt, Artificial Sequence
  Description of Artificial Sequence: Synthetic oligonucleotide
cucuagagggacagcugaa

SEQ ID NO: 1396560 - RNA, 19 nt, Artificial Sequence
  Description of Artificial Sequence: Synthetic oligonucleotide
auggcggucacuaguccaa

SEQ ID NO: 1396561 - RNA, 19 nt, Artificial Sequence
  Description of Artificial Sequence: Synthetic oligonucleotide
acacucccuagaacaaccu

SEQ ID NO: 1396562 - RNA, 19 nt, Artificial Sequence
  Description of Artificial Sequence: Synthetic oligonucleotide
ggcauaggcgggcauugga

SEQ ID NO: 1396563 - RNA, 19 nt, Artificial Sequence
  Description of Artificial Sequence: Synthetic oligonucleotide
ggcggucacuaguccaaag

SEQ ID NO: 1396564 - RNA, 19 nt, Artificial Sequence
  Description of Artificial Sequence: Synthetic oligonucleotide
gagguagacaagguggcuu

SEQ ID NO: 1396565 - RNA, 19 nt, Artificial Sequence
  Description of Artificial Sequence: Synthetic oligonucleotide
gcucgaguacuugaaguca

SEQ ID NO: 1396566 - RNA, 19 nt, Artificial Sequence
  Description of Artificial Sequence: Synthetic oligonucleotide
cuugguccauggcggucac

SEQ ID NO: 1396567 - RNA, 19 nt, Artificial Sequence
  Description of Artificial Sequence: Synthetic oligonucleotide
guccauggcggucacuagu

SEQ ID NO: 1396568 - RNA, 19 nt, Artificial Sequence
  Description of Artificial Sequence: Synthetic oligonucleotide
guguucuguacaccaccaa

SEQ ID NO: 1396569 - RNA, 19 nt, Artificial Sequence
  Description of Artificial Sequence: Synthetic oligonucleotide
cuauucaaugcugcagacu

SEQ ID NO: 1396570 - RNA, 19 nt, Artificial Sequence
  Description of Artificial Sequence: Synthetic oligonucleotide
guacccacuuacaguauua

SEQ ID NO: 1396571 - RNA, 19 nt, Artificial Sequence
  Description of Artificial Sequence: Synthetic oligonucleotide
cacuacugacaugaaccga

SEQ ID NO: 1396572 - RNA, 19 nt, Artificial Sequence
  Description of Artificial Sequence: Synthetic oligonucleotide
aaccgagacccggcuugug

SEQ ID NO: 1396573 - RNA, 19 nt, Artificial Sequence
  Description of Artificial Sequence: Synthetic oligonucleotide
gcugcagacuaugacacua

SEQ ID NO: 1396574 - RNA, 19 nt, Artificial Sequence
  Description of Artificial Sequence: Synthetic oligonucleotide
ggagucagaacagucugcu

SEQ ID NO: 1396575 - RNA, 19 nt, Artificial Sequence
  Description of Artificial Sequence: Synthetic oligonucleotide
ggugggaacuuuagauuuc

SEQ ID NO: 1396576 - RNA, 19 nt, Artificial Sequence
  Description of Artificial Sequence: Synthetic oligonucleotide
gcagugggcugugugaaca

SEQ ID NO: 1396577 - RNA, 19 nt, Artificial Sequence
  Description of Artificial Sequence: Synthetic oligonucleotide
gggaccgcugucucagaac

SEQ ID NO: 1396578 - RNA, 19 nt, Artificial Sequence
  Description of Artificial Sequence: Synthetic oligonucleotide
agacccggcuugugcuaug

SEQ ID NO: 1396579 - RNA, 19 nt, Artificial Sequence
  Description of Artificial Sequence: Synthetic oligonucleotide
gcugaauggguaaaguaau

SEQ ID NO: 1396580 - RNA, 19 nt, Artificial Sequence
  Description of Artificial Sequence: Synthetic oligonucleotide
ucgguucagccagucuuua

SEQ ID NO: 1396581 - RNA, 19 nt, Artificial Sequence
  Description of Artificial Sequence: Synthetic oligonucleotide
cugaauggguaaaguaauu

SEQ ID NO: 1396582 - RNA, 19 nt, Artificial Sequence
  Description of Artificial Sequence: Synthetic oligonucleotide
cguuagcaaguugagauga

SEQ ID NO: 1396583 - RNA, 19 nt, Artificial Sequence
  Description of Artificial Sequence: Synthetic oligonucleotide
guuagucauaauagaugau

SEQ ID NO: 1396584 - RNA, 19 nt, Artificial Sequence
  Description of Artificial Sequence: Synthetic oligonucleotide
cugguaggagagguagaca

SEQ ID NO: 1396585 - RNA, 19 nt, Artificial Sequence
  Description of Artificial Sequence: Synthetic oligonucleotide
ggccucugcgaucugcaga

SEQ ID NO: 1396586 - RNA, 19 nt, Artificial Sequence
  Description of Artificial Sequence: Synthetic oligonucleotide
ucguuccaucugagugcug

SEQ ID NO: 1396587 - RNA, 19 nt, Artificial Sequence
  Description of Artificial Sequence: Synthetic oligonucleotide
gggguauuucugaguaaac

SEQ ID NO: 1396588 - RNA, 19 nt, Artificial Sequence
  Description of Artificial Sequence: Synthetic oligonucleotide
caugaaccgagacccggcu

SEQ ID NO: 1396589 - RNA, 19 nt, Artificial Sequence
  Description of Artificial Sequence: Synthetic oligonucleotide
gucuucccgggaaacucca

SEQ ID NO: 1396590 - RNA, 19 nt, Artificial Sequence
  Description of Artificial Sequence: Synthetic oligonucleotide
cgucuucccgggaaacucc

SEQ ID NO: 1396591 - RNA, 19 nt, Artificial Sequence
  Description of Artificial Sequence: Synthetic oligonucleotide
acccggcuugugcuaugug

SEQ ID NO: 1396592 - RNA, 19 nt, Artificial Sequence
  Description of Artificial Sequence: Synthetic oligonucleotide
cacucccuagaacaaccua

SEQ ID NO: 1396593 - RNA, 19 nt, Artificial Sequence
  Description of Artificial Sequence: Synthetic oligonucleotide
gagcgggaccgcugucuca

SEQ ID NO: 1396594 - RNA, 19 nt, Artificial Sequence
  Description of Artificial Sequence: Synthetic oligonucleotide
ccauggcggucacuagucc

SEQ ID NO: 1396595 - RNA, 19 nt, Artificial Sequence
  Description of Artificial Sequence: Synthetic oligonucleotide
ggauugauuucagaauuuu

SEQ ID NO: 1396596 - RNA, 19 nt, Artificial Sequence
  Description of Artificial Sequence: Synthetic oligonucleotide
uggcggucacuaguccaaa

SEQ ID NO: 1396597 - RNA, 19 nt, Artificial Sequence
  Description of Artificial Sequence: Synthetic oligonucleotide
ccgggaaacuccaaguccu

SEQ ID NO: 1396598 - RNA, 19 nt, Artificial Sequence
  Description of Artificial Sequence: Synthetic oligonucleotide
cgugaaucugcucugggcu

SEQ ID NO: 1396599 - RNA, 19 nt, Artificial Sequence
  Description of Artificial Sequence: Synthetic oligonucleotide
guacaccuuuggggaacug

SEQ ID NO: 1396600 - RNA, 19 nt, Artificial Sequence
  Description of Artificial Sequence: Synthetic oligonucleotide
cugcgaucugcagaaagau

SEQ ID NO: 1396601 - RNA, 19 nt, Artificial Sequence
  Description of Artificial Sequence: Synthetic oligonucleotide
ggggugggaacuuuagauu

SEQ ID NO: 1396602 - RNA, 19 nt, Artificial Sequence
  Description of Artificial Sequence: Synthetic oligonucleotide
guuagcaaguugagaugau

SEQ ID NO: 1396603 - RNA, 19 nt, Artificial Sequence
  Description of Artificial Sequence: Synthetic oligonucleotide
ccgucuucccgggaaacuc

SEQ ID NO: 1396604 - RNA, 19 nt, Artificial Sequence
  Description of Artificial Sequence: Synthetic oligonucleotide
guuaagguccugacucguu

SEQ ID NO: 1396605 - RNA, 19 nt, Artificial Sequence
  Description of Artificial Sequence: Synthetic oligonucleotide
gagucagcuuuacgacaau

SEQ ID NO: 1396606 - RNA, 19 nt, Artificial Sequence
  Description of Artificial Sequence: Synthetic oligonucleotide
gacccggcuugugcuaugu

SEQ ID NO: 1396607 - RNA, 19 nt, Artificial Sequence
  Description of Artificial Sequence: Synthetic oligonucleotide
ccaccaacccaaauggauu

SEQ ID NO: 1396608 - RNA, 19 nt, Artificial Sequence
  Description of Artificial Sequence: Synthetic oligonucleotide
ggacagcugaaagcuaguu

SEQ ID NO: 1396609 - RNA, 19 nt, Artificial Sequence
  Description of Artificial Sequence: Synthetic oligonucleotide
gcuuuacgacaaucacuuu

SEQ ID NO: 1396610 - RNA, 19 nt, Artificial Sequence
  Description of Artificial Sequence: Synthetic oligonucleotide
ccacuuuaugggaguaguu

SEQ ID NO: 1396611 - RNA, 19 nt, Artificial Sequence
  Description of Artificial Sequence: Synthetic oligonucleotide
cuaggcugucuggaauguu

SEQ ID NO: 1396612 - RNA, 19 nt, Artificial Sequence
  Description of Artificial Sequence: Synthetic oligonucleotide
gcgucgguucagccagucu

SEQ ID NO: 1396613 - RNA, 19 nt, Artificial Sequence
  Description of Artificial Sequence: Synthetic oligonucleotide
gcccucaaaucagaaccuu

SEQ ID NO: 1396614 - RNA, 19 nt, Artificial Sequence
  Description of Artificial Sequence: Synthetic oligonucleotide
cgguucagccagucuuuaa

SEQ ID NO: 1396615 - RNA, 19 nt, Artificial Sequence
  Description of Artificial Sequence: Synthetic oligonucleotide
gcgggaccgcugucucaga

SEQ ID NO: 1396616 - RNA, 19 nt, Artificial Sequence
  Description of Artificial Sequence: Synthetic oligonucleotide
cgagacccggcuugugcua

SEQ ID NO: 1396617 - RNA, 19 nt, Artificial Sequence
  Description of Artificial Sequence: Synthetic oligonucleotide
cagcgucgguucagccagu

SEQ ID NO: 1396618 - RNA, 19 nt, Artificial Sequence
  Description of Artificial Sequence: Synthetic oligonucleotide
uuuaauagaagccaaucgc

SEQ ID NO: 1396619 - RNA, 19 nt, Artificial Sequence
  Description of Artificial Sequence: Synthetic oligonucleotide
uuuuaauagaagccaaucg

SEQ ID NO: 1396620 - RNA, 19 nt, Artificial Sequence
  Description of Artificial Sequence: Synthetic oligonucleotide
aaaacguugagaucaauga

SEQ ID NO: 1396621 - RNA, 19 nt, Artificial Sequence
  Description of Artificial Sequence: Synthetic oligonucleotide
agucauauugcacuuuucc

SEQ ID NO: 1396622 - RNA, 19 nt, Artificial Sequence
  Description of Artificial Sequence: Synthetic oligonucleotide
uauaguugcauugggaucg

SEQ ID NO: 1396623 - RNA, 19 nt, Artificial Sequence
  Description of Artificial Sequence: Synthetic oligonucleotide
guauguuagauauaguugc

SEQ ID NO: 1396624 - RNA, 19 nt, Artificial Sequence
  Description of Artificial Sequence: Synthetic oligonucleotide
uucaguuugguuaagcucu

SEQ ID NO: 1396625 - RNA, 19 nt, Artificial Sequence
  Description of Artificial Sequence: Synthetic oligonucleotide
uguugauguacuuuucucg

SEQ ID NO: 1396626 - RNA, 19 nt, Artificial Sequence
  Description of Artificial Sequence: Synthetic oligonucleotide
aucgucguauucuugaggc

SEQ ID NO: 1396627 - RNA, 19 nt, Artificial Sequence
  Description of Artificial Sequence: Synthetic oligonucleotide
aaacauguagaacugcuca

SEQ ID NO: 1396628 - RNA, 19 nt, Artificial Sequence
  Description of Artificial Sequence: Synthetic oligonucleotide
uuagccgucauaaucacca

SEQ ID NO: 1396629 - RNA, 19 nt, Artificial Sequence
  Description of Artificial Sequence: Synthetic oligonucleotide
uuaauagaagccaaucgcu

SEQ ID NO: 1396630 - RNA, 19 nt, Artificial Sequence
  Description of Artificial Sequence: Synthetic oligonucleotide
uuagauauaguugcauugg

SEQ ID NO: 1396631 - RNA, 19 nt, Artificial Sequence
  Description of Artificial Sequence: Synthetic oligonucleotide
uaaaacguugagaucaaug

SEQ ID NO: 1396632 - RNA, 19 nt, Artificial Sequence
  Description of Artificial Sequence: Synthetic oligonucleotide
aacauguagaacugcucac

SEQ ID NO: 1396633 - RNA, 19 nt, Artificial Sequence
  Description of Artificial Sequence: Synthetic oligonucleotide
cuuccacuggauaugaugg

SEQ ID NO: 1396634 - RNA, 19 nt, Artificial Sequence
  Description of Artificial Sequence: Synthetic oligonucleotide
ucggcuaccaaucuuuucc

SEQ ID NO: 1396635 - RNA, 19 nt, Artificial Sequence
  Description of Artificial Sequence: Synthetic oligonucleotide
aaaugagcgaagcucggag

SEQ ID NO: 1396636 - RNA, 19 nt, Artificial Sequence
  Description of Artificial Sequence: Synthetic oligonucleotide
uauagauuguguuuggaaa

SEQ ID NO: 1396637 - RNA, 19 nt, Artificial Sequence
  Description of Artificial Sequence: Synthetic oligonucleotide
caaaguagugucuggacgg

SEQ ID NO: 1396638 - RNA, 19 nt, Artificial Sequence
  Description of Artificial Sequence: Synthetic oligonucleotide
agcuaaacaaucaagaaca

SEQ ID NO: 1396639 - RNA, 19 nt, Artificial Sequence
  Description of Artificial Sequence: Synthetic oligonucleotide
aauagaagccaaucgcuga

SEQ ID NO: 1396640 - RNA, 19 nt, Artificial Sequence
  Description of Artificial Sequence: Synthetic oligonucleotide
aaacaaucaagaacauagc

SEQ ID NO: 1396641 - RNA, 19 nt, Artificial Sequence
  Description of Artificial Sequence: Synthetic oligonucleotide
acuucuagacuccauuccg

SEQ ID NO: 1396642 - RNA, 19 nt, Artificial Sequence
  Description of Artificial Sequence: Synthetic oligonucleotide
aauccuuauugucaguccu

SEQ ID NO: 1396643 - RNA, 19 nt, Artificial Sequence
  Description of Artificial Sequence: Synthetic oligonucleotide
ucagauugcucuuucggag

SEQ ID NO: 1396644 - RNA, 19 nt, Artificial Sequence
  Description of Artificial Sequence: Synthetic oligonucleotide
gcuaauuucauuauggagc

SEQ ID NO: 1396645 - RNA, 19 nt, Artificial Sequence
  Description of Artificial Sequence: Synthetic oligonucleotide
uaauagaagccaaucgcug

SEQ ID NO: 1396646 - RNA, 19 nt, Artificial Sequence
  Description of Artificial Sequence: Synthetic oligonucleotide
gauccuccaauccuuauug

SEQ ID NO: 1396647 - RNA, 19 nt, Artificial Sequence
  Description of Artificial Sequence: Synthetic oligonucleotide
ucaagaacauagcauacau

SEQ ID NO: 1396648 - RNA, 19 nt, Artificial Sequence
  Description of Artificial Sequence: Synthetic oligonucleotide
caagcgauaggucugggcc

SEQ ID NO: 1396649 - RNA, 19 nt, Artificial Sequence
  Description of Artificial Sequence: Synthetic oligonucleotide
aagcuugagagguauagau

SEQ ID NO: 1396650 - RNA, 19 nt, Artificial Sequence
  Description of Artificial Sequence: Synthetic oligonucleotide
caagugcucaaguugauug

SEQ ID NO: 1396651 - RNA, 19 nt, Artificial Sequence
  Description of Artificial Sequence: Synthetic oligonucleotide
cuaccaaucuuuuccagag

SEQ ID NO: 1396652 - RNA, 19 nt, Artificial Sequence
  Description of Artificial Sequence: Synthetic oligonucleotide
ucucgagucauauugcacu

SEQ ID NO: 1396653 - RNA, 19 nt, Artificial Sequence
  Description of Artificial Sequence: Synthetic oligonucleotide
gaaccaagugcucaaguug

SEQ ID NO: 1396654 - RNA, 19 nt, Artificial Sequence
  Description of Artificial Sequence: Synthetic oligonucleotide
cagccaagcagcaagagug

SEQ ID NO: 1396655 - RNA, 19 nt, Artificial Sequence
  Description of Artificial Sequence: Synthetic oligonucleotide
uugagaucaaugaaguuuu

SEQ ID NO: 1396656 - RNA, 19 nt, Artificial Sequence
  Description of Artificial Sequence: Synthetic oligonucleotide
acacgcucgacuucuagac

SEQ ID NO: 1396657 - RNA, 19 nt, Artificial Sequence
  Description of Artificial Sequence: Synthetic oligonucleotide
aguauguuagauauaguug

SEQ ID NO: 1396658 - RNA, 19 nt, Artificial Sequence
  Description of Artificial Sequence: Synthetic oligonucleotide
aauggagugccaucuguca

SEQ ID NO: 1396659 - RNA, 19 nt, Artificial Sequence
  Description of Artificial Sequence: Synthetic oligonucleotide
auuccuaauguccaucuga

SEQ ID NO: 1396660 - RNA, 19 nt, Artificial Sequence
  Description of Artificial Sequence: Synthetic oligonucleotide
auagcauacauguucucca

SEQ ID NO: 1396661 - RNA, 19 nt, Artificial Sequence
  Description of Artificial Sequence: Synthetic oligonucleotide
uuuguguccaagcgauagg

SEQ ID NO: 1396662 - RNA, 19 nt, Artificial Sequence
  Description of Artificial Sequence: Synthetic oligonucleotide
aaggcuuuagccgucauaa

SEQ ID NO: 1396663 - RNA, 19 nt, Artificial Sequence
  Description of Artificial Sequence: Synthetic oligonucleotide
ugauguacuuuucucggcu

SEQ ID NO: 1396664 - RNA, 19 nt, Artificial Sequence
  Description of Artificial Sequence: Synthetic oligonucleotide
gagguauagauuguguuug

SEQ ID NO: 1396665 - RNA, 19 nt, Artificial Sequence
  Description of Artificial Sequence: Synthetic oligonucleotide
auagauuguguuuggaaau

SEQ ID NO: 1396666 - RNA, 19 nt, Artificial Sequence
  Description of Artificial Sequence: Synthetic oligonucleotide
agauuguguuuggaaaucc

SEQ ID NO: 1396667 - RNA, 19 nt, Artificial Sequence
  Description of Artificial Sequence: Synthetic oligonucleotide
ugauuguugauguacuuuu

SEQ ID NO: 1396668 - RNA, 19 nt, Artificial Sequence
  Description of Artificial Sequence: Synthetic oligonucleotide
aauuccacuuuugugcuga

SEQ ID NO: 1396669 - RNA, 19 nt, Artificial Sequence
  Description of Artificial Sequence: Synthetic oligonucleotide
uucuugaggcugcucaaag

SEQ ID NO: 1396670 - RNA, 19 nt, Artificial Sequence
  Description of Artificial Sequence: Synthetic oligonucleotide
cuagacuccauuccgcagc

SEQ ID NO: 1396671 - RNA, 19 nt, Artificial Sequence
  Description of Artificial Sequence: Synthetic oligonucleotide
gauauaguugcauugggau

SEQ ID NO: 1396672 - RNA, 19 nt, Artificial Sequence
  Description of Artificial Sequence: Synthetic oligonucleotide
gaucgucguauucuugagg

SEQ ID NO: 1396673 - RNA, 19 nt, Artificial Sequence
  Description of Artificial Sequence: Synthetic oligonucleotide
cauagcauacauguucucc

SEQ ID NO: 1396674 - RNA, 19 nt, Artificial Sequence
  Description of Artificial Sequence: Synthetic oligonucleotide
aaugagcgaagcucggaga

SEQ ID NO: 1396675 - RNA, 19 nt, Artificial Sequence
  Description of Artificial Sequence: Synthetic oligonucleotide
gauacaauaccugugcaaa

SEQ ID NO: 1396676 - RNA, 19 nt, Artificial Sequence
  Description of Artificial Sequence: Synthetic oligonucleotide
acaaauaaucagaagcaug

SEQ ID NO: 1396677 - RNA, 19 nt, Artificial Sequence
  Description of Artificial Sequence: Synthetic oligonucleotide
uucaguugcgguaguacac

SEQ ID NO: 1396678 - RNA, 19 nt, Artificial Sequence
  Description of Artificial Sequence: Synthetic oligonucleotide
uguuagauauaguugcauu

SEQ ID NO: 1396679 - RNA, 19 nt, Artificial Sequence
  Description of Artificial Sequence: Synthetic oligonucleotide
acgcucgacuucuagacuc

SEQ ID NO: 1396680 - RNA, 19 nt, Artificial Sequence
  Description of Artificial Sequence: Synthetic oligonucleotide
uuuguugaucagccaagca

SEQ ID NO: 1396681 - RNA, 19 nt, Artificial Sequence
  Description of Artificial Sequence: Synthetic oligonucleotide
acaagcuugagagguauag

SEQ ID NO: 1396682 - RNA, 19 nt, Artificial Sequence
  Description of Artificial Sequence: Synthetic oligonucleotide
augagcgaagcucggagag

SEQ ID NO: 1396683 - RNA, 19 nt, Artificial Sequence
  Description of Artificial Sequence: Synthetic oligonucleotide
agagcaaaguagugucugg

SEQ ID NO: 1396684 - RNA, 19 nt, Artificial Sequence
  Description of Artificial Sequence: Synthetic oligonucleotide
ucugucguagacuccaaaa

SEQ ID NO: 1396685 - RNA, 19 nt, Artificial Sequence
  Description of Artificial Sequence: Synthetic oligonucleotide
ucguuuguguccaagcgau

SEQ ID NO: 1396686 - RNA, 19 nt, Artificial Sequence
  Description of Artificial Sequence: Synthetic oligonucleotide
ugggccuuuaaaacguuga

SEQ ID NO: 1396687 - RNA, 19 nt, Artificial Sequence
  Description of Artificial Sequence: Synthetic oligonucleotide
guuuguguccaagcgauag

SEQ ID NO: 1396688 - RNA, 19 nt, Artificial Sequence
  Description of Artificial Sequence: Synthetic oligonucleotide
aagugcucaaguugauugu

SEQ ID NO: 1396689 - RNA, 19 nt, Artificial Sequence
  Description of Artificial Sequence: Synthetic oligonucleotide
uuccuuuagagcagauuca

SEQ ID NO: 1396690 - RNA, 19 nt, Artificial Sequence
  Description of Artificial Sequence: Synthetic oligonucleotide
ugauuccgggguaacagcu

SEQ ID NO: 1396691 - RNA, 19 nt, Artificial Sequence
  Description of Artificial Sequence: Synthetic oligonucleotide
uuccuaauguccaucugaa

SEQ ID NO: 1396692 - RNA, 19 nt, Artificial Sequence
  Description of Artificial Sequence: Synthetic oligonucleotide
gaguauguuagauauaguu

SEQ ID NO: 1396693 - RNA, 19 nt, Artificial Sequence
  Description of Artificial Sequence: Synthetic oligonucleotide
ugcucaaguugauuguuga

SEQ ID NO: 1396694 - RNA, 19 nt, Artificial Sequence
  Description of Artificial Sequence: Synthetic oligonucleotide
acaugugguaggccgcgcc

SEQ ID NO: 1396695 - RNA, 19 nt, Artificial Sequence
  Description of Artificial Sequence: Synthetic oligonucleotide
ggcuaauuucauuauggag

SEQ ID NO: 1396696 - RNA, 19 nt, Artificial Sequence
  Description of Artificial Sequence: Synthetic oligonucleotide
aguugcauugggaucgucg

SEQ ID NO: 1396697 - RNA, 19 nt, Artificial Sequence
  Description of Artificial Sequence: Synthetic oligonucleotide
aaccaagugcucaaguuga

SEQ ID NO: 1396698 - RNA, 19 nt, Artificial Sequence
  Description of Artificial Sequence: Synthetic oligonucleotide
agacuuuaguuuugaagga

SEQ ID NO: 1396699 - RNA, 19 nt, Artificial Sequence
  Description of Artificial Sequence: Synthetic oligonucleotide
acauggauccuccaauccu

SEQ ID NO: 1396700 - RNA, 19 nt, Artificial Sequence
  Description of Artificial Sequence: Synthetic oligonucleotide
aagcccacauguuuuaaua

SEQ ID NO: 1396701 - RNA, 19 nt, Artificial Sequence
  Description of Artificial Sequence: Synthetic oligonucleotide
cagauugcucuuucggagg

SEQ ID NO: 1396702 - RNA, 19 nt, Artificial Sequence
  Description of Artificial Sequence: Synthetic oligonucleotide
uuuagccgucauaaucacc

SEQ ID NO: 1396703 - RNA, 19 nt, Artificial Sequence
  Description of Artificial Sequence: Synthetic oligonucleotide
ucuagacuccauuccgcag

SEQ ID NO: 1396704 - RNA, 19 nt, Artificial Sequence
  Description of Artificial Sequence: Synthetic oligonucleotide
caauccuuauugucagucc

SEQ ID NO: 1396705 - RNA, 19 nt, Artificial Sequence
  Description of Artificial Sequence: Synthetic oligonucleotide
aggagcucuuccucguagc

SEQ ID NO: 1396706 - RNA, 19 nt, Artificial Sequence
  Description of Artificial Sequence: Synthetic oligonucleotide
uucuagacuccauuccgca

SEQ ID NO: 1396707 - RNA, 19 nt, Artificial Sequence
  Description of Artificial Sequence: Synthetic oligonucleotide
agguauagauuguguuugg

SEQ ID NO: 1396708 - RNA, 19 nt, Artificial Sequence
  Description of Artificial Sequence: Synthetic oligonucleotide
aguccggcuaauuucauua

SEQ ID NO: 1396709 - RNA, 19 nt, Artificial Sequence
  Description of Artificial Sequence: Synthetic oligonucleotide
ugucucgagucauauugca

SEQ ID NO: 1396710 - RNA, 19 nt, Artificial Sequence
  Description of Artificial Sequence: Synthetic oligonucleotide
uuguuuggcagacucguuu

SEQ ID NO: 1396711 - RNA, 19 nt, Artificial Sequence
  Description of Artificial Sequence: Synthetic oligonucleotide
gcuuaaucuucaccaaugg

SEQ ID NO: 1396712 - RNA, 19 nt, Artificial Sequence
  Description of Artificial Sequence: Synthetic oligonucleotide
aguagagugugcuccacaa

SEQ ID NO: 1396713 - RNA, 19 nt, Artificial Sequence
  Description of Artificial Sequence: Synthetic oligonucleotide
uccggcuaauuucauuaug

SEQ ID NO: 1396714 - RNA, 19 nt, Artificial Sequence
  Description of Artificial Sequence: Synthetic oligonucleotide
ggucugggccuuuaaaacg

SEQ ID NO: 1396715 - RNA, 19 nt, Artificial Sequence
  Description of Artificial Sequence: Synthetic oligonucleotide
uugagagguauagauugug

SEQ ID NO: 1396716 - RNA, 19 nt, Artificial Sequence
  Description of Artificial Sequence: Synthetic oligonucleotide
ucuuccucguagcggagca

SEQ ID NO: 1396717 - RNA, 19 nt, Artificial Sequence
  Description of Artificial Sequence: Synthetic oligonucleotide
caauguuaauucugcauca

SEQ ID NO: 1396718 - RNA, 19 nt, Artificial Sequence
  Description of Artificial Sequence: Synthetic oligonucleotide
agcccgagacaccccaucc

SEQ ID NO: 1396719 - RNA, 19 nt, Artificial Sequence
  Description of Artificial Sequence: Synthetic oligonucleotide
ugaacgguuucuugcuuca

SEQ ID NO: 1396720 - RNA, 19 nt, Artificial Sequence
  Description of Artificial Sequence: Synthetic oligonucleotide
ucccaaaugagcgaagcuc

SEQ ID NO: 1396721 - RNA, 19 nt, Artificial Sequence
  Description of Artificial Sequence: Synthetic oligonucleotide
guauagauuguguuuggaa

SEQ ID NO: 1396722 - RNA, 19 nt, Artificial Sequence
  Description of Artificial Sequence: Synthetic oligonucleotide
uugcgguaguacacgcucg

SEQ ID NO: 1396723 - RNA, 19 nt, Artificial Sequence
  Description of Artificial Sequence: Synthetic oligonucleotide
gaagccaaucgcugauucc

SEQ ID NO: 1396724 - RNA, 19 nt, Artificial Sequence
  Description of Artificial Sequence: Synthetic oligonucleotide
uggagugccaucugucaug

SEQ ID NO: 1396725 - RNA, 19 nt, Artificial Sequence
  Description of Artificial Sequence: Synthetic oligonucleotide
ugaucgugacuuucaguug

SEQ ID NO: 1396726 - RNA, 19 nt, Artificial Sequence
  Description of Artificial Sequence: Synthetic oligonucleotide
uccugaucgugacuuucag

SEQ ID NO: 1396727 - RNA, 19 nt, Artificial Sequence
  Description of Artificial Sequence: Synthetic oligonucleotide
ugcaguccucccaaaugag

SEQ ID NO: 1396728 - RNA, 19 nt, Artificial Sequence
  Description of Artificial Sequence: Synthetic oligonucleotide
aauguuaauucugcaucau

SEQ ID NO: 1396729 - RNA, 19 nt, Artificial Sequence
  Description of Artificial Sequence: Synthetic oligonucleotide
cccaaaugagcgaagcucg

SEQ ID NO: 1396730 - RNA, 19 nt, Artificial Sequence
  Description of Artificial Sequence: Synthetic oligonucleotide
uaggcagagcaaaguagug

SEQ ID NO: 1396731 - RNA, 19 nt, Artificial Sequence
  Description of Artificial Sequence: Synthetic oligonucleotide
agcucggagaguauguuag

SEQ ID NO: 1396732 - RNA, 19 nt, Artificial Sequence
  Description of Artificial Sequence: Synthetic oligonucleotide
uacacgcucgacuucuaga

SEQ ID NO: 1396733 - RNA, 19 nt, Artificial Sequence
  Description of Artificial Sequence: Synthetic oligonucleotide
ucgacuucuagacuccauu

SEQ ID NO: 1396734 - RNA, 19 nt, Artificial Sequence
  Description of Artificial Sequence: Synthetic oligonucleotide
guugcgguaguacacgcuc

SEQ ID NO: 1396735 - RNA, 19 nt, Artificial Sequence
  Description of Artificial Sequence: Synthetic oligonucleotide
ucaguuugguuaagcucug

SEQ ID NO: 1396736 - RNA, 19 nt, Artificial Sequence
  Description of Artificial Sequence: Synthetic oligonucleotide
aaaggcuuuagccgucaua

SEQ ID NO: 1396737 - RNA, 19 nt, Artificial Sequence
  Description of Artificial Sequence: Synthetic oligonucleotide
acauagcauacauguucuc

SEQ ID NO: 1396738 - RNA, 19 nt, Artificial Sequence
  Description of Artificial Sequence: Synthetic oligonucleotide
augucucgagucauauugc

SEQ ID NO: 1396739 - RNA, 19 nt, Artificial Sequence
  Description of Artificial Sequence: Synthetic oligonucleotide
gaacaugugguaggccgcg

SEQ ID NO: 1396740 - RNA, 19 nt, Artificial Sequence
  Description of Artificial Sequence: Synthetic oligonucleotide
cuuuagccgucauaaucac

SEQ ID NO: 1396741 - RNA, 19 nt, Artificial Sequence
  Description of Artificial Sequence: Synthetic oligonucleotide
cuuaaucuucaccaaugga

SEQ ID NO: 1396742 - RNA, 19 nt, Artificial Sequence
  Description of Artificial Sequence: Synthetic oligonucleotide
aaguagugucuggacgggg

SEQ ID NO: 1396743 - RNA, 19 nt, Artificial Sequence
  Description of Artificial Sequence: Synthetic oligonucleotide
uccuccaagcccgucggcg

SEQ ID NO: 1396744 - RNA, 19 nt, Artificial Sequence
  Description of Artificial Sequence: Synthetic oligonucleotide
ugcucaaagguacgcccug

SEQ ID NO: 1396745 - RNA, 19 nt, Artificial Sequence
  Description of Artificial Sequence: Synthetic oligonucleotide
cuuucaguugcgguaguac

SEQ ID NO: 1396746 - RNA, 19 nt, Artificial Sequence
  Description of Artificial Sequence: Synthetic oligonucleotide
uccuuuagagcagauucaa

SEQ ID NO: 1396747 - RNA, 19 nt, Artificial Sequence
  Description of Artificial Sequence: Synthetic oligonucleotide
aacaugugguaggccgcgc

SEQ ID NO: 1396748 - RNA, 19 nt, Artificial Sequence
  Description of Artificial Sequence: Synthetic oligonucleotide
ugcucaccuggguugguag

SEQ ID NO: 1396749 - RNA, 19 nt, Artificial Sequence
  Description of Artificial Sequence: Synthetic oligonucleotide
agauugcucuuucggagga

SEQ ID NO: 1396750 - RNA, 19 nt, Artificial Sequence
  Description of Artificial Sequence: Synthetic oligonucleotide
cugauuccgggguaacagc

SEQ ID NO: 1396751 - RNA, 19 nt, Artificial Sequence
  Description of Artificial Sequence: Synthetic oligonucleotide
guaaccucagacaggacuc

SEQ ID NO: 1396752 - RNA, 19 nt, Artificial Sequence
  Description of Artificial Sequence: Synthetic oligonucleotide
uuccccgcgagcccgagac

SEQ ID NO: 1396753 - RNA, 19 nt, Artificial Sequence
  Description of Artificial Sequence: Synthetic oligonucleotide
guugagaucaaugaaguuu

SEQ ID NO: 1396754 - RNA, 19 nt, Artificial Sequence
  Description of Artificial Sequence: Synthetic oligonucleotide
ugaugcauuuggucaacau

SEQ ID NO: 1396755 - RNA, 19 nt, Artificial Sequence
  Description of Artificial Sequence: Synthetic oligonucleotide
auugucaguccugaucgug

SEQ ID NO: 1396756 - RNA, 19 nt, Artificial Sequence
  Description of Artificial Sequence: Synthetic oligonucleotide
uaguacacgcucgacuucu

SEQ ID NO: 1396757 - RNA, 19 nt, Artificial Sequence
  Description of Artificial Sequence: Synthetic oligonucleotide
caugugguaggccgcgccg

SEQ ID NO: 1396758 - RNA, 19 nt, Artificial Sequence
  Description of Artificial Sequence: Synthetic oligonucleotide
acagcugcgugcaugucuc

SEQ ID NO: 1396759 - RNA, 19 nt, Artificial Sequence
  Description of Artificial Sequence: Synthetic oligonucleotide
cugaacgguuucuugcuuc

SEQ ID NO: 1396760 - RNA, 19 nt, Artificial Sequence
  Description of Artificial Sequence: Synthetic oligonucleotide
ugcgguaguacacgcucga

SEQ ID NO: 1396761 - RNA, 19 nt, Artificial Sequence
  Description of Artificial Sequence: Synthetic oligonucleotide
ucggagaguauguuagaua

SEQ ID NO: 1396762 - RNA, 19 nt, Artificial Sequence
  Description of Artificial Sequence: Synthetic oligonucleotide
gauuguguuuggaaaucca

SEQ ID NO: 1396763 - RNA, 19 nt, Artificial Sequence
  Description of Artificial Sequence: Synthetic oligonucleotide
ugcaguagagugugcucca

SEQ ID NO: 1396764 - RNA, 19 nt, Artificial Sequence
  Description of Artificial Sequence: Synthetic oligonucleotide
ucggcgggaucacugcugc

SEQ ID NO: 1396765 - RNA, 19 nt, Artificial Sequence
  Description of Artificial Sequence: Synthetic oligonucleotide
ggcuuuagccgucauaauc

SEQ ID NO: 1396766 - RNA, 19 nt, Artificial Sequence
  Description of Artificial Sequence: Synthetic oligonucleotide
cauccuccaagcccgucgg

SEQ ID NO: 1396767 - RNA, 19 nt, Artificial Sequence
  Description of Artificial Sequence: Synthetic oligonucleotide
ugcacuuuuccuucagcuu

SEQ ID NO: 1396768 - RNA, 19 nt, Artificial Sequence
  Description of Artificial Sequence: Synthetic oligonucleotide
uguguccaagcgauagguc

SEQ ID NO: 1396769 - RNA, 19 nt, Artificial Sequence
  Description of Artificial Sequence: Synthetic oligonucleotide
auaggucugggccuuuaaa

SEQ ID NO: 1396770 - RNA, 19 nt, Artificial Sequence
  Description of Artificial Sequence: Synthetic oligonucleotide
uugguaggcagagcaaagu

SEQ ID NO: 1396771 - RNA, 19 nt, Artificial Sequence
  Description of Artificial Sequence: Synthetic oligonucleotide
cugaucgugacuuucaguu

SEQ ID NO: 1396772 - RNA, 19 nt, Artificial Sequence
  Description of Artificial Sequence: Synthetic oligonucleotide
uuccgggguaacagcugcg

SEQ ID NO: 1396773 - RNA, 19 nt, Artificial Sequence
  Description of Artificial Sequence: Synthetic oligonucleotide
uccuaauguccaucugaac

SEQ ID NO: 1396774 - RNA, 19 nt, Artificial Sequence
  Description of Artificial Sequence: Synthetic oligonucleotide
gcugcucaaagguacgccc

SEQ ID NO: 1396775 - RNA, 19 nt, Artificial Sequence
  Description of Artificial Sequence: Synthetic oligonucleotide
guguccaagcgauaggucu

SEQ ID NO: 1396776 - RNA, 19 nt, Artificial Sequence
  Description of Artificial Sequence: Synthetic oligonucleotide
aagcccgucggcgggauca

SEQ ID NO: 1396777 - RNA, 19 nt, Artificial Sequence
  Description of Artificial Sequence: Synthetic oligonucleotide
aguuuugaaggaggaaaau

SEQ ID NO: 1396778 - RNA, 19 nt, Artificial Sequence
  Description of Artificial Sequence: Synthetic oligonucleotide
ugguaggccgcgccgggcc

SEQ ID NO: 1396779 - RNA, 19 nt, Artificial Sequence
  Description of Artificial Sequence: Synthetic oligonucleotide
uacuuuucucggcuaccaa

SEQ ID NO: 1396780 - RNA, 19 nt, Artificial Sequence
  Description of Artificial Sequence: Synthetic oligonucleotide
uauugucaguccugaucgu

SEQ ID NO: 1396781 - RNA, 19 nt, Artificial Sequence
  Description of Artificial Sequence: Synthetic oligonucleotide
aaaaggcuuuagccgucau

SEQ ID NO: 1396782 - RNA, 19 nt, Artificial Sequence
  Description of Artificial Sequence: Synthetic oligonucleotide
aguccucccaaaugagcga

SEQ ID NO: 1396783 - RNA, 19 nt, Artificial Sequence
  Description of Artificial Sequence: Synthetic oligonucleotide
auguuagauauaguugcau

SEQ ID NO: 1396784 - RNA, 19 nt, Artificial Sequence
  Description of Artificial Sequence: Synthetic oligonucleotide
guugcauugggaucgucgu

SEQ ID NO: 1396785 - RNA, 19 nt, Artificial Sequence
  Description of Artificial Sequence: Synthetic oligonucleotide
auggagugccaucugucau

SEQ ID NO: 1396786 - RNA, 19 nt, Artificial Sequence
  Description of Artificial Sequence: Synthetic oligonucleotide
cauuccuaauguccaucug

SEQ ID NO: 1396787 - RNA, 19 nt, Artificial Sequence
  Description of Artificial Sequence: Synthetic oligonucleotide
cucguuuguguccaagcga

SEQ ID NO: 1396788 - RNA, 19 nt, Artificial Sequence
  Description of Artificial Sequence: Synthetic oligonucleotide
ucugaacgguuucuugcuu

SEQ ID NO: 1396789 - RNA, 19 nt, Artificial Sequence
  Description of Artificial Sequence: Synthetic oligonucleotide
guacacgcucgacuucuag

SEQ ID NO: 1396790 - RNA, 19 nt, Artificial Sequence
  Description of Artificial Sequence: Synthetic oligonucleotide
gagcaaaguagugucugga

SEQ ID NO: 1396791 - RNA, 19 nt, Artificial Sequence
  Description of Artificial Sequence: Synthetic oligonucleotide
ucgugacuuucaguugcgg

SEQ ID NO: 1396792 - RNA, 19 nt, Artificial Sequence
  Description of Artificial Sequence: Synthetic oligonucleotide
acaggacucugguccuuuc

SEQ ID NO: 1396793 - RNA, 19 nt, Artificial Sequence
  Description of Artificial Sequence: Synthetic oligonucleotide
augaaagcccacauguuuu

SEQ ID NO: 1396794 - RNA, 19 nt, Artificial Sequence
  Description of Artificial Sequence: Synthetic oligonucleotide
aaucgcugauuccggggua

SEQ ID NO: 1396795 - RNA, 19 nt, Artificial Sequence
  Description of Artificial Sequence: Synthetic oligonucleotide
cauaaccagacuuuaguuu

SEQ ID NO: 1396796 - RNA, 19 nt, Artificial Sequence
  Description of Artificial Sequence: Synthetic oligonucleotide
gguacgcccuguuuuguug

SEQ ID NO: 1396797 - RNA, 19 nt, Artificial Sequence
  Description of Artificial Sequence: Synthetic oligonucleotide
guagagugugcuccacaac

SEQ ID NO: 1396798 - RNA, 19 nt, Artificial Sequence
  Description of Artificial Sequence: Synthetic oligonucleotide
cugggccuuuaaaacguug

SEQ ID NO: 1396799 - RNA, 19 nt, Artificial Sequence
  Description of Artificial Sequence: Synthetic oligonucleotide
uuccucguagcggagcagu

SEQ ID NO: 1396800 - RNA, 19 nt, Artificial Sequence
  Description of Artificial Sequence: Synthetic oligonucleotide
gucguauucuugaggcugc

SEQ ID NO: 1396801 - RNA, 19 nt, Artificial Sequence
  Description of Artificial Sequence: Synthetic oligonucleotide
gggccuuuaaaacguugag

SEQ ID NO: 1396802 - RNA, 19 nt, Artificial Sequence
  Description of Artificial Sequence: Synthetic oligonucleotide
gggaucgucguauucuuga

SEQ ID NO: 1396803 - RNA, 19 nt, Artificial Sequence
  Description of Artificial Sequence: Synthetic oligonucleotide
agcaucugucguagacucc

SEQ ID NO: 1396804 - RNA, 19 nt, Artificial Sequence
  Description of Artificial Sequence: Synthetic oligonucleotide
gguuaagcucugcuuaauc

SEQ ID NO: 1396805 - RNA, 19 nt, Artificial Sequence
  Description of Artificial Sequence: Synthetic oligonucleotide
ugcgugcaugucucgaguc

SEQ ID NO: 1396806 - RNA, 19 nt, Artificial Sequence
  Description of Artificial Sequence: Synthetic oligonucleotide
ggaucgucguauucuugag

SEQ ID NO: 1396807 - RNA, 19 nt, Artificial Sequence
  Description of Artificial Sequence: Synthetic oligonucleotide
ucgucguauucuugaggcu

SEQ ID NO: 1396808 - RNA, 19 nt, Artificial Sequence
  Description of Artificial Sequence: Synthetic oligonucleotide
auuucauuauggagcuugu

SEQ ID NO: 1396809 - RNA, 19 nt, Artificial Sequence
  Description of Artificial Sequence: Synthetic oligonucleotide
uuaaaacguugagaucaau

SEQ ID NO: 1396810 - RNA, 19 nt, Artificial Sequence
  Description of Artificial Sequence: Synthetic oligonucleotide
gcuaccaaucuuuuccaga

SEQ ID NO: 1396811 - RNA, 19 nt, Artificial Sequence
  Description of Artificial Sequence: Synthetic oligonucleotide
aucagccaagcagcaagag

SEQ ID NO: 1396812 - RNA, 19 nt, Artificial Sequence
  Description of Artificial Sequence: Synthetic oligonucleotide
uccaauccuuauugucagu

SEQ ID NO: 1396813 - RNA, 19 nt, Artificial Sequence
  Description of Artificial Sequence: Synthetic oligonucleotide
cguuacuccgccauuuccc

SEQ ID NO: 1396814 - RNA, 19 nt, Artificial Sequence
  Description of Artificial Sequence: Synthetic oligonucleotide
ccaaucgcugauuccgggg

SEQ ID NO: 1396815 - RNA, 19 nt, Artificial Sequence
  Description of Artificial Sequence: Synthetic oligonucleotide
augugguaggccgcgccgg

SEQ ID NO: 1396816 - RNA, 19 nt, Artificial Sequence
  Description of Artificial Sequence: Synthetic oligonucleotide
ucguagcggagcaguuuca

SEQ ID NO: 1396817 - RNA, 19 nt, Artificial Sequence
  Description of Artificial Sequence: Synthetic oligonucleotide
uugcauugggaucgucgua

SEQ ID NO: 1396818 - RNA, 19 nt, Artificial Sequence
  Description of Artificial Sequence: Synthetic oligonucleotide
agacucguuuguguccaag

SEQ ID NO: 1396819 - RNA, 19 nt, Artificial Sequence
  Description of Artificial Sequence: Synthetic oligonucleotide
caagagugcaaaacaugua

SEQ ID NO: 1396820 - RNA, 19 nt, Artificial Sequence
  Description of Artificial Sequence: Synthetic oligonucleotide
guacgcccuguuuuguuga

SEQ ID NO: 1396821 - RNA, 19 nt, Artificial Sequence
  Description of Artificial Sequence: Synthetic oligonucleotide
agccaaucgcugauuccgg

SEQ ID NO: 1396822 - RNA, 19 nt, Artificial Sequence
  Description of Artificial Sequence: Synthetic oligonucleotide
guuugguuaagcucugcuu

SEQ ID NO: 1396823 - RNA, 19 nt, Artificial Sequence
  Description of Artificial Sequence: Synthetic oligonucleotide
gucucgagucauauugcac

SEQ ID NO: 1396824 - RNA, 19 nt, Artificial Sequence
  Description of Artificial Sequence: Synthetic oligonucleotide
guuacuccgccauuucccu

SEQ ID NO: 1396825 - RNA, 19 nt, Artificial Sequence
  Description of Artificial Sequence: Synthetic oligonucleotide
agaacauagcauacauguu

SEQ ID NO: 1396826 - RNA, 19 nt, Artificial Sequence
  Description of Artificial Sequence: Synthetic oligonucleotide
cuuccgggacaguuucuuc

SEQ ID NO: 1396827 - RNA, 19 nt, Artificial Sequence
  Description of Artificial Sequence: Synthetic oligonucleotide
ugagcgaagcucggagagu

SEQ ID NO: 1396828 - RNA, 19 nt, Artificial Sequence
  Description of Artificial Sequence: Synthetic oligonucleotide
caccuggguugguaggcag

SEQ ID NO: 1396829 - RNA, 19 nt, Artificial Sequence
  Description of Artificial Sequence: Synthetic oligonucleotide
ucucggcuaccaaucuuuu

SEQ ID NO: 1396830 - RNA, 19 nt, Artificial Sequence
  Description of Artificial Sequence: Synthetic oligonucleotide
uccgggguaacagcugcgu

SEQ ID NO: 1396831 - RNA, 19 nt, Artificial Sequence
  Description of Artificial Sequence: Synthetic oligonucleotide
gagucauauugcacuuuuc

SEQ ID NO: 1396832 - RNA, 19 nt, Artificial Sequence
  Description of Artificial Sequence: Synthetic oligonucleotide
uccaagcgauaggucuggg

SEQ ID NO: 1396833 - RNA, 19 nt, Artificial Sequence
  Description of Artificial Sequence: Synthetic oligonucleotide
gccaaucgcugauuccggg

SEQ ID NO: 1396834 - RNA, 19 nt, Artificial Sequence
  Description of Artificial Sequence: Synthetic oligonucleotide
uugaucagccaagcagcaa

SEQ ID NO: 1396835 - RNA, 19 nt, Artificial Sequence
  Description of Artificial Sequence: Synthetic oligonucleotide
ccaauccuuauugucaguc

SEQ ID NO: 1396836 - RNA, 19 nt, Artificial Sequence
  Description of Artificial Sequence: Synthetic oligonucleotide
caaagguacgcccuguuuu

SEQ ID NO: 1396837 - RNA, 19 nt, Artificial Sequence
  Description of Artificial Sequence: Synthetic oligonucleotide
ucugggccuuuaaaacguu

SEQ ID NO: 1396838 - RNA, 19 nt, Artificial Sequence
  Description of Artificial Sequence: Synthetic oligonucleotide
ggagugccaucugucaugc

SEQ ID NO: 1396839 - RNA, 19 nt, Artificial Sequence
  Description of Artificial Sequence: Synthetic oligonucleotide
auguccaucugaacgguuu

SEQ ID NO: 1396840 - RNA, 19 nt, Artificial Sequence
  Description of Artificial Sequence: Synthetic oligonucleotide
gagcgaagcucggagagua

SEQ ID NO: 1396841 - RNA, 19 nt, Artificial Sequence
  Description of Artificial Sequence: Synthetic oligonucleotide
gcugcgugcaugucucgag

SEQ ID NO: 1396842 - RNA, 19 nt, Artificial Sequence
  Description of Artificial Sequence: Synthetic oligonucleotide
uccccugcgccuuccccgc

SEQ ID NO: 1396843 - RNA, 19 nt, Artificial Sequence
  Description of Artificial Sequence: Synthetic oligonucleotide
gacugcaguagagugugcu

SEQ ID NO: 1396844 - RNA, 19 nt, Artificial Sequence
  Description of Artificial Sequence: Synthetic oligonucleotide
caagcuugagagguauaga

SEQ ID NO: 1396845 - RNA, 19 nt, Artificial Sequence
  Description of Artificial Sequence: Synthetic oligonucleotide
gcucaccuggguugguagg

SEQ ID NO: 1396846 - RNA, 19 nt, Artificial Sequence
  Description of Artificial Sequence: Synthetic oligonucleotide
ugguuaagcucugcuuaau

SEQ ID NO: 1396847 - RNA, 19 nt, Artificial Sequence
  Description of Artificial Sequence: Synthetic oligonucleotide
gguauagauuguguuugga

SEQ ID NO: 1396848 - RNA, 19 nt, Artificial Sequence
  Description of Artificial Sequence: Synthetic oligonucleotide
ccaagcgauaggucugggc

SEQ ID NO: 1396849 - RNA, 19 nt, Artificial Sequence
  Description of Artificial Sequence: Synthetic oligonucleotide
aguugcgguaguacacgcu

SEQ ID NO: 1396850 - RNA, 19 nt, Artificial Sequence
  Description of Artificial Sequence: Synthetic oligonucleotide
cgggguaacagcugcgugc

SEQ ID NO: 1396851 - RNA, 19 nt, Artificial Sequence
  Description of Artificial Sequence: Synthetic oligonucleotide
guugauuguugauguacuu

SEQ ID NO: 1396852 - RNA, 19 nt, Artificial Sequence
  Description of Artificial Sequence: Synthetic oligonucleotide
cugucguagacuccaaaau

SEQ ID NO: 1396853 - RNA, 19 nt, Artificial Sequence
  Description of Artificial Sequence: Synthetic oligonucleotide
cuuuccguuacuccgccau

SEQ ID NO: 1396854 - RNA, 19 nt, Artificial Sequence
  Description of Artificial Sequence: Synthetic oligonucleotide
guagcgcucccuugccuca

SEQ ID NO: 1396855 - RNA, 19 nt, Artificial Sequence
  Description of Artificial Sequence: Synthetic oligonucleotide
caguagagugugcuccaca

SEQ ID NO: 1396856 - RNA, 19 nt, Artificial Sequence
  Description of Artificial Sequence: Synthetic oligonucleotide
cauggauccuccaauccuu

SEQ ID NO: 1396857 - RNA, 19 nt, Artificial Sequence
  Description of Artificial Sequence: Synthetic oligonucleotide
ucguauucuugaggcugcu

SEQ ID NO: 1396858 - RNA, 19 nt, Artificial Sequence
  Description of Artificial Sequence: Synthetic oligonucleotide
caaucgcugauuccggggu

SEQ ID NO: 1396859 - RNA, 19 nt, Artificial Sequence
  Description of Artificial Sequence: Synthetic oligonucleotide
aggcuuuagccgucauaau

SEQ ID NO: 1396860 - RNA, 19 nt, Artificial Sequence
  Description of Artificial Sequence: Synthetic oligonucleotide
caaguugauuguugaugua

SEQ ID NO: 1396861 - RNA, 19 nt, Artificial Sequence
  Description of Artificial Sequence: Synthetic oligonucleotide
acgcccuguuuuguugauc

SEQ ID NO: 1396862 - RNA, 19 nt, Artificial Sequence
  Description of Artificial Sequence: Synthetic oligonucleotide
ucgagucauauugcacuuu

SEQ ID NO: 1396863 - RNA, 19 nt, Artificial Sequence
  Description of Artificial Sequence: Synthetic oligonucleotide
aucgcugauuccgggguaa

SEQ ID NO: 1396864 - RNA, 19 nt, Artificial Sequence
  Description of Artificial Sequence: Synthetic oligonucleotide
uacgcccuguuuuguugau

SEQ ID NO: 1396865 - RNA, 19 nt, Artificial Sequence
  Description of Artificial Sequence: Synthetic oligonucleotide
ccguuacuccgccauuucc

SEQ ID NO: 1396866 - RNA, 19 nt, Artificial Sequence
  Description of Artificial Sequence: Synthetic oligonucleotide
cgucguauucuugaggcug

SEQ ID NO: 1396867 - RNA, 19 nt, Artificial Sequence
  Description of Artificial Sequence: Synthetic oligonucleotide
gucggcgggaucacugcug

SEQ ID NO: 1396868 - RNA, 19 nt, Artificial Sequence
  Description of Artificial Sequence: Synthetic oligonucleotide
ggcugcucaaagguacgcc

SEQ ID NO: 1396869 - RNA, 19 nt, Artificial Sequence
  Description of Artificial Sequence: Synthetic oligonucleotide
agcugcgugcaugucucga

SEQ ID NO: 1396870 - RNA, 19 nt, Artificial Sequence
  Description of Artificial Sequence: Synthetic oligonucleotide
cuuccucguagcggagcag

SEQ ID NO: 1396871 - RNA, 19 nt, Artificial Sequence
  Description of Artificial Sequence: Synthetic oligonucleotide
cagcugcgugcaugucucg

SEQ ID NO: 1396872 - RNA, 19 nt, Artificial Sequence
  Description of Artificial Sequence: Synthetic oligonucleotide
cugcucaaagguacgcccu

SEQ ID NO: 1396873 - RNA, 19 nt, Artificial Sequence
  Description of Artificial Sequence: Synthetic oligonucleotide
cguagacuccaaaauaucu

SEQ ID NO: 1396874 - RNA, 19 nt, Artificial Sequence
  Description of Artificial Sequence: Synthetic oligonucleotide
cugcuuaaucuucaccaau

SEQ ID NO: 1396875 - RNA, 19 nt, Artificial Sequence
  Description of Artificial Sequence: Synthetic oligonucleotide
ugggccccacgauauucuu

SEQ ID NO: 1396876 - RNA, 19 nt, Artificial Sequence
  Description of Artificial Sequence: Synthetic oligonucleotide
ucgcugauuccgggguaac

SEQ ID NO: 1396877 - RNA, 19 nt, Artificial Sequence
  Description of Artificial Sequence: Synthetic oligonucleotide
gcgugcaugucucgaguca

SEQ ID NO: 1396878 - RNA, 19 nt, Artificial Sequence
  Description of Artificial Sequence: Synthetic oligonucleotide
cccgagacaccccauccuc

SEQ ID NO: 1396879 - RNA, 19 nt, Artificial Sequence
  Description of Artificial Sequence: Synthetic oligonucleotide
cucccaaaugagcgaagcu

SEQ ID NO: 1396880 - RNA, 19 nt, Artificial Sequence
  Description of Artificial Sequence: Synthetic oligonucleotide
cucgagucauauugcacuu

SEQ ID NO: 1396881 - RNA, 19 nt, Artificial Sequence
  Description of Artificial Sequence: Synthetic oligonucleotide
auggauccuccaauccuua

SEQ ID NO: 1396882 - RNA, 19 nt, Artificial Sequence
  Description of Artificial Sequence: Synthetic oligonucleotide
agcgcucccuugccucacu

SEQ ID NO: 1396883 - RNA, 19 nt, Artificial Sequence
  Description of Artificial Sequence: Synthetic oligonucleotide
uccccgcgagcccgagaca

SEQ ID NO: 1396884 - RNA, 19 nt, Artificial Sequence
  Description of Artificial Sequence: Synthetic oligonucleotide
cucggagaguauguuagau

SEQ ID NO: 1396885 - RNA, 19 nt, Artificial Sequence
  Description of Artificial Sequence: Synthetic oligonucleotide
gacuuucaguugcgguagu

SEQ ID NO: 1396886 - RNA, 19 nt, Artificial Sequence
  Description of Artificial Sequence: Synthetic oligonucleotide
cccgucggcgggaucacug

SEQ ID NO: 1396887 - RNA, 19 nt, Artificial Sequence
  Description of Artificial Sequence: Synthetic oligonucleotide
gcucggagaguauguuaga

SEQ ID NO: 1396888 - RNA, 19 nt, Artificial Sequence
  Description of Artificial Sequence: Synthetic oligonucleotide
gguaggccgcgccgggccc

SEQ ID NO: 1396889 - RNA, 19 nt, Artificial Sequence
  Description of Artificial Sequence: Synthetic oligonucleotide
ggauccuccaauccuuauu

SEQ ID NO: 1396890 - RNA, 19 nt, Artificial Sequence
  Description of Artificial Sequence: Synthetic oligonucleotide
cuucaccaauggagugcca

SEQ ID NO: 1396891 - RNA, 19 nt, Artificial Sequence
  Description of Artificial Sequence: Synthetic oligonucleotide
ccauaaccagacuuuaguu

SEQ ID NO: 1396892 - RNA, 19 nt, Artificial Sequence
  Description of Artificial Sequence: Synthetic oligonucleotide
guccggcuaauuucauuau

SEQ ID NO: 1396893 - RNA, 19 nt, Artificial Sequence
  Description of Artificial Sequence: Synthetic oligonucleotide
cggcuaauuucauuaugga

SEQ ID NO: 1396894 - RNA, 19 nt, Artificial Sequence
  Description of Artificial Sequence: Synthetic oligonucleotide
cguagcggagcaguuucag

SEQ ID NO: 1396895 - RNA, 19 nt, Artificial Sequence
  Description of Artificial Sequence: Synthetic oligonucleotide
gcgagcccgagacacccca

SEQ ID NO: 1396896 - RNA, 19 nt, Artificial Sequence
  Description of Artificial Sequence: Synthetic oligonucleotide
cugcgugcaugucucgagu

SEQ ID NO: 1396897 - RNA, 19 nt, Artificial Sequence
  Description of Artificial Sequence: Synthetic oligonucleotide
gggccccacgauauucuug

SEQ ID NO: 1396898 - RNA, 19 nt, Artificial Sequence
  Description of Artificial Sequence: Synthetic oligonucleotide
ccugggccccacgauauuc

SEQ ID NO: 1396899 - RNA, 19 nt, Artificial Sequence
  Description of Artificial Sequence: Synthetic oligonucleotide
cacgcucgacuucuagacu

SEQ ID NO: 1396900 - RNA, 19 nt, Artificial Sequence
  Description of Artificial Sequence: Synthetic oligonucleotide
ccaauggagugccaucugu

SEQ ID NO: 1396901 - RNA, 19 nt, Artificial Sequence
  Description of Artificial Sequence: Synthetic oligonucleotide
aguacacgcucgacuucua

SEQ ID NO: 1396902 - RNA, 19 nt, Artificial Sequence
  Description of Artificial Sequence: Synthetic oligonucleotide
ccgggguaacagcugcgug

SEQ ID NO: 1396903 - RNA, 19 nt, Artificial Sequence
  Description of Artificial Sequence: Synthetic oligonucleotide
cugcgccuuccccgcgagc

SEQ ID NO: 1396904 - RNA, 19 nt, Artificial Sequence
  Description of Artificial Sequence: Synthetic oligonucleotide
agcgaagcucggagaguau

SEQ ID NO: 1396905 - RNA, 19 nt, Artificial Sequence
  Description of Artificial Sequence: Synthetic oligonucleotide
ccccgcgagcccgagacac

SEQ ID NO: 1396906 - RNA, 19 nt, Artificial Sequence
  Description of Artificial Sequence: Synthetic oligonucleotide
gcgguaguacacgcucgac

SEQ ID NO: 1396907 - RNA, 19 nt, Artificial Sequence
  Description of Artificial Sequence: Synthetic oligonucleotide
ccugaucgugacuuucagu

SEQ ID NO: 1396908 - RNA, 19 nt, Artificial Sequence
  Description of Artificial Sequence: Synthetic oligonucleotide
caagcccgucggcgggauc

SEQ ID NO: 1396909 - RNA, 19 nt, Artificial Sequence
  Description of Artificial Sequence: Synthetic oligonucleotide
cgugacuuucaguugcggu

SEQ ID NO: 1396910 - RNA, 19 nt, Artificial Sequence
  Description of Artificial Sequence: Synthetic oligonucleotide
ggacugcaguagagugugc

SEQ ID NO: 1396911 - RNA, 19 nt, Artificial Sequence
  Description of Artificial Sequence: Synthetic oligonucleotide
cccgcgagcccgagacacc

SEQ ID NO: 1396912 - RNA, 19 nt, Artificial Sequence
  Description of Artificial Sequence: Synthetic oligonucleotide
cggcuaccaaucuuuucca

SEQ ID NO: 1396913 - RNA, 19 nt, Artificial Sequence
  Description of Artificial Sequence: Synthetic oligonucleotide
cugcucaccuggguuggua

SEQ ID NO: 1396914 - RNA, 19 nt, Artificial Sequence
  Description of Artificial Sequence: Synthetic oligonucleotide
ccuuuagagcagauucaau

SEQ ID NO: 1396915 - RNA, 19 nt, Artificial Sequence
  Description of Artificial Sequence: Synthetic oligonucleotide
gcccgagacaccccauccu

SEQ ID NO: 1396916 - RNA, 19 nt, Artificial Sequence
  Description of Artificial Sequence: Synthetic oligonucleotide
cgguaguacacgcucgacu

SEQ ID NO: 1396917 - RNA, 19 nt, Artificial Sequence
  Description of Artificial Sequence: Synthetic oligonucleotide
gcgcucccuugccucacuc

SEQ ID NO: 1396918 - RNA, 19 nt, Artificial Sequence
  Description of Artificial Sequence: Synthetic oligonucleotide
caguccugaucgugacuuu

SEQ ID NO: 1396919 - RNA, 19 nt, Artificial Sequence
  Description of Artificial Sequence: Synthetic oligonucleotide
ccuuauugucaguccugau

SEQ ID NO: 1396920 - RNA, 19 nt, Artificial Sequence
  Description of Artificial Sequence: Synthetic oligonucleotide
cgcgagcccgagacacccc

SEQ ID NO: 1396921 - RNA, 19 nt, Artificial Sequence
  Description of Artificial Sequence: Synthetic oligonucleotide
cguuuguguccaagcgaua

SEQ ID NO: 1396922 - RNA, 19 nt, Artificial Sequence
  Description of Artificial Sequence: Synthetic oligonucleotide
cgcugauuccgggguaaca

SEQ ID NO: 1396923 - RNA, 19 nt, Artificial Sequence
  Description of Artificial Sequence: Synthetic oligonucleotide
gccuuccccgcgagcccga

SEQ ID NO: 1396924 - RNA, 19 nt, Artificial Sequence
  Description of Artificial Sequence: Synthetic oligonucleotide
cgauaggucugggccuuua

SEQ ID NO: 1396925 - RNA, 19 nt, Artificial Sequence
  Description of Artificial Sequence: Synthetic oligonucleotide
cgucggcgggaucacugcu

SEQ ID NO: 1396926 - RNA, 19 nt, Artificial Sequence
  Description of Artificial Sequence: Synthetic oligonucleotide
ccgccuccccugcgccuuc

SEQ ID NO: 1396927 - RNA, 19 nt, Artificial Sequence
  Description of Artificial Sequence: Synthetic oligonucleotide
gcgauaggucugggccuuu

SEQ ID NO: 1396928 - RNA, 19 nt, Artificial Sequence
  Description of Artificial Sequence: Synthetic oligonucleotide
gcccgucggcgggaucacu

SEQ ID NO: 1396929 - RNA, 19 nt, Artificial Sequence
  Description of Artificial Sequence: Synthetic oligonucleotide
ccaagcccgucggcgggau

SEQ ID NO: 1396930 - RNA, 19 nt, Artificial Sequence
  Description of Artificial Sequence: Synthetic oligonucleotide
auuaacuucaaaccgaucc

SEQ ID NO: 1396931 - RNA, 19 nt, Artificial Sequence
  Description of Artificial Sequence: Synthetic oligonucleotide
aaaguuuauucuuacacag

SEQ ID NO: 1396932 - RNA, 19 nt, Artificial Sequence
  Description of Artificial Sequence: Synthetic oligonucleotide
aaaagauacacccauuugu

SEQ ID NO: 1396933 - RNA, 19 nt, Artificial Sequence
  Description of Artificial Sequence: Synthetic oligonucleotide
aacuauggcucucaggagc

SEQ ID NO: 1396934 - RNA, 19 nt, Artificial Sequence
  Description of Artificial Sequence: Synthetic oligonucleotide
aucuauuucuucuggaagc

SEQ ID NO: 1396935 - RNA, 19 nt, Artificial Sequence
  Description of Artificial Sequence: Synthetic oligonucleotide
aguaaaaguuuauucuuac

SEQ ID NO: 1396936 - RNA, 19 nt, Artificial Sequence
  Description of Artificial Sequence: Synthetic oligonucleotide
uucaucagauacaaaagug

SEQ ID NO: 1396937 - RNA, 19 nt, Artificial Sequence
  Description of Artificial Sequence: Synthetic oligonucleotide
uucaaaccgauccugaaca

SEQ ID NO: 1396938 - RNA, 19 nt, Artificial Sequence
  Description of Artificial Sequence: Synthetic oligonucleotide
cugguuaaacucuaggacg

SEQ ID NO: 1396939 - RNA, 19 nt, Artificial Sequence
  Description of Artificial Sequence: Synthetic oligonucleotide
gauaccuugacacugggca

SEQ ID NO: 1396940 - RNA, 19 nt, Artificial Sequence
  Description of Artificial Sequence: Synthetic oligonucleotide
agauacacccauuugucac

SEQ ID NO: 1396941 - RNA, 19 nt, Artificial Sequence
  Description of Artificial Sequence: Synthetic oligonucleotide
aguuuauucuuacacagcu

SEQ ID NO: 1396942 - RNA, 19 nt, Artificial Sequence
  Description of Artificial Sequence: Synthetic oligonucleotide
uugaagacgauguugacuc

SEQ ID NO: 1396943 - RNA, 19 nt, Artificial Sequence
  Description of Artificial Sequence: Synthetic oligonucleotide
aaagauacacccauuuguc

SEQ ID NO: 1396944 - RNA, 19 nt, Artificial Sequence
  Description of Artificial Sequence: Synthetic oligonucleotide
aagaggguggccauggugc

SEQ ID NO: 1396945 - RNA, 19 nt, Artificial Sequence
  Description of Artificial Sequence: Synthetic oligonucleotide
agacguaagacccuuugac

SEQ ID NO: 1396946 - RNA, 19 nt, Artificial Sequence
  Description of Artificial Sequence: Synthetic oligonucleotide
ugaauggagacguaagacc

SEQ ID NO: 1396947 - RNA, 19 nt, Artificial Sequence
  Description of Artificial Sequence: Synthetic oligonucleotide
uauucuuacacagcuacag

SEQ ID NO: 1396948 - RNA, 19 nt, Artificial Sequence
  Description of Artificial Sequence: Synthetic oligonucleotide
uuucacauuccucagguuc

SEQ ID NO: 1396949 - RNA, 19 nt, Artificial Sequence
  Description of Artificial Sequence: Synthetic oligonucleotide
aacucuaggacgucaagga

SEQ ID NO: 1396950 - RNA, 19 nt, Artificial Sequence
  Description of Artificial Sequence: Synthetic oligonucleotide
uuugguaccaaagcgacca

SEQ ID NO: 1396951 - RNA, 19 nt, Artificial Sequence
  Description of Artificial Sequence: Synthetic oligonucleotide
gaccaguacagauaccugg

SEQ ID NO: 1396952 - RNA, 19 nt, Artificial Sequence
  Description of Artificial Sequence: Synthetic oligonucleotide
ucaucuaguacaaaguguu

SEQ ID NO: 1396953 - RNA, 19 nt, Artificial Sequence
  Description of Artificial Sequence: Synthetic oligonucleotide
aaacaaauugguagccacc

SEQ ID NO: 1396954 - RNA, 19 nt, Artificial Sequence
  Description of Artificial Sequence: Synthetic oligonucleotide
uccugaacaucauugagga

SEQ ID NO: 1396955 - RNA, 19 nt, Artificial Sequence
  Description of Artificial Sequence: Synthetic oligonucleotide
ucgaugaauagcaauggcu

SEQ ID NO: 1396956 - RNA, 19 nt, Artificial Sequence
  Description of Artificial Sequence: Synthetic oligonucleotide
uugagcuugacguaguacu

SEQ ID NO: 1396957 - RNA, 19 nt, Artificial Sequence
  Description of Artificial Sequence: Synthetic oligonucleotide
acagacuugacgaagauca

SEQ ID NO: 1396958 - RNA, 19 nt, Artificial Sequence
  Description of Artificial Sequence: Synthetic oligonucleotide
uugacgaagaucaccaccu

SEQ ID NO: 1396959 - RNA, 19 nt, Artificial Sequence
  Description of Artificial Sequence: Synthetic oligonucleotide
ucuaguacaaaguguuuca

SEQ ID NO: 1396960 - RNA, 19 nt, Artificial Sequence
  Description of Artificial Sequence: Synthetic oligonucleotide
augguuaucggcucuguuc

SEQ ID NO: 1396961 - RNA, 19 nt, Artificial Sequence
  Description of Artificial Sequence: Synthetic oligonucleotide
ucggugaagguaaguaucg

SEQ ID NO: 1396962 - RNA, 19 nt, Artificial Sequence
  Description of Artificial Sequence: Synthetic oligonucleotide
aagguaaguaucggagucc

SEQ ID NO: 1396963 - RNA, 19 nt, Artificial Sequence
  Description of Artificial Sequence: Synthetic oligonucleotide
uccuucuuaauggagaggc

SEQ ID NO: 1396964 - RNA, 19 nt, Artificial Sequence
  Description of Artificial Sequence: Synthetic oligonucleotide
aguaucggaguccucuggc

SEQ ID NO: 1396965 - RNA, 19 nt, Artificial Sequence
  Description of Artificial Sequence: Synthetic oligonucleotide
aaguuuauucuuacacagc

SEQ ID NO: 1396966 - RNA, 19 nt, Artificial Sequence
  Description of Artificial Sequence: Synthetic oligonucleotide
gaauggagacguaagaccc

SEQ ID NO: 1396967 - RNA, 19 nt, Artificial Sequence
  Description of Artificial Sequence: Synthetic oligonucleotide
caaauugguagccaccagg

SEQ ID NO: 1396968 - RNA, 19 nt, Artificial Sequence
  Description of Artificial Sequence: Synthetic oligonucleotide
ucaauguccauaccucugc

SEQ ID NO: 1396969 - RNA, 19 nt, Artificial Sequence
  Description of Artificial Sequence: Synthetic oligonucleotide
cucuaggacgucaaggagg

SEQ ID NO: 1396970 - RNA, 19 nt, Artificial Sequence
  Description of Artificial Sequence: Synthetic oligonucleotide
gauguugacucgcucaaug

SEQ ID NO: 1396971 - RNA, 19 nt, Artificial Sequence
  Description of Artificial Sequence: Synthetic oligonucleotide
uguauguggagauaucuau

SEQ ID NO: 1396972 - RNA, 19 nt, Artificial Sequence
  Description of Artificial Sequence: Synthetic oligonucleotide
ccauuugucaccuaggaag

SEQ ID NO: 1396973 - RNA, 19 nt, Artificial Sequence
  Description of Artificial Sequence: Synthetic oligonucleotide
ugguuaucggcucuguuca

SEQ ID NO: 1396974 - RNA, 19 nt, Artificial Sequence
  Description of Artificial Sequence: Synthetic oligonucleotide
agguucagacuccugcucc

SEQ ID NO: 1396975 - RNA, 19 nt, Artificial Sequence
  Description of Artificial Sequence: Synthetic oligonucleotide
cuggggaauacacucaugc

SEQ ID NO: 1396976 - RNA, 19 nt, Artificial Sequence
  Description of Artificial Sequence: Synthetic oligonucleotide
agaacugugaauggagacg

SEQ ID NO: 1396977 - RNA, 19 nt, Artificial Sequence
  Description of Artificial Sequence: Synthetic oligonucleotide
agucccggaaaccagaacu

SEQ ID NO: 1396978 - RNA, 19 nt, Artificial Sequence
  Description of Artificial Sequence: Synthetic oligonucleotide
ucuaggacgucaaggaggu

SEQ ID NO: 1396979 - RNA, 19 nt, Artificial Sequence
  Description of Artificial Sequence: Synthetic oligonucleotide
ugccaaacaaauugguagc

SEQ ID NO: 1396980 - RNA, 19 nt, Artificial Sequence
  Description of Artificial Sequence: Synthetic oligonucleotide
aagauacacccauuuguca

SEQ ID NO: 1396981 - RNA, 19 nt, Artificial Sequence
  Description of Artificial Sequence: Synthetic oligonucleotide
ugguuaaacucuaggacgu

SEQ ID NO: 1396982 - RNA, 19 nt, Artificial Sequence
  Description of Artificial Sequence: Synthetic oligonucleotide
gaagguaaguaucggaguc

SEQ ID NO: 1396983 - RNA, 19 nt, Artificial Sequence
  Description of Artificial Sequence: Synthetic oligonucleotide
aaaccgauccugaacauca

SEQ ID NO: 1396984 - RNA, 19 nt, Artificial Sequence
  Description of Artificial Sequence: Synthetic oligonucleotide
uuugucaccuaggaagagg

SEQ ID NO: 1396985 - RNA, 19 nt, Artificial Sequence
  Description of Artificial Sequence: Synthetic oligonucleotide
uuggcuacacauaugguua

SEQ ID NO: 1396986 - RNA, 19 nt, Artificial Sequence
  Description of Artificial Sequence: Synthetic oligonucleotide
ugcaacguugcacagacuu

SEQ ID NO: 1396987 - RNA, 19 nt, Artificial Sequence
  Description of Artificial Sequence: Synthetic oligonucleotide
uccuugcuuaucuggaagg

SEQ ID NO: 1396988 - RNA, 19 nt, Artificial Sequence
  Description of Artificial Sequence: Synthetic oligonucleotide
uucuuaauggagaggcccc

SEQ ID NO: 1396989 - RNA, 19 nt, Artificial Sequence
  Description of Artificial Sequence: Synthetic oligonucleotide
aauggccuggggaauacac

SEQ ID NO: 1396990 - RNA, 19 nt, Artificial Sequence
  Description of Artificial Sequence: Synthetic oligonucleotide
uugucaccuaggaagagga

SEQ ID NO: 1396991 - RNA, 19 nt, Artificial Sequence
  Description of Artificial Sequence: Synthetic oligonucleotide
auuggcuacacauaugguu

SEQ ID NO: 1396992 - RNA, 19 nt, Artificial Sequence
  Description of Artificial Sequence: Synthetic oligonucleotide
aucucuugcacgucccggc

SEQ ID NO: 1396993 - RNA, 19 nt, Artificial Sequence
  Description of Artificial Sequence: Synthetic oligonucleotide
gauacacccauuugucacc

SEQ ID NO: 1396994 - RNA, 19 nt, Artificial Sequence
  Description of Artificial Sequence: Synthetic oligonucleotide
cuucuuaauggagaggccc

SEQ ID NO: 1396995 - RNA, 19 nt, Artificial Sequence
  Description of Artificial Sequence: Synthetic oligonucleotide
acguaguacugcuguagcc

SEQ ID NO: 1396996 - RNA, 19 nt, Artificial Sequence
  Description of Artificial Sequence: Synthetic oligonucleotide
agacuugacgaagaucacc

SEQ ID NO: 1396997 - RNA, 19 nt, Artificial Sequence
  Description of Artificial Sequence: Synthetic oligonucleotide
caucauugaggauuuuggc

SEQ ID NO: 1396998 - RNA, 19 nt, Artificial Sequence
  Description of Artificial Sequence: Synthetic oligonucleotide
caugcaacguugcacagac

SEQ ID NO: 1396999 - RNA, 19 nt, Artificial Sequence
  Description of Artificial Sequence: Synthetic oligonucleotide
aggaagaggaucugaagca

SEQ ID NO: 1397000 - RNA, 19 nt, Artificial Sequence
  Description of Artificial Sequence: Synthetic oligonucleotide
uauguggagauaucuauuu

SEQ ID NO: 1397001 - RNA, 19 nt, Artificial Sequence
  Description of Artificial Sequence: Synthetic oligonucleotide
cuacacauaugguuaucgg

SEQ ID NO: 1397002 - RNA, 19 nt, Artificial Sequence
  Description of Artificial Sequence: Synthetic oligonucleotide
aaauugguagccaccagga

SEQ ID NO: 1397003 - RNA, 19 nt, Artificial Sequence
  Description of Artificial Sequence: Synthetic oligonucleotide
ugaagguaaguaucggagu

SEQ ID NO: 1397004 - RNA, 19 nt, Artificial Sequence
  Description of Artificial Sequence: Synthetic oligonucleotide
cuuguauggcacaugacca

SEQ ID NO: 1397005 - RNA, 19 nt, Artificial Sequence
  Description of Artificial Sequence: Synthetic oligonucleotide
caugccucgaugaauagca

SEQ ID NO: 1397006 - RNA, 19 nt, Artificial Sequence
  Description of Artificial Sequence: Synthetic oligonucleotide
guaguacugcuguagcccg

SEQ ID NO: 1397007 - RNA, 19 nt, Artificial Sequence
  Description of Artificial Sequence: Synthetic oligonucleotide
uaguacaaaguguuucaca

SEQ ID NO: 1397008 - RNA, 19 nt, Artificial Sequence
  Description of Artificial Sequence: Synthetic oligonucleotide
acaagugccaggauccggc

SEQ ID NO: 1397009 - RNA, 19 nt, Artificial Sequence
  Description of Artificial Sequence: Synthetic oligonucleotide
uaggacgucaaggagguca

SEQ ID NO: 1397010 - RNA, 19 nt, Artificial Sequence
  Description of Artificial Sequence: Synthetic oligonucleotide
uacgucgcgccccuggacg

SEQ ID NO: 1397011 - RNA, 19 nt, Artificial Sequence
  Description of Artificial Sequence: Synthetic oligonucleotide
uccugcuccguacaagugc

SEQ ID NO: 1397012 - RNA, 19 nt, Artificial Sequence
  Description of Artificial Sequence: Synthetic oligonucleotide
auccugaacaucauugagg

SEQ ID NO: 1397013 - RNA, 19 nt, Artificial Sequence
  Description of Artificial Sequence: Synthetic oligonucleotide
ugagcuugacguaguacug

SEQ ID NO: 1397014 - RNA, 19 nt, Artificial Sequence
  Description of Artificial Sequence: Synthetic oligonucleotide
ucugguuguacgucgcgcc

SEQ ID NO: 1397015 - RNA, 19 nt, Artificial Sequence
  Description of Artificial Sequence: Synthetic oligonucleotide
ucccuuguauggcacauga

SEQ ID NO: 1397016 - RNA, 19 nt, Artificial Sequence
  Description of Artificial Sequence: Synthetic oligonucleotide
augaccaguacagauaccu

SEQ ID NO: 1397017 - RNA, 19 nt, Artificial Sequence
  Description of Artificial Sequence: Synthetic oligonucleotide
aagaucucuugcacguccc

SEQ ID NO: 1397018 - RNA, 19 nt, Artificial Sequence
  Description of Artificial Sequence: Synthetic oligonucleotide
ugaacaucauugaggauuu

SEQ ID NO: 1397019 - RNA, 19 nt, Artificial Sequence
  Description of Artificial Sequence: Synthetic oligonucleotide
uuauucuuacacagcuaca

SEQ ID NO: 1397020 - RNA, 19 nt, Artificial Sequence
  Description of Artificial Sequence: Synthetic oligonucleotide
uggugcauuggcuacacau

SEQ ID NO: 1397021 - RNA, 19 nt, Artificial Sequence
  Description of Artificial Sequence: Synthetic oligonucleotide
acacccauuugucaccuag

SEQ ID NO: 1397022 - RNA, 19 nt, Artificial Sequence
  Description of Artificial Sequence: Synthetic oligonucleotide
uguugacucgcucaauguc

SEQ ID NO: 1397023 - RNA, 19 nt, Artificial Sequence
  Description of Artificial Sequence: Synthetic oligonucleotide
uuaucggcucuguucaaug

SEQ ID NO: 1397024 - RNA, 19 nt, Artificial Sequence
  Description of Artificial Sequence: Synthetic oligonucleotide
uccgucugguuguacgucg

SEQ ID NO: 1397025 - RNA, 19 nt, Artificial Sequence
  Description of Artificial Sequence: Synthetic oligonucleotide
acacauaugguuaucggcu

SEQ ID NO: 1397026 - RNA, 19 nt, Artificial Sequence
  Description of Artificial Sequence: Synthetic oligonucleotide
gggaauacacucaugcugg

SEQ ID NO: 1397027 - RNA, 19 nt, Artificial Sequence
  Description of Artificial Sequence: Synthetic oligonucleotide
agagccguccgucugguug

SEQ ID NO: 1397028 - RNA, 19 nt, Artificial Sequence
  Description of Artificial Sequence: Synthetic oligonucleotide
accaguacagauaccuggc

SEQ ID NO: 1397029 - RNA, 19 nt, Artificial Sequence
  Description of Artificial Sequence: Synthetic oligonucleotide
guugacucgcucaaugucc

SEQ ID NO: 1397030 - RNA, 19 nt, Artificial Sequence
  Description of Artificial Sequence: Synthetic oligonucleotide
cacauuaacuucaaaccga

SEQ ID NO: 1397031 - RNA, 19 nt, Artificial Sequence
  Description of Artificial Sequence: Synthetic oligonucleotide
ggggaauacacucaugcug

SEQ ID NO: 1397032 - RNA, 19 nt, Artificial Sequence
  Description of Artificial Sequence: Synthetic oligonucleotide
gacgauguugacucgcuca

SEQ ID NO: 1397033 - RNA, 19 nt, Artificial Sequence
  Description of Artificial Sequence: Synthetic oligonucleotide
gacguaagacccuuugaca

SEQ ID NO: 1397034 - RNA, 19 nt, Artificial Sequence
  Description of Artificial Sequence: Synthetic oligonucleotide
gacuugacgaagaucacca

SEQ ID NO: 1397035 - RNA, 19 nt, Artificial Sequence
  Description of Artificial Sequence: Synthetic oligonucleotide
cuucaaaccgauccugaac

SEQ ID NO: 1397036 - RNA, 19 nt, Artificial Sequence
  Description of Artificial Sequence: Synthetic oligonucleotide
cucggugaagguaaguauc

SEQ ID NO: 1397037 - RNA, 19 nt, Artificial Sequence
  Description of Artificial Sequence: Synthetic oligonucleotide
ggucucgucauccacaaac

SEQ ID NO: 1397038 - RNA, 19 nt, Artificial Sequence
  Description of Artificial Sequence: Synthetic oligonucleotide
ucucuugcacgucccggcg

SEQ ID NO: 1397039 - RNA, 19 nt, Artificial Sequence
  Description of Artificial Sequence: Synthetic oligonucleotide
gacgucaaggaggucaaag

SEQ ID NO: 1397040 - RNA, 19 nt, Artificial Sequence
  Description of Artificial Sequence: Synthetic oligonucleotide
caggcgaaagaucucuugc

SEQ ID NO: 1397041 - RNA, 19 nt, Artificial Sequence
  Description of Artificial Sequence: Synthetic oligonucleotide
cugugaauggagacguaag

SEQ ID NO: 1397042 - RNA, 19 nt, Artificial Sequence
  Description of Artificial Sequence: Synthetic oligonucleotide
uuguacgucgcgccccugg

SEQ ID NO: 1397043 - RNA, 19 nt, Artificial Sequence
  Description of Artificial Sequence: Synthetic oligonucleotide
uaacuucaaaccgauccug

SEQ ID NO: 1397044 - RNA, 19 nt, Artificial Sequence
  Description of Artificial Sequence: Synthetic oligonucleotide
gauacaaaagugacugcca

SEQ ID NO: 1397045 - RNA, 19 nt, Artificial Sequence
  Description of Artificial Sequence: Synthetic oligonucleotide
uaaguaucggaguccucug

SEQ ID NO: 1397046 - RNA, 19 nt, Artificial Sequence
  Description of Artificial Sequence: Synthetic oligonucleotide
uugacucgcucaaugucca

SEQ ID NO: 1397047 - RNA, 19 nt, Artificial Sequence
  Description of Artificial Sequence: Synthetic oligonucleotide
ccuuugacaucuuucuucg

SEQ ID NO: 1397048 - RNA, 19 nt, Artificial Sequence
  Description of Artificial Sequence: Synthetic oligonucleotide
auacacucaugcuggaccu

SEQ ID NO: 1397049 - RNA, 19 nt, Artificial Sequence
  Description of Artificial Sequence: Synthetic oligonucleotide
guagccaccaggaugcgcc

SEQ ID NO: 1397050 - RNA, 19 nt, Artificial Sequence
  Description of Artificial Sequence: Synthetic oligonucleotide
ucaugcacugcuucucaug

SEQ ID NO: 1397051 - RNA, 19 nt, Artificial Sequence
  Description of Artificial Sequence: Synthetic oligonucleotide
cagaacugugaauggagac

SEQ ID NO: 1397052 - RNA, 19 nt, Artificial Sequence
  Description of Artificial Sequence: Synthetic oligonucleotide
acguugcacagacuugacg

SEQ ID NO: 1397053 - RNA, 19 nt, Artificial Sequence
  Description of Artificial Sequence: Synthetic oligonucleotide
gaagacgauguugacucgc

SEQ ID NO: 1397054 - RNA, 19 nt, Artificial Sequence
  Description of Artificial Sequence: Synthetic oligonucleotide
cucgaugaauagcaauggc

SEQ ID NO: 1397055 - RNA, 19 nt, Artificial Sequence
  Description of Artificial Sequence: Synthetic oligonucleotide
ugaagacgauguugacucg

SEQ ID NO: 1397056 - RNA, 19 nt, Artificial Sequence
  Description of Artificial Sequence: Synthetic oligonucleotide
ugauaccuugacacugggc

SEQ ID NO: 1397057 - RNA, 19 nt, Artificial Sequence
  Description of Artificial Sequence: Synthetic oligonucleotide
acuugacgaagaucaccac

SEQ ID NO: 1397058 - RNA, 19 nt, Artificial Sequence
  Description of Artificial Sequence: Synthetic oligonucleotide
ugaccaguacagauaccug

SEQ ID NO: 1397059 - RNA, 19 nt, Artificial Sequence
  Description of Artificial Sequence: Synthetic oligonucleotide
auguccauaccucugccaa

SEQ ID NO: 1397060 - RNA, 19 nt, Artificial Sequence
  Description of Artificial Sequence: Synthetic oligonucleotide
gugaauggagacguaagac

SEQ ID NO: 1397061 - RNA, 19 nt, Artificial Sequence
  Description of Artificial Sequence: Synthetic oligonucleotide
acaaauugguagccaccag

SEQ ID NO: 1397062 - RNA, 19 nt, Artificial Sequence
  Description of Artificial Sequence: Synthetic oligonucleotide
aauugguagccaccaggau

SEQ ID NO: 1397063 - RNA, 19 nt, Artificial Sequence
  Description of Artificial Sequence: Synthetic oligonucleotide
cuugcuuaucuggaaggcc

SEQ ID NO: 1397064 - RNA, 19 nt, Artificial Sequence
  Description of Artificial Sequence: Synthetic oligonucleotide
ccccaaagaacacugauac

SEQ ID NO: 1397065 - RNA, 19 nt, Artificial Sequence
  Description of Artificial Sequence: Synthetic oligonucleotide
cauuugucaccuaggaaga

SEQ ID NO: 1397066 - RNA, 19 nt, Artificial Sequence
  Description of Artificial Sequence: Synthetic oligonucleotide
agaucucuugcacgucccg

SEQ ID NO: 1397067 - RNA, 19 nt, Artificial Sequence
  Description of Artificial Sequence: Synthetic oligonucleotide
guggccauggugcauuggc

SEQ ID NO: 1397068 - RNA, 19 nt, Artificial Sequence
  Description of Artificial Sequence: Synthetic oligonucleotide
ggcacugucgcccgguucg

SEQ ID NO: 1397069 - RNA, 19 nt, Artificial Sequence
  Description of Artificial Sequence: Synthetic oligonucleotide
gcuacacauaugguuaucg

SEQ ID NO: 1397070 - RNA, 19 nt, Artificial Sequence
  Description of Artificial Sequence: Synthetic oligonucleotide
ucuugcacgucccggcgca

SEQ ID NO: 1397071 - RNA, 19 nt, Artificial Sequence
  Description of Artificial Sequence: Synthetic oligonucleotide
cguacaagugccaggaucc

SEQ ID NO: 1397072 - RNA, 19 nt, Artificial Sequence
  Description of Artificial Sequence: Synthetic oligonucleotide
uggccuggggaauacacuc

SEQ ID NO: 1397073 - RNA, 19 nt, Artificial Sequence
  Description of Artificial Sequence: Synthetic oligonucleotide
gcgaaagaucucuugcacg

SEQ ID NO: 1397074 - RNA, 19 nt, Artificial Sequence
  Description of Artificial Sequence: Synthetic oligonucleotide
cuuccgguucuucucacug

SEQ ID NO: 1397075 - RNA, 19 nt, Artificial Sequence
  Description of Artificial Sequence: Synthetic oligonucleotide
uggggaauacacucaugcu

SEQ ID NO: 1397076 - RNA, 19 nt, Artificial Sequence
  Description of Artificial Sequence: Synthetic oligonucleotide
uacaagugccaggauccgg

SEQ ID NO: 1397077 - RNA, 19 nt, Artificial Sequence
  Description of Artificial Sequence: Synthetic oligonucleotide
ucagacuccugcuccguac

SEQ ID NO: 1397078 - RNA, 19 nt, Artificial Sequence
  Description of Artificial Sequence: Synthetic oligonucleotide
aacuucaaaccgauccuga

SEQ ID NO: 1397079 - RNA, 19 nt, Artificial Sequence
  Description of Artificial Sequence: Synthetic oligonucleotide
agcuugacguaguacugcu

SEQ ID NO: 1397080 - RNA, 19 nt, Artificial Sequence
  Description of Artificial Sequence: Synthetic oligonucleotide
ucggcucuguucaauguau

SEQ ID NO: 1397081 - RNA, 19 nt, Artificial Sequence
  Description of Artificial Sequence: Synthetic oligonucleotide
aggcgaaagaucucuugca

SEQ ID NO: 1397082 - RNA, 19 nt, Artificial Sequence
  Description of Artificial Sequence: Synthetic oligonucleotide
cgaugaauagcaauggcug

SEQ ID NO: 1397083 - RNA, 19 nt, Artificial Sequence
  Description of Artificial Sequence: Synthetic oligonucleotide
acauaugguuaucggcucu

SEQ ID NO: 1397084 - RNA, 19 nt, Artificial Sequence
  Description of Artificial Sequence: Synthetic oligonucleotide
cacugauaccuugacacug

SEQ ID NO: 1397085 - RNA, 19 nt, Artificial Sequence
  Description of Artificial Sequence: Synthetic oligonucleotide
aucagauacaaaagugacu

SEQ ID NO: 1397086 - RNA, 19 nt, Artificial Sequence
  Description of Artificial Sequence: Synthetic oligonucleotide
agcacgagccacucgguga

SEQ ID NO: 1397087 - RNA, 19 nt, Artificial Sequence
  Description of Artificial Sequence: Synthetic oligonucleotide
acucggugaagguaaguau

SEQ ID NO: 1397088 - RNA, 19 nt, Artificial Sequence
  Description of Artificial Sequence: Synthetic oligonucleotide
cuuccugcagaccggccgg

SEQ ID NO: 1397089 - RNA, 19 nt, Artificial Sequence
  Description of Artificial Sequence: Synthetic oligonucleotide
aacguugcacagacuugac

SEQ ID NO: 1397090 - RNA, 19 nt, Artificial Sequence
  Description of Artificial Sequence: Synthetic oligonucleotide
uacugcuguagcccgugca

SEQ ID NO: 1397091 - RNA, 19 nt, Artificial Sequence
  Description of Artificial Sequence: Synthetic oligonucleotide
cauaccucugccaaacaaa

SEQ ID NO: 1397092 - RNA, 19 nt, Artificial Sequence
  Description of Artificial Sequence: Synthetic oligonucleotide
acagauaccuggccauuga

SEQ ID NO: 1397093 - RNA, 19 nt, Artificial Sequence
  Description of Artificial Sequence: Synthetic oligonucleotide
ugcuguagcccgugcagug

SEQ ID NO: 1397094 - RNA, 19 nt, Artificial Sequence
  Description of Artificial Sequence: Synthetic oligonucleotide
uacagauaccuggccauug

SEQ ID NO: 1397095 - RNA, 19 nt, Artificial Sequence
  Description of Artificial Sequence: Synthetic oligonucleotide
uucgccuccgcgagcugcg

SEQ ID NO: 1397096 - RNA, 19 nt, Artificial Sequence
  Description of Artificial Sequence: Synthetic oligonucleotide
cacccauuugucaccuagg

SEQ ID NO: 1397097 - RNA, 19 nt, Artificial Sequence
  Description of Artificial Sequence: Synthetic oligonucleotide
agacgauguugacucgcuc

SEQ ID NO: 1397098 - RNA, 19 nt, Artificial Sequence
  Description of Artificial Sequence: Synthetic oligonucleotide
cuaguacaaaguguuucac

SEQ ID NO: 1397099 - RNA, 19 nt, Artificial Sequence
  Description of Artificial Sequence: Synthetic oligonucleotide
agaaagucccggaaaccag

SEQ ID NO: 1397100 - RNA, 19 nt, Artificial Sequence
  Description of Artificial Sequence: Synthetic oligonucleotide
uaucggcucuguucaaugu

SEQ ID NO: 1397101 - RNA, 19 nt, Artificial Sequence
  Description of Artificial Sequence: Synthetic oligonucleotide
acuucaaaccgauccugaa

SEQ ID NO: 1397102 - RNA, 19 nt, Artificial Sequence
  Description of Artificial Sequence: Synthetic oligonucleotide
uuggucucgucauccacaa

SEQ ID NO: 1397103 - RNA, 19 nt, Artificial Sequence
  Description of Artificial Sequence: Synthetic oligonucleotide
cugauaccuugacacuggg

SEQ ID NO: 1397104 - RNA, 19 nt, Artificial Sequence
  Description of Artificial Sequence: Synthetic oligonucleotide
ggaaagaggguggccaugg

SEQ ID NO: 1397105 - RNA, 19 nt, Artificial Sequence
  Description of Artificial Sequence: Synthetic oligonucleotide
guaaguaucggaguccucu

SEQ ID NO: 1397106 - RNA, 19 nt, Artificial Sequence
  Description of Artificial Sequence: Synthetic oligonucleotide
gagcuugacguaguacugc

SEQ ID NO: 1397107 - RNA, 19 nt, Artificial Sequence
  Description of Artificial Sequence: Synthetic oligonucleotide
uguacgucgcgccccugga

SEQ ID NO: 1397108 - RNA, 19 nt, Artificial Sequence
  Description of Artificial Sequence: Synthetic oligonucleotide
acauuaacuucaaaccgau

SEQ ID NO: 1397109 - RNA, 19 nt, Artificial Sequence
  Description of Artificial Sequence: Synthetic oligonucleotide
gucaccuaggaagaggauc

SEQ ID NO: 1397110 - RNA, 19 nt, Artificial Sequence
  Description of Artificial Sequence: Synthetic oligonucleotide
uguucugccauggcacugu

SEQ ID NO: 1397111 - RNA, 19 nt, Artificial Sequence
  Description of Artificial Sequence: Synthetic oligonucleotide
gaauacacucaugcuggac

SEQ ID NO: 1397112 - RNA, 19 nt, Artificial Sequence
  Description of Artificial Sequence: Synthetic oligonucleotide
aagacgauguugacucgcu

SEQ ID NO: 1397113 - RNA, 19 nt, Artificial Sequence
  Description of Artificial Sequence: Synthetic oligonucleotide
uugguaccaaagcgaccag

SEQ ID NO: 1397114 - RNA, 19 nt, Artificial Sequence
  Description of Artificial Sequence: Synthetic oligonucleotide
ggugaagguaaguaucgga

SEQ ID NO: 1397115 - RNA, 19 nt, Artificial Sequence
  Description of Artificial Sequence: Synthetic oligonucleotide
caccacaacauggggacag

SEQ ID NO: 1397116 - RNA, 19 nt, Artificial Sequence
  Description of Artificial Sequence: Synthetic oligonucleotide
ugccucgaugaauagcaau

SEQ ID NO: 1397117 - RNA, 19 nt, Artificial Sequence
  Description of Artificial Sequence: Synthetic oligonucleotide
agguaaguaucggaguccu

SEQ ID NO: 1397118 - RNA, 19 nt, Artificial Sequence
  Description of Artificial Sequence: Synthetic oligonucleotide
uaugguuaucggcucuguu

SEQ ID NO: 1397119 - RNA, 19 nt, Artificial Sequence
  Description of Artificial Sequence: Synthetic oligonucleotide
auaccuugacacugggcau

SEQ ID NO: 1397120 - RNA, 19 nt, Artificial Sequence
  Description of Artificial Sequence: Synthetic oligonucleotide
cugaacaucauugaggauu

SEQ ID NO: 1397121 - RNA, 19 nt, Artificial Sequence
  Description of Artificial Sequence: Synthetic oligonucleotide
ucaaaccgauccugaacau

SEQ ID NO: 1397122 - RNA, 19 nt, Artificial Sequence
  Description of Artificial Sequence: Synthetic oligonucleotide
cauaugguuaucggcucug

SEQ ID NO: 1397123 - RNA, 19 nt, Artificial Sequence
  Description of Artificial Sequence: Synthetic oligonucleotide
auuugucaccuaggaagag

SEQ ID NO: 1397124 - RNA, 19 nt, Artificial Sequence
  Description of Artificial Sequence: Synthetic oligonucleotide
auacccagaauggccuggg

SEQ ID NO: 1397125 - RNA, 19 nt, Artificial Sequence
  Description of Artificial Sequence: Synthetic oligonucleotide
ccucugccaaacaaauugg

SEQ ID NO: 1397126 - RNA, 19 nt, Artificial Sequence
  Description of Artificial Sequence: Synthetic oligonucleotide
cauuaacuucaaaccgauc

SEQ ID NO: 1397127 - RNA, 19 nt, Artificial Sequence
  Description of Artificial Sequence: Synthetic oligonucleotide
uggccauggugcauuggcu

SEQ ID NO: 1397128 - RNA, 19 nt, Artificial Sequence
  Description of Artificial Sequence: Synthetic oligonucleotide
uacuuagagaagcgcucau

SEQ ID NO: 1397129 - RNA, 19 nt, Artificial Sequence
  Description of Artificial Sequence: Synthetic oligonucleotide
acgucgcgccccuggacgc

SEQ ID NO: 1397130 - RNA, 19 nt, Artificial Sequence
  Description of Artificial Sequence: Synthetic oligonucleotide
caguacagauaccuggcca

SEQ ID NO: 1397131 - RNA, 19 nt, Artificial Sequence
  Description of Artificial Sequence: Synthetic oligonucleotide
cugguuguacgucgcgccc

SEQ ID NO: 1397132 - RNA, 19 nt, Artificial Sequence
  Description of Artificial Sequence: Synthetic oligonucleotide
ggcgaaagaucucuugcac

SEQ ID NO: 1397133 - RNA, 19 nt, Artificial Sequence
  Description of Artificial Sequence: Synthetic oligonucleotide
agcuuuggaacaauauaaa

SEQ ID NO: 1397134 - RNA, 19 nt, Artificial Sequence
  Description of Artificial Sequence: Synthetic oligonucleotide
acagucaacuauggcucuc

SEQ ID NO: 1397135 - RNA, 19 nt, Artificial Sequence
  Description of Artificial Sequence: Synthetic oligonucleotide
gaacuuccugcagaccggc

SEQ ID NO: 1397136 - RNA, 19 nt, Artificial Sequence
  Description of Artificial Sequence: Synthetic oligonucleotide
caacguugcacagacuuga

SEQ ID NO: 1397137 - RNA, 19 nt, Artificial Sequence
  Description of Artificial Sequence: Synthetic oligonucleotide
uccauaccucugccaaaca

SEQ ID NO: 1397138 - RNA, 19 nt, Artificial Sequence
  Description of Artificial Sequence: Synthetic oligonucleotide
aaagucccggaaaccagaa

SEQ ID NO: 1397139 - RNA, 19 nt, Artificial Sequence
  Description of Artificial Sequence: Synthetic oligonucleotide
cacaugaccaguacagaua

SEQ ID NO: 1397140 - RNA, 19 nt, Artificial Sequence
  Description of Artificial Sequence: Synthetic oligonucleotide
caagugccaggauccggcc

SEQ ID NO: 1397141 - RNA, 19 nt, Artificial Sequence
  Description of Artificial Sequence: Synthetic oligonucleotide
gccucgaugaauagcaaug

SEQ ID NO: 1397142 - RNA, 19 nt, Artificial Sequence
  Description of Artificial Sequence: Synthetic oligonucleotide
cuugucacauucaucuagu

SEQ ID NO: 1397143 - RNA, 19 nt, Artificial Sequence
  Description of Artificial Sequence: Synthetic oligonucleotide
guaccaaagcgaccagcac

SEQ ID NO: 1397144 - RNA, 19 nt, Artificial Sequence
  Description of Artificial Sequence: Synthetic oligonucleotide
ugguuguacgucgcgcccc

SEQ ID NO: 1397145 - RNA, 19 nt, Artificial Sequence
  Description of Artificial Sequence: Synthetic oligonucleotide
cccaccacaacauggggac

SEQ ID NO: 1397146 - RNA, 19 nt, Artificial Sequence
  Description of Artificial Sequence: Synthetic oligonucleotide
guacaagugccaggauccg

SEQ ID NO: 1397147 - RNA, 19 nt, Artificial Sequence
  Description of Artificial Sequence: Synthetic oligonucleotide
ccugcuccguacaagugcc

SEQ ID NO: 1397148 - RNA, 19 nt, Artificial Sequence
  Description of Artificial Sequence: Synthetic oligonucleotide
uugucacauucaucuagua

SEQ ID NO: 1397149 - RNA, 19 nt, Artificial Sequence
  Description of Artificial Sequence: Synthetic oligonucleotide
acugucgcccgguucgccu

SEQ ID NO: 1397150 - RNA, 19 nt, Artificial Sequence
  Description of Artificial Sequence: Synthetic oligonucleotide
guaucggaguccucuggca

SEQ ID NO: 1397151 - RNA, 19 nt, Artificial Sequence
  Description of Artificial Sequence: Synthetic oligonucleotide
ccaaagaacacugauaccu

SEQ ID NO: 1397152 - RNA, 19 nt, Artificial Sequence
  Description of Artificial Sequence: Synthetic oligonucleotide
caaaccgauccugaacauc

SEQ ID NO: 1397153 - RNA, 19 nt, Artificial Sequence
  Description of Artificial Sequence: Synthetic oligonucleotide
gcucuguucaauguaugug

SEQ ID NO: 1397154 - RNA, 19 nt, Artificial Sequence
  Description of Artificial Sequence: Synthetic oligonucleotide
gguaccaaagcgaccagca

SEQ ID NO: 1397155 - RNA, 19 nt, Artificial Sequence
  Description of Artificial Sequence: Synthetic oligonucleotide
ugcgaggagagccguccgu

SEQ ID NO: 1397156 - RNA, 19 nt, Artificial Sequence
  Description of Artificial Sequence: Synthetic oligonucleotide
uggcuacacauaugguuau

SEQ ID NO: 1397157 - RNA, 19 nt, Artificial Sequence
  Description of Artificial Sequence: Synthetic oligonucleotide
uuguucugccauggcacug

SEQ ID NO: 1397158 - RNA, 19 nt, Artificial Sequence
  Description of Artificial Sequence: Synthetic oligonucleotide
ggccaugcaacguugcaca

SEQ ID NO: 1397159 - RNA, 19 nt, Artificial Sequence
  Description of Artificial Sequence: Synthetic oligonucleotide
uagccaccaggaugcgccg

SEQ ID NO: 1397160 - RNA, 19 nt, Artificial Sequence
  Description of Artificial Sequence: Synthetic oligonucleotide
uugacguaguacugcugua

SEQ ID NO: 1397161 - RNA, 19 nt, Artificial Sequence
  Description of Artificial Sequence: Synthetic oligonucleotide
cagacuugacgaagaucac

SEQ ID NO: 1397162 - RNA, 19 nt, Artificial Sequence
  Description of Artificial Sequence: Synthetic oligonucleotide
guugcacagacuugacgaa

SEQ ID NO: 1397163 - RNA, 19 nt, Artificial Sequence
  Description of Artificial Sequence: Synthetic oligonucleotide
auacacccauuugucaccu

SEQ ID NO: 1397164 - RNA, 19 nt, Artificial Sequence
  Description of Artificial Sequence: Synthetic oligonucleotide
gacaggcgcuccuccuggg

SEQ ID NO: 1397165 - RNA, 19 nt, Artificial Sequence
  Description of Artificial Sequence: Synthetic oligonucleotide
cguugcacagacuugacga

SEQ ID NO: 1397166 - RNA, 19 nt, Artificial Sequence
  Description of Artificial Sequence: Synthetic oligonucleotide
ccucgaugaauagcaaugg

SEQ ID NO: 1397167 - RNA, 19 nt, Artificial Sequence
  Description of Artificial Sequence: Synthetic oligonucleotide
agcgaccagcacgagccac

SEQ ID NO: 1397168 - RNA, 19 nt, Artificial Sequence
  Description of Artificial Sequence: Synthetic oligonucleotide
uggggcaugccucgaugaa

SEQ ID NO: 1397169 - RNA, 19 nt, Artificial Sequence
  Description of Artificial Sequence: Synthetic oligonucleotide
gucccggaaaccagaacug

SEQ ID NO: 1397170 - RNA, 19 nt, Artificial Sequence
  Description of Artificial Sequence: Synthetic oligonucleotide
gaugcgccgcuggaagucc

SEQ ID NO: 1397171 - RNA, 19 nt, Artificial Sequence
  Description of Artificial Sequence: Synthetic oligonucleotide
gucugguuguacgucgcgc

SEQ ID NO: 1397172 - RNA, 19 nt, Artificial Sequence
  Description of Artificial Sequence: Synthetic oligonucleotide
caucaugcacugcuucuca

SEQ ID NO: 1397173 - RNA, 19 nt, Artificial Sequence
  Description of Artificial Sequence: Synthetic oligonucleotide
cacagacuugacgaagauc

SEQ ID NO: 1397174 - RNA, 19 nt, Artificial Sequence
  Description of Artificial Sequence: Synthetic oligonucleotide
ggugucaggcgaaagaucu

SEQ ID NO: 1397175 - RNA, 19 nt, Artificial Sequence
  Description of Artificial Sequence: Synthetic oligonucleotide
cuccguacaagugccagga

SEQ ID NO: 1397176 - RNA, 19 nt, Artificial Sequence
  Description of Artificial Sequence: Synthetic oligonucleotide
ucccggaaaccagaacugu

SEQ ID NO: 1397177 - RNA, 19 nt, Artificial Sequence
  Description of Artificial Sequence: Synthetic oligonucleotide
gggacaguucuucuucaac

SEQ ID NO: 1397178 - RNA, 19 nt, Artificial Sequence
  Description of Artificial Sequence: Synthetic oligonucleotide
cucuugcacgucccggcgc

SEQ ID NO: 1397179 - RNA, 19 nt, Artificial Sequence
  Description of Artificial Sequence: Synthetic oligonucleotide
agggccaugcaacguugca

SEQ ID NO: 1397180 - RNA, 19 nt, Artificial Sequence
  Description of Artificial Sequence: Synthetic oligonucleotide
uaccucugccaaacaaauu

SEQ ID NO: 1397181 - RNA, 19 nt, Artificial Sequence
  Description of Artificial Sequence: Synthetic oligonucleotide
accuaggaagaggaucuga

SEQ ID NO: 1397182 - RNA, 19 nt, Artificial Sequence
  Description of Artificial Sequence: Synthetic oligonucleotide
auaugguuaucggcucugu

SEQ ID NO: 1397183 - RNA, 19 nt, Artificial Sequence
  Description of Artificial Sequence: Synthetic oligonucleotide
gcuccguacaagugccagg

SEQ ID NO: 1397184 - RNA, 19 nt, Artificial Sequence
  Description of Artificial Sequence: Synthetic oligonucleotide
gucucgucauccacaaaca

SEQ ID NO: 1397185 - RNA, 19 nt, Artificial Sequence
  Description of Artificial Sequence: Synthetic oligonucleotide
aggaugcgccgcuggaagu

SEQ ID NO: 1397186 - RNA, 19 nt, Artificial Sequence
  Description of Artificial Sequence: Synthetic oligonucleotide
ccuucuuaauggagaggcc

SEQ ID NO: 1397187 - RNA, 19 nt, Artificial Sequence
  Description of Artificial Sequence: Synthetic oligonucleotide
guagcgagacaggcgcucc

SEQ ID NO: 1397188 - RNA, 19 nt, Artificial Sequence
  Description of Artificial Sequence: Synthetic oligonucleotide
ugguagcgagacaggcgcu

SEQ ID NO: 1397189 - RNA, 19 nt, Artificial Sequence
  Description of Artificial Sequence: Synthetic oligonucleotide
agugugagcuuggucucgu

SEQ ID NO: 1397190 - RNA, 19 nt, Artificial Sequence
  Description of Artificial Sequence: Synthetic oligonucleotide
gagugcucuccuggggugc

SEQ ID NO: 1397191 - RNA, 19 nt, Artificial Sequence
  Description of Artificial Sequence: Synthetic oligonucleotide
cagugugagcuuggucucg

SEQ ID NO: 1397192 - RNA, 19 nt, Artificial Sequence
  Description of Artificial Sequence: Synthetic oligonucleotide
agcucccuuguauggcaca

SEQ ID NO: 1397193 - RNA, 19 nt, Artificial Sequence
  Description of Artificial Sequence: Synthetic oligonucleotide
caggauccggccugguguc

SEQ ID NO: 1397194 - RNA, 19 nt, Artificial Sequence
  Description of Artificial Sequence: Synthetic oligonucleotide
cauuccucagguucagacu

SEQ ID NO: 1397195 - RNA, 19 nt, Artificial Sequence
  Description of Artificial Sequence: Synthetic oligonucleotide
guagcccgugcagugugag

SEQ ID NO: 1397196 - RNA, 19 nt, Artificial Sequence
  Description of Artificial Sequence: Synthetic oligonucleotide
ccaguacagauaccuggcc

SEQ ID NO: 1397197 - RNA, 19 nt, Artificial Sequence
  Description of Artificial Sequence: Synthetic oligonucleotide
gauccggccuggugucccc

SEQ ID NO: 1397198 - RNA, 19 nt, Artificial Sequence
  Description of Artificial Sequence: Synthetic oligonucleotide
ccguacaagugccaggauc

SEQ ID NO: 1397199 - RNA, 19 nt, Artificial Sequence
  Description of Artificial Sequence: Synthetic oligonucleotide
guucgccuccgcgagcugc

SEQ ID NO: 1397200 - RNA, 19 nt, Artificial Sequence
  Description of Artificial Sequence: Synthetic oligonucleotide
guguccccaccacaacaug

SEQ ID NO: 1397201 - RNA, 19 nt, Artificial Sequence
  Description of Artificial Sequence: Synthetic oligonucleotide
cugcgaggagagccguccg

SEQ ID NO: 1397202 - RNA, 19 nt, Artificial Sequence
  Description of Artificial Sequence: Synthetic oligonucleotide
gacugccaggccuuuggua

SEQ ID NO: 1397203 - RNA, 19 nt, Artificial Sequence
  Description of Artificial Sequence: Synthetic oligonucleotide
cagcacgagccacucggug

SEQ ID NO: 1397204 - RNA, 19 nt, Artificial Sequence
  Description of Artificial Sequence: Synthetic oligonucleotide
ccguccgucugguuguacg

SEQ ID NO: 1397205 - RNA, 19 nt, Artificial Sequence
  Description of Artificial Sequence: Synthetic oligonucleotide
ccuugcuuaucuggaaggc

SEQ ID NO: 1397206 - RNA, 19 nt, Artificial Sequence
  Description of Artificial Sequence: Synthetic oligonucleotide
cuugcccaucccagacuug

SEQ ID NO: 1397207 - RNA, 19 nt, Artificial Sequence
  Description of Artificial Sequence: Synthetic oligonucleotide
auggagacguaagacccuu

SEQ ID NO: 1397208 - RNA, 19 nt, Artificial Sequence
  Description of Artificial Sequence: Synthetic oligonucleotide
gccauggugcauuggcuac

SEQ ID NO: 1397209 - RNA, 19 nt, Artificial Sequence
  Description of Artificial Sequence: Synthetic oligonucleotide
uggccauugaugggcucga

SEQ ID NO: 1397210 - RNA, 19 nt, Artificial Sequence
  Description of Artificial Sequence: Synthetic oligonucleotide
uccguacaagugccaggau

SEQ ID NO: 1397211 - RNA, 19 nt, Artificial Sequence
  Description of Artificial Sequence: Synthetic oligonucleotide
cuuacacagcuacagcuuu

SEQ ID NO: 1397212 - RNA, 19 nt, Artificial Sequence
  Description of Artificial Sequence: Synthetic oligonucleotide
cagcuacagcuuuggaaca

SEQ ID NO: 1397213 - RNA, 19 nt, Artificial Sequence
  Description of Artificial Sequence: Synthetic oligonucleotide
cacucggugaagguaagua

SEQ ID NO: 1397214 - RNA, 19 nt, Artificial Sequence
  Description of Artificial Sequence: Synthetic oligonucleotide
auggggugucaggcgaaag

SEQ ID NO: 1397215 - RNA, 19 nt, Artificial Sequence
  Description of Artificial Sequence: Synthetic oligonucleotide
uggcacugucgcccgguuc

SEQ ID NO: 1397216 - RNA, 19 nt, Artificial Sequence
  Description of Artificial Sequence: Synthetic oligonucleotide
agacuccugcuccguacaa

SEQ ID NO: 1397217 - RNA, 19 nt, Artificial Sequence
  Description of Artificial Sequence: Synthetic oligonucleotide
cuuguucugccauggcacu

SEQ ID NO: 1397218 - RNA, 19 nt, Artificial Sequence
  Description of Artificial Sequence: Synthetic oligonucleotide
ggcaugccucgaugaauag

SEQ ID NO: 1397219 - RNA, 19 nt, Artificial Sequence
  Description of Artificial Sequence: Synthetic oligonucleotide
cccggaaaccagaacugug

SEQ ID NO: 1397220 - RNA, 19 nt, Artificial Sequence
  Description of Artificial Sequence: Synthetic oligonucleotide
gcugcgaggagagccgucc

SEQ ID NO: 1397221 - RNA, 19 nt, Artificial Sequence
  Description of Artificial Sequence: Synthetic oligonucleotide
gcacugaacaucaugcacu

SEQ ID NO: 1397222 - RNA, 19 nt, Artificial Sequence
  Description of Artificial Sequence: Synthetic oligonucleotide
gcaacguugcacagacuug

SEQ ID NO: 1397223 - RNA, 19 nt, Artificial Sequence
  Description of Artificial Sequence: Synthetic oligonucleotide
gccauggcacugucgcccg

SEQ ID NO: 1397224 - RNA, 19 nt, Artificial Sequence
  Description of Artificial Sequence: Synthetic oligonucleotide
cuuggggcucuucgucuuc

SEQ ID NO: 1397225 - RNA, 19 nt, Artificial Sequence
  Description of Artificial Sequence: Synthetic oligonucleotide
ggaauacacucaugcugga

SEQ ID NO: 1397226 - RNA, 19 nt, Artificial Sequence
  Description of Artificial Sequence: Synthetic oligonucleotide
gcaugccucgaugaauagc

SEQ ID NO: 1397227 - RNA, 19 nt, Artificial Sequence
  Description of Artificial Sequence: Synthetic oligonucleotide
uacacucaugcuggaccuc

SEQ ID NO: 1397228 - RNA, 19 nt, Artificial Sequence
  Description of Artificial Sequence: Synthetic oligonucleotide
aaccgauccugaacaucau

SEQ ID NO: 1397229 - RNA, 19 nt, Artificial Sequence
  Description of Artificial Sequence: Synthetic oligonucleotide
uugcacgucccggcgcaug

SEQ ID NO: 1397230 - RNA, 19 nt, Artificial Sequence
  Description of Artificial Sequence: Synthetic oligonucleotide
guacgucgcgccccuggac

SEQ ID NO: 1397231 - RNA, 19 nt, Artificial Sequence
  Description of Artificial Sequence: Synthetic oligonucleotide
aggacgucaaggaggucaa

SEQ ID NO: 1397232 - RNA, 19 nt, Artificial Sequence
  Description of Artificial Sequence: Synthetic oligonucleotide
gccaugcaacguugcacag

SEQ ID NO: 1397233 - RNA, 19 nt, Artificial Sequence
  Description of Artificial Sequence: Synthetic oligonucleotide
gccauugaugggcucgauc

SEQ ID NO: 1397234 - RNA, 19 nt, Artificial Sequence
  Description of Artificial Sequence: Synthetic oligonucleotide
ugacucgcucaauguccau

SEQ ID NO: 1397235 - RNA, 19 nt, Artificial Sequence
  Description of Artificial Sequence: Synthetic oligonucleotide
cauuggcuacacauauggu

SEQ ID NO: 1397236 - RNA, 19 nt, Artificial Sequence
  Description of Artificial Sequence: Synthetic oligonucleotide
ggugcauuggcuacacaua

SEQ ID NO: 1397237 - RNA, 19 nt, Artificial Sequence
  Description of Artificial Sequence: Synthetic oligonucleotide
guauguggagauaucuauu

SEQ ID NO: 1397238 - RNA, 19 nt, Artificial Sequence
  Description of Artificial Sequence: Synthetic oligonucleotide
cugucgcccgguucgccuc

SEQ ID NO: 1397239 - RNA, 19 nt, Artificial Sequence
  Description of Artificial Sequence: Synthetic oligonucleotide
aggguggccauggugcauu

SEQ ID NO: 1397240 - RNA, 19 nt, Artificial Sequence
  Description of Artificial Sequence: Synthetic oligonucleotide
gggccaugcaacguugcac

SEQ ID NO: 1397241 - RNA, 19 nt, Artificial Sequence
  Description of Artificial Sequence: Synthetic oligonucleotide
aacugugaauggagacgua

SEQ ID NO: 1397242 - RNA, 19 nt, Artificial Sequence
  Description of Artificial Sequence: Synthetic oligonucleotide
cucccuuguauggcacaug

SEQ ID NO: 1397243 - RNA, 19 nt, Artificial Sequence
  Description of Artificial Sequence: Synthetic oligonucleotide
cucucaggagcucuggcuu

SEQ ID NO: 1397244 - RNA, 19 nt, Artificial Sequence
  Description of Artificial Sequence: Synthetic oligonucleotide
ccaaacaaauugguagcca

SEQ ID NO: 1397245 - RNA, 19 nt, Artificial Sequence
  Description of Artificial Sequence: Synthetic oligonucleotide
gguuaaacucuaggacguc

SEQ ID NO: 1397246 - RNA, 19 nt, Artificial Sequence
  Description of Artificial Sequence: Synthetic oligonucleotide
gguagcgagacaggcgcuc

SEQ ID NO: 1397247 - RNA, 19 nt, Artificial Sequence
  Description of Artificial Sequence: Synthetic oligonucleotide
guuaucggcucuguucaau

SEQ ID NO: 1397248 - RNA, 19 nt, Artificial Sequence
  Description of Artificial Sequence: Synthetic oligonucleotide
ccauaccucugccaaacaa

SEQ ID NO: 1397249 - RNA, 19 nt, Artificial Sequence
  Description of Artificial Sequence: Synthetic oligonucleotide
guccgucugguuguacguc

SEQ ID NO: 1397250 - RNA, 19 nt, Artificial Sequence
  Description of Artificial Sequence: Synthetic oligonucleotide
cacagucaacuauggcucu

SEQ ID NO: 1397251 - RNA, 19 nt, Artificial Sequence
  Description of Artificial Sequence: Synthetic oligonucleotide
uuccugcagaccggccgga

SEQ ID NO: 1397252 - RNA, 19 nt, Artificial Sequence
  Description of Artificial Sequence: Synthetic oligonucleotide
uacacccauuugucaccua

SEQ ID NO: 1397253 - RNA, 19 nt, Artificial Sequence
  Description of Artificial Sequence: Synthetic oligonucleotide
ggaagcucugccacauuaa

SEQ ID NO: 1397254 - RNA, 19 nt, Artificial Sequence
  Description of Artificial Sequence: Synthetic oligonucleotide
gugucaggcgaaagaucuc

SEQ ID NO: 1397255 - RNA, 19 nt, Artificial Sequence
  Description of Artificial Sequence: Synthetic oligonucleotide
agcugcgaggagagccguc

SEQ ID NO: 1397256 - RNA, 19 nt, Artificial Sequence
  Description of Artificial Sequence: Synthetic oligonucleotide
ccuggggaauacacucaug

SEQ ID NO: 1397257 - RNA, 19 nt, Artificial Sequence
  Description of Artificial Sequence: Synthetic oligonucleotide
gcacgagccacucggugaa

SEQ ID NO: 1397258 - RNA, 19 nt, Artificial Sequence
  Description of Artificial Sequence: Synthetic oligonucleotide
ggugcuuggggcucuucgu

SEQ ID NO: 1397259 - RNA, 19 nt, Artificial Sequence
  Description of Artificial Sequence: Synthetic oligonucleotide
ggauccggccugguguccc

SEQ ID NO: 1397260 - RNA, 19 nt, Artificial Sequence
  Description of Artificial Sequence: Synthetic oligonucleotide
ccgucugguuguacgucgc

SEQ ID NO: 1397261 - RNA, 19 nt, Artificial Sequence
  Description of Artificial Sequence: Synthetic oligonucleotide
cuauggcucucaggagcuc

SEQ ID NO: 1397262 - RNA, 19 nt, Artificial Sequence
  Description of Artificial Sequence: Synthetic oligonucleotide
cccuuguauggcacaugac

SEQ ID NO: 1397263 - RNA, 19 nt, Artificial Sequence
  Description of Artificial Sequence: Synthetic oligonucleotide
cacugucgcccgguucgcc

SEQ ID NO: 1397264 - RNA, 19 nt, Artificial Sequence
  Description of Artificial Sequence: Synthetic oligonucleotide
ccgugcagugugagcuugg

SEQ ID NO: 1397265 - RNA, 19 nt, Artificial Sequence
  Description of Artificial Sequence: Synthetic oligonucleotide
cagauaccuggccauugau

SEQ ID NO: 1397266 - RNA, 19 nt, Artificial Sequence
  Description of Artificial Sequence: Synthetic oligonucleotide
cgucugguuguacgucgcg

SEQ ID NO: 1397267 - RNA, 19 nt, Artificial Sequence
  Description of Artificial Sequence: Synthetic oligonucleotide
cccauuugucaccuaggaa

SEQ ID NO: 1397268 - RNA, 19 nt, Artificial Sequence
  Description of Artificial Sequence: Synthetic oligonucleotide
gguuaucggcucuguucaa

SEQ ID NO: 1397269 - RNA, 19 nt, Artificial Sequence
  Description of Artificial Sequence: Synthetic oligonucleotide
cuccgcgagcugcgaggag

SEQ ID NO: 1397270 - RNA, 19 nt, Artificial Sequence
  Description of Artificial Sequence: Synthetic oligonucleotide
ucgcccgguucgccuccgc

SEQ ID NO: 1397271 - RNA, 19 nt, Artificial Sequence
  Description of Artificial Sequence: Synthetic oligonucleotide
cggugaagguaaguaucgg

SEQ ID NO: 1397272 - RNA, 19 nt, Artificial Sequence
  Description of Artificial Sequence: Synthetic oligonucleotide
augccucgaugaauagcaa

SEQ ID NO: 1397273 - RNA, 19 nt, Artificial Sequence
  Description of Artificial Sequence: Synthetic oligonucleotide
gguaaguaucggaguccuc

SEQ ID NO: 1397274 - RNA, 19 nt, Artificial Sequence
  Description of Artificial Sequence: Synthetic oligonucleotide
uccugcagaccggccggau

SEQ ID NO: 1397275 - RNA, 19 nt, Artificial Sequence
  Description of Artificial Sequence: Synthetic oligonucleotide
guuguacgucgcgccccug

SEQ ID NO: 1397276 - RNA, 19 nt, Artificial Sequence
  Description of Artificial Sequence: Synthetic oligonucleotide
gcgaggagagccguccguc

SEQ ID NO: 1397277 - RNA, 19 nt, Artificial Sequence
  Description of Artificial Sequence: Synthetic oligonucleotide
ggguggccauggugcauug

SEQ ID NO: 1397278 - RNA, 19 nt, Artificial Sequence
  Description of Artificial Sequence: Synthetic oligonucleotide
gguuguacgucgcgccccu

SEQ ID NO: 1397279 - RNA, 19 nt, Artificial Sequence
  Description of Artificial Sequence: Synthetic oligonucleotide
cgcucauauuccuugcuua

SEQ ID NO: 1397280 - RNA, 19 nt, Artificial Sequence
  Description of Artificial Sequence: Synthetic oligonucleotide
ggccuggggaauacacuca

SEQ ID NO: 1397281 - RNA, 19 nt, Artificial Sequence
  Description of Artificial Sequence: Synthetic oligonucleotide
guucagacuccugcuccgu

SEQ ID NO: 1397282 - RNA, 19 nt, Artificial Sequence
  Description of Artificial Sequence: Synthetic oligonucleotide
cuaggacgucaaggagguc

SEQ ID NO: 1397283 - RNA, 19 nt, Artificial Sequence
  Description of Artificial Sequence: Synthetic oligonucleotide
augcaacguugcacagacu

SEQ ID NO: 1397284 - RNA, 19 nt, Artificial Sequence
  Description of Artificial Sequence: Synthetic oligonucleotide
gcccgguucgccuccgcga

SEQ ID NO: 1397285 - RNA, 19 nt, Artificial Sequence
  Description of Artificial Sequence: Synthetic oligonucleotide
gucgcccgguucgccuccg

SEQ ID NO: 1397286 - RNA, 19 nt, Artificial Sequence
  Description of Artificial Sequence: Synthetic oligonucleotide
ccaugcaacguugcacaga

SEQ ID NO: 1397287 - RNA, 19 nt, Artificial Sequence
  Description of Artificial Sequence: Synthetic oligonucleotide
cauggcacugucgcccggu

SEQ ID NO: 1397288 - RNA, 19 nt, Artificial Sequence
  Description of Artificial Sequence: Synthetic oligonucleotide
cagaccggccggaucuccu

SEQ ID NO: 1397289 - RNA, 19 nt, Artificial Sequence
  Description of Artificial Sequence: Synthetic oligonucleotide
gccuggggaauacacucau

SEQ ID NO: 1397290 - RNA, 19 nt, Artificial Sequence
  Description of Artificial Sequence: Synthetic oligonucleotide
ucgccuccgcgagcugcga

SEQ ID NO: 1397291 - RNA, 19 nt, Artificial Sequence
  Description of Artificial Sequence: Synthetic oligonucleotide
gagcugcgaggagagccgu

SEQ ID NO: 1397292 - RNA, 19 nt, Artificial Sequence
  Description of Artificial Sequence: Synthetic oligonucleotide
gcacagacuugacgaagau

SEQ ID NO: 1397293 - RNA, 19 nt, Artificial Sequence
  Description of Artificial Sequence: Synthetic oligonucleotide
ccauggcacugucgcccgg

SEQ ID NO: 1397294 - RNA, 19 nt, Artificial Sequence
  Description of Artificial Sequence: Synthetic oligonucleotide
ccauggugcauuggcuaca

SEQ ID NO: 1397295 - RNA, 19 nt, Artificial Sequence
  Description of Artificial Sequence: Synthetic oligonucleotide
cgucccggcgcauguccag

SEQ ID NO: 1397296 - RNA, 19 nt, Artificial Sequence
  Description of Artificial Sequence: Synthetic oligonucleotide
gcuacagcuuuggaacaau

SEQ ID NO: 1397297 - RNA, 19 nt, Artificial Sequence
  Description of Artificial Sequence: Synthetic oligonucleotide
gcacugucgcccgguucgc

SEQ ID NO: 1397298 - RNA, 19 nt, Artificial Sequence
  Description of Artificial Sequence: Synthetic oligonucleotide
gucaggcgaaagaucucuu

SEQ ID NO: 1397299 - RNA, 19 nt, Artificial Sequence
  Description of Artificial Sequence: Synthetic oligonucleotide
gaacaucauugaggauuuu

SEQ ID NO: 1397300 - RNA, 19 nt, Artificial Sequence
  Description of Artificial Sequence: Synthetic oligonucleotide
ccgguucgccuccgcgagc

SEQ ID NO: 1397301 - RNA, 19 nt, Artificial Sequence
  Description of Artificial Sequence: Synthetic oligonucleotide
gcucccuuguauggcacau

SEQ ID NO: 1397302 - RNA, 19 nt, Artificial Sequence
  Description of Artificial Sequence: Synthetic oligonucleotide
ggagagccguccgucuggu

SEQ ID NO: 1397303 - RNA, 19 nt, Artificial Sequence
  Description of Artificial Sequence: Synthetic oligonucleotide
gagagccguccgucugguu

SEQ ID NO: 1397304 - RNA, 19 nt, Artificial Sequence
  Description of Artificial Sequence: Synthetic oligonucleotide
agccguccgucugguugua

SEQ ID NO: 1397305 - RNA, 19 nt, Artificial Sequence
  Description of Artificial Sequence: Synthetic oligonucleotide
cguccgucugguuguacgu

SEQ ID NO: 1397306 - RNA, 19 nt, Artificial Sequence
  Description of Artificial Sequence: Synthetic oligonucleotide
ccugaacaucauugaggau

SEQ ID NO: 1397307 - RNA, 19 nt, Artificial Sequence
  Description of Artificial Sequence: Synthetic oligonucleotide
ccagcacgagccacucggu

SEQ ID NO: 1397308 - RNA, 19 nt, Artificial Sequence
  Description of Artificial Sequence: Synthetic oligonucleotide
cuggggugcuuggggcucu

SEQ ID NO: 1397309 - RNA, 19 nt, Artificial Sequence
  Description of Artificial Sequence: Synthetic oligonucleotide
gccguccgucugguuguac

SEQ ID NO: 1397310 - RNA, 19 nt, Artificial Sequence
  Description of Artificial Sequence: Synthetic oligonucleotide
cgaggagagccguccgucu

SEQ ID NO: 1397311 - RNA, 19 nt, Artificial Sequence
  Description of Artificial Sequence: Synthetic oligonucleotide
cuugcacgucccggcgcau

SEQ ID NO: 1397312 - RNA, 19 nt, Artificial Sequence
  Description of Artificial Sequence: Synthetic oligonucleotide
ccacucggugaagguaagu

SEQ ID NO: 1397313 - RNA, 19 nt, Artificial Sequence
  Description of Artificial Sequence: Synthetic oligonucleotide
ccuugacacugggcaugua

SEQ ID NO: 1397314 - RNA, 19 nt, Artificial Sequence
  Description of Artificial Sequence: Synthetic oligonucleotide
cgauguugacucgcucaau

SEQ ID NO: 1397315 - RNA, 19 nt, Artificial Sequence
  Description of Artificial Sequence: Synthetic oligonucleotide
agagucuucacauagcacc

SEQ ID NO: 1397316 - RNA, 19 nt, Artificial Sequence
  Description of Artificial Sequence: Synthetic oligonucleotide
aacauguuuauuuucucac

SEQ ID NO: 1397317 - RNA, 19 nt, Artificial Sequence
  Description of Artificial Sequence: Synthetic oligonucleotide
aaugagaucacccauccca

SEQ ID NO: 1397318 - RNA, 19 nt, Artificial Sequence
  Description of Artificial Sequence: Synthetic oligonucleotide
aaguagaucuaagagaaac

SEQ ID NO: 1397319 - RNA, 19 nt, Artificial Sequence
  Description of Artificial Sequence: Synthetic oligonucleotide
uuuggauccacucaguuca

SEQ ID NO: 1397320 - RNA, 19 nt, Artificial Sequence
  Description of Artificial Sequence: Synthetic oligonucleotide
ucuagaauaccuauauuag

SEQ ID NO: 1397321 - RNA, 19 nt, Artificial Sequence
  Description of Artificial Sequence: Synthetic oligonucleotide
auauguaacaaugagauca

SEQ ID NO: 1397322 - RNA, 19 nt, Artificial Sequence
  Description of Artificial Sequence: Synthetic oligonucleotide
aacuugauauuguaguggg

SEQ ID NO: 1397323 - RNA, 19 nt, Artificial Sequence
  Description of Artificial Sequence: Synthetic oligonucleotide
acugacaaccacuacaugg

SEQ ID NO: 1397324 - RNA, 19 nt, Artificial Sequence
  Description of Artificial Sequence: Synthetic oligonucleotide
uguuaaugcuuccugaucc

SEQ ID NO: 1397325 - RNA, 19 nt, Artificial Sequence
  Description of Artificial Sequence: Synthetic oligonucleotide
uagaauaccuauauuagca

SEQ ID NO: 1397326 - RNA, 19 nt, Artificial Sequence
  Description of Artificial Sequence: Synthetic oligonucleotide
uguaacuugauauuguagu

SEQ ID NO: 1397327 - RNA, 19 nt, Artificial Sequence
  Description of Artificial Sequence: Synthetic oligonucleotide
uccugauccagucagauug

SEQ ID NO: 1397328 - RNA, 19 nt, Artificial Sequence
  Description of Artificial Sequence: Synthetic oligonucleotide
uuauuaauggugcaccugc

SEQ ID NO: 1397329 - RNA, 19 nt, Artificial Sequence
  Description of Artificial Sequence: Synthetic oligonucleotide
aaugacgacuuuuggagag

SEQ ID NO: 1397330 - RNA, 19 nt, Artificial Sequence
  Description of Artificial Sequence: Synthetic oligonucleotide
acaguugaaaucuucugac

SEQ ID NO: 1397331 - RNA, 19 nt, Artificial Sequence
  Description of Artificial Sequence: Synthetic oligonucleotide
agaucuaagagaaacuccc

SEQ ID NO: 1397332 - RNA, 19 nt, Artificial Sequence
  Description of Artificial Sequence: Synthetic oligonucleotide
agaaggugcacugacaacc

SEQ ID NO: 1397333 - RNA, 19 nt, Artificial Sequence
  Description of Artificial Sequence: Synthetic oligonucleotide
caauguauaguucacuucc

SEQ ID NO: 1397334 - RNA, 19 nt, Artificial Sequence
  Description of Artificial Sequence: Synthetic oligonucleotide
guccauuuaauauaccugg

SEQ ID NO: 1397335 - RNA, 19 nt, Artificial Sequence
  Description of Artificial Sequence: Synthetic oligonucleotide
cuugaaguagaucuaagag

SEQ ID NO: 1397336 - RNA, 19 nt, Artificial Sequence
  Description of Artificial Sequence: Synthetic oligonucleotide
aaagcuuugagacagccuu

SEQ ID NO: 1397337 - RNA, 19 nt, Artificial Sequence
  Description of Artificial Sequence: Synthetic oligonucleotide
ugguaugcauauaaaaugc

SEQ ID NO: 1397338 - RNA, 19 nt, Artificial Sequence
  Description of Artificial Sequence: Synthetic oligonucleotide
ugcuauauguaacaaugag

SEQ ID NO: 1397339 - RNA, 19 nt, Artificial Sequence
  Description of Artificial Sequence: Synthetic oligonucleotide
ugaacugauauacaagccu

SEQ ID NO: 1397340 - RNA, 19 nt, Artificial Sequence
  Description of Artificial Sequence: Synthetic oligonucleotide
aagagaaacucccacagau

SEQ ID NO: 1397341 - RNA, 19 nt, Artificial Sequence
  Description of Artificial Sequence: Synthetic oligonucleotide
aauuuuggcaggcugcaug

SEQ ID NO: 1397342 - RNA, 19 nt, Artificial Sequence
  Description of Artificial Sequence: Synthetic oligonucleotide
acaaccacuacaugguuac

SEQ ID NO: 1397343 - RNA, 19 nt, Artificial Sequence
  Description of Artificial Sequence: Synthetic oligonucleotide
agaucacccaucccaaucc

SEQ ID NO: 1397344 - RNA, 19 nt, Artificial Sequence
  Description of Artificial Sequence: Synthetic oligonucleotide
ugauuccuaacucaggaga

SEQ ID NO: 1397345 - RNA, 19 nt, Artificial Sequence
  Description of Artificial Sequence: Synthetic oligonucleotide
aauaauugcugguaugcau

SEQ ID NO: 1397346 - RNA, 19 nt, Artificial Sequence
  Description of Artificial Sequence: Synthetic oligonucleotide
aauaaccgcacugauaacu

SEQ ID NO: 1397347 - RNA, 19 nt, Artificial Sequence
  Description of Artificial Sequence: Synthetic oligonucleotide
uuugagacagccuuugagu

SEQ ID NO: 1397348 - RNA, 19 nt, Artificial Sequence
  Description of Artificial Sequence: Synthetic oligonucleotide
aguguuccaacucuuagug

SEQ ID NO: 1397349 - RNA, 19 nt, Artificial Sequence
  Description of Artificial Sequence: Synthetic oligonucleotide
uauaguucacuucccacug

SEQ ID NO: 1397350 - RNA, 19 nt, Artificial Sequence
  Description of Artificial Sequence: Synthetic oligonucleotide
cuauguaaccucuuacagg

SEQ ID NO: 1397351 - RNA, 19 nt, Artificial Sequence
  Description of Artificial Sequence: Synthetic oligonucleotide
uaguccucgguuuucauag

SEQ ID NO: 1397352 - RNA, 19 nt, Artificial Sequence
  Description of Artificial Sequence: Synthetic oligonucleotide
ucucacaugucacuagucc

SEQ ID NO: 1397353 - RNA, 19 nt, Artificial Sequence
  Description of Artificial Sequence: Synthetic oligonucleotide
cuagaauaccuauauuagc

SEQ ID NO: 1397354 - RNA, 19 nt, Artificial Sequence
  Description of Artificial Sequence: Synthetic oligonucleotide
ugcacugacaaccacuaca

SEQ ID NO: 1397355 - RNA, 19 nt, Artificial Sequence
  Description of Artificial Sequence: Synthetic oligonucleotide
aauguauaguucacuuccc

SEQ ID NO: 1397356 - RNA, 19 nt, Artificial Sequence
  Description of Artificial Sequence: Synthetic oligonucleotide
aauguuaaugcuuccugau

SEQ ID NO: 1397357 - RNA, 19 nt, Artificial Sequence
  Description of Artificial Sequence: Synthetic oligonucleotide
ugcauugacugacugaacu

SEQ ID NO: 1397358 - RNA, 19 nt, Artificial Sequence
  Description of Artificial Sequence: Synthetic oligonucleotide
gauggugauaauuuuggca

SEQ ID NO: 1397359 - RNA, 19 nt, Artificial Sequence
  Description of Artificial Sequence: Synthetic oligonucleotide
uagaucuaagagaaacucc

SEQ ID NO: 1397360 - RNA, 19 nt, Artificial Sequence
  Description of Artificial Sequence: Synthetic oligonucleotide
uuaguguaacuugauauug

SEQ ID NO: 1397361 - RNA, 19 nt, Artificial Sequence
  Description of Artificial Sequence: Synthetic oligonucleotide
augaccacuauguuuuggg

SEQ ID NO: 1397362 - RNA, 19 nt, Artificial Sequence
  Description of Artificial Sequence: Synthetic oligonucleotide
uccauuuaauauaccuggg

SEQ ID NO: 1397363 - RNA, 19 nt, Artificial Sequence
  Description of Artificial Sequence: Synthetic oligonucleotide
ugauauucacaacucuagc

SEQ ID NO: 1397364 - RNA, 19 nt, Artificial Sequence
  Description of Artificial Sequence: Synthetic oligonucleotide
ugaaaacuauguaaccucu

SEQ ID NO: 1397365 - RNA, 19 nt, Artificial Sequence
  Description of Artificial Sequence: Synthetic oligonucleotide
ucuugaaguagaucuaaga

SEQ ID NO: 1397366 - RNA, 19 nt, Artificial Sequence
  Description of Artificial Sequence: Synthetic oligonucleotide
aauugcuauauguaacaau

SEQ ID NO: 1397367 - RNA, 19 nt, Artificial Sequence
  Description of Artificial Sequence: Synthetic oligonucleotide
ugguaguaguaucucaaag

SEQ ID NO: 1397368 - RNA, 19 nt, Artificial Sequence
  Description of Artificial Sequence: Synthetic oligonucleotide
agaauaccuauauuagcag

SEQ ID NO: 1397369 - RNA, 19 nt, Artificial Sequence
  Description of Artificial Sequence: Synthetic oligonucleotide
guaauaauugcugguaugc

SEQ ID NO: 1397370 - RNA, 19 nt, Artificial Sequence
  Description of Artificial Sequence: Synthetic oligonucleotide
cugauuuaaccucuggccc

SEQ ID NO: 1397371 - RNA, 19 nt, Artificial Sequence
  Description of Artificial Sequence: Synthetic oligonucleotide
ucacauagcaccaguuaag

SEQ ID NO: 1397372 - RNA, 19 nt, Artificial Sequence
  Description of Artificial Sequence: Synthetic oligonucleotide
gauauacaagccucugucc

SEQ ID NO: 1397373 - RNA, 19 nt, Artificial Sequence
  Description of Artificial Sequence: Synthetic oligonucleotide
uggaugaagcaucaugagc

SEQ ID NO: 1397374 - RNA, 19 nt, Artificial Sequence
  Description of Artificial Sequence: Synthetic oligonucleotide
uauuguagugggcugcuug

SEQ ID NO: 1397375 - RNA, 19 nt, Artificial Sequence
  Description of Artificial Sequence: Synthetic oligonucleotide
uucacauagcaccaguuaa

SEQ ID NO: 1397376 - RNA, 19 nt, Artificial Sequence
  Description of Artificial Sequence: Synthetic oligonucleotide
aagugaguacugugcaaac

SEQ ID NO: 1397377 - RNA, 19 nt, Artificial Sequence
  Description of Artificial Sequence: Synthetic oligonucleotide
uaauggugcaccugcauug

SEQ ID NO: 1397378 - RNA, 19 nt, Artificial Sequence
  Description of Artificial Sequence: Synthetic oligonucleotide
uugaacugauauacaagcc

SEQ ID NO: 1397379 - RNA, 19 nt, Artificial Sequence
  Description of Artificial Sequence: Synthetic oligonucleotide
uuugaguccacaaguuuga

SEQ ID NO: 1397380 - RNA, 19 nt, Artificial Sequence
  Description of Artificial Sequence: Synthetic oligonucleotide
agauagucucauuacagga

SEQ ID NO: 1397381 - RNA, 19 nt, Artificial Sequence
  Description of Artificial Sequence: Synthetic oligonucleotide
ugcugguuauuaauggugc

SEQ ID NO: 1397382 - RNA, 19 nt, Artificial Sequence
  Description of Artificial Sequence: Synthetic oligonucleotide
ucugaguccauuuaauaua

SEQ ID NO: 1397383 - RNA, 19 nt, Artificial Sequence
  Description of Artificial Sequence: Synthetic oligonucleotide
acgacuuuuggagaggugg

SEQ ID NO: 1397384 - RNA, 19 nt, Artificial Sequence
  Description of Artificial Sequence: Synthetic oligonucleotide
uuuaauaaccgcacugaua

SEQ ID NO: 1397385 - RNA, 19 nt, Artificial Sequence
  Description of Artificial Sequence: Synthetic oligonucleotide
uguccuucaaccuuugcaa

SEQ ID NO: 1397386 - RNA, 19 nt, Artificial Sequence
  Description of Artificial Sequence: Synthetic oligonucleotide
gauagucucauuacaggag

SEQ ID NO: 1397387 - RNA, 19 nt, Artificial Sequence
  Description of Artificial Sequence: Synthetic oligonucleotide
uagucuaagaggcaguuuu

SEQ ID NO: 1397388 - RNA, 19 nt, Artificial Sequence
  Description of Artificial Sequence: Synthetic oligonucleotide
cugaaaacuauguaaccuc

SEQ ID NO: 1397389 - RNA, 19 nt, Artificial Sequence
  Description of Artificial Sequence: Synthetic oligonucleotide
agucagauuggacuuuguc

SEQ ID NO: 1397390 - RNA, 19 nt, Artificial Sequence
  Description of Artificial Sequence: Synthetic oligonucleotide
uaauauaccugggacacgu

SEQ ID NO: 1397391 - RNA, 19 nt, Artificial Sequence
  Description of Artificial Sequence: Synthetic oligonucleotide
acucaguucacauucuaga

SEQ ID NO: 1397392 - RNA, 19 nt, Artificial Sequence
  Description of Artificial Sequence: Synthetic oligonucleotide
ucgaggaggagucuggcca

SEQ ID NO: 1397393 - RNA, 19 nt, Artificial Sequence
  Description of Artificial Sequence: Synthetic oligonucleotide
uguauaguucacuucccac

SEQ ID NO: 1397394 - RNA, 19 nt, Artificial Sequence
  Description of Artificial Sequence: Synthetic oligonucleotide
auagucucauuacaggagu

SEQ ID NO: 1397395 - RNA, 19 nt, Artificial Sequence
  Description of Artificial Sequence: Synthetic oligonucleotide
acugaaaacuauguaaccu

SEQ ID NO: 1397396 - RNA, 19 nt, Artificial Sequence
  Description of Artificial Sequence: Synthetic oligonucleotide
auguuaaugcuuccugauc

SEQ ID NO: 1397397 - RNA, 19 nt, Artificial Sequence
  Description of Artificial Sequence: Synthetic oligonucleotide
ucguuccuagucuaagagg

SEQ ID NO: 1397398 - RNA, 19 nt, Artificial Sequence
  Description of Artificial Sequence: Synthetic oligonucleotide
auauuagcagagucuucac

SEQ ID NO: 1397399 - RNA, 19 nt, Artificial Sequence
  Description of Artificial Sequence: Synthetic oligonucleotide
ugguuauuaauggugcacc

SEQ ID NO: 1397400 - RNA, 19 nt, Artificial Sequence
  Description of Artificial Sequence: Synthetic oligonucleotide
uccuugaacugauauacaa

SEQ ID NO: 1397401 - RNA, 19 nt, Artificial Sequence
  Description of Artificial Sequence: Synthetic oligonucleotide
agcaucucaauguauaguu

SEQ ID NO: 1397402 - RNA, 19 nt, Artificial Sequence
  Description of Artificial Sequence: Synthetic oligonucleotide
cugaguccauuuaauauac

SEQ ID NO: 1397403 - RNA, 19 nt, Artificial Sequence
  Description of Artificial Sequence: Synthetic oligonucleotide
gaauaccuauauuagcaga

SEQ ID NO: 1397404 - RNA, 19 nt, Artificial Sequence
  Description of Artificial Sequence: Synthetic oligonucleotide
uuucucacaugucacuagu

SEQ ID NO: 1397405 - RNA, 19 nt, Artificial Sequence
  Description of Artificial Sequence: Synthetic oligonucleotide
gugauauucacaacucuag

SEQ ID NO: 1397406 - RNA, 19 nt, Artificial Sequence
  Description of Artificial Sequence: Synthetic oligonucleotide
gaugaagcaucaugagcag

SEQ ID NO: 1397407 - RNA, 19 nt, Artificial Sequence
  Description of Artificial Sequence: Synthetic oligonucleotide
ugauuuaaccucuggcccu

SEQ ID NO: 1397408 - RNA, 19 nt, Artificial Sequence
  Description of Artificial Sequence: Synthetic oligonucleotide
uuguucuuaugcuuucccc

SEQ ID NO: 1397409 - RNA, 19 nt, Artificial Sequence
  Description of Artificial Sequence: Synthetic oligonucleotide
ucaauguauaguucacuuc

SEQ ID NO: 1397410 - RNA, 19 nt, Artificial Sequence
  Description of Artificial Sequence: Synthetic oligonucleotide
cacaacucuagccacacuc

SEQ ID NO: 1397411 - RNA, 19 nt, Artificial Sequence
  Description of Artificial Sequence: Synthetic oligonucleotide
uugauauuguagugggcug

SEQ ID NO: 1397412 - RNA, 19 nt, Artificial Sequence
  Description of Artificial Sequence: Synthetic oligonucleotide
gugaguacugugcaaacac

SEQ ID NO: 1397413 - RNA, 19 nt, Artificial Sequence
  Description of Artificial Sequence: Synthetic oligonucleotide
aaccacuacaugguuacug

SEQ ID NO: 1397414 - RNA, 19 nt, Artificial Sequence
  Description of Artificial Sequence: Synthetic oligonucleotide
guuaagugaguacugugca

SEQ ID NO: 1397415 - RNA, 19 nt, Artificial Sequence
  Description of Artificial Sequence: Synthetic oligonucleotide
gauaacucgaggaggaguc

SEQ ID NO: 1397416 - RNA, 19 nt, Artificial Sequence
  Description of Artificial Sequence: Synthetic oligonucleotide
uaguguaacuugauauugu

SEQ ID NO: 1397417 - RNA, 19 nt, Artificial Sequence
  Description of Artificial Sequence: Synthetic oligonucleotide
uaccuauauuagcagaguc

SEQ ID NO: 1397418 - RNA, 19 nt, Artificial Sequence
  Description of Artificial Sequence: Synthetic oligonucleotide
cauugacugacugaacugc

SEQ ID NO: 1397419 - RNA, 19 nt, Artificial Sequence
  Description of Artificial Sequence: Synthetic oligonucleotide
aguaccgugggcuauugaa

SEQ ID NO: 1397420 - RNA, 19 nt, Artificial Sequence
  Description of Artificial Sequence: Synthetic oligonucleotide
gucguuccuagucuaagag

SEQ ID NO: 1397421 - RNA, 19 nt, Artificial Sequence
  Description of Artificial Sequence: Synthetic oligonucleotide
agguuguguuuccuuuucc

SEQ ID NO: 1397422 - RNA, 19 nt, Artificial Sequence
  Description of Artificial Sequence: Synthetic oligonucleotide
ugauauuguagugggcugc

SEQ ID NO: 1397423 - RNA, 19 nt, Artificial Sequence
  Description of Artificial Sequence: Synthetic oligonucleotide
auuccuaacucaggagacc

SEQ ID NO: 1397424 - RNA, 19 nt, Artificial Sequence
  Description of Artificial Sequence: Synthetic oligonucleotide
guagaucuaagagaaacuc

SEQ ID NO: 1397425 - RNA, 19 nt, Artificial Sequence
  Description of Artificial Sequence: Synthetic oligonucleotide
caacucuuaguguaacuug

SEQ ID NO: 1397426 - RNA, 19 nt, Artificial Sequence
  Description of Artificial Sequence: Synthetic oligonucleotide
uaagugaguacugugcaaa

SEQ ID NO: 1397427 - RNA, 19 nt, Artificial Sequence
  Description of Artificial Sequence: Synthetic oligonucleotide
ucacaugucacuaguccuc

SEQ ID NO: 1397428 - RNA, 19 nt, Artificial Sequence
  Description of Artificial Sequence: Synthetic oligonucleotide
auugccacacgaacugucc

SEQ ID NO: 1397429 - RNA, 19 nt, Artificial Sequence
  Description of Artificial Sequence: Synthetic oligonucleotide
gaacugauauacaagccuc

SEQ ID NO: 1397430 - RNA, 19 nt, Artificial Sequence
  Description of Artificial Sequence: Synthetic oligonucleotide
ucacauucuagaauaccua

SEQ ID NO: 1397431 - RNA, 19 nt, Artificial Sequence
  Description of Artificial Sequence: Synthetic oligonucleotide
ugacugacugaacugccac

SEQ ID NO: 1397432 - RNA, 19 nt, Artificial Sequence
  Description of Artificial Sequence: Synthetic oligonucleotide
uuccuaacucaggagaccc

SEQ ID NO: 1397433 - RNA, 19 nt, Artificial Sequence
  Description of Artificial Sequence: Synthetic oligonucleotide
guaucucaaagcucgcccc

SEQ ID NO: 1397434 - RNA, 19 nt, Artificial Sequence
  Description of Artificial Sequence: Synthetic oligonucleotide
gaguccauuuaauauaccu

SEQ ID NO: 1397435 - RNA, 19 nt, Artificial Sequence
  Description of Artificial Sequence: Synthetic oligonucleotide
guagugggcugcuuggucc

SEQ ID NO: 1397436 - RNA, 19 nt, Artificial Sequence
  Description of Artificial Sequence: Synthetic oligonucleotide
uaauaauugcugguaugca

SEQ ID NO: 1397437 - RNA, 19 nt, Artificial Sequence
  Description of Artificial Sequence: Synthetic oligonucleotide
ugcuucugauuuaaccucu

SEQ ID NO: 1397438 - RNA, 19 nt, Artificial Sequence
  Description of Artificial Sequence: Synthetic oligonucleotide
uauauguaacaaugagauc

SEQ ID NO: 1397439 - RNA, 19 nt, Artificial Sequence
  Description of Artificial Sequence: Synthetic oligonucleotide
accacuauguuuugggcau

SEQ ID NO: 1397440 - RNA, 19 nt, Artificial Sequence
  Description of Artificial Sequence: Synthetic oligonucleotide
acugugcaagcuguguagc

SEQ ID NO: 1397441 - RNA, 19 nt, Artificial Sequence
  Description of Artificial Sequence: Synthetic oligonucleotide
auaaccgcacugauaacuc

SEQ ID NO: 1397442 - RNA, 19 nt, Artificial Sequence
  Description of Artificial Sequence: Synthetic oligonucleotide
gauuccuaacucaggagac

SEQ ID NO: 1397443 - RNA, 19 nt, Artificial Sequence
  Description of Artificial Sequence: Synthetic oligonucleotide
aaauugcuauauguaacaa

SEQ ID NO: 1397444 - RNA, 19 nt, Artificial Sequence
  Description of Artificial Sequence: Synthetic oligonucleotide
ugaccacuauguuuugggc

SEQ ID NO: 1397445 - RNA, 19 nt, Artificial Sequence
  Description of Artificial Sequence: Synthetic oligonucleotide
uccucgguuuucauaguca

SEQ ID NO: 1397446 - RNA, 19 nt, Artificial Sequence
  Description of Artificial Sequence: Synthetic oligonucleotide
uaagugcucucacagccaa

SEQ ID NO: 1397447 - RNA, 19 nt, Artificial Sequence
  Description of Artificial Sequence: Synthetic oligonucleotide
ugaggguucagucguuccu

SEQ ID NO: 1397448 - RNA, 19 nt, Artificial Sequence
  Description of Artificial Sequence: Synthetic oligonucleotide
uuaagugaguacugugcaa

SEQ ID NO: 1397449 - RNA, 19 nt, Artificial Sequence
  Description of Artificial Sequence: Synthetic oligonucleotide
uaaugcuuccugauccagu

SEQ ID NO: 1397450 - RNA, 19 nt, Artificial Sequence
  Description of Artificial Sequence: Synthetic oligonucleotide
auguauaguucacuuccca

SEQ ID NO: 1397451 - RNA, 19 nt, Artificial Sequence
  Description of Artificial Sequence: Synthetic oligonucleotide
ccaacaauguuaaugcuuc

SEQ ID NO: 1397452 - RNA, 19 nt, Artificial Sequence
  Description of Artificial Sequence: Synthetic oligonucleotide
uaccgugggcuauugaaac

SEQ ID NO: 1397453 - RNA, 19 nt, Artificial Sequence
  Description of Artificial Sequence: Synthetic oligonucleotide
agcaggggaggugauauuc

SEQ ID NO: 1397454 - RNA, 19 nt, Artificial Sequence
  Description of Artificial Sequence: Synthetic oligonucleotide
gugcaagcuguguagcagg

SEQ ID NO: 1397455 - RNA, 19 nt, Artificial Sequence
  Description of Artificial Sequence: Synthetic oligonucleotide
ugauaacucgaggaggagu

SEQ ID NO: 1397456 - RNA, 19 nt, Artificial Sequence
  Description of Artificial Sequence: Synthetic oligonucleotide
gauuggacuuugucugcag

SEQ ID NO: 1397457 - RNA, 19 nt, Artificial Sequence
  Description of Artificial Sequence: Synthetic oligonucleotide
aaccucuuacagguguuag

SEQ ID NO: 1397458 - RNA, 19 nt, Artificial Sequence
  Description of Artificial Sequence: Synthetic oligonucleotide
auauaccugggacacguau

SEQ ID NO: 1397459 - RNA, 19 nt, Artificial Sequence
  Description of Artificial Sequence: Synthetic oligonucleotide
aacucuagccacacucauc

SEQ ID NO: 1397460 - RNA, 19 nt, Artificial Sequence
  Description of Artificial Sequence: Synthetic oligonucleotide
gagaucacccaucccaauc

SEQ ID NO: 1397461 - RNA, 19 nt, Artificial Sequence
  Description of Artificial Sequence: Synthetic oligonucleotide
uuaaccucuggcccuuuaa

SEQ ID NO: 1397462 - RNA, 19 nt, Artificial Sequence
  Description of Artificial Sequence: Synthetic oligonucleotide
cacugugcaagcuguguag

SEQ ID NO: 1397463 - RNA, 19 nt, Artificial Sequence
  Description of Artificial Sequence: Synthetic oligonucleotide
uaguucacuucccacugaa

SEQ ID NO: 1397464 - RNA, 19 nt, Artificial Sequence
  Description of Artificial Sequence: Synthetic oligonucleotide
uauaccugggacacguauu

SEQ ID NO: 1397465 - RNA, 19 nt, Artificial Sequence
  Description of Artificial Sequence: Synthetic oligonucleotide
uaauugcugguaugcauau

SEQ ID NO: 1397466 - RNA, 19 nt, Artificial Sequence
  Description of Artificial Sequence: Synthetic oligonucleotide
auuaauggugcaccugcau

SEQ ID NO: 1397467 - RNA, 19 nt, Artificial Sequence
  Description of Artificial Sequence: Synthetic oligonucleotide
agucgggaucgucugaaug

SEQ ID NO: 1397468 - RNA, 19 nt, Artificial Sequence
  Description of Artificial Sequence: Synthetic oligonucleotide
ucaugagcaggggagguga

SEQ ID NO: 1397469 - RNA, 19 nt, Artificial Sequence
  Description of Artificial Sequence: Synthetic oligonucleotide
aguagaucuaagagaaacu

SEQ ID NO: 1397470 - RNA, 19 nt, Artificial Sequence
  Description of Artificial Sequence: Synthetic oligonucleotide
agguguuaguguuccaacu

SEQ ID NO: 1397471 - RNA, 19 nt, Artificial Sequence
  Description of Artificial Sequence: Synthetic oligonucleotide
ugucuuauucccgucugcu

SEQ ID NO: 1397472 - RNA, 19 nt, Artificial Sequence
  Description of Artificial Sequence: Synthetic oligonucleotide
caauguuaaugcuuccuga

SEQ ID NO: 1397473 - RNA, 19 nt, Artificial Sequence
  Description of Artificial Sequence: Synthetic oligonucleotide
accuauauuagcagagucu

SEQ ID NO: 1397474 - RNA, 19 nt, Artificial Sequence
  Description of Artificial Sequence: Synthetic oligonucleotide
gggguaagugcucucacag

SEQ ID NO: 1397475 - RNA, 19 nt, Artificial Sequence
  Description of Artificial Sequence: Synthetic oligonucleotide
guguaacuugauauuguag

SEQ ID NO: 1397476 - RNA, 19 nt, Artificial Sequence
  Description of Artificial Sequence: Synthetic oligonucleotide
aacugauauacaagccucu

SEQ ID NO: 1397477 - RNA, 19 nt, Artificial Sequence
  Description of Artificial Sequence: Synthetic oligonucleotide
gaaugacgacuuuuggaga

SEQ ID NO: 1397478 - RNA, 19 nt, Artificial Sequence
  Description of Artificial Sequence: Synthetic oligonucleotide
acuugauauuguagugggc

SEQ ID NO: 1397479 - RNA, 19 nt, Artificial Sequence
  Description of Artificial Sequence: Synthetic oligonucleotide
aacucgaggaggagucugg

SEQ ID NO: 1397480 - RNA, 19 nt, Artificial Sequence
  Description of Artificial Sequence: Synthetic oligonucleotide
acuacaugguuacugucuu

SEQ ID NO: 1397481 - RNA, 19 nt, Artificial Sequence
  Description of Artificial Sequence: Synthetic oligonucleotide
accgugggcuauugaaacg

SEQ ID NO: 1397482 - RNA, 19 nt, Artificial Sequence
  Description of Artificial Sequence: Synthetic oligonucleotide
guacugugcaaacacagua

SEQ ID NO: 1397483 - RNA, 19 nt, Artificial Sequence
  Description of Artificial Sequence: Synthetic oligonucleotide
uagguuguguuuccuuuuc

SEQ ID NO: 1397484 - RNA, 19 nt, Artificial Sequence
  Description of Artificial Sequence: Synthetic oligonucleotide
guauaguucacuucccacu

SEQ ID NO: 1397485 - RNA, 19 nt, Artificial Sequence
  Description of Artificial Sequence: Synthetic oligonucleotide
cugguuauuaauggugcac

SEQ ID NO: 1397486 - RNA, 19 nt, Artificial Sequence
  Description of Artificial Sequence: Synthetic oligonucleotide
gucgggaucgucugaauga

SEQ ID NO: 1397487 - RNA, 19 nt, Artificial Sequence
  Description of Artificial Sequence: Synthetic oligonucleotide
uugaggguucagucguucc

SEQ ID NO: 1397488 - RNA, 19 nt, Artificial Sequence
  Description of Artificial Sequence: Synthetic oligonucleotide
uaaccucuggcccuuuaau

SEQ ID NO: 1397489 - RNA, 19 nt, Artificial Sequence
  Description of Artificial Sequence: Synthetic oligonucleotide
cuugauauuguagugggcu

SEQ ID NO: 1397490 - RNA, 19 nt, Artificial Sequence
  Description of Artificial Sequence: Synthetic oligonucleotide
auaccugggacacguauuu

SEQ ID NO: 1397491 - RNA, 19 nt, Artificial Sequence
  Description of Artificial Sequence: Synthetic oligonucleotide
gucucauuacaggaguacc

SEQ ID NO: 1397492 - RNA, 19 nt, Artificial Sequence
  Description of Artificial Sequence: Synthetic oligonucleotide
uaguaucucaaagcucgcc

SEQ ID NO: 1397493 - RNA, 19 nt, Artificial Sequence
  Description of Artificial Sequence: Synthetic oligonucleotide
agucguuccuagucuaaga

SEQ ID NO: 1397494 - RNA, 19 nt, Artificial Sequence
  Description of Artificial Sequence: Synthetic oligonucleotide
gacccagugaugucauuac

SEQ ID NO: 1397495 - RNA, 19 nt, Artificial Sequence
  Description of Artificial Sequence: Synthetic oligonucleotide
uuacaggaguaccgugggc

SEQ ID NO: 1397496 - RNA, 19 nt, Artificial Sequence
  Description of Artificial Sequence: Synthetic oligonucleotide
auaauugcugguaugcaua

SEQ ID NO: 1397497 - RNA, 19 nt, Artificial Sequence
  Description of Artificial Sequence: Synthetic oligonucleotide
cuauauuagcagagucuuc

SEQ ID NO: 1397498 - RNA, 19 nt, Artificial Sequence
  Description of Artificial Sequence: Synthetic oligonucleotide
augcccuuuucucucugag

SEQ ID NO: 1397499 - RNA, 19 nt, Artificial Sequence
  Description of Artificial Sequence: Synthetic oligonucleotide
gaggugauauucacaacuc

SEQ ID NO: 1397500 - RNA, 19 nt, Artificial Sequence
  Description of Artificial Sequence: Synthetic oligonucleotide
uauacaagccucuguccuu

SEQ ID NO: 1397501 - RNA, 19 nt, Artificial Sequence
  Description of Artificial Sequence: Synthetic oligonucleotide
uccaacucuuaguguaacu

SEQ ID NO: 1397502 - RNA, 19 nt, Artificial Sequence
  Description of Artificial Sequence: Synthetic oligonucleotide
cauucuagaauaccuauau

SEQ ID NO: 1397503 - RNA, 19 nt, Artificial Sequence
  Description of Artificial Sequence: Synthetic oligonucleotide
guuaaugcuuccugaucca

SEQ ID NO: 1397504 - RNA, 19 nt, Artificial Sequence
  Description of Artificial Sequence: Synthetic oligonucleotide
cagguguuaguguuccaac

SEQ ID NO: 1397505 - RNA, 19 nt, Artificial Sequence
  Description of Artificial Sequence: Synthetic oligonucleotide
uucucacaugucacuaguc

SEQ ID NO: 1397506 - RNA, 19 nt, Artificial Sequence
  Description of Artificial Sequence: Synthetic oligonucleotide
ugcaaaguuuucacaucau

SEQ ID NO: 1397507 - RNA, 19 nt, Artificial Sequence
  Description of Artificial Sequence: Synthetic oligonucleotide
ggaggugauauucacaacu

SEQ ID NO: 1397508 - RNA, 19 nt, Artificial Sequence
  Description of Artificial Sequence: Synthetic oligonucleotide
gcuauauguaacaaugaga

SEQ ID NO: 1397509 - RNA, 19 nt, Artificial Sequence
  Description of Artificial Sequence: Synthetic oligonucleotide
uccuagucuaagaggcagu

SEQ ID NO: 1397510 - RNA, 19 nt, Artificial Sequence
  Description of Artificial Sequence: Synthetic oligonucleotide
uaacucgaggaggagucug

SEQ ID NO: 1397511 - RNA, 19 nt, Artificial Sequence
  Description of Artificial Sequence: Synthetic oligonucleotide
ugucacuaguccucgguuu

SEQ ID NO: 1397512 - RNA, 19 nt, Artificial Sequence
  Description of Artificial Sequence: Synthetic oligonucleotide
aguuugaauaugcccuuuu

SEQ ID NO: 1397513 - RNA, 19 nt, Artificial Sequence
  Description of Artificial Sequence: Synthetic oligonucleotide
cauugccacacgaacuguc

SEQ ID NO: 1397514 - RNA, 19 nt, Artificial Sequence
  Description of Artificial Sequence: Synthetic oligonucleotide
uuuugggcauauccuugaa

SEQ ID NO: 1397515 - RNA, 19 nt, Artificial Sequence
  Description of Artificial Sequence: Synthetic oligonucleotide
agucuaagaggcaguuuuc

SEQ ID NO: 1397516 - RNA, 19 nt, Artificial Sequence
  Description of Artificial Sequence: Synthetic oligonucleotide
auaccuauauuagcagagu

SEQ ID NO: 1397517 - RNA, 19 nt, Artificial Sequence
  Description of Artificial Sequence: Synthetic oligonucleotide
aaccgcacugauaacucga

SEQ ID NO: 1397518 - RNA, 19 nt, Artificial Sequence
  Description of Artificial Sequence: Synthetic oligonucleotide
ggugauaauuuuggcaggc

SEQ ID NO: 1397519 - RNA, 19 nt, Artificial Sequence
  Description of Artificial Sequence: Synthetic oligonucleotide
auagguuguguuuccuuuu

SEQ ID NO: 1397520 - RNA, 19 nt, Artificial Sequence
  Description of Artificial Sequence: Synthetic oligonucleotide
uguggugguaggagaccug

SEQ ID NO: 1397521 - RNA, 19 nt, Artificial Sequence
  Description of Artificial Sequence: Synthetic oligonucleotide
gauagguuguguuuccuuu

SEQ ID NO: 1397522 - RNA, 19 nt, Artificial Sequence
  Description of Artificial Sequence: Synthetic oligonucleotide
uucagucguuccuagucua

SEQ ID NO: 1397523 - RNA, 19 nt, Artificial Sequence
  Description of Artificial Sequence: Synthetic oligonucleotide
uggagcuuuuggauccacu

SEQ ID NO: 1397524 - RNA, 19 nt, Artificial Sequence
  Description of Artificial Sequence: Synthetic oligonucleotide
acucgaggaggagucuggc

SEQ ID NO: 1397525 - RNA, 19 nt, Artificial Sequence
  Description of Artificial Sequence: Synthetic oligonucleotide
uccacucaguucacauucu

SEQ ID NO: 1397526 - RNA, 19 nt, Artificial Sequence
  Description of Artificial Sequence: Synthetic oligonucleotide
ucagucguuccuagucuaa

SEQ ID NO: 1397527 - RNA, 19 nt, Artificial Sequence
  Description of Artificial Sequence: Synthetic oligonucleotide
auaguucacuucccacuga

SEQ ID NO: 1397528 - RNA, 19 nt, Artificial Sequence
  Description of Artificial Sequence: Synthetic oligonucleotide
agauagguuguguuuccuu

SEQ ID NO: 1397529 - RNA, 19 nt, Artificial Sequence
  Description of Artificial Sequence: Synthetic oligonucleotide
uaauaaccgcacugauaac

SEQ ID NO: 1397530 - RNA, 19 nt, Artificial Sequence
  Description of Artificial Sequence: Synthetic oligonucleotide
ucauaucugguuuguucuu

SEQ ID NO: 1397531 - RNA, 19 nt, Artificial Sequence
  Description of Artificial Sequence: Synthetic oligonucleotide
gcauugacugacugaacug

SEQ ID NO: 1397532 - RNA, 19 nt, Artificial Sequence
  Description of Artificial Sequence: Synthetic oligonucleotide
uccuaacucaggagaccca

SEQ ID NO: 1397533 - RNA, 19 nt, Artificial Sequence
  Description of Artificial Sequence: Synthetic oligonucleotide
cugucuuauucccgucugc

SEQ ID NO: 1397534 - RNA, 19 nt, Artificial Sequence
  Description of Artificial Sequence: Synthetic oligonucleotide
acaugucacuaguccucgg

SEQ ID NO: 1397535 - RNA, 19 nt, Artificial Sequence
  Description of Artificial Sequence: Synthetic oligonucleotide
ggggaggugauauucacaa

SEQ ID NO: 1397536 - RNA, 19 nt, Artificial Sequence
  Description of Artificial Sequence: Synthetic oligonucleotide
augacgacuuuuggagagg

SEQ ID NO: 1397537 - RNA, 19 nt, Artificial Sequence
  Description of Artificial Sequence: Synthetic oligonucleotide
aguacugugcaaacacagu

SEQ ID NO: 1397538 - RNA, 19 nt, Artificial Sequence
  Description of Artificial Sequence: Synthetic oligonucleotide
gugggcuauugaaacgggg

SEQ ID NO: 1397539 - RNA, 19 nt, Artificial Sequence
  Description of Artificial Sequence: Synthetic oligonucleotide
ugacgacuuuuggagaggu

SEQ ID NO: 1397540 - RNA, 19 nt, Artificial Sequence
  Description of Artificial Sequence: Synthetic oligonucleotide
acaacucuagccacacuca

SEQ ID NO: 1397541 - RNA, 19 nt, Artificial Sequence
  Description of Artificial Sequence: Synthetic oligonucleotide
caaugagaucacccauccc

SEQ ID NO: 1397542 - RNA, 19 nt, Artificial Sequence
  Description of Artificial Sequence: Synthetic oligonucleotide
ucauuaccacaggaacuug

SEQ ID NO: 1397543 - RNA, 19 nt, Artificial Sequence
  Description of Artificial Sequence: Synthetic oligonucleotide
ugcccuuuucucucugagu

SEQ ID NO: 1397544 - RNA, 19 nt, Artificial Sequence
  Description of Artificial Sequence: Synthetic oligonucleotide
uucuaccagcugcaaaguu

SEQ ID NO: 1397545 - RNA, 19 nt, Artificial Sequence
  Description of Artificial Sequence: Synthetic oligonucleotide
caggggaggugauauucac

SEQ ID NO: 1397546 - RNA, 19 nt, Artificial Sequence
  Description of Artificial Sequence: Synthetic oligonucleotide
gagacccauuggaaacugg

SEQ ID NO: 1397547 - RNA, 19 nt, Artificial Sequence
  Description of Artificial Sequence: Synthetic oligonucleotide
ucgggaucgucugaaugac

SEQ ID NO: 1397548 - RNA, 19 nt, Artificial Sequence
  Description of Artificial Sequence: Synthetic oligonucleotide
uuuaaccucuggcccuuua

SEQ ID NO: 1397549 - RNA, 19 nt, Artificial Sequence
  Description of Artificial Sequence: Synthetic oligonucleotide
gaucgucugaaugacgacu

SEQ ID NO: 1397550 - RNA, 19 nt, Artificial Sequence
  Description of Artificial Sequence: Synthetic oligonucleotide
gcacagauagucucauuac

SEQ ID NO: 1397551 - RNA, 19 nt, Artificial Sequence
  Description of Artificial Sequence: Synthetic oligonucleotide
acuauguuuugggcauauc

SEQ ID NO: 1397552 - RNA, 19 nt, Artificial Sequence
  Description of Artificial Sequence: Synthetic oligonucleotide
cuucacauagcaccaguua

SEQ ID NO: 1397553 - RNA, 19 nt, Artificial Sequence
  Description of Artificial Sequence: Synthetic oligonucleotide
agauuggacuuugucugca

SEQ ID NO: 1397554 - RNA, 19 nt, Artificial Sequence
  Description of Artificial Sequence: Synthetic oligonucleotide
auaugcccuuuucucucug

SEQ ID NO: 1397555 - RNA, 19 nt, Artificial Sequence
  Description of Artificial Sequence: Synthetic oligonucleotide
aaagcucgccccauaguuu

SEQ ID NO: 1397556 - RNA, 19 nt, Artificial Sequence
  Description of Artificial Sequence: Synthetic oligonucleotide
augucacuaguccucgguu

SEQ ID NO: 1397557 - RNA, 19 nt, Artificial Sequence
  Description of Artificial Sequence: Synthetic oligonucleotide
aucacccaucccaaucccg

SEQ ID NO: 1397558 - RNA, 19 nt, Artificial Sequence
  Description of Artificial Sequence: Synthetic oligonucleotide
cucaauguauaguucacuu

SEQ ID NO: 1397559 - RNA, 19 nt, Artificial Sequence
  Description of Artificial Sequence: Synthetic oligonucleotide
guguuaguguuccaacucu

SEQ ID NO: 1397560 - RNA, 19 nt, Artificial Sequence
  Description of Artificial Sequence: Synthetic oligonucleotide
agcaccaguuaagugagua

SEQ ID NO: 1397561 - RNA, 19 nt, Artificial Sequence
  Description of Artificial Sequence: Synthetic oligonucleotide
ugcuuuccccaaagcuuug

SEQ ID NO: 1397562 - RNA, 19 nt, Artificial Sequence
  Description of Artificial Sequence: Synthetic oligonucleotide
ugagaucacccaucccaau

SEQ ID NO: 1397563 - RNA, 19 nt, Artificial Sequence
  Description of Artificial Sequence: Synthetic oligonucleotide
ccacaaguuugaauaugcc

SEQ ID NO: 1397564 - RNA, 19 nt, Artificial Sequence
  Description of Artificial Sequence: Synthetic oligonucleotide
cucaggagacccauuggaa

SEQ ID NO: 1397565 - RNA, 19 nt, Artificial Sequence
  Description of Artificial Sequence: Synthetic oligonucleotide
gguaugcauauaaaaugca

SEQ ID NO: 1397566 - RNA, 19 nt, Artificial Sequence
  Description of Artificial Sequence: Synthetic oligonucleotide
cccauuggaaacuggugac

SEQ ID NO: 1397567 - RNA, 19 nt, Artificial Sequence
  Description of Artificial Sequence: Synthetic oligonucleotide
guccucgguuuucauaguc

SEQ ID NO: 1397568 - RNA, 19 nt, Artificial Sequence
  Description of Artificial Sequence: Synthetic oligonucleotide
gacaaccacuacaugguua

SEQ ID NO: 1397569 - RNA, 19 nt, Artificial Sequence
  Description of Artificial Sequence: Synthetic oligonucleotide
cagucguuccuagucuaag

SEQ ID NO: 1397570 - RNA, 19 nt, Artificial Sequence
  Description of Artificial Sequence: Synthetic oligonucleotide
ucacaacucuagccacacu

SEQ ID NO: 1397571 - RNA, 19 nt, Artificial Sequence
  Description of Artificial Sequence: Synthetic oligonucleotide
cugauaacucgaggaggag

SEQ ID NO: 1397572 - RNA, 19 nt, Artificial Sequence
  Description of Artificial Sequence: Synthetic oligonucleotide
guucagucguuccuagucu

SEQ ID NO: 1397573 - RNA, 19 nt, Artificial Sequence
  Description of Artificial Sequence: Synthetic oligonucleotide
ugccacacgaacuguccuu

SEQ ID NO: 1397574 - RNA, 19 nt, Artificial Sequence
  Description of Artificial Sequence: Synthetic oligonucleotide
gggcaauagcagaaggugc

SEQ ID NO: 1397575 - RNA, 19 nt, Artificial Sequence
  Description of Artificial Sequence: Synthetic oligonucleotide
cuugaggguucagucguuc

SEQ ID NO: 1397576 - RNA, 19 nt, Artificial Sequence
  Description of Artificial Sequence: Synthetic oligonucleotide
gauauuguagugggcugcu

SEQ ID NO: 1397577 - RNA, 19 nt, Artificial Sequence
  Description of Artificial Sequence: Synthetic oligonucleotide
uaaccucuuacagguguua

SEQ ID NO: 1397578 - RNA, 19 nt, Artificial Sequence
  Description of Artificial Sequence: Synthetic oligonucleotide
ccugauccagucagauugg

SEQ ID NO: 1397579 - RNA, 19 nt, Artificial Sequence
  Description of Artificial Sequence: Synthetic oligonucleotide
aucgucugaaugacgacuu

SEQ ID NO: 1397580 - RNA, 19 nt, Artificial Sequence
  Description of Artificial Sequence: Synthetic oligonucleotide
acaggaguaccgugggcua

SEQ ID NO: 1397581 - RNA, 19 nt, Artificial Sequence
  Description of Artificial Sequence: Synthetic oligonucleotide
cugcauugacugacugaac

SEQ ID NO: 1397582 - RNA, 19 nt, Artificial Sequence
  Description of Artificial Sequence: Synthetic oligonucleotide
augagaucacccaucccaa

SEQ ID NO: 1397583 - RNA, 19 nt, Artificial Sequence
  Description of Artificial Sequence: Synthetic oligonucleotide
accgcacugauaacucgag

SEQ ID NO: 1397584 - RNA, 19 nt, Artificial Sequence
  Description of Artificial Sequence: Synthetic oligonucleotide
aauugcugguaugcauaua

SEQ ID NO: 1397585 - RNA, 19 nt, Artificial Sequence
  Description of Artificial Sequence: Synthetic oligonucleotide
gucauuaccacaggaacuu

SEQ ID NO: 1397586 - RNA, 19 nt, Artificial Sequence
  Description of Artificial Sequence: Synthetic oligonucleotide
cuaguccucgguuuucaua

SEQ ID NO: 1397587 - RNA, 19 nt, Artificial Sequence
  Description of Artificial Sequence: Synthetic oligonucleotide
aagugcucucacagccaag

SEQ ID NO: 1397588 - RNA, 19 nt, Artificial Sequence
  Description of Artificial Sequence: Synthetic oligonucleotide
cugauauacaagccucugu

SEQ ID NO: 1397589 - RNA, 19 nt, Artificial Sequence
  Description of Artificial Sequence: Synthetic oligonucleotide
agagaaacucccacagaua

SEQ ID NO: 1397590 - RNA, 19 nt, Artificial Sequence
  Description of Artificial Sequence: Synthetic oligonucleotide
uugaguccacaaguuugaa

SEQ ID NO: 1397591 - RNA, 19 nt, Artificial Sequence
  Description of Artificial Sequence: Synthetic oligonucleotide
ucccacagauagguugugu

SEQ ID NO: 1397592 - RNA, 19 nt, Artificial Sequence
  Description of Artificial Sequence: Synthetic oligonucleotide
gacgacuuuuggagaggug

SEQ ID NO: 1397593 - RNA, 19 nt, Artificial Sequence
  Description of Artificial Sequence: Synthetic oligonucleotide
gacuggugcugguuauuaa

SEQ ID NO: 1397594 - RNA, 19 nt, Artificial Sequence
  Description of Artificial Sequence: Synthetic oligonucleotide
caccugcauugacugacug

SEQ ID NO: 1397595 - RNA, 19 nt, Artificial Sequence
  Description of Artificial Sequence: Synthetic oligonucleotide
caccaguuaagugaguacu

SEQ ID NO: 1397596 - RNA, 19 nt, Artificial Sequence
  Description of Artificial Sequence: Synthetic oligonucleotide
caaagcucgccccauaguu

SEQ ID NO: 1397597 - RNA, 19 nt, Artificial Sequence
  Description of Artificial Sequence: Synthetic oligonucleotide
gguuauuaauggugcaccu

SEQ ID NO: 1397598 - RNA, 19 nt, Artificial Sequence
  Description of Artificial Sequence: Synthetic oligonucleotide
aguccucgguuuucauagu

SEQ ID NO: 1397599 - RNA, 19 nt, Artificial Sequence
  Description of Artificial Sequence: Synthetic oligonucleotide
gcaccaguuaagugaguac

SEQ ID NO: 1397600 - RNA, 19 nt, Artificial Sequence
  Description of Artificial Sequence: Synthetic oligonucleotide
gaaguagaucuaagagaaa

SEQ ID NO: 1397601 - RNA, 19 nt, Artificial Sequence
  Description of Artificial Sequence: Synthetic oligonucleotide
ucgucugaaugacgacuuu

SEQ ID NO: 1397602 - RNA, 19 nt, Artificial Sequence
  Description of Artificial Sequence: Synthetic oligonucleotide
cacuucccacugaaacaug

SEQ ID NO: 1397603 - RNA, 19 nt, Artificial Sequence
  Description of Artificial Sequence: Synthetic oligonucleotide
ucacuaguccucgguuuuc

SEQ ID NO: 1397604 - RNA, 19 nt, Artificial Sequence
  Description of Artificial Sequence: Synthetic oligonucleotide
aauauaccugggacacgua

SEQ ID NO: 1397605 - RNA, 19 nt, Artificial Sequence
  Description of Artificial Sequence: Synthetic oligonucleotide
guaccgugggcuauugaaa

SEQ ID NO: 1397606 - RNA, 19 nt, Artificial Sequence
  Description of Artificial Sequence: Synthetic oligonucleotide
uucccgucugcucccuuuu

SEQ ID NO: 1397607 - RNA, 19 nt, Artificial Sequence
  Description of Artificial Sequence: Synthetic oligonucleotide
ccugcauugacugacugaa

SEQ ID NO: 1397608 - RNA, 19 nt, Artificial Sequence
  Description of Artificial Sequence: Synthetic oligonucleotide
ggaucgucugaaugacgac

SEQ ID NO: 1397609 - RNA, 19 nt, Artificial Sequence
  Description of Artificial Sequence: Synthetic oligonucleotide
guuccuagucuaagaggca

SEQ ID NO: 1397610 - RNA, 19 nt, Artificial Sequence
  Description of Artificial Sequence: Synthetic oligonucleotide
uuauucccgucugcucccu

SEQ ID NO: 1397611 - RNA, 19 nt, Artificial Sequence
  Description of Artificial Sequence: Synthetic oligonucleotide
cacauagcaccaguuaagu

SEQ ID NO: 1397612 - RNA, 19 nt, Artificial Sequence
  Description of Artificial Sequence: Synthetic oligonucleotide
gggguuccaacaauguuaa

SEQ ID NO: 1397613 - RNA, 19 nt, Artificial Sequence
  Description of Artificial Sequence: Synthetic oligonucleotide
cuuuuggauccacucaguu

SEQ ID NO: 1397614 - RNA, 19 nt, Artificial Sequence
  Description of Artificial Sequence: Synthetic oligonucleotide
ggagacccauuggaaacug

SEQ ID NO: 1397615 - RNA, 19 nt, Artificial Sequence
  Description of Artificial Sequence: Synthetic oligonucleotide
gaguaccgugggcuauuga

SEQ ID NO: 1397616 - RNA, 19 nt, Artificial Sequence
  Description of Artificial Sequence: Synthetic oligonucleotide
ggugcacugacaaccacua

SEQ ID NO: 1397617 - RNA, 19 nt, Artificial Sequence
  Description of Artificial Sequence: Synthetic oligonucleotide
ucccgucugcucccuuuuc

SEQ ID NO: 1397618 - RNA, 19 nt, Artificial Sequence
  Description of Artificial Sequence: Synthetic oligonucleotide
gugcacugacaaccacuac

SEQ ID NO: 1397619 - RNA, 19 nt, Artificial Sequence
  Description of Artificial Sequence: Synthetic oligonucleotide
gccacacgaacuguccuug

SEQ ID NO: 1397620 - RNA, 19 nt, Artificial Sequence
  Description of Artificial Sequence: Synthetic oligonucleotide
guguuccaacucuuagugu

SEQ ID NO: 1397621 - RNA, 19 nt, Artificial Sequence
  Description of Artificial Sequence: Synthetic oligonucleotide
cacuaguccucgguuuuca

SEQ ID NO: 1397622 - RNA, 19 nt, Artificial Sequence
  Description of Artificial Sequence: Synthetic oligonucleotide
gucacuaguccucgguuuu

SEQ ID NO: 1397623 - RNA, 19 nt, Artificial Sequence
  Description of Artificial Sequence: Synthetic oligonucleotide
gugauaauuuuggcaggcu

SEQ ID NO: 1397624 - RNA, 19 nt, Artificial Sequence
  Description of Artificial Sequence: Synthetic oligonucleotide
uauucccgucugcucccuu

SEQ ID NO: 1397625 - RNA, 19 nt, Artificial Sequence
  Description of Artificial Sequence: Synthetic oligonucleotide
ccacacgaacuguccuugg

SEQ ID NO: 1397626 - RNA, 19 nt, Artificial Sequence
  Description of Artificial Sequence: Synthetic oligonucleotide
ccgcacugauaacucgagg

SEQ ID NO: 1397627 - RNA, 19 nt, Artificial Sequence
  Description of Artificial Sequence: Synthetic oligonucleotide
cugauccagucagauugga

SEQ ID NO: 1397628 - RNA, 19 nt, Artificial Sequence
  Description of Artificial Sequence: Synthetic oligonucleotide
caucccaaucccgccccac

SEQ ID NO: 1397629 - RNA, 19 nt, Artificial Sequence
  Description of Artificial Sequence: Synthetic oligonucleotide
cgugggcuauugaaacggg

SEQ ID NO: 1397630 - RNA, 19 nt, Artificial Sequence
  Description of Artificial Sequence: Synthetic oligonucleotide
cgguuuucauagucacagg

SEQ ID NO: 1397631 - RNA, 19 nt, Artificial Sequence
  Description of Artificial Sequence: Synthetic oligonucleotide
ccuauauuagcagagucuu

SEQ ID NO: 1397632 - RNA, 19 nt, Artificial Sequence
  Description of Artificial Sequence: Synthetic oligonucleotide
aggaguaccgugggcuauu

SEQ ID NO: 1397633 - RNA, 19 nt, Artificial Sequence
  Description of Artificial Sequence: Synthetic oligonucleotide
uuggucccuuucagucuuu

SEQ ID NO: 1397634 - RNA, 19 nt, Artificial Sequence
  Description of Artificial Sequence: Synthetic oligonucleotide
uaccugggacacguauuuu

SEQ ID NO: 1397635 - RNA, 19 nt, Artificial Sequence
  Description of Artificial Sequence: Synthetic oligonucleotide
augagcaggggaggugaua

SEQ ID NO: 1397636 - RNA, 19 nt, Artificial Sequence
  Description of Artificial Sequence: Synthetic oligonucleotide
ggaguaccgugggcuauug

SEQ ID NO: 1397637 - RNA, 19 nt, Artificial Sequence
  Description of Artificial Sequence: Synthetic oligonucleotide
gcaggggaggugauauuca

SEQ ID NO: 1397638 - RNA, 19 nt, Artificial Sequence
  Description of Artificial Sequence: Synthetic oligonucleotide
caucaugagcaggggaggu

SEQ ID NO: 1397639 - RNA, 19 nt, Artificial Sequence
  Description of Artificial Sequence: Synthetic oligonucleotide
agacagccuuugaguccac

SEQ ID NO: 1397640 - RNA, 19 nt, Artificial Sequence
  Description of Artificial Sequence: Synthetic oligonucleotide
cgggaucgucugaaugacg

SEQ ID NO: 1397641 - RNA, 19 nt, Artificial Sequence
  Description of Artificial Sequence: Synthetic oligonucleotide
guaaccucuuacagguguu

SEQ ID NO: 1397642 - RNA, 19 nt, Artificial Sequence
  Description of Artificial Sequence: Synthetic oligonucleotide
agugggcugcuuggucccu

SEQ ID NO: 1397643 - RNA, 19 nt, Artificial Sequence
  Description of Artificial Sequence: Synthetic oligonucleotide
ggagaccuggaugaagcau

SEQ ID NO: 1397644 - RNA, 19 nt, Artificial Sequence
  Description of Artificial Sequence: Synthetic oligonucleotide
cacuauguuuugggcauau

SEQ ID NO: 1397645 - RNA, 19 nt, Artificial Sequence
  Description of Artificial Sequence: Synthetic oligonucleotide
cagucagauuggacuuugu

SEQ ID NO: 1397646 - RNA, 19 nt, Artificial Sequence
  Description of Artificial Sequence: Synthetic oligonucleotide
gccccacugaaaacuaugu

SEQ ID NO: 1397647 - RNA, 19 nt, Artificial Sequence
  Description of Artificial Sequence: Synthetic oligonucleotide
cccacagauagguuguguu

SEQ ID NO: 1397648 - RNA, 19 nt, Artificial Sequence
  Description of Artificial Sequence: Synthetic oligonucleotide
ccacagauagguuguguuu

SEQ ID NO: 1397649 - RNA, 19 nt, Artificial Sequence
  Description of Artificial Sequence: Synthetic oligonucleotide
gcuuuuggauccacucagu

SEQ ID NO: 1397650 - RNA, 19 nt, Artificial Sequence
  Description of Artificial Sequence: Synthetic oligonucleotide
ccaaucccgccccacugaa

SEQ ID NO: 1397651 - RNA, 19 nt, Artificial Sequence
  Description of Artificial Sequence: Synthetic oligonucleotide
ccuaacucaggagacccau

SEQ ID NO: 1397652 - RNA, 19 nt, Artificial Sequence
  Description of Artificial Sequence: Synthetic oligonucleotide
ccauuggaaacuggugacu

SEQ ID NO: 1397653 - RNA, 19 nt, Artificial Sequence
  Description of Artificial Sequence: Synthetic oligonucleotide
caaccacuacaugguuacu

SEQ ID NO: 1397654 - RNA, 19 nt, Artificial Sequence
  Description of Artificial Sequence: Synthetic oligonucleotide
gcauugccacacgaacugu

SEQ ID NO: 1397655 - RNA, 19 nt, Artificial Sequence
  Description of Artificial Sequence: Synthetic oligonucleotide
ccuagucuaagaggcaguu

SEQ ID NO: 1397656 - RNA, 19 nt, Artificial Sequence
  Description of Artificial Sequence: Synthetic oligonucleotide
cccgucugcucccuuuucu

SEQ ID NO: 1397657 - RNA, 19 nt, Artificial Sequence
  Description of Artificial Sequence: Synthetic oligonucleotide
ccaucccaaucccgcccca

SEQ ID NO: 1397658 - RNA, 19 nt, Artificial Sequence
  Description of Artificial Sequence: Synthetic oligonucleotide
ccacugaaacauguuuauu

SEQ ID NO: 1397659 - RNA, 19 nt, Artificial Sequence
  Description of Artificial Sequence: Synthetic oligonucleotide
ccacuauguuuugggcaua

SEQ ID NO: 1397660 - RNA, 19 nt, Artificial Sequence
  Description of Artificial Sequence: Synthetic oligonucleotide
uuuguugucaauauugccg

SEQ ID NO: 1397661 - RNA, 19 nt, Artificial Sequence
  Description of Artificial Sequence: Synthetic oligonucleotide
uuuucuuucccauaguggg

SEQ ID NO: 1397662 - RNA, 19 nt, Artificial Sequence
  Description of Artificial Sequence: Synthetic oligonucleotide
uuaugauugagaacgacga

SEQ ID NO: 1397663 - RNA, 19 nt, Artificial Sequence
  Description of Artificial Sequence: Synthetic oligonucleotide
agaagcaucaccaauuggc

SEQ ID NO: 1397664 - RNA, 19 nt, Artificial Sequence
  Description of Artificial Sequence: Synthetic oligonucleotide
auuuaagacucccagcaac

SEQ ID NO: 1397665 - RNA, 19 nt, Artificial Sequence
  Description of Artificial Sequence: Synthetic oligonucleotide
cuuaugauugagaacgacg

SEQ ID NO: 1397666 - RNA, 19 nt, Artificial Sequence
  Description of Artificial Sequence: Synthetic oligonucleotide
ucaauauugccguaggcag

SEQ ID NO: 1397667 - RNA, 19 nt, Artificial Sequence
  Description of Artificial Sequence: Synthetic oligonucleotide
uaacguagcaaucagcaug

SEQ ID NO: 1397668 - RNA, 19 nt, Artificial Sequence
  Description of Artificial Sequence: Synthetic oligonucleotide
aagaugaggaccaagcuag

SEQ ID NO: 1397669 - RNA, 19 nt, Artificial Sequence
  Description of Artificial Sequence: Synthetic oligonucleotide
ucaaacuuaugauugagaa

SEQ ID NO: 1397670 - RNA, 19 nt, Artificial Sequence
  Description of Artificial Sequence: Synthetic oligonucleotide
aaauagagaaauguguaug

SEQ ID NO: 1397671 - RNA, 19 nt, Artificial Sequence
  Description of Artificial Sequence: Synthetic oligonucleotide
aaucucaaacuuaugauug

SEQ ID NO: 1397672 - RNA, 19 nt, Artificial Sequence
  Description of Artificial Sequence: Synthetic oligonucleotide
agucauauacagcugggac

SEQ ID NO: 1397673 - RNA, 19 nt, Artificial Sequence
  Description of Artificial Sequence: Synthetic oligonucleotide
ugggacauaagccaguucu

SEQ ID NO: 1397674 - RNA, 19 nt, Artificial Sequence
  Description of Artificial Sequence: Synthetic oligonucleotide
uuucgugugcagaagauca

SEQ ID NO: 1397675 - RNA, 19 nt, Artificial Sequence
  Description of Artificial Sequence: Synthetic oligonucleotide
gaacagauaguucucuggg

SEQ ID NO: 1397676 - RNA, 19 nt, Artificial Sequence
  Description of Artificial Sequence: Synthetic oligonucleotide
aacggugauagcaaagccc

SEQ ID NO: 1397677 - RNA, 19 nt, Artificial Sequence
  Description of Artificial Sequence: Synthetic oligonucleotide
aagcacuuaacggugauag

SEQ ID NO: 1397678 - RNA, 19 nt, Artificial Sequence
  Description of Artificial Sequence: Synthetic oligonucleotide
aacccuaagaagacuaggc

SEQ ID NO: 1397679 - RNA, 19 nt, Artificial Sequence
  Description of Artificial Sequence: Synthetic oligonucleotide
cucggaucgguguagaugg

SEQ ID NO: 1397680 - RNA, 19 nt, Artificial Sequence
  Description of Artificial Sequence: Synthetic oligonucleotide
uugagaacgacgauggcgu

SEQ ID NO: 1397681 - RNA, 19 nt, Artificial Sequence
  Description of Artificial Sequence: Synthetic oligonucleotide
auugagaacgacgauggcg

SEQ ID NO: 1397682 - RNA, 19 nt, Artificial Sequence
  Description of Artificial Sequence: Synthetic oligonucleotide
ucucgcaagcacuuaacgg

SEQ ID NO: 1397683 - RNA, 19 nt, Artificial Sequence
  Description of Artificial Sequence: Synthetic oligonucleotide
cauacagaagaugaggacc

SEQ ID NO: 1397684 - RNA, 19 nt, Artificial Sequence
  Description of Artificial Sequence: Synthetic oligonucleotide
aaauugaguguacagucau

SEQ ID NO: 1397685 - RNA, 19 nt, Artificial Sequence
  Description of Artificial Sequence: Synthetic oligonucleotide
cauuguuucugaaauugag

SEQ ID NO: 1397686 - RNA, 19 nt, Artificial Sequence
  Description of Artificial Sequence: Synthetic oligonucleotide
cuaacaaggaacuggaaga

SEQ ID NO: 1397687 - RNA, 19 nt, Artificial Sequence
  Description of Artificial Sequence: Synthetic oligonucleotide
aguguacagucauauacag

SEQ ID NO: 1397688 - RNA, 19 nt, Artificial Sequence
  Description of Artificial Sequence: Synthetic oligonucleotide
aauguguauggugggauag

SEQ ID NO: 1397689 - RNA, 19 nt, Artificial Sequence
  Description of Artificial Sequence: Synthetic oligonucleotide
uuggaguuccccaggaucc

SEQ ID NO: 1397690 - RNA, 19 nt, Artificial Sequence
  Description of Artificial Sequence: Synthetic oligonucleotide
cacacacacacacacacgg

SEQ ID NO: 1397691 - RNA, 19 nt, Artificial Sequence
  Description of Artificial Sequence: Synthetic oligonucleotide
gagacucacacacacacac

SEQ ID NO: 1397692 - RNA, 19 nt, Artificial Sequence
  Description of Artificial Sequence: Synthetic oligonucleotide
aucgaacucccauggaggc

SEQ ID NO: 1397693 - RNA, 19 nt, Artificial Sequence
  Description of Artificial Sequence: Synthetic oligonucleotide
ugauugggacauaagccag

SEQ ID NO: 1397694 - RNA, 19 nt, Artificial Sequence
  Description of Artificial Sequence: Synthetic oligonucleotide
uccuuuuccguccagcgcu

SEQ ID NO: 1397695 - RNA, 19 nt, Artificial Sequence
  Description of Artificial Sequence: Synthetic oligonucleotide
auagggauccuccuaacgu

SEQ ID NO: 1397696 - RNA, 19 nt, Artificial Sequence
  Description of Artificial Sequence: Synthetic oligonucleotide
uauugccguaggcagagcc

SEQ ID NO: 1397697 - RNA, 19 nt, Artificial Sequence
  Description of Artificial Sequence: Synthetic oligonucleotide
aaaggguuuaaggacgucu

SEQ ID NO: 1397698 - RNA, 19 nt, Artificial Sequence
  Description of Artificial Sequence: Synthetic oligonucleotide
caacguuggguuuucauug

SEQ ID NO: 1397699 - RNA, 19 nt, Artificial Sequence
  Description of Artificial Sequence: Synthetic oligonucleotide
caucgaacucccauggagg

SEQ ID NO: 1397700 - RNA, 19 nt, Artificial Sequence
  Description of Artificial Sequence: Synthetic oligonucleotide
cucacuagccagaacugcg

SEQ ID NO: 1397701 - RNA, 19 nt, Artificial Sequence
  Description of Artificial Sequence: Synthetic oligonucleotide
gacucacacacacacacac

SEQ ID NO: 1397702 - RNA, 19 nt, Artificial Sequence
  Description of Artificial Sequence: Synthetic oligonucleotide
cucacacacacacacacac

SEQ ID NO: 1397703 - RNA, 19 nt, Artificial Sequence
  Description of Artificial Sequence: Synthetic oligonucleotide
aaucauccaucgaacuccc

SEQ ID NO: 1397704 - RNA, 19 nt, Artificial Sequence
  Description of Artificial Sequence: Synthetic oligonucleotide
ggauucucaaaauagagaa

SEQ ID NO: 1397705 - RNA, 19 nt, Artificial Sequence
  Description of Artificial Sequence: Synthetic oligonucleotide
gauaguuccaggugggaga

SEQ ID NO: 1397706 - RNA, 19 nt, Artificial Sequence
  Description of Artificial Sequence: Synthetic oligonucleotide
agcagcgacgcccagaaca

SEQ ID NO: 1397707 - RNA, 19 nt, Artificial Sequence
  Description of Artificial Sequence: Synthetic oligonucleotide
acggggaaaggguuuaagg

SEQ ID NO: 1397708 - RNA, 19 nt, Artificial Sequence
  Description of Artificial Sequence: Synthetic oligonucleotide
ugggacuacaucucgcaag

SEQ ID NO: 1397709 - RNA, 19 nt, Artificial Sequence
  Description of Artificial Sequence: Synthetic oligonucleotide
aacagauaguucucugggu

SEQ ID NO: 1397710 - RNA, 19 nt, Artificial Sequence
  Description of Artificial Sequence: Synthetic oligonucleotide
gaucccaagucgcucagcc

SEQ ID NO: 1397711 - RNA, 19 nt, Artificial Sequence
  Description of Artificial Sequence: Synthetic oligonucleotide
gauagagcagcagcgacgc

SEQ ID NO: 1397712 - RNA, 19 nt, Artificial Sequence
  Description of Artificial Sequence: Synthetic oligonucleotide
uccauuuaagacucccagc

SEQ ID NO: 1397713 - RNA, 19 nt, Artificial Sequence
  Description of Artificial Sequence: Synthetic oligonucleotide
augauugagaacgacgaug

SEQ ID NO: 1397714 - RNA, 19 nt, Artificial Sequence
  Description of Artificial Sequence: Synthetic oligonucleotide
aucucgcaagcacuuaacg

SEQ ID NO: 1397715 - RNA, 19 nt, Artificial Sequence
  Description of Artificial Sequence: Synthetic oligonucleotide
agaucauuuccacaaagua

SEQ ID NO: 1397716 - RNA, 19 nt, Artificial Sequence
  Description of Artificial Sequence: Synthetic oligonucleotide
caaacuuaugauugagaac

SEQ ID NO: 1397717 - RNA, 19 nt, Artificial Sequence
  Description of Artificial Sequence: Synthetic oligonucleotide
cacacacacacacacgggg

SEQ ID NO: 1397718 - RNA, 19 nt, Artificial Sequence
  Description of Artificial Sequence: Synthetic oligonucleotide
cuuaacggugauagcaaag

SEQ ID NO: 1397719 - RNA, 19 nt, Artificial Sequence
  Description of Artificial Sequence: Synthetic oligonucleotide
guagcaaucagcaugauau

SEQ ID NO: 1397720 - RNA, 19 nt, Artificial Sequence
  Description of Artificial Sequence: Synthetic oligonucleotide
cacacacacacacacacac

SEQ ID NO: 1397721 - RNA, 19 nt, Artificial Sequence
  Description of Artificial Sequence: Synthetic oligonucleotide
uaacggugauagcaaagcc

SEQ ID NO: 1397722 - RNA, 19 nt, Artificial Sequence
  Description of Artificial Sequence: Synthetic oligonucleotide
ugggauaguuccagguggg

SEQ ID NO: 1397723 - RNA, 19 nt, Artificial Sequence
  Description of Artificial Sequence: Synthetic oligonucleotide
auagagcuuguguagccag

SEQ ID NO: 1397724 - RNA, 19 nt, Artificial Sequence
  Description of Artificial Sequence: Synthetic oligonucleotide
ugauagagcuuguguagcc

SEQ ID NO: 1397725 - RNA, 19 nt, Artificial Sequence
  Description of Artificial Sequence: Synthetic oligonucleotide
aggcgaugaacacauagca

SEQ ID NO: 1397726 - RNA, 19 nt, Artificial Sequence
  Description of Artificial Sequence: Synthetic oligonucleotide
ucauccaucgaacucccau

SEQ ID NO: 1397727 - RNA, 19 nt, Artificial Sequence
  Description of Artificial Sequence: Synthetic oligonucleotide
ugucaauauugccguaggc

SEQ ID NO: 1397728 - RNA, 19 nt, Artificial Sequence
  Description of Artificial Sequence: Synthetic oligonucleotide
aacguagcaaucagcauga

SEQ ID NO: 1397729 - RNA, 19 nt, Artificial Sequence
  Description of Artificial Sequence: Synthetic oligonucleotide
gaccaugcuaacaaggaac

SEQ ID NO: 1397730 - RNA, 19 nt, Artificial Sequence
  Description of Artificial Sequence: Synthetic oligonucleotide
uauggugggauaguuccag

SEQ ID NO: 1397731 - RNA, 19 nt, Artificial Sequence
  Description of Artificial Sequence: Synthetic oligonucleotide
uccgggaagaccccugucc

SEQ ID NO: 1397732 - RNA, 19 nt, Artificial Sequence
  Description of Artificial Sequence: Synthetic oligonucleotide
acuuaugauugagaacgac

SEQ ID NO: 1397733 - RNA, 19 nt, Artificial Sequence
  Description of Artificial Sequence: Synthetic oligonucleotide
gaacccuaagaagacuagg

SEQ ID NO: 1397734 - RNA, 19 nt, Artificial Sequence
  Description of Artificial Sequence: Synthetic oligonucleotide
aagcuagccagcgucacug

SEQ ID NO: 1397735 - RNA, 19 nt, Artificial Sequence
  Description of Artificial Sequence: Synthetic oligonucleotide
cauagggauccuccuaacg

SEQ ID NO: 1397736 - RNA, 19 nt, Artificial Sequence
  Description of Artificial Sequence: Synthetic oligonucleotide
ugucacgccaaucauccau

SEQ ID NO: 1397737 - RNA, 19 nt, Artificial Sequence
  Description of Artificial Sequence: Synthetic oligonucleotide
agcacuuaacggugauagc

SEQ ID NO: 1397738 - RNA, 19 nt, Artificial Sequence
  Description of Artificial Sequence: Synthetic oligonucleotide
agggaagugucucguuccc

SEQ ID NO: 1397739 - RNA, 19 nt, Artificial Sequence
  Description of Artificial Sequence: Synthetic oligonucleotide
auugaguguacagucauau

SEQ ID NO: 1397740 - RNA, 19 nt, Artificial Sequence
  Description of Artificial Sequence: Synthetic oligonucleotide
aggacuuuggaguucccca

SEQ ID NO: 1397741 - RNA, 19 nt, Artificial Sequence
  Description of Artificial Sequence: Synthetic oligonucleotide
acugaugaaccgcugcuga

SEQ ID NO: 1397742 - RNA, 19 nt, Artificial Sequence
  Description of Artificial Sequence: Synthetic oligonucleotide
gacgauggcguuuucuuuc

SEQ ID NO: 1397743 - RNA, 19 nt, Artificial Sequence
  Description of Artificial Sequence: Synthetic oligonucleotide
uccuaacguagcaaucagc

SEQ ID NO: 1397744 - RNA, 19 nt, Artificial Sequence
  Description of Artificial Sequence: Synthetic oligonucleotide
gacauaagccaguucuuuc

SEQ ID NO: 1397745 - RNA, 19 nt, Artificial Sequence
  Description of Artificial Sequence: Synthetic oligonucleotide
ucagggaagugucucguuc

SEQ ID NO: 1397746 - RNA, 19 nt, Artificial Sequence
  Description of Artificial Sequence: Synthetic oligonucleotide
aacguuggguuuucauugu

SEQ ID NO: 1397747 - RNA, 19 nt, Artificial Sequence
  Description of Artificial Sequence: Synthetic oligonucleotide
uucuguuuguugucaauau

SEQ ID NO: 1397748 - RNA, 19 nt, Artificial Sequence
  Description of Artificial Sequence: Synthetic oligonucleotide
ccaagguucccuuuggagg

SEQ ID NO: 1397749 - RNA, 19 nt, Artificial Sequence
  Description of Artificial Sequence: Synthetic oligonucleotide
acgccaaucauccaucgaa

SEQ ID NO: 1397750 - RNA, 19 nt, Artificial Sequence
  Description of Artificial Sequence: Synthetic oligonucleotide
acaaacucugugaauggag

SEQ ID NO: 1397751 - RNA, 19 nt, Artificial Sequence
  Description of Artificial Sequence: Synthetic oligonucleotide
ucuggguagucccggaggu

SEQ ID NO: 1397752 - RNA, 19 nt, Artificial Sequence
  Description of Artificial Sequence: Synthetic oligonucleotide
uagauggugcacuccgugc

SEQ ID NO: 1397753 - RNA, 19 nt, Artificial Sequence
  Description of Artificial Sequence: Synthetic oligonucleotide
ucgcaagcacuuaacggug

SEQ ID NO: 1397754 - RNA, 19 nt, Artificial Sequence
  Description of Artificial Sequence: Synthetic oligonucleotide
auaagccaguucuuucuug

SEQ ID NO: 1397755 - RNA, 19 nt, Artificial Sequence
  Description of Artificial Sequence: Synthetic oligonucleotide
acccuaagaagacuaggca

SEQ ID NO: 1397756 - RNA, 19 nt, Artificial Sequence
  Description of Artificial Sequence: Synthetic oligonucleotide
gaggcgaugaacacauagc

SEQ ID NO: 1397757 - RNA, 19 nt, Artificial Sequence
  Description of Artificial Sequence: Synthetic oligonucleotide
gaaauugaguguacaguca

SEQ ID NO: 1397758 - RNA, 19 nt, Artificial Sequence
  Description of Artificial Sequence: Synthetic oligonucleotide
ugaccaugcuaacaaggaa

SEQ ID NO: 1397759 - RNA, 19 nt, Artificial Sequence
  Description of Artificial Sequence: Synthetic oligonucleotide
ucucguucccggcagcucu

SEQ ID NO: 1397760 - RNA, 19 nt, Artificial Sequence
  Description of Artificial Sequence: Synthetic oligonucleotide
cuuggcgcucacuagccag

SEQ ID NO: 1397761 - RNA, 19 nt, Artificial Sequence
  Description of Artificial Sequence: Synthetic oligonucleotide
ugcucgucccagcaaagcu

SEQ ID NO: 1397762 - RNA, 19 nt, Artificial Sequence
  Description of Artificial Sequence: Synthetic oligonucleotide
auugccguaggcagagccc

SEQ ID NO: 1397763 - RNA, 19 nt, Artificial Sequence
  Description of Artificial Sequence: Synthetic oligonucleotide
uggauggcguugacgauga

SEQ ID NO: 1397764 - RNA, 19 nt, Artificial Sequence
  Description of Artificial Sequence: Synthetic oligonucleotide
ggcguuuucuuucccauag

SEQ ID NO: 1397765 - RNA, 19 nt, Artificial Sequence
  Description of Artificial Sequence: Synthetic oligonucleotide
agugucucguucccggcag

SEQ ID NO: 1397766 - RNA, 19 nt, Artificial Sequence
  Description of Artificial Sequence: Synthetic oligonucleotide
uguugaugggccagaggac

SEQ ID NO: 1397767 - RNA, 19 nt, Artificial Sequence
  Description of Artificial Sequence: Synthetic oligonucleotide
gcgaugaacacauagcaga

SEQ ID NO: 1397768 - RNA, 19 nt, Artificial Sequence
  Description of Artificial Sequence: Synthetic oligonucleotide
aggguuuaaggacgucuuc

SEQ ID NO: 1397769 - RNA, 19 nt, Artificial Sequence
  Description of Artificial Sequence: Synthetic oligonucleotide
gggaaaggguuuaaggacg

SEQ ID NO: 1397770 - RNA, 19 nt, Artificial Sequence
  Description of Artificial Sequence: Synthetic oligonucleotide
uuaaggacgucuuccuuuu

SEQ ID NO: 1397771 - RNA, 19 nt, Artificial Sequence
  Description of Artificial Sequence: Synthetic oligonucleotide
agcgacgcccagaacagcc

SEQ ID NO: 1397772 - RNA, 19 nt, Artificial Sequence
  Description of Artificial Sequence: Synthetic oligonucleotide
cauccaucgaacucccaug

SEQ ID NO: 1397773 - RNA, 19 nt, Artificial Sequence
  Description of Artificial Sequence: Synthetic oligonucleotide
aagugucucguucccggca

SEQ ID NO: 1397774 - RNA, 19 nt, Artificial Sequence
  Description of Artificial Sequence: Synthetic oligonucleotide
aucaccaauuggcuggaga

SEQ ID NO: 1397775 - RNA, 19 nt, Artificial Sequence
  Description of Artificial Sequence: Synthetic oligonucleotide
aggaacagauaguucucug

SEQ ID NO: 1397776 - RNA, 19 nt, Artificial Sequence
  Description of Artificial Sequence: Synthetic oligonucleotide
cuaagaagacuaggcagag

SEQ ID NO: 1397777 - RNA, 19 nt, Artificial Sequence
  Description of Artificial Sequence: Synthetic oligonucleotide
gaugaggaccaagcuagcc

SEQ ID NO: 1397778 - RNA, 19 nt, Artificial Sequence
  Description of Artificial Sequence: Synthetic oligonucleotide
ggcguugacgaugagaccc

SEQ ID NO: 1397779 - RNA, 19 nt, Artificial Sequence
  Description of Artificial Sequence: Synthetic oligonucleotide
acuacaucucgcaagcacu

SEQ ID NO: 1397780 - RNA, 19 nt, Artificial Sequence
  Description of Artificial Sequence: Synthetic oligonucleotide
aaggauagagcagcagcga

SEQ ID NO: 1397781 - RNA, 19 nt, Artificial Sequence
  Description of Artificial Sequence: Synthetic oligonucleotide
cagucugccauugaucuug

SEQ ID NO: 1397782 - RNA, 19 nt, Artificial Sequence
  Description of Artificial Sequence: Synthetic oligonucleotide
uggguagucccggaggugc

SEQ ID NO: 1397783 - RNA, 19 nt, Artificial Sequence
  Description of Artificial Sequence: Synthetic oligonucleotide
acggugauagcaaagcccu

SEQ ID NO: 1397784 - RNA, 19 nt, Artificial Sequence
  Description of Artificial Sequence: Synthetic oligonucleotide
ucacacacacacacacaca

SEQ ID NO: 1397785 - RNA, 19 nt, Artificial Sequence
  Description of Artificial Sequence: Synthetic oligonucleotide
agcgcugagacaaacucug

SEQ ID NO: 1397786 - RNA, 19 nt, Artificial Sequence
  Description of Artificial Sequence: Synthetic oligonucleotide
ugagacaaacucugugaau

SEQ ID NO: 1397787 - RNA, 19 nt, Artificial Sequence
  Description of Artificial Sequence: Synthetic oligonucleotide
uuucugucacgccaaucau

SEQ ID NO: 1397788 - RNA, 19 nt, Artificial Sequence
  Description of Artificial Sequence: Synthetic oligonucleotide
uuuuccguccagcgcugag

SEQ ID NO: 1397789 - RNA, 19 nt, Artificial Sequence
  Description of Artificial Sequence: Synthetic oligonucleotide
cucuggguagucccggagg

SEQ ID NO: 1397790 - RNA, 19 nt, Artificial Sequence
  Description of Artificial Sequence: Synthetic oligonucleotide
acauccccaggucagucug

SEQ ID NO: 1397791 - RNA, 19 nt, Artificial Sequence
  Description of Artificial Sequence: Synthetic oligonucleotide
cugaccaugcuaacaagga

SEQ ID NO: 1397792 - RNA, 19 nt, Artificial Sequence
  Description of Artificial Sequence: Synthetic oligonucleotide
gaacccagggcgucuccgg

SEQ ID NO: 1397793 - RNA, 19 nt, Artificial Sequence
  Description of Artificial Sequence: Synthetic oligonucleotide
agguccaugacguggggau

SEQ ID NO: 1397794 - RNA, 19 nt, Artificial Sequence
  Description of Artificial Sequence: Synthetic oligonucleotide
cagaagcaucaccaauugg

SEQ ID NO: 1397795 - RNA, 19 nt, Artificial Sequence
  Description of Artificial Sequence: Synthetic oligonucleotide
uagggauccuccuaacgua

SEQ ID NO: 1397796 - RNA, 19 nt, Artificial Sequence
  Description of Artificial Sequence: Synthetic oligonucleotide
ugugaauggagaggcugug

SEQ ID NO: 1397797 - RNA, 19 nt, Artificial Sequence
  Description of Artificial Sequence: Synthetic oligonucleotide
agaaauguguaugguggga

SEQ ID NO: 1397798 - RNA, 19 nt, Artificial Sequence
  Description of Artificial Sequence: Synthetic oligonucleotide
aucgguguagauggugcac

SEQ ID NO: 1397799 - RNA, 19 nt, Artificial Sequence
  Description of Artificial Sequence: Synthetic oligonucleotide
gaagugucucguucccggc

SEQ ID NO: 1397800 - RNA, 19 nt, Artificial Sequence
  Description of Artificial Sequence: Synthetic oligonucleotide
acuuaacggugauagcaaa

SEQ ID NO: 1397801 - RNA, 19 nt, Artificial Sequence
  Description of Artificial Sequence: Synthetic oligonucleotide
uuaagacucccagcaacgu

SEQ ID NO: 1397802 - RNA, 19 nt, Artificial Sequence
  Description of Artificial Sequence: Synthetic oligonucleotide
ccauuuaagacucccagca

SEQ ID NO: 1397803 - RNA, 19 nt, Artificial Sequence
  Description of Artificial Sequence: Synthetic oligonucleotide
aacgacgauggcguuuucu

SEQ ID NO: 1397804 - RNA, 19 nt, Artificial Sequence
  Description of Artificial Sequence: Synthetic oligonucleotide
aaccgugugcccucacagu

SEQ ID NO: 1397805 - RNA, 19 nt, Artificial Sequence
  Description of Artificial Sequence: Synthetic oligonucleotide
acaucucgcaagcacuuaa

SEQ ID NO: 1397806 - RNA, 19 nt, Artificial Sequence
  Description of Artificial Sequence: Synthetic oligonucleotide
cucgcaagcacuuaacggu

SEQ ID NO: 1397807 - RNA, 19 nt, Artificial Sequence
  Description of Artificial Sequence: Synthetic oligonucleotide
gauggcguugacgaugaga

SEQ ID NO: 1397808 - RNA, 19 nt, Artificial Sequence
  Description of Artificial Sequence: Synthetic oligonucleotide
accaugcuaacaaggaacu

SEQ ID NO: 1397809 - RNA, 19 nt, Artificial Sequence
  Description of Artificial Sequence: Synthetic oligonucleotide
auccuccuaacguagcaau

SEQ ID NO: 1397810 - RNA, 19 nt, Artificial Sequence
  Description of Artificial Sequence: Synthetic oligonucleotide
ggauagagcagcagcgacg

SEQ ID NO: 1397811 - RNA, 19 nt, Artificial Sequence
  Description of Artificial Sequence: Synthetic oligonucleotide
caucucgcaagcacuuaac

SEQ ID NO: 1397812 - RNA, 19 nt, Artificial Sequence
  Description of Artificial Sequence: Synthetic oligonucleotide
aacuuaugauugagaacga

SEQ ID NO: 1397813 - RNA, 19 nt, Artificial Sequence
  Description of Artificial Sequence: Synthetic oligonucleotide
acgacgauggcguuuucuu

SEQ ID NO: 1397814 - RNA, 19 nt, Artificial Sequence
  Description of Artificial Sequence: Synthetic oligonucleotide
gcuugggccaccugcaugc

SEQ ID NO: 1397815 - RNA, 19 nt, Artificial Sequence
  Description of Artificial Sequence: Synthetic oligonucleotide
aaggguuuaaggacgucuu

SEQ ID NO: 1397816 - RNA, 19 nt, Artificial Sequence
  Description of Artificial Sequence: Synthetic oligonucleotide
guuucugcucgucccagca

SEQ ID NO: 1397817 - RNA, 19 nt, Artificial Sequence
  Description of Artificial Sequence: Synthetic oligonucleotide
uguguauggugggauaguu

SEQ ID NO: 1397818 - RNA, 19 nt, Artificial Sequence
  Description of Artificial Sequence: Synthetic oligonucleotide
ucgguguagauggugcacu

SEQ ID NO: 1397819 - RNA, 19 nt, Artificial Sequence
  Description of Artificial Sequence: Synthetic oligonucleotide
uuggcgcucacuagccaga

SEQ ID NO: 1397820 - RNA, 19 nt, Artificial Sequence
  Description of Artificial Sequence: Synthetic oligonucleotide
ggguuuaaggacgucuucc

SEQ ID NO: 1397821 - RNA, 19 nt, Artificial Sequence
  Description of Artificial Sequence: Synthetic oligonucleotide
cugaacccuaagaagacua

SEQ ID NO: 1397822 - RNA, 19 nt, Artificial Sequence
  Description of Artificial Sequence: Synthetic oligonucleotide
gaucgguguagauggugca

SEQ ID NO: 1397823 - RNA, 19 nt, Artificial Sequence
  Description of Artificial Sequence: Synthetic oligonucleotide
cccgaugagguccaugacg

SEQ ID NO: 1397824 - RNA, 19 nt, Artificial Sequence
  Description of Artificial Sequence: Synthetic oligonucleotide
gcacuuaacggugauagca

SEQ ID NO: 1397825 - RNA, 19 nt, Artificial Sequence
  Description of Artificial Sequence: Synthetic oligonucleotide
agcugggacuacaucucgc

SEQ ID NO: 1397826 - RNA, 19 nt, Artificial Sequence
  Description of Artificial Sequence: Synthetic oligonucleotide
agauaguucucuggguagu

SEQ ID NO: 1397827 - RNA, 19 nt, Artificial Sequence
  Description of Artificial Sequence: Synthetic oligonucleotide
agcaacguuggguuuucau

SEQ ID NO: 1397828 - RNA, 19 nt, Artificial Sequence
  Description of Artificial Sequence: Synthetic oligonucleotide
ccaucgaacucccauggag

SEQ ID NO: 1397829 - RNA, 19 nt, Artificial Sequence
  Description of Artificial Sequence: Synthetic oligonucleotide
augacguggggauucucaa

SEQ ID NO: 1397830 - RNA, 19 nt, Artificial Sequence
  Description of Artificial Sequence: Synthetic oligonucleotide
ccuaagaagacuaggcaga

SEQ ID NO: 1397831 - RNA, 19 nt, Artificial Sequence
  Description of Artificial Sequence: Synthetic oligonucleotide
acgaugagacccgaggcga

SEQ ID NO: 1397832 - RNA, 19 nt, Artificial Sequence
  Description of Artificial Sequence: Synthetic oligonucleotide
agacccgaggcgaugaaca

SEQ ID NO: 1397833 - RNA, 19 nt, Artificial Sequence
  Description of Artificial Sequence: Synthetic oligonucleotide
gugcagaagaucauuucca

SEQ ID NO: 1397834 - RNA, 19 nt, Artificial Sequence
  Description of Artificial Sequence: Synthetic oligonucleotide
gauaguucucuggguaguc

SEQ ID NO: 1397835 - RNA, 19 nt, Artificial Sequence
  Description of Artificial Sequence: Synthetic oligonucleotide
agaugcaguagcacagucu

SEQ ID NO: 1397836 - RNA, 19 nt, Artificial Sequence
  Description of Artificial Sequence: Synthetic oligonucleotide
acacacacacacacacacg

SEQ ID NO: 1397837 - RNA, 19 nt, Artificial Sequence
  Description of Artificial Sequence: Synthetic oligonucleotide
agaugaggaccaagcuagc

SEQ ID NO: 1397838 - RNA, 19 nt, Artificial Sequence
  Description of Artificial Sequence: Synthetic oligonucleotide
ggauaguuccaggugggag

SEQ ID NO: 1397839 - RNA, 19 nt, Artificial Sequence
  Description of Artificial Sequence: Synthetic oligonucleotide
caaucucaaacuuaugauu

SEQ ID NO: 1397840 - RNA, 19 nt, Artificial Sequence
  Description of Artificial Sequence: Synthetic oligonucleotide
guguacagucauauacagc

SEQ ID NO: 1397841 - RNA, 19 nt, Artificial Sequence
  Description of Artificial Sequence: Synthetic oligonucleotide
uugccguaggcagagcccu

SEQ ID NO: 1397842 - RNA, 19 nt, Artificial Sequence
  Description of Artificial Sequence: Synthetic oligonucleotide
cacuuaacggugauagcaa

SEQ ID NO: 1397843 - RNA, 19 nt, Artificial Sequence
  Description of Artificial Sequence: Synthetic oligonucleotide
aauugaguguacagucaua

SEQ ID NO: 1397844 - RNA, 19 nt, Artificial Sequence
  Description of Artificial Sequence: Synthetic oligonucleotide
agaacgacgauggcguuuu

SEQ ID NO: 1397845 - RNA, 19 nt, Artificial Sequence
  Description of Artificial Sequence: Synthetic oligonucleotide
acacacacacacacacggg

SEQ ID NO: 1397846 - RNA, 19 nt, Artificial Sequence
  Description of Artificial Sequence: Synthetic oligonucleotide
agaaagauccggggcucag

SEQ ID NO: 1397847 - RNA, 19 nt, Artificial Sequence
  Description of Artificial Sequence: Synthetic oligonucleotide
gcccagaacagccaguuga

SEQ ID NO: 1397848 - RNA, 19 nt, Artificial Sequence
  Description of Artificial Sequence: Synthetic oligonucleotide
ugacguggggauucucaaa

SEQ ID NO: 1397849 - RNA, 19 nt, Artificial Sequence
  Description of Artificial Sequence: Synthetic oligonucleotide
auaguuccaggugggagaa

SEQ ID NO: 1397850 - RNA, 19 nt, Artificial Sequence
  Description of Artificial Sequence: Synthetic oligonucleotide
ccauacagaagaugaggac

SEQ ID NO: 1397851 - RNA, 19 nt, Artificial Sequence
  Description of Artificial Sequence: Synthetic oligonucleotide
ccaaucauccaucgaacuc

SEQ ID NO: 1397852 - RNA, 19 nt, Artificial Sequence
  Description of Artificial Sequence: Synthetic oligonucleotide
caggugggagaaagauccg

SEQ ID NO: 1397853 - RNA, 19 nt, Artificial Sequence
  Description of Artificial Sequence: Synthetic oligonucleotide
gaaauguguauggugggau

SEQ ID NO: 1397854 - RNA, 19 nt, Artificial Sequence
  Description of Artificial Sequence: Synthetic oligonucleotide
ucgaacucccauggaggcc

SEQ ID NO: 1397855 - RNA, 19 nt, Artificial Sequence
  Description of Artificial Sequence: Synthetic oligonucleotide
gggauucucaaaauagaga

SEQ ID NO: 1397856 - RNA, 19 nt, Artificial Sequence
  Description of Artificial Sequence: Synthetic oligonucleotide
cacuuucgugugcagaaga

SEQ ID NO: 1397857 - RNA, 19 nt, Artificial Sequence
  Description of Artificial Sequence: Synthetic oligonucleotide
ggcgaugaacacauagcag

SEQ ID NO: 1397858 - RNA, 19 nt, Artificial Sequence
  Description of Artificial Sequence: Synthetic oligonucleotide
ucuuggcgaccgucugccg

SEQ ID NO: 1397859 - RNA, 19 nt, Artificial Sequence
  Description of Artificial Sequence: Synthetic oligonucleotide
accccuguccuguaguauu

SEQ ID NO: 1397860 - RNA, 19 nt, Artificial Sequence
  Description of Artificial Sequence: Synthetic oligonucleotide
uuggcgaccgucugccgau

SEQ ID NO: 1397861 - RNA, 19 nt, Artificial Sequence
  Description of Artificial Sequence: Synthetic oligonucleotide
ucccacuuucgugugcaga

SEQ ID NO: 1397862 - RNA, 19 nt, Artificial Sequence
  Description of Artificial Sequence: Synthetic oligonucleotide
gacccgaggcgaugaacac

SEQ ID NO: 1397863 - RNA, 19 nt, Artificial Sequence
  Description of Artificial Sequence: Synthetic oligonucleotide
cauuuaagacucccagcaa

SEQ ID NO: 1397864 - RNA, 19 nt, Artificial Sequence
  Description of Artificial Sequence: Synthetic oligonucleotide
auauugccguaggcagagc

SEQ ID NO: 1397865 - RNA, 19 nt, Artificial Sequence
  Description of Artificial Sequence: Synthetic oligonucleotide
auugggacauaagccaguu

SEQ ID NO: 1397866 - RNA, 19 nt, Artificial Sequence
  Description of Artificial Sequence: Synthetic oligonucleotide
acacacacacacacgggga

SEQ ID NO: 1397867 - RNA, 19 nt, Artificial Sequence
  Description of Artificial Sequence: Synthetic oligonucleotide
guugacgaugagacccgag

SEQ ID NO: 1397868 - RNA, 19 nt, Artificial Sequence
  Description of Artificial Sequence: Synthetic oligonucleotide
cgaggcgaugaacacauag

SEQ ID NO: 1397869 - RNA, 19 nt, Artificial Sequence
  Description of Artificial Sequence: Synthetic oligonucleotide
cuuggcgaccgucugccga

SEQ ID NO: 1397870 - RNA, 19 nt, Artificial Sequence
  Description of Artificial Sequence: Synthetic oligonucleotide
acuuucgugugcagaagau

SEQ ID NO: 1397871 - RNA, 19 nt, Artificial Sequence
  Description of Artificial Sequence: Synthetic oligonucleotide
auguguauggugggauagu

SEQ ID NO: 1397872 - RNA, 19 nt, Artificial Sequence
  Description of Artificial Sequence: Synthetic oligonucleotide
aggaccucggaucggugua

SEQ ID NO: 1397873 - RNA, 19 nt, Artificial Sequence
  Description of Artificial Sequence: Synthetic oligonucleotide
agagacucacacacacaca

SEQ ID NO: 1397874 - RNA, 19 nt, Artificial Sequence
  Description of Artificial Sequence: Synthetic oligonucleotide
uagcacagucugccauuga

SEQ ID NO: 1397875 - RNA, 19 nt, Artificial Sequence
  Description of Artificial Sequence: Synthetic oligonucleotide
gugccugaccaccacucca

SEQ ID NO: 1397876 - RNA, 19 nt, Artificial Sequence
  Description of Artificial Sequence: Synthetic oligonucleotide
cacggggaaaggguuuaag

SEQ ID NO: 1397877 - RNA, 19 nt, Artificial Sequence
  Description of Artificial Sequence: Synthetic oligonucleotide
guguauggugggauaguuc

SEQ ID NO: 1397878 - RNA, 19 nt, Artificial Sequence
  Description of Artificial Sequence: Synthetic oligonucleotide
gguuuaaggacgucuuccu

SEQ ID NO: 1397879 - RNA, 19 nt, Artificial Sequence
  Description of Artificial Sequence: Synthetic oligonucleotide
ggauccuccuaacguagca

SEQ ID NO: 1397880 - RNA, 19 nt, Artificial Sequence
  Description of Artificial Sequence: Synthetic oligonucleotide
gucacgccaaucauccauc

SEQ ID NO: 1397881 - RNA, 19 nt, Artificial Sequence
  Description of Artificial Sequence: Synthetic oligonucleotide
gcugggacuacaucucgca

SEQ ID NO: 1397882 - RNA, 19 nt, Artificial Sequence
  Description of Artificial Sequence: Synthetic oligonucleotide
gagacccgaggcgaugaac

SEQ ID NO: 1397883 - RNA, 19 nt, Artificial Sequence
  Description of Artificial Sequence: Synthetic oligonucleotide
acucacacacacacacaca

SEQ ID NO: 1397884 - RNA, 19 nt, Artificial Sequence
  Description of Artificial Sequence: Synthetic oligonucleotide
aagguucccuuuggagggu

SEQ ID NO: 1397885 - RNA, 19 nt, Artificial Sequence
  Description of Artificial Sequence: Synthetic oligonucleotide
cugccgauccugcucccac

SEQ ID NO: 1397886 - RNA, 19 nt, Artificial Sequence
  Description of Artificial Sequence: Synthetic oligonucleotide
cacacacacacacggggaa

SEQ ID NO: 1397887 - RNA, 19 nt, Artificial Sequence
  Description of Artificial Sequence: Synthetic oligonucleotide
gaggaccucggaucggugu

SEQ ID NO: 1397888 - RNA, 19 nt, Artificial Sequence
  Description of Artificial Sequence: Synthetic oligonucleotide
ugccgauccugcucccacu

SEQ ID NO: 1397889 - RNA, 19 nt, Artificial Sequence
  Description of Artificial Sequence: Synthetic oligonucleotide
gcgcucacuagccagaacu

SEQ ID NO: 1397890 - RNA, 19 nt, Artificial Sequence
  Description of Artificial Sequence: Synthetic oligonucleotide
acacacacacacacacaca

SEQ ID NO: 1397891 - RNA, 19 nt, Artificial Sequence
  Description of Artificial Sequence: Synthetic oligonucleotide
cagucauauacagcuggga

SEQ ID NO: 1397892 - RNA, 19 nt, Artificial Sequence
  Description of Artificial Sequence: Synthetic oligonucleotide
gagaaagauccggggcuca

SEQ ID NO: 1397893 - RNA, 19 nt, Artificial Sequence
  Description of Artificial Sequence: Synthetic oligonucleotide
agacucacacacacacaca

SEQ ID NO: 1397894 - RNA, 19 nt, Artificial Sequence
  Description of Artificial Sequence: Synthetic oligonucleotide
uggugcacuccgugccuga

SEQ ID NO: 1397895 - RNA, 19 nt, Artificial Sequence
  Description of Artificial Sequence: Synthetic oligonucleotide
gauugggacauaagccagu

SEQ ID NO: 1397896 - RNA, 19 nt, Artificial Sequence
  Description of Artificial Sequence: Synthetic oligonucleotide
gaccgucugccgauccugc

SEQ ID NO: 1397897 - RNA, 19 nt, Artificial Sequence
  Description of Artificial Sequence: Synthetic oligonucleotide
ggaggccauacagaagaug

SEQ ID NO: 1397898 - RNA, 19 nt, Artificial Sequence
  Description of Artificial Sequence: Synthetic oligonucleotide
gcuuguguagccaggcuga

SEQ ID NO: 1397899 - RNA, 19 nt, Artificial Sequence
  Description of Artificial Sequence: Synthetic oligonucleotide
gcucacuagccagaacugc

SEQ ID NO: 1397900 - RNA, 19 nt, Artificial Sequence
  Description of Artificial Sequence: Synthetic oligonucleotide
ucggaucgguguagauggu

SEQ ID NO: 1397901 - RNA, 19 nt, Artificial Sequence
  Description of Artificial Sequence: Synthetic oligonucleotide
uacaucucgcaagcacuua

SEQ ID NO: 1397902 - RNA, 19 nt, Artificial Sequence
  Description of Artificial Sequence: Synthetic oligonucleotide
ucugccgauccugcuccca

SEQ ID NO: 1397903 - RNA, 19 nt, Artificial Sequence
  Description of Artificial Sequence: Synthetic oligonucleotide
agaccccuguccuguagua

SEQ ID NO: 1397904 - RNA, 19 nt, Artificial Sequence
  Description of Artificial Sequence: Synthetic oligonucleotide
uugugcacuuggcgcucac

SEQ ID NO: 1397905 - RNA, 19 nt, Artificial Sequence
  Description of Artificial Sequence: Synthetic oligonucleotide
uccaugacguggggauucu

SEQ ID NO: 1397906 - RNA, 19 nt, Artificial Sequence
  Description of Artificial Sequence: Synthetic oligonucleotide
cucgucccagcaaagcucu

SEQ ID NO: 1397907 - RNA, 19 nt, Artificial Sequence
  Description of Artificial Sequence: Synthetic oligonucleotide
ccauugaucuugcggaaca

SEQ ID NO: 1397908 - RNA, 19 nt, Artificial Sequence
  Description of Artificial Sequence: Synthetic oligonucleotide
gagguccaugacgugggga

SEQ ID NO: 1397909 - RNA, 19 nt, Artificial Sequence
  Description of Artificial Sequence: Synthetic oligonucleotide
gggaagugucucguucccg

SEQ ID NO: 1397910 - RNA, 19 nt, Artificial Sequence
  Description of Artificial Sequence: Synthetic oligonucleotide
agggcgucuccgggaagac

SEQ ID NO: 1397911 - RNA, 19 nt, Artificial Sequence
  Description of Artificial Sequence: Synthetic oligonucleotide
accgucugccgauccugcu

SEQ ID NO: 1397912 - RNA, 19 nt, Artificial Sequence
  Description of Artificial Sequence: Synthetic oligonucleotide
acacacacacacggggaaa

SEQ ID NO: 1397913 - RNA, 19 nt, Artificial Sequence
  Description of Artificial Sequence: Synthetic oligonucleotide
cuaacguagcaaucagcau

SEQ ID NO: 1397914 - RNA, 19 nt, Artificial Sequence
  Description of Artificial Sequence: Synthetic oligonucleotide
acccgaggcgaugaacaca

SEQ ID NO: 1397915 - RNA, 19 nt, Artificial Sequence
  Description of Artificial Sequence: Synthetic oligonucleotide
ggagaaagauccggggcuc

SEQ ID NO: 1397916 - RNA, 19 nt, Artificial Sequence
  Description of Artificial Sequence: Synthetic oligonucleotide
gcguugacgaugagacccg

SEQ ID NO: 1397917 - RNA, 19 nt, Artificial Sequence
  Description of Artificial Sequence: Synthetic oligonucleotide
uccguccagcgcugagaca

SEQ ID NO: 1397918 - RNA, 19 nt, Artificial Sequence
  Description of Artificial Sequence: Synthetic oligonucleotide
ccucggaucgguguagaug

SEQ ID NO: 1397919 - RNA, 19 nt, Artificial Sequence
  Description of Artificial Sequence: Synthetic oligonucleotide
gugucucguucccggcagc

SEQ ID NO: 1397920 - RNA, 19 nt, Artificial Sequence
  Description of Artificial Sequence: Synthetic oligonucleotide
gcaacguuggguuuucauu

SEQ ID NO: 1397921 - RNA, 19 nt, Artificial Sequence
  Description of Artificial Sequence: Synthetic oligonucleotide
acgcccagaacagccaguu

SEQ ID NO: 1397922 - RNA, 19 nt, Artificial Sequence
  Description of Artificial Sequence: Synthetic oligonucleotide
accucggaucgguguagau

SEQ ID NO: 1397923 - RNA, 19 nt, Artificial Sequence
  Description of Artificial Sequence: Synthetic oligonucleotide
cuacaucucgcaagcacuu

SEQ ID NO: 1397924 - RNA, 19 nt, Artificial Sequence
  Description of Artificial Sequence: Synthetic oligonucleotide
cugggacuacaucucgcaa

SEQ ID NO: 1397925 - RNA, 19 nt, Artificial Sequence
  Description of Artificial Sequence: Synthetic oligonucleotide
cacgccaaucauccaucga

SEQ ID NO: 1397926 - RNA, 19 nt, Artificial Sequence
  Description of Artificial Sequence: Synthetic oligonucleotide
cuggguagucccggaggug

SEQ ID NO: 1397927 - RNA, 19 nt, Artificial Sequence
  Description of Artificial Sequence: Synthetic oligonucleotide
gccaguugaccagagccca

SEQ ID NO: 1397928 - RNA, 19 nt, Artificial Sequence
  Description of Artificial Sequence: Synthetic oligonucleotide
cgccaaucauccaucgaac

SEQ ID NO: 1397929 - RNA, 19 nt, Artificial Sequence
  Description of Artificial Sequence: Synthetic oligonucleotide
gccaaucauccaucgaacu

SEQ ID NO: 1397930 - RNA, 19 nt, Artificial Sequence
  Description of Artificial Sequence: Synthetic oligonucleotide
cauaagccaguucuuucuu

SEQ ID NO: 1397931 - RNA, 19 nt, Artificial Sequence
  Description of Artificial Sequence: Synthetic oligonucleotide
guuccccaggaucccaagu

SEQ ID NO: 1397932 - RNA, 19 nt, Artificial Sequence
  Description of Artificial Sequence: Synthetic oligonucleotide
gcaaagcccuuggugcgag

SEQ ID NO: 1397933 - RNA, 19 nt, Artificial Sequence
  Description of Artificial Sequence: Synthetic oligonucleotide
augaaccgcugcugaccau

SEQ ID NO: 1397934 - RNA, 19 nt, Artificial Sequence
  Description of Artificial Sequence: Synthetic oligonucleotide
uggcgcucacuagccagaa

SEQ ID NO: 1397935 - RNA, 19 nt, Artificial Sequence
  Description of Artificial Sequence: Synthetic oligonucleotide
ggaccucggaucgguguag

SEQ ID NO: 1397936 - RNA, 19 nt, Artificial Sequence
  Description of Artificial Sequence: Synthetic oligonucleotide
gaccucggaucgguguaga

SEQ ID NO: 1397937 - RNA, 19 nt, Artificial Sequence
  Description of Artificial Sequence: Synthetic oligonucleotide
gggauccuccuaacguagc

SEQ ID NO: 1397938 - RNA, 19 nt, Artificial Sequence
  Description of Artificial Sequence: Synthetic oligonucleotide
cuccgggaagaccccuguc

SEQ ID NO: 1397939 - RNA, 19 nt, Artificial Sequence
  Description of Artificial Sequence: Synthetic oligonucleotide
gcggaacagcugcuuguug

SEQ ID NO: 1397940 - RNA, 19 nt, Artificial Sequence
  Description of Artificial Sequence: Synthetic oligonucleotide
auccggggcucagggaagu

SEQ ID NO: 1397941 - RNA, 19 nt, Artificial Sequence
  Description of Artificial Sequence: Synthetic oligonucleotide
ccuuuuccguccagcgcug

SEQ ID NO: 1397942 - RNA, 19 nt, Artificial Sequence
  Description of Artificial Sequence: Synthetic oligonucleotide
caagcacuuaacggugaua

SEQ ID NO: 1397943 - RNA, 19 nt, Artificial Sequence
  Description of Artificial Sequence: Synthetic oligonucleotide
ggaaaggguuuaaggacgu

SEQ ID NO: 1397944 - RNA, 19 nt, Artificial Sequence
  Description of Artificial Sequence: Synthetic oligonucleotide
cugucacgccaaucaucca

SEQ ID NO: 1397945 - RNA, 19 nt, Artificial Sequence
  Description of Artificial Sequence: Synthetic oligonucleotide
ggcgaccgucugccgaucc

SEQ ID NO: 1397946 - RNA, 19 nt, Artificial Sequence
  Description of Artificial Sequence: Synthetic oligonucleotide
ccaagucgcucagccaggc

SEQ ID NO: 1397947 - RNA, 19 nt, Artificial Sequence
  Description of Artificial Sequence: Synthetic oligonucleotide
gagaacgacgauggcguuu

SEQ ID NO: 1397948 - RNA, 19 nt, Artificial Sequence
  Description of Artificial Sequence: Synthetic oligonucleotide
gccaacaguuccccaaggu

SEQ ID NO: 1397949 - RNA, 19 nt, Artificial Sequence
  Description of Artificial Sequence: Synthetic oligonucleotide
caagcuagccagcgucacu

SEQ ID NO: 1397950 - RNA, 19 nt, Artificial Sequence
  Description of Artificial Sequence: Synthetic oligonucleotide
cuugugcacuuggcgcuca

SEQ ID NO: 1397951 - RNA, 19 nt, Artificial Sequence
  Description of Artificial Sequence: Synthetic oligonucleotide
ccaagcuagccagcgucac

SEQ ID NO: 1397952 - RNA, 19 nt, Artificial Sequence
  Description of Artificial Sequence: Synthetic oligonucleotide
ggaucccaagucgcucagc

SEQ ID NO: 1397953 - RNA, 19 nt, Artificial Sequence
  Description of Artificial Sequence: Synthetic oligonucleotide
cgugccugaccaccacucc

SEQ ID NO: 1397954 - RNA, 19 nt, Artificial Sequence
  Description of Artificial Sequence: Synthetic oligonucleotide
ccgucugccgauccugcuc

SEQ ID NO: 1397955 - RNA, 19 nt, Artificial Sequence
  Description of Artificial Sequence: Synthetic oligonucleotide
cuuuuccguccagcgcuga

SEQ ID NO: 1397956 - RNA, 19 nt, Artificial Sequence
  Description of Artificial Sequence: Synthetic oligonucleotide
ccaauuggcuggagaugca

SEQ ID NO: 1397957 - RNA, 19 nt, Artificial Sequence
  Description of Artificial Sequence: Synthetic oligonucleotide
cccgaggcgaugaacacau

SEQ ID NO: 1397958 - RNA, 19 nt, Artificial Sequence
  Description of Artificial Sequence: Synthetic oligonucleotide
ggcgcucacuagccagaac

SEQ ID NO: 1397959 - RNA, 19 nt, Artificial Sequence
  Description of Artificial Sequence: Synthetic oligonucleotide
ggaggaccucggaucggug

SEQ ID NO: 1397960 - RNA, 19 nt, Artificial Sequence
  Description of Artificial Sequence: Synthetic oligonucleotide
aacucccauggaggccaua

SEQ ID NO: 1397961 - RNA, 19 nt, Artificial Sequence
  Description of Artificial Sequence: Synthetic oligonucleotide
gacgcccagaacagccagu

SEQ ID NO: 1397962 - RNA, 19 nt, Artificial Sequence
  Description of Artificial Sequence: Synthetic oligonucleotide
ggacuacaucucgcaagca

SEQ ID NO: 1397963 - RNA, 19 nt, Artificial Sequence
  Description of Artificial Sequence: Synthetic oligonucleotide
gaccccuguccuguaguau

SEQ ID NO: 1397964 - RNA, 19 nt, Artificial Sequence
  Description of Artificial Sequence: Synthetic oligonucleotide
acguagcaaucagcaugau

SEQ ID NO: 1397965 - RNA, 19 nt, Artificial Sequence
  Description of Artificial Sequence: Synthetic oligonucleotide
gcgaggcagcagguggugc

SEQ ID NO: 1397966 - RNA, 19 nt, Artificial Sequence
  Description of Artificial Sequence: Synthetic oligonucleotide
gguucccuuuggaggguga

SEQ ID NO: 1397967 - RNA, 19 nt, Artificial Sequence
  Description of Artificial Sequence: Synthetic oligonucleotide
guuccccaagguucccuuu

SEQ ID NO: 1397968 - RNA, 19 nt, Artificial Sequence
  Description of Artificial Sequence: Synthetic oligonucleotide
ggaccaagcuagccagcgu

SEQ ID NO: 1397969 - RNA, 19 nt, Artificial Sequence
  Description of Artificial Sequence: Synthetic oligonucleotide
caagucgcucagccaggcu

SEQ ID NO: 1397970 - RNA, 19 nt, Artificial Sequence
  Description of Artificial Sequence: Synthetic oligonucleotide
gccugaccaccacuccaga

SEQ ID NO: 1397971 - RNA, 19 nt, Artificial Sequence
  Description of Artificial Sequence: Synthetic oligonucleotide
uggcgaccgucugccgauc

SEQ ID NO: 1397972 - RNA, 19 nt, Artificial Sequence
  Description of Artificial Sequence: Synthetic oligonucleotide
cgcaagcacuuaacgguga

SEQ ID NO: 1397973 - RNA, 19 nt, Artificial Sequence
  Description of Artificial Sequence: Synthetic oligonucleotide
cgaccgucugccgauccug

SEQ ID NO: 1397974 - RNA, 19 nt, Artificial Sequence
  Description of Artificial Sequence: Synthetic oligonucleotide
gggaggaccucggaucggu

SEQ ID NO: 1397975 - RNA, 19 nt, Artificial Sequence
  Description of Artificial Sequence: Synthetic oligonucleotide
gcuagccagcgucacugau

SEQ ID NO: 1397976 - RNA, 19 nt, Artificial Sequence
  Description of Artificial Sequence: Synthetic oligonucleotide
gcgacgcccagaacagcca

SEQ ID NO: 1397977 - RNA, 19 nt, Artificial Sequence
  Description of Artificial Sequence: Synthetic oligonucleotide
gggacauaagccaguucuu

SEQ ID NO: 1397978 - RNA, 19 nt, Artificial Sequence
  Description of Artificial Sequence: Synthetic oligonucleotide
caggucagucugucuguuu

SEQ ID NO: 1397979 - RNA, 19 nt, Artificial Sequence
  Description of Artificial Sequence: Synthetic oligonucleotide
ccgggaagaccccuguccu

SEQ ID NO: 1397980 - RNA, 19 nt, Artificial Sequence
  Description of Artificial Sequence: Synthetic oligonucleotide
cgugugcccucacagugaa

SEQ ID NO: 1397981 - RNA, 19 nt, Artificial Sequence
  Description of Artificial Sequence: Synthetic oligonucleotide
gcugagcacuucuccucgu

SEQ ID NO: 1397982 - RNA, 19 nt, Artificial Sequence
  Description of Artificial Sequence: Synthetic oligonucleotide
cagcaacguuggguuuuca

SEQ ID NO: 1397983 - RNA, 19 nt, Artificial Sequence
  Description of Artificial Sequence: Synthetic oligonucleotide
cucguucccggcagcucuu

SEQ ID NO: 1397984 - RNA, 19 nt, Artificial Sequence
  Description of Artificial Sequence: Synthetic oligonucleotide
gcgaccgucugccgauccu

SEQ ID NO: 1397985 - RNA, 19 nt, Artificial Sequence
  Description of Artificial Sequence: Synthetic oligonucleotide
gcgcugagacaaacucugu

SEQ ID NO: 1397986 - RNA, 19 nt, Artificial Sequence
  Description of Artificial Sequence: Synthetic oligonucleotide
cccagcaacguuggguuuu

SEQ ID NO: 1397987 - RNA, 19 nt, Artificial Sequence
  Description of Artificial Sequence: Synthetic oligonucleotide
cguugacgaugagacccga

SEQ ID NO: 1397988 - RNA, 19 nt, Artificial Sequence
  Description of Artificial Sequence: Synthetic oligonucleotide
cgacgauggcguuuucuuu

SEQ ID NO: 1397989 - RNA, 19 nt, Artificial Sequence
  Description of Artificial Sequence: Synthetic oligonucleotide
cggugauagcaaagcccuu

SEQ ID NO: 1397990 - RNA, 19 nt, Artificial Sequence
  Description of Artificial Sequence: Synthetic oligonucleotide
uguguuauggaaacugugg

SEQ ID NO: 1397991 - RNA, 19 nt, Artificial Sequence
  Description of Artificial Sequence: Synthetic oligonucleotide
uuuucuggaggucaaacag

SEQ ID NO: 1397992 - RNA, 19 nt, Artificial Sequence
  Description of Artificial Sequence: Synthetic oligonucleotide
uuaagugugcuccaguccc

SEQ ID NO: 1397993 - RNA, 19 nt, Artificial Sequence
  Description of Artificial Sequence: Synthetic oligonucleotide
uucuaguugguccaagucc

SEQ ID NO: 1397994 - RNA, 19 nt, Artificial Sequence
  Description of Artificial Sequence: Synthetic oligonucleotide
uccaguucaccucauagcc

SEQ ID NO: 1397995 - RNA, 19 nt, Artificial Sequence
  Description of Artificial Sequence: Synthetic oligonucleotide
aaaaccaaggggcgcacag

SEQ ID NO: 1397996 - RNA, 19 nt, Artificial Sequence
  Description of Artificial Sequence: Synthetic oligonucleotide
aaaacccuuggagagucgc

SEQ ID NO: 1397997 - RNA, 19 nt, Artificial Sequence
  Description of Artificial Sequence: Synthetic oligonucleotide
aggugaacugcacuggagc

SEQ ID NO: 1397998 - RNA, 19 nt, Artificial Sequence
  Description of Artificial Sequence: Synthetic oligonucleotide
augaccguggccuccaccc

SEQ ID NO: 1397999 - RNA, 19 nt, Artificial Sequence
  Description of Artificial Sequence: Synthetic oligonucleotide
ucuaguugguccaaguccu

SEQ ID NO: 1398000 - RNA, 19 nt, Artificial Sequence
  Description of Artificial Sequence: Synthetic oligonucleotide
cacacauaggacuuaagug

SEQ ID NO: 1398001 - RNA, 19 nt, Artificial Sequence
  Description of Artificial Sequence: Synthetic oligonucleotide
acuuaagugugcuccaguc

SEQ ID NO: 1398002 - RNA, 19 nt, Artificial Sequence
  Description of Artificial Sequence: Synthetic oligonucleotide
guguuauggaaacuguggg

SEQ ID NO: 1398003 - RNA, 19 nt, Artificial Sequence
  Description of Artificial Sequence: Synthetic oligonucleotide
uucaguuuggugcuccgag

SEQ ID NO: 1398004 - RNA, 19 nt, Artificial Sequence
  Description of Artificial Sequence: Synthetic oligonucleotide
aacuuuucgucuccccgcg

SEQ ID NO: 1398005 - RNA, 19 nt, Artificial Sequence
  Description of Artificial Sequence: Synthetic oligonucleotide
gagaaggugaacugcacug

SEQ ID NO: 1398006 - RNA, 19 nt, Artificial Sequence
  Description of Artificial Sequence: Synthetic oligonucleotide
agcagcuaagagcugaguc

SEQ ID NO: 1398007 - RNA, 19 nt, Artificial Sequence
  Description of Artificial Sequence: Synthetic oligonucleotide
ugggaaacagguacugggg

SEQ ID NO: 1398008 - RNA, 19 nt, Artificial Sequence
  Description of Artificial Sequence: Synthetic oligonucleotide
uaggacuuaagugugcucc

SEQ ID NO: 1398009 - RNA, 19 nt, Artificial Sequence
  Description of Artificial Sequence: Synthetic oligonucleotide
gaagagauuccuguggaag

SEQ ID NO: 1398010 - RNA, 19 nt, Artificial Sequence
  Description of Artificial Sequence: Synthetic oligonucleotide
aacuguggguuucugugag

SEQ ID NO: 1398011 - RNA, 19 nt, Artificial Sequence
  Description of Artificial Sequence: Synthetic oligonucleotide
ugugcgccaaagcaguggg

SEQ ID NO: 1398012 - RNA, 19 nt, Artificial Sequence
  Description of Artificial Sequence: Synthetic oligonucleotide
acacacauaggacuuaagu

SEQ ID NO: 1398013 - RNA, 19 nt, Artificial Sequence
  Description of Artificial Sequence: Synthetic oligonucleotide
aagacaggacaccgucugc

SEQ ID NO: 1398014 - RNA, 19 nt, Artificial Sequence
  Description of Artificial Sequence: Synthetic oligonucleotide
aucagucagaccugugcgc

SEQ ID NO: 1398015 - RNA, 19 nt, Artificial Sequence
  Description of Artificial Sequence: Synthetic oligonucleotide
gauacacagggucugugug

SEQ ID NO: 1398016 - RNA, 19 nt, Artificial Sequence
  Description of Artificial Sequence: Synthetic oligonucleotide
auagccaucgaaggcaugg

SEQ ID NO: 1398017 - RNA, 19 nt, Artificial Sequence
  Description of Artificial Sequence: Synthetic oligonucleotide
guuuguguuauggaaacug

SEQ ID NO: 1398018 - RNA, 19 nt, Artificial Sequence
  Description of Artificial Sequence: Synthetic oligonucleotide
agcacucaggaagagauuc

SEQ ID NO: 1398019 - RNA, 19 nt, Artificial Sequence
  Description of Artificial Sequence: Synthetic oligonucleotide
cuaaggggcacagagcugg

SEQ ID NO: 1398020 - RNA, 19 nt, Artificial Sequence
  Description of Artificial Sequence: Synthetic oligonucleotide
aaugcuggcugucuggcaa

SEQ ID NO: 1398021 - RNA, 19 nt, Artificial Sequence
  Description of Artificial Sequence: Synthetic oligonucleotide
acaguugcacgucaccuuc

SEQ ID NO: 1398022 - RNA, 19 nt, Artificial Sequence
  Description of Artificial Sequence: Synthetic oligonucleotide
uguuauggaaacugugggu

SEQ ID NO: 1398023 - RNA, 19 nt, Artificial Sequence
  Description of Artificial Sequence: Synthetic oligonucleotide
uggcuguuaaacuccaggc

SEQ ID NO: 1398024 - RNA, 19 nt, Artificial Sequence
  Description of Artificial Sequence: Synthetic oligonucleotide
caucagucagaccugugcg

SEQ ID NO: 1398025 - RNA, 19 nt, Artificial Sequence
  Description of Artificial Sequence: Synthetic oligonucleotide
gagaagcacccuuccaucg

SEQ ID NO: 1398026 - RNA, 19 nt, Artificial Sequence
  Description of Artificial Sequence: Synthetic oligonucleotide
aguagacaggacuuccauc

SEQ ID NO: 1398027 - RNA, 19 nt, Artificial Sequence
  Description of Artificial Sequence: Synthetic oligonucleotide
ugugcgagggcuguguggg

SEQ ID NO: 1398028 - RNA, 19 nt, Artificial Sequence
  Description of Artificial Sequence: Synthetic oligonucleotide
auaggcacaggccagcaca

SEQ ID NO: 1398029 - RNA, 19 nt, Artificial Sequence
  Description of Artificial Sequence: Synthetic oligonucleotide
augccggucacaugcagac

SEQ ID NO: 1398030 - RNA, 19 nt, Artificial Sequence
  Description of Artificial Sequence: Synthetic oligonucleotide
cuggcuguuaaacuccagg

SEQ ID NO: 1398031 - RNA, 19 nt, Artificial Sequence
  Description of Artificial Sequence: Synthetic oligonucleotide
aguugccacaccuucacca

SEQ ID NO: 1398032 - RNA, 19 nt, Artificial Sequence
  Description of Artificial Sequence: Synthetic oligonucleotide
cucaccgcuauacaguccc

SEQ ID NO: 1398033 - RNA, 19 nt, Artificial Sequence
  Description of Artificial Sequence: Synthetic oligonucleotide
ucugugaaagcuguacuca

SEQ ID NO: 1398034 - RNA, 19 nt, Artificial Sequence
  Description of Artificial Sequence: Synthetic oligonucleotide
uugugagacagcugcagug

SEQ ID NO: 1398035 - RNA, 19 nt, Artificial Sequence
  Description of Artificial Sequence: Synthetic oligonucleotide
agcuguacucaguugccac

SEQ ID NO: 1398036 - RNA, 19 nt, Artificial Sequence
  Description of Artificial Sequence: Synthetic oligonucleotide
accacagcaccugauacac

SEQ ID NO: 1398037 - RNA, 19 nt, Artificial Sequence
  Description of Artificial Sequence: Synthetic oligonucleotide
uacuuccgcuucuaguugg

SEQ ID NO: 1398038 - RNA, 19 nt, Artificial Sequence
  Description of Artificial Sequence: Synthetic oligonucleotide
ggugucaucagucagaccu

SEQ ID NO: 1398039 - RNA, 19 nt, Artificial Sequence
  Description of Artificial Sequence: Synthetic oligonucleotide
ugugcuccaguccccgucg

SEQ ID NO: 1398040 - RNA, 19 nt, Artificial Sequence
  Description of Artificial Sequence: Synthetic oligonucleotide
agaccugugcgccaaagca

SEQ ID NO: 1398041 - RNA, 19 nt, Artificial Sequence
  Description of Artificial Sequence: Synthetic oligonucleotide
gaagcgguggcugugccgg

SEQ ID NO: 1398042 - RNA, 19 nt, Artificial Sequence
  Description of Artificial Sequence: Synthetic oligonucleotide
ugagcuuuucuggagguca

SEQ ID NO: 1398043 - RNA, 19 nt, Artificial Sequence
  Description of Artificial Sequence: Synthetic oligonucleotide
uguucugugaaagcuguac

SEQ ID NO: 1398044 - RNA, 19 nt, Artificial Sequence
  Description of Artificial Sequence: Synthetic oligonucleotide
uccacuacugcugauggcu

SEQ ID NO: 1398045 - RNA, 19 nt, Artificial Sequence
  Description of Artificial Sequence: Synthetic oligonucleotide
uggguuuguguuauggaaa

SEQ ID NO: 1398046 - RNA, 19 nt, Artificial Sequence
  Description of Artificial Sequence: Synthetic oligonucleotide
aaaugccggucacaugcag

SEQ ID NO: 1398047 - RNA, 19 nt, Artificial Sequence
  Description of Artificial Sequence: Synthetic oligonucleotide
uccggagaaaggcugccag

SEQ ID NO: 1398048 - RNA, 19 nt, Artificial Sequence
  Description of Artificial Sequence: Synthetic oligonucleotide
aggagccucugucuguacc

SEQ ID NO: 1398049 - RNA, 19 nt, Artificial Sequence
  Description of Artificial Sequence: Synthetic oligonucleotide
caccucauagccaucgaag

SEQ ID NO: 1398050 - RNA, 19 nt, Artificial Sequence
  Description of Artificial Sequence: Synthetic oligonucleotide
ucgguggacgcacucagca

SEQ ID NO: 1398051 - RNA, 19 nt, Artificial Sequence
  Description of Artificial Sequence: Synthetic oligonucleotide
agagauuccuguggaaggg

SEQ ID NO: 1398052 - RNA, 19 nt, Artificial Sequence
  Description of Artificial Sequence: Synthetic oligonucleotide
caacuuuucgucuccccgc

SEQ ID NO: 1398053 - RNA, 19 nt, Artificial Sequence
  Description of Artificial Sequence: Synthetic oligonucleotide
ugugaaagcuguacucagu

SEQ ID NO: 1398054 - RNA, 19 nt, Artificial Sequence
  Description of Artificial Sequence: Synthetic oligonucleotide
ugaaagcuguacucaguug

SEQ ID NO: 1398055 - RNA, 19 nt, Artificial Sequence
  Description of Artificial Sequence: Synthetic oligonucleotide
ucaaacaguugcacgucac

SEQ ID NO: 1398056 - RNA, 19 nt, Artificial Sequence
  Description of Artificial Sequence: Synthetic oligonucleotide
ugauacacagggucugugu

SEQ ID NO: 1398057 - RNA, 19 nt, Artificial Sequence
  Description of Artificial Sequence: Synthetic oligonucleotide
accucaccgcuauacaguc

SEQ ID NO: 1398058 - RNA, 19 nt, Artificial Sequence
  Description of Artificial Sequence: Synthetic oligonucleotide
agaaggugaacugcacugg

SEQ ID NO: 1398059 - RNA, 19 nt, Artificial Sequence
  Description of Artificial Sequence: Synthetic oligonucleotide
uggagucaaagcuggagaa

SEQ ID NO: 1398060 - RNA, 19 nt, Artificial Sequence
  Description of Artificial Sequence: Synthetic oligonucleotide
aacccuuggagagucgcag

SEQ ID NO: 1398061 - RNA, 19 nt, Artificial Sequence
  Description of Artificial Sequence: Synthetic oligonucleotide
ugugaagacaggacaccgu

SEQ ID NO: 1398062 - RNA, 19 nt, Artificial Sequence
  Description of Artificial Sequence: Synthetic oligonucleotide
uguguccgagccuggacag

SEQ ID NO: 1398063 - RNA, 19 nt, Artificial Sequence
  Description of Artificial Sequence: Synthetic oligonucleotide
agucugcuggcuguuaaac

SEQ ID NO: 1398064 - RNA, 19 nt, Artificial Sequence
  Description of Artificial Sequence: Synthetic oligonucleotide
uccgcuucuaguuggucca

SEQ ID NO: 1398065 - RNA, 19 nt, Artificial Sequence
  Description of Artificial Sequence: Synthetic oligonucleotide
auaggacuuaagugugcuc

SEQ ID NO: 1398066 - RNA, 19 nt, Artificial Sequence
  Description of Artificial Sequence: Synthetic oligonucleotide
caaacaguugcacgucacc

SEQ ID NO: 1398067 - RNA, 19 nt, Artificial Sequence
  Description of Artificial Sequence: Synthetic oligonucleotide
aaugugcgagggcugugug

SEQ ID NO: 1398068 - RNA, 19 nt, Artificial Sequence
  Description of Artificial Sequence: Synthetic oligonucleotide
ucagucagaccugugcgcc

SEQ ID NO: 1398069 - RNA, 19 nt, Artificial Sequence
  Description of Artificial Sequence: Synthetic oligonucleotide
cugugaaagcuguacucag

SEQ ID NO: 1398070 - RNA, 19 nt, Artificial Sequence
  Description of Artificial Sequence: Synthetic oligonucleotide
aaaccaaggggcgcacagg

SEQ ID NO: 1398071 - RNA, 19 nt, Artificial Sequence
  Description of Artificial Sequence: Synthetic oligonucleotide
ucuggcaacuuuucgucuc

SEQ ID NO: 1398072 - RNA, 19 nt, Artificial Sequence
  Description of Artificial Sequence: Synthetic oligonucleotide
gaacacuugaggggaaagc

SEQ ID NO: 1398073 - RNA, 19 nt, Artificial Sequence
  Description of Artificial Sequence: Synthetic oligonucleotide
auggaguacagguggacau

SEQ ID NO: 1398074 - RNA, 19 nt, Artificial Sequence
  Description of Artificial Sequence: Synthetic oligonucleotide
acauaggacuuaagugugc

SEQ ID NO: 1398075 - RNA, 19 nt, Artificial Sequence
  Description of Artificial Sequence: Synthetic oligonucleotide
gugugaagacaggacaccg

SEQ ID NO: 1398076 - RNA, 19 nt, Artificial Sequence
  Description of Artificial Sequence: Synthetic oligonucleotide
uacacacauaggacuuaag

SEQ ID NO: 1398077 - RNA, 19 nt, Artificial Sequence
  Description of Artificial Sequence: Synthetic oligonucleotide
caaccacagcaccugauac

SEQ ID NO: 1398078 - RNA, 19 nt, Artificial Sequence
  Description of Artificial Sequence: Synthetic oligonucleotide
acggacgccacgcccaggg

SEQ ID NO: 1398079 - RNA, 19 nt, Artificial Sequence
  Description of Artificial Sequence: Synthetic oligonucleotide
uaagugugcuccagucccc

SEQ ID NO: 1398080 - RNA, 19 nt, Artificial Sequence
  Description of Artificial Sequence: Synthetic oligonucleotide
ugcagugaggucagaggcu

SEQ ID NO: 1398081 - RNA, 19 nt, Artificial Sequence
  Description of Artificial Sequence: Synthetic oligonucleotide
agcacccuuccaucggugg

SEQ ID NO: 1398082 - RNA, 19 nt, Artificial Sequence
  Description of Artificial Sequence: Synthetic oligonucleotide
uucgucuccccgcgaaugc

SEQ ID NO: 1398083 - RNA, 19 nt, Artificial Sequence
  Description of Artificial Sequence: Synthetic oligonucleotide
aagugugcuccaguccccg

SEQ ID NO: 1398084 - RNA, 19 nt, Artificial Sequence
  Description of Artificial Sequence: Synthetic oligonucleotide
aaggugaacugcacuggag

SEQ ID NO: 1398085 - RNA, 19 nt, Artificial Sequence
  Description of Artificial Sequence: Synthetic oligonucleotide
agcuacuuccgcuucuagu

SEQ ID NO: 1398086 - RNA, 19 nt, Artificial Sequence
  Description of Artificial Sequence: Synthetic oligonucleotide
acccuuggagagucgcagc

SEQ ID NO: 1398087 - RNA, 19 nt, Artificial Sequence
  Description of Artificial Sequence: Synthetic oligonucleotide
guuuggugcuccgaggcag

SEQ ID NO: 1398088 - RNA, 19 nt, Artificial Sequence
  Description of Artificial Sequence: Synthetic oligonucleotide
agugaggucagaggcuggg

SEQ ID NO: 1398089 - RNA, 19 nt, Artificial Sequence
  Description of Artificial Sequence: Synthetic oligonucleotide
ugagucugcuggcuguuaa

SEQ ID NO: 1398090 - RNA, 19 nt, Artificial Sequence
  Description of Artificial Sequence: Synthetic oligonucleotide
ucccggaugaccguggccu

SEQ ID NO: 1398091 - RNA, 19 nt, Artificial Sequence
  Description of Artificial Sequence: Synthetic oligonucleotide
gaaggugaacugcacugga

SEQ ID NO: 1398092 - RNA, 19 nt, Artificial Sequence
  Description of Artificial Sequence: Synthetic oligonucleotide
ggugaacugcacuggagcc

SEQ ID NO: 1398093 - RNA, 19 nt, Artificial Sequence
  Description of Artificial Sequence: Synthetic oligonucleotide
ccaaguacacacauaggac

SEQ ID NO: 1398094 - RNA, 19 nt, Artificial Sequence
  Description of Artificial Sequence: Synthetic oligonucleotide
aaguacacacauaggacuu

SEQ ID NO: 1398095 - RNA, 19 nt, Artificial Sequence
  Description of Artificial Sequence: Synthetic oligonucleotide
uguacucaguugccacacc

SEQ ID NO: 1398096 - RNA, 19 nt, Artificial Sequence
  Description of Artificial Sequence: Synthetic oligonucleotide
gguggacgcacucagcacc

SEQ ID NO: 1398097 - RNA, 19 nt, Artificial Sequence
  Description of Artificial Sequence: Synthetic oligonucleotide
augugcgagggcugugugg

SEQ ID NO: 1398098 - RNA, 19 nt, Artificial Sequence
  Description of Artificial Sequence: Synthetic oligonucleotide
uuauggaaacuguggguuu

SEQ ID NO: 1398099 - RNA, 19 nt, Artificial Sequence
  Description of Artificial Sequence: Synthetic oligonucleotide
gaccugugcgccaaagcag

SEQ ID NO: 1398100 - RNA, 19 nt, Artificial Sequence
  Description of Artificial Sequence: Synthetic oligonucleotide
caaagcaguggguccucgg

SEQ ID NO: 1398101 - RNA, 19 nt, Artificial Sequence
  Description of Artificial Sequence: Synthetic oligonucleotide
uuucgucuccccgcgaaug

SEQ ID NO: 1398102 - RNA, 19 nt, Artificial Sequence
  Description of Artificial Sequence: Synthetic oligonucleotide
uccacccuccggagaaagg

SEQ ID NO: 1398103 - RNA, 19 nt, Artificial Sequence
  Description of Artificial Sequence: Synthetic oligonucleotide
aaugccggucacaugcaga

SEQ ID NO: 1398104 - RNA, 19 nt, Artificial Sequence
  Description of Artificial Sequence: Synthetic oligonucleotide
caucgguggacgcacucag

SEQ ID NO: 1398105 - RNA, 19 nt, Artificial Sequence
  Description of Artificial Sequence: Synthetic oligonucleotide
ucccacaccagcaccucac

SEQ ID NO: 1398106 - RNA, 19 nt, Artificial Sequence
  Description of Artificial Sequence: Synthetic oligonucleotide
cacgcccagggucucaucc

SEQ ID NO: 1398107 - RNA, 19 nt, Artificial Sequence
  Description of Artificial Sequence: Synthetic oligonucleotide
uguuaaacuccaggcagua

SEQ ID NO: 1398108 - RNA, 19 nt, Artificial Sequence
  Description of Artificial Sequence: Synthetic oligonucleotide
aggacuuaagugugcucca

SEQ ID NO: 1398109 - RNA, 19 nt, Artificial Sequence
  Description of Artificial Sequence: Synthetic oligonucleotide
uaaggggcacagagcuggg

SEQ ID NO: 1398110 - RNA, 19 nt, Artificial Sequence
  Description of Artificial Sequence: Synthetic oligonucleotide
cagcaaacagguacuugug

SEQ ID NO: 1398111 - RNA, 19 nt, Artificial Sequence
  Description of Artificial Sequence: Synthetic oligonucleotide
ggguuuguguuauggaaac

SEQ ID NO: 1398112 - RNA, 19 nt, Artificial Sequence
  Description of Artificial Sequence: Synthetic oligonucleotide
gagccgaccauaggcacag

SEQ ID NO: 1398113 - RNA, 19 nt, Artificial Sequence
  Description of Artificial Sequence: Synthetic oligonucleotide
ucgucgagccgaccauagg

SEQ ID NO: 1398114 - RNA, 19 nt, Artificial Sequence
  Description of Artificial Sequence: Synthetic oligonucleotide
ggugcuccgaggcagcugc

SEQ ID NO: 1398115 - RNA, 19 nt, Artificial Sequence
  Description of Artificial Sequence: Synthetic oligonucleotide
guggacauggccaucgguc

SEQ ID NO: 1398116 - RNA, 19 nt, Artificial Sequence
  Description of Artificial Sequence: Synthetic oligonucleotide
gggaaacagguacuggggc

SEQ ID NO: 1398117 - RNA, 19 nt, Artificial Sequence
  Description of Artificial Sequence: Synthetic oligonucleotide
caccucagucucuccacgg

SEQ ID NO: 1398118 - RNA, 19 nt, Artificial Sequence
  Description of Artificial Sequence: Synthetic oligonucleotide
cacuacugcugauggcugc

SEQ ID NO: 1398119 - RNA, 19 nt, Artificial Sequence
  Description of Artificial Sequence: Synthetic oligonucleotide
augcuggcugucuggcaac

SEQ ID NO: 1398120 - RNA, 19 nt, Artificial Sequence
  Description of Artificial Sequence: Synthetic oligonucleotide
accauggggagagaaggug

SEQ ID NO: 1398121 - RNA, 19 nt, Artificial Sequence
  Description of Artificial Sequence: Synthetic oligonucleotide
uggaguacagguggacaug

SEQ ID NO: 1398122 - RNA, 19 nt, Artificial Sequence
  Description of Artificial Sequence: Synthetic oligonucleotide
gcugucuggcaacuuuucg

SEQ ID NO: 1398123 - RNA, 19 nt, Artificial Sequence
  Description of Artificial Sequence: Synthetic oligonucleotide
acaggacaccgucugcugu

SEQ ID NO: 1398124 - RNA, 19 nt, Artificial Sequence
  Description of Artificial Sequence: Synthetic oligonucleotide
aguuuggugcuccgaggca

SEQ ID NO: 1398125 - RNA, 19 nt, Artificial Sequence
  Description of Artificial Sequence: Synthetic oligonucleotide
gcgcacagcaaacagguac

SEQ ID NO: 1398126 - RNA, 19 nt, Artificial Sequence
  Description of Artificial Sequence: Synthetic oligonucleotide
uccagguuccaaguacaca

SEQ ID NO: 1398127 - RNA, 19 nt, Artificial Sequence
  Description of Artificial Sequence: Synthetic oligonucleotide
caaaacccuuggagagucg

SEQ ID NO: 1398128 - RNA, 19 nt, Artificial Sequence
  Description of Artificial Sequence: Synthetic oligonucleotide
gugaacugcacuggagccc

SEQ ID NO: 1398129 - RNA, 19 nt, Artificial Sequence
  Description of Artificial Sequence: Synthetic oligonucleotide
guagaccagggugugaaga

SEQ ID NO: 1398130 - RNA, 19 nt, Artificial Sequence
  Description of Artificial Sequence: Synthetic oligonucleotide
uuuucgucuccccgcgaau

SEQ ID NO: 1398131 - RNA, 19 nt, Artificial Sequence
  Description of Artificial Sequence: Synthetic oligonucleotide
guuauggaaacuguggguu

SEQ ID NO: 1398132 - RNA, 19 nt, Artificial Sequence
  Description of Artificial Sequence: Synthetic oligonucleotide
uacucaguugccacaccuu

SEQ ID NO: 1398133 - RNA, 19 nt, Artificial Sequence
  Description of Artificial Sequence: Synthetic oligonucleotide
caggacaccgucugcugug

SEQ ID NO: 1398134 - RNA, 19 nt, Artificial Sequence
  Description of Artificial Sequence: Synthetic oligonucleotide
agccaucgaaggcauggcu

SEQ ID NO: 1398135 - RNA, 19 nt, Artificial Sequence
  Description of Artificial Sequence: Synthetic oligonucleotide
cuuccaucgguggacgcac

SEQ ID NO: 1398136 - RNA, 19 nt, Artificial Sequence
  Description of Artificial Sequence: Synthetic oligonucleotide
aggaaaugccggucacaug

SEQ ID NO: 1398137 - RNA, 19 nt, Artificial Sequence
  Description of Artificial Sequence: Synthetic oligonucleotide
cugugcgccaaagcagugg

SEQ ID NO: 1398138 - RNA, 19 nt, Artificial Sequence
  Description of Artificial Sequence: Synthetic oligonucleotide
agggcacggacgccacgcc

SEQ ID NO: 1398139 - RNA, 19 nt, Artificial Sequence
  Description of Artificial Sequence: Synthetic oligonucleotide
agacccugcccuugggcug

SEQ ID NO: 1398140 - RNA, 19 nt, Artificial Sequence
  Description of Artificial Sequence: Synthetic oligonucleotide
ggcuguuaaacuccaggca

SEQ ID NO: 1398141 - RNA, 19 nt, Artificial Sequence
  Description of Artificial Sequence: Synthetic oligonucleotide
cacagggucugugugggug

SEQ ID NO: 1398142 - RNA, 19 nt, Artificial Sequence
  Description of Artificial Sequence: Synthetic oligonucleotide
uggcaucaccagcagcuaa

SEQ ID NO: 1398143 - RNA, 19 nt, Artificial Sequence
  Description of Artificial Sequence: Synthetic oligonucleotide
uggaagcgguggcugugcc

SEQ ID NO: 1398144 - RNA, 19 nt, Artificial Sequence
  Description of Artificial Sequence: Synthetic oligonucleotide
ccuuguucugugaaagcug

SEQ ID NO: 1398145 - RNA, 19 nt, Artificial Sequence
  Description of Artificial Sequence: Synthetic oligonucleotide
cacagaguacacagggcca

SEQ ID NO: 1398146 - RNA, 19 nt, Artificial Sequence
  Description of Artificial Sequence: Synthetic oligonucleotide
gaaggccacggaugucacc

SEQ ID NO: 1398147 - RNA, 19 nt, Artificial Sequence
  Description of Artificial Sequence: Synthetic oligonucleotide
uccucgggccggcucaugu

SEQ ID NO: 1398148 - RNA, 19 nt, Artificial Sequence
  Description of Artificial Sequence: Synthetic oligonucleotide
agcaaaacccuuggagagu

SEQ ID NO: 1398149 - RNA, 19 nt, Artificial Sequence
  Description of Artificial Sequence: Synthetic oligonucleotide
agcgccacugccccuccag

SEQ ID NO: 1398150 - RNA, 19 nt, Artificial Sequence
  Description of Artificial Sequence: Synthetic oligonucleotide
aaacccuuggagagucgca

SEQ ID NO: 1398151 - RNA, 19 nt, Artificial Sequence
  Description of Artificial Sequence: Synthetic oligonucleotide
gagugucaggcugggaaac

SEQ ID NO: 1398152 - RNA, 19 nt, Artificial Sequence
  Description of Artificial Sequence: Synthetic oligonucleotide
acagagccgguggcguucc

SEQ ID NO: 1398153 - RNA, 19 nt, Artificial Sequence
  Description of Artificial Sequence: Synthetic oligonucleotide
cccgcgaaugcccuggacg

SEQ ID NO: 1398154 - RNA, 19 nt, Artificial Sequence
  Description of Artificial Sequence: Synthetic oligonucleotide
uggccaucggucccagcac

SEQ ID NO: 1398155 - RNA, 19 nt, Artificial Sequence
  Description of Artificial Sequence: Synthetic oligonucleotide
ggugugaagacaggacacc

SEQ ID NO: 1398156 - RNA, 19 nt, Artificial Sequence
  Description of Artificial Sequence: Synthetic oligonucleotide
ccucagguagcuacuuccg

SEQ ID NO: 1398157 - RNA, 19 nt, Artificial Sequence
  Description of Artificial Sequence: Synthetic oligonucleotide
aggcaguagacaggacuuc

SEQ ID NO: 1398158 - RNA, 19 nt, Artificial Sequence
  Description of Artificial Sequence: Synthetic oligonucleotide
uccaucgguggacgcacuc

SEQ ID NO: 1398159 - RNA, 19 nt, Artificial Sequence
  Description of Artificial Sequence: Synthetic oligonucleotide
ccgaccauaggcacaggcc

SEQ ID NO: 1398160 - RNA, 19 nt, Artificial Sequence
  Description of Artificial Sequence: Synthetic oligonucleotide
gacgccccuccacugcgag

SEQ ID NO: 1398161 - RNA, 19 nt, Artificial Sequence
  Description of Artificial Sequence: Synthetic oligonucleotide
agaguacacagggccacca

SEQ ID NO: 1398162 - RNA, 19 nt, Artificial Sequence
  Description of Artificial Sequence: Synthetic oligonucleotide
ggcccuuguucugugaaag

SEQ ID NO: 1398163 - RNA, 19 nt, Artificial Sequence
  Description of Artificial Sequence: Synthetic oligonucleotide
ggacgcacucagcaccugg

SEQ ID NO: 1398164 - RNA, 19 nt, Artificial Sequence
  Description of Artificial Sequence: Synthetic oligonucleotide
cugucuggcaacuuuucgu

SEQ ID NO: 1398165 - RNA, 19 nt, Artificial Sequence
  Description of Artificial Sequence: Synthetic oligonucleotide
aucgguggacgcacucagc

SEQ ID NO: 1398166 - RNA, 19 nt, Artificial Sequence
  Description of Artificial Sequence: Synthetic oligonucleotide
ggcaucaccagcagcuaag

SEQ ID NO: 1398167 - RNA, 19 nt, Artificial Sequence
  Description of Artificial Sequence: Synthetic oligonucleotide
uagccaucgaaggcauggc

SEQ ID NO: 1398168 - RNA, 19 nt, Artificial Sequence
  Description of Artificial Sequence: Synthetic oligonucleotide
cugauacacagggucugug

SEQ ID NO: 1398169 - RNA, 19 nt, Artificial Sequence
  Description of Artificial Sequence: Synthetic oligonucleotide
accugugcgccaaagcagu

SEQ ID NO: 1398170 - RNA, 19 nt, Artificial Sequence
  Description of Artificial Sequence: Synthetic oligonucleotide
caguccccgucgucgagcc

SEQ ID NO: 1398171 - RNA, 19 nt, Artificial Sequence
  Description of Artificial Sequence: Synthetic oligonucleotide
cuaguugguccaaguccuc

SEQ ID NO: 1398172 - RNA, 19 nt, Artificial Sequence
  Description of Artificial Sequence: Synthetic oligonucleotide
gacuuaagugugcuccagu

SEQ ID NO: 1398173 - RNA, 19 nt, Artificial Sequence
  Description of Artificial Sequence: Synthetic oligonucleotide
aggacaccgucugcugugg

SEQ ID NO: 1398174 - RNA, 19 nt, Artificial Sequence
  Description of Artificial Sequence: Synthetic oligonucleotide
ggcaguagacaggacuucc

SEQ ID NO: 1398175 - RNA, 19 nt, Artificial Sequence
  Description of Artificial Sequence: Synthetic oligonucleotide
gcuccaguccccgucgucg

SEQ ID NO: 1398176 - RNA, 19 nt, Artificial Sequence
  Description of Artificial Sequence: Synthetic oligonucleotide
gcagcuaagagcugagucu

SEQ ID NO: 1398177 - RNA, 19 nt, Artificial Sequence
  Description of Artificial Sequence: Synthetic oligonucleotide
ggaagcgguggcugugccg

SEQ ID NO: 1398178 - RNA, 19 nt, Artificial Sequence
  Description of Artificial Sequence: Synthetic oligonucleotide
gaaaugccggucacaugca

SEQ ID NO: 1398179 - RNA, 19 nt, Artificial Sequence
  Description of Artificial Sequence: Synthetic oligonucleotide
uuguucugugaaagcugua

SEQ ID NO: 1398180 - RNA, 19 nt, Artificial Sequence
  Description of Artificial Sequence: Synthetic oligonucleotide
uccacugcgagggcacgga

SEQ ID NO: 1398181 - RNA, 19 nt, Artificial Sequence
  Description of Artificial Sequence: Synthetic oligonucleotide
agaugccucugcuguggca

SEQ ID NO: 1398182 - RNA, 19 nt, Artificial Sequence
  Description of Artificial Sequence: Synthetic oligonucleotide
cugcaaugugcgagggcug

SEQ ID NO: 1398183 - RNA, 19 nt, Artificial Sequence
  Description of Artificial Sequence: Synthetic oligonucleotide
gaagcacccuuccaucggu

SEQ ID NO: 1398184 - RNA, 19 nt, Artificial Sequence
  Description of Artificial Sequence: Synthetic oligonucleotide
gucgucgagccgaccauag

SEQ ID NO: 1398185 - RNA, 19 nt, Artificial Sequence
  Description of Artificial Sequence: Synthetic oligonucleotide
ggcaacuuuucgucucccc

SEQ ID NO: 1398186 - RNA, 19 nt, Artificial Sequence
  Description of Artificial Sequence: Synthetic oligonucleotide
gggaccagcgcacagcaaa

SEQ ID NO: 1398187 - RNA, 19 nt, Artificial Sequence
  Description of Artificial Sequence: Synthetic oligonucleotide
ggacagaugccucugcugu

SEQ ID NO: 1398188 - RNA, 19 nt, Artificial Sequence
  Description of Artificial Sequence: Synthetic oligonucleotide
caguugccacaccuucacc

SEQ ID NO: 1398189 - RNA, 19 nt, Artificial Sequence
  Description of Artificial Sequence: Synthetic oligonucleotide
ucgucuccccgcgaaugcc

SEQ ID NO: 1398190 - RNA, 19 nt, Artificial Sequence
  Description of Artificial Sequence: Synthetic oligonucleotide
ugaccguggccuccacccu

SEQ ID NO: 1398191 - RNA, 19 nt, Artificial Sequence
  Description of Artificial Sequence: Synthetic oligonucleotide
cguccaguucaccucauag

SEQ ID NO: 1398192 - RNA, 19 nt, Artificial Sequence
  Description of Artificial Sequence: Synthetic oligonucleotide
ccgcgaaugcccuggacgc

SEQ ID NO: 1398193 - RNA, 19 nt, Artificial Sequence
  Description of Artificial Sequence: Synthetic oligonucleotide
cauagccaucgaaggcaug

SEQ ID NO: 1398194 - RNA, 19 nt, Artificial Sequence
  Description of Artificial Sequence: Synthetic oligonucleotide
gggugugaagacaggacac

SEQ ID NO: 1398195 - RNA, 19 nt, Artificial Sequence
  Description of Artificial Sequence: Synthetic oligonucleotide
cuggaagcgguggcugugc

SEQ ID NO: 1398196 - RNA, 19 nt, Artificial Sequence
  Description of Artificial Sequence: Synthetic oligonucleotide
caguucaccucauagccau

SEQ ID NO: 1398197 - RNA, 19 nt, Artificial Sequence
  Description of Artificial Sequence: Synthetic oligonucleotide
gagucugcuggcuguuaaa

SEQ ID NO: 1398198 - RNA, 19 nt, Artificial Sequence
  Description of Artificial Sequence: Synthetic oligonucleotide
gggcauccgagugagagca

SEQ ID NO: 1398199 - RNA, 19 nt, Artificial Sequence
  Description of Artificial Sequence: Synthetic oligonucleotide
gacgcacucagcaccugga

SEQ ID NO: 1398200 - RNA, 19 nt, Artificial Sequence
  Description of Artificial Sequence: Synthetic oligonucleotide
aagcacccuuccaucggug

SEQ ID NO: 1398201 - RNA, 19 nt, Artificial Sequence
  Description of Artificial Sequence: Synthetic oligonucleotide
cagguacuugugagacagc

SEQ ID NO: 1398202 - RNA, 19 nt, Artificial Sequence
  Description of Artificial Sequence: Synthetic oligonucleotide
gccgaccauaggcacaggc

SEQ ID NO: 1398203 - RNA, 19 nt, Artificial Sequence
  Description of Artificial Sequence: Synthetic oligonucleotide
cuccccgcgaaugcccugg

SEQ ID NO: 1398204 - RNA, 19 nt, Artificial Sequence
  Description of Artificial Sequence: Synthetic oligonucleotide
gccuuggcgguccagguuc

SEQ ID NO: 1398205 - RNA, 19 nt, Artificial Sequence
  Description of Artificial Sequence: Synthetic oligonucleotide
gaccguggccuccacccuc

SEQ ID NO: 1398206 - RNA, 19 nt, Artificial Sequence
  Description of Artificial Sequence: Synthetic oligonucleotide
gcugugccgggguucaggc

SEQ ID NO: 1398207 - RNA, 19 nt, Artificial Sequence
  Description of Artificial Sequence: Synthetic oligonucleotide
gacaccgucugcuguggcu

SEQ ID NO: 1398208 - RNA, 19 nt, Artificial Sequence
  Description of Artificial Sequence: Synthetic oligonucleotide
gugugcuccaguccccguc

SEQ ID NO: 1398209 - RNA, 19 nt, Artificial Sequence
  Description of Artificial Sequence: Synthetic oligonucleotide
guucaggccuuggcggucc

SEQ ID NO: 1398210 - RNA, 19 nt, Artificial Sequence
  Description of Artificial Sequence: Synthetic oligonucleotide
acgucaccuuccccagaag

SEQ ID NO: 1398211 - RNA, 19 nt, Artificial Sequence
  Description of Artificial Sequence: Synthetic oligonucleotide
gcuguacucaguugccaca

SEQ ID NO: 1398212 - RNA, 19 nt, Artificial Sequence
  Description of Artificial Sequence: Synthetic oligonucleotide
ggacuuaagugugcuccag

SEQ ID NO: 1398213 - RNA, 19 nt, Artificial Sequence
  Description of Artificial Sequence: Synthetic oligonucleotide
ugcgagggcugugugggau

SEQ ID NO: 1398214 - RNA, 19 nt, Artificial Sequence
  Description of Artificial Sequence: Synthetic oligonucleotide
ggccagacacaugacagca

SEQ ID NO: 1398215 - RNA, 19 nt, Artificial Sequence
  Description of Artificial Sequence: Synthetic oligonucleotide
aacagguacuggggccacu

SEQ ID NO: 1398216 - RNA, 19 nt, Artificial Sequence
  Description of Artificial Sequence: Synthetic oligonucleotide
agugugcuccaguccccgu

SEQ ID NO: 1398217 - RNA, 19 nt, Artificial Sequence
  Description of Artificial Sequence: Synthetic oligonucleotide
uuccaucgguggacgcacu

SEQ ID NO: 1398218 - RNA, 19 nt, Artificial Sequence
  Description of Artificial Sequence: Synthetic oligonucleotide
agccgguggcguuccagga

SEQ ID NO: 1398219 - RNA, 19 nt, Artificial Sequence
  Description of Artificial Sequence: Synthetic oligonucleotide
ggagagucgcagcugccca

SEQ ID NO: 1398220 - RNA, 19 nt, Artificial Sequence
  Description of Artificial Sequence: Synthetic oligonucleotide
acccuccggagaaaggcug

SEQ ID NO: 1398221 - RNA, 19 nt, Artificial Sequence
  Description of Artificial Sequence: Synthetic oligonucleotide
acgcacucagcaccuggaa

SEQ ID NO: 1398222 - RNA, 19 nt, Artificial Sequence
  Description of Artificial Sequence: Synthetic oligonucleotide
gucugcuggcuguuaaacu

SEQ ID NO: 1398223 - RNA, 19 nt, Artificial Sequence
  Description of Artificial Sequence: Synthetic oligonucleotide
cuccacugcgagggcacgg

SEQ ID NO: 1398224 - RNA, 19 nt, Artificial Sequence
  Description of Artificial Sequence: Synthetic oligonucleotide
agucagaccugugcgccaa

SEQ ID NO: 1398225 - RNA, 19 nt, Artificial Sequence
  Description of Artificial Sequence: Synthetic oligonucleotide
ccacaccagcaccucaccg

SEQ ID NO: 1398226 - RNA, 19 nt, Artificial Sequence
  Description of Artificial Sequence: Synthetic oligonucleotide
cacugggcaccuccacuac

SEQ ID NO: 1398227 - RNA, 19 nt, Artificial Sequence
  Description of Artificial Sequence: Synthetic oligonucleotide
gcauccgagugagagcagc

SEQ ID NO: 1398228 - RNA, 19 nt, Artificial Sequence
  Description of Artificial Sequence: Synthetic oligonucleotide
ggaacagcucacagaguac

SEQ ID NO: 1398229 - RNA, 19 nt, Artificial Sequence
  Description of Artificial Sequence: Synthetic oligonucleotide
ggaagagauuccuguggaa

SEQ ID NO: 1398230 - RNA, 19 nt, Artificial Sequence
  Description of Artificial Sequence: Synthetic oligonucleotide
cugccagccugagaguguc

SEQ ID NO: 1398231 - RNA, 19 nt, Artificial Sequence
  Description of Artificial Sequence: Synthetic oligonucleotide
gcagacccugcccuugggc

SEQ ID NO: 1398232 - RNA, 19 nt, Artificial Sequence
  Description of Artificial Sequence: Synthetic oligonucleotide
ggucaaacaguugcacguc

SEQ ID NO: 1398233 - RNA, 19 nt, Artificial Sequence
  Description of Artificial Sequence: Synthetic oligonucleotide
caccugauacacagggucu

SEQ ID NO: 1398234 - RNA, 19 nt, Artificial Sequence
  Description of Artificial Sequence: Synthetic oligonucleotide
guccagguuccaaguacac

SEQ ID NO: 1398235 - RNA, 19 nt, Artificial Sequence
  Description of Artificial Sequence: Synthetic oligonucleotide
guccccgucgucgagccga

SEQ ID NO: 1398236 - RNA, 19 nt, Artificial Sequence
  Description of Artificial Sequence: Synthetic oligonucleotide
cucagucucuccacggggu

SEQ ID NO: 1398237 - RNA, 19 nt, Artificial Sequence
  Description of Artificial Sequence: Synthetic oligonucleotide
ucuccccgcgaaugcccug

SEQ ID NO: 1398238 - RNA, 19 nt, Artificial Sequence
  Description of Artificial Sequence: Synthetic oligonucleotide
agcucccggaugaccgugg

SEQ ID NO: 1398239 - RNA, 19 nt, Artificial Sequence
  Description of Artificial Sequence: Synthetic oligonucleotide
ugccggucacaugcagacc

SEQ ID NO: 1398240 - RNA, 19 nt, Artificial Sequence
  Description of Artificial Sequence: Synthetic oligonucleotide
ccaccucagucucuccacg

SEQ ID NO: 1398241 - RNA, 19 nt, Artificial Sequence
  Description of Artificial Sequence: Synthetic oligonucleotide
ccauggggagagaagguga

SEQ ID NO: 1398242 - RNA, 19 nt, Artificial Sequence
  Description of Artificial Sequence: Synthetic oligonucleotide
cacagagccgguggcguuc

SEQ ID NO: 1398243 - RNA, 19 nt, Artificial Sequence
  Description of Artificial Sequence: Synthetic oligonucleotide
gcaaccacagcaccugaua

SEQ ID NO: 1398244 - RNA, 19 nt, Artificial Sequence
  Description of Artificial Sequence: Synthetic oligonucleotide
ugccagccugagaguguca

SEQ ID NO: 1398245 - RNA, 19 nt, Artificial Sequence
  Description of Artificial Sequence: Synthetic oligonucleotide
gcguuccaggaaaugccgg

SEQ ID NO: 1398246 - RNA, 19 nt, Artificial Sequence
  Description of Artificial Sequence: Synthetic oligonucleotide
gcacucaggaagagauucc

SEQ ID NO: 1398247 - RNA, 19 nt, Artificial Sequence
  Description of Artificial Sequence: Synthetic oligonucleotide
gagcuuuucuggaggucaa

SEQ ID NO: 1398248 - RNA, 19 nt, Artificial Sequence
  Description of Artificial Sequence: Synthetic oligonucleotide
gugagcuuuucuggagguc

SEQ ID NO: 1398249 - RNA, 19 nt, Artificial Sequence
  Description of Artificial Sequence: Synthetic oligonucleotide
caguggguccucgggccgg

SEQ ID NO: 1398250 - RNA, 19 nt, Artificial Sequence
  Description of Artificial Sequence: Synthetic oligonucleotide
gcuccguccaguucaccuc

SEQ ID NO: 1398251 - RNA, 19 nt, Artificial Sequence
  Description of Artificial Sequence: Synthetic oligonucleotide
ggacgccacgcccaggguc

SEQ ID NO: 1398252 - RNA, 19 nt, Artificial Sequence
  Description of Artificial Sequence: Synthetic oligonucleotide
accgucugcuguggcuccg

SEQ ID NO: 1398253 - RNA, 19 nt, Artificial Sequence
  Description of Artificial Sequence: Synthetic oligonucleotide
gacgccacgcccagggucu

SEQ ID NO: 1398254 - RNA, 19 nt, Artificial Sequence
  Description of Artificial Sequence: Synthetic oligonucleotide
ugucucccugggcccuugu

SEQ ID NO: 1398255 - RNA, 19 nt, Artificial Sequence
  Description of Artificial Sequence: Synthetic oligonucleotide
ggagcccuaaggggcacag

SEQ ID NO: 1398256 - RNA, 19 nt, Artificial Sequence
  Description of Artificial Sequence: Synthetic oligonucleotide
ccgggguucaggcaaccac

SEQ ID NO: 1398257 - RNA, 19 nt, Artificial Sequence
  Description of Artificial Sequence: Synthetic oligonucleotide
cuuccgcuucuaguugguc

SEQ ID NO: 1398258 - RNA, 19 nt, Artificial Sequence
  Description of Artificial Sequence: Synthetic oligonucleotide
caggaaaugccggucacau

SEQ ID NO: 1398259 - RNA, 19 nt, Artificial Sequence
  Description of Artificial Sequence: Synthetic oligonucleotide
uccguccaguucaccucau

SEQ ID NO: 1398260 - RNA, 19 nt, Artificial Sequence
  Description of Artificial Sequence: Synthetic oligonucleotide
cccuaaggggcacagagcu

SEQ ID NO: 1398261 - RNA, 19 nt, Artificial Sequence
  Description of Artificial Sequence: Synthetic oligonucleotide
ccuaaggggcacagagcug

SEQ ID NO: 1398262 - RNA, 19 nt, Artificial Sequence
  Description of Artificial Sequence: Synthetic oligonucleotide
caguagacaggacuuccau

SEQ ID NO: 1398263 - RNA, 19 nt, Artificial Sequence
  Description of Artificial Sequence: Synthetic oligonucleotide
cauccgagugagagcagcu

SEQ ID NO: 1398264 - RNA, 19 nt, Artificial Sequence
  Description of Artificial Sequence: Synthetic oligonucleotide
ccaguucaccucauagcca

SEQ ID NO: 1398265 - RNA, 19 nt, Artificial Sequence
  Description of Artificial Sequence: Synthetic oligonucleotide
uggacgcacucagcaccug

SEQ ID NO: 1398266 - RNA, 19 nt, Artificial Sequence
  Description of Artificial Sequence: Synthetic oligonucleotide
cagucagaccugugcgcca

SEQ ID NO: 1398267 - RNA, 19 nt, Artificial Sequence
  Description of Artificial Sequence: Synthetic oligonucleotide
ggcuccguccaguucaccu

SEQ ID NO: 1398268 - RNA, 19 nt, Artificial Sequence
  Description of Artificial Sequence: Synthetic oligonucleotide
uccccgucgucgagccgac

SEQ ID NO: 1398269 - RNA, 19 nt, Artificial Sequence
  Description of Artificial Sequence: Synthetic oligonucleotide
gcaguagacaggacuucca

SEQ ID NO: 1398270 - RNA, 19 nt, Artificial Sequence
  Description of Artificial Sequence: Synthetic oligonucleotide
ggaccagcgcacagcaaac

SEQ ID NO: 1398271 - RNA, 19 nt, Artificial Sequence
  Description of Artificial Sequence: Synthetic oligonucleotide
gaguacacagggccaccau

SEQ ID NO: 1398272 - RNA, 19 nt, Artificial Sequence
  Description of Artificial Sequence: Synthetic oligonucleotide
uccccgcgaaugcccugga

SEQ ID NO: 1398273 - RNA, 19 nt, Artificial Sequence
  Description of Artificial Sequence: Synthetic oligonucleotide
cgguccagguuccaaguac

SEQ ID NO: 1398274 - RNA, 19 nt, Artificial Sequence
  Description of Artificial Sequence: Synthetic oligonucleotide
gcauggaguacagguggac

SEQ ID NO: 1398275 - RNA, 19 nt, Artificial Sequence
  Description of Artificial Sequence: Synthetic oligonucleotide
ucucuccacgggguggcuu

SEQ ID NO: 1398276 - RNA, 19 nt, Artificial Sequence
  Description of Artificial Sequence: Synthetic oligonucleotide
ccugcaaugugcgagggcu

SEQ ID NO: 1398277 - RNA, 19 nt, Artificial Sequence
  Description of Artificial Sequence: Synthetic oligonucleotide
gguagcuacuuccgcuucu

SEQ ID NO: 1398278 - RNA, 19 nt, Artificial Sequence
  Description of Artificial Sequence: Synthetic oligonucleotide
gggcacggacgccacgccc

SEQ ID NO: 1398279 - RNA, 19 nt, Artificial Sequence
  Description of Artificial Sequence: Synthetic oligonucleotide
ccucaccgcuauacagucc

SEQ ID NO: 1398280 - RNA, 19 nt, Artificial Sequence
  Description of Artificial Sequence: Synthetic oligonucleotide
gccggcucaugucccacac

SEQ ID NO: 1398281 - RNA, 19 nt, Artificial Sequence
  Description of Artificial Sequence: Synthetic oligonucleotide
cagcucccggaugaccgug

SEQ ID NO: 1398282 - RNA, 19 nt, Artificial Sequence
  Description of Artificial Sequence: Synthetic oligonucleotide
ggcucaugucccacaccag

SEQ ID NO: 1398283 - RNA, 19 nt, Artificial Sequence
  Description of Artificial Sequence: Synthetic oligonucleotide
caaugugcgagggcugugu

SEQ ID NO: 1398284 - RNA, 19 nt, Artificial Sequence
  Description of Artificial Sequence: Synthetic oligonucleotide
ccuggacgccccuccacug

SEQ ID NO: 1398285 - RNA, 19 nt, Artificial Sequence
  Description of Artificial Sequence: Synthetic oligonucleotide
gggugucaucagucagacc

SEQ ID NO: 1398286 - RNA, 19 nt, Artificial Sequence
  Description of Artificial Sequence: Synthetic oligonucleotide
cccacaccagcaccucacc

SEQ ID NO: 1398287 - RNA, 19 nt, Artificial Sequence
  Description of Artificial Sequence: Synthetic oligonucleotide
gcccuaaggggcacagagc

SEQ ID NO: 1398288 - RNA, 19 nt, Artificial Sequence
  Description of Artificial Sequence: Synthetic oligonucleotide
ccuuggcgguccagguucc

SEQ ID NO: 1398289 - RNA, 19 nt, Artificial Sequence
  Description of Artificial Sequence: Synthetic oligonucleotide
ggcacggacgccacgccca

SEQ ID NO: 1398290 - RNA, 19 nt, Artificial Sequence
  Description of Artificial Sequence: Synthetic oligonucleotide
ggacaccgucugcuguggc

SEQ ID NO: 1398291 - RNA, 19 nt, Artificial Sequence
  Description of Artificial Sequence: Synthetic oligonucleotide
aggggcgcacaggggacca

SEQ ID NO: 1398292 - RNA, 19 nt, Artificial Sequence
  Description of Artificial Sequence: Synthetic oligonucleotide
cgucuccccgcgaaugccc

SEQ ID NO: 1398293 - RNA, 19 nt, Artificial Sequence
  Description of Artificial Sequence: Synthetic oligonucleotide
cacccuccggagaaaggcu

SEQ ID NO: 1398294 - RNA, 19 nt, Artificial Sequence
  Description of Artificial Sequence: Synthetic oligonucleotide
cugugccgggguucaggca

SEQ ID NO: 1398295 - RNA, 19 nt, Artificial Sequence
  Description of Artificial Sequence: Synthetic oligonucleotide
uggcuccguccaguucacc

SEQ ID NO: 1398296 - RNA, 19 nt, Artificial Sequence
  Description of Artificial Sequence: Synthetic oligonucleotide
ccugugcgccaaagcagug

SEQ ID NO: 1398297 - RNA, 19 nt, Artificial Sequence
  Description of Artificial Sequence: Synthetic oligonucleotide
gcacggacgccacgcccag

SEQ ID NO: 1398298 - RNA, 19 nt, Artificial Sequence
  Description of Artificial Sequence: Synthetic oligonucleotide
cccugcaaugugcgagggc

SEQ ID NO: 1398299 - RNA, 19 nt, Artificial Sequence
  Description of Artificial Sequence: Synthetic oligonucleotide
gcaaugugcgagggcugug

SEQ ID NO: 1398300 - RNA, 19 nt, Artificial Sequence
  Description of Artificial Sequence: Synthetic oligonucleotide
cccgucgucgagccgacca

SEQ ID NO: 1398301 - RNA, 19 nt, Artificial Sequence
  Description of Artificial Sequence: Synthetic oligonucleotide
guggacgcacucagcaccu

SEQ ID NO: 1398302 - RNA, 19 nt, Artificial Sequence
  Description of Artificial Sequence: Synthetic oligonucleotide
gguuuguguuauggaaacu

SEQ ID NO: 1398303 - RNA, 19 nt, Artificial Sequence
  Description of Artificial Sequence: Synthetic oligonucleotide
gcacaggggaccagcgcac

SEQ ID NO: 1398304 - RNA, 19 nt, Artificial Sequence
  Description of Artificial Sequence: Synthetic oligonucleotide
gggcgcacaggggaccagc

SEQ ID NO: 1398305 - RNA, 19 nt, Artificial Sequence
  Description of Artificial Sequence: Synthetic oligonucleotide
gcccucagguagcuacuuc

SEQ ID NO: 1398306 - RNA, 19 nt, Artificial Sequence
  Description of Artificial Sequence: Synthetic oligonucleotide
gggaacacuugaggggaaa

SEQ ID NO: 1398307 - RNA, 19 nt, Artificial Sequence
  Description of Artificial Sequence: Synthetic oligonucleotide
agccgaccauaggcacagg

SEQ ID NO: 1398308 - RNA, 19 nt, Artificial Sequence
  Description of Artificial Sequence: Synthetic oligonucleotide
cacggacgccacgcccagg

SEQ ID NO: 1398309 - RNA, 19 nt, Artificial Sequence
  Description of Artificial Sequence: Synthetic oligonucleotide
cauggcucugccaguuguu

SEQ ID NO: 1398310 - RNA, 19 nt, Artificial Sequence
  Description of Artificial Sequence: Synthetic oligonucleotide
cacaggggaccagcgcaca

SEQ ID NO: 1398311 - RNA, 19 nt, Artificial Sequence
  Description of Artificial Sequence: Synthetic oligonucleotide
uggcugugccgggguucag

SEQ ID NO: 1398312 - RNA, 19 nt, Artificial Sequence
  Description of Artificial Sequence: Synthetic oligonucleotide
gaaugcccuggacgccccu

SEQ ID NO: 1398313 - RNA, 19 nt, Artificial Sequence
  Description of Artificial Sequence: Synthetic oligonucleotide
gugcgagggcuguguggga

SEQ ID NO: 1398314 - RNA, 19 nt, Artificial Sequence
  Description of Artificial Sequence: Synthetic oligonucleotide
ccggcucaugucccacacc

SEQ ID NO: 1398315 - RNA, 19 nt, Artificial Sequence
  Description of Artificial Sequence: Synthetic oligonucleotide
ggcauccgagugagagcag

SEQ ID NO: 1398316 - RNA, 19 nt, Artificial Sequence
  Description of Artificial Sequence: Synthetic oligonucleotide
gccgguggcguuccaggaa

SEQ ID NO: 1398317 - RNA, 19 nt, Artificial Sequence
  Description of Artificial Sequence: Synthetic oligonucleotide
agcgcacagcaaacaggua

SEQ ID NO: 1398318 - RNA, 19 nt, Artificial Sequence
  Description of Artificial Sequence: Synthetic oligonucleotide
ccccugcaaugugcgaggg

SEQ ID NO: 1398319 - RNA, 19 nt, Artificial Sequence
  Description of Artificial Sequence: Synthetic oligonucleotide
cgguggacgcacucagcac

SEQ ID NO: 1398320 - RNA, 19 nt, Artificial Sequence
  Description of Artificial Sequence: Synthetic oligonucleotide
ccaggaaaugccggucaca

SEQ ID NO: 1398321 - RNA, 19 nt, Artificial Sequence
  Description of Artificial Sequence: Synthetic oligonucleotide
ccaucgguggacgcacuca

SEQ ID NO: 1398322 - RNA, 19 nt, Artificial Sequence
  Description of Artificial Sequence: Synthetic oligonucleotide
cuuggcgguccagguucca

SEQ ID NO: 1398323 - RNA, 19 nt, Artificial Sequence
  Description of Artificial Sequence: Synthetic oligonucleotide
ccacugcgagggcacggac

SEQ ID NO: 1398324 - RNA, 19 nt, Artificial Sequence
  Description of Artificial Sequence: Synthetic oligonucleotide
cugcugccagggaacacuu

SEQ ID NO: 1398325 - RNA, 19 nt, Artificial Sequence
  Description of Artificial Sequence: Synthetic oligonucleotide
ggccggcucaugucccaca

SEQ ID NO: 1398326 - RNA, 19 nt, Artificial Sequence
  Description of Artificial Sequence: Synthetic oligonucleotide
cugagucugcuggcuguua

SEQ ID NO: 1398327 - RNA, 19 nt, Artificial Sequence
  Description of Artificial Sequence: Synthetic oligonucleotide
cccuuggagagucgcagcu

SEQ ID NO: 1398328 - RNA, 19 nt, Artificial Sequence
  Description of Artificial Sequence: Synthetic oligonucleotide
gccaucggucccagcacuc

SEQ ID NO: 1398329 - RNA, 19 nt, Artificial Sequence
  Description of Artificial Sequence: Synthetic oligonucleotide
cgagccgaccauaggcaca

SEQ ID NO: 1398330 - RNA, 19 nt, Artificial Sequence
  Description of Artificial Sequence: Synthetic oligonucleotide
gucuccccgcgaaugcccu

SEQ ID NO: 1398331 - RNA, 19 nt, Artificial Sequence
  Description of Artificial Sequence: Synthetic oligonucleotide
cagcacucaggaagagauu

SEQ ID NO: 1398332 - RNA, 19 nt, Artificial Sequence
  Description of Artificial Sequence: Synthetic oligonucleotide
cccggaugaccguggccuc

SEQ ID NO: 1398333 - RNA, 19 nt, Artificial Sequence
  Description of Artificial Sequence: Synthetic oligonucleotide
ggcauccaccuguguccga

SEQ ID NO: 1398334 - RNA, 19 nt, Artificial Sequence
  Description of Artificial Sequence: Synthetic oligonucleotide
gggucugugugggugucau

SEQ ID NO: 1398335 - RNA, 19 nt, Artificial Sequence
  Description of Artificial Sequence: Synthetic oligonucleotide
cgcgaaugcccuggacgcc

SEQ ID NO: 1398336 - RNA, 19 nt, Artificial Sequence
  Description of Artificial Sequence: Synthetic oligonucleotide
cgagggcacggacgccacg

SEQ ID NO: 1398337 - RNA, 19 nt, Artificial Sequence
  Description of Artificial Sequence: Synthetic oligonucleotide
gcuguggcuccguccaguu

SEQ ID NO: 1398338 - RNA, 19 nt, Artificial Sequence
  Description of Artificial Sequence: Synthetic oligonucleotide
gugcgccaaagcagugggu

SEQ ID NO: 1398339 - RNA, 19 nt, Artificial Sequence
  Description of Artificial Sequence: Synthetic oligonucleotide
gcugccagccugagagugu

SEQ ID NO: 1398340 - RNA, 19 nt, Artificial Sequence
  Description of Artificial Sequence: Synthetic oligonucleotide
gccgggguucaggcaacca

SEQ ID NO: 1398341 - RNA, 19 nt, Artificial Sequence
  Description of Artificial Sequence: Synthetic oligonucleotide
cagagccgguggcguucca

SEQ ID NO: 1398342 - RNA, 19 nt, Artificial Sequence
  Description of Artificial Sequence: Synthetic oligonucleotide
cagcgccacugccccucca

SEQ ID NO: 1398343 - RNA, 19 nt, Artificial Sequence
  Description of Artificial Sequence: Synthetic oligonucleotide
ggacgccccuccacugcga

SEQ ID NO: 1398344 - RNA, 19 nt, Artificial Sequence
  Description of Artificial Sequence: Synthetic oligonucleotide
ccacgcccagggucucauc

SEQ ID NO: 1398345 - RNA, 19 nt, Artificial Sequence
  Description of Artificial Sequence: Synthetic oligonucleotide
gcgguggcugugccggggu

SEQ ID NO: 1398346 - RNA, 19 nt, Artificial Sequence
  Description of Artificial Sequence: Synthetic oligonucleotide
ccggucacaugcagacccu

SEQ ID NO: 1398347 - RNA, 19 nt, Artificial Sequence
  Description of Artificial Sequence: Synthetic oligonucleotide
gcacagagccgguggcguu

SEQ ID NO: 1398348 - RNA, 19 nt, Artificial Sequence
  Description of Artificial Sequence: Synthetic oligonucleotide
ggggaccagcgcacagcaa

SEQ ID NO: 1398349 - RNA, 19 nt, Artificial Sequence
  Description of Artificial Sequence: Synthetic oligonucleotide
ccguccaguucaccucaua

SEQ ID NO: 1398350 - RNA, 19 nt, Artificial Sequence
  Description of Artificial Sequence: Synthetic oligonucleotide
cgccaaagcaguggguccu

SEQ ID NO: 1398351 - RNA, 19 nt, Artificial Sequence
  Description of Artificial Sequence: Synthetic oligonucleotide
gugcuccgaggcagcugcu

SEQ ID NO: 1398352 - RNA, 19 nt, Artificial Sequence
  Description of Artificial Sequence: Synthetic oligonucleotide
cccuccagagaagcacccu

SEQ ID NO: 1398353 - RNA, 19 nt, Artificial Sequence
  Description of Artificial Sequence: Synthetic oligonucleotide
ccgucgucgagccgaccau

SEQ ID NO: 1398354 - RNA, 19 nt, Artificial Sequence
  Description of Artificial Sequence: Synthetic oligonucleotide
gccacgcccagggucucau

SEQ ID NO: 1398355 - RNA, 19 nt, Artificial Sequence
  Description of Artificial Sequence: Synthetic oligonucleotide
cgggccggcucauguccca

SEQ ID NO: 1398356 - RNA, 19 nt, Artificial Sequence
  Description of Artificial Sequence: Synthetic oligonucleotide
ccgcuucuaguugguccaa

SEQ ID NO: 1398357 - RNA, 19 nt, Artificial Sequence
  Description of Artificial Sequence: Synthetic oligonucleotide
guggguccucgggccggcu

SEQ ID NO: 1398358 - RNA, 19 nt, Artificial Sequence
  Description of Artificial Sequence: Synthetic oligonucleotide
cgucgucgagccgaccaua

SEQ ID NO: 1398359 - RNA, 19 nt, Artificial Sequence
  Description of Artificial Sequence: Synthetic oligonucleotide
ccccgucgucgagccgacc

SEQ ID NO: 1398360 - RNA, 19 nt, Artificial Sequence
  Description of Artificial Sequence: Synthetic oligonucleotide
ccgucugcuguggcuccgu

SEQ ID NO: 1398361 - RNA, 19 nt, Artificial Sequence
  Description of Artificial Sequence: Synthetic oligonucleotide
cgguggcguuccaggaaau

SEQ ID NO: 1398362 - RNA, 19 nt, Artificial Sequence
  Description of Artificial Sequence: Synthetic oligonucleotide
cggacgccacgcccagggu

SEQ ID NO: 1398363 - RNA, 19 nt, Artificial Sequence
  Description of Artificial Sequence: Synthetic oligonucleotide
aaaagauggacuuuggcug

SEQ ID NO: 1398364 - RNA, 19 nt, Artificial Sequence
  Description of Artificial Sequence: Synthetic oligonucleotide
ugaaugauaagacuggagc

SEQ ID NO: 1398365 - RNA, 19 nt, Artificial Sequence
  Description of Artificial Sequence: Synthetic oligonucleotide
cauaaauagacauuauugc

SEQ ID NO: 1398366 - RNA, 19 nt, Artificial Sequence
  Description of Artificial Sequence: Synthetic oligonucleotide
aaucaaacccuguaucugg

SEQ ID NO: 1398367 - RNA, 19 nt, Artificial Sequence
  Description of Artificial Sequence: Synthetic oligonucleotide
ugaaguuuggucuucgucc

SEQ ID NO: 1398368 - RNA, 19 nt, Artificial Sequence
  Description of Artificial Sequence: Synthetic oligonucleotide
ucuccuacuaucuccaugg

SEQ ID NO: 1398369 - RNA, 19 nt, Artificial Sequence
  Description of Artificial Sequence: Synthetic oligonucleotide
uaaaagauggacuuuggcu

SEQ ID NO: 1398370 - RNA, 19 nt, Artificial Sequence
  Description of Artificial Sequence: Synthetic oligonucleotide
aacacucuucccaacaucc

SEQ ID NO: 1398371 - RNA, 19 nt, Artificial Sequence
  Description of Artificial Sequence: Synthetic oligonucleotide
auuauugcucuucuguugg

SEQ ID NO: 1398372 - RNA, 19 nt, Artificial Sequence
  Description of Artificial Sequence: Synthetic oligonucleotide
aaugauaagacuggagcuc

SEQ ID NO: 1398373 - RNA, 19 nt, Artificial Sequence
  Description of Artificial Sequence: Synthetic oligonucleotide
auaaauagacauuauugcu

SEQ ID NO: 1398374 - RNA, 19 nt, Artificial Sequence
  Description of Artificial Sequence: Synthetic oligonucleotide
agucugcacacuuauaugg

SEQ ID NO: 1398375 - RNA, 19 nt, Artificial Sequence
  Description of Artificial Sequence: Synthetic oligonucleotide
aagaacuucuccauugagc

SEQ ID NO: 1398376 - RNA, 19 nt, Artificial Sequence
  Description of Artificial Sequence: Synthetic oligonucleotide
cucucuacauucaugaggc

SEQ ID NO: 1398377 - RNA, 19 nt, Artificial Sequence
  Description of Artificial Sequence: Synthetic oligonucleotide
ugauguuucaguagguuug

SEQ ID NO: 1398378 - RNA, 19 nt, Artificial Sequence
  Description of Artificial Sequence: Synthetic oligonucleotide
agaacuucuccauugagca

SEQ ID NO: 1398379 - RNA, 19 nt, Artificial Sequence
  Description of Artificial Sequence: Synthetic oligonucleotide
acacucaggacauggauac

SEQ ID NO: 1398380 - RNA, 19 nt, Artificial Sequence
  Description of Artificial Sequence: Synthetic oligonucleotide
aggacauggauacagcuuc

SEQ ID NO: 1398381 - RNA, 19 nt, Artificial Sequence
  Description of Artificial Sequence: Synthetic oligonucleotide
ucuuagagaaacaccuucc

SEQ ID NO: 1398382 - RNA, 19 nt, Artificial Sequence
  Description of Artificial Sequence: Synthetic oligonucleotide
uucaguagguuugagaucu

SEQ ID NO: 1398383 - RNA, 19 nt, Artificial Sequence
  Description of Artificial Sequence: Synthetic oligonucleotide
uccauugagcacuaaaaga

SEQ ID NO: 1398384 - RNA, 19 nt, Artificial Sequence
  Description of Artificial Sequence: Synthetic oligonucleotide
gauuaaagcgcuuuccgca

SEQ ID NO: 1398385 - RNA, 19 nt, Artificial Sequence
  Description of Artificial Sequence: Synthetic oligonucleotide
aacuucccacacucgaggc

SEQ ID NO: 1398386 - RNA, 19 nt, Artificial Sequence
  Description of Artificial Sequence: Synthetic oligonucleotide
auuaaagcgcuuuccgcac

SEQ ID NO: 1398387 - RNA, 19 nt, Artificial Sequence
  Description of Artificial Sequence: Synthetic oligonucleotide
uugggaaucuggcagaagu

SEQ ID NO: 1398388 - RNA, 19 nt, Artificial Sequence
  Description of Artificial Sequence: Synthetic oligonucleotide
ugccacucugcccagaucc

SEQ ID NO: 1398389 - RNA, 19 nt, Artificial Sequence
  Description of Artificial Sequence: Synthetic oligonucleotide
uuauauggcuucucgccgg

SEQ ID NO: 1398390 - RNA, 19 nt, Artificial Sequence
  Description of Artificial Sequence: Synthetic oligonucleotide
gagugaugagguuggagcg

SEQ ID NO: 1398391 - RNA, 19 nt, Artificial Sequence
  Description of Artificial Sequence: Synthetic oligonucleotide
caggauuuccuccagagug

SEQ ID NO: 1398392 - RNA, 19 nt, Artificial Sequence
  Description of Artificial Sequence: Synthetic oligonucleotide
aguucaugcuuccacugac

SEQ ID NO: 1398393 - RNA, 19 nt, Artificial Sequence
  Description of Artificial Sequence: Synthetic oligonucleotide
cugauuaaagcgcuuuccg

SEQ ID NO: 1398394 - RNA, 19 nt, Artificial Sequence
  Description of Artificial Sequence: Synthetic oligonucleotide
uggcuuuccgguaauuccg

SEQ ID NO: 1398395 - RNA, 19 nt, Artificial Sequence
  Description of Artificial Sequence: Synthetic oligonucleotide
ugauuaaagcgcuuuccgc

SEQ ID NO: 1398396 - RNA, 19 nt, Artificial Sequence
  Description of Artificial Sequence: Synthetic oligonucleotide
agagcucuuagagaaacac

SEQ ID NO: 1398397 - RNA, 19 nt, Artificial Sequence
  Description of Artificial Sequence: Synthetic oligonucleotide
ucguagaaggggcaggucc

SEQ ID NO: 1398398 - RNA, 19 nt, Artificial Sequence
  Description of Artificial Sequence: Synthetic oligonucleotide
uggaguuugggaaucuggc

SEQ ID NO: 1398399 - RNA, 19 nt, Artificial Sequence
  Description of Artificial Sequence: Synthetic oligonucleotide
ucuccauugagcacuaaaa

SEQ ID NO: 1398400 - RNA, 19 nt, Artificial Sequence
  Description of Artificial Sequence: Synthetic oligonucleotide
uugagaucugcuugaagcc

SEQ ID NO: 1398401 - RNA, 19 nt, Artificial Sequence
  Description of Artificial Sequence: Synthetic oligonucleotide
ucuuccaucucaccccagg

SEQ ID NO: 1398402 - RNA, 19 nt, Artificial Sequence
  Description of Artificial Sequence: Synthetic oligonucleotide
agcacuaaaagauggacuu

SEQ ID NO: 1398403 - RNA, 19 nt, Artificial Sequence
  Description of Artificial Sequence: Synthetic oligonucleotide
ccuacuaucuccauggccc

SEQ ID NO: 1398404 - RNA, 19 nt, Artificial Sequence
  Description of Artificial Sequence: Synthetic oligonucleotide
cuaaaagauggacuuuggc

SEQ ID NO: 1398405 - RNA, 19 nt, Artificial Sequence
  Description of Artificial Sequence: Synthetic oligonucleotide
ucacccacgugucacaucu

SEQ ID NO: 1398406 - RNA, 19 nt, Artificial Sequence
  Description of Artificial Sequence: Synthetic oligonucleotide
uuggcuuuccgguaauucc

SEQ ID NO: 1398407 - RNA, 19 nt, Artificial Sequence
  Description of Artificial Sequence: Synthetic oligonucleotide
ucugauuaaagcgcuuucc

SEQ ID NO: 1398408 - RNA, 19 nt, Artificial Sequence
  Description of Artificial Sequence: Synthetic oligonucleotide
uccaaucaaacccuguauc

SEQ ID NO: 1398409 - RNA, 19 nt, Artificial Sequence
  Description of Artificial Sequence: Synthetic oligonucleotide
cuuugguggcugaugaggg

SEQ ID NO: 1398410 - RNA, 19 nt, Artificial Sequence
  Description of Artificial Sequence: Synthetic oligonucleotide
uuuccgguaauuccguaga

SEQ ID NO: 1398411 - RNA, 19 nt, Artificial Sequence
  Description of Artificial Sequence: Synthetic oligonucleotide
uguuucaguagguuugaga

SEQ ID NO: 1398412 - RNA, 19 nt, Artificial Sequence
  Description of Artificial Sequence: Synthetic oligonucleotide
acgugucacaucuguaggc

SEQ ID NO: 1398413 - RNA, 19 nt, Artificial Sequence
  Description of Artificial Sequence: Synthetic oligonucleotide
ucuugaaucuguagcgaca

SEQ ID NO: 1398414 - RNA, 19 nt, Artificial Sequence
  Description of Artificial Sequence: Synthetic oligonucleotide
aggcucauuacacugguca

SEQ ID NO: 1398415 - RNA, 19 nt, Artificial Sequence
  Description of Artificial Sequence: Synthetic oligonucleotide
acucgaggcaucuguaggg

SEQ ID NO: 1398416 - RNA, 19 nt, Artificial Sequence
  Description of Artificial Sequence: Synthetic oligonucleotide
aaguuuaauggcaucuuca

SEQ ID NO: 1398417 - RNA, 19 nt, Artificial Sequence
  Description of Artificial Sequence: Synthetic oligonucleotide
gaaguggaagcuccuacug

SEQ ID NO: 1398418 - RNA, 19 nt, Artificial Sequence
  Description of Artificial Sequence: Synthetic oligonucleotide
auucuuugguggcugauga

SEQ ID NO: 1398419 - RNA, 19 nt, Artificial Sequence
  Description of Artificial Sequence: Synthetic oligonucleotide
caucagugaguccagcucc

SEQ ID NO: 1398420 - RNA, 19 nt, Artificial Sequence
  Description of Artificial Sequence: Synthetic oligonucleotide
cauuauugcucuucuguug

SEQ ID NO: 1398421 - RNA, 19 nt, Artificial Sequence
  Description of Artificial Sequence: Synthetic oligonucleotide
guagcuucgaagaagguuc

SEQ ID NO: 1398422 - RNA, 19 nt, Artificial Sequence
  Description of Artificial Sequence: Synthetic oligonucleotide
aagugugagcuguuguuga

SEQ ID NO: 1398423 - RNA, 19 nt, Artificial Sequence
  Description of Artificial Sequence: Synthetic oligonucleotide
ucgaagaagguucuugaau

SEQ ID NO: 1398424 - RNA, 19 nt, Artificial Sequence
  Description of Artificial Sequence: Synthetic oligonucleotide
cuccauugagcacuaaaag

SEQ ID NO: 1398425 - RNA, 19 nt, Artificial Sequence
  Description of Artificial Sequence: Synthetic oligonucleotide
agcucuuagagaaacaccu

SEQ ID NO: 1398426 - RNA, 19 nt, Artificial Sequence
  Description of Artificial Sequence: Synthetic oligonucleotide
uuuggcugaaguucucccc

SEQ ID NO: 1398427 - RNA, 19 nt, Artificial Sequence
  Description of Artificial Sequence: Synthetic oligonucleotide
ugcuugaagccuaaaacuu

SEQ ID NO: 1398428 - RNA, 19 nt, Artificial Sequence
  Description of Artificial Sequence: Synthetic oligonucleotide
uugauggucaaugaguuuu

SEQ ID NO: 1398429 - RNA, 19 nt, Artificial Sequence
  Description of Artificial Sequence: Synthetic oligonucleotide
uccuacuaucuccauggcc

SEQ ID NO: 1398430 - RNA, 19 nt, Artificial Sequence
  Description of Artificial Sequence: Synthetic oligonucleotide
gauagcccgguauaucccc

SEQ ID NO: 1398431 - RNA, 19 nt, Artificial Sequence
  Description of Artificial Sequence: Synthetic oligonucleotide
ugugagcuguuguugaagu

SEQ ID NO: 1398432 - RNA, 19 nt, Artificial Sequence
  Description of Artificial Sequence: Synthetic oligonucleotide
cuuuccgguagcuucgaag

SEQ ID NO: 1398433 - RNA, 19 nt, Artificial Sequence
  Description of Artificial Sequence: Synthetic oligonucleotide
gaaugauaagacuggagcu

SEQ ID NO: 1398434 - RNA, 19 nt, Artificial Sequence
  Description of Artificial Sequence: Synthetic oligonucleotide
uuggcuuuccgguagcuuc

SEQ ID NO: 1398435 - RNA, 19 nt, Artificial Sequence
  Description of Artificial Sequence: Synthetic oligonucleotide
ugagcacuaaaagauggac

SEQ ID NO: 1398436 - RNA, 19 nt, Artificial Sequence
  Description of Artificial Sequence: Synthetic oligonucleotide
uucuugaaucuguagcgac

SEQ ID NO: 1398437 - RNA, 19 nt, Artificial Sequence
  Description of Artificial Sequence: Synthetic oligonucleotide
uugagcacuaaaagaugga

SEQ ID NO: 1398438 - RNA, 19 nt, Artificial Sequence
  Description of Artificial Sequence: Synthetic oligonucleotide
aagaagguucuugaaucug

SEQ ID NO: 1398439 - RNA, 19 nt, Artificial Sequence
  Description of Artificial Sequence: Synthetic oligonucleotide
gaagugugagcuguuguug

SEQ ID NO: 1398440 - RNA, 19 nt, Artificial Sequence
  Description of Artificial Sequence: Synthetic oligonucleotide
ccgguaauuccguagaagg

SEQ ID NO: 1398441 - RNA, 19 nt, Artificial Sequence
  Description of Artificial Sequence: Synthetic oligonucleotide
uuccaaucaaacccuguau

SEQ ID NO: 1398442 - RNA, 19 nt, Artificial Sequence
  Description of Artificial Sequence: Synthetic oligonucleotide
uggcuuuccgguagcuucg

SEQ ID NO: 1398443 - RNA, 19 nt, Artificial Sequence
  Description of Artificial Sequence: Synthetic oligonucleotide
ucguagaaagggcacguuc

SEQ ID NO: 1398444 - RNA, 19 nt, Artificial Sequence
  Description of Artificial Sequence: Synthetic oligonucleotide
cuugaaucuguagcgacac

SEQ ID NO: 1398445 - RNA, 19 nt, Artificial Sequence
  Description of Artificial Sequence: Synthetic oligonucleotide
auauccccucaccagagcu

SEQ ID NO: 1398446 - RNA, 19 nt, Artificial Sequence
  Description of Artificial Sequence: Synthetic oligonucleotide
cauccugagcuucuuuggg

SEQ ID NO: 1398447 - RNA, 19 nt, Artificial Sequence
  Description of Artificial Sequence: Synthetic oligonucleotide
acuaaaagauggacuuugg

SEQ ID NO: 1398448 - RNA, 19 nt, Artificial Sequence
  Description of Artificial Sequence: Synthetic oligonucleotide
gagguguugccuacaaugc

SEQ ID NO: 1398449 - RNA, 19 nt, Artificial Sequence
  Description of Artificial Sequence: Synthetic oligonucleotide
ucugcgauagcccgguaua

SEQ ID NO: 1398450 - RNA, 19 nt, Artificial Sequence
  Description of Artificial Sequence: Synthetic oligonucleotide
cacgugucacaucuguagg

SEQ ID NO: 1398451 - RNA, 19 nt, Artificial Sequence
  Description of Artificial Sequence: Synthetic oligonucleotide
uguagcgacacugcuccag

SEQ ID NO: 1398452 - RNA, 19 nt, Artificial Sequence
  Description of Artificial Sequence: Synthetic oligonucleotide
ucuuuggguaucuccugug

SEQ ID NO: 1398453 - RNA, 19 nt, Artificial Sequence
  Description of Artificial Sequence: Synthetic oligonucleotide
ucuucguccucaugcuucc

SEQ ID NO: 1398454 - RNA, 19 nt, Artificial Sequence
  Description of Artificial Sequence: Synthetic oligonucleotide
ugaguccagcuccucguag

SEQ ID NO: 1398455 - RNA, 19 nt, Artificial Sequence
  Description of Artificial Sequence: Synthetic oligonucleotide
aguuugggaaucuggcaga

SEQ ID NO: 1398456 - RNA, 19 nt, Artificial Sequence
  Description of Artificial Sequence: Synthetic oligonucleotide
ucaggauuuccuccagagu

SEQ ID NO: 1398457 - RNA, 19 nt, Artificial Sequence
  Description of Artificial Sequence: Synthetic oligonucleotide
cacucgaggcaucuguagg

SEQ ID NO: 1398458 - RNA, 19 nt, Artificial Sequence
  Description of Artificial Sequence: Synthetic oligonucleotide
uccgguagcuucgaagaag

SEQ ID NO: 1398459 - RNA, 19 nt, Artificial Sequence
  Description of Artificial Sequence: Synthetic oligonucleotide
agcacuuuccgcagucugc

SEQ ID NO: 1398460 - RNA, 19 nt, Artificial Sequence
  Description of Artificial Sequence: Synthetic oligonucleotide
guccgcaggaaacccagcg

SEQ ID NO: 1398461 - RNA, 19 nt, Artificial Sequence
  Description of Artificial Sequence: Synthetic oligonucleotide
gauucuuugguggcugaug

SEQ ID NO: 1398462 - RNA, 19 nt, Artificial Sequence
  Description of Artificial Sequence: Synthetic oligonucleotide
uauauccccucaccagagc

SEQ ID NO: 1398463 - RNA, 19 nt, Artificial Sequence
  Description of Artificial Sequence: Synthetic oligonucleotide
uuucaguagguuugagauc

SEQ ID NO: 1398464 - RNA, 19 nt, Artificial Sequence
  Description of Artificial Sequence: Synthetic oligonucleotide
agugaugagguuggagcgg

SEQ ID NO: 1398465 - RNA, 19 nt, Artificial Sequence
  Description of Artificial Sequence: Synthetic oligonucleotide
uccgguaauuccguagaag

SEQ ID NO: 1398466 - RNA, 19 nt, Artificial Sequence
  Description of Artificial Sequence: Synthetic oligonucleotide
guugccuacaaugcuuucc

SEQ ID NO: 1398467 - RNA, 19 nt, Artificial Sequence
  Description of Artificial Sequence: Synthetic oligonucleotide
aggaacacucuucccaaca

SEQ ID NO: 1398468 - RNA, 19 nt, Artificial Sequence
  Description of Artificial Sequence: Synthetic oligonucleotide
agcuccucguagaaggggc

SEQ ID NO: 1398469 - RNA, 19 nt, Artificial Sequence
  Description of Artificial Sequence: Synthetic oligonucleotide
cucaugcuuccaaucaaac

SEQ ID NO: 1398470 - RNA, 19 nt, Artificial Sequence
  Description of Artificial Sequence: Synthetic oligonucleotide
guaggcuuucucugugagg

SEQ ID NO: 1398471 - RNA, 19 nt, Artificial Sequence
  Description of Artificial Sequence: Synthetic oligonucleotide
augaaugauaagacuggag

SEQ ID NO: 1398472 - RNA, 19 nt, Artificial Sequence
  Description of Artificial Sequence: Synthetic oligonucleotide
ucagaggaacacucuuccc

SEQ ID NO: 1398473 - RNA, 19 nt, Artificial Sequence
  Description of Artificial Sequence: Synthetic oligonucleotide
ccuacaaugcuuucccucc

SEQ ID NO: 1398474 - RNA, 19 nt, Artificial Sequence
  Description of Artificial Sequence: Synthetic oligonucleotide
gaugaaugauaagacugga

SEQ ID NO: 1398475 - RNA, 19 nt, Artificial Sequence
  Description of Artificial Sequence: Synthetic oligonucleotide
uccucguagaaagggcacg

SEQ ID NO: 1398476 - RNA, 19 nt, Artificial Sequence
  Description of Artificial Sequence: Synthetic oligonucleotide
cauccugcucugaaguuug

SEQ ID NO: 1398477 - RNA, 19 nt, Artificial Sequence
  Description of Artificial Sequence: Synthetic oligonucleotide
augauaagacuggagcucu

SEQ ID NO: 1398478 - RNA, 19 nt, Artificial Sequence
  Description of Artificial Sequence: Synthetic oligonucleotide
cuucgaagaagguucuuga

SEQ ID NO: 1398479 - RNA, 19 nt, Artificial Sequence
  Description of Artificial Sequence: Synthetic oligonucleotide
uuuucacccacgugucaca

SEQ ID NO: 1398480 - RNA, 19 nt, Artificial Sequence
  Description of Artificial Sequence: Synthetic oligonucleotide
uccgcaggaaacccagcgc

SEQ ID NO: 1398481 - RNA, 19 nt, Artificial Sequence
  Description of Artificial Sequence: Synthetic oligonucleotide
cugaaguuuggucuucguc

SEQ ID NO: 1398482 - RNA, 19 nt, Artificial Sequence
  Description of Artificial Sequence: Synthetic oligonucleotide
uggacggcugcucuuggcu

SEQ ID NO: 1398483 - RNA, 19 nt, Artificial Sequence
  Description of Artificial Sequence: Synthetic oligonucleotide
ugucacaucuguaggcuuu

SEQ ID NO: 1398484 - RNA, 19 nt, Artificial Sequence
  Description of Artificial Sequence: Synthetic oligonucleotide
cugaucacaguccgagccc

SEQ ID NO: 1398485 - RNA, 19 nt, Artificial Sequence
  Description of Artificial Sequence: Synthetic oligonucleotide
cucaggacauggauacagc

SEQ ID NO: 1398486 - RNA, 19 nt, Artificial Sequence
  Description of Artificial Sequence: Synthetic oligonucleotide
acaguccgagcccucauca

SEQ ID NO: 1398487 - RNA, 19 nt, Artificial Sequence
  Description of Artificial Sequence: Synthetic oligonucleotide
ucgcggaagaacuucccac

SEQ ID NO: 1398488 - RNA, 19 nt, Artificial Sequence
  Description of Artificial Sequence: Synthetic oligonucleotide
uuaaagcgcuuuccgcacu

SEQ ID NO: 1398489 - RNA, 19 nt, Artificial Sequence
  Description of Artificial Sequence: Synthetic oligonucleotide
agcgcuuuccgcacucucc

SEQ ID NO: 1398490 - RNA, 19 nt, Artificial Sequence
  Description of Artificial Sequence: Synthetic oligonucleotide
gauacagcuucuccccuga

SEQ ID NO: 1398491 - RNA, 19 nt, Artificial Sequence
  Description of Artificial Sequence: Synthetic oligonucleotide
gagcucuuagagaaacacc

SEQ ID NO: 1398492 - RNA, 19 nt, Artificial Sequence
  Description of Artificial Sequence: Synthetic oligonucleotide
gucuuugccgcacuccgug

SEQ ID NO: 1398493 - RNA, 19 nt, Artificial Sequence
  Description of Artificial Sequence: Synthetic oligonucleotide
ccugaucacaguccgagcc

SEQ ID NO: 1398494 - RNA, 19 nt, Artificial Sequence
  Description of Artificial Sequence: Synthetic oligonucleotide
agcuccucguagaaagggc

SEQ ID NO: 1398495 - RNA, 19 nt, Artificial Sequence
  Description of Artificial Sequence: Synthetic oligonucleotide
gaagaagguucuugaaucu

SEQ ID NO: 1398496 - RNA, 19 nt, Artificial Sequence
  Description of Artificial Sequence: Synthetic oligonucleotide
ugauaagacuggagcucug

SEQ ID NO: 1398497 - RNA, 19 nt, Artificial Sequence
  Description of Artificial Sequence: Synthetic oligonucleotide
cacucuucccaacauccug

SEQ ID NO: 1398498 - RNA, 19 nt, Artificial Sequence
  Description of Artificial Sequence: Synthetic oligonucleotide
ggagaguucaugcuuccac

SEQ ID NO: 1398499 - RNA, 19 nt, Artificial Sequence
  Description of Artificial Sequence: Synthetic oligonucleotide
aucuguagcgacacugcuc

SEQ ID NO: 1398500 - RNA, 19 nt, Artificial Sequence
  Description of Artificial Sequence: Synthetic oligonucleotide
gcgauagcccgguauaucc

SEQ ID NO: 1398501 - RNA, 19 nt, Artificial Sequence
  Description of Artificial Sequence: Synthetic oligonucleotide
gaaguuuggucuucguccu

SEQ ID NO: 1398502 - RNA, 19 nt, Artificial Sequence
  Description of Artificial Sequence: Synthetic oligonucleotide
guauauccccucaccagag

SEQ ID NO: 1398503 - RNA, 19 nt, Artificial Sequence
  Description of Artificial Sequence: Synthetic oligonucleotide
agguguugccuacaaugcu

SEQ ID NO: 1398504 - RNA, 19 nt, Artificial Sequence
  Description of Artificial Sequence: Synthetic oligonucleotide
uguucuuggcuuuccggua

SEQ ID NO: 1398505 - RNA, 19 nt, Artificial Sequence
  Description of Artificial Sequence: Synthetic oligonucleotide
gaguuggugcugcaggguc

SEQ ID NO: 1398506 - RNA, 19 nt, Artificial Sequence
  Description of Artificial Sequence: Synthetic oligonucleotide
cuucccaacauccugcucu

SEQ ID NO: 1398507 - RNA, 19 nt, Artificial Sequence
  Description of Artificial Sequence: Synthetic oligonucleotide
uccugagcuucuuugggua

SEQ ID NO: 1398508 - RNA, 19 nt, Artificial Sequence
  Description of Artificial Sequence: Synthetic oligonucleotide
agcgacacugcuccagugu

SEQ ID NO: 1398509 - RNA, 19 nt, Artificial Sequence
  Description of Artificial Sequence: Synthetic oligonucleotide
uccguuggugguuggccag

SEQ ID NO: 1398510 - RNA, 19 nt, Artificial Sequence
  Description of Artificial Sequence: Synthetic oligonucleotide
gauaagacuggagcucuga

SEQ ID NO: 1398511 - RNA, 19 nt, Artificial Sequence
  Description of Artificial Sequence: Synthetic oligonucleotide
gaguucaugcuuccacuga

SEQ ID NO: 1398512 - RNA, 19 nt, Artificial Sequence
  Description of Artificial Sequence: Synthetic oligonucleotide
uugaagucuuugccgcacu

SEQ ID NO: 1398513 - RNA, 19 nt, Artificial Sequence
  Description of Artificial Sequence: Synthetic oligonucleotide
ucugaaguuuggucuucgu

SEQ ID NO: 1398514 - RNA, 19 nt, Artificial Sequence
  Description of Artificial Sequence: Synthetic oligonucleotide
agguauaggccuugauggu

SEQ ID NO: 1398515 - RNA, 19 nt, Artificial Sequence
  Description of Artificial Sequence: Synthetic oligonucleotide
uggucuucguccucaugcu

SEQ ID NO: 1398516 - RNA, 19 nt, Artificial Sequence
  Description of Artificial Sequence: Synthetic oligonucleotide
aguagguuugagaucugcu

SEQ ID NO: 1398517 - RNA, 19 nt, Artificial Sequence
  Description of Artificial Sequence: Synthetic oligonucleotide
uggauacagcuucuccccu

SEQ ID NO: 1398518 - RNA, 19 nt, Artificial Sequence
  Description of Artificial Sequence: Synthetic oligonucleotide
cguagaaagggcacguucc

SEQ ID NO: 1398519 - RNA, 19 nt, Artificial Sequence
  Description of Artificial Sequence: Synthetic oligonucleotide
gagguuggagcggucgcgg

SEQ ID NO: 1398520 - RNA, 19 nt, Artificial Sequence
  Description of Artificial Sequence: Synthetic oligonucleotide
cucugauuaaagcgcuuuc

SEQ ID NO: 1398521 - RNA, 19 nt, Artificial Sequence
  Description of Artificial Sequence: Synthetic oligonucleotide
aguuuggucuucguccuca

SEQ ID NO: 1398522 - RNA, 19 nt, Artificial Sequence
  Description of Artificial Sequence: Synthetic oligonucleotide
guccucaugcuuccaauca

SEQ ID NO: 1398523 - RNA, 19 nt, Artificial Sequence
  Description of Artificial Sequence: Synthetic oligonucleotide
cucauuacacuggucagga

SEQ ID NO: 1398524 - RNA, 19 nt, Artificial Sequence
  Description of Artificial Sequence: Synthetic oligonucleotide
ugaucacaguccgagcccu

SEQ ID NO: 1398525 - RNA, 19 nt, Artificial Sequence
  Description of Artificial Sequence: Synthetic oligonucleotide
uagcuucgaagaagguucu

SEQ ID NO: 1398526 - RNA, 19 nt, Artificial Sequence
  Description of Artificial Sequence: Synthetic oligonucleotide
ugggaaucuggcagaaguu

SEQ ID NO: 1398527 - RNA, 19 nt, Artificial Sequence
  Description of Artificial Sequence: Synthetic oligonucleotide
ccugaguuggugcugcagg

SEQ ID NO: 1398528 - RNA, 19 nt, Artificial Sequence
  Description of Artificial Sequence: Synthetic oligonucleotide
cucaccccaggccucuugg

SEQ ID NO: 1398529 - RNA, 19 nt, Artificial Sequence
  Description of Artificial Sequence: Synthetic oligonucleotide
uauccccucaccagagcuc

SEQ ID NO: 1398530 - RNA, 19 nt, Artificial Sequence
  Description of Artificial Sequence: Synthetic oligonucleotide
ugcggugggcacugaagug

SEQ ID NO: 1398531 - RNA, 19 nt, Artificial Sequence
  Description of Artificial Sequence: Synthetic oligonucleotide
ugagcuucuuuggguaucu

SEQ ID NO: 1398532 - RNA, 19 nt, Artificial Sequence
  Description of Artificial Sequence: Synthetic oligonucleotide
gagaguucaugcuuccacu

SEQ ID NO: 1398533 - RNA, 19 nt, Artificial Sequence
  Description of Artificial Sequence: Synthetic oligonucleotide
ucuuugccgcacuccgugc

SEQ ID NO: 1398534 - RNA, 19 nt, Artificial Sequence
  Description of Artificial Sequence: Synthetic oligonucleotide
ccacgugucacaucuguag

SEQ ID NO: 1398535 - RNA, 19 nt, Artificial Sequence
  Description of Artificial Sequence: Synthetic oligonucleotide
ccgguagcuucgaagaagg

SEQ ID NO: 1398536 - RNA, 19 nt, Artificial Sequence
  Description of Artificial Sequence: Synthetic oligonucleotide
acccacgugucacaucugu

SEQ ID NO: 1398537 - RNA, 19 nt, Artificial Sequence
  Description of Artificial Sequence: Synthetic oligonucleotide
uuugggaaucuggcagaag

SEQ ID NO: 1398538 - RNA, 19 nt, Artificial Sequence
  Description of Artificial Sequence: Synthetic oligonucleotide
uccccgguaugaauccucu

SEQ ID NO: 1398539 - RNA, 19 nt, Artificial Sequence
  Description of Artificial Sequence: Synthetic oligonucleotide
cuuccaaucaaacccugua

SEQ ID NO: 1398540 - RNA, 19 nt, Artificial Sequence
  Description of Artificial Sequence: Synthetic oligonucleotide
cucugaaguuuggucuucg

SEQ ID NO: 1398541 - RNA, 19 nt, Artificial Sequence
  Description of Artificial Sequence: Synthetic oligonucleotide
ugagggcagagcucuuaga

SEQ ID NO: 1398542 - RNA, 19 nt, Artificial Sequence
  Description of Artificial Sequence: Synthetic oligonucleotide
cuggguagguuccggguug

SEQ ID NO: 1398543 - RNA, 19 nt, Artificial Sequence
  Description of Artificial Sequence: Synthetic oligonucleotide
guugaagucuuugccgcac

SEQ ID NO: 1398544 - RNA, 19 nt, Artificial Sequence
  Description of Artificial Sequence: Synthetic oligonucleotide
ggugggugacuguucuugg

SEQ ID NO: 1398545 - RNA, 19 nt, Artificial Sequence
  Description of Artificial Sequence: Synthetic oligonucleotide
gagcuuggagcgcucgcug

SEQ ID NO: 1398546 - RNA, 19 nt, Artificial Sequence
  Description of Artificial Sequence: Synthetic oligonucleotide
cucuccacacuuguacggc

SEQ ID NO: 1398547 - RNA, 19 nt, Artificial Sequence
  Description of Artificial Sequence: Synthetic oligonucleotide
gaaucuggcagaaguuuaa

SEQ ID NO: 1398548 - RNA, 19 nt, Artificial Sequence
  Description of Artificial Sequence: Synthetic oligonucleotide
cuguaucuggaguuuggga

SEQ ID NO: 1398549 - RNA, 19 nt, Artificial Sequence
  Description of Artificial Sequence: Synthetic oligonucleotide
caguagguuugagaucugc

SEQ ID NO: 1398550 - RNA, 19 nt, Artificial Sequence
  Description of Artificial Sequence: Synthetic oligonucleotide
gauggacuuuggcugaagu

SEQ ID NO: 1398551 - RNA, 19 nt, Artificial Sequence
  Description of Artificial Sequence: Synthetic oligonucleotide
uuccgguaauuccguagaa

SEQ ID NO: 1398552 - RNA, 19 nt, Artificial Sequence
  Description of Artificial Sequence: Synthetic oligonucleotide
gcucauuacacuggucagg

SEQ ID NO: 1398553 - RNA, 19 nt, Artificial Sequence
  Description of Artificial Sequence: Synthetic oligonucleotide
uaauuccguagaagguuuu

SEQ ID NO: 1398554 - RNA, 19 nt, Artificial Sequence
  Description of Artificial Sequence: Synthetic oligonucleotide
caggaaacccagcgcacac

SEQ ID NO: 1398555 - RNA, 19 nt, Artificial Sequence
  Description of Artificial Sequence: Synthetic oligonucleotide
cucgaggcaucuguagggc

SEQ ID NO: 1398556 - RNA, 19 nt, Artificial Sequence
  Description of Artificial Sequence: Synthetic oligonucleotide
gugggugacuguucuuggc

SEQ ID NO: 1398557 - RNA, 19 nt, Artificial Sequence
  Description of Artificial Sequence: Synthetic oligonucleotide
aagcuccuacugcaguuuu

SEQ ID NO: 1398558 - RNA, 19 nt, Artificial Sequence
  Description of Artificial Sequence: Synthetic oligonucleotide
gaggaacacucuucccaac

SEQ ID NO: 1398559 - RNA, 19 nt, Artificial Sequence
  Description of Artificial Sequence: Synthetic oligonucleotide
gagcacuaaaagauggacu

SEQ ID NO: 1398560 - RNA, 19 nt, Artificial Sequence
  Description of Artificial Sequence: Synthetic oligonucleotide
uccccaggcucauuacacu

SEQ ID NO: 1398561 - RNA, 19 nt, Artificial Sequence
  Description of Artificial Sequence: Synthetic oligonucleotide
ugggaggagguguugccua

SEQ ID NO: 1398562 - RNA, 19 nt, Artificial Sequence
  Description of Artificial Sequence: Synthetic oligonucleotide
ugacuguucuuggcuuucc

SEQ ID NO: 1398563 - RNA, 19 nt, Artificial Sequence
  Description of Artificial Sequence: Synthetic oligonucleotide
ucucaccccaggccucuug

SEQ ID NO: 1398564 - RNA, 19 nt, Artificial Sequence
  Description of Artificial Sequence: Synthetic oligonucleotide
uucccuccagcauggguuc

SEQ ID NO: 1398565 - RNA, 19 nt, Artificial Sequence
  Description of Artificial Sequence: Synthetic oligonucleotide
ucguccucaugcuuccaau

SEQ ID NO: 1398566 - RNA, 19 nt, Artificial Sequence
  Description of Artificial Sequence: Synthetic oligonucleotide
ccaacauccugcucugaag

SEQ ID NO: 1398567 - RNA, 19 nt, Artificial Sequence
  Description of Artificial Sequence: Synthetic oligonucleotide
gauuuccuccagaguggag

SEQ ID NO: 1398568 - RNA, 19 nt, Artificial Sequence
  Description of Artificial Sequence: Synthetic oligonucleotide
uagcgacacugcuccagug

SEQ ID NO: 1398569 - RNA, 19 nt, Artificial Sequence
  Description of Artificial Sequence: Synthetic oligonucleotide
ucucuacauucaugaggcu

SEQ ID NO: 1398570 - RNA, 19 nt, Artificial Sequence
  Description of Artificial Sequence: Synthetic oligonucleotide
uguccgcaggaaacccagc

SEQ ID NO: 1398571 - RNA, 19 nt, Artificial Sequence
  Description of Artificial Sequence: Synthetic oligonucleotide
acacugcuccaguguccgc

SEQ ID NO: 1398572 - RNA, 19 nt, Artificial Sequence
  Description of Artificial Sequence: Synthetic oligonucleotide
ggauacagcuucuccccug

SEQ ID NO: 1398573 - RNA, 19 nt, Artificial Sequence
  Description of Artificial Sequence: Synthetic oligonucleotide
ugguggacggcugcucuug

SEQ ID NO: 1398574 - RNA, 19 nt, Artificial Sequence
  Description of Artificial Sequence: Synthetic oligonucleotide
caacauccugcucugaagu

SEQ ID NO: 1398575 - RNA, 19 nt, Artificial Sequence
  Description of Artificial Sequence: Synthetic oligonucleotide
acagcccgcucugcgauag

SEQ ID NO: 1398576 - RNA, 19 nt, Artificial Sequence
  Description of Artificial Sequence: Synthetic oligonucleotide
uguugccuacaaugcuuuc

SEQ ID NO: 1398577 - RNA, 19 nt, Artificial Sequence
  Description of Artificial Sequence: Synthetic oligonucleotide
ugcgauagcccgguauauc

SEQ ID NO: 1398578 - RNA, 19 nt, Artificial Sequence
  Description of Artificial Sequence: Synthetic oligonucleotide
gaaacaccuuccacacuca

SEQ ID NO: 1398579 - RNA, 19 nt, Artificial Sequence
  Description of Artificial Sequence: Synthetic oligonucleotide
gaagguucuugaaucugua

SEQ ID NO: 1398580 - RNA, 19 nt, Artificial Sequence
  Description of Artificial Sequence: Synthetic oligonucleotide
gguauaggccuugaugguc

SEQ ID NO: 1398581 - RNA, 19 nt, Artificial Sequence
  Description of Artificial Sequence: Synthetic oligonucleotide
gugagcuguuguugaaguc

SEQ ID NO: 1398582 - RNA, 19 nt, Artificial Sequence
  Description of Artificial Sequence: Synthetic oligonucleotide
gcagagcucuuagagaaac

SEQ ID NO: 1398583 - RNA, 19 nt, Artificial Sequence
  Description of Artificial Sequence: Synthetic oligonucleotide
gucgcggaagaacuuccca

SEQ ID NO: 1398584 - RNA, 19 nt, Artificial Sequence
  Description of Artificial Sequence: Synthetic oligonucleotide
cuccuacuaucuccauggc

SEQ ID NO: 1398585 - RNA, 19 nt, Artificial Sequence
  Description of Artificial Sequence: Synthetic oligonucleotide
uuggagcggucgcggaaga

SEQ ID NO: 1398586 - RNA, 19 nt, Artificial Sequence
  Description of Artificial Sequence: Synthetic oligonucleotide
aacccuguaucuggaguuu

SEQ ID NO: 1398587 - RNA, 19 nt, Artificial Sequence
  Description of Artificial Sequence: Synthetic oligonucleotide
guagaaagggcacguuccu

SEQ ID NO: 1398588 - RNA, 19 nt, Artificial Sequence
  Description of Artificial Sequence: Synthetic oligonucleotide
cauggguucugcggugggc

SEQ ID NO: 1398589 - RNA, 19 nt, Artificial Sequence
  Description of Artificial Sequence: Synthetic oligonucleotide
auguuucaguagguuugag

SEQ ID NO: 1398590 - RNA, 19 nt, Artificial Sequence
  Description of Artificial Sequence: Synthetic oligonucleotide
gcagucugcacacuuauau

SEQ ID NO: 1398591 - RNA, 19 nt, Artificial Sequence
  Description of Artificial Sequence: Synthetic oligonucleotide
caguguccgcaggaaaccc

SEQ ID NO: 1398592 - RNA, 19 nt, Artificial Sequence
  Description of Artificial Sequence: Synthetic oligonucleotide
aagauggacuuuggcugaa

SEQ ID NO: 1398593 - RNA, 19 nt, Artificial Sequence
  Description of Artificial Sequence: Synthetic oligonucleotide
caguccgagcccucaucag

SEQ ID NO: 1398594 - RNA, 19 nt, Artificial Sequence
  Description of Artificial Sequence: Synthetic oligonucleotide
guucuccccaggcucauua

SEQ ID NO: 1398595 - RNA, 19 nt, Artificial Sequence
  Description of Artificial Sequence: Synthetic oligonucleotide
uccgugcacuuguaggguu

SEQ ID NO: 1398596 - RNA, 19 nt, Artificial Sequence
  Description of Artificial Sequence: Synthetic oligonucleotide
ucuuggcuuuccgguagcu

SEQ ID NO: 1398597 - RNA, 19 nt, Artificial Sequence
  Description of Artificial Sequence: Synthetic oligonucleotide
cuacaaugcuuucccucca

SEQ ID NO: 1398598 - RNA, 19 nt, Artificial Sequence
  Description of Artificial Sequence: Synthetic oligonucleotide
cccgcucugcgauagcccg

SEQ ID NO: 1398599 - RNA, 19 nt, Artificial Sequence
  Description of Artificial Sequence: Synthetic oligonucleotide
gcccugaucacaguccgag

SEQ ID NO: 1398600 - RNA, 19 nt, Artificial Sequence
  Description of Artificial Sequence: Synthetic oligonucleotide
agcccgguauauccccuca

SEQ ID NO: 1398601 - RNA, 19 nt, Artificial Sequence
  Description of Artificial Sequence: Synthetic oligonucleotide
gagcucuuacugaagcucu

SEQ ID NO: 1398602 - RNA, 19 nt, Artificial Sequence
  Description of Artificial Sequence: Synthetic oligonucleotide
aguguccgcaggaaaccca

SEQ ID NO: 1398603 - RNA, 19 nt, Artificial Sequence
  Description of Artificial Sequence: Synthetic oligonucleotide
gaaagggcacguuccuggu

SEQ ID NO: 1398604 - RNA, 19 nt, Artificial Sequence
  Description of Artificial Sequence: Synthetic oligonucleotide
agacuggagcucugauuaa

SEQ ID NO: 1398605 - RNA, 19 nt, Artificial Sequence
  Description of Artificial Sequence: Synthetic oligonucleotide
gcaggucccugguggacgg

SEQ ID NO: 1398606 - RNA, 19 nt, Artificial Sequence
  Description of Artificial Sequence: Synthetic oligonucleotide
guggacggcugcucuuggc

SEQ ID NO: 1398607 - RNA, 19 nt, Artificial Sequence
  Description of Artificial Sequence: Synthetic oligonucleotide
aggagguguugccuacaau

SEQ ID NO: 1398608 - RNA, 19 nt, Artificial Sequence
  Description of Artificial Sequence: Synthetic oligonucleotide
acccuguaucuggaguuug

SEQ ID NO: 1398609 - RNA, 19 nt, Artificial Sequence
  Description of Artificial Sequence: Synthetic oligonucleotide
ugcguccguuggugguugg

SEQ ID NO: 1398610 - RNA, 19 nt, Artificial Sequence
  Description of Artificial Sequence: Synthetic oligonucleotide
gguaauuccguagaagguu

SEQ ID NO: 1398611 - RNA, 19 nt, Artificial Sequence
  Description of Artificial Sequence: Synthetic oligonucleotide
ggugagcuuggagcgcucg

SEQ ID NO: 1398612 - RNA, 19 nt, Artificial Sequence
  Description of Artificial Sequence: Synthetic oligonucleotide
cccgguauauccccucacc

SEQ ID NO: 1398613 - RNA, 19 nt, Artificial Sequence
  Description of Artificial Sequence: Synthetic oligonucleotide
aggaaacccagcgcacaca

SEQ ID NO: 1398614 - RNA, 19 nt, Artificial Sequence
  Description of Artificial Sequence: Synthetic oligonucleotide
uuacacuggucaggauuuc

SEQ ID NO: 1398615 - RNA, 19 nt, Artificial Sequence
  Description of Artificial Sequence: Synthetic oligonucleotide
cgguauauccccucaccag

SEQ ID NO: 1398616 - RNA, 19 nt, Artificial Sequence
  Description of Artificial Sequence: Synthetic oligonucleotide
guaauuccguagaagguuu

SEQ ID NO: 1398617 - RNA, 19 nt, Artificial Sequence
  Description of Artificial Sequence: Synthetic oligonucleotide
ggagcggucgcggaagaac

SEQ ID NO: 1398618 - RNA, 19 nt, Artificial Sequence
  Description of Artificial Sequence: Synthetic oligonucleotide
cugcucuuggcuuuccggu

SEQ ID NO: 1398619 - RNA, 19 nt, Artificial Sequence
  Description of Artificial Sequence: Synthetic oligonucleotide
gguggacggcugcucuugg

SEQ ID NO: 1398620 - RNA, 19 nt, Artificial Sequence
  Description of Artificial Sequence: Synthetic oligonucleotide
ccaaucaaacccuguaucu

SEQ ID NO: 1398621 - RNA, 19 nt, Artificial Sequence
  Description of Artificial Sequence: Synthetic oligonucleotide
uagcccgguauauccccuc

SEQ ID NO: 1398622 - RNA, 19 nt, Artificial Sequence
  Description of Artificial Sequence: Synthetic oligonucleotide
guuugggaaucuggcagaa

SEQ ID NO: 1398623 - RNA, 19 nt, Artificial Sequence
  Description of Artificial Sequence: Synthetic oligonucleotide
cacuuuccgcagucugcac

SEQ ID NO: 1398624 - RNA, 19 nt, Artificial Sequence
  Description of Artificial Sequence: Synthetic oligonucleotide
gagcucugauuaaagcgcu

SEQ ID NO: 1398625 - RNA, 19 nt, Artificial Sequence
  Description of Artificial Sequence: Synthetic oligonucleotide
guagcgacacugcuccagu

SEQ ID NO: 1398626 - RNA, 19 nt, Artificial Sequence
  Description of Artificial Sequence: Synthetic oligonucleotide
ggagcgcucgcugaagcac

SEQ ID NO: 1398627 - RNA, 19 nt, Artificial Sequence
  Description of Artificial Sequence: Synthetic oligonucleotide
ccaguguccgcaggaaacc

SEQ ID NO: 1398628 - RNA, 19 nt, Artificial Sequence
  Description of Artificial Sequence: Synthetic oligonucleotide
ccccaggcucauuacacug

SEQ ID NO: 1398629 - RNA, 19 nt, Artificial Sequence
  Description of Artificial Sequence: Synthetic oligonucleotide
cugugagguauaggccuug

SEQ ID NO: 1398630 - RNA, 19 nt, Artificial Sequence
  Description of Artificial Sequence: Synthetic oligonucleotide
ugcccagauccaggaagac

SEQ ID NO: 1398631 - RNA, 19 nt, Artificial Sequence
  Description of Artificial Sequence: Synthetic oligonucleotide
aaguucuccccaggcucau

SEQ ID NO: 1398632 - RNA, 19 nt, Artificial Sequence
  Description of Artificial Sequence: Synthetic oligonucleotide
cagccucagugccacucug

SEQ ID NO: 1398633 - RNA, 19 nt, Artificial Sequence
  Description of Artificial Sequence: Synthetic oligonucleotide
ugugguggguggugagcuu

SEQ ID NO: 1398634 - RNA, 19 nt, Artificial Sequence
  Description of Artificial Sequence: Synthetic oligonucleotide
gguucugcggugggcacug

SEQ ID NO: 1398635 - RNA, 19 nt, Artificial Sequence
  Description of Artificial Sequence: Synthetic oligonucleotide
auagcccgguauauccccu

SEQ ID NO: 1398636 - RNA, 19 nt, Artificial Sequence
  Description of Artificial Sequence: Synthetic oligonucleotide
agucuuugccgcacuccgu

SEQ ID NO: 1398637 - RNA, 19 nt, Artificial Sequence
  Description of Artificial Sequence: Synthetic oligonucleotide
aggguccggggagaguuca

SEQ ID NO: 1398638 - RNA, 19 nt, Artificial Sequence
  Description of Artificial Sequence: Synthetic oligonucleotide
gcuccucguagaaagggca

SEQ ID NO: 1398639 - RNA, 19 nt, Artificial Sequence
  Description of Artificial Sequence: Synthetic oligonucleotide
cacacucgaggcaucugua

SEQ ID NO: 1398640 - RNA, 19 nt, Artificial Sequence
  Description of Artificial Sequence: Synthetic oligonucleotide
ugaugagggcagagcucuu

SEQ ID NO: 1398641 - RNA, 19 nt, Artificial Sequence
  Description of Artificial Sequence: Synthetic oligonucleotide
caugaaguggaagcuccua

SEQ ID NO: 1398642 - RNA, 19 nt, Artificial Sequence
  Description of Artificial Sequence: Synthetic oligonucleotide
gagcggucgcggaagaacu

SEQ ID NO: 1398643 - RNA, 19 nt, Artificial Sequence
  Description of Artificial Sequence: Synthetic oligonucleotide
cuacuaucuccauggcccu

SEQ ID NO: 1398644 - RNA, 19 nt, Artificial Sequence
  Description of Artificial Sequence: Synthetic oligonucleotide
cugcggugggcacugaagu

SEQ ID NO: 1398645 - RNA, 19 nt, Artificial Sequence
  Description of Artificial Sequence: Synthetic oligonucleotide
agaucugcuugaagccuaa

SEQ ID NO: 1398646 - RNA, 19 nt, Artificial Sequence
  Description of Artificial Sequence: Synthetic oligonucleotide
ggauuuccuccagagugga

SEQ ID NO: 1398647 - RNA, 19 nt, Artificial Sequence
  Description of Artificial Sequence: Synthetic oligonucleotide
caggacauggauacagcuu

SEQ ID NO: 1398648 - RNA, 19 nt, Artificial Sequence
  Description of Artificial Sequence: Synthetic oligonucleotide
gggaggagguguugccuac

SEQ ID NO: 1398649 - RNA, 19 nt, Artificial Sequence
  Description of Artificial Sequence: Synthetic oligonucleotide
gcacuuuccgcagucugca

SEQ ID NO: 1398650 - RNA, 19 nt, Artificial Sequence
  Description of Artificial Sequence: Synthetic oligonucleotide
cugcacacuuauauggcuu

SEQ ID NO: 1398651 - RNA, 19 nt, Artificial Sequence
  Description of Artificial Sequence: Synthetic oligonucleotide
cucguagaaggggcagguc

SEQ ID NO: 1398652 - RNA, 19 nt, Artificial Sequence
  Description of Artificial Sequence: Synthetic oligonucleotide
gugaugagguuggagcggu

SEQ ID NO: 1398653 - RNA, 19 nt, Artificial Sequence
  Description of Artificial Sequence: Synthetic oligonucleotide
cuguugggaggagguguug

SEQ ID NO: 1398654 - RNA, 19 nt, Artificial Sequence
  Description of Artificial Sequence: Synthetic oligonucleotide
ccgguauauccccucacca

SEQ ID NO: 1398655 - RNA, 19 nt, Artificial Sequence
  Description of Artificial Sequence: Synthetic oligonucleotide
cuccaguguccgcaggaaa

SEQ ID NO: 1398656 - RNA, 19 nt, Artificial Sequence
  Description of Artificial Sequence: Synthetic oligonucleotide
gaucacaguccgagcccuc

SEQ ID NO: 1398657 - RNA, 19 nt, Artificial Sequence
  Description of Artificial Sequence: Synthetic oligonucleotide
cuugauggucaaugaguuu

SEQ ID NO: 1398658 - RNA, 19 nt, Artificial Sequence
  Description of Artificial Sequence: Synthetic oligonucleotide
ccucaugcuuccaaucaaa

SEQ ID NO: 1398659 - RNA, 19 nt, Artificial Sequence
  Description of Artificial Sequence: Synthetic oligonucleotide
uccccucaccagagcucca

SEQ ID NO: 1398660 - RNA, 19 nt, Artificial Sequence
  Description of Artificial Sequence: Synthetic oligonucleotide
ccuugauggucaaugaguu

SEQ ID NO: 1398661 - RNA, 19 nt, Artificial Sequence
  Description of Artificial Sequence: Synthetic oligonucleotide
gugcguccguuggugguug

SEQ ID NO: 1398662 - RNA, 19 nt, Artificial Sequence
  Description of Artificial Sequence: Synthetic oligonucleotide
ucccaacauccugcucuga

SEQ ID NO: 1398663 - RNA, 19 nt, Artificial Sequence
  Description of Artificial Sequence: Synthetic oligonucleotide
cacguuccuggugggugac

SEQ ID NO: 1398664 - RNA, 19 nt, Artificial Sequence
  Description of Artificial Sequence: Synthetic oligonucleotide
cccugaucacaguccgagc

SEQ ID NO: 1398665 - RNA, 19 nt, Artificial Sequence
  Description of Artificial Sequence: Synthetic oligonucleotide
gcaggaaacccagcgcaca

SEQ ID NO: 1398666 - RNA, 19 nt, Artificial Sequence
  Description of Artificial Sequence: Synthetic oligonucleotide
gcacguuccugguggguga

SEQ ID NO: 1398667 - RNA, 19 nt, Artificial Sequence
  Description of Artificial Sequence: Synthetic oligonucleotide
gcucuucccacacucucua

SEQ ID NO: 1398668 - RNA, 19 nt, Artificial Sequence
  Description of Artificial Sequence: Synthetic oligonucleotide
cacccacgugucacaucug

SEQ ID NO: 1398669 - RNA, 19 nt, Artificial Sequence
  Description of Artificial Sequence: Synthetic oligonucleotide
caggguccggggagaguuc

SEQ ID NO: 1398670 - RNA, 19 nt, Artificial Sequence
  Description of Artificial Sequence: Synthetic oligonucleotide
gguguugccuacaaugcuu

SEQ ID NO: 1398671 - RNA, 19 nt, Artificial Sequence
  Description of Artificial Sequence: Synthetic oligonucleotide
ugcaggguccggggagagu

SEQ ID NO: 1398672 - RNA, 19 nt, Artificial Sequence
  Description of Artificial Sequence: Synthetic oligonucleotide
auaggccuugauggucaau

SEQ ID NO: 1398673 - RNA, 19 nt, Artificial Sequence
  Description of Artificial Sequence: Synthetic oligonucleotide
uggagcggucgcggaagaa

SEQ ID NO: 1398674 - RNA, 19 nt, Artificial Sequence
  Description of Artificial Sequence: Synthetic oligonucleotide
agcucuuacugaagcucuu

SEQ ID NO: 1398675 - RNA, 19 nt, Artificial Sequence
  Description of Artificial Sequence: Synthetic oligonucleotide
cucugcgauagcccgguau

SEQ ID NO: 1398676 - RNA, 19 nt, Artificial Sequence
  Description of Artificial Sequence: Synthetic oligonucleotide
cggggagaguucaugcuuc

SEQ ID NO: 1398677 - RNA, 19 nt, Artificial Sequence
  Description of Artificial Sequence: Synthetic oligonucleotide
ccgagcccucaucagugag

SEQ ID NO: 1398678 - RNA, 19 nt, Artificial Sequence
  Description of Artificial Sequence: Synthetic oligonucleotide
gaucugcuugaagccuaaa

SEQ ID NO: 1398679 - RNA, 19 nt, Artificial Sequence
  Description of Artificial Sequence: Synthetic oligonucleotide
gguuugagaucugcuugaa

SEQ ID NO: 1398680 - RNA, 19 nt, Artificial Sequence
  Description of Artificial Sequence: Synthetic oligonucleotide
ccccuggguagguuccggg

SEQ ID NO: 1398681 - RNA, 19 nt, Artificial Sequence
  Description of Artificial Sequence: Synthetic oligonucleotide
cguccucaugcuuccaauc

SEQ ID NO: 1398682 - RNA, 19 nt, Artificial Sequence
  Description of Artificial Sequence: Synthetic oligonucleotide
ggcagaaguuuaauggcau

SEQ ID NO: 1398683 - RNA, 19 nt, Artificial Sequence
  Description of Artificial Sequence: Synthetic oligonucleotide
cggucgcggaagaacuucc

SEQ ID NO: 1398684 - RNA, 19 nt, Artificial Sequence
  Description of Artificial Sequence: Synthetic oligonucleotide
gugagguauaggccuugau

SEQ ID NO: 1398685 - RNA, 19 nt, Artificial Sequence
  Description of Artificial Sequence: Synthetic oligonucleotide
gugucacaucuguaggcuu

SEQ ID NO: 1398686 - RNA, 19 nt, Artificial Sequence
  Description of Artificial Sequence: Synthetic oligonucleotide
cguccguuggugguuggcc

SEQ ID NO: 1398687 - RNA, 19 nt, Artificial Sequence
  Description of Artificial Sequence: Synthetic oligonucleotide
agcuucgaagaagguucuu

SEQ ID NO: 1398688 - RNA, 19 nt, Artificial Sequence
  Description of Artificial Sequence: Synthetic oligonucleotide
ccaucucaccccaggccuc

SEQ ID NO: 1398689 - RNA, 19 nt, Artificial Sequence
  Description of Artificial Sequence: Synthetic oligonucleotide
guuggugguuggccagggu

SEQ ID NO: 1398690 - RNA, 19 nt, Artificial Sequence
  Description of Artificial Sequence: Synthetic oligonucleotide
cccucaccagagcuccagc

SEQ ID NO: 1398691 - RNA, 19 nt, Artificial Sequence
  Description of Artificial Sequence: Synthetic oligonucleotide
ggugacuguucuuggcuuu

SEQ ID NO: 1398692 - RNA, 19 nt, Artificial Sequence
  Description of Artificial Sequence: Synthetic oligonucleotide
cuguagcgacacugcucca

SEQ ID NO: 1398693 - RNA, 19 nt, Artificial Sequence
  Description of Artificial Sequence: Synthetic oligonucleotide
ccgcucugcgauagcccgg

SEQ ID NO: 1398694 - RNA, 19 nt, Artificial Sequence
  Description of Artificial Sequence: Synthetic oligonucleotide
gcccgguauauccccucac

SEQ ID NO: 1398695 - RNA, 19 nt, Artificial Sequence
  Description of Artificial Sequence: Synthetic oligonucleotide
gcggucgcggaagaacuuc

SEQ ID NO: 1398696 - RNA, 19 nt, Artificial Sequence
  Description of Artificial Sequence: Synthetic oligonucleotide
gggagaguucaugcuucca

SEQ ID NO: 1398697 - RNA, 19 nt, Artificial Sequence
  Description of Artificial Sequence: Synthetic oligonucleotide
guuccggguugggccauga

SEQ ID NO: 1398698 - RNA, 19 nt, Artificial Sequence
  Description of Artificial Sequence: Synthetic oligonucleotide
ucgccggugugcguccguu

SEQ ID NO: 1398699 - RNA, 19 nt, Artificial Sequence
  Description of Artificial Sequence: Synthetic oligonucleotide
cuccacacuuguacggcuu

SEQ ID NO: 1398700 - RNA, 19 nt, Artificial Sequence
  Description of Artificial Sequence: Synthetic oligonucleotide
acguuccuggugggugacu

SEQ ID NO: 1398701 - RNA, 19 nt, Artificial Sequence
  Description of Artificial Sequence: Synthetic oligonucleotide
cgcucgcugaagcacuuuc

SEQ ID NO: 1398702 - RNA, 19 nt, Artificial Sequence
  Description of Artificial Sequence: Synthetic oligonucleotide
ccguuggugguuggccagg

SEQ ID NO: 1398703 - RNA, 19 nt, Artificial Sequence
  Description of Artificial Sequence: Synthetic oligonucleotide
gcggugggcacugaagugu

SEQ ID NO: 1398704 - RNA, 19 nt, Artificial Sequence
  Description of Artificial Sequence: Synthetic oligonucleotide
agcggucgcggaagaacuu

SEQ ID NO: 1398705 - RNA, 19 nt, Artificial Sequence
  Description of Artificial Sequence: Synthetic oligonucleotide
cagcccgcucugcgauagc

SEQ ID NO: 1398706 - RNA, 19 nt, Artificial Sequence
  Description of Artificial Sequence: Synthetic oligonucleotide
gcucuucuguugggaggag

SEQ ID NO: 1398707 - RNA, 19 nt, Artificial Sequence
  Description of Artificial Sequence: Synthetic oligonucleotide
aguucuccccaggcucauu

SEQ ID NO: 1398708 - RNA, 19 nt, Artificial Sequence
  Description of Artificial Sequence: Synthetic oligonucleotide
gcccgcucugcgauagccc

SEQ ID NO: 1398709 - RNA, 19 nt, Artificial Sequence
  Description of Artificial Sequence: Synthetic oligonucleotide
gcuccucguagaaggggca

SEQ ID NO: 1398710 - RNA, 19 nt, Artificial Sequence
  Description of Artificial Sequence: Synthetic oligonucleotide
ccccucaccagagcuccag

SEQ ID NO: 1398711 - RNA, 19 nt, Artificial Sequence
  Description of Artificial Sequence: Synthetic oligonucleotide
caggucccugguggacggc

SEQ ID NO: 1398712 - RNA, 19 nt, Artificial Sequence
  Description of Artificial Sequence: Synthetic oligonucleotide
cuucuccuacuaucuccau

SEQ ID NO: 1398713 - RNA, 19 nt, Artificial Sequence
  Description of Artificial Sequence: Synthetic oligonucleotide
gggccaugaaguggaagcu

SEQ ID NO: 1398714 - RNA, 19 nt, Artificial Sequence
  Description of Artificial Sequence: Synthetic oligonucleotide
gcuuccaaucaaacccugu

SEQ ID NO: 1398715 - RNA, 19 nt, Artificial Sequence
  Description of Artificial Sequence: Synthetic oligonucleotide
agcgcucgcugaagcacuu

SEQ ID NO: 1398716 - RNA, 19 nt, Artificial Sequence
  Description of Artificial Sequence: Synthetic oligonucleotide
cgguaauuccguagaaggu

SEQ ID NO: 1398717 - RNA, 19 nt, Artificial Sequence
  Description of Artificial Sequence: Synthetic oligonucleotide
cuuggcuuuccgguagcuu

SEQ ID NO: 1398718 - RNA, 19 nt, Artificial Sequence
  Description of Artificial Sequence: Synthetic oligonucleotide
ggcuuuccgguaauuccgu

SEQ ID NO: 1398719 - RNA, 19 nt, Artificial Sequence
  Description of Artificial Sequence: Synthetic oligonucleotide
gcguccguuggugguuggc

SEQ ID NO: 1398720 - RNA, 19 nt, Artificial Sequence
  Description of Artificial Sequence: Synthetic oligonucleotide
cuuggucaucagccucagu

SEQ ID NO: 1398721 - RNA, 19 nt, Artificial Sequence
  Description of Artificial Sequence: Synthetic oligonucleotide
ggucuucguccucaugcuu

SEQ ID NO: 1398722 - RNA, 19 nt, Artificial Sequence
  Description of Artificial Sequence: Synthetic oligonucleotide
cugcgauagcccgguauau

SEQ ID NO: 1398723 - RNA, 19 nt, Artificial Sequence
  Description of Artificial Sequence: Synthetic oligonucleotide
ggcuuuccgguagcuucga

SEQ ID NO: 1398724 - RNA, 19 nt, Artificial Sequence
  Description of Artificial Sequence: Synthetic oligonucleotide
ccaugaaguggaagcuccu

SEQ ID NO: 1398725 - RNA, 19 nt, Artificial Sequence
  Description of Artificial Sequence: Synthetic oligonucleotide
ggacggcugcucuuggcuu

SEQ ID NO: 1398726 - RNA, 19 nt, Artificial Sequence
  Description of Artificial Sequence: Synthetic oligonucleotide
gcacuaaaagauggacuuu

SEQ ID NO: 1398727 - RNA, 19 nt, Artificial Sequence
  Description of Artificial Sequence: Synthetic oligonucleotide
cuaucuccauggcccugau

SEQ ID NO: 1398728 - RNA, 19 nt, Artificial Sequence
  Description of Artificial Sequence: Synthetic oligonucleotide
cccacgugucacaucugua

SEQ ID NO: 1398729 - RNA, 19 nt, Artificial Sequence
  Description of Artificial Sequence: Synthetic oligonucleotide
cgugucacaucuguaggcu

SEQ ID NO: 1398730 - RNA, 19 nt, Artificial Sequence
  Description of Artificial Sequence: Synthetic oligonucleotide
gguuccggguugggccaug

SEQ ID NO: 1398731 - RNA, 19 nt, Artificial Sequence
  Description of Artificial Sequence: Synthetic oligonucleotide
cucguagaaagggcacguu

SEQ ID NO: 1398732 - RNA, 19 nt, Artificial Sequence
  Description of Artificial Sequence: Synthetic oligonucleotide
ccucguagaaagggcacgu

SEQ ID NO: 1398733 - RNA, 19 nt, Artificial Sequence
  Description of Artificial Sequence: Synthetic oligonucleotide
ccugagcuucuuuggguau

SEQ ID NO: 1398734 - RNA, 19 nt, Artificial Sequence
  Description of Artificial Sequence: Synthetic oligonucleotide
guucugcggugggcacuga

SEQ ID NO: 1398735 - RNA, 19 nt, Artificial Sequence
  Description of Artificial Sequence: Synthetic oligonucleotide
cccuggguagguuccgggu

SEQ ID NO: 1398736 - RNA, 19 nt, Artificial Sequence
  Description of Artificial Sequence: Synthetic oligonucleotide
cgagcccucaucagugagu

SEQ ID NO: 1398737 - RNA, 19 nt, Artificial Sequence
  Description of Artificial Sequence: Synthetic oligonucleotide
ccccugaguuggugcugca

SEQ ID NO: 1398738 - RNA, 19 nt, Artificial Sequence
  Description of Artificial Sequence: Synthetic oligonucleotide
gcucugcgauagcccggua

SEQ ID NO: 1398739 - RNA, 19 nt, Artificial Sequence
  Description of Artificial Sequence: Synthetic oligonucleotide
cgguagcuucgaagaaggu

SEQ ID NO: 1398740 - RNA, 19 nt, Artificial Sequence
  Description of Artificial Sequence: Synthetic oligonucleotide
ggguccggggagaguucau

SEQ ID NO: 1398741 - RNA, 19 nt, Artificial Sequence
  Description of Artificial Sequence: Synthetic oligonucleotide
gcgcucgcugaagcacuuu

SEQ ID NO: 1398742 - RNA, 19 nt, Artificial Sequence
  Description of Artificial Sequence: Synthetic oligonucleotide
aaaguaugaauccauagac

SEQ ID NO: 1398743 - RNA, 19 nt, Artificial Sequence
  Description of Artificial Sequence: Synthetic oligonucleotide
aguaugaauccauagaccg

SEQ ID NO: 1398744 - RNA, 19 nt, Artificial Sequence
  Description of Artificial Sequence: Synthetic oligonucleotide
aauugcaaaauacagggca

SEQ ID NO: 1398745 - RNA, 19 nt, Artificial Sequence
  Description of Artificial Sequence: Synthetic oligonucleotide
ugcuccuuuaauuugaugg

SEQ ID NO: 1398746 - RNA, 19 nt, Artificial Sequence
  Description of Artificial Sequence: Synthetic oligonucleotide
caaacuaucaccacaaggc

SEQ ID NO: 1398747 - RNA, 19 nt, Artificial Sequence
  Description of Artificial Sequence: Synthetic oligonucleotide
uuuaauuugauggcuaagg

SEQ ID NO: 1398748 - RNA, 19 nt, Artificial Sequence
  Description of Artificial Sequence: Synthetic oligonucleotide
aaaacacugccuuuuauug

SEQ ID NO: 1398749 - RNA, 19 nt, Artificial Sequence
  Description of Artificial Sequence: Synthetic oligonucleotide
agaauauggagacacuccc

SEQ ID NO: 1398750 - RNA, 19 nt, Artificial Sequence
  Description of Artificial Sequence: Synthetic oligonucleotide
uuguugauagcacagguag

SEQ ID NO: 1398751 - RNA, 19 nt, Artificial Sequence
  Description of Artificial Sequence: Synthetic oligonucleotide
guagccacaaccuauaaag

SEQ ID NO: 1398752 - RNA, 19 nt, Artificial Sequence
  Description of Artificial Sequence: Synthetic oligonucleotide
agaaguaccagaaaagccc

SEQ ID NO: 1398753 - RNA, 19 nt, Artificial Sequence
  Description of Artificial Sequence: Synthetic oligonucleotide
uaccaauucugcauaaucg

SEQ ID NO: 1398754 - RNA, 19 nt, Artificial Sequence
  Description of Artificial Sequence: Synthetic oligonucleotide
aagacaggaucguauaagg

SEQ ID NO: 1398755 - RNA, 19 nt, Artificial Sequence
  Description of Artificial Sequence: Synthetic oligonucleotide
uaauuugauggcuaagggg

SEQ ID NO: 1398756 - RNA, 19 nt, Artificial Sequence
  Description of Artificial Sequence: Synthetic oligonucleotide
ugcauaaucgauuaggaaa

SEQ ID NO: 1398757 - RNA, 19 nt, Artificial Sequence
  Description of Artificial Sequence: Synthetic oligonucleotide
uuuauugaaguccugaauu

SEQ ID NO: 1398758 - RNA, 19 nt, Artificial Sequence
  Description of Artificial Sequence: Synthetic oligonucleotide
auauuauuaauggaguuuc

SEQ ID NO: 1398759 - RNA, 19 nt, Artificial Sequence
  Description of Artificial Sequence: Synthetic oligonucleotide
aaggccuucaaccacucuc

SEQ ID NO: 1398760 - RNA, 19 nt, Artificial Sequence
  Description of Artificial Sequence: Synthetic oligonucleotide
agccacaaccuauaaagcc

SEQ ID NO: 1398761 - RNA, 19 nt, Artificial Sequence
  Description of Artificial Sequence: Synthetic oligonucleotide
ucguauaaggauuuaggag

SEQ ID NO: 1398762 - RNA, 19 nt, Artificial Sequence
  Description of Artificial Sequence: Synthetic oligonucleotide
uggauaagggaccuggcgg

SEQ ID NO: 1398763 - RNA, 19 nt, Artificial Sequence
  Description of Artificial Sequence: Synthetic oligonucleotide
ucugguauguugcuaaggc

SEQ ID NO: 1398764 - RNA, 19 nt, Artificial Sequence
  Description of Artificial Sequence: Synthetic oligonucleotide
aauacagggcaauagcagu

SEQ ID NO: 1398765 - RNA, 19 nt, Artificial Sequence
  Description of Artificial Sequence: Synthetic oligonucleotide
aaguaugaauccauagacc

SEQ ID NO: 1398766 - RNA, 19 nt, Artificial Sequence
  Description of Artificial Sequence: Synthetic oligonucleotide
aacguugaaggucagugug

SEQ ID NO: 1398767 - RNA, 19 nt, Artificial Sequence
  Description of Artificial Sequence: Synthetic oligonucleotide
uacgaaaacguuccguagg

SEQ ID NO: 1398768 - RNA, 19 nt, Artificial Sequence
  Description of Artificial Sequence: Synthetic oligonucleotide
gaagacguugaucugaaac

SEQ ID NO: 1398769 - RNA, 19 nt, Artificial Sequence
  Description of Artificial Sequence: Synthetic oligonucleotide
agugugauggcguaaaaga

SEQ ID NO: 1398770 - RNA, 19 nt, Artificial Sequence
  Description of Artificial Sequence: Synthetic oligonucleotide
guaacccuggauuugaacc

SEQ ID NO: 1398771 - RNA, 19 nt, Artificial Sequence
  Description of Artificial Sequence: Synthetic oligonucleotide
agguauauuauuaauggag

SEQ ID NO: 1398772 - RNA, 19 nt, Artificial Sequence
  Description of Artificial Sequence: Synthetic oligonucleotide
uucugcauaaucgauuagg

SEQ ID NO: 1398773 - RNA, 19 nt, Artificial Sequence
  Description of Artificial Sequence: Synthetic oligonucleotide
gaucguauaaggauuuagg

SEQ ID NO: 1398774 - RNA, 19 nt, Artificial Sequence
  Description of Artificial Sequence: Synthetic oligonucleotide
uaucgcauuuccauagggg

SEQ ID NO: 1398775 - RNA, 19 nt, Artificial Sequence
  Description of Artificial Sequence: Synthetic oligonucleotide
gaaaguaugaauccauaga

SEQ ID NO: 1398776 - RNA, 19 nt, Artificial Sequence
  Description of Artificial Sequence: Synthetic oligonucleotide
aaucccaagagcugagaag

SEQ ID NO: 1398777 - RNA, 19 nt, Artificial Sequence
  Description of Artificial Sequence: Synthetic oligonucleotide
uaugaguccccuaugguac

SEQ ID NO: 1398778 - RNA, 19 nt, Artificial Sequence
  Description of Artificial Sequence: Synthetic oligonucleotide
uuauugaaguccugaauug

SEQ ID NO: 1398779 - RNA, 19 nt, Artificial Sequence
  Description of Artificial Sequence: Synthetic oligonucleotide
agggauguaucgcauuucc

SEQ ID NO: 1398780 - RNA, 19 nt, Artificial Sequence
  Description of Artificial Sequence: Synthetic oligonucleotide
aauagagaccaugugugag

SEQ ID NO: 1398781 - RNA, 19 nt, Artificial Sequence
  Description of Artificial Sequence: Synthetic oligonucleotide
ucgauuaggaaaugaaaga

SEQ ID NO: 1398782 - RNA, 19 nt, Artificial Sequence
  Description of Artificial Sequence: Synthetic oligonucleotide
aaagaaauuggaguuggca

SEQ ID NO: 1398783 - RNA, 19 nt, Artificial Sequence
  Description of Artificial Sequence: Synthetic oligonucleotide
aaaagcccgauguuuggag

SEQ ID NO: 1398784 - RNA, 19 nt, Artificial Sequence
  Description of Artificial Sequence: Synthetic oligonucleotide
ucugcauaaucgauuagga

SEQ ID NO: 1398785 - RNA, 19 nt, Artificial Sequence
  Description of Artificial Sequence: Synthetic oligonucleotide
aucgauuaggaaaugaaag

SEQ ID NO: 1398786 - RNA, 19 nt, Artificial Sequence
  Description of Artificial Sequence: Synthetic oligonucleotide
aaacuaucaccacaaggcu

SEQ ID NO: 1398787 - RNA, 19 nt, Artificial Sequence
  Description of Artificial Sequence: Synthetic oligonucleotide
aaauacagggcaauagcag

SEQ ID NO: 1398788 - RNA, 19 nt, Artificial Sequence
  Description of Artificial Sequence: Synthetic oligonucleotide
guggucaaaaugaagaaag

SEQ ID NO: 1398789 - RNA, 19 nt, Artificial Sequence
  Description of Artificial Sequence: Synthetic oligonucleotide
uuaaguagccacaaccuau

SEQ ID NO: 1398790 - RNA, 19 nt, Artificial Sequence
  Description of Artificial Sequence: Synthetic oligonucleotide
auagagaccaugugugagg

SEQ ID NO: 1398791 - RNA, 19 nt, Artificial Sequence
  Description of Artificial Sequence: Synthetic oligonucleotide
uaaucgauuaggaaaugaa

SEQ ID NO: 1398792 - RNA, 19 nt, Artificial Sequence
  Description of Artificial Sequence: Synthetic oligonucleotide
agauuuguaacccuggauu

SEQ ID NO: 1398793 - RNA, 19 nt, Artificial Sequence
  Description of Artificial Sequence: Synthetic oligonucleotide
guuggauaggacuugaaga

SEQ ID NO: 1398794 - RNA, 19 nt, Artificial Sequence
  Description of Artificial Sequence: Synthetic oligonucleotide
ugaucugaaacacgcagac

SEQ ID NO: 1398795 - RNA, 19 nt, Artificial Sequence
  Description of Artificial Sequence: Synthetic oligonucleotide
uaugaauccauagaccgca

SEQ ID NO: 1398796 - RNA, 19 nt, Artificial Sequence
  Description of Artificial Sequence: Synthetic oligonucleotide
uggagugagaucuggaaca

SEQ ID NO: 1398797 - RNA, 19 nt, Artificial Sequence
  Description of Artificial Sequence: Synthetic oligonucleotide
accuauaaagcccugcuca

SEQ ID NO: 1398798 - RNA, 19 nt, Artificial Sequence
  Description of Artificial Sequence: Synthetic oligonucleotide
uugagcacaagcauagccu

SEQ ID NO: 1398799 - RNA, 19 nt, Artificial Sequence
  Description of Artificial Sequence: Synthetic oligonucleotide
uaccagaaaagcccgaugu

SEQ ID NO: 1398800 - RNA, 19 nt, Artificial Sequence
  Description of Artificial Sequence: Synthetic oligonucleotide
ucuaggaggaguuucugcu

SEQ ID NO: 1398801 - RNA, 19 nt, Artificial Sequence
  Description of Artificial Sequence: Synthetic oligonucleotide
aucguauaaggauuuagga

SEQ ID NO: 1398802 - RNA, 19 nt, Artificial Sequence
  Description of Artificial Sequence: Synthetic oligonucleotide
acagugaaaggccuucaac

SEQ ID NO: 1398803 - RNA, 19 nt, Artificial Sequence
  Description of Artificial Sequence: Synthetic oligonucleotide
uuccguaggaaucuguaga

SEQ ID NO: 1398804 - RNA, 19 nt, Artificial Sequence
  Description of Artificial Sequence: Synthetic oligonucleotide
ggauuuaggagguagaaca

SEQ ID NO: 1398805 - RNA, 19 nt, Artificial Sequence
  Description of Artificial Sequence: Synthetic oligonucleotide
auagcacugaggaaaacac

SEQ ID NO: 1398806 - RNA, 19 nt, Artificial Sequence
  Description of Artificial Sequence: Synthetic oligonucleotide
cuugagcacaagcauagcc

SEQ ID NO: 1398807 - RNA, 19 nt, Artificial Sequence
  Description of Artificial Sequence: Synthetic oligonucleotide
acguugaucugaaacacgc

SEQ ID NO: 1398808 - RNA, 19 nt, Artificial Sequence
  Description of Artificial Sequence: Synthetic oligonucleotide
ugugagguaauacucccgu

SEQ ID NO: 1398809 - RNA, 19 nt, Artificial Sequence
  Description of Artificial Sequence: Synthetic oligonucleotide
aagaaggagaggcaaacua

SEQ ID NO: 1398810 - RNA, 19 nt, Artificial Sequence
  Description of Artificial Sequence: Synthetic oligonucleotide
uggguauagagucugguau

SEQ ID NO: 1398811 - RNA, 19 nt, Artificial Sequence
  Description of Artificial Sequence: Synthetic oligonucleotide
cagacgacgaugaugcagg

SEQ ID NO: 1398812 - RNA, 19 nt, Artificial Sequence
  Description of Artificial Sequence: Synthetic oligonucleotide
uggcguaaaagaaauugga

SEQ ID NO: 1398813 - RNA, 19 nt, Artificial Sequence
  Description of Artificial Sequence: Synthetic oligonucleotide
auguaucgcauuuccauag

SEQ ID NO: 1398814 - RNA, 19 nt, Artificial Sequence
  Description of Artificial Sequence: Synthetic oligonucleotide
gagaagagagcagacgacg

SEQ ID NO: 1398815 - RNA, 19 nt, Artificial Sequence
  Description of Artificial Sequence: Synthetic oligonucleotide
ugaaauacugcuccagaau

SEQ ID NO: 1398816 - RNA, 19 nt, Artificial Sequence
  Description of Artificial Sequence: Synthetic oligonucleotide
auaaggauuuaggagguag

SEQ ID NO: 1398817 - RNA, 19 nt, Artificial Sequence
  Description of Artificial Sequence: Synthetic oligonucleotide
ugugugagguaauacuccc

SEQ ID NO: 1398818 - RNA, 19 nt, Artificial Sequence
  Description of Artificial Sequence: Synthetic oligonucleotide
agcuaugaguccccuaugg

SEQ ID NO: 1398819 - RNA, 19 nt, Artificial Sequence
  Description of Artificial Sequence: Synthetic oligonucleotide
uguaucgcauuuccauagg

SEQ ID NO: 1398820 - RNA, 19 nt, Artificial Sequence
  Description of Artificial Sequence: Synthetic oligonucleotide
acuaucaccacaaggcuuc

SEQ ID NO: 1398821 - RNA, 19 nt, Artificial Sequence
  Description of Artificial Sequence: Synthetic oligonucleotide
ucuguagagaugauuccac

SEQ ID NO: 1398822 - RNA, 19 nt, Artificial Sequence
  Description of Artificial Sequence: Synthetic oligonucleotide
aaacacugccuuuuauugu

SEQ ID NO: 1398823 - RNA, 19 nt, Artificial Sequence
  Description of Artificial Sequence: Synthetic oligonucleotide
aagcauagccucugugccg

SEQ ID NO: 1398824 - RNA, 19 nt, Artificial Sequence
  Description of Artificial Sequence: Synthetic oligonucleotide
gauguacugccgcuggagg

SEQ ID NO: 1398825 - RNA, 19 nt, Artificial Sequence
  Description of Artificial Sequence: Synthetic oligonucleotide
guagucagagaugagcagg

SEQ ID NO: 1398826 - RNA, 19 nt, Artificial Sequence
  Description of Artificial Sequence: Synthetic oligonucleotide
uccguaggaaucuguagag

SEQ ID NO: 1398827 - RNA, 19 nt, Artificial Sequence
  Description of Artificial Sequence: Synthetic oligonucleotide
accaauucugcauaaucga

SEQ ID NO: 1398828 - RNA, 19 nt, Artificial Sequence
  Description of Artificial Sequence: Synthetic oligonucleotide
ugaauccauagaccgcagg

SEQ ID NO: 1398829 - RNA, 19 nt, Artificial Sequence
  Description of Artificial Sequence: Synthetic oligonucleotide
uccauagggguucggauga

SEQ ID NO: 1398830 - RNA, 19 nt, Artificial Sequence
  Description of Artificial Sequence: Synthetic oligonucleotide
uaaggauuuaggagguaga

SEQ ID NO: 1398831 - RNA, 19 nt, Artificial Sequence
  Description of Artificial Sequence: Synthetic oligonucleotide
agaaaagcccgauguuugg

SEQ ID NO: 1398832 - RNA, 19 nt, Artificial Sequence
  Description of Artificial Sequence: Synthetic oligonucleotide
uauuauuaauggaguuuca

SEQ ID NO: 1398833 - RNA, 19 nt, Artificial Sequence
  Description of Artificial Sequence: Synthetic oligonucleotide
uuggagugagaucuggaac

SEQ ID NO: 1398834 - RNA, 19 nt, Artificial Sequence
  Description of Artificial Sequence: Synthetic oligonucleotide
uauugaaguccugaauugc

SEQ ID NO: 1398835 - RNA, 19 nt, Artificial Sequence
  Description of Artificial Sequence: Synthetic oligonucleotide
gcaaacuaucaccacaagg

SEQ ID NO: 1398836 - RNA, 19 nt, Artificial Sequence
  Description of Artificial Sequence: Synthetic oligonucleotide
gugaguacgaaaacguucc

SEQ ID NO: 1398837 - RNA, 19 nt, Artificial Sequence
  Description of Artificial Sequence: Synthetic oligonucleotide
agcauacugguccaguucu

SEQ ID NO: 1398838 - RNA, 19 nt, Artificial Sequence
  Description of Artificial Sequence: Synthetic oligonucleotide
ugaaaucccaagagcugag

SEQ ID NO: 1398839 - RNA, 19 nt, Artificial Sequence
  Description of Artificial Sequence: Synthetic oligonucleotide
aguacgaaaacguuccgua

SEQ ID NO: 1398840 - RNA, 19 nt, Artificial Sequence
  Description of Artificial Sequence: Synthetic oligonucleotide
aauggaguuucaugaaaua

SEQ ID NO: 1398841 - RNA, 19 nt, Artificial Sequence
  Description of Artificial Sequence: Synthetic oligonucleotide
acaaccuauaaagcccugc

SEQ ID NO: 1398842 - RNA, 19 nt, Artificial Sequence
  Description of Artificial Sequence: Synthetic oligonucleotide
aaucgauuaggaaaugaaa

SEQ ID NO: 1398843 - RNA, 19 nt, Artificial Sequence
  Description of Artificial Sequence: Synthetic oligonucleotide
aagauagagaugauggcaa

SEQ ID NO: 1398844 - RNA, 19 nt, Artificial Sequence
  Description of Artificial Sequence: Synthetic oligonucleotide
guaaaagaaauuggaguug

SEQ ID NO: 1398845 - RNA, 19 nt, Artificial Sequence
  Description of Artificial Sequence: Synthetic oligonucleotide
ugcccaacguugaagguca

SEQ ID NO: 1398846 - RNA, 19 nt, Artificial Sequence
  Description of Artificial Sequence: Synthetic oligonucleotide
guaucgcauuuccauaggg

SEQ ID NO: 1398847 - RNA, 19 nt, Artificial Sequence
  Description of Artificial Sequence: Synthetic oligonucleotide
uuuguaacccuggauuuga

SEQ ID NO: 1398848 - RNA, 19 nt, Artificial Sequence
  Description of Artificial Sequence: Synthetic oligonucleotide
cagaaaagcccgauguuug

SEQ ID NO: 1398849 - RNA, 19 nt, Artificial Sequence
  Description of Artificial Sequence: Synthetic oligonucleotide
gagguaauacucccgucgc

SEQ ID NO: 1398850 - RNA, 19 nt, Artificial Sequence
  Description of Artificial Sequence: Synthetic oligonucleotide
aguagucagagaugagcag

SEQ ID NO: 1398851 - RNA, 19 nt, Artificial Sequence
  Description of Artificial Sequence: Synthetic oligonucleotide
ugaguacgaaaacguuccg

SEQ ID NO: 1398852 - RNA, 19 nt, Artificial Sequence
  Description of Artificial Sequence: Synthetic oligonucleotide
uaauacucccgucgcagga

SEQ ID NO: 1398853 - RNA, 19 nt, Artificial Sequence
  Description of Artificial Sequence: Synthetic oligonucleotide
cuggauaagggaccuggcg

SEQ ID NO: 1398854 - RNA, 19 nt, Artificial Sequence
  Description of Artificial Sequence: Synthetic oligonucleotide
aagcccgauguuuggagug

SEQ ID NO: 1398855 - RNA, 19 nt, Artificial Sequence
  Description of Artificial Sequence: Synthetic oligonucleotide
uucuaggaggaguuucugc

SEQ ID NO: 1398856 - RNA, 19 nt, Artificial Sequence
  Description of Artificial Sequence: Synthetic oligonucleotide
aaagcccgauguuuggagu

SEQ ID NO: 1398857 - RNA, 19 nt, Artificial Sequence
  Description of Artificial Sequence: Synthetic oligonucleotide
aggauuuaggagguagaac

SEQ ID NO: 1398858 - RNA, 19 nt, Artificial Sequence
  Description of Artificial Sequence: Synthetic oligonucleotide
cugugcagucacaaagugg

SEQ ID NO: 1398859 - RNA, 19 nt, Artificial Sequence
  Description of Artificial Sequence: Synthetic oligonucleotide
gagguauauuauuaaugga

SEQ ID NO: 1398860 - RNA, 19 nt, Artificial Sequence
  Description of Artificial Sequence: Synthetic oligonucleotide
auacugguccaguucuagg

SEQ ID NO: 1398861 - RNA, 19 nt, Artificial Sequence
  Description of Artificial Sequence: Synthetic oligonucleotide
uguugauagcacagguaga

SEQ ID NO: 1398862 - RNA, 19 nt, Artificial Sequence
  Description of Artificial Sequence: Synthetic oligonucleotide
gaggcaaacuaucaccaca

SEQ ID NO: 1398863 - RNA, 19 nt, Artificial Sequence
  Description of Artificial Sequence: Synthetic oligonucleotide
cacugaggaaaacacugcc

SEQ ID NO: 1398864 - RNA, 19 nt, Artificial Sequence
  Description of Artificial Sequence: Synthetic oligonucleotide
ugagcacaagcauagccuc

SEQ ID NO: 1398865 - RNA, 19 nt, Artificial Sequence
  Description of Artificial Sequence: Synthetic oligonucleotide
auuaaguagccacaaccua

SEQ ID NO: 1398866 - RNA, 19 nt, Artificial Sequence
  Description of Artificial Sequence: Synthetic oligonucleotide
aagauccagaaggcuuugc

SEQ ID NO: 1398867 - RNA, 19 nt, Artificial Sequence
  Description of Artificial Sequence: Synthetic oligonucleotide
acuuccugcauaaauccag

SEQ ID NO: 1398868 - RNA, 19 nt, Artificial Sequence
  Description of Artificial Sequence: Synthetic oligonucleotide
uagccacaaccuauaaagc

SEQ ID NO: 1398869 - RNA, 19 nt, Artificial Sequence
  Description of Artificial Sequence: Synthetic oligonucleotide
auggcauacucccaagaga

SEQ ID NO: 1398870 - RNA, 19 nt, Artificial Sequence
  Description of Artificial Sequence: Synthetic oligonucleotide
ucugugccguccuuggcag

SEQ ID NO: 1398871 - RNA, 19 nt, Artificial Sequence
  Description of Artificial Sequence: Synthetic oligonucleotide
augaguccccuaugguacc

SEQ ID NO: 1398872 - RNA, 19 nt, Artificial Sequence
  Description of Artificial Sequence: Synthetic oligonucleotide
guacgaaaacguuccguag

SEQ ID NO: 1398873 - RNA, 19 nt, Artificial Sequence
  Description of Artificial Sequence: Synthetic oligonucleotide
uuaggaaaugaaagaggua

SEQ ID NO: 1398874 - RNA, 19 nt, Artificial Sequence
  Description of Artificial Sequence: Synthetic oligonucleotide
acgaaaacguuccguagga

SEQ ID NO: 1398875 - RNA, 19 nt, Artificial Sequence
  Description of Artificial Sequence: Synthetic oligonucleotide
ggauaggacuugaagauag

SEQ ID NO: 1398876 - RNA, 19 nt, Artificial Sequence
  Description of Artificial Sequence: Synthetic oligonucleotide
auaaucgauuaggaaauga

SEQ ID NO: 1398877 - RNA, 19 nt, Artificial Sequence
  Description of Artificial Sequence: Synthetic oligonucleotide
gcaaagaaguaccagaaaa

SEQ ID NO: 1398878 - RNA, 19 nt, Artificial Sequence
  Description of Artificial Sequence: Synthetic oligonucleotide
uguacugccgcuggaggag

SEQ ID NO: 1398879 - RNA, 19 nt, Artificial Sequence
  Description of Artificial Sequence: Synthetic oligonucleotide
cucaccugcagguuucccc

SEQ ID NO: 1398880 - RNA, 19 nt, Artificial Sequence
  Description of Artificial Sequence: Synthetic oligonucleotide
uaccagagauuuguaaccc

SEQ ID NO: 1398881 - RNA, 19 nt, Artificial Sequence
  Description of Artificial Sequence: Synthetic oligonucleotide
cacagguagacuuggcaac

SEQ ID NO: 1398882 - RNA, 19 nt, Artificial Sequence
  Description of Artificial Sequence: Synthetic oligonucleotide
accaugugugagguaauac

SEQ ID NO: 1398883 - RNA, 19 nt, Artificial Sequence
  Description of Artificial Sequence: Synthetic oligonucleotide
aacagugaaaggccuucaa

SEQ ID NO: 1398884 - RNA, 19 nt, Artificial Sequence
  Description of Artificial Sequence: Synthetic oligonucleotide
gaauugcaaaauacagggc

SEQ ID NO: 1398885 - RNA, 19 nt, Artificial Sequence
  Description of Artificial Sequence: Synthetic oligonucleotide
guuccguaggaaucuguag

SEQ ID NO: 1398886 - RNA, 19 nt, Artificial Sequence
  Description of Artificial Sequence: Synthetic oligonucleotide
cugaggacucgccugcugg

SEQ ID NO: 1398887 - RNA, 19 nt, Artificial Sequence
  Description of Artificial Sequence: Synthetic oligonucleotide
uccccuaugguaccagaga

SEQ ID NO: 1398888 - RNA, 19 nt, Artificial Sequence
  Description of Artificial Sequence: Synthetic oligonucleotide
uccauagaccgcagggaug

SEQ ID NO: 1398889 - RNA, 19 nt, Artificial Sequence
  Description of Artificial Sequence: Synthetic oligonucleotide
gacaggaucguauaaggau

SEQ ID NO: 1398890 - RNA, 19 nt, Artificial Sequence
  Description of Artificial Sequence: Synthetic oligonucleotide
aaauacugcuccagaauau

SEQ ID NO: 1398891 - RNA, 19 nt, Artificial Sequence
  Description of Artificial Sequence: Synthetic oligonucleotide
ggggacaccaccucaaccc

SEQ ID NO: 1398892 - RNA, 19 nt, Artificial Sequence
  Description of Artificial Sequence: Synthetic oligonucleotide
accgcagggaugaaauccc

SEQ ID NO: 1398893 - RNA, 19 nt, Artificial Sequence
  Description of Artificial Sequence: Synthetic oligonucleotide
gauguaucgcauuuccaua

SEQ ID NO: 1398894 - RNA, 19 nt, Artificial Sequence
  Description of Artificial Sequence: Synthetic oligonucleotide
gaaggagaggcaaacuauc

SEQ ID NO: 1398895 - RNA, 19 nt, Artificial Sequence
  Description of Artificial Sequence: Synthetic oligonucleotide
aacccuggauuugaaccuc

SEQ ID NO: 1398896 - RNA, 19 nt, Artificial Sequence
  Description of Artificial Sequence: Synthetic oligonucleotide
aaguggggugcuccaaacu

SEQ ID NO: 1398897 - RNA, 19 nt, Artificial Sequence
  Description of Artificial Sequence: Synthetic oligonucleotide
aauaccaauucugcauaau

SEQ ID NO: 1398898 - RNA, 19 nt, Artificial Sequence
  Description of Artificial Sequence: Synthetic oligonucleotide
aucuguagagaugauucca

SEQ ID NO: 1398899 - RNA, 19 nt, Artificial Sequence
  Description of Artificial Sequence: Synthetic oligonucleotide
gaaaacguuccguaggaau

SEQ ID NO: 1398900 - RNA, 19 nt, Artificial Sequence
  Description of Artificial Sequence: Synthetic oligonucleotide
auuuguaacccuggauuug

SEQ ID NO: 1398901 - RNA, 19 nt, Artificial Sequence
  Description of Artificial Sequence: Synthetic oligonucleotide
ugauuccacacagggaaga

SEQ ID NO: 1398902 - RNA, 19 nt, Artificial Sequence
  Description of Artificial Sequence: Synthetic oligonucleotide
uggggacaccaccucaacc

SEQ ID NO: 1398903 - RNA, 19 nt, Artificial Sequence
  Description of Artificial Sequence: Synthetic oligonucleotide
accacaaggcuuccuauau

SEQ ID NO: 1398904 - RNA, 19 nt, Artificial Sequence
  Description of Artificial Sequence: Synthetic oligonucleotide
ugcaggugaguacgaaaac

SEQ ID NO: 1398905 - RNA, 19 nt, Artificial Sequence
  Description of Artificial Sequence: Synthetic oligonucleotide
aguagccacaaccuauaaa

SEQ ID NO: 1398906 - RNA, 19 nt, Artificial Sequence
  Description of Artificial Sequence: Synthetic oligonucleotide
gguaauacucccgucgcag

SEQ ID NO: 1398907 - RNA, 19 nt, Artificial Sequence
  Description of Artificial Sequence: Synthetic oligonucleotide
aguggggugcuccaaacuu

SEQ ID NO: 1398908 - RNA, 19 nt, Artificial Sequence
  Description of Artificial Sequence: Synthetic oligonucleotide
ugacuggguauagagucug

SEQ ID NO: 1398909 - RNA, 19 nt, Artificial Sequence
  Description of Artificial Sequence: Synthetic oligonucleotide
agagggauguaucgcauuu

SEQ ID NO: 1398910 - RNA, 19 nt, Artificial Sequence
  Description of Artificial Sequence: Synthetic oligonucleotide
gcaggugaguacgaaaacg

SEQ ID NO: 1398911 - RNA, 19 nt, Artificial Sequence
  Description of Artificial Sequence: Synthetic oligonucleotide
ggcauagaaguagucagag

SEQ ID NO: 1398912 - RNA, 19 nt, Artificial Sequence
  Description of Artificial Sequence: Synthetic oligonucleotide
cugcauaaauccagagaug

SEQ ID NO: 1398913 - RNA, 19 nt, Artificial Sequence
  Description of Artificial Sequence: Synthetic oligonucleotide
gugaaaggccuucaaccac

SEQ ID NO: 1398914 - RNA, 19 nt, Artificial Sequence
  Description of Artificial Sequence: Synthetic oligonucleotide
guguuguugauagcacagg

SEQ ID NO: 1398915 - RNA, 19 nt, Artificial Sequence
  Description of Artificial Sequence: Synthetic oligonucleotide
guccugaauugcaaaauac

SEQ ID NO: 1398916 - RNA, 19 nt, Artificial Sequence
  Description of Artificial Sequence: Synthetic oligonucleotide
uagagaccaugugugaggu

SEQ ID NO: 1398917 - RNA, 19 nt, Artificial Sequence
  Description of Artificial Sequence: Synthetic oligonucleotide
cauacugguccaguucuag

SEQ ID NO: 1398918 - RNA, 19 nt, Artificial Sequence
  Description of Artificial Sequence: Synthetic oligonucleotide
ucagagggauguaucgcau

SEQ ID NO: 1398919 - RNA, 19 nt, Artificial Sequence
  Description of Artificial Sequence: Synthetic oligonucleotide
gauuuguaacccuggauuu

SEQ ID NO: 1398920 - RNA, 19 nt, Artificial Sequence
  Description of Artificial Sequence: Synthetic oligonucleotide
cuauauacaucauggcaua

SEQ ID NO: 1398921 - RNA, 19 nt, Artificial Sequence
  Description of Artificial Sequence: Synthetic oligonucleotide
uucaaccacucucuuccaa

SEQ ID NO: 1398922 - RNA, 19 nt, Artificial Sequence
  Description of Artificial Sequence: Synthetic oligonucleotide
aacuaucaccacaaggcuu

SEQ ID NO: 1398923 - RNA, 19 nt, Artificial Sequence
  Description of Artificial Sequence: Synthetic oligonucleotide
agaaggagaggcaaacuau

SEQ ID NO: 1398924 - RNA, 19 nt, Artificial Sequence
  Description of Artificial Sequence: Synthetic oligonucleotide
agacacucccaaauccaac

SEQ ID NO: 1398925 - RNA, 19 nt, Artificial Sequence
  Description of Artificial Sequence: Synthetic oligonucleotide
ucucccaccguuggauagg

SEQ ID NO: 1398926 - RNA, 19 nt, Artificial Sequence
  Description of Artificial Sequence: Synthetic oligonucleotide
aaguagccacaaccuauaa

SEQ ID NO: 1398927 - RNA, 19 nt, Artificial Sequence
  Description of Artificial Sequence: Synthetic oligonucleotide
auugcaaaauacagggcaa

SEQ ID NO: 1398928 - RNA, 19 nt, Artificial Sequence
  Description of Artificial Sequence: Synthetic oligonucleotide
gagggcaucuguuaucaua

SEQ ID NO: 1398929 - RNA, 19 nt, Artificial Sequence
  Description of Artificial Sequence: Synthetic oligonucleotide
guaccagaaaagcccgaug

SEQ ID NO: 1398930 - RNA, 19 nt, Artificial Sequence
  Description of Artificial Sequence: Synthetic oligonucleotide
gcaaucuggaugaacauga

SEQ ID NO: 1398931 - RNA, 19 nt, Artificial Sequence
  Description of Artificial Sequence: Synthetic oligonucleotide
acagggcaauagcagugag

SEQ ID NO: 1398932 - RNA, 19 nt, Artificial Sequence
  Description of Artificial Sequence: Synthetic oligonucleotide
gaauauggagacacuccca

SEQ ID NO: 1398933 - RNA, 19 nt, Artificial Sequence
  Description of Artificial Sequence: Synthetic oligonucleotide
uggcuaaggggacugugua

SEQ ID NO: 1398934 - RNA, 19 nt, Artificial Sequence
  Description of Artificial Sequence: Synthetic oligonucleotide
gccacaaccuauaaagccc

SEQ ID NO: 1398935 - RNA, 19 nt, Artificial Sequence
  Description of Artificial Sequence: Synthetic oligonucleotide
aauacucccgucgcaggaa

SEQ ID NO: 1398936 - RNA, 19 nt, Artificial Sequence
  Description of Artificial Sequence: Synthetic oligonucleotide
ggaucguauaaggauuuag

SEQ ID NO: 1398937 - RNA, 19 nt, Artificial Sequence
  Description of Artificial Sequence: Synthetic oligonucleotide
ugaaccucuucugccugag

SEQ ID NO: 1398938 - RNA, 19 nt, Artificial Sequence
  Description of Artificial Sequence: Synthetic oligonucleotide
gucgcaggaaggcauagaa

SEQ ID NO: 1398939 - RNA, 19 nt, Artificial Sequence
  Description of Artificial Sequence: Synthetic oligonucleotide
ggguauagagucugguaug

SEQ ID NO: 1398940 - RNA, 19 nt, Artificial Sequence
  Description of Artificial Sequence: Synthetic oligonucleotide
aguucuaggaggaguuucu

SEQ ID NO: 1398941 - RNA, 19 nt, Artificial Sequence
  Description of Artificial Sequence: Synthetic oligonucleotide
gcguaaaagaaauuggagu

SEQ ID NO: 1398942 - RNA, 19 nt, Artificial Sequence
  Description of Artificial Sequence: Synthetic oligonucleotide
auguugcuaaggcaagaaa

SEQ ID NO: 1398943 - RNA, 19 nt, Artificial Sequence
  Description of Artificial Sequence: Synthetic oligonucleotide
agggcaucuguuaucauaa

SEQ ID NO: 1398944 - RNA, 19 nt, Artificial Sequence
  Description of Artificial Sequence: Synthetic oligonucleotide
ggugaguacgaaaacguuc

SEQ ID NO: 1398945 - RNA, 19 nt, Artificial Sequence
  Description of Artificial Sequence: Synthetic oligonucleotide
agagagcagacgacgauga

SEQ ID NO: 1398946 - RNA, 19 nt, Artificial Sequence
  Description of Artificial Sequence: Synthetic oligonucleotide
cgauuaggaaaugaaagag

SEQ ID NO: 1398947 - RNA, 19 nt, Artificial Sequence
  Description of Artificial Sequence: Synthetic oligonucleotide
agaccgcagggaugaaauc

SEQ ID NO: 1398948 - RNA, 19 nt, Artificial Sequence
  Description of Artificial Sequence: Synthetic oligonucleotide
uugauagcacagguagacu

SEQ ID NO: 1398949 - RNA, 19 nt, Artificial Sequence
  Description of Artificial Sequence: Synthetic oligonucleotide
acaggaucguauaaggauu

SEQ ID NO: 1398950 - RNA, 19 nt, Artificial Sequence
  Description of Artificial Sequence: Synthetic oligonucleotide
gguauauuauuaauggagu

SEQ ID NO: 1398951 - RNA, 19 nt, Artificial Sequence
  Description of Artificial Sequence: Synthetic oligonucleotide
auggggugcuccuuuaauu

SEQ ID NO: 1398952 - RNA, 19 nt, Artificial Sequence
  Description of Artificial Sequence: Synthetic oligonucleotide
gggacuguguagaagaaga

SEQ ID NO: 1398953 - RNA, 19 nt, Artificial Sequence
  Description of Artificial Sequence: Synthetic oligonucleotide
gggcaaacaaggugacugg

SEQ ID NO: 1398954 - RNA, 19 nt, Artificial Sequence
  Description of Artificial Sequence: Synthetic oligonucleotide
gaaaagcccgauguuugga

SEQ ID NO: 1398955 - RNA, 19 nt, Artificial Sequence
  Description of Artificial Sequence: Synthetic oligonucleotide
cugguauguugcuaaggca

SEQ ID NO: 1398956 - RNA, 19 nt, Artificial Sequence
  Description of Artificial Sequence: Synthetic oligonucleotide
gugugagguaauacucccg

SEQ ID NO: 1398957 - RNA, 19 nt, Artificial Sequence
  Description of Artificial Sequence: Synthetic oligonucleotide
uccaacagugaaaggccuu

SEQ ID NO: 1398958 - RNA, 19 nt, Artificial Sequence
  Description of Artificial Sequence: Synthetic oligonucleotide
ccagagauuuguaacccug

SEQ ID NO: 1398959 - RNA, 19 nt, Artificial Sequence
  Description of Artificial Sequence: Synthetic oligonucleotide
uucugccugaggacucgcc

SEQ ID NO: 1398960 - RNA, 19 nt, Artificial Sequence
  Description of Artificial Sequence: Synthetic oligonucleotide
ccaacguugaaggucagug

SEQ ID NO: 1398961 - RNA, 19 nt, Artificial Sequence
  Description of Artificial Sequence: Synthetic oligonucleotide
agguaauacucccgucgca

SEQ ID NO: 1398962 - RNA, 19 nt, Artificial Sequence
  Description of Artificial Sequence: Synthetic oligonucleotide
ucugcccaacguugaaggu

SEQ ID NO: 1398963 - RNA, 19 nt, Artificial Sequence
  Description of Artificial Sequence: Synthetic oligonucleotide
cauaaucgauuaggaaaug

SEQ ID NO: 1398964 - RNA, 19 nt, Artificial Sequence
  Description of Artificial Sequence: Synthetic oligonucleotide
aguaccagaaaagcccgau

SEQ ID NO: 1398965 - RNA, 19 nt, Artificial Sequence
  Description of Artificial Sequence: Synthetic oligonucleotide
gguucggaugaguucggcc

SEQ ID NO: 1398966 - RNA, 19 nt, Artificial Sequence
  Description of Artificial Sequence: Synthetic oligonucleotide
gguauguugcuaaggcaag

SEQ ID NO: 1398967 - RNA, 19 nt, Artificial Sequence
  Description of Artificial Sequence: Synthetic oligonucleotide
gaagauccagaaggcuuug

SEQ ID NO: 1398968 - RNA, 19 nt, Artificial Sequence
  Description of Artificial Sequence: Synthetic oligonucleotide
ugaggguguuguugauagc

SEQ ID NO: 1398969 - RNA, 19 nt, Artificial Sequence
  Description of Artificial Sequence: Synthetic oligonucleotide
cuguagagaugauuccaca

SEQ ID NO: 1398970 - RNA, 19 nt, Artificial Sequence
  Description of Artificial Sequence: Synthetic oligonucleotide
uggcaaucuggaugaacau

SEQ ID NO: 1398971 - RNA, 19 nt, Artificial Sequence
  Description of Artificial Sequence: Synthetic oligonucleotide
aacguuccguaggaaucug

SEQ ID NO: 1398972 - RNA, 19 nt, Artificial Sequence
  Description of Artificial Sequence: Synthetic oligonucleotide
ugcagguuuccccuuccuu

SEQ ID NO: 1398973 - RNA, 19 nt, Artificial Sequence
  Description of Artificial Sequence: Synthetic oligonucleotide
caggugaguacgaaaacgu

SEQ ID NO: 1398974 - RNA, 19 nt, Artificial Sequence
  Description of Artificial Sequence: Synthetic oligonucleotide
uaagggaccuggcgggcuc

SEQ ID NO: 1398975 - RNA, 19 nt, Artificial Sequence
  Description of Artificial Sequence: Synthetic oligonucleotide
accagaaaagcccgauguu

SEQ ID NO: 1398976 - RNA, 19 nt, Artificial Sequence
  Description of Artificial Sequence: Synthetic oligonucleotide
agacaggaucguauaagga

SEQ ID NO: 1398977 - RNA, 19 nt, Artificial Sequence
  Description of Artificial Sequence: Synthetic oligonucleotide
ggcaaacaaggugacuggg

SEQ ID NO: 1398978 - RNA, 19 nt, Artificial Sequence
  Description of Artificial Sequence: Synthetic oligonucleotide
aggcaaacuaucaccacaa

SEQ ID NO: 1398979 - RNA, 19 nt, Artificial Sequence
  Description of Artificial Sequence: Synthetic oligonucleotide
guucggccacaucuggagc

SEQ ID NO: 1398980 - RNA, 19 nt, Artificial Sequence
  Description of Artificial Sequence: Synthetic oligonucleotide
ggauguaucgcauuuccau

SEQ ID NO: 1398981 - RNA, 19 nt, Artificial Sequence
  Description of Artificial Sequence: Synthetic oligonucleotide
augauuccacacagggaag

SEQ ID NO: 1398982 - RNA, 19 nt, Artificial Sequence
  Description of Artificial Sequence: Synthetic oligonucleotide
ggcaaucuggaugaacaug

SEQ ID NO: 1398983 - RNA, 19 nt, Artificial Sequence
  Description of Artificial Sequence: Synthetic oligonucleotide
ccuauaaagcccugcucac

SEQ ID NO: 1398984 - RNA, 19 nt, Artificial Sequence
  Description of Artificial Sequence: Synthetic oligonucleotide
gauaggacuugaagauaga

SEQ ID NO: 1398985 - RNA, 19 nt, Artificial Sequence
  Description of Artificial Sequence: Synthetic oligonucleotide
ggcuaaggggacuguguag

SEQ ID NO: 1398986 - RNA, 19 nt, Artificial Sequence
  Description of Artificial Sequence: Synthetic oligonucleotide
uggagcauacugguccagu

SEQ ID NO: 1398987 - RNA, 19 nt, Artificial Sequence
  Description of Artificial Sequence: Synthetic oligonucleotide
ggcuacuugagcacaagca

SEQ ID NO: 1398988 - RNA, 19 nt, Artificial Sequence
  Description of Artificial Sequence: Synthetic oligonucleotide
cugcccaacguugaagguc

SEQ ID NO: 1398989 - RNA, 19 nt, Artificial Sequence
  Description of Artificial Sequence: Synthetic oligonucleotide
cguuggauaggacuugaag

SEQ ID NO: 1398990 - RNA, 19 nt, Artificial Sequence
  Description of Artificial Sequence: Synthetic oligonucleotide
gaucugaaacacgcagaca

SEQ ID NO: 1398991 - RNA, 19 nt, Artificial Sequence
  Description of Artificial Sequence: Synthetic oligonucleotide
ugugccguccuuggcaguc

SEQ ID NO: 1398992 - RNA, 19 nt, Artificial Sequence
  Description of Artificial Sequence: Synthetic oligonucleotide
guauaaggauuuaggaggu

SEQ ID NO: 1398993 - RNA, 19 nt, Artificial Sequence
  Description of Artificial Sequence: Synthetic oligonucleotide
ucccgucgcaggaaggcau

SEQ ID NO: 1398994 - RNA, 19 nt, Artificial Sequence
  Description of Artificial Sequence: Synthetic oligonucleotide
gugugauggcguaaaagaa

SEQ ID NO: 1398995 - RNA, 19 nt, Artificial Sequence
  Description of Artificial Sequence: Synthetic oligonucleotide
accuggcgggcuccuggcc

SEQ ID NO: 1398996 - RNA, 19 nt, Artificial Sequence
  Description of Artificial Sequence: Synthetic oligonucleotide
cuggggcaaacaaggugac

SEQ ID NO: 1398997 - RNA, 19 nt, Artificial Sequence
  Description of Artificial Sequence: Synthetic oligonucleotide
guuguugauagcacaggua

SEQ ID NO: 1398998 - RNA, 19 nt, Artificial Sequence
  Description of Artificial Sequence: Synthetic oligonucleotide
uauaaggauuuaggaggua

SEQ ID NO: 1398999 - RNA, 19 nt, Artificial Sequence
  Description of Artificial Sequence: Synthetic oligonucleotide
gcuaaggggacuguguaga

SEQ ID NO: 1399000 - RNA, 19 nt, Artificial Sequence
  Description of Artificial Sequence: Synthetic oligonucleotide
uagagaaguccuggggcaa

SEQ ID NO: 1399001 - RNA, 19 nt, Artificial Sequence
  Description of Artificial Sequence: Synthetic oligonucleotide
gagacacucccaaauccaa

SEQ ID NO: 1399002 - RNA, 19 nt, Artificial Sequence
  Description of Artificial Sequence: Synthetic oligonucleotide
ggagugagaucuggaacag

SEQ ID NO: 1399003 - RNA, 19 nt, Artificial Sequence
  Description of Artificial Sequence: Synthetic oligonucleotide
gggagguccaaguggggug

SEQ ID NO: 1399004 - RNA, 19 nt, Artificial Sequence
  Description of Artificial Sequence: Synthetic oligonucleotide
aguccccuaugguaccaga

SEQ ID NO: 1399005 - RNA, 19 nt, Artificial Sequence
  Description of Artificial Sequence: Synthetic oligonucleotide
gguagacuuggcaacacaa

SEQ ID NO: 1399006 - RNA, 19 nt, Artificial Sequence
  Description of Artificial Sequence: Synthetic oligonucleotide
aaguaccagaaaagcccga

SEQ ID NO: 1399007 - RNA, 19 nt, Artificial Sequence
  Description of Artificial Sequence: Synthetic oligonucleotide
guauguugcuaaggcaaga

SEQ ID NO: 1399008 - RNA, 19 nt, Artificial Sequence
  Description of Artificial Sequence: Synthetic oligonucleotide
gaagagagcagacgacgau

SEQ ID NO: 1399009 - RNA, 19 nt, Artificial Sequence
  Description of Artificial Sequence: Synthetic oligonucleotide
caaccuauaaagcccugcu

SEQ ID NO: 1399010 - RNA, 19 nt, Artificial Sequence
  Description of Artificial Sequence: Synthetic oligonucleotide
auagggguucggaugaguu

SEQ ID NO: 1399011 - RNA, 19 nt, Artificial Sequence
  Description of Artificial Sequence: Synthetic oligonucleotide
gauuccacacagggaagaa

SEQ ID NO: 1399012 - RNA, 19 nt, Artificial Sequence
  Description of Artificial Sequence: Synthetic oligonucleotide
gugagguaauacucccguc

SEQ ID NO: 1399013 - RNA, 19 nt, Artificial Sequence
  Description of Artificial Sequence: Synthetic oligonucleotide
cacaaccuauaaagcccug

SEQ ID NO: 1399014 - RNA, 19 nt, Artificial Sequence
  Description of Artificial Sequence: Synthetic oligonucleotide
uggcaacacaagacaggau

SEQ ID NO: 1399015 - RNA, 19 nt, Artificial Sequence
  Description of Artificial Sequence: Synthetic oligonucleotide
ugaguccccuaugguacca

SEQ ID NO: 1399016 - RNA, 19 nt, Artificial Sequence
  Description of Artificial Sequence: Synthetic oligonucleotide
gggcuacuugagcacaagc

SEQ ID NO: 1399017 - RNA, 19 nt, Artificial Sequence
  Description of Artificial Sequence: Synthetic oligonucleotide
agauggggugcuccuuuaa

SEQ ID NO: 1399018 - RNA, 19 nt, Artificial Sequence
  Description of Artificial Sequence: Synthetic oligonucleotide
gaguacgaaaacguuccgu

SEQ ID NO: 1399019 - RNA, 19 nt, Artificial Sequence
  Description of Artificial Sequence: Synthetic oligonucleotide
ggacuugaagauagagaug

SEQ ID NO: 1399020 - RNA, 19 nt, Artificial Sequence
  Description of Artificial Sequence: Synthetic oligonucleotide
gaagauggggugcuccuuu

SEQ ID NO: 1399021 - RNA, 19 nt, Artificial Sequence
  Description of Artificial Sequence: Synthetic oligonucleotide
gaaauuggaguuggcacuu

SEQ ID NO: 1399022 - RNA, 19 nt, Artificial Sequence
  Description of Artificial Sequence: Synthetic oligonucleotide
gauggggugcuccuuuaau

SEQ ID NO: 1399023 - RNA, 19 nt, Artificial Sequence
  Description of Artificial Sequence: Synthetic oligonucleotide
gcuacuugagcacaagcau

SEQ ID NO: 1399024 - RNA, 19 nt, Artificial Sequence
  Description of Artificial Sequence: Synthetic oligonucleotide
ccugugcagucacaaagug

SEQ ID NO: 1399025 - RNA, 19 nt, Artificial Sequence
  Description of Artificial Sequence: Synthetic oligonucleotide
agggcuacuugagcacaag

SEQ ID NO: 1399026 - RNA, 19 nt, Artificial Sequence
  Description of Artificial Sequence: Synthetic oligonucleotide
cguaaaagaaauuggaguu

SEQ ID NO: 1399027 - RNA, 19 nt, Artificial Sequence
  Description of Artificial Sequence: Synthetic oligonucleotide
accguuggauaggacuuga

SEQ ID NO: 1399028 - RNA, 19 nt, Artificial Sequence
  Description of Artificial Sequence: Synthetic oligonucleotide
gccacuuucagagggaugu

SEQ ID NO: 1399029 - RNA, 19 nt, Artificial Sequence
  Description of Artificial Sequence: Synthetic oligonucleotide
cagggauguacugccgcug

SEQ ID NO: 1399030 - RNA, 19 nt, Artificial Sequence
  Description of Artificial Sequence: Synthetic oligonucleotide
ccacaucucccaccguugg

SEQ ID NO: 1399031 - RNA, 19 nt, Artificial Sequence
  Description of Artificial Sequence: Synthetic oligonucleotide
ugccgcuggaggagauaga

SEQ ID NO: 1399032 - RNA, 19 nt, Artificial Sequence
  Description of Artificial Sequence: Synthetic oligonucleotide
ccuuuaauuugauggcuaa

SEQ ID NO: 1399033 - RNA, 19 nt, Artificial Sequence
  Description of Artificial Sequence: Synthetic oligonucleotide
gaguucggccacaucugga

SEQ ID NO: 1399034 - RNA, 19 nt, Artificial Sequence
  Description of Artificial Sequence: Synthetic oligonucleotide
guggggacaccaccucaac

SEQ ID NO: 1399035 - RNA, 19 nt, Artificial Sequence
  Description of Artificial Sequence: Synthetic oligonucleotide
cuucaaccacucucuucca

SEQ ID NO: 1399036 - RNA, 19 nt, Artificial Sequence
  Description of Artificial Sequence: Synthetic oligonucleotide
caacguugaaggucagugu

SEQ ID NO: 1399037 - RNA, 19 nt, Artificial Sequence
  Description of Artificial Sequence: Synthetic oligonucleotide
aggugaguacgaaaacguu

SEQ ID NO: 1399038 - RNA, 19 nt, Artificial Sequence
  Description of Artificial Sequence: Synthetic oligonucleotide
gguauagagucugguaugu

SEQ ID NO: 1399039 - RNA, 19 nt, Artificial Sequence
  Description of Artificial Sequence: Synthetic oligonucleotide
agcccgauguuuggaguga

SEQ ID NO: 1399040 - RNA, 19 nt, Artificial Sequence
  Description of Artificial Sequence: Synthetic oligonucleotide
gugggagguccaagugggg

SEQ ID NO: 1399041 - RNA, 19 nt, Artificial Sequence
  Description of Artificial Sequence: Synthetic oligonucleotide
ugugccagccagggcuacu

SEQ ID NO: 1399042 - RNA, 19 nt, Artificial Sequence
  Description of Artificial Sequence: Synthetic oligonucleotide
caacagugaaaggccuuca

SEQ ID NO: 1399043 - RNA, 19 nt, Artificial Sequence
  Description of Artificial Sequence: Synthetic oligonucleotide
cacaucucccaccguugga

SEQ ID NO: 1399044 - RNA, 19 nt, Artificial Sequence
  Description of Artificial Sequence: Synthetic oligonucleotide
ccaugcaguucugugccag

SEQ ID NO: 1399045 - RNA, 19 nt, Artificial Sequence
  Description of Artificial Sequence: Synthetic oligonucleotide
cgaugaugcaggugaguac

SEQ ID NO: 1399046 - RNA, 19 nt, Artificial Sequence
  Description of Artificial Sequence: Synthetic oligonucleotide
ucggccacaucuggagcau

SEQ ID NO: 1399047 - RNA, 19 nt, Artificial Sequence
  Description of Artificial Sequence: Synthetic oligonucleotide
caggaucguauaaggauuu

SEQ ID NO: 1399048 - RNA, 19 nt, Artificial Sequence
  Description of Artificial Sequence: Synthetic oligonucleotide
ucccaccguuggauaggac

SEQ ID NO: 1399049 - RNA, 19 nt, Artificial Sequence
  Description of Artificial Sequence: Synthetic oligonucleotide
gcuaugaguccccuauggu

SEQ ID NO: 1399050 - RNA, 19 nt, Artificial Sequence
  Description of Artificial Sequence: Synthetic oligonucleotide
aggaucguauaaggauuua

SEQ ID NO: 1399051 - RNA, 19 nt, Artificial Sequence
  Description of Artificial Sequence: Synthetic oligonucleotide
acguuccguaggaaucugu

SEQ ID NO: 1399052 - RNA, 19 nt, Artificial Sequence
  Description of Artificial Sequence: Synthetic oligonucleotide
gggauguaucgcauuucca

SEQ ID NO: 1399053 - RNA, 19 nt, Artificial Sequence
  Description of Artificial Sequence: Synthetic oligonucleotide
caucucccaccguuggaua

SEQ ID NO: 1399054 - RNA, 19 nt, Artificial Sequence
  Description of Artificial Sequence: Synthetic oligonucleotide
ggacucgccugcuggcaac

SEQ ID NO: 1399055 - RNA, 19 nt, Artificial Sequence
  Description of Artificial Sequence: Synthetic oligonucleotide
agaccaugugugagguaau

SEQ ID NO: 1399056 - RNA, 19 nt, Artificial Sequence
  Description of Artificial Sequence: Synthetic oligonucleotide
caacacaagacaggaucgu

SEQ ID NO: 1399057 - RNA, 19 nt, Artificial Sequence
  Description of Artificial Sequence: Synthetic oligonucleotide
cagggcuacuugagcacaa

SEQ ID NO: 1399058 - RNA, 19 nt, Artificial Sequence
  Description of Artificial Sequence: Synthetic oligonucleotide
aggaaucuguagagaugau

SEQ ID NO: 1399059 - RNA, 19 nt, Artificial Sequence
  Description of Artificial Sequence: Synthetic oligonucleotide
caauagcagugagggcauc

SEQ ID NO: 1399060 - RNA, 19 nt, Artificial Sequence
  Description of Artificial Sequence: Synthetic oligonucleotide
gggguucggaugaguucgg

SEQ ID NO: 1399061 - RNA, 19 nt, Artificial Sequence
  Description of Artificial Sequence: Synthetic oligonucleotide
ccacaaccuauaaagcccu

SEQ ID NO: 1399062 - RNA, 19 nt, Artificial Sequence
  Description of Artificial Sequence: Synthetic oligonucleotide
gcaaacaaggugacugggu

SEQ ID NO: 1399063 - RNA, 19 nt, Artificial Sequence
  Description of Artificial Sequence: Synthetic oligonucleotide
gagagcagacgacgaugau

SEQ ID NO: 1399064 - RNA, 19 nt, Artificial Sequence
  Description of Artificial Sequence: Synthetic oligonucleotide
gugcagucacaaaguggga

SEQ ID NO: 1399065 - RNA, 19 nt, Artificial Sequence
  Description of Artificial Sequence: Synthetic oligonucleotide
ggaugaguucggccacauc

SEQ ID NO: 1399066 - RNA, 19 nt, Artificial Sequence
  Description of Artificial Sequence: Synthetic oligonucleotide
ccugaggacucgccugcug

SEQ ID NO: 1399067 - RNA, 19 nt, Artificial Sequence
  Description of Artificial Sequence: Synthetic oligonucleotide
ggguucggaugaguucggc

SEQ ID NO: 1399068 - RNA, 19 nt, Artificial Sequence
  Description of Artificial Sequence: Synthetic oligonucleotide
gggacaccaccucaacccu

SEQ ID NO: 1399069 - RNA, 19 nt, Artificial Sequence
  Description of Artificial Sequence: Synthetic oligonucleotide
cguugaucugaaacacgca

SEQ ID NO: 1399070 - RNA, 19 nt, Artificial Sequence
  Description of Artificial Sequence: Synthetic oligonucleotide
gcccgauguuuggagugag

SEQ ID NO: 1399071 - RNA, 19 nt, Artificial Sequence
  Description of Artificial Sequence: Synthetic oligonucleotide
cauagggguucggaugagu

SEQ ID NO: 1399072 - RNA, 19 nt, Artificial Sequence
  Description of Artificial Sequence: Synthetic oligonucleotide
ggccacaucucccaccguu

SEQ ID NO: 1399073 - RNA, 19 nt, Artificial Sequence
  Description of Artificial Sequence: Synthetic oligonucleotide
ccgccagcuaugagucccc

SEQ ID NO: 1399074 - RNA, 19 nt, Artificial Sequence
  Description of Artificial Sequence: Synthetic oligonucleotide
guauagagucugguauguu

SEQ ID NO: 1399075 - RNA, 19 nt, Artificial Sequence
  Description of Artificial Sequence: Synthetic oligonucleotide
cguuccguaggaaucugua

SEQ ID NO: 1399076 - RNA, 19 nt, Artificial Sequence
  Description of Artificial Sequence: Synthetic oligonucleotide
gggcaucuguuaucauaaa

SEQ ID NO: 1399077 - RNA, 19 nt, Artificial Sequence
  Description of Artificial Sequence: Synthetic oligonucleotide
gacucgccugcuggcaacu

SEQ ID NO: 1399078 - RNA, 19 nt, Artificial Sequence
  Description of Artificial Sequence: Synthetic oligonucleotide
ccgauguuuggagugagau

SEQ ID NO: 1399079 - RNA, 19 nt, Artificial Sequence
  Description of Artificial Sequence: Synthetic oligonucleotide
ccccuaugguaccagagau

SEQ ID NO: 1399080 - RNA, 19 nt, Artificial Sequence
  Description of Artificial Sequence: Synthetic oligonucleotide
ccguaggaaucuguagaga

SEQ ID NO: 1399081 - RNA, 19 nt, Artificial Sequence
  Description of Artificial Sequence: Synthetic oligonucleotide
ccauagggguucggaugag

SEQ ID NO: 1399082 - RNA, 19 nt, Artificial Sequence
  Description of Artificial Sequence: Synthetic oligonucleotide
cccgauguuuggagugaga

SEQ ID NO: 1399083 - RNA, 19 nt, Artificial Sequence
  Description of Artificial Sequence: Synthetic oligonucleotide
ccgucgcaggaaggcauag

SEQ ID NO: 1399084 - RNA, 19 nt, Artificial Sequence
  Description of Artificial Sequence: Synthetic oligonucleotide
ccgcagggaugaaauccca

SEQ ID NO: 1399085 - RNA, 19 nt, Artificial Sequence
  Description of Artificial Sequence: Synthetic oligonucleotide
gcacaagcauagccucugu

SEQ ID NO: 1399086 - RNA, 19 nt, Artificial Sequence
  Description of Artificial Sequence: Synthetic oligonucleotide
cauagaccgcagggaugaa

SEQ ID NO: 1399087 - RNA, 19 nt, Artificial Sequence
  Description of Artificial Sequence: Synthetic oligonucleotide
gccagcuaugaguccccua

SEQ ID NO: 1399088 - RNA, 19 nt, Artificial Sequence
  Description of Artificial Sequence: Synthetic oligonucleotide
gccuuuuauuguggucaaa

SEQ ID NO: 1399089 - RNA, 19 nt, Artificial Sequence
  Description of Artificial Sequence: Synthetic oligonucleotide
ccguuggauaggacuugaa

SEQ ID NO: 1399090 - RNA, 19 nt, Artificial Sequence
  Description of Artificial Sequence: Synthetic oligonucleotide
gcccaacguugaaggucag

SEQ ID NO: 1399091 - RNA, 19 nt, Artificial Sequence
  Description of Artificial Sequence: Synthetic oligonucleotide
cccuaugguaccagagauu

SEQ ID NO: 1399092 - RNA, 19 nt, Artificial Sequence
  Description of Artificial Sequence: Synthetic oligonucleotide
cugugccguccuuggcagu

SEQ ID NO: 1399093 - RNA, 19 nt, Artificial Sequence
  Description of Artificial Sequence: Synthetic oligonucleotide
cgaaaacguuccguaggaa

SEQ ID NO: 1399094 - RNA, 19 nt, Artificial Sequence
  Description of Artificial Sequence: Synthetic oligonucleotide
cguugaaggucagugugau

SEQ ID NO: 1399095 - RNA, 19 nt, Artificial Sequence
  Description of Artificial Sequence: Synthetic oligonucleotide
cccgucgcaggaaggcaua

SEQ ID NO: 1399096 - RNA, 19 nt, Artificial Sequence
  Description of Artificial Sequence: Synthetic oligonucleotide
ggcuuccuauauacaucau

SEQ ID NO: 1399097 - RNA, 19 nt, Artificial Sequence
  Description of Artificial Sequence: Synthetic oligonucleotide
cgucgcaggaaggcauaga

SEQ ID NO: 1399098 - RNA, 19 nt, Artificial Sequence
  Description of Artificial Sequence: Synthetic oligonucleotide
ccaguucuaggaggaguuu

SEQ ID NO: 1399099 - RNA, 19 nt, Artificial Sequence
  Description of Artificial Sequence: Synthetic oligonucleotide
gggccacaucucccaccgu

SEQ ID NO: 1399100 - RNA, 19 nt, Artificial Sequence
  Description of Artificial Sequence: Synthetic oligonucleotide
cggaugaguucggccacau

SEQ ID NO: 1399101 - RNA, 19 nt, Artificial Sequence
  Description of Artificial Sequence: Synthetic oligonucleotide
aguuacuauaaauaggucc

SEQ ID NO: 1399102 - RNA, 19 nt, Artificial Sequence
  Description of Artificial Sequence: Synthetic oligonucleotide
agaaucauaauauuauuac

SEQ ID NO: 1399103 - RNA, 19 nt, Artificial Sequence
  Description of Artificial Sequence: Synthetic oligonucleotide
uguauaaacgccuaaaucu

SEQ ID NO: 1399104 - RNA, 19 nt, Artificial Sequence
  Description of Artificial Sequence: Synthetic oligonucleotide
aaguauucuacccuugggc

SEQ ID NO: 1399105 - RNA, 19 nt, Artificial Sequence
  Description of Artificial Sequence: Synthetic oligonucleotide
uccaauaauaaguuaauag

SEQ ID NO: 1399106 - RNA, 19 nt, Artificial Sequence
  Description of Artificial Sequence: Synthetic oligonucleotide
aaacaguuagauuugaagu

SEQ ID NO: 1399107 - RNA, 19 nt, Artificial Sequence
  Description of Artificial Sequence: Synthetic oligonucleotide
augaguguuaucuuuaaac

SEQ ID NO: 1399108 - RNA, 19 nt, Artificial Sequence
  Description of Artificial Sequence: Synthetic oligonucleotide
aauaucguccauugaagac

SEQ ID NO: 1399109 - RNA, 19 nt, Artificial Sequence
  Description of Artificial Sequence: Synthetic oligonucleotide
agaaauaucuuuugacugc

SEQ ID NO: 1399110 - RNA, 19 nt, Artificial Sequence
  Description of Artificial Sequence: Synthetic oligonucleotide
ugaguguuaucuuuaaacg

SEQ ID NO: 1399111 - RNA, 19 nt, Artificial Sequence
  Description of Artificial Sequence: Synthetic oligonucleotide
ucuauaauuaguucgucag

SEQ ID NO: 1399112 - RNA, 19 nt, Artificial Sequence
  Description of Artificial Sequence: Synthetic oligonucleotide
uaguucgucaggaauaucg

SEQ ID NO: 1399113 - RNA, 19 nt, Artificial Sequence
  Description of Artificial Sequence: Synthetic oligonucleotide
guaacagauuacuugaugg

SEQ ID NO: 1399114 - RNA, 19 nt, Artificial Sequence
  Description of Artificial Sequence: Synthetic oligonucleotide
ugcuucuauaauuaguucg

SEQ ID NO: 1399115 - RNA, 19 nt, Artificial Sequence
  Description of Artificial Sequence: Synthetic oligonucleotide
aauuugguuuguuacagug

SEQ ID NO: 1399116 - RNA, 19 nt, Artificial Sequence
  Description of Artificial Sequence: Synthetic oligonucleotide
uguuuauucaccaaagaaa

SEQ ID NO: 1399117 - RNA, 19 nt, Artificial Sequence
  Description of Artificial Sequence: Synthetic oligonucleotide
uguauaacuccucaagugc

SEQ ID NO: 1399118 - RNA, 19 nt, Artificial Sequence
  Description of Artificial Sequence: Synthetic oligonucleotide
uuugagaauucuuagucag

SEQ ID NO: 1399119 - RNA, 19 nt, Artificial Sequence
  Description of Artificial Sequence: Synthetic oligonucleotide
uugaugaucgauacagucg

SEQ ID NO: 1399120 - RNA, 19 nt, Artificial Sequence
  Description of Artificial Sequence: Synthetic oligonucleotide
aaauagguccaauaauaag

SEQ ID NO: 1399121 - RNA, 19 nt, Artificial Sequence
  Description of Artificial Sequence: Synthetic oligonucleotide
guuaauagaauuugguuug

SEQ ID NO: 1399122 - RNA, 19 nt, Artificial Sequence
  Description of Artificial Sequence: Synthetic oligonucleotide
uuuucucacaaaauuacca

SEQ ID NO: 1399123 - RNA, 19 nt, Artificial Sequence
  Description of Artificial Sequence: Synthetic oligonucleotide
aguguuaucuuuaaacgcc

SEQ ID NO: 1399124 - RNA, 19 nt, Artificial Sequence
  Description of Artificial Sequence: Synthetic oligonucleotide
aauguuuucacaccagcga

SEQ ID NO: 1399125 - RNA, 19 nt, Artificial Sequence
  Description of Artificial Sequence: Synthetic oligonucleotide
agccucauuauguaagucc

SEQ ID NO: 1399126 - RNA, 19 nt, Artificial Sequence
  Description of Artificial Sequence: Synthetic oligonucleotide
uuagaugucggcuaaauuu

SEQ ID NO: 1399127 - RNA, 19 nt, Artificial Sequence
  Description of Artificial Sequence: Synthetic oligonucleotide
aaacuaagugauaaaacag

SEQ ID NO: 1399128 - RNA, 19 nt, Artificial Sequence
  Description of Artificial Sequence: Synthetic oligonucleotide
uaaaccucaggcuucaggc

SEQ ID NO: 1399129 - RNA, 19 nt, Artificial Sequence
  Description of Artificial Sequence: Synthetic oligonucleotide
aguuaauagaauuugguuu

SEQ ID NO: 1399130 - RNA, 19 nt, Artificial Sequence
  Description of Artificial Sequence: Synthetic oligonucleotide
ugagaauucguaaaguguc

SEQ ID NO: 1399131 - RNA, 19 nt, Artificial Sequence
  Description of Artificial Sequence: Synthetic oligonucleotide
uucagaucaaccagaauca

SEQ ID NO: 1399132 - RNA, 19 nt, Artificial Sequence
  Description of Artificial Sequence: Synthetic oligonucleotide
ucaacuaucagcuggggaa

SEQ ID NO: 1399133 - RNA, 19 nt, Artificial Sequence
  Description of Artificial Sequence: Synthetic oligonucleotide
ugaugaucgauacagucga

SEQ ID NO: 1399134 - RNA, 19 nt, Artificial Sequence
  Description of Artificial Sequence: Synthetic oligonucleotide
gauaacauccucaacugag

SEQ ID NO: 1399135 - RNA, 19 nt, Artificial Sequence
  Description of Artificial Sequence: Synthetic oligonucleotide
ucauguuuauucaccaaag

SEQ ID NO: 1399136 - RNA, 19 nt, Artificial Sequence
  Description of Artificial Sequence: Synthetic oligonucleotide
uucgucaggaauaucgucc

SEQ ID NO: 1399137 - RNA, 19 nt, Artificial Sequence
  Description of Artificial Sequence: Synthetic oligonucleotide
aacaguuacuauaaauagg

SEQ ID NO: 1399138 - RNA, 19 nt, Artificial Sequence
  Description of Artificial Sequence: Synthetic oligonucleotide
uuccuaucuuugaugaucg

SEQ ID NO: 1399139 - RNA, 19 nt, Artificial Sequence
  Description of Artificial Sequence: Synthetic oligonucleotide
uaauuaagugaagagcagg

SEQ ID NO: 1399140 - RNA, 19 nt, Artificial Sequence
  Description of Artificial Sequence: Synthetic oligonucleotide
uugguaauuaagugaagag

SEQ ID NO: 1399141 - RNA, 19 nt, Artificial Sequence
  Description of Artificial Sequence: Synthetic oligonucleotide
gguaauggaaaacaguuag

SEQ ID NO: 1399142 - RNA, 19 nt, Artificial Sequence
  Description of Artificial Sequence: Synthetic oligonucleotide
ugauagguaaguauucuac

SEQ ID NO: 1399143 - RNA, 19 nt, Artificial Sequence
  Description of Artificial Sequence: Synthetic oligonucleotide
uuagucagugaguugcugg

SEQ ID NO: 1399144 - RNA, 19 nt, Artificial Sequence
  Description of Artificial Sequence: Synthetic oligonucleotide
uguaaugcuucuauaauua

SEQ ID NO: 1399145 - RNA, 19 nt, Artificial Sequence
  Description of Artificial Sequence: Synthetic oligonucleotide
ugugagaauucguaaagug

SEQ ID NO: 1399146 - RNA, 19 nt, Artificial Sequence
  Description of Artificial Sequence: Synthetic oligonucleotide
uauaauuaguucgucagga

SEQ ID NO: 1399147 - RNA, 19 nt, Artificial Sequence
  Description of Artificial Sequence: Synthetic oligonucleotide
uuuuaaugguacaucagaa

SEQ ID NO: 1399148 - RNA, 19 nt, Artificial Sequence
  Description of Artificial Sequence: Synthetic oligonucleotide
uaagugaagagcagguugc

SEQ ID NO: 1399149 - RNA, 19 nt, Artificial Sequence
  Description of Artificial Sequence: Synthetic oligonucleotide
aaguuaauagaauuugguu

SEQ ID NO: 1399150 - RNA, 19 nt, Artificial Sequence
  Description of Artificial Sequence: Synthetic oligonucleotide
gauagguaaguauucuacc

SEQ ID NO: 1399151 - RNA, 19 nt, Artificial Sequence
  Description of Artificial Sequence: Synthetic oligonucleotide
uuguuugaagcaagaacgg

SEQ ID NO: 1399152 - RNA, 19 nt, Artificial Sequence
  Description of Artificial Sequence: Synthetic oligonucleotide
uucuuagucagugaguugc

SEQ ID NO: 1399153 - RNA, 19 nt, Artificial Sequence
  Description of Artificial Sequence: Synthetic oligonucleotide
uuguauaacuccucaagug

SEQ ID NO: 1399154 - RNA, 19 nt, Artificial Sequence
  Description of Artificial Sequence: Synthetic oligonucleotide
aguuccaacgccgaauucc

SEQ ID NO: 1399155 - RNA, 19 nt, Artificial Sequence
  Description of Artificial Sequence: Synthetic oligonucleotide
aauaauaaguuaauagaau

SEQ ID NO: 1399156 - RNA, 19 nt, Artificial Sequence
  Description of Artificial Sequence: Synthetic oligonucleotide
uaaguauucuacccuuggg

SEQ ID NO: 1399157 - RNA, 19 nt, Artificial Sequence
  Description of Artificial Sequence: Synthetic oligonucleotide
gugaacauuguauaacucc

SEQ ID NO: 1399158 - RNA, 19 nt, Artificial Sequence
  Description of Artificial Sequence: Synthetic oligonucleotide
uucguaaagugucugaaaa

SEQ ID NO: 1399159 - RNA, 19 nt, Artificial Sequence
  Description of Artificial Sequence: Synthetic oligonucleotide
aaagaucagggauguauug

SEQ ID NO: 1399160 - RNA, 19 nt, Artificial Sequence
  Description of Artificial Sequence: Synthetic oligonucleotide
gaguguuaucuuuaaacgc

SEQ ID NO: 1399161 - RNA, 19 nt, Artificial Sequence
  Description of Artificial Sequence: Synthetic oligonucleotide
uggaauaaaucuguuaucu

SEQ ID NO: 1399162 - RNA, 19 nt, Artificial Sequence
  Description of Artificial Sequence: Synthetic oligonucleotide
ugaucgauacagucgaaag

SEQ ID NO: 1399163 - RNA, 19 nt, Artificial Sequence
  Description of Artificial Sequence: Synthetic oligonucleotide
cuacccuugggcuauagcc

SEQ ID NO: 1399164 - RNA, 19 nt, Artificial Sequence
  Description of Artificial Sequence: Synthetic oligonucleotide
cauuguauaacuccucaag

SEQ ID NO: 1399165 - RNA, 19 nt, Artificial Sequence
  Description of Artificial Sequence: Synthetic oligonucleotide
uuugaagcaagaacgguuc

SEQ ID NO: 1399166 - RNA, 19 nt, Artificial Sequence
  Description of Artificial Sequence: Synthetic oligonucleotide
aaagauuagaugucggcua

SEQ ID NO: 1399167 - RNA, 19 nt, Artificial Sequence
  Description of Artificial Sequence: Synthetic oligonucleotide
ucccauauuauucuucaca

SEQ ID NO: 1399168 - RNA, 19 nt, Artificial Sequence
  Description of Artificial Sequence: Synthetic oligonucleotide
uauuauuacuuuugugggc

SEQ ID NO: 1399169 - RNA, 19 nt, Artificial Sequence
  Description of Artificial Sequence: Synthetic oligonucleotide
aaaugguagccucauuaug

SEQ ID NO: 1399170 - RNA, 19 nt, Artificial Sequence
  Description of Artificial Sequence: Synthetic oligonucleotide
uuguauaaacgccuaaauc

SEQ ID NO: 1399171 - RNA, 19 nt, Artificial Sequence
  Description of Artificial Sequence: Synthetic oligonucleotide
ugguaauuaagugaagagc

SEQ ID NO: 1399172 - RNA, 19 nt, Artificial Sequence
  Description of Artificial Sequence: Synthetic oligonucleotide
auucaccaaagaaagaacg

SEQ ID NO: 1399173 - RNA, 19 nt, Artificial Sequence
  Description of Artificial Sequence: Synthetic oligonucleotide
aucuguuaucuucagcaac

SEQ ID NO: 1399174 - RNA, 19 nt, Artificial Sequence
  Description of Artificial Sequence: Synthetic oligonucleotide
aauaucuuuugacugcuuu

SEQ ID NO: 1399175 - RNA, 19 nt, Artificial Sequence
  Description of Artificial Sequence: Synthetic oligonucleotide
ugaaaaucugacauugcuc

SEQ ID NO: 1399176 - RNA, 19 nt, Artificial Sequence
  Description of Artificial Sequence: Synthetic oligonucleotide
uggguaauggaaaacaguu

SEQ ID NO: 1399177 - RNA, 19 nt, Artificial Sequence
  Description of Artificial Sequence: Synthetic oligonucleotide
aaugcagggcccuacacau

SEQ ID NO: 1399178 - RNA, 19 nt, Artificial Sequence
  Description of Artificial Sequence: Synthetic oligonucleotide
aaugaaagaucagggaugu

SEQ ID NO: 1399179 - RNA, 19 nt, Artificial Sequence
  Description of Artificial Sequence: Synthetic oligonucleotide
uccuugguaauuaagugaa

SEQ ID NO: 1399180 - RNA, 19 nt, Artificial Sequence
  Description of Artificial Sequence: Synthetic oligonucleotide
aacaggaaacuuugugguc

SEQ ID NO: 1399181 - RNA, 19 nt, Artificial Sequence
  Description of Artificial Sequence: Synthetic oligonucleotide
caauaauaaguuaauagaa

SEQ ID NO: 1399182 - RNA, 19 nt, Artificial Sequence
  Description of Artificial Sequence: Synthetic oligonucleotide
aacuaagugauaaaacagu

SEQ ID NO: 1399183 - RNA, 19 nt, Artificial Sequence
  Description of Artificial Sequence: Synthetic oligonucleotide
gaaagaacgagauguguca

SEQ ID NO: 1399184 - RNA, 19 nt, Artificial Sequence
  Description of Artificial Sequence: Synthetic oligonucleotide
ugagaauucuuagucagug

SEQ ID NO: 1399185 - RNA, 19 nt, Artificial Sequence
  Description of Artificial Sequence: Synthetic oligonucleotide
accaacaugaguguuaucu

SEQ ID NO: 1399186 - RNA, 19 nt, Artificial Sequence
  Description of Artificial Sequence: Synthetic oligonucleotide
agaauaaacuaagugauaa

SEQ ID NO: 1399187 - RNA, 19 nt, Artificial Sequence
  Description of Artificial Sequence: Synthetic oligonucleotide
ugaaguuuugugcuuuaca

SEQ ID NO: 1399188 - RNA, 19 nt, Artificial Sequence
  Description of Artificial Sequence: Synthetic oligonucleotide
aguauucuacccuugggcu

SEQ ID NO: 1399189 - RNA, 19 nt, Artificial Sequence
  Description of Artificial Sequence: Synthetic oligonucleotide
aauuaagugaagagcaggu

SEQ ID NO: 1399190 - RNA, 19 nt, Artificial Sequence
  Description of Artificial Sequence: Synthetic oligonucleotide
aaacgccacaucauggagc

SEQ ID NO: 1399191 - RNA, 19 nt, Artificial Sequence
  Description of Artificial Sequence: Synthetic oligonucleotide
aacagauuacuugauggug

SEQ ID NO: 1399192 - RNA, 19 nt, Artificial Sequence
  Description of Artificial Sequence: Synthetic oligonucleotide
uuuaaugguacaucagaaa

SEQ ID NO: 1399193 - RNA, 19 nt, Artificial Sequence
  Description of Artificial Sequence: Synthetic oligonucleotide
uucuauaauuaguucguca

SEQ ID NO: 1399194 - RNA, 19 nt, Artificial Sequence
  Description of Artificial Sequence: Synthetic oligonucleotide
aggaauaucguccauugaa

SEQ ID NO: 1399195 - RNA, 19 nt, Artificial Sequence
  Description of Artificial Sequence: Synthetic oligonucleotide
uauugcuuaggugaccccg

SEQ ID NO: 1399196 - RNA, 19 nt, Artificial Sequence
  Description of Artificial Sequence: Synthetic oligonucleotide
guuacuauaaauaggucca

SEQ ID NO: 1399197 - RNA, 19 nt, Artificial Sequence
  Description of Artificial Sequence: Synthetic oligonucleotide
ugcuuuggaauaaaucugu

SEQ ID NO: 1399198 - RNA, 19 nt, Artificial Sequence
  Description of Artificial Sequence: Synthetic oligonucleotide
ucuauuguuugaagcaaga

SEQ ID NO: 1399199 - RNA, 19 nt, Artificial Sequence
  Description of Artificial Sequence: Synthetic oligonucleotide
guaaguauucuacccuugg

SEQ ID NO: 1399200 - RNA, 19 nt, Artificial Sequence
  Description of Artificial Sequence: Synthetic oligonucleotide
cuauaauuaguucgucagg

SEQ ID NO: 1399201 - RNA, 19 nt, Artificial Sequence
  Description of Artificial Sequence: Synthetic oligonucleotide
uaauuaguucgucaggaau

SEQ ID NO: 1399202 - RNA, 19 nt, Artificial Sequence
  Description of Artificial Sequence: Synthetic oligonucleotide
ucauggagcugaaagauua

SEQ ID NO: 1399203 - RNA, 19 nt, Artificial Sequence
  Description of Artificial Sequence: Synthetic oligonucleotide
uuccuugguaauuaaguga

SEQ ID NO: 1399204 - RNA, 19 nt, Artificial Sequence
  Description of Artificial Sequence: Synthetic oligonucleotide
ggauguauugcuuagguga

SEQ ID NO: 1399205 - RNA, 19 nt, Artificial Sequence
  Description of Artificial Sequence: Synthetic oligonucleotide
ugaaagaucagggauguau

SEQ ID NO: 1399206 - RNA, 19 nt, Artificial Sequence
  Description of Artificial Sequence: Synthetic oligonucleotide
aacgccacaucauggagcu

SEQ ID NO: 1399207 - RNA, 19 nt, Artificial Sequence
  Description of Artificial Sequence: Synthetic oligonucleotide
gaaacuuuguggucuguug

SEQ ID NO: 1399208 - RNA, 19 nt, Artificial Sequence
  Description of Artificial Sequence: Synthetic oligonucleotide
caugugagaauucguaaag

SEQ ID NO: 1399209 - RNA, 19 nt, Artificial Sequence
  Description of Artificial Sequence: Synthetic oligonucleotide
aaacgccuaaaucuuacaa

SEQ ID NO: 1399210 - RNA, 19 nt, Artificial Sequence
  Description of Artificial Sequence: Synthetic oligonucleotide
aaguccuguccacaguuag

SEQ ID NO: 1399211 - RNA, 19 nt, Artificial Sequence
  Description of Artificial Sequence: Synthetic oligonucleotide
uuuauguccuaaaccucag

SEQ ID NO: 1399212 - RNA, 19 nt, Artificial Sequence
  Description of Artificial Sequence: Synthetic oligonucleotide
agaaagaacgagauguguc

SEQ ID NO: 1399213 - RNA, 19 nt, Artificial Sequence
  Description of Artificial Sequence: Synthetic oligonucleotide
aacgccuaaaucuuacaaa

SEQ ID NO: 1399214 - RNA, 19 nt, Artificial Sequence
  Description of Artificial Sequence: Synthetic oligonucleotide
ucuguaaugcuucuauaau

SEQ ID NO: 1399215 - RNA, 19 nt, Artificial Sequence
  Description of Artificial Sequence: Synthetic oligonucleotide
aagaacgguucugggagcc

SEQ ID NO: 1399216 - RNA, 19 nt, Artificial Sequence
  Description of Artificial Sequence: Synthetic oligonucleotide
uugauaccaaacuucauuu

SEQ ID NO: 1399217 - RNA, 19 nt, Artificial Sequence
  Description of Artificial Sequence: Synthetic oligonucleotide
uagguaaguauucuacccu

SEQ ID NO: 1399218 - RNA, 19 nt, Artificial Sequence
  Description of Artificial Sequence: Synthetic oligonucleotide
ucuaugaguaaugcaacca

SEQ ID NO: 1399219 - RNA, 19 nt, Artificial Sequence
  Description of Artificial Sequence: Synthetic oligonucleotide
uaaacgccacaucauggag

SEQ ID NO: 1399220 - RNA, 19 nt, Artificial Sequence
  Description of Artificial Sequence: Synthetic oligonucleotide
ugcuuuacauacaggguca

SEQ ID NO: 1399221 - RNA, 19 nt, Artificial Sequence
  Description of Artificial Sequence: Synthetic oligonucleotide
gucauggcacuuuugauac

SEQ ID NO: 1399222 - RNA, 19 nt, Artificial Sequence
  Description of Artificial Sequence: Synthetic oligonucleotide
aaaacaccugaaaaccauc

SEQ ID NO: 1399223 - RNA, 19 nt, Artificial Sequence
  Description of Artificial Sequence: Synthetic oligonucleotide
ucgccaauuuguuaaauuc

SEQ ID NO: 1399224 - RNA, 19 nt, Artificial Sequence
  Description of Artificial Sequence: Synthetic oligonucleotide
uuccaauguuuucacacca

SEQ ID NO: 1399225 - RNA, 19 nt, Artificial Sequence
  Description of Artificial Sequence: Synthetic oligonucleotide
gguaauuaagugaagagca

SEQ ID NO: 1399226 - RNA, 19 nt, Artificial Sequence
  Description of Artificial Sequence: Synthetic oligonucleotide
ggagacuuacuucaguggg

SEQ ID NO: 1399227 - RNA, 19 nt, Artificial Sequence
  Description of Artificial Sequence: Synthetic oligonucleotide
uuuaacauuuauguccuaa

SEQ ID NO: 1399228 - RNA, 19 nt, Artificial Sequence
  Description of Artificial Sequence: Synthetic oligonucleotide
uguccuaaaccucaggcuu

SEQ ID NO: 1399229 - RNA, 19 nt, Artificial Sequence
  Description of Artificial Sequence: Synthetic oligonucleotide
ugugcuuuacauacagggu

SEQ ID NO: 1399230 - RNA, 19 nt, Artificial Sequence
  Description of Artificial Sequence: Synthetic oligonucleotide
uaacagauuacuugauggu

SEQ ID NO: 1399231 - RNA, 19 nt, Artificial Sequence
  Description of Artificial Sequence: Synthetic oligonucleotide
acuauaaauagguccaaua

SEQ ID NO: 1399232 - RNA, 19 nt, Artificial Sequence
  Description of Artificial Sequence: Synthetic oligonucleotide
uuauguccuaaaccucagg

SEQ ID NO: 1399233 - RNA, 19 nt, Artificial Sequence
  Description of Artificial Sequence: Synthetic oligonucleotide
aauuaguucgucaggaaua

SEQ ID NO: 1399234 - RNA, 19 nt, Artificial Sequence
  Description of Artificial Sequence: Synthetic oligonucleotide
auaaacgccuaaaucuuac

SEQ ID NO: 1399235 - RNA, 19 nt, Artificial Sequence
  Description of Artificial Sequence: Synthetic oligonucleotide
aacuccucaagugcuuuac

SEQ ID NO: 1399236 - RNA, 19 nt, Artificial Sequence
  Description of Artificial Sequence: Synthetic oligonucleotide
agaagcaggcaucaucuug

SEQ ID NO: 1399237 - RNA, 19 nt, Artificial Sequence
  Description of Artificial Sequence: Synthetic oligonucleotide
aguugauaacauccucaac

SEQ ID NO: 1399238 - RNA, 19 nt, Artificial Sequence
  Description of Artificial Sequence: Synthetic oligonucleotide
cugaaagauuagaugucgg

SEQ ID NO: 1399239 - RNA, 19 nt, Artificial Sequence
  Description of Artificial Sequence: Synthetic oligonucleotide
gaauaucguccauugaaga

SEQ ID NO: 1399240 - RNA, 19 nt, Artificial Sequence
  Description of Artificial Sequence: Synthetic oligonucleotide
ucacaugugagaauucgua

SEQ ID NO: 1399241 - RNA, 19 nt, Artificial Sequence
  Description of Artificial Sequence: Synthetic oligonucleotide
aagauuagaugucggcuaa

SEQ ID NO: 1399242 - RNA, 19 nt, Artificial Sequence
  Description of Artificial Sequence: Synthetic oligonucleotide
uccaacgccgaauuccucc

SEQ ID NO: 1399243 - RNA, 19 nt, Artificial Sequence
  Description of Artificial Sequence: Synthetic oligonucleotide
cuaaaccucaggcuucagg

SEQ ID NO: 1399244 - RNA, 19 nt, Artificial Sequence
  Description of Artificial Sequence: Synthetic oligonucleotide
auuuauguccuaaaccuca

SEQ ID NO: 1399245 - RNA, 19 nt, Artificial Sequence
  Description of Artificial Sequence: Synthetic oligonucleotide
aauucguaaagugucugaa

SEQ ID NO: 1399246 - RNA, 19 nt, Artificial Sequence
  Description of Artificial Sequence: Synthetic oligonucleotide
uuacauacagggucauggc

SEQ ID NO: 1399247 - RNA, 19 nt, Artificial Sequence
  Description of Artificial Sequence: Synthetic oligonucleotide
guaaugcuucuauaauuag

SEQ ID NO: 1399248 - RNA, 19 nt, Artificial Sequence
  Description of Artificial Sequence: Synthetic oligonucleotide
gaagacaggaaauacuggu

SEQ ID NO: 1399249 - RNA, 19 nt, Artificial Sequence
  Description of Artificial Sequence: Synthetic oligonucleotide
cucuaugaguaaugcaacc

SEQ ID NO: 1399250 - RNA, 19 nt, Artificial Sequence
  Description of Artificial Sequence: Synthetic oligonucleotide
acgccuaaaucuuacaaaa

SEQ ID NO: 1399251 - RNA, 19 nt, Artificial Sequence
  Description of Artificial Sequence: Synthetic oligonucleotide
uuaaaugcagggcccuaca

SEQ ID NO: 1399252 - RNA, 19 nt, Artificial Sequence
  Description of Artificial Sequence: Synthetic oligonucleotide
acaccagcgauauuuacaa

SEQ ID NO: 1399253 - RNA, 19 nt, Artificial Sequence
  Description of Artificial Sequence: Synthetic oligonucleotide
gugcuuuacauacaggguc

SEQ ID NO: 1399254 - RNA, 19 nt, Artificial Sequence
  Description of Artificial Sequence: Synthetic oligonucleotide
cagauuacuugaugguggg

SEQ ID NO: 1399255 - RNA, 19 nt, Artificial Sequence
  Description of Artificial Sequence: Synthetic oligonucleotide
ccuaauuuaacauuuaugu

SEQ ID NO: 1399256 - RNA, 19 nt, Artificial Sequence
  Description of Artificial Sequence: Synthetic oligonucleotide
ugcagggcccuacacauga

SEQ ID NO: 1399257 - RNA, 19 nt, Artificial Sequence
  Description of Artificial Sequence: Synthetic oligonucleotide
uuauguaaguccuguccac

SEQ ID NO: 1399258 - RNA, 19 nt, Artificial Sequence
  Description of Artificial Sequence: Synthetic oligonucleotide
cauaaaccaguaauucuuc

SEQ ID NO: 1399259 - RNA, 19 nt, Artificial Sequence
  Description of Artificial Sequence: Synthetic oligonucleotide
aagaacgagaugugucaca

SEQ ID NO: 1399260 - RNA, 19 nt, Artificial Sequence
  Description of Artificial Sequence: Synthetic oligonucleotide
cucuauuguuugaagcaag

SEQ ID NO: 1399261 - RNA, 19 nt, Artificial Sequence
  Description of Artificial Sequence: Synthetic oligonucleotide
ugugucacaugugagaauu

SEQ ID NO: 1399262 - RNA, 19 nt, Artificial Sequence
  Description of Artificial Sequence: Synthetic oligonucleotide
aacuaucagcuggggaagc

SEQ ID NO: 1399263 - RNA, 19 nt, Artificial Sequence
  Description of Artificial Sequence: Synthetic oligonucleotide
acacaugauagguaaguau

SEQ ID NO: 1399264 - RNA, 19 nt, Artificial Sequence
  Description of Artificial Sequence: Synthetic oligonucleotide
cagcucuauuguuugaagc

SEQ ID NO: 1399265 - RNA, 19 nt, Artificial Sequence
  Description of Artificial Sequence: Synthetic oligonucleotide
aguaaugcaaccaucuuuu

SEQ ID NO: 1399266 - RNA, 19 nt, Artificial Sequence
  Description of Artificial Sequence: Synthetic oligonucleotide
uauaaacgccuaaaucuua

SEQ ID NO: 1399267 - RNA, 19 nt, Artificial Sequence
  Description of Artificial Sequence: Synthetic oligonucleotide
caggagacuuacuucagug

SEQ ID NO: 1399268 - RNA, 19 nt, Artificial Sequence
  Description of Artificial Sequence: Synthetic oligonucleotide
guaauuaagugaagagcag

SEQ ID NO: 1399269 - RNA, 19 nt, Artificial Sequence
  Description of Artificial Sequence: Synthetic oligonucleotide
aaaccucaggcuucaggca

SEQ ID NO: 1399270 - RNA, 19 nt, Artificial Sequence
  Description of Artificial Sequence: Synthetic oligonucleotide
uaucguccauugaagacuc

SEQ ID NO: 1399271 - RNA, 19 nt, Artificial Sequence
  Description of Artificial Sequence: Synthetic oligonucleotide
aucgauacagucgaaaguu

SEQ ID NO: 1399272 - RNA, 19 nt, Artificial Sequence
  Description of Artificial Sequence: Synthetic oligonucleotide
agcgaauucagcaucuucu

SEQ ID NO: 1399273 - RNA, 19 nt, Artificial Sequence
  Description of Artificial Sequence: Synthetic oligonucleotide
auguccuaaaccucaggcu

SEQ ID NO: 1399274 - RNA, 19 nt, Artificial Sequence
  Description of Artificial Sequence: Synthetic oligonucleotide
caugcucuaugaguaaugc

SEQ ID NO: 1399275 - RNA, 19 nt, Artificial Sequence
  Description of Artificial Sequence: Synthetic oligonucleotide
gaauucguaaagugucuga

SEQ ID NO: 1399276 - RNA, 19 nt, Artificial Sequence
  Description of Artificial Sequence: Synthetic oligonucleotide
uguuaucuuuaaacgccac

SEQ ID NO: 1399277 - RNA, 19 nt, Artificial Sequence
  Description of Artificial Sequence: Synthetic oligonucleotide
gauguauugcuuaggugac

SEQ ID NO: 1399278 - RNA, 19 nt, Artificial Sequence
  Description of Artificial Sequence: Synthetic oligonucleotide
cuugguaauuaagugaaga

SEQ ID NO: 1399279 - RNA, 19 nt, Artificial Sequence
  Description of Artificial Sequence: Synthetic oligonucleotide
uaaaugcagggcccuacac

SEQ ID NO: 1399280 - RNA, 19 nt, Artificial Sequence
  Description of Artificial Sequence: Synthetic oligonucleotide
agugaacauuguauaacuc

SEQ ID NO: 1399281 - RNA, 19 nt, Artificial Sequence
  Description of Artificial Sequence: Synthetic oligonucleotide
uauguaaguccuguccaca

SEQ ID NO: 1399282 - RNA, 19 nt, Artificial Sequence
  Description of Artificial Sequence: Synthetic oligonucleotide
uacagucgaaaguuucugu

SEQ ID NO: 1399283 - RNA, 19 nt, Artificial Sequence
  Description of Artificial Sequence: Synthetic oligonucleotide
auaauuaguucgucaggaa

SEQ ID NO: 1399284 - RNA, 19 nt, Artificial Sequence
  Description of Artificial Sequence: Synthetic oligonucleotide
ucgucaggaauaucgucca

SEQ ID NO: 1399285 - RNA, 19 nt, Artificial Sequence
  Description of Artificial Sequence: Synthetic oligonucleotide
uaaacgccuaaaucuuaca

SEQ ID NO: 1399286 - RNA, 19 nt, Artificial Sequence
  Description of Artificial Sequence: Synthetic oligonucleotide
aguaauucuucugggaaaa

SEQ ID NO: 1399287 - RNA, 19 nt, Artificial Sequence
  Description of Artificial Sequence: Synthetic oligonucleotide
accaguaauucuucuggga

SEQ ID NO: 1399288 - RNA, 19 nt, Artificial Sequence
  Description of Artificial Sequence: Synthetic oligonucleotide
gaaagauuagaugucggcu

SEQ ID NO: 1399289 - RNA, 19 nt, Artificial Sequence
  Description of Artificial Sequence: Synthetic oligonucleotide
agguccaauaauaaguuaa

SEQ ID NO: 1399290 - RNA, 19 nt, Artificial Sequence
  Description of Artificial Sequence: Synthetic oligonucleotide
uguuugaagcaagaacggu

SEQ ID NO: 1399291 - RNA, 19 nt, Artificial Sequence
  Description of Artificial Sequence: Synthetic oligonucleotide
aucaacuaucagcugggga

SEQ ID NO: 1399292 - RNA, 19 nt, Artificial Sequence
  Description of Artificial Sequence: Synthetic oligonucleotide
agccacuacauuuuccuau

SEQ ID NO: 1399293 - RNA, 19 nt, Artificial Sequence
  Description of Artificial Sequence: Synthetic oligonucleotide
agaauucguaaagugucug

SEQ ID NO: 1399294 - RNA, 19 nt, Artificial Sequence
  Description of Artificial Sequence: Synthetic oligonucleotide
cucuguaaugcuucuauaa

SEQ ID NO: 1399295 - RNA, 19 nt, Artificial Sequence
  Description of Artificial Sequence: Synthetic oligonucleotide
ucaucuagccuuccagcuc

SEQ ID NO: 1399296 - RNA, 19 nt, Artificial Sequence
  Description of Artificial Sequence: Synthetic oligonucleotide
ggaauaucguccauugaag

SEQ ID NO: 1399297 - RNA, 19 nt, Artificial Sequence
  Description of Artificial Sequence: Synthetic oligonucleotide
agcagugaacauuguauaa

SEQ ID NO: 1399298 - RNA, 19 nt, Artificial Sequence
  Description of Artificial Sequence: Synthetic oligonucleotide
acagucgaaaguuucuguu

SEQ ID NO: 1399299 - RNA, 19 nt, Artificial Sequence
  Description of Artificial Sequence: Synthetic oligonucleotide
uuaauagaauuugguuugu

SEQ ID NO: 1399300 - RNA, 19 nt, Artificial Sequence
  Description of Artificial Sequence: Synthetic oligonucleotide
ucuacccuugggcuauagc

SEQ ID NO: 1399301 - RNA, 19 nt, Artificial Sequence
  Description of Artificial Sequence: Synthetic oligonucleotide
aaaguaguuccaacgccga

SEQ ID NO: 1399302 - RNA, 19 nt, Artificial Sequence
  Description of Artificial Sequence: Synthetic oligonucleotide
agugaguugcugguuucac

SEQ ID NO: 1399303 - RNA, 19 nt, Artificial Sequence
  Description of Artificial Sequence: Synthetic oligonucleotide
auacagucgaaaguuucug

SEQ ID NO: 1399304 - RNA, 19 nt, Artificial Sequence
  Description of Artificial Sequence: Synthetic oligonucleotide
auucguaaagugucugaaa

SEQ ID NO: 1399305 - RNA, 19 nt, Artificial Sequence
  Description of Artificial Sequence: Synthetic oligonucleotide
acuaagugauaaaacaguu

SEQ ID NO: 1399306 - RNA, 19 nt, Artificial Sequence
  Description of Artificial Sequence: Synthetic oligonucleotide
ucuuagucagugaguugcu

SEQ ID NO: 1399307 - RNA, 19 nt, Artificial Sequence
  Description of Artificial Sequence: Synthetic oligonucleotide
augauagguaaguauucua

SEQ ID NO: 1399308 - RNA, 19 nt, Artificial Sequence
  Description of Artificial Sequence: Synthetic oligonucleotide
auuacuugaugguggguuu

SEQ ID NO: 1399309 - RNA, 19 nt, Artificial Sequence
  Description of Artificial Sequence: Synthetic oligonucleotide
auucuuagucagugaguug

SEQ ID NO: 1399310 - RNA, 19 nt, Artificial Sequence
  Description of Artificial Sequence: Synthetic oligonucleotide
uauuacuuuugugggcucu

SEQ ID NO: 1399311 - RNA, 19 nt, Artificial Sequence
  Description of Artificial Sequence: Synthetic oligonucleotide
aacaugcucuaugaguaau

SEQ ID NO: 1399312 - RNA, 19 nt, Artificial Sequence
  Description of Artificial Sequence: Synthetic oligonucleotide
uugaagcaagaacgguucu

SEQ ID NO: 1399313 - RNA, 19 nt, Artificial Sequence
  Description of Artificial Sequence: Synthetic oligonucleotide
auuagaugucggcuaaauu

SEQ ID NO: 1399314 - RNA, 19 nt, Artificial Sequence
  Description of Artificial Sequence: Synthetic oligonucleotide
uucgccaauuuguuaaauu

SEQ ID NO: 1399315 - RNA, 19 nt, Artificial Sequence
  Description of Artificial Sequence: Synthetic oligonucleotide
aggagugaacuccuccucu

SEQ ID NO: 1399316 - RNA, 19 nt, Artificial Sequence
  Description of Artificial Sequence: Synthetic oligonucleotide
ggauucgccaauuuguuaa

SEQ ID NO: 1399317 - RNA, 19 nt, Artificial Sequence
  Description of Artificial Sequence: Synthetic oligonucleotide
cuaagugauaaaacaguua

SEQ ID NO: 1399318 - RNA, 19 nt, Artificial Sequence
  Description of Artificial Sequence: Synthetic oligonucleotide
auuaguucgucaggaauau

SEQ ID NO: 1399319 - RNA, 19 nt, Artificial Sequence
  Description of Artificial Sequence: Synthetic oligonucleotide
acauuguauaacuccucaa

SEQ ID NO: 1399320 - RNA, 19 nt, Artificial Sequence
  Description of Artificial Sequence: Synthetic oligonucleotide
gaucgauacagucgaaagu

SEQ ID NO: 1399321 - RNA, 19 nt, Artificial Sequence
  Description of Artificial Sequence: Synthetic oligonucleotide
agguaaguauucuacccuu

SEQ ID NO: 1399322 - RNA, 19 nt, Artificial Sequence
  Description of Artificial Sequence: Synthetic oligonucleotide
ugauaccaaacuucauuuu

SEQ ID NO: 1399323 - RNA, 19 nt, Artificial Sequence
  Description of Artificial Sequence: Synthetic oligonucleotide
aucuuaucgucaucuuccu

SEQ ID NO: 1399324 - RNA, 19 nt, Artificial Sequence
  Description of Artificial Sequence: Synthetic oligonucleotide
auagguccaauaauaaguu

SEQ ID NO: 1399325 - RNA, 19 nt, Artificial Sequence
  Description of Artificial Sequence: Synthetic oligonucleotide
acaggagacuuacuucagu

SEQ ID NO: 1399326 - RNA, 19 nt, Artificial Sequence
  Description of Artificial Sequence: Synthetic oligonucleotide
aguaguuccaacgccgaau

SEQ ID NO: 1399327 - RNA, 19 nt, Artificial Sequence
  Description of Artificial Sequence: Synthetic oligonucleotide
caucagcgaauucagcauc

SEQ ID NO: 1399328 - RNA, 19 nt, Artificial Sequence
  Description of Artificial Sequence: Synthetic oligonucleotide
cuuuugacugcuuuggaau

SEQ ID NO: 1399329 - RNA, 19 nt, Artificial Sequence
  Description of Artificial Sequence: Synthetic oligonucleotide
caccugaaaaccaucaacu

SEQ ID NO: 1399330 - RNA, 19 nt, Artificial Sequence
  Description of Artificial Sequence: Synthetic oligonucleotide
ucguccauugaagacuccu

SEQ ID NO: 1399331 - RNA, 19 nt, Artificial Sequence
  Description of Artificial Sequence: Synthetic oligonucleotide
agcaucagaaaaggcuguc

SEQ ID NO: 1399332 - RNA, 19 nt, Artificial Sequence
  Description of Artificial Sequence: Synthetic oligonucleotide
cugaaaaucugacauugcu

SEQ ID NO: 1399333 - RNA, 19 nt, Artificial Sequence
  Description of Artificial Sequence: Synthetic oligonucleotide
cugucugguaacagauuac

SEQ ID NO: 1399334 - RNA, 19 nt, Artificial Sequence
  Description of Artificial Sequence: Synthetic oligonucleotide
gaaauaucuuuugacugcu

SEQ ID NO: 1399335 - RNA, 19 nt, Artificial Sequence
  Description of Artificial Sequence: Synthetic oligonucleotide
augcucuaugaguaaugca

SEQ ID NO: 1399336 - RNA, 19 nt, Artificial Sequence
  Description of Artificial Sequence: Synthetic oligonucleotide
aaguaguuccaacgccgaa

SEQ ID NO: 1399337 - RNA, 19 nt, Artificial Sequence
  Description of Artificial Sequence: Synthetic oligonucleotide
aacgccgaauuccuccuuu

SEQ ID NO: 1399338 - RNA, 19 nt, Artificial Sequence
  Description of Artificial Sequence: Synthetic oligonucleotide
augugagaauucguaaagu

SEQ ID NO: 1399339 - RNA, 19 nt, Artificial Sequence
  Description of Artificial Sequence: Synthetic oligonucleotide
aguuagauuugaaguuuug

SEQ ID NO: 1399340 - RNA, 19 nt, Artificial Sequence
  Description of Artificial Sequence: Synthetic oligonucleotide
uuuuccuaucuuugaugau

SEQ ID NO: 1399341 - RNA, 19 nt, Artificial Sequence
  Description of Artificial Sequence: Synthetic oligonucleotide
gcaaaugguagccucauua

SEQ ID NO: 1399342 - RNA, 19 nt, Artificial Sequence
  Description of Artificial Sequence: Synthetic oligonucleotide
caacuaucagcuggggaag

SEQ ID NO: 1399343 - RNA, 19 nt, Artificial Sequence
  Description of Artificial Sequence: Synthetic oligonucleotide
uacacaugauagguaagua

SEQ ID NO: 1399344 - RNA, 19 nt, Artificial Sequence
  Description of Artificial Sequence: Synthetic oligonucleotide
cuucagcaaccuccaaagc

SEQ ID NO: 1399345 - RNA, 19 nt, Artificial Sequence
  Description of Artificial Sequence: Synthetic oligonucleotide
uuauuacuuuugugggcuc

SEQ ID NO: 1399346 - RNA, 19 nt, Artificial Sequence
  Description of Artificial Sequence: Synthetic oligonucleotide
gauacagucgaaaguuucu

SEQ ID NO: 1399347 - RNA, 19 nt, Artificial Sequence
  Description of Artificial Sequence: Synthetic oligonucleotide
cucccaggucucuaaaauc

SEQ ID NO: 1399348 - RNA, 19 nt, Artificial Sequence
  Description of Artificial Sequence: Synthetic oligonucleotide
cuuuguggucuguugccuc

SEQ ID NO: 1399349 - RNA, 19 nt, Artificial Sequence
  Description of Artificial Sequence: Synthetic oligonucleotide
cacaugugagaauucguaa

SEQ ID NO: 1399350 - RNA, 19 nt, Artificial Sequence
  Description of Artificial Sequence: Synthetic oligonucleotide
guaauggaaaacaguuaga

SEQ ID NO: 1399351 - RNA, 19 nt, Artificial Sequence
  Description of Artificial Sequence: Synthetic oligonucleotide
uugcuuaggugaccccggc

SEQ ID NO: 1399352 - RNA, 19 nt, Artificial Sequence
  Description of Artificial Sequence: Synthetic oligonucleotide
ucgauacagucgaaaguuu

SEQ ID NO: 1399353 - RNA, 19 nt, Artificial Sequence
  Description of Artificial Sequence: Synthetic oligonucleotide
cacaugauagguaaguauu

SEQ ID NO: 1399354 - RNA, 19 nt, Artificial Sequence
  Description of Artificial Sequence: Synthetic oligonucleotide
guucgucaggaauaucguc

SEQ ID NO: 1399355 - RNA, 19 nt, Artificial Sequence
  Description of Artificial Sequence: Synthetic oligonucleotide
gaaaacaguuagauuugaa

SEQ ID NO: 1399356 - RNA, 19 nt, Artificial Sequence
  Description of Artificial Sequence: Synthetic oligonucleotide
aagugaagagcagguugca

SEQ ID NO: 1399357 - RNA, 19 nt, Artificial Sequence
  Description of Artificial Sequence: Synthetic oligonucleotide
uagguccaauaauaaguua

SEQ ID NO: 1399358 - RNA, 19 nt, Artificial Sequence
  Description of Artificial Sequence: Synthetic oligonucleotide
uggcacuuuugauaccaaa

SEQ ID NO: 1399359 - RNA, 19 nt, Artificial Sequence
  Description of Artificial Sequence: Synthetic oligonucleotide
uggauucgccaauuuguua

SEQ ID NO: 1399360 - RNA, 19 nt, Artificial Sequence
  Description of Artificial Sequence: Synthetic oligonucleotide
guuagauuugaaguuuugu

SEQ ID NO: 1399361 - RNA, 19 nt, Artificial Sequence
  Description of Artificial Sequence: Synthetic oligonucleotide
uacuugaugguggguuuug

SEQ ID NO: 1399362 - RNA, 19 nt, Artificial Sequence
  Description of Artificial Sequence: Synthetic oligonucleotide
cagugaacauuguauaacu

SEQ ID NO: 1399363 - RNA, 19 nt, Artificial Sequence
  Description of Artificial Sequence: Synthetic oligonucleotide
auuaagugaagagcagguu

SEQ ID NO: 1399364 - RNA, 19 nt, Artificial Sequence
  Description of Artificial Sequence: Synthetic oligonucleotide
cuucuauaauuaguucguc

SEQ ID NO: 1399365 - RNA, 19 nt, Artificial Sequence
  Description of Artificial Sequence: Synthetic oligonucleotide
aagccacuacauuuuccua

SEQ ID NO: 1399366 - RNA, 19 nt, Artificial Sequence
  Description of Artificial Sequence: Synthetic oligonucleotide
uccuaaaccucaggcuuca

SEQ ID NO: 1399367 - RNA, 19 nt, Artificial Sequence
  Description of Artificial Sequence: Synthetic oligonucleotide
gcaggaaugagaauaaacu

SEQ ID NO: 1399368 - RNA, 19 nt, Artificial Sequence
  Description of Artificial Sequence: Synthetic oligonucleotide
aguucgucaggaauaucgu

SEQ ID NO: 1399369 - RNA, 19 nt, Artificial Sequence
  Description of Artificial Sequence: Synthetic oligonucleotide
augaucgauacagucgaaa

SEQ ID NO: 1399370 - RNA, 19 nt, Artificial Sequence
  Description of Artificial Sequence: Synthetic oligonucleotide
cuuguauaaacgccuaaau

SEQ ID NO: 1399371 - RNA, 19 nt, Artificial Sequence
  Description of Artificial Sequence: Synthetic oligonucleotide
ugggcucuuccaauguuuu

SEQ ID NO: 1399372 - RNA, 19 nt, Artificial Sequence
  Description of Artificial Sequence: Synthetic oligonucleotide
gauucgccaauuuguuaaa

SEQ ID NO: 1399373 - RNA, 19 nt, Artificial Sequence
  Description of Artificial Sequence: Synthetic oligonucleotide
acaugcucuaugaguaaug

SEQ ID NO: 1399374 - RNA, 19 nt, Artificial Sequence
  Description of Artificial Sequence: Synthetic oligonucleotide
ggucauggcacuuuugaua

SEQ ID NO: 1399375 - RNA, 19 nt, Artificial Sequence
  Description of Artificial Sequence: Synthetic oligonucleotide
caguggguaauggaaaaca

SEQ ID NO: 1399376 - RNA, 19 nt, Artificial Sequence
  Description of Artificial Sequence: Synthetic oligonucleotide
ucauggcacuuuugauacc

SEQ ID NO: 1399377 - RNA, 19 nt, Artificial Sequence
  Description of Artificial Sequence: Synthetic oligonucleotide
ugcuuaggugaccccggcu

SEQ ID NO: 1399378 - RNA, 19 nt, Artificial Sequence
  Description of Artificial Sequence: Synthetic oligonucleotide
cuuaggugaccccggcuuc

SEQ ID NO: 1399379 - RNA, 19 nt, Artificial Sequence
  Description of Artificial Sequence: Synthetic oligonucleotide
ugugggcucuuccaauguu

SEQ ID NO: 1399380 - RNA, 19 nt, Artificial Sequence
  Description of Artificial Sequence: Synthetic oligonucleotide
guauugcuuaggugacccc

SEQ ID NO: 1399381 - RNA, 19 nt, Artificial Sequence
  Description of Artificial Sequence: Synthetic oligonucleotide
cuuagucagugaguugcug

SEQ ID NO: 1399382 - RNA, 19 nt, Artificial Sequence
  Description of Artificial Sequence: Synthetic oligonucleotide
gggauguauugcuuaggug

SEQ ID NO: 1399383 - RNA, 19 nt, Artificial Sequence
  Description of Artificial Sequence: Synthetic oligonucleotide
agacuuacuucagugggua

SEQ ID NO: 1399384 - RNA, 19 nt, Artificial Sequence
  Description of Artificial Sequence: Synthetic oligonucleotide
gcgaauucagcaucuucug

SEQ ID NO: 1399385 - RNA, 19 nt, Artificial Sequence
  Description of Artificial Sequence: Synthetic oligonucleotide
cguaaagugucugaaaauc

SEQ ID NO: 1399386 - RNA, 19 nt, Artificial Sequence
  Description of Artificial Sequence: Synthetic oligonucleotide
ucuuaucgucaucuuccuu

SEQ ID NO: 1399387 - RNA, 19 nt, Artificial Sequence
  Description of Artificial Sequence: Synthetic oligonucleotide
ucagaucaaccagaaucau

SEQ ID NO: 1399388 - RNA, 19 nt, Artificial Sequence
  Description of Artificial Sequence: Synthetic oligonucleotide
uaauagaauuugguuuguu

SEQ ID NO: 1399389 - RNA, 19 nt, Artificial Sequence
  Description of Artificial Sequence: Synthetic oligonucleotide
acuccucaagugcuuuaca

SEQ ID NO: 1399390 - RNA, 19 nt, Artificial Sequence
  Description of Artificial Sequence: Synthetic oligonucleotide
caucaacuaucagcugggg

SEQ ID NO: 1399391 - RNA, 19 nt, Artificial Sequence
  Description of Artificial Sequence: Synthetic oligonucleotide
guauaacuccucaagugcu

SEQ ID NO: 1399392 - RNA, 19 nt, Artificial Sequence
  Description of Artificial Sequence: Synthetic oligonucleotide
guauucuacccuugggcua

SEQ ID NO: 1399393 - RNA, 19 nt, Artificial Sequence
  Description of Artificial Sequence: Synthetic oligonucleotide
aucagcgaauucagcaucu

SEQ ID NO: 1399394 - RNA, 19 nt, Artificial Sequence
  Description of Artificial Sequence: Synthetic oligonucleotide
ugguggguuuugagaauuc

SEQ ID NO: 1399395 - RNA, 19 nt, Artificial Sequence
  Description of Artificial Sequence: Synthetic oligonucleotide
cuguaaugcuucuauaauu

SEQ ID NO: 1399396 - RNA, 19 nt, Artificial Sequence
  Description of Artificial Sequence: Synthetic oligonucleotide
cagcgaauucagcaucuuc

SEQ ID NO: 1399397 - RNA, 19 nt, Artificial Sequence
  Description of Artificial Sequence: Synthetic oligonucleotide
ccauauuauucuucacaac

SEQ ID NO: 1399398 - RNA, 19 nt, Artificial Sequence
  Description of Artificial Sequence: Synthetic oligonucleotide
cuaugaguaaugcaaccau

SEQ ID NO: 1399399 - RNA, 19 nt, Artificial Sequence
  Description of Artificial Sequence: Synthetic oligonucleotide
uuacagugcugggaauuaa

SEQ ID NO: 1399400 - RNA, 19 nt, Artificial Sequence
  Description of Artificial Sequence: Synthetic oligonucleotide
gagaauucguaaagugucu

SEQ ID NO: 1399401 - RNA, 19 nt, Artificial Sequence
  Description of Artificial Sequence: Synthetic oligonucleotide
ucuaagaagcaggcaucau

SEQ ID NO: 1399402 - RNA, 19 nt, Artificial Sequence
  Description of Artificial Sequence: Synthetic oligonucleotide
gggcccuacacaugauagg

SEQ ID NO: 1399403 - RNA, 19 nt, Artificial Sequence
  Description of Artificial Sequence: Synthetic oligonucleotide
uaguuccaacgccgaauuc

SEQ ID NO: 1399404 - RNA, 19 nt, Artificial Sequence
  Description of Artificial Sequence: Synthetic oligonucleotide
guuugaagcaagaacgguu

SEQ ID NO: 1399405 - RNA, 19 nt, Artificial Sequence
  Description of Artificial Sequence: Synthetic oligonucleotide
gauuagaugucggcuaaau

SEQ ID NO: 1399406 - RNA, 19 nt, Artificial Sequence
  Description of Artificial Sequence: Synthetic oligonucleotide
guauaaacgccuaaaucuu

SEQ ID NO: 1399407 - RNA, 19 nt, Artificial Sequence
  Description of Artificial Sequence: Synthetic oligonucleotide
cucaucuagccuuccagcu

SEQ ID NO: 1399408 - RNA, 19 nt, Artificial Sequence
  Description of Artificial Sequence: Synthetic oligonucleotide
ggucucuaaaaucucuugu

SEQ ID NO: 1399409 - RNA, 19 nt, Artificial Sequence
  Description of Artificial Sequence: Synthetic oligonucleotide
cauccucaacugagcagug

SEQ ID NO: 1399410 - RNA, 19 nt, Artificial Sequence
  Description of Artificial Sequence: Synthetic oligonucleotide
aaauaucuuuugacugcuu

SEQ ID NO: 1399411 - RNA, 19 nt, Artificial Sequence
  Description of Artificial Sequence: Synthetic oligonucleotide
uuacuugaugguggguuuu

SEQ ID NO: 1399412 - RNA, 19 nt, Artificial Sequence
  Description of Artificial Sequence: Synthetic oligonucleotide
cuacacaugauagguaagu

SEQ ID NO: 1399413 - RNA, 19 nt, Artificial Sequence
  Description of Artificial Sequence: Synthetic oligonucleotide
caucuagccuuccagcucu

SEQ ID NO: 1399414 - RNA, 19 nt, Artificial Sequence
  Description of Artificial Sequence: Synthetic oligonucleotide
cagaucaaccagaaucaua

SEQ ID NO: 1399415 - RNA, 19 nt, Artificial Sequence
  Description of Artificial Sequence: Synthetic oligonucleotide
caaaugguagccucauuau

SEQ ID NO: 1399416 - RNA, 19 nt, Artificial Sequence
  Description of Artificial Sequence: Synthetic oligonucleotide
caugauagguaaguauucu

SEQ ID NO: 1399417 - RNA, 19 nt, Artificial Sequence
  Description of Artificial Sequence: Synthetic oligonucleotide
caugaguguuaucuuuaaa

SEQ ID NO: 1399418 - RNA, 19 nt, Artificial Sequence
  Description of Artificial Sequence: Synthetic oligonucleotide
ccagcucuauuguuugaag

SEQ ID NO: 1399419 - RNA, 19 nt, Artificial Sequence
  Description of Artificial Sequence: Synthetic oligonucleotide
uagccucauuauguaaguc

SEQ ID NO: 1399420 - RNA, 19 nt, Artificial Sequence
  Description of Artificial Sequence: Synthetic oligonucleotide
guuuugugcuuuacauaca

SEQ ID NO: 1399421 - RNA, 19 nt, Artificial Sequence
  Description of Artificial Sequence: Synthetic oligonucleotide
ccaguaauucuucugggaa

SEQ ID NO: 1399422 - RNA, 19 nt, Artificial Sequence
  Description of Artificial Sequence: Synthetic oligonucleotide
agauuacuugauggugggu

SEQ ID NO: 1399423 - RNA, 19 nt, Artificial Sequence
  Description of Artificial Sequence: Synthetic oligonucleotide
cuggaaucuuaucgucauc

SEQ ID NO: 1399424 - RNA, 19 nt, Artificial Sequence
  Description of Artificial Sequence: Synthetic oligonucleotide
gacuuacuucaguggguaa

SEQ ID NO: 1399425 - RNA, 19 nt, Artificial Sequence
  Description of Artificial Sequence: Synthetic oligonucleotide
ggaaaacaguuagauuuga

SEQ ID NO: 1399426 - RNA, 19 nt, Artificial Sequence
  Description of Artificial Sequence: Synthetic oligonucleotide
guaguuccaacgccgaauu

SEQ ID NO: 1399427 - RNA, 19 nt, Artificial Sequence
  Description of Artificial Sequence: Synthetic oligonucleotide
uucuacccuugggcuauag

SEQ ID NO: 1399428 - RNA, 19 nt, Artificial Sequence
  Description of Artificial Sequence: Synthetic oligonucleotide
guuacagugcugggaauua

SEQ ID NO: 1399429 - RNA, 19 nt, Artificial Sequence
  Description of Artificial Sequence: Synthetic oligonucleotide
uuaguucgucaggaauauc

SEQ ID NO: 1399430 - RNA, 19 nt, Artificial Sequence
  Description of Artificial Sequence: Synthetic oligonucleotide
auucgccaauuuguuaaau

SEQ ID NO: 1399431 - RNA, 19 nt, Artificial Sequence
  Description of Artificial Sequence: Synthetic oligonucleotide
uuccaacgccgaauuccuc

SEQ ID NO: 1399432 - RNA, 19 nt, Artificial Sequence
  Description of Artificial Sequence: Synthetic oligonucleotide
gagacuuacuucagugggu

SEQ ID NO: 1399433 - RNA, 19 nt, Artificial Sequence
  Description of Artificial Sequence: Synthetic oligonucleotide
guccuaaaccucaggcuuc

SEQ ID NO: 1399434 - RNA, 19 nt, Artificial Sequence
  Description of Artificial Sequence: Synthetic oligonucleotide
cccuacacaugauagguaa

SEQ ID NO: 1399435 - RNA, 19 nt, Artificial Sequence
  Description of Artificial Sequence: Synthetic oligonucleotide
guggguaauggaaaacagu

SEQ ID NO: 1399436 - RNA, 19 nt, Artificial Sequence
  Description of Artificial Sequence: Synthetic oligonucleotide
gccagcaucagaaaaggcu

SEQ ID NO: 1399437 - RNA, 19 nt, Artificial Sequence
  Description of Artificial Sequence: Synthetic oligonucleotide
ccuggauucgccaauuugu

SEQ ID NO: 1399438 - RNA, 19 nt, Artificial Sequence
  Description of Artificial Sequence: Synthetic oligonucleotide
acgagaugugucacaugug

SEQ ID NO: 1399439 - RNA, 19 nt, Artificial Sequence
  Description of Artificial Sequence: Synthetic oligonucleotide
gaacgguucugggagccaa

SEQ ID NO: 1399440 - RNA, 19 nt, Artificial Sequence
  Description of Artificial Sequence: Synthetic oligonucleotide
cuguagcuucuaagaagca

SEQ ID NO: 1399441 - RNA, 19 nt, Artificial Sequence
  Description of Artificial Sequence: Synthetic oligonucleotide
aucauggagcugaaagauu

SEQ ID NO: 1399442 - RNA, 19 nt, Artificial Sequence
  Description of Artificial Sequence: Synthetic oligonucleotide
agauuagaugucggcuaaa

SEQ ID NO: 1399443 - RNA, 19 nt, Artificial Sequence
  Description of Artificial Sequence: Synthetic oligonucleotide
auccucaacugagcaguga

SEQ ID NO: 1399444 - RNA, 19 nt, Artificial Sequence
  Description of Artificial Sequence: Synthetic oligonucleotide
guuccaacgccgaauuccu

SEQ ID NO: 1399445 - RNA, 19 nt, Artificial Sequence
  Description of Artificial Sequence: Synthetic oligonucleotide
cagcccuaauuuaacauuu

SEQ ID NO: 1399446 - RNA, 19 nt, Artificial Sequence
  Description of Artificial Sequence: Synthetic oligonucleotide
ccucaacugagcagugaac

SEQ ID NO: 1399447 - RNA, 19 nt, Artificial Sequence
  Description of Artificial Sequence: Synthetic oligonucleotide
gaugaucgauacagucgaa

SEQ ID NO: 1399448 - RNA, 19 nt, Artificial Sequence
  Description of Artificial Sequence: Synthetic oligonucleotide
gcucuauuguuugaagcaa

SEQ ID NO: 1399449 - RNA, 19 nt, Artificial Sequence
  Description of Artificial Sequence: Synthetic oligonucleotide
agaacgguucugggagcca

SEQ ID NO: 1399450 - RNA, 19 nt, Artificial Sequence
  Description of Artificial Sequence: Synthetic oligonucleotide
aggaaacuuuguggucugu

SEQ ID NO: 1399451 - RNA, 19 nt, Artificial Sequence
  Description of Artificial Sequence: Synthetic oligonucleotide
ucuagccuuccagcucuau

SEQ ID NO: 1399452 - RNA, 19 nt, Artificial Sequence
  Description of Artificial Sequence: Synthetic oligonucleotide
cuggauucgccaauuuguu

SEQ ID NO: 1399453 - RNA, 19 nt, Artificial Sequence
  Description of Artificial Sequence: Synthetic oligonucleotide
cagucgaaaguuucuguuu

SEQ ID NO: 1399454 - RNA, 19 nt, Artificial Sequence
  Description of Artificial Sequence: Synthetic oligonucleotide
acgccgaauuccuccuuua

SEQ ID NO: 1399455 - RNA, 19 nt, Artificial Sequence
  Description of Artificial Sequence: Synthetic oligonucleotide
caguuagauuugaaguuuu

SEQ ID NO: 1399456 - RNA, 19 nt, Artificial Sequence
  Description of Artificial Sequence: Synthetic oligonucleotide
gagcagguugcaaaauuuu

SEQ ID NO: 1399457 - RNA, 19 nt, Artificial Sequence
  Description of Artificial Sequence: Synthetic oligonucleotide
ggcccuacacaugauaggu

SEQ ID NO: 1399458 - RNA, 19 nt, Artificial Sequence
  Description of Artificial Sequence: Synthetic oligonucleotide
cagugaguugcugguuuca

SEQ ID NO: 1399459 - RNA, 19 nt, Artificial Sequence
  Description of Artificial Sequence: Synthetic oligonucleotide
agcccuaauuuaacauuua

SEQ ID NO: 1399460 - RNA, 19 nt, Artificial Sequence
  Description of Artificial Sequence: Synthetic oligonucleotide
caccuacuucaucaggagu

SEQ ID NO: 1399461 - RNA, 19 nt, Artificial Sequence
  Description of Artificial Sequence: Synthetic oligonucleotide
cgauauuuacaaaugucau

SEQ ID NO: 1399462 - RNA, 19 nt, Artificial Sequence
  Description of Artificial Sequence: Synthetic oligonucleotide
gaucagggauguauugcuu

SEQ ID NO: 1399463 - RNA, 19 nt, Artificial Sequence
  Description of Artificial Sequence: Synthetic oligonucleotide
gcucuguaaugcuucuaua

SEQ ID NO: 1399464 - RNA, 19 nt, Artificial Sequence
  Description of Artificial Sequence: Synthetic oligonucleotide
gcccuaauuuaacauuuau

SEQ ID NO: 1399465 - RNA, 19 nt, Artificial Sequence
  Description of Artificial Sequence: Synthetic oligonucleotide
guggguuuugagaauucuu

SEQ ID NO: 1399466 - RNA, 19 nt, Artificial Sequence
  Description of Artificial Sequence: Synthetic oligonucleotide
cagggcccuacacaugaua

SEQ ID NO: 1399467 - RNA, 19 nt, Artificial Sequence
  Description of Artificial Sequence: Synthetic oligonucleotide
gggcuauagccccagcccu

SEQ ID NO: 1399468 - RNA, 19 nt, Artificial Sequence
  Description of Artificial Sequence: Synthetic oligonucleotide
cuguuaucuucagcaaccu

SEQ ID NO: 1399469 - RNA, 19 nt, Artificial Sequence
  Description of Artificial Sequence: Synthetic oligonucleotide
gguggguuuugagaauucu

SEQ ID NO: 1399470 - RNA, 19 nt, Artificial Sequence
  Description of Artificial Sequence: Synthetic oligonucleotide
auacagggucauggcacuu

SEQ ID NO: 1399471 - RNA, 19 nt, Artificial Sequence
  Description of Artificial Sequence: Synthetic oligonucleotide
ggaaucuuaucgucaucuu

SEQ ID NO: 1399472 - RNA, 19 nt, Artificial Sequence
  Description of Artificial Sequence: Synthetic oligonucleotide
augaaagaucagggaugua

SEQ ID NO: 1399473 - RNA, 19 nt, Artificial Sequence
  Description of Artificial Sequence: Synthetic oligonucleotide
caccagcgauauuuacaaa

SEQ ID NO: 1399474 - RNA, 19 nt, Artificial Sequence
  Description of Artificial Sequence: Synthetic oligonucleotide
ccuaucuuugaugaucgau

SEQ ID NO: 1399475 - RNA, 19 nt, Artificial Sequence
  Description of Artificial Sequence: Synthetic oligonucleotide
gcuauagccccagcccuaa

SEQ ID NO: 1399476 - RNA, 19 nt, Artificial Sequence
  Description of Artificial Sequence: Synthetic oligonucleotide
ccagcccuaauuuaacauu

SEQ ID NO: 1399477 - RNA, 19 nt, Artificial Sequence
  Description of Artificial Sequence: Synthetic oligonucleotide
ggcuauagccccagcccua

SEQ ID NO: 1399478 - RNA, 19 nt, Artificial Sequence
  Description of Artificial Sequence: Synthetic oligonucleotide
ccaacgccgaauuccuccu

SEQ ID NO: 1399479 - RNA, 19 nt, Artificial Sequence
  Description of Artificial Sequence: Synthetic oligonucleotide
auucuacccuugggcuaua

SEQ ID NO: 1399480 - RNA, 19 nt, Artificial Sequence
  Description of Artificial Sequence: Synthetic oligonucleotide
gcccuacacaugauaggua

SEQ ID NO: 1399481 - RNA, 19 nt, Artificial Sequence
  Description of Artificial Sequence: Synthetic oligonucleotide
ggcaaaugguagccucauu

SEQ ID NO: 1399482 - RNA, 19 nt, Artificial Sequence
  Description of Artificial Sequence: Synthetic oligonucleotide
cuauagccccagcccuaau

SEQ ID NO: 1399483 - RNA, 19 nt, Artificial Sequence
  Description of Artificial Sequence: Synthetic oligonucleotide
caacgccgaauuccuccuu

SEQ ID NO: 1399484 - RNA, 19 nt, Artificial Sequence
  Description of Artificial Sequence: Synthetic oligonucleotide
cgccgaauuccuccuuuaa

SEQ ID NO: 1399485 - RNA, 19 nt, Artificial Sequence
  Description of Artificial Sequence: Synthetic oligonucleotide
gcagggcccuacacaugau

SEQ ID NO: 1399486 - RNA, 19 nt, Artificial Sequence
  Description of Artificial Sequence: Synthetic oligonucleotide
aaugugagaaaucacuucg

SEQ ID NO: 1399487 - RNA, 19 nt, Artificial Sequence
  Description of Artificial Sequence: Synthetic oligonucleotide
aagaagaggauccacacuc

SEQ ID NO: 1399488 - RNA, 19 nt, Artificial Sequence
  Description of Artificial Sequence: Synthetic oligonucleotide
ucaacgaaauccaaaaccg

SEQ ID NO: 1399489 - RNA, 19 nt, Artificial Sequence
  Description of Artificial Sequence: Synthetic oligonucleotide
aaccaaugacuuuagaaac

SEQ ID NO: 1399490 - RNA, 19 nt, Artificial Sequence
  Description of Artificial Sequence: Synthetic oligonucleotide
aaauccaaaaccgcggucc

SEQ ID NO: 1399491 - RNA, 19 nt, Artificial Sequence
  Description of Artificial Sequence: Synthetic oligonucleotide
uucaacgaaauccaaaacc

SEQ ID NO: 1399492 - RNA, 19 nt, Artificial Sequence
  Description of Artificial Sequence: Synthetic oligonucleotide
aggaguaagaaccaaugac

SEQ ID NO: 1399493 - RNA, 19 nt, Artificial Sequence
  Description of Artificial Sequence: Synthetic oligonucleotide
uaagcauuaauauacuccu

SEQ ID NO: 1399494 - RNA, 19 nt, Artificial Sequence
  Description of Artificial Sequence: Synthetic oligonucleotide
uucaccauugccaucaccc

SEQ ID NO: 1399495 - RNA, 19 nt, Artificial Sequence
  Description of Artificial Sequence: Synthetic oligonucleotide
uguaauggggacaacaggu

SEQ ID NO: 1399496 - RNA, 19 nt, Artificial Sequence
  Description of Artificial Sequence: Synthetic oligonucleotide
uguucaaacaucuguaucu

SEQ ID NO: 1399497 - RNA, 19 nt, Artificial Sequence
  Description of Artificial Sequence: Synthetic oligonucleotide
auuaauauacuccuuccug

SEQ ID NO: 1399498 - RNA, 19 nt, Artificial Sequence
  Description of Artificial Sequence: Synthetic oligonucleotide
aaauaagcuguucauuuca

SEQ ID NO: 1399499 - RNA, 19 nt, Artificial Sequence
  Description of Artificial Sequence: Synthetic oligonucleotide
ucaucaaauaagcuguuca

SEQ ID NO: 1399500 - RNA, 19 nt, Artificial Sequence
  Description of Artificial Sequence: Synthetic oligonucleotide
ucaagcauuguaaugggga

SEQ ID NO: 1399501 - RNA, 19 nt, Artificial Sequence
  Description of Artificial Sequence: Synthetic oligonucleotide
aacgaaauccaaaaccgcg

SEQ ID NO: 1399502 - RNA, 19 nt, Artificial Sequence
  Description of Artificial Sequence: Synthetic oligonucleotide
uuuuccaugacaagauggc

SEQ ID NO: 1399503 - RNA, 19 nt, Artificial Sequence
  Description of Artificial Sequence: Synthetic oligonucleotide
acacgcuuaacucggaugg

SEQ ID NO: 1399504 - RNA, 19 nt, Artificial Sequence
  Description of Artificial Sequence: Synthetic oligonucleotide
acauuaggcauguucuccc

SEQ ID NO: 1399505 - RNA, 19 nt, Artificial Sequence
  Description of Artificial Sequence: Synthetic oligonucleotide
uucgauuugccucacuuca

SEQ ID NO: 1399506 - RNA, 19 nt, Artificial Sequence
  Description of Artificial Sequence: Synthetic oligonucleotide
auaagcuguucauuucacc

SEQ ID NO: 1399507 - RNA, 19 nt, Artificial Sequence
  Description of Artificial Sequence: Synthetic oligonucleotide
acgacuaacuggugaaugc

SEQ ID NO: 1399508 - RNA, 19 nt, Artificial Sequence
  Description of Artificial Sequence: Synthetic oligonucleotide
gaaccaaugacuuuagaaa

SEQ ID NO: 1399509 - RNA, 19 nt, Artificial Sequence
  Description of Artificial Sequence: Synthetic oligonucleotide
auguccaaccgccauagcg

SEQ ID NO: 1399510 - RNA, 19 nt, Artificial Sequence
  Description of Artificial Sequence: Synthetic oligonucleotide
uuguaauggggacaacagg

SEQ ID NO: 1399511 - RNA, 19 nt, Artificial Sequence
  Description of Artificial Sequence: Synthetic oligonucleotide
agcuugacaaggcagaugu

SEQ ID NO: 1399512 - RNA, 19 nt, Artificial Sequence
  Description of Artificial Sequence: Synthetic oligonucleotide
ugucguaccagucaaggaa

SEQ ID NO: 1399513 - RNA, 19 nt, Artificial Sequence
  Description of Artificial Sequence: Synthetic oligonucleotide
gugaauaucucuuggaguc

SEQ ID NO: 1399514 - RNA, 19 nt, Artificial Sequence
  Description of Artificial Sequence: Synthetic oligonucleotide
agugugauguccaaccgcc

SEQ ID NO: 1399515 - RNA, 19 nt, Artificial Sequence
  Description of Artificial Sequence: Synthetic oligonucleotide
cauuucaccaaugagccgc

SEQ ID NO: 1399516 - RNA, 19 nt, Artificial Sequence
  Description of Artificial Sequence: Synthetic oligonucleotide
ucucguaugucuucguugc

SEQ ID NO: 1399517 - RNA, 19 nt, Artificial Sequence
  Description of Artificial Sequence: Synthetic oligonucleotide
aacuauuuuccaugacaag

SEQ ID NO: 1399518 - RNA, 19 nt, Artificial Sequence
  Description of Artificial Sequence: Synthetic oligonucleotide
aaggaguaagaaccaauga

SEQ ID NO: 1399519 - RNA, 19 nt, Artificial Sequence
  Description of Artificial Sequence: Synthetic oligonucleotide
acggguguagcccuggugg

SEQ ID NO: 1399520 - RNA, 19 nt, Artificial Sequence
  Description of Artificial Sequence: Synthetic oligonucleotide
agaaaucacuucgcgagcc

SEQ ID NO: 1399521 - RNA, 19 nt, Artificial Sequence
  Description of Artificial Sequence: Synthetic oligonucleotide
auuuggcucagguuccagc

SEQ ID NO: 1399522 - RNA, 19 nt, Artificial Sequence
  Description of Artificial Sequence: Synthetic oligonucleotide
accgucuugacgcucgccc

SEQ ID NO: 1399523 - RNA, 19 nt, Artificial Sequence
  Description of Artificial Sequence: Synthetic oligonucleotide
aguucaucuucaccauugc

SEQ ID NO: 1399524 - RNA, 19 nt, Artificial Sequence
  Description of Artificial Sequence: Synthetic oligonucleotide
cauuagacaccacaaggag

SEQ ID NO: 1399525 - RNA, 19 nt, Artificial Sequence
  Description of Artificial Sequence: Synthetic oligonucleotide
uguccaaccgccauagcga

SEQ ID NO: 1399526 - RNA, 19 nt, Artificial Sequence
  Description of Artificial Sequence: Synthetic oligonucleotide
gaguaaagcuuacauacuc

SEQ ID NO: 1399527 - RNA, 19 nt, Artificial Sequence
  Description of Artificial Sequence: Synthetic oligonucleotide
ugugaacuauuuuccauga

SEQ ID NO: 1399528 - RNA, 19 nt, Artificial Sequence
  Description of Artificial Sequence: Synthetic oligonucleotide
ugaauugccucugaacaag

SEQ ID NO: 1399529 - RNA, 19 nt, Artificial Sequence
  Description of Artificial Sequence: Synthetic oligonucleotide
aacaucuguaucucuucug

SEQ ID NO: 1399530 - RNA, 19 nt, Artificial Sequence
  Description of Artificial Sequence: Synthetic oligonucleotide
caaggaguaagaaccaaug

SEQ ID NO: 1399531 - RNA, 19 nt, Artificial Sequence
  Description of Artificial Sequence: Synthetic oligonucleotide
gcauuuauuagcuugacaa

SEQ ID NO: 1399532 - RNA, 19 nt, Artificial Sequence
  Description of Artificial Sequence: Synthetic oligonucleotide
caacaggugugccauaucc

SEQ ID NO: 1399533 - RNA, 19 nt, Artificial Sequence
  Description of Artificial Sequence: Synthetic oligonucleotide
aacaggugugccauauccc

SEQ ID NO: 1399534 - RNA, 19 nt, Artificial Sequence
  Description of Artificial Sequence: Synthetic oligonucleotide
gaggcuuucucagaugggg

SEQ ID NO: 1399535 - RNA, 19 nt, Artificial Sequence
  Description of Artificial Sequence: Synthetic oligonucleotide
uuagauagucucuucuuau

SEQ ID NO: 1399536 - RNA, 19 nt, Artificial Sequence
  Description of Artificial Sequence: Synthetic oligonucleotide
ugacagguuccaaauguug

SEQ ID NO: 1399537 - RNA, 19 nt, Artificial Sequence
  Description of Artificial Sequence: Synthetic oligonucleotide
uucaccgucuugacgcucg

SEQ ID NO: 1399538 - RNA, 19 nt, Artificial Sequence
  Description of Artificial Sequence: Synthetic oligonucleotide
aaaucacuucgcgagcccg

SEQ ID NO: 1399539 - RNA, 19 nt, Artificial Sequence
  Description of Artificial Sequence: Synthetic oligonucleotide
aucacgaggaagaagagga

SEQ ID NO: 1399540 - RNA, 19 nt, Artificial Sequence
  Description of Artificial Sequence: Synthetic oligonucleotide
aacaacuuucccuucgauu

SEQ ID NO: 1399541 - RNA, 19 nt, Artificial Sequence
  Description of Artificial Sequence: Synthetic oligonucleotide
aaaaccgcgguccuguguu

SEQ ID NO: 1399542 - RNA, 19 nt, Artificial Sequence
  Description of Artificial Sequence: Synthetic oligonucleotide
aguccuuggaccuuacaca

SEQ ID NO: 1399543 - RNA, 19 nt, Artificial Sequence
  Description of Artificial Sequence: Synthetic oligonucleotide
ucggauggcucuuuguuca

SEQ ID NO: 1399544 - RNA, 19 nt, Artificial Sequence
  Description of Artificial Sequence: Synthetic oligonucleotide
agcagacuuuucuucagag

SEQ ID NO: 1399545 - RNA, 19 nt, Artificial Sequence
  Description of Artificial Sequence: Synthetic oligonucleotide
uuagaaacauuaggcaugu

SEQ ID NO: 1399546 - RNA, 19 nt, Artificial Sequence
  Description of Artificial Sequence: Synthetic oligonucleotide
ucggcauccgucauccucc

SEQ ID NO: 1399547 - RNA, 19 nt, Artificial Sequence
  Description of Artificial Sequence: Synthetic oligonucleotide
cacgucagcagcaagcgac

SEQ ID NO: 1399548 - RNA, 19 nt, Artificial Sequence
  Description of Artificial Sequence: Synthetic oligonucleotide
caugguauggcuguaagca

SEQ ID NO: 1399549 - RNA, 19 nt, Artificial Sequence
  Description of Artificial Sequence: Synthetic oligonucleotide
caacgaaauccaaaaccgc

SEQ ID NO: 1399550 - RNA, 19 nt, Artificial Sequence
  Description of Artificial Sequence: Synthetic oligonucleotide
ugagccgcugauuuucuug

SEQ ID NO: 1399551 - RNA, 19 nt, Artificial Sequence
  Description of Artificial Sequence: Synthetic oligonucleotide
ugauguccaaccgccauag

SEQ ID NO: 1399552 - RNA, 19 nt, Artificial Sequence
  Description of Artificial Sequence: Synthetic oligonucleotide
uccaccacacgcuuaacuc

SEQ ID NO: 1399553 - RNA, 19 nt, Artificial Sequence
  Description of Artificial Sequence: Synthetic oligonucleotide
agcuuagauagucucuucu

SEQ ID NO: 1399554 - RNA, 19 nt, Artificial Sequence
  Description of Artificial Sequence: Synthetic oligonucleotide
gaagaggagugugaugucc

SEQ ID NO: 1399555 - RNA, 19 nt, Artificial Sequence
  Description of Artificial Sequence: Synthetic oligonucleotide
caaauaagcuguucauuuc

SEQ ID NO: 1399556 - RNA, 19 nt, Artificial Sequence
  Description of Artificial Sequence: Synthetic oligonucleotide
aauccaaaaccgcgguccu

SEQ ID NO: 1399557 - RNA, 19 nt, Artificial Sequence
  Description of Artificial Sequence: Synthetic oligonucleotide
cauauucggacaugguaug

SEQ ID NO: 1399558 - RNA, 19 nt, Artificial Sequence
  Description of Artificial Sequence: Synthetic oligonucleotide
cauaugcuggcacauggug

SEQ ID NO: 1399559 - RNA, 19 nt, Artificial Sequence
  Description of Artificial Sequence: Synthetic oligonucleotide
caaugugagaaaucacuuc

SEQ ID NO: 1399560 - RNA, 19 nt, Artificial Sequence
  Description of Artificial Sequence: Synthetic oligonucleotide
acgaaauccaaaaccgcgg

SEQ ID NO: 1399561 - RNA, 19 nt, Artificial Sequence
  Description of Artificial Sequence: Synthetic oligonucleotide
gccucaagcauuguaaugg

SEQ ID NO: 1399562 - RNA, 19 nt, Artificial Sequence
  Description of Artificial Sequence: Synthetic oligonucleotide
ugagcauccuggucuaucu

SEQ ID NO: 1399563 - RNA, 19 nt, Artificial Sequence
  Description of Artificial Sequence: Synthetic oligonucleotide
gugcaggacacuuuuaauc

SEQ ID NO: 1399564 - RNA, 19 nt, Artificial Sequence
  Description of Artificial Sequence: Synthetic oligonucleotide
gucauccucccauauucgg

SEQ ID NO: 1399565 - RNA, 19 nt, Artificial Sequence
  Description of Artificial Sequence: Synthetic oligonucleotide
ucuucguugccuuccuuga

SEQ ID NO: 1399566 - RNA, 19 nt, Artificial Sequence
  Description of Artificial Sequence: Synthetic oligonucleotide
aacuggugaaugcugucaa

SEQ ID NO: 1399567 - RNA, 19 nt, Artificial Sequence
  Description of Artificial Sequence: Synthetic oligonucleotide
uggcuguaagcauuaauau

SEQ ID NO: 1399568 - RNA, 19 nt, Artificial Sequence
  Description of Artificial Sequence: Synthetic oligonucleotide
cucaagcauuguaaugggg

SEQ ID NO: 1399569 - RNA, 19 nt, Artificial Sequence
  Description of Artificial Sequence: Synthetic oligonucleotide
uugauguuuucaguugccc

SEQ ID NO: 1399570 - RNA, 19 nt, Artificial Sequence
  Description of Artificial Sequence: Synthetic oligonucleotide
uaugcuggcacauggugua

SEQ ID NO: 1399571 - RNA, 19 nt, Artificial Sequence
  Description of Artificial Sequence: Synthetic oligonucleotide
cuuuguucagaguaaagcu

SEQ ID NO: 1399572 - RNA, 19 nt, Artificial Sequence
  Description of Artificial Sequence: Synthetic oligonucleotide
gagaaaucacuucgcgagc

SEQ ID NO: 1399573 - RNA, 19 nt, Artificial Sequence
  Description of Artificial Sequence: Synthetic oligonucleotide
aauugccucugaacaaguc

SEQ ID NO: 1399574 - RNA, 19 nt, Artificial Sequence
  Description of Artificial Sequence: Synthetic oligonucleotide
gauuugccucacuucauca

SEQ ID NO: 1399575 - RNA, 19 nt, Artificial Sequence
  Description of Artificial Sequence: Synthetic oligonucleotide
auuagcuugacaaggcaga

SEQ ID NO: 1399576 - RNA, 19 nt, Artificial Sequence
  Description of Artificial Sequence: Synthetic oligonucleotide
accaaugagccgcugauuu

SEQ ID NO: 1399577 - RNA, 19 nt, Artificial Sequence
  Description of Artificial Sequence: Synthetic oligonucleotide
uugacgcucgcccggaaga

SEQ ID NO: 1399578 - RNA, 19 nt, Artificial Sequence
  Description of Artificial Sequence: Synthetic oligonucleotide
cacauaucagcacacauua

SEQ ID NO: 1399579 - RNA, 19 nt, Artificial Sequence
  Description of Artificial Sequence: Synthetic oligonucleotide
caccacacgcuuaacucgg

SEQ ID NO: 1399580 - RNA, 19 nt, Artificial Sequence
  Description of Artificial Sequence: Synthetic oligonucleotide
guaccagucaaggaagagc

SEQ ID NO: 1399581 - RNA, 19 nt, Artificial Sequence
  Description of Artificial Sequence: Synthetic oligonucleotide
aaggccucaagcauuguaa

SEQ ID NO: 1399582 - RNA, 19 nt, Artificial Sequence
  Description of Artificial Sequence: Synthetic oligonucleotide
agguucccaguucagguug

SEQ ID NO: 1399583 - RNA, 19 nt, Artificial Sequence
  Description of Artificial Sequence: Synthetic oligonucleotide
aguaaagcuuacauacucu

SEQ ID NO: 1399584 - RNA, 19 nt, Artificial Sequence
  Description of Artificial Sequence: Synthetic oligonucleotide
auauucggacaugguaugg

SEQ ID NO: 1399585 - RNA, 19 nt, Artificial Sequence
  Description of Artificial Sequence: Synthetic oligonucleotide
gcuucggcggaacagcucg

SEQ ID NO: 1399586 - RNA, 19 nt, Artificial Sequence
  Description of Artificial Sequence: Synthetic oligonucleotide
aagcauuguaauggggaca

SEQ ID NO: 1399587 - RNA, 19 nt, Artificial Sequence
  Description of Artificial Sequence: Synthetic oligonucleotide
cuuuuaauccaugcauuuc

SEQ ID NO: 1399588 - RNA, 19 nt, Artificial Sequence
  Description of Artificial Sequence: Synthetic oligonucleotide
aaccgcgguccuguguucc

SEQ ID NO: 1399589 - RNA, 19 nt, Artificial Sequence
  Description of Artificial Sequence: Synthetic oligonucleotide
cucugaacaaguccucaug

SEQ ID NO: 1399590 - RNA, 19 nt, Artificial Sequence
  Description of Artificial Sequence: Synthetic oligonucleotide
uccaaaaccgcgguccugu

SEQ ID NO: 1399591 - RNA, 19 nt, Artificial Sequence
  Description of Artificial Sequence: Synthetic oligonucleotide
ucguugccuuccuugaugu

SEQ ID NO: 1399592 - RNA, 19 nt, Artificial Sequence
  Description of Artificial Sequence: Synthetic oligonucleotide
cuuguuccgugucuucacc

SEQ ID NO: 1399593 - RNA, 19 nt, Artificial Sequence
  Description of Artificial Sequence: Synthetic oligonucleotide
gacaagauggccacauauc

SEQ ID NO: 1399594 - RNA, 19 nt, Artificial Sequence
  Description of Artificial Sequence: Synthetic oligonucleotide
cacacgucagcagcaagcg

SEQ ID NO: 1399595 - RNA, 19 nt, Artificial Sequence
  Description of Artificial Sequence: Synthetic oligonucleotide
cucccauauucggacaugg

SEQ ID NO: 1399596 - RNA, 19 nt, Artificial Sequence
  Description of Artificial Sequence: Synthetic oligonucleotide
aagaggauccacacucuga

SEQ ID NO: 1399597 - RNA, 19 nt, Artificial Sequence
  Description of Artificial Sequence: Synthetic oligonucleotide
gucggcacacgucagcagc

SEQ ID NO: 1399598 - RNA, 19 nt, Artificial Sequence
  Description of Artificial Sequence: Synthetic oligonucleotide
agcauuguaauggggacaa

SEQ ID NO: 1399599 - RNA, 19 nt, Artificial Sequence
  Description of Artificial Sequence: Synthetic oligonucleotide
cacacgcuuaacucggaug

SEQ ID NO: 1399600 - RNA, 19 nt, Artificial Sequence
  Description of Artificial Sequence: Synthetic oligonucleotide
guuccaaauguuggcuugg

SEQ ID NO: 1399601 - RNA, 19 nt, Artificial Sequence
  Description of Artificial Sequence: Synthetic oligonucleotide
uguuccgugucuucaccgu

SEQ ID NO: 1399602 - RNA, 19 nt, Artificial Sequence
  Description of Artificial Sequence: Synthetic oligonucleotide
uggaccuuacacagcuaca

SEQ ID NO: 1399603 - RNA, 19 nt, Artificial Sequence
  Description of Artificial Sequence: Synthetic oligonucleotide
gacaaggcagaugugaacu

SEQ ID NO: 1399604 - RNA, 19 nt, Artificial Sequence
  Description of Artificial Sequence: Synthetic oligonucleotide
guaauggggacaacaggug

SEQ ID NO: 1399605 - RNA, 19 nt, Artificial Sequence
  Description of Artificial Sequence: Synthetic oligonucleotide
aagcgaccccggcaagaac

SEQ ID NO: 1399606 - RNA, 19 nt, Artificial Sequence
  Description of Artificial Sequence: Synthetic oligonucleotide
ucccaaugugagaaaucac

SEQ ID NO: 1399607 - RNA, 19 nt, Artificial Sequence
  Description of Artificial Sequence: Synthetic oligonucleotide
aguuuccuguugcaagacu

SEQ ID NO: 1399608 - RNA, 19 nt, Artificial Sequence
  Description of Artificial Sequence: Synthetic oligonucleotide
aaaccgcgguccuguguuc

SEQ ID NO: 1399609 - RNA, 19 nt, Artificial Sequence
  Description of Artificial Sequence: Synthetic oligonucleotide
cuuagauagucucuucuua

SEQ ID NO: 1399610 - RNA, 19 nt, Artificial Sequence
  Description of Artificial Sequence: Synthetic oligonucleotide
caaugagccgcugauuuuc

SEQ ID NO: 1399611 - RNA, 19 nt, Artificial Sequence
  Description of Artificial Sequence: Synthetic oligonucleotide
uggucuaucuggucucgcu

SEQ ID NO: 1399612 - RNA, 19 nt, Artificial Sequence
  Description of Artificial Sequence: Synthetic oligonucleotide
ggagugugauguccaaccg

SEQ ID NO: 1399613 - RNA, 19 nt, Artificial Sequence
  Description of Artificial Sequence: Synthetic oligonucleotide
guguaugucaggcagcagu

SEQ ID NO: 1399614 - RNA, 19 nt, Artificial Sequence
  Description of Artificial Sequence: Synthetic oligonucleotide
ucuggucucgcucggcauc

SEQ ID NO: 1399615 - RNA, 19 nt, Artificial Sequence
  Description of Artificial Sequence: Synthetic oligonucleotide
acucggauggcucuuuguu

SEQ ID NO: 1399616 - RNA, 19 nt, Artificial Sequence
  Description of Artificial Sequence: Synthetic oligonucleotide
aacacaucacgaggaagaa

SEQ ID NO: 1399617 - RNA, 19 nt, Artificial Sequence
  Description of Artificial Sequence: Synthetic oligonucleotide
ucguaccagucaaggaaga

SEQ ID NO: 1399618 - RNA, 19 nt, Artificial Sequence
  Description of Artificial Sequence: Synthetic oligonucleotide
aucacuucgcgagcccggc

SEQ ID NO: 1399619 - RNA, 19 nt, Artificial Sequence
  Description of Artificial Sequence: Synthetic oligonucleotide
cucggauggcucuuuguuc

SEQ ID NO: 1399620 - RNA, 19 nt, Artificial Sequence
  Description of Artificial Sequence: Synthetic oligonucleotide
agaguaaagcuuacauacu

SEQ ID NO: 1399621 - RNA, 19 nt, Artificial Sequence
  Description of Artificial Sequence: Synthetic oligonucleotide
ucggcggaacagcucgucc

SEQ ID NO: 1399622 - RNA, 19 nt, Artificial Sequence
  Description of Artificial Sequence: Synthetic oligonucleotide
agcuacuggugugggaagg

SEQ ID NO: 1399623 - RNA, 19 nt, Artificial Sequence
  Description of Artificial Sequence: Synthetic oligonucleotide
uccuuggaccuuacacagc

SEQ ID NO: 1399624 - RNA, 19 nt, Artificial Sequence
  Description of Artificial Sequence: Synthetic oligonucleotide
gcugucguaccagucaagg

SEQ ID NO: 1399625 - RNA, 19 nt, Artificial Sequence
  Description of Artificial Sequence: Synthetic oligonucleotide
cacgacuaacuggugaaug

SEQ ID NO: 1399626 - RNA, 19 nt, Artificial Sequence
  Description of Artificial Sequence: Synthetic oligonucleotide
uaggcauguucuccccuga

SEQ ID NO: 1399627 - RNA, 19 nt, Artificial Sequence
  Description of Artificial Sequence: Synthetic oligonucleotide
acuucgcgagcccggcugg

SEQ ID NO: 1399628 - RNA, 19 nt, Artificial Sequence
  Description of Artificial Sequence: Synthetic oligonucleotide
aaccgccauagcgacccac

SEQ ID NO: 1399629 - RNA, 19 nt, Artificial Sequence
  Description of Artificial Sequence: Synthetic oligonucleotide
cuacuggugugggaaggcg

SEQ ID NO: 1399630 - RNA, 19 nt, Artificial Sequence
  Description of Artificial Sequence: Synthetic oligonucleotide
uuagcuugacaaggcagau

SEQ ID NO: 1399631 - RNA, 19 nt, Artificial Sequence
  Description of Artificial Sequence: Synthetic oligonucleotide
acgucagcagcaagcgacc

SEQ ID NO: 1399632 - RNA, 19 nt, Artificial Sequence
  Description of Artificial Sequence: Synthetic oligonucleotide
ucgauuugccucacuucau

SEQ ID NO: 1399633 - RNA, 19 nt, Artificial Sequence
  Description of Artificial Sequence: Synthetic oligonucleotide
acaaggaguaagaaccaau

SEQ ID NO: 1399634 - RNA, 19 nt, Artificial Sequence
  Description of Artificial Sequence: Synthetic oligonucleotide
ugugggcacggguguagcc

SEQ ID NO: 1399635 - RNA, 19 nt, Artificial Sequence
  Description of Artificial Sequence: Synthetic oligonucleotide
cuugacgcucgcccggaag

SEQ ID NO: 1399636 - RNA, 19 nt, Artificial Sequence
  Description of Artificial Sequence: Synthetic oligonucleotide
uauuuggcucagguuccag

SEQ ID NO: 1399637 - RNA, 19 nt, Artificial Sequence
  Description of Artificial Sequence: Synthetic oligonucleotide
agccggucggcacacguca

SEQ ID NO: 1399638 - RNA, 19 nt, Artificial Sequence
  Description of Artificial Sequence: Synthetic oligonucleotide
cugaauugccucugaacaa

SEQ ID NO: 1399639 - RNA, 19 nt, Artificial Sequence
  Description of Artificial Sequence: Synthetic oligonucleotide
ccaccacacgcuuaacucg

SEQ ID NO: 1399640 - RNA, 19 nt, Artificial Sequence
  Description of Artificial Sequence: Synthetic oligonucleotide
ucccauauucggacauggu

SEQ ID NO: 1399641 - RNA, 19 nt, Artificial Sequence
  Description of Artificial Sequence: Synthetic oligonucleotide
auagcgacccacaccgcag

SEQ ID NO: 1399642 - RNA, 19 nt, Artificial Sequence
  Description of Artificial Sequence: Synthetic oligonucleotide
uggccacauaucagcacac

SEQ ID NO: 1399643 - RNA, 19 nt, Artificial Sequence
  Description of Artificial Sequence: Synthetic oligonucleotide
guaaagcuuacauacucuu

SEQ ID NO: 1399644 - RNA, 19 nt, Artificial Sequence
  Description of Artificial Sequence: Synthetic oligonucleotide
cauagcgacccacaccgca

SEQ ID NO: 1399645 - RNA, 19 nt, Artificial Sequence
  Description of Artificial Sequence: Synthetic oligonucleotide
ccucaagcauuguaauggg

SEQ ID NO: 1399646 - RNA, 19 nt, Artificial Sequence
  Description of Artificial Sequence: Synthetic oligonucleotide
caccgcagucagaagccgg

SEQ ID NO: 1399647 - RNA, 19 nt, Artificial Sequence
  Description of Artificial Sequence: Synthetic oligonucleotide
ucuucaccgucuugacgcu

SEQ ID NO: 1399648 - RNA, 19 nt, Artificial Sequence
  Description of Artificial Sequence: Synthetic oligonucleotide
cucccagagccuuguuccg

SEQ ID NO: 1399649 - RNA, 19 nt, Artificial Sequence
  Description of Artificial Sequence: Synthetic oligonucleotide
cugaagcuacugguguggg

SEQ ID NO: 1399650 - RNA, 19 nt, Artificial Sequence
  Description of Artificial Sequence: Synthetic oligonucleotide
gguuccagcuuagauaguc

SEQ ID NO: 1399651 - RNA, 19 nt, Artificial Sequence
  Description of Artificial Sequence: Synthetic oligonucleotide
aggccucaagcauuguaau

SEQ ID NO: 1399652 - RNA, 19 nt, Artificial Sequence
  Description of Artificial Sequence: Synthetic oligonucleotide
cacuucgcgagcccggcug

SEQ ID NO: 1399653 - RNA, 19 nt, Artificial Sequence
  Description of Artificial Sequence: Synthetic oligonucleotide
cugaacaaguccucaugaa

SEQ ID NO: 1399654 - RNA, 19 nt, Artificial Sequence
  Description of Artificial Sequence: Synthetic oligonucleotide
ccaaccgccauagcgaccc

SEQ ID NO: 1399655 - RNA, 19 nt, Artificial Sequence
  Description of Artificial Sequence: Synthetic oligonucleotide
guccaaccgccauagcgac

SEQ ID NO: 1399656 - RNA, 19 nt, Artificial Sequence
  Description of Artificial Sequence: Synthetic oligonucleotide
agacauaugcuggcacaug

SEQ ID NO: 1399657 - RNA, 19 nt, Artificial Sequence
  Description of Artificial Sequence: Synthetic oligonucleotide
aagccggucggcacacguc

SEQ ID NO: 1399658 - RNA, 19 nt, Artificial Sequence
  Description of Artificial Sequence: Synthetic oligonucleotide
uccaaccgccauagcgacc

SEQ ID NO: 1399659 - RNA, 19 nt, Artificial Sequence
  Description of Artificial Sequence: Synthetic oligonucleotide
cucguaugucuucguugcc

SEQ ID NO: 1399660 - RNA, 19 nt, Artificial Sequence
  Description of Artificial Sequence: Synthetic oligonucleotide
acgcuuaacucggauggcu

SEQ ID NO: 1399661 - RNA, 19 nt, Artificial Sequence
  Description of Artificial Sequence: Synthetic oligonucleotide
cuuguucaaacaucuguau

SEQ ID NO: 1399662 - RNA, 19 nt, Artificial Sequence
  Description of Artificial Sequence: Synthetic oligonucleotide
uccgucauccucccauauu

SEQ ID NO: 1399663 - RNA, 19 nt, Artificial Sequence
  Description of Artificial Sequence: Synthetic oligonucleotide
aaggcagaugugaacuauu

SEQ ID NO: 1399664 - RNA, 19 nt, Artificial Sequence
  Description of Artificial Sequence: Synthetic oligonucleotide
uagcgacccacaccgcagu

SEQ ID NO: 1399665 - RNA, 19 nt, Artificial Sequence
  Description of Artificial Sequence: Synthetic oligonucleotide
gauguccaaccgccauagc

SEQ ID NO: 1399666 - RNA, 19 nt, Artificial Sequence
  Description of Artificial Sequence: Synthetic oligonucleotide
agcgacccacaccgcaguc

SEQ ID NO: 1399667 - RNA, 19 nt, Artificial Sequence
  Description of Artificial Sequence: Synthetic oligonucleotide
ugacgcucgcccggaagag

SEQ ID NO: 1399668 - RNA, 19 nt, Artificial Sequence
  Description of Artificial Sequence: Synthetic oligonucleotide
gugucuucaccgucuugac

SEQ ID NO: 1399669 - RNA, 19 nt, Artificial Sequence
  Description of Artificial Sequence: Synthetic oligonucleotide
ugcuggcacaugguguaug

SEQ ID NO: 1399670 - RNA, 19 nt, Artificial Sequence
  Description of Artificial Sequence: Synthetic oligonucleotide
cucgucccggcugccaucg

SEQ ID NO: 1399671 - RNA, 19 nt, Artificial Sequence
  Description of Artificial Sequence: Synthetic oligonucleotide
ggcuguaagcauuaauaua

SEQ ID NO: 1399672 - RNA, 19 nt, Artificial Sequence
  Description of Artificial Sequence: Synthetic oligonucleotide
cucgcccggaagaggagug

SEQ ID NO: 1399673 - RNA, 19 nt, Artificial Sequence
  Description of Artificial Sequence: Synthetic oligonucleotide
gacgcucgcccggaagagg

SEQ ID NO: 1399674 - RNA, 19 nt, Artificial Sequence
  Description of Artificial Sequence: Synthetic oligonucleotide
ggccucaagcauuguaaug

SEQ ID NO: 1399675 - RNA, 19 nt, Artificial Sequence
  Description of Artificial Sequence: Synthetic oligonucleotide
cuggucucgcucggcaucc

SEQ ID NO: 1399676 - RNA, 19 nt, Artificial Sequence
  Description of Artificial Sequence: Synthetic oligonucleotide
cagcuuagauagucucuuc

SEQ ID NO: 1399677 - RNA, 19 nt, Artificial Sequence
  Description of Artificial Sequence: Synthetic oligonucleotide
guuccgugucuucaccguc

SEQ ID NO: 1399678 - RNA, 19 nt, Artificial Sequence
  Description of Artificial Sequence: Synthetic oligonucleotide
gcacacgucagcagcaagc

SEQ ID NO: 1399679 - RNA, 19 nt, Artificial Sequence
  Description of Artificial Sequence: Synthetic oligonucleotide
ucgcgagcccggcuggaga

SEQ ID NO: 1399680 - RNA, 19 nt, Artificial Sequence
  Description of Artificial Sequence: Synthetic oligonucleotide
auccucccauauucggaca

SEQ ID NO: 1399681 - RNA, 19 nt, Artificial Sequence
  Description of Artificial Sequence: Synthetic oligonucleotide
ggaagagcaaggagaagga

SEQ ID NO: 1399682 - RNA, 19 nt, Artificial Sequence
  Description of Artificial Sequence: Synthetic oligonucleotide
cugucguaccagucaagga

SEQ ID NO: 1399683 - RNA, 19 nt, Artificial Sequence
  Description of Artificial Sequence: Synthetic oligonucleotide
cauauccccugcccuguuc

SEQ ID NO: 1399684 - RNA, 19 nt, Artificial Sequence
  Description of Artificial Sequence: Synthetic oligonucleotide
acacgucagcagcaagcga

SEQ ID NO: 1399685 - RNA, 19 nt, Artificial Sequence
  Description of Artificial Sequence: Synthetic oligonucleotide
cccaaugugagaaaucacu

SEQ ID NO: 1399686 - RNA, 19 nt, Artificial Sequence
  Description of Artificial Sequence: Synthetic oligonucleotide
ucaccccagguucccaguu

SEQ ID NO: 1399687 - RNA, 19 nt, Artificial Sequence
  Description of Artificial Sequence: Synthetic oligonucleotide
uucuccccugaagcuacug

SEQ ID NO: 1399688 - RNA, 19 nt, Artificial Sequence
  Description of Artificial Sequence: Synthetic oligonucleotide
cccaccgcuacucccagag

SEQ ID NO: 1399689 - RNA, 19 nt, Artificial Sequence
  Description of Artificial Sequence: Synthetic oligonucleotide
cuaucuggucucgcucggc

SEQ ID NO: 1399690 - RNA, 19 nt, Artificial Sequence
  Description of Artificial Sequence: Synthetic oligonucleotide
cacgacuccccaguccuug

SEQ ID NO: 1399691 - RNA, 19 nt, Artificial Sequence
  Description of Artificial Sequence: Synthetic oligonucleotide
ucacuucgcgagcccggcu

SEQ ID NO: 1399692 - RNA, 19 nt, Artificial Sequence
  Description of Artificial Sequence: Synthetic oligonucleotide
aucuggucucgcucggcau

SEQ ID NO: 1399693 - RNA, 19 nt, Artificial Sequence
  Description of Artificial Sequence: Synthetic oligonucleotide
cacgcuuaacucggauggc

SEQ ID NO: 1399694 - RNA, 19 nt, Artificial Sequence
  Description of Artificial Sequence: Synthetic oligonucleotide
ccauauucggacaugguau

SEQ ID NO: 1399695 - RNA, 19 nt, Artificial Sequence
  Description of Artificial Sequence: Synthetic oligonucleotide
cacggguguagcccuggug

SEQ ID NO: 1399696 - RNA, 19 nt, Artificial Sequence
  Description of Artificial Sequence: Synthetic oligonucleotide
gugauguccaaccgccaua

SEQ ID NO: 1399697 - RNA, 19 nt, Artificial Sequence
  Description of Artificial Sequence: Synthetic oligonucleotide
uggggacaacaggugugcc

SEQ ID NO: 1399698 - RNA, 19 nt, Artificial Sequence
  Description of Artificial Sequence: Synthetic oligonucleotide
gaagccggucggcacacgu

SEQ ID NO: 1399699 - RNA, 19 nt, Artificial Sequence
  Description of Artificial Sequence: Synthetic oligonucleotide
accgcagucagaagccggu

SEQ ID NO: 1399700 - RNA, 19 nt, Artificial Sequence
  Description of Artificial Sequence: Synthetic oligonucleotide
caaggccucaagcauugua

SEQ ID NO: 1399701 - RNA, 19 nt, Artificial Sequence
  Description of Artificial Sequence: Synthetic oligonucleotide
gaauugccucugaacaagu

SEQ ID NO: 1399702 - RNA, 19 nt, Artificial Sequence
  Description of Artificial Sequence: Synthetic oligonucleotide
agcucgucccggcugccau

SEQ ID NO: 1399703 - RNA, 19 nt, Artificial Sequence
  Description of Artificial Sequence: Synthetic oligonucleotide
auccaaaaccgcgguccug

SEQ ID NO: 1399704 - RNA, 19 nt, Artificial Sequence
  Description of Artificial Sequence: Synthetic oligonucleotide
cagcaagcgaccccggcaa

SEQ ID NO: 1399705 - RNA, 19 nt, Artificial Sequence
  Description of Artificial Sequence: Synthetic oligonucleotide
aggcauguucuccccugaa

SEQ ID NO: 1399706 - RNA, 19 nt, Artificial Sequence
  Description of Artificial Sequence: Synthetic oligonucleotide
cuggucuaucuggucucgc

SEQ ID NO: 1399707 - RNA, 19 nt, Artificial Sequence
  Description of Artificial Sequence: Synthetic oligonucleotide
ucgcucggcauccgucauc

SEQ ID NO: 1399708 - RNA, 19 nt, Artificial Sequence
  Description of Artificial Sequence: Synthetic oligonucleotide
ccugacagguuccaaaugu

SEQ ID NO: 1399709 - RNA, 19 nt, Artificial Sequence
  Description of Artificial Sequence: Synthetic oligonucleotide
caugacaagauggccacau

SEQ ID NO: 1399710 - RNA, 19 nt, Artificial Sequence
  Description of Artificial Sequence: Synthetic oligonucleotide
cgucauccucccauauucg

SEQ ID NO: 1399711 - RNA, 19 nt, Artificial Sequence
  Description of Artificial Sequence: Synthetic oligonucleotide
accgccauagcgacccaca

SEQ ID NO: 1399712 - RNA, 19 nt, Artificial Sequence
  Description of Artificial Sequence: Synthetic oligonucleotide
cagcuacagggcagaugag

SEQ ID NO: 1399713 - RNA, 19 nt, Artificial Sequence
  Description of Artificial Sequence: Synthetic oligonucleotide
ccgucuugacgcucgcccg

SEQ ID NO: 1399714 - RNA, 19 nt, Artificial Sequence
  Description of Artificial Sequence: Synthetic oligonucleotide
aagucucccuugggccgag

SEQ ID NO: 1399715 - RNA, 19 nt, Artificial Sequence
  Description of Artificial Sequence: Synthetic oligonucleotide
uucggcggaacagcucguc

SEQ ID NO: 1399716 - RNA, 19 nt, Artificial Sequence
  Description of Artificial Sequence: Synthetic oligonucleotide
cccauauucggacauggua

SEQ ID NO: 1399717 - RNA, 19 nt, Artificial Sequence
  Description of Artificial Sequence: Synthetic oligonucleotide
caggacacuuuuaauccau

SEQ ID NO: 1399718 - RNA, 19 nt, Artificial Sequence
  Description of Artificial Sequence: Synthetic oligonucleotide
gcaaggagaaggaacacau

SEQ ID NO: 1399719 - RNA, 19 nt, Artificial Sequence
  Description of Artificial Sequence: Synthetic oligonucleotide
accgcuacucccagagccu

SEQ ID NO: 1399720 - RNA, 19 nt, Artificial Sequence
  Description of Artificial Sequence: Synthetic oligonucleotide
agcugucguaccagucaag

SEQ ID NO: 1399721 - RNA, 19 nt, Artificial Sequence
  Description of Artificial Sequence: Synthetic oligonucleotide
ccgcugauuuucuuguuca

SEQ ID NO: 1399722 - RNA, 19 nt, Artificial Sequence
  Description of Artificial Sequence: Synthetic oligonucleotide
ggucggcacacgucagcag

SEQ ID NO: 1399723 - RNA, 19 nt, Artificial Sequence
  Description of Artificial Sequence: Synthetic oligonucleotide
cgcagucagaagccggucg

SEQ ID NO: 1399724 - RNA, 19 nt, Artificial Sequence
  Description of Artificial Sequence: Synthetic oligonucleotide
accgcgguccuguguuccu

SEQ ID NO: 1399725 - RNA, 19 nt, Artificial Sequence
  Description of Artificial Sequence: Synthetic oligonucleotide
ccuuggaccuuacacagcu

SEQ ID NO: 1399726 - RNA, 19 nt, Artificial Sequence
  Description of Artificial Sequence: Synthetic oligonucleotide
gugccauauccccugcccu

SEQ ID NO: 1399727 - RNA, 19 nt, Artificial Sequence
  Description of Artificial Sequence: Synthetic oligonucleotide
cugaagccggcauuguuuu

SEQ ID NO: 1399728 - RNA, 19 nt, Artificial Sequence
  Description of Artificial Sequence: Synthetic oligonucleotide
cacccaccgcuacucccag

SEQ ID NO: 1399729 - RNA, 19 nt, Artificial Sequence
  Description of Artificial Sequence: Synthetic oligonucleotide
cgauuugccucacuucauc

SEQ ID NO: 1399730 - RNA, 19 nt, Artificial Sequence
  Description of Artificial Sequence: Synthetic oligonucleotide
agaagccggucggcacacg

SEQ ID NO: 1399731 - RNA, 19 nt, Artificial Sequence
  Description of Artificial Sequence: Synthetic oligonucleotide
gucucgcucggcauccguc

SEQ ID NO: 1399732 - RNA, 19 nt, Artificial Sequence
  Description of Artificial Sequence: Synthetic oligonucleotide
cuucaccgucuugacgcuc

SEQ ID NO: 1399733 - RNA, 19 nt, Artificial Sequence
  Description of Artificial Sequence: Synthetic oligonucleotide
caucggccccgccacccac

SEQ ID NO: 1399734 - RNA, 19 nt, Artificial Sequence
  Description of Artificial Sequence: Synthetic oligonucleotide
ccaugcuuguggccucucc

SEQ ID NO: 1399735 - RNA, 19 nt, Artificial Sequence
  Description of Artificial Sequence: Synthetic oligonucleotide
cccacgacuaacuggugaa

SEQ ID NO: 1399736 - RNA, 19 nt, Artificial Sequence
  Description of Artificial Sequence: Synthetic oligonucleotide
caagcgaccccggcaagaa

SEQ ID NO: 1399737 - RNA, 19 nt, Artificial Sequence
  Description of Artificial Sequence: Synthetic oligonucleotide
gguguaugucaggcagcag

SEQ ID NO: 1399738 - RNA, 19 nt, Artificial Sequence
  Description of Artificial Sequence: Synthetic oligonucleotide
ccuggucuaucuggucucg

SEQ ID NO: 1399739 - RNA, 19 nt, Artificial Sequence
  Description of Artificial Sequence: Synthetic oligonucleotide
cauccgucauccucccaua

SEQ ID NO: 1399740 - RNA, 19 nt, Artificial Sequence
  Description of Artificial Sequence: Synthetic oligonucleotide
agccgcugauuuucuuguu

SEQ ID NO: 1399741 - RNA, 19 nt, Artificial Sequence
  Description of Artificial Sequence: Synthetic oligonucleotide
cgucuugacgcucgcccgg

SEQ ID NO: 1399742 - RNA, 19 nt, Artificial Sequence
  Description of Artificial Sequence: Synthetic oligonucleotide
gccacauaucagcacacau

SEQ ID NO: 1399743 - RNA, 19 nt, Artificial Sequence
  Description of Artificial Sequence: Synthetic oligonucleotide
caaaaccgcgguccugugu

SEQ ID NO: 1399744 - RNA, 19 nt, Artificial Sequence
  Description of Artificial Sequence: Synthetic oligonucleotide
gcuagcugucguaccaguc

SEQ ID NO: 1399745 - RNA, 19 nt, Artificial Sequence
  Description of Artificial Sequence: Synthetic oligonucleotide
gugugauguccaaccgcca

SEQ ID NO: 1399746 - RNA, 19 nt, Artificial Sequence
  Description of Artificial Sequence: Synthetic oligonucleotide
cuuggaccuuacacagcua

SEQ ID NO: 1399747 - RNA, 19 nt, Artificial Sequence
  Description of Artificial Sequence: Synthetic oligonucleotide
ggguguagcccuggugggc

SEQ ID NO: 1399748 - RNA, 19 nt, Artificial Sequence
  Description of Artificial Sequence: Synthetic oligonucleotide
ggcacggguguagcccugg

SEQ ID NO: 1399749 - RNA, 19 nt, Artificial Sequence
  Description of Artificial Sequence: Synthetic oligonucleotide
cggaagaggagugugaugu

SEQ ID NO: 1399750 - RNA, 19 nt, Artificial Sequence
  Description of Artificial Sequence: Synthetic oligonucleotide
acaaggccucaagcauugu

SEQ ID NO: 1399751 - RNA, 19 nt, Artificial Sequence
  Description of Artificial Sequence: Synthetic oligonucleotide
cagggcagaugagacauau

SEQ ID NO: 1399752 - RNA, 19 nt, Artificial Sequence
  Description of Artificial Sequence: Synthetic oligonucleotide
cggguguagcccugguggg

SEQ ID NO: 1399753 - RNA, 19 nt, Artificial Sequence
  Description of Artificial Sequence: Synthetic oligonucleotide
cgccauagcgacccacacc

SEQ ID NO: 1399754 - RNA, 19 nt, Artificial Sequence
  Description of Artificial Sequence: Synthetic oligonucleotide
ccacauaucagcacacauu

SEQ ID NO: 1399755 - RNA, 19 nt, Artificial Sequence
  Description of Artificial Sequence: Synthetic oligonucleotide
accacacgcuuaacucgga

SEQ ID NO: 1399756 - RNA, 19 nt, Artificial Sequence
  Description of Artificial Sequence: Synthetic oligonucleotide
guauggcuguaagcauuaa

SEQ ID NO: 1399757 - RNA, 19 nt, Artificial Sequence
  Description of Artificial Sequence: Synthetic oligonucleotide
cgggagacaaggccucaag

SEQ ID NO: 1399758 - RNA, 19 nt, Artificial Sequence
  Description of Artificial Sequence: Synthetic oligonucleotide
ccaaaaccgcgguccugug

SEQ ID NO: 1399759 - RNA, 19 nt, Artificial Sequence
  Description of Artificial Sequence: Synthetic oligonucleotide
acccaccgcuacucccaga

SEQ ID NO: 1399760 - RNA, 19 nt, Artificial Sequence
  Description of Artificial Sequence: Synthetic oligonucleotide
ccacccaccgcuacuccca

SEQ ID NO: 1399761 - RNA, 19 nt, Artificial Sequence
  Description of Artificial Sequence: Synthetic oligonucleotide
augcuggcacaugguguau

SEQ ID NO: 1399762 - RNA, 19 nt, Artificial Sequence
  Description of Artificial Sequence: Synthetic oligonucleotide
ccccacgacuaacugguga

SEQ ID NO: 1399763 - RNA, 19 nt, Artificial Sequence
  Description of Artificial Sequence: Synthetic oligonucleotide
ggccacauaucagcacaca

SEQ ID NO: 1399764 - RNA, 19 nt, Artificial Sequence
  Description of Artificial Sequence: Synthetic oligonucleotide
cuuaacucggauggcucuu

SEQ ID NO: 1399765 - RNA, 19 nt, Artificial Sequence
  Description of Artificial Sequence: Synthetic oligonucleotide
ccggucggcacacgucagc

SEQ ID NO: 1399766 - RNA, 19 nt, Artificial Sequence
  Description of Artificial Sequence: Synthetic oligonucleotide
gcaagcgaccccggcaaga

SEQ ID NO: 1399767 - RNA, 19 nt, Artificial Sequence
  Description of Artificial Sequence: Synthetic oligonucleotide
cucugaagccggcauuguu

SEQ ID NO: 1399768 - RNA, 19 nt, Artificial Sequence
  Description of Artificial Sequence: Synthetic oligonucleotide
ccgccauagcgacccacac

SEQ ID NO: 1399769 - RNA, 19 nt, Artificial Sequence
  Description of Artificial Sequence: Synthetic oligonucleotide
ccuugggccgagggcuucg

SEQ ID NO: 1399770 - RNA, 19 nt, Artificial Sequence
  Description of Artificial Sequence: Synthetic oligonucleotide
ccaccgcuacucccagagc

SEQ ID NO: 1399771 - RNA, 19 nt, Artificial Sequence
  Description of Artificial Sequence: Synthetic oligonucleotide
gcgguccuguguuccuuca

SEQ ID NO: 1399772 - RNA, 19 nt, Artificial Sequence
  Description of Artificial Sequence: Synthetic oligonucleotide
cuucggcggaacagcucgu

SEQ ID NO: 1399773 - RNA, 19 nt, Artificial Sequence
  Description of Artificial Sequence: Synthetic oligonucleotide
ggcuucggcggaacagcuc

SEQ ID NO: 1399774 - RNA, 19 nt, Artificial Sequence
  Description of Artificial Sequence: Synthetic oligonucleotide
ccagcuuagauagucucuu

SEQ ID NO: 1399775 - RNA, 19 nt, Artificial Sequence
  Description of Artificial Sequence: Synthetic oligonucleotide
cuucgcgagcccggcugga

SEQ ID NO: 1399776 - RNA, 19 nt, Artificial Sequence
  Description of Artificial Sequence: Synthetic oligonucleotide
gccggucggcacacgucag

SEQ ID NO: 1399777 - RNA, 19 nt, Artificial Sequence
  Description of Artificial Sequence: Synthetic oligonucleotide
gguucccaguucagguugu

SEQ ID NO: 1399778 - RNA, 19 nt, Artificial Sequence
  Description of Artificial Sequence: Synthetic oligonucleotide
cggcauccgucauccuccc

SEQ ID NO: 1399779 - RNA, 19 nt, Artificial Sequence
  Description of Artificial Sequence: Synthetic oligonucleotide
ggucucgcucggcauccgu

SEQ ID NO: 1399780 - RNA, 19 nt, Artificial Sequence
  Description of Artificial Sequence: Synthetic oligonucleotide
gcccggcuggagaagucuc

SEQ ID NO: 1399781 - RNA, 19 nt, Artificial Sequence
  Description of Artificial Sequence: Synthetic oligonucleotide
cgcgguccuguguuccuuc

SEQ ID NO: 1399782 - RNA, 19 nt, Artificial Sequence
  Description of Artificial Sequence: Synthetic oligonucleotide
ccgccacccaccgcuacuc

SEQ ID NO: 1399783 - RNA, 19 nt, Artificial Sequence
  Description of Artificial Sequence: Synthetic oligonucleotide
cucgcucggcauccgucau

SEQ ID NO: 1399784 - RNA, 19 nt, Artificial Sequence
  Description of Artificial Sequence: Synthetic oligonucleotide
ccgcagucagaagccgguc

SEQ ID NO: 1399785 - RNA, 19 nt, Artificial Sequence
  Description of Artificial Sequence: Synthetic oligonucleotide
gcucgcccggaagaggagu

SEQ ID NO: 1399786 - RNA, 19 nt, Artificial Sequence
  Description of Artificial Sequence: Synthetic oligonucleotide
ccgagggcuucggcggaac

SEQ ID NO: 1399787 - RNA, 19 nt, Artificial Sequence
  Description of Artificial Sequence: Synthetic oligonucleotide
cgcgagcccggcuggagaa

SEQ ID NO: 1399788 - RNA, 19 nt, Artificial Sequence
  Description of Artificial Sequence: Synthetic oligonucleotide
ccaucaccccagguuccca

SEQ ID NO: 1399789 - RNA, 19 nt, Artificial Sequence
  Description of Artificial Sequence: Synthetic oligonucleotide
ccacacgcuuaacucggau

SEQ ID NO: 1399790 - RNA, 19 nt, Artificial Sequence
  Description of Artificial Sequence: Synthetic oligonucleotide
gccaugcuuguggccucuc

SEQ ID NO: 1399791 - RNA, 19 nt, Artificial Sequence
  Description of Artificial Sequence: Synthetic oligonucleotide
gcacggguguagcccuggu

SEQ ID NO: 1399792 - RNA, 19 nt, Artificial Sequence
  Description of Artificial Sequence: Synthetic oligonucleotide
cccuugggccgagggcuuc

SEQ ID NO: 1399793 - RNA, 19 nt, Artificial Sequence
  Description of Artificial Sequence: Synthetic oligonucleotide
ccacgacuaacuggugaau

SEQ ID NO: 1399794 - RNA, 19 nt, Artificial Sequence
  Description of Artificial Sequence: Synthetic oligonucleotide
gccgagggcuucggcggaa

SEQ ID NO: 1399795 - RNA, 19 nt, Artificial Sequence
  Description of Artificial Sequence: Synthetic oligonucleotide
cccuucgauuugccucacu

SEQ ID NO: 1399796 - RNA, 19 nt, Artificial Sequence
  Description of Artificial Sequence: Synthetic oligonucleotide
ccauauccccugcccuguu

SEQ ID NO: 1399797 - RNA, 19 nt, Artificial Sequence
  Description of Artificial Sequence: Synthetic oligonucleotide
cggcacacgucagcagcaa

SEQ ID NO: 1399798 - RNA, 19 nt, Artificial Sequence
  Description of Artificial Sequence: Synthetic oligonucleotide
ccgcuacucccagagccuu

SEQ ID NO: 1399799 - RNA, 19 nt, Artificial Sequence
  Description of Artificial Sequence: Synthetic oligonucleotide
ccacgacuccccaguccuu

SEQ ID NO: 1399800 - RNA, 19 nt, Artificial Sequence
  Description of Artificial Sequence: Synthetic oligonucleotide
ccgcgguccuguguuccuu

SEQ ID NO: 1399801 - RNA, 19 nt, Artificial Sequence
  Description of Artificial Sequence: Synthetic oligonucleotide
gaaauuauggaccagagag

SEQ ID NO: 1399802 - RNA, 19 nt, Artificial Sequence
  Description of Artificial Sequence: Synthetic oligonucleotide
aaugugaaaacccagauaa

SEQ ID NO: 1399803 - RNA, 19 nt, Artificial Sequence
  Description of Artificial Sequence: Synthetic oligonucleotide
aauaugacaacuguaggcc

SEQ ID NO: 1399804 - RNA, 19 nt, Artificial Sequence
  Description of Artificial Sequence: Synthetic oligonucleotide
acaaccaacucccagaugc

SEQ ID NO: 1399805 - RNA, 19 nt, Artificial Sequence
  Description of Artificial Sequence: Synthetic oligonucleotide
aauagaaccucugagggcc

SEQ ID NO: 1399806 - RNA, 19 nt, Artificial Sequence
  Description of Artificial Sequence: Synthetic oligonucleotide
uguuuuaacacacacagac

SEQ ID NO: 1399807 - RNA, 19 nt, Artificial Sequence
  Description of Artificial Sequence: Synthetic oligonucleotide
gaaaauagaaccucugagg

SEQ ID NO: 1399808 - RNA, 19 nt, Artificial Sequence
  Description of Artificial Sequence: Synthetic oligonucleotide
aaauggauuauucuaauaa

SEQ ID NO: 1399809 - RNA, 19 nt, Artificial Sequence
  Description of Artificial Sequence: Synthetic oligonucleotide
auucaauccaacaacaacc

SEQ ID NO: 1399810 - RNA, 19 nt, Artificial Sequence
  Description of Artificial Sequence: Synthetic oligonucleotide
uaacauuccagacuuaaag

SEQ ID NO: 1399811 - RNA, 19 nt, Artificial Sequence
  Description of Artificial Sequence: Synthetic oligonucleotide
acuauuaaaugcugaacgc

SEQ ID NO: 1399812 - RNA, 19 nt, Artificial Sequence
  Description of Artificial Sequence: Synthetic oligonucleotide
aauuauggaccagagaggg

SEQ ID NO: 1399813 - RNA, 19 nt, Artificial Sequence
  Description of Artificial Sequence: Synthetic oligonucleotide
caagcaaacuauuaaaugc

SEQ ID NO: 1399814 - RNA, 19 nt, Artificial Sequence
  Description of Artificial Sequence: Synthetic oligonucleotide
agcaaaaugauucacgucu

SEQ ID NO: 1399815 - RNA, 19 nt, Artificial Sequence
  Description of Artificial Sequence: Synthetic oligonucleotide
aauagcguuugguuuacac

SEQ ID NO: 1399816 - RNA, 19 nt, Artificial Sequence
  Description of Artificial Sequence: Synthetic oligonucleotide
aaauagaaccucugagggc

SEQ ID NO: 1399817 - RNA, 19 nt, Artificial Sequence
  Description of Artificial Sequence: Synthetic oligonucleotide
uaauaugugguaacuagcc

SEQ ID NO: 1399818 - RNA, 19 nt, Artificial Sequence
  Description of Artificial Sequence: Synthetic oligonucleotide
uauuaaaugcugaacgccc

SEQ ID NO: 1399819 - RNA, 19 nt, Artificial Sequence
  Description of Artificial Sequence: Synthetic oligonucleotide
auuaaaauaugacaacugu

SEQ ID NO: 1399820 - RNA, 19 nt, Artificial Sequence
  Description of Artificial Sequence: Synthetic oligonucleotide
ucuugcaagaauaaguuuc

SEQ ID NO: 1399821 - RNA, 19 nt, Artificial Sequence
  Description of Artificial Sequence: Synthetic oligonucleotide
uuuuaaauggccagcaguc

SEQ ID NO: 1399822 - RNA, 19 nt, Artificial Sequence
  Description of Artificial Sequence: Synthetic oligonucleotide
aaacuauuaaaugcugaac

SEQ ID NO: 1399823 - RNA, 19 nt, Artificial Sequence
  Description of Artificial Sequence: Synthetic oligonucleotide
uggauuauucuaauaaaac

SEQ ID NO: 1399824 - RNA, 19 nt, Artificial Sequence
  Description of Artificial Sequence: Synthetic oligonucleotide
aauuaaaauaugacaacug

SEQ ID NO: 1399825 - RNA, 19 nt, Artificial Sequence
  Description of Artificial Sequence: Synthetic oligonucleotide
aaacccagauaacgaaacc

SEQ ID NO: 1399826 - RNA, 19 nt, Artificial Sequence
  Description of Artificial Sequence: Synthetic oligonucleotide
aaaugcugaacgcccuucc

SEQ ID NO: 1399827 - RNA, 19 nt, Artificial Sequence
  Description of Artificial Sequence: Synthetic oligonucleotide
uguuggaacagaucuauug

SEQ ID NO: 1399828 - RNA, 19 nt, Artificial Sequence
  Description of Artificial Sequence: Synthetic oligonucleotide
aguaauacucaccuaccgg

SEQ ID NO: 1399829 - RNA, 19 nt, Artificial Sequence
  Description of Artificial Sequence: Synthetic oligonucleotide
uagcguuugguuuacacag

SEQ ID NO: 1399830 - RNA, 19 nt, Artificial Sequence
  Description of Artificial Sequence: Synthetic oligonucleotide
agcaagaugauaguucugc

SEQ ID NO: 1399831 - RNA, 19 nt, Artificial Sequence
  Description of Artificial Sequence: Synthetic oligonucleotide
agagacugggccuagaucu

SEQ ID NO: 1399832 - RNA, 19 nt, Artificial Sequence
  Description of Artificial Sequence: Synthetic oligonucleotide
uuuacaaaagaagcaauca

SEQ ID NO: 1399833 - RNA, 19 nt, Artificial Sequence
  Description of Artificial Sequence: Synthetic oligonucleotide
accuauuggaggcugacac

SEQ ID NO: 1399834 - RNA, 19 nt, Artificial Sequence
  Description of Artificial Sequence: Synthetic oligonucleotide
uaagcaaaaugauucacgu

SEQ ID NO: 1399835 - RNA, 19 nt, Artificial Sequence
  Description of Artificial Sequence: Synthetic oligonucleotide
cuagccaggagauagggag

SEQ ID NO: 1399836 - RNA, 19 nt, Artificial Sequence
  Description of Artificial Sequence: Synthetic oligonucleotide
guaauacucaccuaccggc

SEQ ID NO: 1399837 - RNA, 19 nt, Artificial Sequence
  Description of Artificial Sequence: Synthetic oligonucleotide
uuauggaccagagagggag

SEQ ID NO: 1399838 - RNA, 19 nt, Artificial Sequence
  Description of Artificial Sequence: Synthetic oligonucleotide
acaagcaaacuauuaaaug

SEQ ID NO: 1399839 - RNA, 19 nt, Artificial Sequence
  Description of Artificial Sequence: Synthetic oligonucleotide
aaauuauggaccagagagg

SEQ ID NO: 1399840 - RNA, 19 nt, Artificial Sequence
  Description of Artificial Sequence: Synthetic oligonucleotide
uuucccuggauucucaaga

SEQ ID NO: 1399841 - RNA, 19 nt, Artificial Sequence
  Description of Artificial Sequence: Synthetic oligonucleotide
caauccaacaacaaccaac

SEQ ID NO: 1399842 - RNA, 19 nt, Artificial Sequence
  Description of Artificial Sequence: Synthetic oligonucleotide
uauucuaauaaaacuuuau

SEQ ID NO: 1399843 - RNA, 19 nt, Artificial Sequence
  Description of Artificial Sequence: Synthetic oligonucleotide
aagaugauaguucugccua

SEQ ID NO: 1399844 - RNA, 19 nt, Artificial Sequence
  Description of Artificial Sequence: Synthetic oligonucleotide
guaacuagccaggagauag

SEQ ID NO: 1399845 - RNA, 19 nt, Artificial Sequence
  Description of Artificial Sequence: Synthetic oligonucleotide
uucaauccaacaacaacca

SEQ ID NO: 1399846 - RNA, 19 nt, Artificial Sequence
  Description of Artificial Sequence: Synthetic oligonucleotide
aauaugugguaacuagcca

SEQ ID NO: 1399847 - RNA, 19 nt, Artificial Sequence
  Description of Artificial Sequence: Synthetic oligonucleotide
uaguuuaacauuccagacu

SEQ ID NO: 1399848 - RNA, 19 nt, Artificial Sequence
  Description of Artificial Sequence: Synthetic oligonucleotide
gguaauaugugguaacuag

SEQ ID NO: 1399849 - RNA, 19 nt, Artificial Sequence
  Description of Artificial Sequence: Synthetic oligonucleotide
cuugcaagaauaaguuucc

SEQ ID NO: 1399850 - RNA, 19 nt, Artificial Sequence
  Description of Artificial Sequence: Synthetic oligonucleotide
uaaacuuagggccuugcaa

SEQ ID NO: 1399851 - RNA, 19 nt, Artificial Sequence
  Description of Artificial Sequence: Synthetic oligonucleotide
guuucuguaaucccauuag

SEQ ID NO: 1399852 - RNA, 19 nt, Artificial Sequence
  Description of Artificial Sequence: Synthetic oligonucleotide
ugauucacgucuugaaaag

SEQ ID NO: 1399853 - RNA, 19 nt, Artificial Sequence
  Description of Artificial Sequence: Synthetic oligonucleotide
aauuagaggcaaauaaaca

SEQ ID NO: 1399854 - RNA, 19 nt, Artificial Sequence
  Description of Artificial Sequence: Synthetic oligonucleotide
acuuauggaaguuuuaaua

SEQ ID NO: 1399855 - RNA, 19 nt, Artificial Sequence
  Description of Artificial Sequence: Synthetic oligonucleotide
guaagcaaaaugauucacg

SEQ ID NO: 1399856 - RNA, 19 nt, Artificial Sequence
  Description of Artificial Sequence: Synthetic oligonucleotide
uaaaguagagggagguugc

SEQ ID NO: 1399857 - RNA, 19 nt, Artificial Sequence
  Description of Artificial Sequence: Synthetic oligonucleotide
aaaccagcuaaaguagagg

SEQ ID NO: 1399858 - RNA, 19 nt, Artificial Sequence
  Description of Artificial Sequence: Synthetic oligonucleotide
aggaaauucaauccaacaa

SEQ ID NO: 1399859 - RNA, 19 nt, Artificial Sequence
  Description of Artificial Sequence: Synthetic oligonucleotide
aauaaacauuuccuggcaa

SEQ ID NO: 1399860 - RNA, 19 nt, Artificial Sequence
  Description of Artificial Sequence: Synthetic oligonucleotide
gaauaaguuucccuacagc

SEQ ID NO: 1399861 - RNA, 19 nt, Artificial Sequence
  Description of Artificial Sequence: Synthetic oligonucleotide
aagagacugggccuagauc

SEQ ID NO: 1399862 - RNA, 19 nt, Artificial Sequence
  Description of Artificial Sequence: Synthetic oligonucleotide
cuaagggugggaaagccag

SEQ ID NO: 1399863 - RNA, 19 nt, Artificial Sequence
  Description of Artificial Sequence: Synthetic oligonucleotide
aagacauggcuaccucccc

SEQ ID NO: 1399864 - RNA, 19 nt, Artificial Sequence
  Description of Artificial Sequence: Synthetic oligonucleotide
cuauuaaaugcugaacgcc

SEQ ID NO: 1399865 - RNA, 19 nt, Artificial Sequence
  Description of Artificial Sequence: Synthetic oligonucleotide
acagaucuauuguguaagc

SEQ ID NO: 1399866 - RNA, 19 nt, Artificial Sequence
  Description of Artificial Sequence: Synthetic oligonucleotide
cucaagaagacauggcuac

SEQ ID NO: 1399867 - RNA, 19 nt, Artificial Sequence
  Description of Artificial Sequence: Synthetic oligonucleotide
ggaaauucaauccaacaac

SEQ ID NO: 1399868 - RNA, 19 nt, Artificial Sequence
  Description of Artificial Sequence: Synthetic oligonucleotide
cucuuaggcccuuagagac

SEQ ID NO: 1399869 - RNA, 19 nt, Artificial Sequence
  Description of Artificial Sequence: Synthetic oligonucleotide
aagcaaacuauuaaaugcu

SEQ ID NO: 1399870 - RNA, 19 nt, Artificial Sequence
  Description of Artificial Sequence: Synthetic oligonucleotide
cuaaaguagagggagguug

SEQ ID NO: 1399871 - RNA, 19 nt, Artificial Sequence
  Description of Artificial Sequence: Synthetic oligonucleotide
guaccugcaaucuuaaguc

SEQ ID NO: 1399872 - RNA, 19 nt, Artificial Sequence
  Description of Artificial Sequence: Synthetic oligonucleotide
ugaaaacccagauaacgaa

SEQ ID NO: 1399873 - RNA, 19 nt, Artificial Sequence
  Description of Artificial Sequence: Synthetic oligonucleotide
aacuuagggccuugcaaag

SEQ ID NO: 1399874 - RNA, 19 nt, Artificial Sequence
  Description of Artificial Sequence: Synthetic oligonucleotide
gaacuguuggaacagaucu

SEQ ID NO: 1399875 - RNA, 19 nt, Artificial Sequence
  Description of Artificial Sequence: Synthetic oligonucleotide
acgucuacacagcaucagc

SEQ ID NO: 1399876 - RNA, 19 nt, Artificial Sequence
  Description of Artificial Sequence: Synthetic oligonucleotide
aaaauggauuauucuaaua

SEQ ID NO: 1399877 - RNA, 19 nt, Artificial Sequence
  Description of Artificial Sequence: Synthetic oligonucleotide
augauucacgucuugaaaa

SEQ ID NO: 1399878 - RNA, 19 nt, Artificial Sequence
  Description of Artificial Sequence: Synthetic oligonucleotide
ucaccuaccggccagccac

SEQ ID NO: 1399879 - RNA, 19 nt, Artificial Sequence
  Description of Artificial Sequence: Synthetic oligonucleotide
aguucugccuaguuuaaca

SEQ ID NO: 1399880 - RNA, 19 nt, Artificial Sequence
  Description of Artificial Sequence: Synthetic oligonucleotide
uaauacucaccuaccggcc

SEQ ID NO: 1399881 - RNA, 19 nt, Artificial Sequence
  Description of Artificial Sequence: Synthetic oligonucleotide
aaucaaggauagguaacuc

SEQ ID NO: 1399882 - RNA, 19 nt, Artificial Sequence
  Description of Artificial Sequence: Synthetic oligonucleotide
uuuguuucuguaaucccau

SEQ ID NO: 1399883 - RNA, 19 nt, Artificial Sequence
  Description of Artificial Sequence: Synthetic oligonucleotide
aaucauagacugcuuuuaa

SEQ ID NO: 1399884 - RNA, 19 nt, Artificial Sequence
  Description of Artificial Sequence: Synthetic oligonucleotide
aauacucaccuaccggcca

SEQ ID NO: 1399885 - RNA, 19 nt, Artificial Sequence
  Description of Artificial Sequence: Synthetic oligonucleotide
ucucucagggccaauuaga

SEQ ID NO: 1399886 - RNA, 19 nt, Artificial Sequence
  Description of Artificial Sequence: Synthetic oligonucleotide
ugugguaacuagccaggag

SEQ ID NO: 1399887 - RNA, 19 nt, Artificial Sequence
  Description of Artificial Sequence: Synthetic oligonucleotide
gagagccucucuuaggccc

SEQ ID NO: 1399888 - RNA, 19 nt, Artificial Sequence
  Description of Artificial Sequence: Synthetic oligonucleotide
agauaacgaaaccagcuaa

SEQ ID NO: 1399889 - RNA, 19 nt, Artificial Sequence
  Description of Artificial Sequence: Synthetic oligonucleotide
auagcguuugguuuacaca

SEQ ID NO: 1399890 - RNA, 19 nt, Artificial Sequence
  Description of Artificial Sequence: Synthetic oligonucleotide
uagaggcaaauaaacauuu

SEQ ID NO: 1399891 - RNA, 19 nt, Artificial Sequence
  Description of Artificial Sequence: Synthetic oligonucleotide
uagcccagugguaauaugu

SEQ ID NO: 1399892 - RNA, 19 nt, Artificial Sequence
  Description of Artificial Sequence: Synthetic oligonucleotide
caguaauacucaccuaccg

SEQ ID NO: 1399893 - RNA, 19 nt, Artificial Sequence
  Description of Artificial Sequence: Synthetic oligonucleotide
gaagcaagaugauaguucu

SEQ ID NO: 1399894 - RNA, 19 nt, Artificial Sequence
  Description of Artificial Sequence: Synthetic oligonucleotide
auaacgaaaccagcuaaag

SEQ ID NO: 1399895 - RNA, 19 nt, Artificial Sequence
  Description of Artificial Sequence: Synthetic oligonucleotide
guaauaugugguaacuagc

SEQ ID NO: 1399896 - RNA, 19 nt, Artificial Sequence
  Description of Artificial Sequence: Synthetic oligonucleotide
uuuaaauggccagcagucc

SEQ ID NO: 1399897 - RNA, 19 nt, Artificial Sequence
  Description of Artificial Sequence: Synthetic oligonucleotide
gugguaacuagccaggaga

SEQ ID NO: 1399898 - RNA, 19 nt, Artificial Sequence
  Description of Artificial Sequence: Synthetic oligonucleotide
aggauagguaacuccuggg

SEQ ID NO: 1399899 - RNA, 19 nt, Artificial Sequence
  Description of Artificial Sequence: Synthetic oligonucleotide
uguaagcaaaaugauucac

SEQ ID NO: 1399900 - RNA, 19 nt, Artificial Sequence
  Description of Artificial Sequence: Synthetic oligonucleotide
gauucacgucuugaaaagg

SEQ ID NO: 1399901 - RNA, 19 nt, Artificial Sequence
  Description of Artificial Sequence: Synthetic oligonucleotide
uucacgucuugaaaaggcu

SEQ ID NO: 1399902 - RNA, 19 nt, Artificial Sequence
  Description of Artificial Sequence: Synthetic oligonucleotide
agagagccucucuuaggcc

SEQ ID NO: 1399903 - RNA, 19 nt, Artificial Sequence
  Description of Artificial Sequence: Synthetic oligonucleotide
uagaucuugcaagaauaag

SEQ ID NO: 1399904 - RNA, 19 nt, Artificial Sequence
  Description of Artificial Sequence: Synthetic oligonucleotide
ugauaguucugccuaguuu

SEQ ID NO: 1399905 - RNA, 19 nt, Artificial Sequence
  Description of Artificial Sequence: Synthetic oligonucleotide
uccagacuuaaaggaaugg

SEQ ID NO: 1399906 - RNA, 19 nt, Artificial Sequence
  Description of Artificial Sequence: Synthetic oligonucleotide
cagccaaucccucagugag

SEQ ID NO: 1399907 - RNA, 19 nt, Artificial Sequence
  Description of Artificial Sequence: Synthetic oligonucleotide
uuacuguagcauugggacc

SEQ ID NO: 1399908 - RNA, 19 nt, Artificial Sequence
  Description of Artificial Sequence: Synthetic oligonucleotide
uuagcacagggacuuuggc

SEQ ID NO: 1399909 - RNA, 19 nt, Artificial Sequence
  Description of Artificial Sequence: Synthetic oligonucleotide
agacugguagcccaguggu

SEQ ID NO: 1399910 - RNA, 19 nt, Artificial Sequence
  Description of Artificial Sequence: Synthetic oligonucleotide
uaugacaacuguaggccuc

SEQ ID NO: 1399911 - RNA, 19 nt, Artificial Sequence
  Description of Artificial Sequence: Synthetic oligonucleotide
cuuagggccuugcaaagac

SEQ ID NO: 1399912 - RNA, 19 nt, Artificial Sequence
  Description of Artificial Sequence: Synthetic oligonucleotide
accucauguuuuaacacac

SEQ ID NO: 1399913 - RNA, 19 nt, Artificial Sequence
  Description of Artificial Sequence: Synthetic oligonucleotide
cucucagggccaauuagag

SEQ ID NO: 1399914 - RNA, 19 nt, Artificial Sequence
  Description of Artificial Sequence: Synthetic oligonucleotide
agaugauaguucugccuag

SEQ ID NO: 1399915 - RNA, 19 nt, Artificial Sequence
  Description of Artificial Sequence: Synthetic oligonucleotide
ucuauuguguaagcaaaau

SEQ ID NO: 1399916 - RNA, 19 nt, Artificial Sequence
  Description of Artificial Sequence: Synthetic oligonucleotide
uggcuaccuccccugaagg

SEQ ID NO: 1399917 - RNA, 19 nt, Artificial Sequence
  Description of Artificial Sequence: Synthetic oligonucleotide
cugggaaagcccaaaugug

SEQ ID NO: 1399918 - RNA, 19 nt, Artificial Sequence
  Description of Artificial Sequence: Synthetic oligonucleotide
auaugacaacuguaggccu

SEQ ID NO: 1399919 - RNA, 19 nt, Artificial Sequence
  Description of Artificial Sequence: Synthetic oligonucleotide
aaauucaauccaacaacaa

SEQ ID NO: 1399920 - RNA, 19 nt, Artificial Sequence
  Description of Artificial Sequence: Synthetic oligonucleotide
cuuauggaaguuuuaauau

SEQ ID NO: 1399921 - RNA, 19 nt, Artificial Sequence
  Description of Artificial Sequence: Synthetic oligonucleotide
ggauuauucuaauaaaacu

SEQ ID NO: 1399922 - RNA, 19 nt, Artificial Sequence
  Description of Artificial Sequence: Synthetic oligonucleotide
cagacgucuacacagcauc

SEQ ID NO: 1399923 - RNA, 19 nt, Artificial Sequence
  Description of Artificial Sequence: Synthetic oligonucleotide
ugcugaacgcccuuccucu

SEQ ID NO: 1399924 - RNA, 19 nt, Artificial Sequence
  Description of Artificial Sequence: Synthetic oligonucleotide
auggcuaccuccccugaag

SEQ ID NO: 1399925 - RNA, 19 nt, Artificial Sequence
  Description of Artificial Sequence: Synthetic oligonucleotide
aacgcccuuccucuuucuc

SEQ ID NO: 1399926 - RNA, 19 nt, Artificial Sequence
  Description of Artificial Sequence: Synthetic oligonucleotide
ugccagugaccuauuggag

SEQ ID NO: 1399927 - RNA, 19 nt, Artificial Sequence
  Description of Artificial Sequence: Synthetic oligonucleotide
ugguaacuagccaggagau

SEQ ID NO: 1399928 - RNA, 19 nt, Artificial Sequence
  Description of Artificial Sequence: Synthetic oligonucleotide
ucacacacgcaguaauacu

SEQ ID NO: 1399929 - RNA, 19 nt, Artificial Sequence
  Description of Artificial Sequence: Synthetic oligonucleotide
caaucccucagugagcccc

SEQ ID NO: 1399930 - RNA, 19 nt, Artificial Sequence
  Description of Artificial Sequence: Synthetic oligonucleotide
ugaaggguaccugcaaucu

SEQ ID NO: 1399931 - RNA, 19 nt, Artificial Sequence
  Description of Artificial Sequence: Synthetic oligonucleotide
ggcccuuagagacugguag

SEQ ID NO: 1399932 - RNA, 19 nt, Artificial Sequence
  Description of Artificial Sequence: Synthetic oligonucleotide
cuuagagacugguagccca

SEQ ID NO: 1399933 - RNA, 19 nt, Artificial Sequence
  Description of Artificial Sequence: Synthetic oligonucleotide
agacuuaaaggaauggaau

SEQ ID NO: 1399934 - RNA, 19 nt, Artificial Sequence
  Description of Artificial Sequence: Synthetic oligonucleotide
uuaaacugggaagcaagau

SEQ ID NO: 1399935 - RNA, 19 nt, Artificial Sequence
  Description of Artificial Sequence: Synthetic oligonucleotide
uuagggccuugcaaagacc

SEQ ID NO: 1399936 - RNA, 19 nt, Artificial Sequence
  Description of Artificial Sequence: Synthetic oligonucleotide
gaugaaucaaggauaggua

SEQ ID NO: 1399937 - RNA, 19 nt, Artificial Sequence
  Description of Artificial Sequence: Synthetic oligonucleotide
agaagcuggcaccagggaa

SEQ ID NO: 1399938 - RNA, 19 nt, Artificial Sequence
  Description of Artificial Sequence: Synthetic oligonucleotide
ccagaugcuucucauagcc

SEQ ID NO: 1399939 - RNA, 19 nt, Artificial Sequence
  Description of Artificial Sequence: Synthetic oligonucleotide
acccagauaacgaaaccag

SEQ ID NO: 1399940 - RNA, 19 nt, Artificial Sequence
  Description of Artificial Sequence: Synthetic oligonucleotide
uggauucucaagagagccu

SEQ ID NO: 1399941 - RNA, 19 nt, Artificial Sequence
  Description of Artificial Sequence: Synthetic oligonucleotide
gccaauuagaggcaaauaa

SEQ ID NO: 1399942 - RNA, 19 nt, Artificial Sequence
  Description of Artificial Sequence: Synthetic oligonucleotide
agcaaucauagacugcuuu

SEQ ID NO: 1399943 - RNA, 19 nt, Artificial Sequence
  Description of Artificial Sequence: Synthetic oligonucleotide
caaaaugauucacgucuug

SEQ ID NO: 1399944 - RNA, 19 nt, Artificial Sequence
  Description of Artificial Sequence: Synthetic oligonucleotide
aacaaccaacucccagaug

SEQ ID NO: 1399945 - RNA, 19 nt, Artificial Sequence
  Description of Artificial Sequence: Synthetic oligonucleotide
ccuaguuuaacauuccaga

SEQ ID NO: 1399946 - RNA, 19 nt, Artificial Sequence
  Description of Artificial Sequence: Synthetic oligonucleotide
auacucaccuaccggccag

SEQ ID NO: 1399947 - RNA, 19 nt, Artificial Sequence
  Description of Artificial Sequence: Synthetic oligonucleotide
gucucucagggccaauuag

SEQ ID NO: 1399948 - RNA, 19 nt, Artificial Sequence
  Description of Artificial Sequence: Synthetic oligonucleotide
cuuuuaaauggccagcagu

SEQ ID NO: 1399949 - RNA, 19 nt, Artificial Sequence
  Description of Artificial Sequence: Synthetic oligonucleotide
guggaagacaagcaaacua

SEQ ID NO: 1399950 - RNA, 19 nt, Artificial Sequence
  Description of Artificial Sequence: Synthetic oligonucleotide
ucaauccaacaacaaccaa

SEQ ID NO: 1399951 - RNA, 19 nt, Artificial Sequence
  Description of Artificial Sequence: Synthetic oligonucleotide
augacaacuguaggccucg

SEQ ID NO: 1399952 - RNA, 19 nt, Artificial Sequence
  Description of Artificial Sequence: Synthetic oligonucleotide
cucacacacgcaguaauac

SEQ ID NO: 1399953 - RNA, 19 nt, Artificial Sequence
  Description of Artificial Sequence: Synthetic oligonucleotide
cacauccccagccaauccc

SEQ ID NO: 1399954 - RNA, 19 nt, Artificial Sequence
  Description of Artificial Sequence: Synthetic oligonucleotide
ucuuaggcccuuagagacu

SEQ ID NO: 1399955 - RNA, 19 nt, Artificial Sequence
  Description of Artificial Sequence: Synthetic oligonucleotide
uuaaaugcugaacgcccuu

SEQ ID NO: 1399956 - RNA, 19 nt, Artificial Sequence
  Description of Artificial Sequence: Synthetic oligonucleotide
agcuaaaguagagggaggu

SEQ ID NO: 1399957 - RNA, 19 nt, Artificial Sequence
  Description of Artificial Sequence: Synthetic oligonucleotide
cauugggcagucacugggc

SEQ ID NO: 1399958 - RNA, 19 nt, Artificial Sequence
  Description of Artificial Sequence: Synthetic oligonucleotide
gagguugcuugcuuuacaa

SEQ ID NO: 1399959 - RNA, 19 nt, Artificial Sequence
  Description of Artificial Sequence: Synthetic oligonucleotide
cuuaggcccuuagagacug

SEQ ID NO: 1399960 - RNA, 19 nt, Artificial Sequence
  Description of Artificial Sequence: Synthetic oligonucleotide
agcaaacuauuaaaugcug

SEQ ID NO: 1399961 - RNA, 19 nt, Artificial Sequence
  Description of Artificial Sequence: Synthetic oligonucleotide
cauuccagacuuaaaggaa

SEQ ID NO: 1399962 - RNA, 19 nt, Artificial Sequence
  Description of Artificial Sequence: Synthetic oligonucleotide
agaugcagacgucuacaca

SEQ ID NO: 1399963 - RNA, 19 nt, Artificial Sequence
  Description of Artificial Sequence: Synthetic oligonucleotide
auuaaaugcugaacgcccu

SEQ ID NO: 1399964 - RNA, 19 nt, Artificial Sequence
  Description of Artificial Sequence: Synthetic oligonucleotide
gauaacgaaaccagcuaaa

SEQ ID NO: 1399965 - RNA, 19 nt, Artificial Sequence
  Description of Artificial Sequence: Synthetic oligonucleotide
gacuuaaaggaauggaauu

SEQ ID NO: 1399966 - RNA, 19 nt, Artificial Sequence
  Description of Artificial Sequence: Synthetic oligonucleotide
ucaagaagacauggcuacc

SEQ ID NO: 1399967 - RNA, 19 nt, Artificial Sequence
  Description of Artificial Sequence: Synthetic oligonucleotide
cagcuaaaguagagggagg

SEQ ID NO: 1399968 - RNA, 19 nt, Artificial Sequence
  Description of Artificial Sequence: Synthetic oligonucleotide
ugggaagcaagaugauagu

SEQ ID NO: 1399969 - RNA, 19 nt, Artificial Sequence
  Description of Artificial Sequence: Synthetic oligonucleotide
aggugugcuccacucuggg

SEQ ID NO: 1399970 - RNA, 19 nt, Artificial Sequence
  Description of Artificial Sequence: Synthetic oligonucleotide
cucccuaagggugggaaag

SEQ ID NO: 1399971 - RNA, 19 nt, Artificial Sequence
  Description of Artificial Sequence: Synthetic oligonucleotide
agaggcaaauaaacauuuc

SEQ ID NO: 1399972 - RNA, 19 nt, Artificial Sequence
  Description of Artificial Sequence: Synthetic oligonucleotide
cugccucaacauauucugg

SEQ ID NO: 1399973 - RNA, 19 nt, Artificial Sequence
  Description of Artificial Sequence: Synthetic oligonucleotide
gaaucaaggauagguaacu

SEQ ID NO: 1399974 - RNA, 19 nt, Artificial Sequence
  Description of Artificial Sequence: Synthetic oligonucleotide
cuaccggccagccacacca

SEQ ID NO: 1399975 - RNA, 19 nt, Artificial Sequence
  Description of Artificial Sequence: Synthetic oligonucleotide
gacgucuacacagcaucag

SEQ ID NO: 1399976 - RNA, 19 nt, Artificial Sequence
  Description of Artificial Sequence: Synthetic oligonucleotide
ggaagcaagaugauaguuc

SEQ ID NO: 1399977 - RNA, 19 nt, Artificial Sequence
  Description of Artificial Sequence: Synthetic oligonucleotide
acgcagcagaugcagacgu

SEQ ID NO: 1399978 - RNA, 19 nt, Artificial Sequence
  Description of Artificial Sequence: Synthetic oligonucleotide
ugaacgcccuuccucuuuc

SEQ ID NO: 1399979 - RNA, 19 nt, Artificial Sequence
  Description of Artificial Sequence: Synthetic oligonucleotide
aguggaagacaagcaaacu

SEQ ID NO: 1399980 - RNA, 19 nt, Artificial Sequence
  Description of Artificial Sequence: Synthetic oligonucleotide
cacgcaguaauacucaccu

SEQ ID NO: 1399981 - RNA, 19 nt, Artificial Sequence
  Description of Artificial Sequence: Synthetic oligonucleotide
cucaacauauucuggagau

SEQ ID NO: 1399982 - RNA, 19 nt, Artificial Sequence
  Description of Artificial Sequence: Synthetic oligonucleotide
uucugccuaguuuaacauu

SEQ ID NO: 1399983 - RNA, 19 nt, Artificial Sequence
  Description of Artificial Sequence: Synthetic oligonucleotide
ugguaauaugugguaacua

SEQ ID NO: 1399984 - RNA, 19 nt, Artificial Sequence
  Description of Artificial Sequence: Synthetic oligonucleotide
ucaacauauucuggagauc

SEQ ID NO: 1399985 - RNA, 19 nt, Artificial Sequence
  Description of Artificial Sequence: Synthetic oligonucleotide
ggagccuuggaaaauagaa

SEQ ID NO: 1399986 - RNA, 19 nt, Artificial Sequence
  Description of Artificial Sequence: Synthetic oligonucleotide
ucccgggaauaaaugucac

SEQ ID NO: 1399987 - RNA, 19 nt, Artificial Sequence
  Description of Artificial Sequence: Synthetic oligonucleotide
ggaggugugcuccacucug

SEQ ID NO: 1399988 - RNA, 19 nt, Artificial Sequence
  Description of Artificial Sequence: Synthetic oligonucleotide
gcaagaugauaguucugcc

SEQ ID NO: 1399989 - RNA, 19 nt, Artificial Sequence
  Description of Artificial Sequence: Synthetic oligonucleotide
ccagagagggagaaccagg

SEQ ID NO: 1399990 - RNA, 19 nt, Artificial Sequence
  Description of Artificial Sequence: Synthetic oligonucleotide
gacuuauggaaguuuuaau

SEQ ID NO: 1399991 - RNA, 19 nt, Artificial Sequence
  Description of Artificial Sequence: Synthetic oligonucleotide
caagaugauaguucugccu

SEQ ID NO: 1399992 - RNA, 19 nt, Artificial Sequence
  Description of Artificial Sequence: Synthetic oligonucleotide
cacacgcaguaauacucac

SEQ ID NO: 1399993 - RNA, 19 nt, Artificial Sequence
  Description of Artificial Sequence: Synthetic oligonucleotide
gcuuuuaaauggccagcag

SEQ ID NO: 1399994 - RNA, 19 nt, Artificial Sequence
  Description of Artificial Sequence: Synthetic oligonucleotide
gccuaguuuaacauuccag

SEQ ID NO: 1399995 - RNA, 19 nt, Artificial Sequence
  Description of Artificial Sequence: Synthetic oligonucleotide
uuaggcccuuagagacugg

SEQ ID NO: 1399996 - RNA, 19 nt, Artificial Sequence
  Description of Artificial Sequence: Synthetic oligonucleotide
agccaaucccucagugagc

SEQ ID NO: 1399997 - RNA, 19 nt, Artificial Sequence
  Description of Artificial Sequence: Synthetic oligonucleotide
cagauaacgaaaccagcua

SEQ ID NO: 1399998 - RNA, 19 nt, Artificial Sequence
  Description of Artificial Sequence: Synthetic oligonucleotide
gagauagggaggagccuug

SEQ ID NO: 1399999 - RNA, 19 nt, Artificial Sequence
  Description of Artificial Sequence: Synthetic oligonucleotide
aggaugaaucaaggauagg

SEQ ID NO: 1400000 - RNA, 19 nt, Artificial Sequence
  Description of Artificial Sequence: Synthetic oligonucleotide
acucaccuaccggccagcc

SEQ ID NO: 1400001 - RNA, 19 nt, Artificial Sequence
  Description of Artificial Sequence: Synthetic oligonucleotide
guaggccucgcucccuaag

SEQ ID NO: 1400002 - RNA, 19 nt, Artificial Sequence
  Description of Artificial Sequence: Synthetic oligonucleotide
aaguagagggagguugcuu

SEQ ID NO: 1400003 - RNA, 19 nt, Artificial Sequence
  Description of Artificial Sequence: Synthetic oligonucleotide
aacuguuggaacagaucua

SEQ ID NO: 1400004 - RNA, 19 nt, Artificial Sequence
  Description of Artificial Sequence: Synthetic oligonucleotide
acacacgcaguaauacuca

SEQ ID NO: 1400005 - RNA, 19 nt, Artificial Sequence
  Description of Artificial Sequence: Synthetic oligonucleotide
cccagauaacgaaaccagc

SEQ ID NO: 1400006 - RNA, 19 nt, Artificial Sequence
  Description of Artificial Sequence: Synthetic oligonucleotide
cagaucuauuguguaagca

SEQ ID NO: 1400007 - RNA, 19 nt, Artificial Sequence
  Description of Artificial Sequence: Synthetic oligonucleotide
aucuauuguguaagcaaaa

SEQ ID NO: 1400008 - RNA, 19 nt, Artificial Sequence
  Description of Artificial Sequence: Synthetic oligonucleotide
gcagcuagggcugccauug

SEQ ID NO: 1400009 - RNA, 19 nt, Artificial Sequence
  Description of Artificial Sequence: Synthetic oligonucleotide
gcaguaauacucaccuacc

SEQ ID NO: 1400010 - RNA, 19 nt, Artificial Sequence
  Description of Artificial Sequence: Synthetic oligonucleotide
gguuuacacagaacuguug

SEQ ID NO: 1400011 - RNA, 19 nt, Artificial Sequence
  Description of Artificial Sequence: Synthetic oligonucleotide
acuuaaacuuagggccuug

SEQ ID NO: 1400012 - RNA, 19 nt, Artificial Sequence
  Description of Artificial Sequence: Synthetic oligonucleotide
gcaaacuauuaaaugcuga

SEQ ID NO: 1400013 - RNA, 19 nt, Artificial Sequence
  Description of Artificial Sequence: Synthetic oligonucleotide
ggcuaccuccccugaaggg

SEQ ID NO: 1400014 - RNA, 19 nt, Artificial Sequence
  Description of Artificial Sequence: Synthetic oligonucleotide
gccaaucccucagugagcc

SEQ ID NO: 1400015 - RNA, 19 nt, Artificial Sequence
  Description of Artificial Sequence: Synthetic oligonucleotide
ggcucaagaagacauggcu

SEQ ID NO: 1400016 - RNA, 19 nt, Artificial Sequence
  Description of Artificial Sequence: Synthetic oligonucleotide
gggaaggaugaaucaagga

SEQ ID NO: 1400017 - RNA, 19 nt, Artificial Sequence
  Description of Artificial Sequence: Synthetic oligonucleotide
acuuagggccuugcaaaga

SEQ ID NO: 1400018 - RNA, 19 nt, Artificial Sequence
  Description of Artificial Sequence: Synthetic oligonucleotide
guuuuaacacacacagacu

SEQ ID NO: 1400019 - RNA, 19 nt, Artificial Sequence
  Description of Artificial Sequence: Synthetic oligonucleotide
aaauagcguuugguuuaca

SEQ ID NO: 1400020 - RNA, 19 nt, Artificial Sequence
  Description of Artificial Sequence: Synthetic oligonucleotide
uacuuaaacuuagggccuu

SEQ ID NO: 1400021 - RNA, 19 nt, Artificial Sequence
  Description of Artificial Sequence: Synthetic oligonucleotide
cagcaguccaaaugcauua

SEQ ID NO: 1400022 - RNA, 19 nt, Artificial Sequence
  Description of Artificial Sequence: Synthetic oligonucleotide
ugggcucaguuucccugga

SEQ ID NO: 1400023 - RNA, 19 nt, Artificial Sequence
  Description of Artificial Sequence: Synthetic oligonucleotide
gugggcucaaggacucccg

SEQ ID NO: 1400024 - RNA, 19 nt, Artificial Sequence
  Description of Artificial Sequence: Synthetic oligonucleotide
guucugccuaguuuaacau

SEQ ID NO: 1400025 - RNA, 19 nt, Artificial Sequence
  Description of Artificial Sequence: Synthetic oligonucleotide
ugcuccacucugggaaagc

SEQ ID NO: 1400026 - RNA, 19 nt, Artificial Sequence
  Description of Artificial Sequence: Synthetic oligonucleotide
acauccccagccaaucccu

SEQ ID NO: 1400027 - RNA, 19 nt, Artificial Sequence
  Description of Artificial Sequence: Synthetic oligonucleotide
agacgucuacacagcauca

SEQ ID NO: 1400028 - RNA, 19 nt, Artificial Sequence
  Description of Artificial Sequence: Synthetic oligonucleotide
ccagauaacgaaaccagcu

SEQ ID NO: 1400029 - RNA, 19 nt, Artificial Sequence
  Description of Artificial Sequence: Synthetic oligonucleotide
uggcugaaguugugggcaa

SEQ ID NO: 1400030 - RNA, 19 nt, Artificial Sequence
  Description of Artificial Sequence: Synthetic oligonucleotide
ucccucagugagccccagc

SEQ ID NO: 1400031 - RNA, 19 nt, Artificial Sequence
  Description of Artificial Sequence: Synthetic oligonucleotide
agcaguccaaaugcauuaa

SEQ ID NO: 1400032 - RNA, 19 nt, Artificial Sequence
  Description of Artificial Sequence: Synthetic oligonucleotide
caagaagacauggcuaccu

SEQ ID NO: 1400033 - RNA, 19 nt, Artificial Sequence
  Description of Artificial Sequence: Synthetic oligonucleotide
uacucaccuaccggccagc

SEQ ID NO: 1400034 - RNA, 19 nt, Artificial Sequence
  Description of Artificial Sequence: Synthetic oligonucleotide
gaccuauuggaggcugaca

SEQ ID NO: 1400035 - RNA, 19 nt, Artificial Sequence
  Description of Artificial Sequence: Synthetic oligonucleotide
cagacuuauggaaguuuua

SEQ ID NO: 1400036 - RNA, 19 nt, Artificial Sequence
  Description of Artificial Sequence: Synthetic oligonucleotide
uagagacugguagcccagu

SEQ ID NO: 1400037 - RNA, 19 nt, Artificial Sequence
  Description of Artificial Sequence: Synthetic oligonucleotide
ggaaagcccaaaugugaaa

SEQ ID NO: 1400038 - RNA, 19 nt, Artificial Sequence
  Description of Artificial Sequence: Synthetic oligonucleotide
auggaccagagagggagaa

SEQ ID NO: 1400039 - RNA, 19 nt, Artificial Sequence
  Description of Artificial Sequence: Synthetic oligonucleotide
uguaggccucgcucccuaa

SEQ ID NO: 1400040 - RNA, 19 nt, Artificial Sequence
  Description of Artificial Sequence: Synthetic oligonucleotide
ggcugacacugccaucugc

SEQ ID NO: 1400041 - RNA, 19 nt, Artificial Sequence
  Description of Artificial Sequence: Synthetic oligonucleotide
agcguuugguuuacacaga

SEQ ID NO: 1400042 - RNA, 19 nt, Artificial Sequence
  Description of Artificial Sequence: Synthetic oligonucleotide
accuccccugaaggguacc

SEQ ID NO: 1400043 - RNA, 19 nt, Artificial Sequence
  Description of Artificial Sequence: Synthetic oligonucleotide
ccucaacauauucuggaga

SEQ ID NO: 1400044 - RNA, 19 nt, Artificial Sequence
  Description of Artificial Sequence: Synthetic oligonucleotide
acucacacacgcaguaaua

SEQ ID NO: 1400045 - RNA, 19 nt, Artificial Sequence
  Description of Artificial Sequence: Synthetic oligonucleotide
gcauuuaaacugggaagca

SEQ ID NO: 1400046 - RNA, 19 nt, Artificial Sequence
  Description of Artificial Sequence: Synthetic oligonucleotide
acacagacuuauggaaguu

SEQ ID NO: 1400047 - RNA, 19 nt, Artificial Sequence
  Description of Artificial Sequence: Synthetic oligonucleotide
gaaccagggaaggaugaau

SEQ ID NO: 1400048 - RNA, 19 nt, Artificial Sequence
  Description of Artificial Sequence: Synthetic oligonucleotide
ugguagcccagugguaaua

SEQ ID NO: 1400049 - RNA, 19 nt, Artificial Sequence
  Description of Artificial Sequence: Synthetic oligonucleotide
agagccucucuuaggcccu

SEQ ID NO: 1400050 - RNA, 19 nt, Artificial Sequence
  Description of Artificial Sequence: Synthetic oligonucleotide
cucgcucccuaaggguggg

SEQ ID NO: 1400051 - RNA, 19 nt, Artificial Sequence
  Description of Artificial Sequence: Synthetic oligonucleotide
gaggcagaaccacugccuu

SEQ ID NO: 1400052 - RNA, 19 nt, Artificial Sequence
  Description of Artificial Sequence: Synthetic oligonucleotide
gaaggguaccugcaaucuu

SEQ ID NO: 1400053 - RNA, 19 nt, Artificial Sequence
  Description of Artificial Sequence: Synthetic oligonucleotide
ccuuagagacugguagccc

SEQ ID NO: 1400054 - RNA, 19 nt, Artificial Sequence
  Description of Artificial Sequence: Synthetic oligonucleotide
accuaccggccagccacac

SEQ ID NO: 1400055 - RNA, 19 nt, Artificial Sequence
  Description of Artificial Sequence: Synthetic oligonucleotide
accggccagccacaccaca

SEQ ID NO: 1400056 - RNA, 19 nt, Artificial Sequence
  Description of Artificial Sequence: Synthetic oligonucleotide
gcucaagaagacauggcua

SEQ ID NO: 1400057 - RNA, 19 nt, Artificial Sequence
  Description of Artificial Sequence: Synthetic oligonucleotide
gcuccacucugggaaagcc

SEQ ID NO: 1400058 - RNA, 19 nt, Artificial Sequence
  Description of Artificial Sequence: Synthetic oligonucleotide
ggguaccugcaaucuuaag

SEQ ID NO: 1400059 - RNA, 19 nt, Artificial Sequence
  Description of Artificial Sequence: Synthetic oligonucleotide
cacacgcagcagaugcaga

SEQ ID NO: 1400060 - RNA, 19 nt, Artificial Sequence
  Description of Artificial Sequence: Synthetic oligonucleotide
auagaaccucugagggcca

SEQ ID NO: 1400061 - RNA, 19 nt, Artificial Sequence
  Description of Artificial Sequence: Synthetic oligonucleotide
acgcaguaauacucaccua

SEQ ID NO: 1400062 - RNA, 19 nt, Artificial Sequence
  Description of Artificial Sequence: Synthetic oligonucleotide
ccuaagggugggaaagcca

SEQ ID NO: 1400063 - RNA, 19 nt, Artificial Sequence
  Description of Artificial Sequence: Synthetic oligonucleotide
cacucacacacgcaguaau

SEQ ID NO: 1400064 - RNA, 19 nt, Artificial Sequence
  Description of Artificial Sequence: Synthetic oligonucleotide
aggguaccugcaaucuuaa

SEQ ID NO: 1400065 - RNA, 19 nt, Artificial Sequence
  Description of Artificial Sequence: Synthetic oligonucleotide
gccucgcucccuaagggug

SEQ ID NO: 1400066 - RNA, 19 nt, Artificial Sequence
  Description of Artificial Sequence: Synthetic oligonucleotide
cguuugguuuacacagaac

SEQ ID NO: 1400067 - RNA, 19 nt, Artificial Sequence
  Description of Artificial Sequence: Synthetic oligonucleotide
cucaccuaccggccagcca

SEQ ID NO: 1400068 - RNA, 19 nt, Artificial Sequence
  Description of Artificial Sequence: Synthetic oligonucleotide
cagaugcuucucauagccu

SEQ ID NO: 1400069 - RNA, 19 nt, Artificial Sequence
  Description of Artificial Sequence: Synthetic oligonucleotide
gugaccuauuggaggcuga

SEQ ID NO: 1400070 - RNA, 19 nt, Artificial Sequence
  Description of Artificial Sequence: Synthetic oligonucleotide
ccagccaaucccucaguga

SEQ ID NO: 1400071 - RNA, 19 nt, Artificial Sequence
  Description of Artificial Sequence: Synthetic oligonucleotide
ccggaggugugcuccacuc

SEQ ID NO: 1400072 - RNA, 19 nt, Artificial Sequence
  Description of Artificial Sequence: Synthetic oligonucleotide
gcuaccuccccugaagggu

SEQ ID NO: 1400073 - RNA, 19 nt, Artificial Sequence
  Description of Artificial Sequence: Synthetic oligonucleotide
gacugguagcccaguggua

SEQ ID NO: 1400074 - RNA, 19 nt, Artificial Sequence
  Description of Artificial Sequence: Synthetic oligonucleotide
gccuuggaaaauagaaccu

SEQ ID NO: 1400075 - RNA, 19 nt, Artificial Sequence
  Description of Artificial Sequence: Synthetic oligonucleotide
ggcucaguuucccuggauu

SEQ ID NO: 1400076 - RNA, 19 nt, Artificial Sequence
  Description of Artificial Sequence: Synthetic oligonucleotide
agggccaauuagaggcaaa

SEQ ID NO: 1400077 - RNA, 19 nt, Artificial Sequence
  Description of Artificial Sequence: Synthetic oligonucleotide
caaggacucccgggaauaa

SEQ ID NO: 1400078 - RNA, 19 nt, Artificial Sequence
  Description of Artificial Sequence: Synthetic oligonucleotide
gguaacuagccaggagaua

SEQ ID NO: 1400079 - RNA, 19 nt, Artificial Sequence
  Description of Artificial Sequence: Synthetic oligonucleotide
ggccaauuagaggcaaaua

SEQ ID NO: 1400080 - RNA, 19 nt, Artificial Sequence
  Description of Artificial Sequence: Synthetic oligonucleotide
gcucccuaagggugggaaa

SEQ ID NO: 1400081 - RNA, 19 nt, Artificial Sequence
  Description of Artificial Sequence: Synthetic oligonucleotide
ccuaccggccagccacacc

SEQ ID NO: 1400082 - RNA, 19 nt, Artificial Sequence
  Description of Artificial Sequence: Synthetic oligonucleotide
ccaaucccucagugagccc

SEQ ID NO: 1400083 - RNA, 19 nt, Artificial Sequence
  Description of Artificial Sequence: Synthetic oligonucleotide
caccuaccggccagccaca

SEQ ID NO: 1400084 - RNA, 19 nt, Artificial Sequence
  Description of Artificial Sequence: Synthetic oligonucleotide
cagggccaauuagaggcaa

SEQ ID NO: 1400085 - RNA, 19 nt, Artificial Sequence
  Description of Artificial Sequence: Synthetic oligonucleotide
ccuauuggaggcugacacu

SEQ ID NO: 1400086 - RNA, 19 nt, Artificial Sequence
  Description of Artificial Sequence: Synthetic oligonucleotide
gcaaaaugauucacgucuu

SEQ ID NO: 1400087 - RNA, 19 nt, Artificial Sequence
  Description of Artificial Sequence: Synthetic oligonucleotide
gguagcccagugguaauau

SEQ ID NO: 1400088 - RNA, 19 nt, Artificial Sequence
  Description of Artificial Sequence: Synthetic oligonucleotide
cugcugcacuggcugaagu

SEQ ID NO: 1400089 - RNA, 19 nt, Artificial Sequence
  Description of Artificial Sequence: Synthetic oligonucleotide
ucgcucccuaaggguggga

SEQ ID NO: 1400090 - RNA, 19 nt, Artificial Sequence
  Description of Artificial Sequence: Synthetic oligonucleotide
gggccaauuagaggcaaau

SEQ ID NO: 1400091 - RNA, 19 nt, Artificial Sequence
  Description of Artificial Sequence: Synthetic oligonucleotide
cccauuagcacagggacuu

SEQ ID NO: 1400092 - RNA, 19 nt, Artificial Sequence
  Description of Artificial Sequence: Synthetic oligonucleotide
cugguagcccagugguaau

SEQ ID NO: 1400093 - RNA, 19 nt, Artificial Sequence
  Description of Artificial Sequence: Synthetic oligonucleotide
cugaacgcccuuccucuuu

SEQ ID NO: 1400094 - RNA, 19 nt, Artificial Sequence
  Description of Artificial Sequence: Synthetic oligonucleotide
ggccucgcucccuaagggu

SEQ ID NO: 1400095 - RNA, 19 nt, Artificial Sequence
  Description of Artificial Sequence: Synthetic oligonucleotide
gcuaaaguagagggagguu

SEQ ID NO: 1400096 - RNA, 19 nt, Artificial Sequence
  Description of Artificial Sequence: Synthetic oligonucleotide
gcagacgucuacacagcau

SEQ ID NO: 1400097 - RNA, 19 nt, Artificial Sequence
  Description of Artificial Sequence: Synthetic oligonucleotide
cagugaccuauuggaggcu

SEQ ID NO: 1400098 - RNA, 19 nt, Artificial Sequence
  Description of Artificial Sequence: Synthetic oligonucleotide
cugcaaucuuaaguccauu

SEQ ID NO: 1400099 - RNA, 19 nt, Artificial Sequence
  Description of Artificial Sequence: Synthetic oligonucleotide
gcugaacgcccuuccucuu

SEQ ID NO: 1400100 - RNA, 19 nt, Artificial Sequence
  Description of Artificial Sequence: Synthetic oligonucleotide
ccccggaggugugcuccac

SEQ ID NO: 1400101 - RNA, 19 nt, Artificial Sequence
  Description of Artificial Sequence: Synthetic oligonucleotide
ccuccccugaaggguaccu

SEQ ID NO: 1400102 - RNA, 19 nt, Artificial Sequence
  Description of Artificial Sequence: Synthetic oligonucleotide
guggucucucagggccaau

SEQ ID NO: 1400103 - RNA, 19 nt, Artificial Sequence
  Description of Artificial Sequence: Synthetic oligonucleotide
cccggaggugugcuccacu

SEQ ID NO: 1400104 - RNA, 19 nt, Artificial Sequence
  Description of Artificial Sequence: Synthetic oligonucleotide
auugaauuaguauuuguac

SEQ ID NO: 1400105 - RNA, 19 nt, Artificial Sequence
  Description of Artificial Sequence: Synthetic oligonucleotide
ugaauuaguauuuguacag

SEQ ID NO: 1400106 - RNA, 19 nt, Artificial Sequence
  Description of Artificial Sequence: Synthetic oligonucleotide
aaugacgcuuaugaaaugc

SEQ ID NO: 1400107 - RNA, 19 nt, Artificial Sequence
  Description of Artificial Sequence: Synthetic oligonucleotide
ucacaaaugacgcuuauga

SEQ ID NO: 1400108 - RNA, 19 nt, Artificial Sequence
  Description of Artificial Sequence: Synthetic oligonucleotide
gacuauauugacaagauac

SEQ ID NO: 1400109 - RNA, 19 nt, Artificial Sequence
  Description of Artificial Sequence: Synthetic oligonucleotide
aagaggaccagcuuaaacu

SEQ ID NO: 1400110 - RNA, 19 nt, Artificial Sequence
  Description of Artificial Sequence: Synthetic oligonucleotide
agugcgauugguuagagug

SEQ ID NO: 1400111 - RNA, 19 nt, Artificial Sequence
  Description of Artificial Sequence: Synthetic oligonucleotide
agugcaaugacaauguugg

SEQ ID NO: 1400112 - RNA, 19 nt, Artificial Sequence
  Description of Artificial Sequence: Synthetic oligonucleotide
ugugauaucgcuccugucc

SEQ ID NO: 1400113 - RNA, 19 nt, Artificial Sequence
  Description of Artificial Sequence: Synthetic oligonucleotide
uauauugacaagauacuga

SEQ ID NO: 1400114 - RNA, 19 nt, Artificial Sequence
  Description of Artificial Sequence: Synthetic oligonucleotide
caaagaggcacuuaacugg

SEQ ID NO: 1400115 - RNA, 19 nt, Artificial Sequence
  Description of Artificial Sequence: Synthetic oligonucleotide
ugacuuaagacuuaaaauu

SEQ ID NO: 1400116 - RNA, 19 nt, Artificial Sequence
  Description of Artificial Sequence: Synthetic oligonucleotide
uuagaguggauuccagucg

SEQ ID NO: 1400117 - RNA, 19 nt, Artificial Sequence
  Description of Artificial Sequence: Synthetic oligonucleotide
gaugacagccaaaugaggg

SEQ ID NO: 1400118 - RNA, 19 nt, Artificial Sequence
  Description of Artificial Sequence: Synthetic oligonucleotide
uugaauuaguauuuguaca

SEQ ID NO: 1400119 - RNA, 19 nt, Artificial Sequence
  Description of Artificial Sequence: Synthetic oligonucleotide
agucgggucauucuggugg

SEQ ID NO: 1400120 - RNA, 19 nt, Artificial Sequence
  Description of Artificial Sequence: Synthetic oligonucleotide
ugucccuugacaaagcgga

SEQ ID NO: 1400121 - RNA, 19 nt, Artificial Sequence
  Description of Artificial Sequence: Synthetic oligonucleotide
guaucgucuaagcagacag

SEQ ID NO: 1400122 - RNA, 19 nt, Artificial Sequence
  Description of Artificial Sequence: Synthetic oligonucleotide
agacuuaaaauugaauuag

SEQ ID NO: 1400123 - RNA, 19 nt, Artificial Sequence
  Description of Artificial Sequence: Synthetic oligonucleotide
aaauguaucuguguuggug

SEQ ID NO: 1400124 - RNA, 19 nt, Artificial Sequence
  Description of Artificial Sequence: Synthetic oligonucleotide
agugacuuaagacuuaaaa

SEQ ID NO: 1400125 - RNA, 19 nt, Artificial Sequence
  Description of Artificial Sequence: Synthetic oligonucleotide
uuuugaggucgaucgaucg

SEQ ID NO: 1400126 - RNA, 19 nt, Artificial Sequence
  Description of Artificial Sequence: Synthetic oligonucleotide
acaaaugacgcuuaugaaa

SEQ ID NO: 1400127 - RNA, 19 nt, Artificial Sequence
  Description of Artificial Sequence: Synthetic oligonucleotide
uagaguggauuccagucgg

SEQ ID NO: 1400128 - RNA, 19 nt, Artificial Sequence
  Description of Artificial Sequence: Synthetic oligonucleotide
auauugacaagauacugau

SEQ ID NO: 1400129 - RNA, 19 nt, Artificial Sequence
  Description of Artificial Sequence: Synthetic oligonucleotide
uuaugaaaugcugcgaucu

SEQ ID NO: 1400130 - RNA, 19 nt, Artificial Sequence
  Description of Artificial Sequence: Synthetic oligonucleotide
uuugaggucgaucgaucgg

SEQ ID NO: 1400131 - RNA, 19 nt, Artificial Sequence
  Description of Artificial Sequence: Synthetic oligonucleotide
uccgauugugcucuccugg

SEQ ID NO: 1400132 - RNA, 19 nt, Artificial Sequence
  Description of Artificial Sequence: Synthetic oligonucleotide
auugguuagaguggauucc

SEQ ID NO: 1400133 - RNA, 19 nt, Artificial Sequence
  Description of Artificial Sequence: Synthetic oligonucleotide
aucaucgugauuuggucag

SEQ ID NO: 1400134 - RNA, 19 nt, Artificial Sequence
  Description of Artificial Sequence: Synthetic oligonucleotide
guuaagugcgauugguuag

SEQ ID NO: 1400135 - RNA, 19 nt, Artificial Sequence
  Description of Artificial Sequence: Synthetic oligonucleotide
gaugcuugguagcaguacc

SEQ ID NO: 1400136 - RNA, 19 nt, Artificial Sequence
  Description of Artificial Sequence: Synthetic oligonucleotide
aggaaagccgcuccgauug

SEQ ID NO: 1400137 - RNA, 19 nt, Artificial Sequence
  Description of Artificial Sequence: Synthetic oligonucleotide
gaauugucccuugacaaag

SEQ ID NO: 1400138 - RNA, 19 nt, Artificial Sequence
  Description of Artificial Sequence: Synthetic oligonucleotide
ucgugauuuggucagaaua

SEQ ID NO: 1400139 - RNA, 19 nt, Artificial Sequence
  Description of Artificial Sequence: Synthetic oligonucleotide
ugcaggguggaauaacucc

SEQ ID NO: 1400140 - RNA, 19 nt, Artificial Sequence
  Description of Artificial Sequence: Synthetic oligonucleotide
acgcuuaugaaaugcugcg

SEQ ID NO: 1400141 - RNA, 19 nt, Artificial Sequence
  Description of Artificial Sequence: Synthetic oligonucleotide
gauugguuagaguggauuc

SEQ ID NO: 1400142 - RNA, 19 nt, Artificial Sequence
  Description of Artificial Sequence: Synthetic oligonucleotide
cuuaaacugacagaucuug

SEQ ID NO: 1400143 - RNA, 19 nt, Artificial Sequence
  Description of Artificial Sequence: Synthetic oligonucleotide
agucgagucguuaagugcg

SEQ ID NO: 1400144 - RNA, 19 nt, Artificial Sequence
  Description of Artificial Sequence: Synthetic oligonucleotide
ugugaggaaagccgcuccg

SEQ ID NO: 1400145 - RNA, 19 nt, Artificial Sequence
  Description of Artificial Sequence: Synthetic oligonucleotide
gguggaauaacucccuccg

SEQ ID NO: 1400146 - RNA, 19 nt, Artificial Sequence
  Description of Artificial Sequence: Synthetic oligonucleotide
ucagaauagggcucagagc

SEQ ID NO: 1400147 - RNA, 19 nt, Artificial Sequence
  Description of Artificial Sequence: Synthetic oligonucleotide
uguucuagcaaagggcaag

SEQ ID NO: 1400148 - RNA, 19 nt, Artificial Sequence
  Description of Artificial Sequence: Synthetic oligonucleotide
gagucguuaagugcgauug

SEQ ID NO: 1400149 - RNA, 19 nt, Artificial Sequence
  Description of Artificial Sequence: Synthetic oligonucleotide
uugucccuugacaaagcgg

SEQ ID NO: 1400150 - RNA, 19 nt, Artificial Sequence
  Description of Artificial Sequence: Synthetic oligonucleotide
uuaacugggagggaggccu

SEQ ID NO: 1400151 - RNA, 19 nt, Artificial Sequence
  Description of Artificial Sequence: Synthetic oligonucleotide
aaugacaauguuggggcug

SEQ ID NO: 1400152 - RNA, 19 nt, Artificial Sequence
  Description of Artificial Sequence: Synthetic oligonucleotide
cuauauugacaagauacug

SEQ ID NO: 1400153 - RNA, 19 nt, Artificial Sequence
  Description of Artificial Sequence: Synthetic oligonucleotide
gauugugcucuccugguac

SEQ ID NO: 1400154 - RNA, 19 nt, Artificial Sequence
  Description of Artificial Sequence: Synthetic oligonucleotide
aucgucuaagcagacaguc

SEQ ID NO: 1400155 - RNA, 19 nt, Artificial Sequence
  Description of Artificial Sequence: Synthetic oligonucleotide
gacgcuuaugaaaugcugc

SEQ ID NO: 1400156 - RNA, 19 nt, Artificial Sequence
  Description of Artificial Sequence: Synthetic oligonucleotide
acaagauacugauugguua

SEQ ID NO: 1400157 - RNA, 19 nt, Artificial Sequence
  Description of Artificial Sequence: Synthetic oligonucleotide
gaagcuucuuagcuauugc

SEQ ID NO: 1400158 - RNA, 19 nt, Artificial Sequence
  Description of Artificial Sequence: Synthetic oligonucleotide
ugacgcuuaugaaaugcug

SEQ ID NO: 1400159 - RNA, 19 nt, Artificial Sequence
  Description of Artificial Sequence: Synthetic oligonucleotide
guacucguggaauuguccc

SEQ ID NO: 1400160 - RNA, 19 nt, Artificial Sequence
  Description of Artificial Sequence: Synthetic oligonucleotide
ugguccauugggucgagcc

SEQ ID NO: 1400161 - RNA, 19 nt, Artificial Sequence
  Description of Artificial Sequence: Synthetic oligonucleotide
accgugguaucgucuaagc

SEQ ID NO: 1400162 - RNA, 19 nt, Artificial Sequence
  Description of Artificial Sequence: Synthetic oligonucleotide
aaaugacgcuuaugaaaug

SEQ ID NO: 1400163 - RNA, 19 nt, Artificial Sequence
  Description of Artificial Sequence: Synthetic oligonucleotide
gagucgagucguuaagugc

SEQ ID NO: 1400164 - RNA, 19 nt, Artificial Sequence
  Description of Artificial Sequence: Synthetic oligonucleotide
aagaccacucccagcaagg

SEQ ID NO: 1400165 - RNA, 19 nt, Artificial Sequence
  Description of Artificial Sequence: Synthetic oligonucleotide
aggcacuuaacugggaggg

SEQ ID NO: 1400166 - RNA, 19 nt, Artificial Sequence
  Description of Artificial Sequence: Synthetic oligonucleotide
aucggcugacuauauugac

SEQ ID NO: 1400167 - RNA, 19 nt, Artificial Sequence
  Description of Artificial Sequence: Synthetic oligonucleotide
ucggcugacuauauugaca

SEQ ID NO: 1400168 - RNA, 19 nt, Artificial Sequence
  Description of Artificial Sequence: Synthetic oligonucleotide
acuauauugacaagauacu

SEQ ID NO: 1400169 - RNA, 19 nt, Artificial Sequence
  Description of Artificial Sequence: Synthetic oligonucleotide
cucuguuccggccuggagc

SEQ ID NO: 1400170 - RNA, 19 nt, Artificial Sequence
  Description of Artificial Sequence: Synthetic oligonucleotide
guuauguggagaauucaug

SEQ ID NO: 1400171 - RNA, 19 nt, Artificial Sequence
  Description of Artificial Sequence: Synthetic oligonucleotide
uugaggucgaucgaucggc

SEQ ID NO: 1400172 - RNA, 19 nt, Artificial Sequence
  Description of Artificial Sequence: Synthetic oligonucleotide
ucaucaucgugauuugguc

SEQ ID NO: 1400173 - RNA, 19 nt, Artificial Sequence
  Description of Artificial Sequence: Synthetic oligonucleotide
uguggguguucuagcaaag

SEQ ID NO: 1400174 - RNA, 19 nt, Artificial Sequence
  Description of Artificial Sequence: Synthetic oligonucleotide
ccccaaauacucaucaucg

SEQ ID NO: 1400175 - RNA, 19 nt, Artificial Sequence
  Description of Artificial Sequence: Synthetic oligonucleotide
auaggcuugugcuuccuga

SEQ ID NO: 1400176 - RNA, 19 nt, Artificial Sequence
  Description of Artificial Sequence: Synthetic oligonucleotide
uccgccuaggaucaaaguu

SEQ ID NO: 1400177 - RNA, 19 nt, Artificial Sequence
  Description of Artificial Sequence: Synthetic oligonucleotide
aaagugacuuaagacuuaa

SEQ ID NO: 1400178 - RNA, 19 nt, Artificial Sequence
  Description of Artificial Sequence: Synthetic oligonucleotide
ucuugggaagcuucuuagc

SEQ ID NO: 1400179 - RNA, 19 nt, Artificial Sequence
  Description of Artificial Sequence: Synthetic oligonucleotide
uuccagucgggucauucug

SEQ ID NO: 1400180 - RNA, 19 nt, Artificial Sequence
  Description of Artificial Sequence: Synthetic oligonucleotide
ugcuaugcaaagaggcacu

SEQ ID NO: 1400181 - RNA, 19 nt, Artificial Sequence
  Description of Artificial Sequence: Synthetic oligonucleotide
ugucauagaccacgauggc

SEQ ID NO: 1400182 - RNA, 19 nt, Artificial Sequence
  Description of Artificial Sequence: Synthetic oligonucleotide
gugauuuggucagaauagg

SEQ ID NO: 1400183 - RNA, 19 nt, Artificial Sequence
  Description of Artificial Sequence: Synthetic oligonucleotide
gcaaagaggcacuuaacug

SEQ ID NO: 1400184 - RNA, 19 nt, Artificial Sequence
  Description of Artificial Sequence: Synthetic oligonucleotide
ucccuugacaaagcggagg

SEQ ID NO: 1400185 - RNA, 19 nt, Artificial Sequence
  Description of Artificial Sequence: Synthetic oligonucleotide
ugguagcaguaccagugag

SEQ ID NO: 1400186 - RNA, 19 nt, Artificial Sequence
  Description of Artificial Sequence: Synthetic oligonucleotide
aguaccagugagcgugggg

SEQ ID NO: 1400187 - RNA, 19 nt, Artificial Sequence
  Description of Artificial Sequence: Synthetic oligonucleotide
auugggucgagccgcaccu

SEQ ID NO: 1400188 - RNA, 19 nt, Artificial Sequence
  Description of Artificial Sequence: Synthetic oligonucleotide
agucguuaagugcgauugg

SEQ ID NO: 1400189 - RNA, 19 nt, Artificial Sequence
  Description of Artificial Sequence: Synthetic oligonucleotide
cacuuaacugggagggagg

SEQ ID NO: 1400190 - RNA, 19 nt, Artificial Sequence
  Description of Artificial Sequence: Synthetic oligonucleotide
ucucaaacuugaccguggu

SEQ ID NO: 1400191 - RNA, 19 nt, Artificial Sequence
  Description of Artificial Sequence: Synthetic oligonucleotide
gugacuuaagacuuaaaau

SEQ ID NO: 1400192 - RNA, 19 nt, Artificial Sequence
  Description of Artificial Sequence: Synthetic oligonucleotide
cgugguaucgucuaagcag

SEQ ID NO: 1400193 - RNA, 19 nt, Artificial Sequence
  Description of Artificial Sequence: Synthetic oligonucleotide
ugacuauauugacaagaua

SEQ ID NO: 1400194 - RNA, 19 nt, Artificial Sequence
  Description of Artificial Sequence: Synthetic oligonucleotide
uugguuagaguggauucca

SEQ ID NO: 1400195 - RNA, 19 nt, Artificial Sequence
  Description of Artificial Sequence: Synthetic oligonucleotide
cuugacaaagcggaggaca

SEQ ID NO: 1400196 - RNA, 19 nt, Artificial Sequence
  Description of Artificial Sequence: Synthetic oligonucleotide
ggcagcguuacuugggccg

SEQ ID NO: 1400197 - RNA, 19 nt, Artificial Sequence
  Description of Artificial Sequence: Synthetic oligonucleotide
uguaacuccuucacccaau

SEQ ID NO: 1400198 - RNA, 19 nt, Artificial Sequence
  Description of Artificial Sequence: Synthetic oligonucleotide
ugguuagaguggauuccag

SEQ ID NO: 1400199 - RNA, 19 nt, Artificial Sequence
  Description of Artificial Sequence: Synthetic oligonucleotide
uguugccagcagcuggucc

SEQ ID NO: 1400200 - RNA, 19 nt, Artificial Sequence
  Description of Artificial Sequence: Synthetic oligonucleotide
ccugaugacagccaaauga

SEQ ID NO: 1400201 - RNA, 19 nt, Artificial Sequence
  Description of Artificial Sequence: Synthetic oligonucleotide
ucgucuaagcagacagucu

SEQ ID NO: 1400202 - RNA, 19 nt, Artificial Sequence
  Description of Artificial Sequence: Synthetic oligonucleotide
ugcgauugguuagagugga

SEQ ID NO: 1400203 - RNA, 19 nt, Artificial Sequence
  Description of Artificial Sequence: Synthetic oligonucleotide
caagaccacucccagcaag

SEQ ID NO: 1400204 - RNA, 19 nt, Artificial Sequence
  Description of Artificial Sequence: Synthetic oligonucleotide
ugauggacccuccccugcc

SEQ ID NO: 1400205 - RNA, 19 nt, Artificial Sequence
  Description of Artificial Sequence: Synthetic oligonucleotide
ugccuuauugccugcgagu

SEQ ID NO: 1400206 - RNA, 19 nt, Artificial Sequence
  Description of Artificial Sequence: Synthetic oligonucleotide
aggucgaucgaucggcuga

SEQ ID NO: 1400207 - RNA, 19 nt, Artificial Sequence
  Description of Artificial Sequence: Synthetic oligonucleotide
ggaucaaaguuauguggag

SEQ ID NO: 1400208 - RNA, 19 nt, Artificial Sequence
  Description of Artificial Sequence: Synthetic oligonucleotide
uaucgucuaagcagacagu

SEQ ID NO: 1400209 - RNA, 19 nt, Artificial Sequence
  Description of Artificial Sequence: Synthetic oligonucleotide
guugguuccguccccuccc

SEQ ID NO: 1400210 - RNA, 19 nt, Artificial Sequence
  Description of Artificial Sequence: Synthetic oligonucleotide
uuagcccgugcaaauguau

SEQ ID NO: 1400211 - RNA, 19 nt, Artificial Sequence
  Description of Artificial Sequence: Synthetic oligonucleotide
uuggucagaauagggcuca

SEQ ID NO: 1400212 - RNA, 19 nt, Artificial Sequence
  Description of Artificial Sequence: Synthetic oligonucleotide
gauaucgcuccuguccagc

SEQ ID NO: 1400213 - RNA, 19 nt, Artificial Sequence
  Description of Artificial Sequence: Synthetic oligonucleotide
auguggguguucuagcaaa

SEQ ID NO: 1400214 - RNA, 19 nt, Artificial Sequence
  Description of Artificial Sequence: Synthetic oligonucleotide
ucugccuuauugccugcga

SEQ ID NO: 1400215 - RNA, 19 nt, Artificial Sequence
  Description of Artificial Sequence: Synthetic oligonucleotide
auggacccuccccugcccc

SEQ ID NO: 1400216 - RNA, 19 nt, Artificial Sequence
  Description of Artificial Sequence: Synthetic oligonucleotide
gugauaucgcuccugucca

SEQ ID NO: 1400217 - RNA, 19 nt, Artificial Sequence
  Description of Artificial Sequence: Synthetic oligonucleotide
agcccgugcaaauguaucu

SEQ ID NO: 1400218 - RNA, 19 nt, Artificial Sequence
  Description of Artificial Sequence: Synthetic oligonucleotide
caucaucgugauuugguca

SEQ ID NO: 1400219 - RNA, 19 nt, Artificial Sequence
  Description of Artificial Sequence: Synthetic oligonucleotide
acuugaccgugguaucguc

SEQ ID NO: 1400220 - RNA, 19 nt, Artificial Sequence
  Description of Artificial Sequence: Synthetic oligonucleotide
uccccgacccgccauggcc

SEQ ID NO: 1400221 - RNA, 19 nt, Artificial Sequence
  Description of Artificial Sequence: Synthetic oligonucleotide
uacucguggaauugucccu

SEQ ID NO: 1400222 - RNA, 19 nt, Artificial Sequence
  Description of Artificial Sequence: Synthetic oligonucleotide
aacuugaccgugguaucgu

SEQ ID NO: 1400223 - RNA, 19 nt, Artificial Sequence
  Description of Artificial Sequence: Synthetic oligonucleotide
aagugcgauugguuagagu

SEQ ID NO: 1400224 - RNA, 19 nt, Artificial Sequence
  Description of Artificial Sequence: Synthetic oligonucleotide
ugauaucgcuccuguccag

SEQ ID NO: 1400225 - RNA, 19 nt, Artificial Sequence
  Description of Artificial Sequence: Synthetic oligonucleotide
uugaccgugguaucgucua

SEQ ID NO: 1400226 - RNA, 19 nt, Artificial Sequence
  Description of Artificial Sequence: Synthetic oligonucleotide
uauugacaagauacugauu

SEQ ID NO: 1400227 - RNA, 19 nt, Artificial Sequence
  Description of Artificial Sequence: Synthetic oligonucleotide
gugcuaugcaaagaggcac

SEQ ID NO: 1400228 - RNA, 19 nt, Artificial Sequence
  Description of Artificial Sequence: Synthetic oligonucleotide
ugcccaccaccccaggacc

SEQ ID NO: 1400229 - RNA, 19 nt, Artificial Sequence
  Description of Artificial Sequence: Synthetic oligonucleotide
ucguuaagugcgauugguu

SEQ ID NO: 1400230 - RNA, 19 nt, Artificial Sequence
  Description of Artificial Sequence: Synthetic oligonucleotide
cauugggucgagccgcacc

SEQ ID NO: 1400231 - RNA, 19 nt, Artificial Sequence
  Description of Artificial Sequence: Synthetic oligonucleotide
uucuuagcccgugcaaaug

SEQ ID NO: 1400232 - RNA, 19 nt, Artificial Sequence
  Description of Artificial Sequence: Synthetic oligonucleotide
auccacaccucuguuccgg

SEQ ID NO: 1400233 - RNA, 19 nt, Artificial Sequence
  Description of Artificial Sequence: Synthetic oligonucleotide
gaucggcugacuauauuga

SEQ ID NO: 1400234 - RNA, 19 nt, Artificial Sequence
  Description of Artificial Sequence: Synthetic oligonucleotide
aagccgcuccgauugugcu

SEQ ID NO: 1400235 - RNA, 19 nt, Artificial Sequence
  Description of Artificial Sequence: Synthetic oligonucleotide
auggcccgaugcuugguag

SEQ ID NO: 1400236 - RNA, 19 nt, Artificial Sequence
  Description of Artificial Sequence: Synthetic oligonucleotide
gguguucuagcaaagggca

SEQ ID NO: 1400237 - RNA, 19 nt, Artificial Sequence
  Description of Artificial Sequence: Synthetic oligonucleotide
gugcgauugguuagagugg

SEQ ID NO: 1400238 - RNA, 19 nt, Artificial Sequence
  Description of Artificial Sequence: Synthetic oligonucleotide
gauguggguguucuagcaa

SEQ ID NO: 1400239 - RNA, 19 nt, Artificial Sequence
  Description of Artificial Sequence: Synthetic oligonucleotide
caugauggacccuccccug

SEQ ID NO: 1400240 - RNA, 19 nt, Artificial Sequence
  Description of Artificial Sequence: Synthetic oligonucleotide
ucgaucgaucggcugacua

SEQ ID NO: 1400241 - RNA, 19 nt, Artificial Sequence
  Description of Artificial Sequence: Synthetic oligonucleotide
gugugaggaaagccgcucc

SEQ ID NO: 1400242 - RNA, 19 nt, Artificial Sequence
  Description of Artificial Sequence: Synthetic oligonucleotide
gguccauugggucgagccg

SEQ ID NO: 1400243 - RNA, 19 nt, Artificial Sequence
  Description of Artificial Sequence: Synthetic oligonucleotide
uagcccgugcaaauguauc

SEQ ID NO: 1400244 - RNA, 19 nt, Artificial Sequence
  Description of Artificial Sequence: Synthetic oligonucleotide
auaucgcuccuguccagcu

SEQ ID NO: 1400245 - RNA, 19 nt, Artificial Sequence
  Description of Artificial Sequence: Synthetic oligonucleotide
gugguaucgucuaagcaga

SEQ ID NO: 1400246 - RNA, 19 nt, Artificial Sequence
  Description of Artificial Sequence: Synthetic oligonucleotide
gauuccagucgggucauuc

SEQ ID NO: 1400247 - RNA, 19 nt, Artificial Sequence
  Description of Artificial Sequence: Synthetic oligonucleotide
ucaaaguuauguggagaau

SEQ ID NO: 1400248 - RNA, 19 nt, Artificial Sequence
  Description of Artificial Sequence: Synthetic oligonucleotide
ugugugaggaaagccgcuc

SEQ ID NO: 1400249 - RNA, 19 nt, Artificial Sequence
  Description of Artificial Sequence: Synthetic oligonucleotide
ugacaaagcggaggacaag

SEQ ID NO: 1400250 - RNA, 19 nt, Artificial Sequence
  Description of Artificial Sequence: Synthetic oligonucleotide
aagugggagagcagucgag

SEQ ID NO: 1400251 - RNA, 19 nt, Artificial Sequence
  Description of Artificial Sequence: Synthetic oligonucleotide
ugaggucgaucgaucggcu

SEQ ID NO: 1400252 - RNA, 19 nt, Artificial Sequence
  Description of Artificial Sequence: Synthetic oligonucleotide
ggguguucuagcaaagggc

SEQ ID NO: 1400253 - RNA, 19 nt, Artificial Sequence
  Description of Artificial Sequence: Synthetic oligonucleotide
gucgagagggaacugggaa

SEQ ID NO: 1400254 - RNA, 19 nt, Artificial Sequence
  Description of Artificial Sequence: Synthetic oligonucleotide
guccauugggucgagccgc

SEQ ID NO: 1400255 - RNA, 19 nt, Artificial Sequence
  Description of Artificial Sequence: Synthetic oligonucleotide
aacucccuccgccuaggau

SEQ ID NO: 1400256 - RNA, 19 nt, Artificial Sequence
  Description of Artificial Sequence: Synthetic oligonucleotide
gugaccaaggguggagggg

SEQ ID NO: 1400257 - RNA, 19 nt, Artificial Sequence
  Description of Artificial Sequence: Synthetic oligonucleotide
gauggacccuccccugccc

SEQ ID NO: 1400258 - RNA, 19 nt, Artificial Sequence
  Description of Artificial Sequence: Synthetic oligonucleotide
guggaauaacucccuccgc

SEQ ID NO: 1400259 - RNA, 19 nt, Artificial Sequence
  Description of Artificial Sequence: Synthetic oligonucleotide
agggaggccuccaacgcgg

SEQ ID NO: 1400260 - RNA, 19 nt, Artificial Sequence
  Description of Artificial Sequence: Synthetic oligonucleotide
uucuagcaaagggcaagug

SEQ ID NO: 1400261 - RNA, 19 nt, Artificial Sequence
  Description of Artificial Sequence: Synthetic oligonucleotide
gaccgugguaucgucuaag

SEQ ID NO: 1400262 - RNA, 19 nt, Artificial Sequence
  Description of Artificial Sequence: Synthetic oligonucleotide
ggguggaauaacucccucc

SEQ ID NO: 1400263 - RNA, 19 nt, Artificial Sequence
  Description of Artificial Sequence: Synthetic oligonucleotide
cuuaacugggagggaggcc

SEQ ID NO: 1400264 - RNA, 19 nt, Artificial Sequence
  Description of Artificial Sequence: Synthetic oligonucleotide
agugagcgugggguggggc

SEQ ID NO: 1400265 - RNA, 19 nt, Artificial Sequence
  Description of Artificial Sequence: Synthetic oligonucleotide
agcaaacuguugucaucug

SEQ ID NO: 1400266 - RNA, 19 nt, Artificial Sequence
  Description of Artificial Sequence: Synthetic oligonucleotide
ugcgaucucucugccagcu

SEQ ID NO: 1400267 - RNA, 19 nt, Artificial Sequence
  Description of Artificial Sequence: Synthetic oligonucleotide
cacaaaugacgcuuaugaa

SEQ ID NO: 1400268 - RNA, 19 nt, Artificial Sequence
  Description of Artificial Sequence: Synthetic oligonucleotide
gaggucgaucgaucggcug

SEQ ID NO: 1400269 - RNA, 19 nt, Artificial Sequence
  Description of Artificial Sequence: Synthetic oligonucleotide
guuacuugggccggggcuc

SEQ ID NO: 1400270 - RNA, 19 nt, Artificial Sequence
  Description of Artificial Sequence: Synthetic oligonucleotide
cggugcuaugcaaagaggc

SEQ ID NO: 1400271 - RNA, 19 nt, Artificial Sequence
  Description of Artificial Sequence: Synthetic oligonucleotide
guauguggcugucacaaau

SEQ ID NO: 1400272 - RNA, 19 nt, Artificial Sequence
  Description of Artificial Sequence: Synthetic oligonucleotide
agccugaugacagccaaau

SEQ ID NO: 1400273 - RNA, 19 nt, Artificial Sequence
  Description of Artificial Sequence: Synthetic oligonucleotide
agccgcuccgauugugcuc

SEQ ID NO: 1400274 - RNA, 19 nt, Artificial Sequence
  Description of Artificial Sequence: Synthetic oligonucleotide
agauacugauugguuacau

SEQ ID NO: 1400275 - RNA, 19 nt, Artificial Sequence
  Description of Artificial Sequence: Synthetic oligonucleotide
gcaagugggagagcagucg

SEQ ID NO: 1400276 - RNA, 19 nt, Artificial Sequence
  Description of Artificial Sequence: Synthetic oligonucleotide
augacgcuuaugaaaugcu

SEQ ID NO: 1400277 - RNA, 19 nt, Artificial Sequence
  Description of Artificial Sequence: Synthetic oligonucleotide
cgaucggcugacuauauug

SEQ ID NO: 1400278 - RNA, 19 nt, Artificial Sequence
  Description of Artificial Sequence: Synthetic oligonucleotide
gaaagccgcuccgauugug

SEQ ID NO: 1400279 - RNA, 19 nt, Artificial Sequence
  Description of Artificial Sequence: Synthetic oligonucleotide
cugacuauauugacaagau

SEQ ID NO: 1400280 - RNA, 19 nt, Artificial Sequence
  Description of Artificial Sequence: Synthetic oligonucleotide
ggccaggucugccuuauug

SEQ ID NO: 1400281 - RNA, 19 nt, Artificial Sequence
  Description of Artificial Sequence: Synthetic oligonucleotide
ugguaucgucuaagcagac

SEQ ID NO: 1400282 - RNA, 19 nt, Artificial Sequence
  Description of Artificial Sequence: Synthetic oligonucleotide
gcacuuaacugggagggag

SEQ ID NO: 1400283 - RNA, 19 nt, Artificial Sequence
  Description of Artificial Sequence: Synthetic oligonucleotide
gguacucguggaauugucc

SEQ ID NO: 1400284 - RNA, 19 nt, Artificial Sequence
  Description of Artificial Sequence: Synthetic oligonucleotide
ggaccaagaccacucccag

SEQ ID NO: 1400285 - RNA, 19 nt, Artificial Sequence
  Description of Artificial Sequence: Synthetic oligonucleotide
agcacuggcuucggcuggc

SEQ ID NO: 1400286 - RNA, 19 nt, Artificial Sequence
  Description of Artificial Sequence: Synthetic oligonucleotide
cauaggcuugugcuuccug

SEQ ID NO: 1400287 - RNA, 19 nt, Artificial Sequence
  Description of Artificial Sequence: Synthetic oligonucleotide
aucgugauuuggucagaau

SEQ ID NO: 1400288 - RNA, 19 nt, Artificial Sequence
  Description of Artificial Sequence: Synthetic oligonucleotide
ugguuacauguugaagaaa

SEQ ID NO: 1400289 - RNA, 19 nt, Artificial Sequence
  Description of Artificial Sequence: Synthetic oligonucleotide
uggcccgaugcuugguagc

SEQ ID NO: 1400290 - RNA, 19 nt, Artificial Sequence
  Description of Artificial Sequence: Synthetic oligonucleotide
gaucgaucggcugacuaua

SEQ ID NO: 1400291 - RNA, 19 nt, Artificial Sequence
  Description of Artificial Sequence: Synthetic oligonucleotide
gagcaccaguuacauucug

SEQ ID NO: 1400292 - RNA, 19 nt, Artificial Sequence
  Description of Artificial Sequence: Synthetic oligonucleotide
aagguaagauguggguguu

SEQ ID NO: 1400293 - RNA, 19 nt, Artificial Sequence
  Description of Artificial Sequence: Synthetic oligonucleotide
ggaauugucccuugacaaa

SEQ ID NO: 1400294 - RNA, 19 nt, Artificial Sequence
  Description of Artificial Sequence: Synthetic oligonucleotide
caaaguuauguggagaauu

SEQ ID NO: 1400295 - RNA, 19 nt, Artificial Sequence
  Description of Artificial Sequence: Synthetic oligonucleotide
agggugaccaaggguggag

SEQ ID NO: 1400296 - RNA, 19 nt, Artificial Sequence
  Description of Artificial Sequence: Synthetic oligonucleotide
agaccacgauggcugcuug

SEQ ID NO: 1400297 - RNA, 19 nt, Artificial Sequence
  Description of Artificial Sequence: Synthetic oligonucleotide
guaccagugagcguggggu

SEQ ID NO: 1400298 - RNA, 19 nt, Artificial Sequence
  Description of Artificial Sequence: Synthetic oligonucleotide
cuccgauugugcucuccug

SEQ ID NO: 1400299 - RNA, 19 nt, Artificial Sequence
  Description of Artificial Sequence: Synthetic oligonucleotide
ccuaggaucaaaguuaugu

SEQ ID NO: 1400300 - RNA, 19 nt, Artificial Sequence
  Description of Artificial Sequence: Synthetic oligonucleotide
agguaagauguggguguuc

SEQ ID NO: 1400301 - RNA, 19 nt, Artificial Sequence
  Description of Artificial Sequence: Synthetic oligonucleotide
ucgaucggcugacuauauu

SEQ ID NO: 1400302 - RNA, 19 nt, Artificial Sequence
  Description of Artificial Sequence: Synthetic oligonucleotide
gccuuauugccugcgagug

SEQ ID NO: 1400303 - RNA, 19 nt, Artificial Sequence
  Description of Artificial Sequence: Synthetic oligonucleotide
ugcugcgaucucucugcca

SEQ ID NO: 1400304 - RNA, 19 nt, Artificial Sequence
  Description of Artificial Sequence: Synthetic oligonucleotide
agcguuacuugggccgggg

SEQ ID NO: 1400305 - RNA, 19 nt, Artificial Sequence
  Description of Artificial Sequence: Synthetic oligonucleotide
ugaccgugguaucgucuaa

SEQ ID NO: 1400306 - RNA, 19 nt, Artificial Sequence
  Description of Artificial Sequence: Synthetic oligonucleotide
gugcaaauguaucuguguu

SEQ ID NO: 1400307 - RNA, 19 nt, Artificial Sequence
  Description of Artificial Sequence: Synthetic oligonucleotide
uuauugccugcgagugcaa

SEQ ID NO: 1400308 - RNA, 19 nt, Artificial Sequence
  Description of Artificial Sequence: Synthetic oligonucleotide
gagagcagucgagagggaa

SEQ ID NO: 1400309 - RNA, 19 nt, Artificial Sequence
  Description of Artificial Sequence: Synthetic oligonucleotide
agaauucaugauggacccu

SEQ ID NO: 1400310 - RNA, 19 nt, Artificial Sequence
  Description of Artificial Sequence: Synthetic oligonucleotide
ggugcuaugcaaagaggca

SEQ ID NO: 1400311 - RNA, 19 nt, Artificial Sequence
  Description of Artificial Sequence: Synthetic oligonucleotide
gacaagauacugauugguu

SEQ ID NO: 1400312 - RNA, 19 nt, Artificial Sequence
  Description of Artificial Sequence: Synthetic oligonucleotide
uagaccacgauggcugcuu

SEQ ID NO: 1400313 - RNA, 19 nt, Artificial Sequence
  Description of Artificial Sequence: Synthetic oligonucleotide
gcuuaugaaaugcugcgau

SEQ ID NO: 1400314 - RNA, 19 nt, Artificial Sequence
  Description of Artificial Sequence: Synthetic oligonucleotide
ucaucgugauuuggucaga

SEQ ID NO: 1400315 - RNA, 19 nt, Artificial Sequence
  Description of Artificial Sequence: Synthetic oligonucleotide
uauugccugcgagugcaau

SEQ ID NO: 1400316 - RNA, 19 nt, Artificial Sequence
  Description of Artificial Sequence: Synthetic oligonucleotide
aagugacuuaagacuuaaa

SEQ ID NO: 1400317 - RNA, 19 nt, Artificial Sequence
  Description of Artificial Sequence: Synthetic oligonucleotide
agcugguccauugggucga

SEQ ID NO: 1400318 - RNA, 19 nt, Artificial Sequence
  Description of Artificial Sequence: Synthetic oligonucleotide
gguaagauguggguguucu

SEQ ID NO: 1400319 - RNA, 19 nt, Artificial Sequence
  Description of Artificial Sequence: Synthetic oligonucleotide
gucauagaccacgauggcu

SEQ ID NO: 1400320 - RNA, 19 nt, Artificial Sequence
  Description of Artificial Sequence: Synthetic oligonucleotide
acucguggaauugucccuu

SEQ ID NO: 1400321 - RNA, 19 nt, Artificial Sequence
  Description of Artificial Sequence: Synthetic oligonucleotide
cucccuccgccuaggauca

SEQ ID NO: 1400322 - RNA, 19 nt, Artificial Sequence
  Description of Artificial Sequence: Synthetic oligonucleotide
cuucggcuggcuggguugc

SEQ ID NO: 1400323 - RNA, 19 nt, Artificial Sequence
  Description of Artificial Sequence: Synthetic oligonucleotide
gcuucggcuggcuggguug

SEQ ID NO: 1400324 - RNA, 19 nt, Artificial Sequence
  Description of Artificial Sequence: Synthetic oligonucleotide
gucguuaagugcgauuggu

SEQ ID NO: 1400325 - RNA, 19 nt, Artificial Sequence
  Description of Artificial Sequence: Synthetic oligonucleotide
cugcgaucucucugccagc

SEQ ID NO: 1400326 - RNA, 19 nt, Artificial Sequence
  Description of Artificial Sequence: Synthetic oligonucleotide
gucgggucauucuggugga

SEQ ID NO: 1400327 - RNA, 19 nt, Artificial Sequence
  Description of Artificial Sequence: Synthetic oligonucleotide
gguuagaguggauuccagu

SEQ ID NO: 1400328 - RNA, 19 nt, Artificial Sequence
  Description of Artificial Sequence: Synthetic oligonucleotide
ccggugcuaugcaaagagg

SEQ ID NO: 1400329 - RNA, 19 nt, Artificial Sequence
  Description of Artificial Sequence: Synthetic oligonucleotide
agaccacucccagcaaggu

SEQ ID NO: 1400330 - RNA, 19 nt, Artificial Sequence
  Description of Artificial Sequence: Synthetic oligonucleotide
cgagucgagucguuaagug

SEQ ID NO: 1400331 - RNA, 19 nt, Artificial Sequence
  Description of Artificial Sequence: Synthetic oligonucleotide
ccuuauugccugcgagugc

SEQ ID NO: 1400332 - RNA, 19 nt, Artificial Sequence
  Description of Artificial Sequence: Synthetic oligonucleotide
cagucgggucauucuggug

SEQ ID NO: 1400333 - RNA, 19 nt, Artificial Sequence
  Description of Artificial Sequence: Synthetic oligonucleotide
ggggcucauucuugggaag

SEQ ID NO: 1400334 - RNA, 19 nt, Artificial Sequence
  Description of Artificial Sequence: Synthetic oligonucleotide
uggucagaauagggcucag

SEQ ID NO: 1400335 - RNA, 19 nt, Artificial Sequence
  Description of Artificial Sequence: Synthetic oligonucleotide
gguuccguccccuccccac

SEQ ID NO: 1400336 - RNA, 19 nt, Artificial Sequence
  Description of Artificial Sequence: Synthetic oligonucleotide
gucccuugacaaagcggag

SEQ ID NO: 1400337 - RNA, 19 nt, Artificial Sequence
  Description of Artificial Sequence: Synthetic oligonucleotide
ccagcuuaaacugacagau

SEQ ID NO: 1400338 - RNA, 19 nt, Artificial Sequence
  Description of Artificial Sequence: Synthetic oligonucleotide
ccgugcaaauguaucugug

SEQ ID NO: 1400339 - RNA, 19 nt, Artificial Sequence
  Description of Artificial Sequence: Synthetic oligonucleotide
uggauuccagucgggucau

SEQ ID NO: 1400340 - RNA, 19 nt, Artificial Sequence
  Description of Artificial Sequence: Synthetic oligonucleotide
cugucacaaaugacgcuua

SEQ ID NO: 1400341 - RNA, 19 nt, Artificial Sequence
  Description of Artificial Sequence: Synthetic oligonucleotide
gugcaggguggaauaacuc

SEQ ID NO: 1400342 - RNA, 19 nt, Artificial Sequence
  Description of Artificial Sequence: Synthetic oligonucleotide
gguaucgucuaagcagaca

SEQ ID NO: 1400343 - RNA, 19 nt, Artificial Sequence
  Description of Artificial Sequence: Synthetic oligonucleotide
gcggcagcguuacuugggc

SEQ ID NO: 1400344 - RNA, 19 nt, Artificial Sequence
  Description of Artificial Sequence: Synthetic oligonucleotide
uuacauucuggggcucauu

SEQ ID NO: 1400345 - RNA, 19 nt, Artificial Sequence
  Description of Artificial Sequence: Synthetic oligonucleotide
gggccggugcuaugcaaag

SEQ ID NO: 1400346 - RNA, 19 nt, Artificial Sequence
  Description of Artificial Sequence: Synthetic oligonucleotide
ccuccgccuaggaucaaag

SEQ ID NO: 1400347 - RNA, 19 nt, Artificial Sequence
  Description of Artificial Sequence: Synthetic oligonucleotide
cccacccauccccaaauac

SEQ ID NO: 1400348 - RNA, 19 nt, Artificial Sequence
  Description of Artificial Sequence: Synthetic oligonucleotide
uccggggcggcagcguuac

SEQ ID NO: 1400349 - RNA, 19 nt, Artificial Sequence
  Description of Artificial Sequence: Synthetic oligonucleotide
ggucgagccgcaccucccc

SEQ ID NO: 1400350 - RNA, 19 nt, Artificial Sequence
  Description of Artificial Sequence: Synthetic oligonucleotide
accuccccgacccgccaug

SEQ ID NO: 1400351 - RNA, 19 nt, Artificial Sequence
  Description of Artificial Sequence: Synthetic oligonucleotide
uggggccggugcuaugcaa

SEQ ID NO: 1400352 - RNA, 19 nt, Artificial Sequence
  Description of Artificial Sequence: Synthetic oligonucleotide
cguuaagugcgauugguua

SEQ ID NO: 1400353 - RNA, 19 nt, Artificial Sequence
  Description of Artificial Sequence: Synthetic oligonucleotide
ucgagucguuaagugcgau

SEQ ID NO: 1400354 - RNA, 19 nt, Artificial Sequence
  Description of Artificial Sequence: Synthetic oligonucleotide
ccgccuaggaucaaaguua

SEQ ID NO: 1400355 - RNA, 19 nt, Artificial Sequence
  Description of Artificial Sequence: Synthetic oligonucleotide
gggcggcagcguuacuugg

SEQ ID NO: 1400356 - RNA, 19 nt, Artificial Sequence
  Description of Artificial Sequence: Synthetic oligonucleotide
ccuccaacgcggcuccggg

SEQ ID NO: 1400357 - RNA, 19 nt, Artificial Sequence
  Description of Artificial Sequence: Synthetic oligonucleotide
caucgugauuuggucagaa

SEQ ID NO: 1400358 - RNA, 19 nt, Artificial Sequence
  Description of Artificial Sequence: Synthetic oligonucleotide
gaggaaagccgcuccgauu

SEQ ID NO: 1400359 - RNA, 19 nt, Artificial Sequence
  Description of Artificial Sequence: Synthetic oligonucleotide
cucaaacuugaccguggua

SEQ ID NO: 1400360 - RNA, 19 nt, Artificial Sequence
  Description of Artificial Sequence: Synthetic oligonucleotide
gcccgugcaaauguaucug

SEQ ID NO: 1400361 - RNA, 19 nt, Artificial Sequence
  Description of Artificial Sequence: Synthetic oligonucleotide
cacggcucucuugcuggcc

SEQ ID NO: 1400362 - RNA, 19 nt, Artificial Sequence
  Description of Artificial Sequence: Synthetic oligonucleotide
caggucugccuuauugccu

SEQ ID NO: 1400363 - RNA, 19 nt, Artificial Sequence
  Description of Artificial Sequence: Synthetic oligonucleotide
cccgagucgagucguuaag

SEQ ID NO: 1400364 - RNA, 19 nt, Artificial Sequence
  Description of Artificial Sequence: Synthetic oligonucleotide
gcagccugaugacagccaa

SEQ ID NO: 1400365 - RNA, 19 nt, Artificial Sequence
  Description of Artificial Sequence: Synthetic oligonucleotide
ggcuccuacagacuccgcu

SEQ ID NO: 1400366 - RNA, 19 nt, Artificial Sequence
  Description of Artificial Sequence: Synthetic oligonucleotide
gcugucacaaaugacgcuu

SEQ ID NO: 1400367 - RNA, 19 nt, Artificial Sequence
  Description of Artificial Sequence: Synthetic oligonucleotide
ggcugugauaucgcuccug

SEQ ID NO: 1400368 - RNA, 19 nt, Artificial Sequence
  Description of Artificial Sequence: Synthetic oligonucleotide
caggguggaauaacucccu

SEQ ID NO: 1400369 - RNA, 19 nt, Artificial Sequence
  Description of Artificial Sequence: Synthetic oligonucleotide
caaauguaucuguguuggu

SEQ ID NO: 1400370 - RNA, 19 nt, Artificial Sequence
  Description of Artificial Sequence: Synthetic oligonucleotide
gucgagucguuaagugcga

SEQ ID NO: 1400371 - RNA, 19 nt, Artificial Sequence
  Description of Artificial Sequence: Synthetic oligonucleotide
guguucuagcaaagggcaa

SEQ ID NO: 1400372 - RNA, 19 nt, Artificial Sequence
  Description of Artificial Sequence: Synthetic oligonucleotide
aucgaucggcugacuauau

SEQ ID NO: 1400373 - RNA, 19 nt, Artificial Sequence
  Description of Artificial Sequence: Synthetic oligonucleotide
cagauggggagggucugca

SEQ ID NO: 1400374 - RNA, 19 nt, Artificial Sequence
  Description of Artificial Sequence: Synthetic oligonucleotide
gucuaagcagacagucugu

SEQ ID NO: 1400375 - RNA, 19 nt, Artificial Sequence
  Description of Artificial Sequence: Synthetic oligonucleotide
ggucgaucgaucggcugac

SEQ ID NO: 1400376 - RNA, 19 nt, Artificial Sequence
  Description of Artificial Sequence: Synthetic oligonucleotide
cuaugcaaagaggcacuua

SEQ ID NO: 1400377 - RNA, 19 nt, Artificial Sequence
  Description of Artificial Sequence: Synthetic oligonucleotide
ccccgacccgccauggccc

SEQ ID NO: 1400378 - RNA, 19 nt, Artificial Sequence
  Description of Artificial Sequence: Synthetic oligonucleotide
ccccuuacccacccauccc

SEQ ID NO: 1400379 - RNA, 19 nt, Artificial Sequence
  Description of Artificial Sequence: Synthetic oligonucleotide
cagcguuacuugggccggg

SEQ ID NO: 1400380 - RNA, 19 nt, Artificial Sequence
  Description of Artificial Sequence: Synthetic oligonucleotide
cuccccgacccgccauggc

SEQ ID NO: 1400381 - RNA, 19 nt, Artificial Sequence
  Description of Artificial Sequence: Synthetic oligonucleotide
cugguccauugggucgagc

SEQ ID NO: 1400382 - RNA, 19 nt, Artificial Sequence
  Description of Artificial Sequence: Synthetic oligonucleotide
gcguuacuugggccggggc

SEQ ID NO: 1400383 - RNA, 19 nt, Artificial Sequence
  Description of Artificial Sequence: Synthetic oligonucleotide
gcuugguagcaguaccagu

SEQ ID NO: 1400384 - RNA, 19 nt, Artificial Sequence
  Description of Artificial Sequence: Synthetic oligonucleotide
ccgugguaucgucuaagca

SEQ ID NO: 1400385 - RNA, 19 nt, Artificial Sequence
  Description of Artificial Sequence: Synthetic oligonucleotide
gccuccaacgcggcuccgg

SEQ ID NO: 1400386 - RNA, 19 nt, Artificial Sequence
  Description of Artificial Sequence: Synthetic oligonucleotide
gcuccgauugugcucuccu

SEQ ID NO: 1400387 - RNA, 19 nt, Artificial Sequence
  Description of Artificial Sequence: Synthetic oligonucleotide
cgaugcuugguagcaguac

SEQ ID NO: 1400388 - RNA, 19 nt, Artificial Sequence
  Description of Artificial Sequence: Synthetic oligonucleotide
cuccgccuaggaucaaagu

SEQ ID NO: 1400389 - RNA, 19 nt, Artificial Sequence
  Description of Artificial Sequence: Synthetic oligonucleotide
gcgaucucucugccagcug

SEQ ID NO: 1400390 - RNA, 19 nt, Artificial Sequence
  Description of Artificial Sequence: Synthetic oligonucleotide
ggccaggcugugauaucgc

SEQ ID NO: 1400391 - RNA, 19 nt, Artificial Sequence
  Description of Artificial Sequence: Synthetic oligonucleotide
ccuugacaaagcggaggac

SEQ ID NO: 1400392 - RNA, 19 nt, Artificial Sequence
  Description of Artificial Sequence: Synthetic oligonucleotide
uucggcuggcuggguugcu

SEQ ID NO: 1400393 - RNA, 19 nt, Artificial Sequence
  Description of Artificial Sequence: Synthetic oligonucleotide
ggcugucacaaaugacgcu

SEQ ID NO: 1400394 - RNA, 19 nt, Artificial Sequence
  Description of Artificial Sequence: Synthetic oligonucleotide
gacccgccauggcccgaug

SEQ ID NO: 1400395 - RNA, 19 nt, Artificial Sequence
  Description of Artificial Sequence: Synthetic oligonucleotide
ccuuacccacccaucccca

SEQ ID NO: 1400396 - RNA, 19 nt, Artificial Sequence
  Description of Artificial Sequence: Synthetic oligonucleotide
gcccgagucgagucguuaa

SEQ ID NO: 1400397 - RNA, 19 nt, Artificial Sequence
  Description of Artificial Sequence: Synthetic oligonucleotide
gggcaagugggagagcagu

SEQ ID NO: 1400398 - RNA, 19 nt, Artificial Sequence
  Description of Artificial Sequence: Synthetic oligonucleotide
ggcacuuaacugggaggga

SEQ ID NO: 1400399 - RNA, 19 nt, Artificial Sequence
  Description of Artificial Sequence: Synthetic oligonucleotide
uggagggguccugggccau

SEQ ID NO: 1400400 - RNA, 19 nt, Artificial Sequence
  Description of Artificial Sequence: Synthetic oligonucleotide
cccaaauacucaucaucgu

SEQ ID NO: 1400401 - RNA, 19 nt, Artificial Sequence
  Description of Artificial Sequence: Synthetic oligonucleotide
ggggccggugcuaugcaaa

SEQ ID NO: 1400402 - RNA, 19 nt, Artificial Sequence
  Description of Artificial Sequence: Synthetic oligonucleotide
gccgcuccgauugugcucu

SEQ ID NO: 1400403 - RNA, 19 nt, Artificial Sequence
  Description of Artificial Sequence: Synthetic oligonucleotide
cccgacccgccauggcccg

SEQ ID NO: 1400404 - RNA, 19 nt, Artificial Sequence
  Description of Artificial Sequence: Synthetic oligonucleotide
gcccgaugcuugguagcag

SEQ ID NO: 1400405 - RNA, 19 nt, Artificial Sequence
  Description of Artificial Sequence: Synthetic oligonucleotide
gcuuaaacugacagaucuu

SEQ ID NO: 1400406 - RNA, 19 nt, Artificial Sequence
  Description of Artificial Sequence: Synthetic oligonucleotide
gcagaagaucauauauauu

SEQ ID NO: 1400407 - RNA, 19 nt, Artificial Sequence
  Description of Artificial Sequence: Synthetic oligonucleotide
cggcagcguuacuugggcc

SEQ ID NO: 1400408 - RNA, 19 nt, Artificial Sequence
  Description of Artificial Sequence: Synthetic oligonucleotide
ggaaagccgcuccgauugu

SEQ ID NO: 1400409 - RNA, 19 nt, Artificial Sequence
  Description of Artificial Sequence: Synthetic oligonucleotide
cccgugcaaauguaucugu

SEQ ID NO: 1400410 - RNA, 19 nt, Artificial Sequence
  Description of Artificial Sequence: Synthetic oligonucleotide
cccgaugcuugguagcagu

SEQ ID NO: 1400411 - RNA, 19 nt, Artificial Sequence
  Description of Artificial Sequence: Synthetic oligonucleotide
ccgauugugcucuccuggu

SEQ ID NO: 1400412 - RNA, 19 nt, Artificial Sequence
  Description of Artificial Sequence: Synthetic oligonucleotide
cgcuuaugaaaugcugcga

SEQ ID NO: 1400413 - RNA, 19 nt, Artificial Sequence
  Description of Artificial Sequence: Synthetic oligonucleotide
ccuccccgacccgccaugg

SEQ ID NO: 1400414 - RNA, 19 nt, Artificial Sequence
  Description of Artificial Sequence: Synthetic oligonucleotide
cguuacuugggccggggcu

SEQ ID NO: 1400415 - RNA, 19 nt, Artificial Sequence
  Description of Artificial Sequence: Synthetic oligonucleotide
gggaggccuccaacgcggc

SEQ ID NO: 1400416 - RNA, 19 nt, Artificial Sequence
  Description of Artificial Sequence: Synthetic oligonucleotide
ccagucgggucauucuggu

SEQ ID NO: 1400417 - RNA, 19 nt, Artificial Sequence
  Description of Artificial Sequence: Synthetic oligonucleotide
ccgaugcuugguagcagua

SEQ ID NO: 1400418 - RNA, 19 nt, Artificial Sequence
  Description of Artificial Sequence: Synthetic oligonucleotide
ccauggguauguggcuguc

SEQ ID NO: 1400419 - RNA, 19 nt, Artificial Sequence
  Description of Artificial Sequence: Synthetic oligonucleotide
cgaucgaucggcugacuau

SEQ ID NO: 1400420 - RNA, 19 nt, Artificial Sequence
  Description of Artificial Sequence: Synthetic oligonucleotide
gucgaucgaucggcugacu

SEQ ID NO: 1400421 - RNA, 19 nt, Artificial Sequence
  Description of Artificial Sequence: Synthetic oligonucleotide
ccgcaccuccccgacccgc

SEQ ID NO: 1400422 - RNA, 19 nt, Artificial Sequence
  Description of Artificial Sequence: Synthetic oligonucleotide
cgauugguuagaguggauu

SEQ ID NO: 1400423 - RNA, 19 nt, Artificial Sequence
  Description of Artificial Sequence: Synthetic oligonucleotide
ccgagucgagucguuaagu

SEQ ID NO: 1400424 - RNA, 19 nt, Artificial Sequence
  Description of Artificial Sequence: Synthetic oligonucleotide
ccauugggucgagccgcac

SEQ ID NO: 1400425 - RNA, 19 nt, Artificial Sequence
  Description of Artificial Sequence: Synthetic oligonucleotide
ccaagaggaccagcuuaaa

SEQ ID NO: 1400426 - RNA, 19 nt, Artificial Sequence
  Description of Artificial Sequence: Synthetic oligonucleotide
ucccuccgccuaggaucaa

SEQ ID NO: 1400427 - RNA, 19 nt, Artificial Sequence
  Description of Artificial Sequence: Synthetic oligonucleotide
ggccuccaacgcggcuccg

SEQ ID NO: 1400428 - RNA, 19 nt, Artificial Sequence
  Description of Artificial Sequence: Synthetic oligonucleotide
ggcccgagucgagucguua

SEQ ID NO: 1400429 - RNA, 19 nt, Artificial Sequence
  Description of Artificial Sequence: Synthetic oligonucleotide
cgagucguuaagugcgauu

SEQ ID NO: 1400430 - RNA, 19 nt, Artificial Sequence
  Description of Artificial Sequence: Synthetic oligonucleotide
cccuccgccuaggaucaaa

SEQ ID NO: 1400431 - RNA, 19 nt, Artificial Sequence
  Description of Artificial Sequence: Synthetic oligonucleotide
gcgauugguuagaguggau

SEQ ID NO: 1400432 - RNA, 19 nt, Artificial Sequence
  Description of Artificial Sequence: Synthetic oligonucleotide
ggauuccagucgggucauu

SEQ ID NO: 1400433 - RNA, 19 nt, Artificial Sequence
  Description of Artificial Sequence: Synthetic oligonucleotide
ccgacccgccauggcccga

SEQ ID NO: 1400434 - RNA, 19 nt, Artificial Sequence
  Description of Artificial Sequence: Synthetic oligonucleotide
cgacccgccauggcccgau

SEQ ID NO: 1400435 - RNA, 19 nt, Artificial Sequence
  Description of Artificial Sequence: Synthetic oligonucleotide
uaucaauagagucauagcc

SEQ ID NO: 1400436 - RNA, 19 nt, Artificial Sequence
  Description of Artificial Sequence: Synthetic oligonucleotide
aaaggaccgcuacagaucc

SEQ ID NO: 1400437 - RNA, 19 nt, Artificial Sequence
  Description of Artificial Sequence: Synthetic oligonucleotide
uaucauauaacuuagccaa

SEQ ID NO: 1400438 - RNA, 19 nt, Artificial Sequence
  Description of Artificial Sequence: Synthetic oligonucleotide
aauaauaccugacugcaug

SEQ ID NO: 1400439 - RNA, 19 nt, Artificial Sequence
  Description of Artificial Sequence: Synthetic oligonucleotide
aauaccugacugcaugucc

SEQ ID NO: 1400440 - RNA, 19 nt, Artificial Sequence
  Description of Artificial Sequence: Synthetic oligonucleotide
uugaaugucacguuucacg

SEQ ID NO: 1400441 - RNA, 19 nt, Artificial Sequence
  Description of Artificial Sequence: Synthetic oligonucleotide
gaugugauagccuuggggc

SEQ ID NO: 1400442 - RNA, 19 nt, Artificial Sequence
  Description of Artificial Sequence: Synthetic oligonucleotide
uaaguuaucauauaacuua

SEQ ID NO: 1400443 - RNA, 19 nt, Artificial Sequence
  Description of Artificial Sequence: Synthetic oligonucleotide
aauucaagaaaggucguac

SEQ ID NO: 1400444 - RNA, 19 nt, Artificial Sequence
  Description of Artificial Sequence: Synthetic oligonucleotide
guuaucauauaacuuagcc

SEQ ID NO: 1400445 - RNA, 19 nt, Artificial Sequence
  Description of Artificial Sequence: Synthetic oligonucleotide
uaucgcuggauacagaugc

SEQ ID NO: 1400446 - RNA, 19 nt, Artificial Sequence
  Description of Artificial Sequence: Synthetic oligonucleotide
ugcugcaugaauaauaccu

SEQ ID NO: 1400447 - RNA, 19 nt, Artificial Sequence
  Description of Artificial Sequence: Synthetic oligonucleotide
cauguuuugaauuguuucg

SEQ ID NO: 1400448 - RNA, 19 nt, Artificial Sequence
  Description of Artificial Sequence: Synthetic oligonucleotide
ugaugauugggucaucccg

SEQ ID NO: 1400449 - RNA, 19 nt, Artificial Sequence
  Description of Artificial Sequence: Synthetic oligonucleotide
aaugcuuggcguaagaaag

SEQ ID NO: 1400450 - RNA, 19 nt, Artificial Sequence
  Description of Artificial Sequence: Synthetic oligonucleotide
uuaucauauaacuuagcca

SEQ ID NO: 1400451 - RNA, 19 nt, Artificial Sequence
  Description of Artificial Sequence: Synthetic oligonucleotide
auagaucaagaagagaucg

SEQ ID NO: 1400452 - RNA, 19 nt, Artificial Sequence
  Description of Artificial Sequence: Synthetic oligonucleotide
auaaucaggacacccuccc

SEQ ID NO: 1400453 - RNA, 19 nt, Artificial Sequence
  Description of Artificial Sequence: Synthetic oligonucleotide
ucugucucccugcauaucg

SEQ ID NO: 1400454 - RNA, 19 nt, Artificial Sequence
  Description of Artificial Sequence: Synthetic oligonucleotide
ucugauuuggcccauucga

SEQ ID NO: 1400455 - RNA, 19 nt, Artificial Sequence
  Description of Artificial Sequence: Synthetic oligonucleotide
ucguacauacuucagaagu

SEQ ID NO: 1400456 - RNA, 19 nt, Artificial Sequence
  Description of Artificial Sequence: Synthetic oligonucleotide
aagagaucgcaccagacga

SEQ ID NO: 1400457 - RNA, 19 nt, Artificial Sequence
  Description of Artificial Sequence: Synthetic oligonucleotide
aaagcaugguauguuuugc

SEQ ID NO: 1400458 - RNA, 19 nt, Artificial Sequence
  Description of Artificial Sequence: Synthetic oligonucleotide
aaauguaacgcuuccuggu

SEQ ID NO: 1400459 - RNA, 19 nt, Artificial Sequence
  Description of Artificial Sequence: Synthetic oligonucleotide
gaagagaucgcaccagacg

SEQ ID NO: 1400460 - RNA, 19 nt, Artificial Sequence
  Description of Artificial Sequence: Synthetic oligonucleotide
cauaaguuuuaucuacugg

SEQ ID NO: 1400461 - RNA, 19 nt, Artificial Sequence
  Description of Artificial Sequence: Synthetic oligonucleotide
uacagauccaacucuaugu

SEQ ID NO: 1400462 - RNA, 19 nt, Artificial Sequence
  Description of Artificial Sequence: Synthetic oligonucleotide
aauagaucaagaagagauc

SEQ ID NO: 1400463 - RNA, 19 nt, Artificial Sequence
  Description of Artificial Sequence: Synthetic oligonucleotide
aagaaagaaucuccuagca

SEQ ID NO: 1400464 - RNA, 19 nt, Artificial Sequence
  Description of Artificial Sequence: Synthetic oligonucleotide
cuuggggcuaucaauagag

SEQ ID NO: 1400465 - RNA, 19 nt, Artificial Sequence
  Description of Artificial Sequence: Synthetic oligonucleotide
auucgaugcacucuaaaca

SEQ ID NO: 1400466 - RNA, 19 nt, Artificial Sequence
  Description of Artificial Sequence: Synthetic oligonucleotide
auguguucaaucuguacuc

SEQ ID NO: 1400467 - RNA, 19 nt, Artificial Sequence
  Description of Artificial Sequence: Synthetic oligonucleotide
aaaggucguacauacuuca

SEQ ID NO: 1400468 - RNA, 19 nt, Artificial Sequence
  Description of Artificial Sequence: Synthetic oligonucleotide
ucuaaacauagcucgaccu

SEQ ID NO: 1400469 - RNA, 19 nt, Artificial Sequence
  Description of Artificial Sequence: Synthetic oligonucleotide
uuugaauuguuucgagggc

SEQ ID NO: 1400470 - RNA, 19 nt, Artificial Sequence
  Description of Artificial Sequence: Synthetic oligonucleotide
auauaacuuagccaagugu

SEQ ID NO: 1400471 - RNA, 19 nt, Artificial Sequence
  Description of Artificial Sequence: Synthetic oligonucleotide
uguguguugaugauugggu

SEQ ID NO: 1400472 - RNA, 19 nt, Artificial Sequence
  Description of Artificial Sequence: Synthetic oligonucleotide
ugauuuugcacaacaacau

SEQ ID NO: 1400473 - RNA, 19 nt, Artificial Sequence
  Description of Artificial Sequence: Synthetic oligonucleotide
aaaauaaucaggacacccu

SEQ ID NO: 1400474 - RNA, 19 nt, Artificial Sequence
  Description of Artificial Sequence: Synthetic oligonucleotide
uuuccgagcgaaaaguaga

SEQ ID NO: 1400475 - RNA, 19 nt, Artificial Sequence
  Description of Artificial Sequence: Synthetic oligonucleotide
caugauuuugcacaacaac

SEQ ID NO: 1400476 - RNA, 19 nt, Artificial Sequence
  Description of Artificial Sequence: Synthetic oligonucleotide
acagauccaacucuauguc

SEQ ID NO: 1400477 - RNA, 19 nt, Artificial Sequence
  Description of Artificial Sequence: Synthetic oligonucleotide
caaauguaacgcuuccugg

SEQ ID NO: 1400478 - RNA, 19 nt, Artificial Sequence
  Description of Artificial Sequence: Synthetic oligonucleotide
ucauaaguuuuaucuacug

SEQ ID NO: 1400479 - RNA, 19 nt, Artificial Sequence
  Description of Artificial Sequence: Synthetic oligonucleotide
ucaagaaucaucugugaua

SEQ ID NO: 1400480 - RNA, 19 nt, Artificial Sequence
  Description of Artificial Sequence: Synthetic oligonucleotide
gaugauugggucaucccgg

SEQ ID NO: 1400481 - RNA, 19 nt, Artificial Sequence
  Description of Artificial Sequence: Synthetic oligonucleotide
uuugaugaggcuagauaug

SEQ ID NO: 1400482 - RNA, 19 nt, Artificial Sequence
  Description of Artificial Sequence: Synthetic oligonucleotide
ugcauaucgaagugcaagc

SEQ ID NO: 1400483 - RNA, 19 nt, Artificial Sequence
  Description of Artificial Sequence: Synthetic oligonucleotide
gauuuugcacaacaacaug

SEQ ID NO: 1400484 - RNA, 19 nt, Artificial Sequence
  Description of Artificial Sequence: Synthetic oligonucleotide
cagauuacucaaagcaugg

SEQ ID NO: 1400485 - RNA, 19 nt, Artificial Sequence
  Description of Artificial Sequence: Synthetic oligonucleotide
uuggagaguuugaugaggc

SEQ ID NO: 1400486 - RNA, 19 nt, Artificial Sequence
  Description of Artificial Sequence: Synthetic oligonucleotide
agaaaggucguacauacuu

SEQ ID NO: 1400487 - RNA, 19 nt, Artificial Sequence
  Description of Artificial Sequence: Synthetic oligonucleotide
gauugggucaucccggagc

SEQ ID NO: 1400488 - RNA, 19 nt, Artificial Sequence
  Description of Artificial Sequence: Synthetic oligonucleotide
uguguugaugauuggguca

SEQ ID NO: 1400489 - RNA, 19 nt, Artificial Sequence
  Description of Artificial Sequence: Synthetic oligonucleotide
cuaucaauagagucauagc

SEQ ID NO: 1400490 - RNA, 19 nt, Artificial Sequence
  Description of Artificial Sequence: Synthetic oligonucleotide
uucggcagauuacucaaag

SEQ ID NO: 1400491 - RNA, 19 nt, Artificial Sequence
  Description of Artificial Sequence: Synthetic oligonucleotide
uucauaaguuuuaucuacu

SEQ ID NO: 1400492 - RNA, 19 nt, Artificial Sequence
  Description of Artificial Sequence: Synthetic oligonucleotide
augauuuugcacaacaaca

SEQ ID NO: 1400493 - RNA, 19 nt, Artificial Sequence
  Description of Artificial Sequence: Synthetic oligonucleotide
gcuuuagccuuacugaugg

SEQ ID NO: 1400494 - RNA, 19 nt, Artificial Sequence
  Description of Artificial Sequence: Synthetic oligonucleotide
uucgaugcacucuaaacau

SEQ ID NO: 1400495 - RNA, 19 nt, Artificial Sequence
  Description of Artificial Sequence: Synthetic oligonucleotide
cauucgaugcacucuaaac

SEQ ID NO: 1400496 - RNA, 19 nt, Artificial Sequence
  Description of Artificial Sequence: Synthetic oligonucleotide
gguucaaugacccggauga

SEQ ID NO: 1400497 - RNA, 19 nt, Artificial Sequence
  Description of Artificial Sequence: Synthetic oligonucleotide
ugcacucuaaacauagcuc

SEQ ID NO: 1400498 - RNA, 19 nt, Artificial Sequence
  Description of Artificial Sequence: Synthetic oligonucleotide
caguaaguuaucauauaac

SEQ ID NO: 1400499 - RNA, 19 nt, Artificial Sequence
  Description of Artificial Sequence: Synthetic oligonucleotide
agcugcuuuagccuuacug

SEQ ID NO: 1400500 - RNA, 19 nt, Artificial Sequence
  Description of Artificial Sequence: Synthetic oligonucleotide
cagacgagcugcuuuagcc

SEQ ID NO: 1400501 - RNA, 19 nt, Artificial Sequence
  Description of Artificial Sequence: Synthetic oligonucleotide
gaguccacuacuuuacuca

SEQ ID NO: 1400502 - RNA, 19 nt, Artificial Sequence
  Description of Artificial Sequence: Synthetic oligonucleotide
ugcaugaauaauaccugac

SEQ ID NO: 1400503 - RNA, 19 nt, Artificial Sequence
  Description of Artificial Sequence: Synthetic oligonucleotide
aacgcuuccugguaccucu

SEQ ID NO: 1400504 - RNA, 19 nt, Artificial Sequence
  Description of Artificial Sequence: Synthetic oligonucleotide
gauuacgugagaacuggcc

SEQ ID NO: 1400505 - RNA, 19 nt, Artificial Sequence
  Description of Artificial Sequence: Synthetic oligonucleotide
aacuuuccgagcgaaaagu

SEQ ID NO: 1400506 - RNA, 19 nt, Artificial Sequence
  Description of Artificial Sequence: Synthetic oligonucleotide
cauagcucgaccuccugcc

SEQ ID NO: 1400507 - RNA, 19 nt, Artificial Sequence
  Description of Artificial Sequence: Synthetic oligonucleotide
gagaguuugaugaggcuag

SEQ ID NO: 1400508 - RNA, 19 nt, Artificial Sequence
  Description of Artificial Sequence: Synthetic oligonucleotide
aauuguuucgagggcagcu

SEQ ID NO: 1400509 - RNA, 19 nt, Artificial Sequence
  Description of Artificial Sequence: Synthetic oligonucleotide
ccucuuaguaucaaaauac

SEQ ID NO: 1400510 - RNA, 19 nt, Artificial Sequence
  Description of Artificial Sequence: Synthetic oligonucleotide
ugcugauuacgugagaacu

SEQ ID NO: 1400511 - RNA, 19 nt, Artificial Sequence
  Description of Artificial Sequence: Synthetic oligonucleotide
uagaucaagaagagaucgc

SEQ ID NO: 1400512 - RNA, 19 nt, Artificial Sequence
  Description of Artificial Sequence: Synthetic oligonucleotide
uuacgugagaacuggccgc

SEQ ID NO: 1400513 - RNA, 19 nt, Artificial Sequence
  Description of Artificial Sequence: Synthetic oligonucleotide
cuuuccgagcgaaaaguag

SEQ ID NO: 1400514 - RNA, 19 nt, Artificial Sequence
  Description of Artificial Sequence: Synthetic oligonucleotide
acccaaauguaacgcuucc

SEQ ID NO: 1400515 - RNA, 19 nt, Artificial Sequence
  Description of Artificial Sequence: Synthetic oligonucleotide
cugauuacgugagaacugg

SEQ ID NO: 1400516 - RNA, 19 nt, Artificial Sequence
  Description of Artificial Sequence: Synthetic oligonucleotide
auguaacgcuuccugguac

SEQ ID NO: 1400517 - RNA, 19 nt, Artificial Sequence
  Description of Artificial Sequence: Synthetic oligonucleotide
uuucuaaaagcuguacuuc

SEQ ID NO: 1400518 - RNA, 19 nt, Artificial Sequence
  Description of Artificial Sequence: Synthetic oligonucleotide
uguguucaaucuguacucg

SEQ ID NO: 1400519 - RNA, 19 nt, Artificial Sequence
  Description of Artificial Sequence: Synthetic oligonucleotide
aaugacccggaugagauuu

SEQ ID NO: 1400520 - RNA, 19 nt, Artificial Sequence
  Description of Artificial Sequence: Synthetic oligonucleotide
uuagccuuacugauggaau

SEQ ID NO: 1400521 - RNA, 19 nt, Artificial Sequence
  Description of Artificial Sequence: Synthetic oligonucleotide
ucauauaacuuagccaagu

SEQ ID NO: 1400522 - RNA, 19 nt, Artificial Sequence
  Description of Artificial Sequence: Synthetic oligonucleotide
uucgagcagagguuaaggc

SEQ ID NO: 1400523 - RNA, 19 nt, Artificial Sequence
  Description of Artificial Sequence: Synthetic oligonucleotide
aauguaacgcuuccuggua

SEQ ID NO: 1400524 - RNA, 19 nt, Artificial Sequence
  Description of Artificial Sequence: Synthetic oligonucleotide
aagcaugguauguuuugcu

SEQ ID NO: 1400525 - RNA, 19 nt, Artificial Sequence
  Description of Artificial Sequence: Synthetic oligonucleotide
gcuaucaauagagucauag

SEQ ID NO: 1400526 - RNA, 19 nt, Artificial Sequence
  Description of Artificial Sequence: Synthetic oligonucleotide
uuucacgauggaguggagg

SEQ ID NO: 1400527 - RNA, 19 nt, Artificial Sequence
  Description of Artificial Sequence: Synthetic oligonucleotide
auuacucaaagcaugguau

SEQ ID NO: 1400528 - RNA, 19 nt, Artificial Sequence
  Description of Artificial Sequence: Synthetic oligonucleotide
agguuaaggcagcucgggc

SEQ ID NO: 1400529 - RNA, 19 nt, Artificial Sequence
  Description of Artificial Sequence: Synthetic oligonucleotide
uuagccaaguguguguuga

SEQ ID NO: 1400530 - RNA, 19 nt, Artificial Sequence
  Description of Artificial Sequence: Synthetic oligonucleotide
auucaagaaaggucguaca

SEQ ID NO: 1400531 - RNA, 19 nt, Artificial Sequence
  Description of Artificial Sequence: Synthetic oligonucleotide
aucaauagagucauagccu

SEQ ID NO: 1400532 - RNA, 19 nt, Artificial Sequence
  Description of Artificial Sequence: Synthetic oligonucleotide
caccaaaagggcuuuauca

SEQ ID NO: 1400533 - RNA, 19 nt, Artificial Sequence
  Description of Artificial Sequence: Synthetic oligonucleotide
auaauaccugacugcaugu

SEQ ID NO: 1400534 - RNA, 19 nt, Artificial Sequence
  Description of Artificial Sequence: Synthetic oligonucleotide
accaaaagggcuuuaucau

SEQ ID NO: 1400535 - RNA, 19 nt, Artificial Sequence
  Description of Artificial Sequence: Synthetic oligonucleotide
aacccaaauguaacgcuuc

SEQ ID NO: 1400536 - RNA, 19 nt, Artificial Sequence
  Description of Artificial Sequence: Synthetic oligonucleotide
uguaacgcuuccugguacc

SEQ ID NO: 1400537 - RNA, 19 nt, Artificial Sequence
  Description of Artificial Sequence: Synthetic oligonucleotide
auuggcugugguucgagca

SEQ ID NO: 1400538 - RNA, 19 nt, Artificial Sequence
  Description of Artificial Sequence: Synthetic oligonucleotide
ucgaagugcaagcuuucca

SEQ ID NO: 1400539 - RNA, 19 nt, Artificial Sequence
  Description of Artificial Sequence: Synthetic oligonucleotide
cuaaacauagcucgaccuc

SEQ ID NO: 1400540 - RNA, 19 nt, Artificial Sequence
  Description of Artificial Sequence: Synthetic oligonucleotide
guuugaugaggcuagauau

SEQ ID NO: 1400541 - RNA, 19 nt, Artificial Sequence
  Description of Artificial Sequence: Synthetic oligonucleotide
agaacccaaauguaacgcu

SEQ ID NO: 1400542 - RNA, 19 nt, Artificial Sequence
  Description of Artificial Sequence: Synthetic oligonucleotide
uuuagccuuacugauggaa

SEQ ID NO: 1400543 - RNA, 19 nt, Artificial Sequence
  Description of Artificial Sequence: Synthetic oligonucleotide
ugcuuuagccuuacugaug

SEQ ID NO: 1400544 - RNA, 19 nt, Artificial Sequence
  Description of Artificial Sequence: Synthetic oligonucleotide
uaacuuagccaagugugug

SEQ ID NO: 1400545 - RNA, 19 nt, Artificial Sequence
  Description of Artificial Sequence: Synthetic oligonucleotide
gucggugcugaguagagac

SEQ ID NO: 1400546 - RNA, 19 nt, Artificial Sequence
  Description of Artificial Sequence: Synthetic oligonucleotide
uggggcuaucaauagaguc

SEQ ID NO: 1400547 - RNA, 19 nt, Artificial Sequence
  Description of Artificial Sequence: Synthetic oligonucleotide
cugugauaauuuucuuucc

SEQ ID NO: 1400548 - RNA, 19 nt, Artificial Sequence
  Description of Artificial Sequence: Synthetic oligonucleotide
uguuccaguaaguuaucau

SEQ ID NO: 1400549 - RNA, 19 nt, Artificial Sequence
  Description of Artificial Sequence: Synthetic oligonucleotide
ucuccuagcauuuccccaa

SEQ ID NO: 1400550 - RNA, 19 nt, Artificial Sequence
  Description of Artificial Sequence: Synthetic oligonucleotide
gaaucuccuagcauuuccc

SEQ ID NO: 1400551 - RNA, 19 nt, Artificial Sequence
  Description of Artificial Sequence: Synthetic oligonucleotide
ucuucgccaggagagaccc

SEQ ID NO: 1400552 - RNA, 19 nt, Artificial Sequence
  Description of Artificial Sequence: Synthetic oligonucleotide
auagcucgaccuccugccc

SEQ ID NO: 1400553 - RNA, 19 nt, Artificial Sequence
  Description of Artificial Sequence: Synthetic oligonucleotide
acuuuacucauguuuugaa

SEQ ID NO: 1400554 - RNA, 19 nt, Artificial Sequence
  Description of Artificial Sequence: Synthetic oligonucleotide
ugaggcuagauauguguuc

SEQ ID NO: 1400555 - RNA, 19 nt, Artificial Sequence
  Description of Artificial Sequence: Synthetic oligonucleotide
caaaggaccgcuacagauc

SEQ ID NO: 1400556 - RNA, 19 nt, Artificial Sequence
  Description of Artificial Sequence: Synthetic oligonucleotide
ugaguagagacugggcucu

SEQ ID NO: 1400557 - RNA, 19 nt, Artificial Sequence
  Description of Artificial Sequence: Synthetic oligonucleotide
cuuggcguaagaaaguucu

SEQ ID NO: 1400558 - RNA, 19 nt, Artificial Sequence
  Description of Artificial Sequence: Synthetic oligonucleotide
ugauuacgugagaacuggc

SEQ ID NO: 1400559 - RNA, 19 nt, Artificial Sequence
  Description of Artificial Sequence: Synthetic oligonucleotide
gaaauagaucaagaagaga

SEQ ID NO: 1400560 - RNA, 19 nt, Artificial Sequence
  Description of Artificial Sequence: Synthetic oligonucleotide
gauggaauucaagaaaggu

SEQ ID NO: 1400561 - RNA, 19 nt, Artificial Sequence
  Description of Artificial Sequence: Synthetic oligonucleotide
aucgaagugcaagcuuucc

SEQ ID NO: 1400562 - RNA, 19 nt, Artificial Sequence
  Description of Artificial Sequence: Synthetic oligonucleotide
aaagguucaaugacccgga

SEQ ID NO: 1400563 - RNA, 19 nt, Artificial Sequence
  Description of Artificial Sequence: Synthetic oligonucleotide
guagaaguaugaguaagca

SEQ ID NO: 1400564 - RNA, 19 nt, Artificial Sequence
  Description of Artificial Sequence: Synthetic oligonucleotide
cacguuucacgauggagug

SEQ ID NO: 1400565 - RNA, 19 nt, Artificial Sequence
  Description of Artificial Sequence: Synthetic oligonucleotide
cugaguagagacugggcuc

SEQ ID NO: 1400566 - RNA, 19 nt, Artificial Sequence
  Description of Artificial Sequence: Synthetic oligonucleotide
ucggcagauuacucaaagc

SEQ ID NO: 1400567 - RNA, 19 nt, Artificial Sequence
  Description of Artificial Sequence: Synthetic oligonucleotide
aggucguacauacuucaga

SEQ ID NO: 1400568 - RNA, 19 nt, Artificial Sequence
  Description of Artificial Sequence: Synthetic oligonucleotide
guucgagcagagguuaagg

SEQ ID NO: 1400569 - RNA, 19 nt, Artificial Sequence
  Description of Artificial Sequence: Synthetic oligonucleotide
gauccaacucuaugucagc

SEQ ID NO: 1400570 - RNA, 19 nt, Artificial Sequence
  Description of Artificial Sequence: Synthetic oligonucleotide
aaaugccucguagaaguau

SEQ ID NO: 1400571 - RNA, 19 nt, Artificial Sequence
  Description of Artificial Sequence: Synthetic oligonucleotide
uuccgagcgaaaaguagaa

SEQ ID NO: 1400572 - RNA, 19 nt, Artificial Sequence
  Description of Artificial Sequence: Synthetic oligonucleotide
agguucaaugacccggaug

SEQ ID NO: 1400573 - RNA, 19 nt, Artificial Sequence
  Description of Artificial Sequence: Synthetic oligonucleotide
ugugguucgagcagagguu

SEQ ID NO: 1400574 - RNA, 19 nt, Artificial Sequence
  Description of Artificial Sequence: Synthetic oligonucleotide
gaucaagaagagaucgcac

SEQ ID NO: 1400575 - RNA, 19 nt, Artificial Sequence
  Description of Artificial Sequence: Synthetic oligonucleotide
agacgagcugcuuuagccu

SEQ ID NO: 1400576 - RNA, 19 nt, Artificial Sequence
  Description of Artificial Sequence: Synthetic oligonucleotide
gaggcuagauauguguuca

SEQ ID NO: 1400577 - RNA, 19 nt, Artificial Sequence
  Description of Artificial Sequence: Synthetic oligonucleotide
gaaaggucguacauacuuc

SEQ ID NO: 1400578 - RNA, 19 nt, Artificial Sequence
  Description of Artificial Sequence: Synthetic oligonucleotide
agucuucgccaggagagac

SEQ ID NO: 1400579 - RNA, 19 nt, Artificial Sequence
  Description of Artificial Sequence: Synthetic oligonucleotide
augugauagccuuggggcu

SEQ ID NO: 1400580 - RNA, 19 nt, Artificial Sequence
  Description of Artificial Sequence: Synthetic oligonucleotide
ccaaauguaacgcuuccug

SEQ ID NO: 1400581 - RNA, 19 nt, Artificial Sequence
  Description of Artificial Sequence: Synthetic oligonucleotide
uggauacagaugcaccaau

SEQ ID NO: 1400582 - RNA, 19 nt, Artificial Sequence
  Description of Artificial Sequence: Synthetic oligonucleotide
auaacuuagccaagugugu

SEQ ID NO: 1400583 - RNA, 19 nt, Artificial Sequence
  Description of Artificial Sequence: Synthetic oligonucleotide
gcagauuacucaaagcaug

SEQ ID NO: 1400584 - RNA, 19 nt, Artificial Sequence
  Description of Artificial Sequence: Synthetic oligonucleotide
gcuagauauguguucaauc

SEQ ID NO: 1400585 - RNA, 19 nt, Artificial Sequence
  Description of Artificial Sequence: Synthetic oligonucleotide
uccaaaggaccgcuacaga

SEQ ID NO: 1400586 - RNA, 19 nt, Artificial Sequence
  Description of Artificial Sequence: Synthetic oligonucleotide
uccaaugcuuggcguaaga

SEQ ID NO: 1400587 - RNA, 19 nt, Artificial Sequence
  Description of Artificial Sequence: Synthetic oligonucleotide
agcgaaaaguagaacagaa

SEQ ID NO: 1400588 - RNA, 19 nt, Artificial Sequence
  Description of Artificial Sequence: Synthetic oligonucleotide
uaucgaagugcaagcuuuc

SEQ ID NO: 1400589 - RNA, 19 nt, Artificial Sequence
  Description of Artificial Sequence: Synthetic oligonucleotide
uucgccaggagagacccca

SEQ ID NO: 1400590 - RNA, 19 nt, Artificial Sequence
  Description of Artificial Sequence: Synthetic oligonucleotide
uggccagugcugauuacgu

SEQ ID NO: 1400591 - RNA, 19 nt, Artificial Sequence
  Description of Artificial Sequence: Synthetic oligonucleotide
auaucgaagugcaagcuuu

SEQ ID NO: 1400592 - RNA, 19 nt, Artificial Sequence
  Description of Artificial Sequence: Synthetic oligonucleotide
guagagacugggcucucug

SEQ ID NO: 1400593 - RNA, 19 nt, Artificial Sequence
  Description of Artificial Sequence: Synthetic oligonucleotide
ugauugggucaucccggag

SEQ ID NO: 1400594 - RNA, 19 nt, Artificial Sequence
  Description of Artificial Sequence: Synthetic oligonucleotide
agcaugguauguuuugcuu

SEQ ID NO: 1400595 - RNA, 19 nt, Artificial Sequence
  Description of Artificial Sequence: Synthetic oligonucleotide
cuuucggcagauuacucaa

SEQ ID NO: 1400596 - RNA, 19 nt, Artificial Sequence
  Description of Artificial Sequence: Synthetic oligonucleotide
ggcuuuguuguagagggag

SEQ ID NO: 1400597 - RNA, 19 nt, Artificial Sequence
  Description of Artificial Sequence: Synthetic oligonucleotide
aaggucguacauacuucag

SEQ ID NO: 1400598 - RNA, 19 nt, Artificial Sequence
  Description of Artificial Sequence: Synthetic oligonucleotide
cuaucgcuggauacagaug

SEQ ID NO: 1400599 - RNA, 19 nt, Artificial Sequence
  Description of Artificial Sequence: Synthetic oligonucleotide
agagguuaaggcagcucgg

SEQ ID NO: 1400600 - RNA, 19 nt, Artificial Sequence
  Description of Artificial Sequence: Synthetic oligonucleotide
ggucguacauacuucagaa

SEQ ID NO: 1400601 - RNA, 19 nt, Artificial Sequence
  Description of Artificial Sequence: Synthetic oligonucleotide
guaugaguaagcaguuuuc

SEQ ID NO: 1400602 - RNA, 19 nt, Artificial Sequence
  Description of Artificial Sequence: Synthetic oligonucleotide
uacgugagaacuggccgcc

SEQ ID NO: 1400603 - RNA, 19 nt, Artificial Sequence
  Description of Artificial Sequence: Synthetic oligonucleotide
cugcaugaauaauaccuga

SEQ ID NO: 1400604 - RNA, 19 nt, Artificial Sequence
  Description of Artificial Sequence: Synthetic oligonucleotide
gaugcacucuaaacauagc

SEQ ID NO: 1400605 - RNA, 19 nt, Artificial Sequence
  Description of Artificial Sequence: Synthetic oligonucleotide
uuggggcuaucaauagagu

SEQ ID NO: 1400606 - RNA, 19 nt, Artificial Sequence
  Description of Artificial Sequence: Synthetic oligonucleotide
uuuccccaaggguucacuc

SEQ ID NO: 1400607 - RNA, 19 nt, Artificial Sequence
  Description of Artificial Sequence: Synthetic oligonucleotide
auacuucagaaguccucca

SEQ ID NO: 1400608 - RNA, 19 nt, Artificial Sequence
  Description of Artificial Sequence: Synthetic oligonucleotide
ugggguguugagcaugauu

SEQ ID NO: 1400609 - RNA, 19 nt, Artificial Sequence
  Description of Artificial Sequence: Synthetic oligonucleotide
acucuaugucagcuucuug

SEQ ID NO: 1400610 - RNA, 19 nt, Artificial Sequence
  Description of Artificial Sequence: Synthetic oligonucleotide
agauuuuguuccaguaagu

SEQ ID NO: 1400611 - RNA, 19 nt, Artificial Sequence
  Description of Artificial Sequence: Synthetic oligonucleotide
ugccucguagaaguaugag

SEQ ID NO: 1400612 - RNA, 19 nt, Artificial Sequence
  Description of Artificial Sequence: Synthetic oligonucleotide
augauugggucaucccgga

SEQ ID NO: 1400613 - RNA, 19 nt, Artificial Sequence
  Description of Artificial Sequence: Synthetic oligonucleotide
gaccccaguucaaggaugc

SEQ ID NO: 1400614 - RNA, 19 nt, Artificial Sequence
  Description of Artificial Sequence: Synthetic oligonucleotide
auaccugacugcaugucca

SEQ ID NO: 1400615 - RNA, 19 nt, Artificial Sequence
  Description of Artificial Sequence: Synthetic oligonucleotide
uggagaguuugaugaggcu

SEQ ID NO: 1400616 - RNA, 19 nt, Artificial Sequence
  Description of Artificial Sequence: Synthetic oligonucleotide
gaauuguuucgagggcagc

SEQ ID NO: 1400617 - RNA, 19 nt, Artificial Sequence
  Description of Artificial Sequence: Synthetic oligonucleotide
ugucacguuucacgaugga

SEQ ID NO: 1400618 - RNA, 19 nt, Artificial Sequence
  Description of Artificial Sequence: Synthetic oligonucleotide
ucgaugcacucuaaacaua

SEQ ID NO: 1400619 - RNA, 19 nt, Artificial Sequence
  Description of Artificial Sequence: Synthetic oligonucleotide
auuuggcccauucgaugca

SEQ ID NO: 1400620 - RNA, 19 nt, Artificial Sequence
  Description of Artificial Sequence: Synthetic oligonucleotide
uagagggaguccacuacuu

SEQ ID NO: 1400621 - RNA, 19 nt, Artificial Sequence
  Description of Artificial Sequence: Synthetic oligonucleotide
cugcugcaugaauaauacc

SEQ ID NO: 1400622 - RNA, 19 nt, Artificial Sequence
  Description of Artificial Sequence: Synthetic oligonucleotide
augucacguuucacgaugg

SEQ ID NO: 1400623 - RNA, 19 nt, Artificial Sequence
  Description of Artificial Sequence: Synthetic oligonucleotide
uuucggcagauuacucaaa

SEQ ID NO: 1400624 - RNA, 19 nt, Artificial Sequence
  Description of Artificial Sequence: Synthetic oligonucleotide
cgagcgaaaaguagaacag

SEQ ID NO: 1400625 - RNA, 19 nt, Artificial Sequence
  Description of Artificial Sequence: Synthetic oligonucleotide
cagagaugugauagccuug

SEQ ID NO: 1400626 - RNA, 19 nt, Artificial Sequence
  Description of Artificial Sequence: Synthetic oligonucleotide
cuuagccaaguguguguug

SEQ ID NO: 1400627 - RNA, 19 nt, Artificial Sequence
  Description of Artificial Sequence: Synthetic oligonucleotide
uggcguaagaaaguucuuu

SEQ ID NO: 1400628 - RNA, 19 nt, Artificial Sequence
  Description of Artificial Sequence: Synthetic oligonucleotide
gagcgaaaaguagaacaga

SEQ ID NO: 1400629 - RNA, 19 nt, Artificial Sequence
  Description of Artificial Sequence: Synthetic oligonucleotide
gcugcaugaauaauaccug

SEQ ID NO: 1400630 - RNA, 19 nt, Artificial Sequence
  Description of Artificial Sequence: Synthetic oligonucleotide
ucgauggaggccucccggu

SEQ ID NO: 1400631 - RNA, 19 nt, Artificial Sequence
  Description of Artificial Sequence: Synthetic oligonucleotide
ugucucccugcauaucgaa

SEQ ID NO: 1400632 - RNA, 19 nt, Artificial Sequence
  Description of Artificial Sequence: Synthetic oligonucleotide
aagaaaggucguacauacu

SEQ ID NO: 1400633 - RNA, 19 nt, Artificial Sequence
  Description of Artificial Sequence: Synthetic oligonucleotide
ccgagcgaaaaguagaaca

SEQ ID NO: 1400634 - RNA, 19 nt, Artificial Sequence
  Description of Artificial Sequence: Synthetic oligonucleotide
gaagugcaagcuuuccacu

SEQ ID NO: 1400635 - RNA, 19 nt, Artificial Sequence
  Description of Artificial Sequence: Synthetic oligonucleotide
aaguaugaguaagcaguuu

SEQ ID NO: 1400636 - RNA, 19 nt, Artificial Sequence
  Description of Artificial Sequence: Synthetic oligonucleotide
ucccugcauaucgaagugc

SEQ ID NO: 1400637 - RNA, 19 nt, Artificial Sequence
  Description of Artificial Sequence: Synthetic oligonucleotide
ucccggucggugcugagua

SEQ ID NO: 1400638 - RNA, 19 nt, Artificial Sequence
  Description of Artificial Sequence: Synthetic oligonucleotide
acuggccgccuaucgcugg

SEQ ID NO: 1400639 - RNA, 19 nt, Artificial Sequence
  Description of Artificial Sequence: Synthetic oligonucleotide
gcuagcuugagccacacau

SEQ ID NO: 1400640 - RNA, 19 nt, Artificial Sequence
  Description of Artificial Sequence: Synthetic oligonucleotide
agagaucgcaccagacgag

SEQ ID NO: 1400641 - RNA, 19 nt, Artificial Sequence
  Description of Artificial Sequence: Synthetic oligonucleotide
cugcccgguagucugucag

SEQ ID NO: 1400642 - RNA, 19 nt, Artificial Sequence
  Description of Artificial Sequence: Synthetic oligonucleotide
ccaacucuaugucagcuuc

SEQ ID NO: 1400643 - RNA, 19 nt, Artificial Sequence
  Description of Artificial Sequence: Synthetic oligonucleotide
ucgcuggauacagaugcac

SEQ ID NO: 1400644 - RNA, 19 nt, Artificial Sequence
  Description of Artificial Sequence: Synthetic oligonucleotide
cgaagugcaagcuuuccac

SEQ ID NO: 1400645 - RNA, 19 nt, Artificial Sequence
  Description of Artificial Sequence: Synthetic oligonucleotide
gcuuucggcagauuacuca

SEQ ID NO: 1400646 - RNA, 19 nt, Artificial Sequence
  Description of Artificial Sequence: Synthetic oligonucleotide
ggauacagaugcaccaaug

SEQ ID NO: 1400647 - RNA, 19 nt, Artificial Sequence
  Description of Artificial Sequence: Synthetic oligonucleotide
gaccgcuacagauccaacu

SEQ ID NO: 1400648 - RNA, 19 nt, Artificial Sequence
  Description of Artificial Sequence: Synthetic oligonucleotide
cuuuacucauguuuugaau

SEQ ID NO: 1400649 - RNA, 19 nt, Artificial Sequence
  Description of Artificial Sequence: Synthetic oligonucleotide
gcugauuacgugagaacug

SEQ ID NO: 1400650 - RNA, 19 nt, Artificial Sequence
  Description of Artificial Sequence: Synthetic oligonucleotide
agccaaguguguguugaug

SEQ ID NO: 1400651 - RNA, 19 nt, Artificial Sequence
  Description of Artificial Sequence: Synthetic oligonucleotide
acguuucacgauggagugg

SEQ ID NO: 1400652 - RNA, 19 nt, Artificial Sequence
  Description of Artificial Sequence: Synthetic oligonucleotide
ugacccggaugagauuuug

SEQ ID NO: 1400653 - RNA, 19 nt, Artificial Sequence
  Description of Artificial Sequence: Synthetic oligonucleotide
cacucuaaacauagcucga

SEQ ID NO: 1400654 - RNA, 19 nt, Artificial Sequence
  Description of Artificial Sequence: Synthetic oligonucleotide
ugcuuggcguaagaaaguu

SEQ ID NO: 1400655 - RNA, 19 nt, Artificial Sequence
  Description of Artificial Sequence: Synthetic oligonucleotide
agcuugagccacacauuuc

SEQ ID NO: 1400656 - RNA, 19 nt, Artificial Sequence
  Description of Artificial Sequence: Synthetic oligonucleotide
uuggcguaagaaaguucuu

SEQ ID NO: 1400657 - RNA, 19 nt, Artificial Sequence
  Description of Artificial Sequence: Synthetic oligonucleotide
guagagggaguccacuacu

SEQ ID NO: 1400658 - RNA, 19 nt, Artificial Sequence
  Description of Artificial Sequence: Synthetic oligonucleotide
uccgagcgaaaaguagaac

SEQ ID NO: 1400659 - RNA, 19 nt, Artificial Sequence
  Description of Artificial Sequence: Synthetic oligonucleotide
cucguagaaguaugaguaa

SEQ ID NO: 1400660 - RNA, 19 nt, Artificial Sequence
  Description of Artificial Sequence: Synthetic oligonucleotide
agaccccaguucaaggaug

SEQ ID NO: 1400661 - RNA, 19 nt, Artificial Sequence
  Description of Artificial Sequence: Synthetic oligonucleotide
aggaccgcuacagauccaa

SEQ ID NO: 1400662 - RNA, 19 nt, Artificial Sequence
  Description of Artificial Sequence: Synthetic oligonucleotide
cuccuagcauuuccccaag

SEQ ID NO: 1400663 - RNA, 19 nt, Artificial Sequence
  Description of Artificial Sequence: Synthetic oligonucleotide
gaugcaccaaugaggguua

SEQ ID NO: 1400664 - RNA, 19 nt, Artificial Sequence
  Description of Artificial Sequence: Synthetic oligonucleotide
ugguucgagcagagguuaa

SEQ ID NO: 1400665 - RNA, 19 nt, Artificial Sequence
  Description of Artificial Sequence: Synthetic oligonucleotide
ggagaguuugaugaggcua

SEQ ID NO: 1400666 - RNA, 19 nt, Artificial Sequence
  Description of Artificial Sequence: Synthetic oligonucleotide
ugcuagcuugagccacaca

SEQ ID NO: 1400667 - RNA, 19 nt, Artificial Sequence
  Description of Artificial Sequence: Synthetic oligonucleotide
ggaguggaggaugucgaug

SEQ ID NO: 1400668 - RNA, 19 nt, Artificial Sequence
  Description of Artificial Sequence: Synthetic oligonucleotide
gguucgagcagagguuaag

SEQ ID NO: 1400669 - RNA, 19 nt, Artificial Sequence
  Description of Artificial Sequence: Synthetic oligonucleotide
ucugcccgguagucuguca

SEQ ID NO: 1400670 - RNA, 19 nt, Artificial Sequence
  Description of Artificial Sequence: Synthetic oligonucleotide
aggguucacucucccgcca

SEQ ID NO: 1400671 - RNA, 19 nt, Artificial Sequence
  Description of Artificial Sequence: Synthetic oligonucleotide
aguagagacugggcucucu

SEQ ID NO: 1400672 - RNA, 19 nt, Artificial Sequence
  Description of Artificial Sequence: Synthetic oligonucleotide
augcuuggcguaagaaagu

SEQ ID NO: 1400673 - RNA, 19 nt, Artificial Sequence
  Description of Artificial Sequence: Synthetic oligonucleotide
acuuuccgagcgaaaagua

SEQ ID NO: 1400674 - RNA, 19 nt, Artificial Sequence
  Description of Artificial Sequence: Synthetic oligonucleotide
gaaugucacguuucacgau

SEQ ID NO: 1400675 - RNA, 19 nt, Artificial Sequence
  Description of Artificial Sequence: Synthetic oligonucleotide
gucuucgccaggagagacc

SEQ ID NO: 1400676 - RNA, 19 nt, Artificial Sequence
  Description of Artificial Sequence: Synthetic oligonucleotide
cuugagccacacauuucaa

SEQ ID NO: 1400677 - RNA, 19 nt, Artificial Sequence
  Description of Artificial Sequence: Synthetic oligonucleotide
gagaccccaguucaaggau

SEQ ID NO: 1400678 - RNA, 19 nt, Artificial Sequence
  Description of Artificial Sequence: Synthetic oligonucleotide
uaacgcuuccugguaccuc

SEQ ID NO: 1400679 - RNA, 19 nt, Artificial Sequence
  Description of Artificial Sequence: Synthetic oligonucleotide
gaacccaaauguaacgcuu

SEQ ID NO: 1400680 - RNA, 19 nt, Artificial Sequence
  Description of Artificial Sequence: Synthetic oligonucleotide
agaguuugaugaggcuaga

SEQ ID NO: 1400681 - RNA, 19 nt, Artificial Sequence
  Description of Artificial Sequence: Synthetic oligonucleotide
accagacgagcugcuuuag

SEQ ID NO: 1400682 - RNA, 19 nt, Artificial Sequence
  Description of Artificial Sequence: Synthetic oligonucleotide
agaucgcaccagacgagcu

SEQ ID NO: 1400683 - RNA, 19 nt, Artificial Sequence
  Description of Artificial Sequence: Synthetic oligonucleotide
cugauuuggcccauucgau

SEQ ID NO: 1400684 - RNA, 19 nt, Artificial Sequence
  Description of Artificial Sequence: Synthetic oligonucleotide
cauaucgaagugcaagcuu

SEQ ID NO: 1400685 - RNA, 19 nt, Artificial Sequence
  Description of Artificial Sequence: Synthetic oligonucleotide
gagcaugauuuugcacaac

SEQ ID NO: 1400686 - RNA, 19 nt, Artificial Sequence
  Description of Artificial Sequence: Synthetic oligonucleotide
cgcuggauacagaugcacc

SEQ ID NO: 1400687 - RNA, 19 nt, Artificial Sequence
  Description of Artificial Sequence: Synthetic oligonucleotide
gaauaauaccugacugcau

SEQ ID NO: 1400688 - RNA, 19 nt, Artificial Sequence
  Description of Artificial Sequence: Synthetic oligonucleotide
guuguagagggaguccacu

SEQ ID NO: 1400689 - RNA, 19 nt, Artificial Sequence
  Description of Artificial Sequence: Synthetic oligonucleotide
cucccauguuggccagugc

SEQ ID NO: 1400690 - RNA, 19 nt, Artificial Sequence
  Description of Artificial Sequence: Synthetic oligonucleotide
augccucguagaaguauga

SEQ ID NO: 1400691 - RNA, 19 nt, Artificial Sequence
  Description of Artificial Sequence: Synthetic oligonucleotide
cuccaaugcuuggcguaag

SEQ ID NO: 1400692 - RNA, 19 nt, Artificial Sequence
  Description of Artificial Sequence: Synthetic oligonucleotide
gccgccuaucgcuggauac

SEQ ID NO: 1400693 - RNA, 19 nt, Artificial Sequence
  Description of Artificial Sequence: Synthetic oligonucleotide
cuuuagccuuacugaugga

SEQ ID NO: 1400694 - RNA, 19 nt, Artificial Sequence
  Description of Artificial Sequence: Synthetic oligonucleotide
cuucgccaggagagacccc

SEQ ID NO: 1400695 - RNA, 19 nt, Artificial Sequence
  Description of Artificial Sequence: Synthetic oligonucleotide
guuucacgauggaguggag

SEQ ID NO: 1400696 - RNA, 19 nt, Artificial Sequence
  Description of Artificial Sequence: Synthetic oligonucleotide
ggcguaagaaaguucuuuu

SEQ ID NO: 1400697 - RNA, 19 nt, Artificial Sequence
  Description of Artificial Sequence: Synthetic oligonucleotide
uuuccacgucggccuugga

SEQ ID NO: 1400698 - RNA, 19 nt, Artificial Sequence
  Description of Artificial Sequence: Synthetic oligonucleotide
gcgaaaaguagaacagaaa

SEQ ID NO: 1400699 - RNA, 19 nt, Artificial Sequence
  Description of Artificial Sequence: Synthetic oligonucleotide
gcaugauuuugcacaacaa

SEQ ID NO: 1400700 - RNA, 19 nt, Artificial Sequence
  Description of Artificial Sequence: Synthetic oligonucleotide
ccuaucgcuggauacagau

SEQ ID NO: 1400701 - RNA, 19 nt, Artificial Sequence
  Description of Artificial Sequence: Synthetic oligonucleotide
ccaaaggaccgcuacagau

SEQ ID NO: 1400702 - RNA, 19 nt, Artificial Sequence
  Description of Artificial Sequence: Synthetic oligonucleotide
ggcagauuacucaaagcau

SEQ ID NO: 1400703 - RNA, 19 nt, Artificial Sequence
  Description of Artificial Sequence: Synthetic oligonucleotide
aaggaccgcuacagaucca

SEQ ID NO: 1400704 - RNA, 19 nt, Artificial Sequence
  Description of Artificial Sequence: Synthetic oligonucleotide
cguuucacgauggagugga

SEQ ID NO: 1400705 - RNA, 19 nt, Artificial Sequence
  Description of Artificial Sequence: Synthetic oligonucleotide
ccacgucggccuuggagag

SEQ ID NO: 1400706 - RNA, 19 nt, Artificial Sequence
  Description of Artificial Sequence: Synthetic oligonucleotide
gcccauucgaugcacucua

SEQ ID NO: 1400707 - RNA, 19 nt, Artificial Sequence
  Description of Artificial Sequence: Synthetic oligonucleotide
gcuuggcguaagaaaguuc

SEQ ID NO: 1400708 - RNA, 19 nt, Artificial Sequence
  Description of Artificial Sequence: Synthetic oligonucleotide
guaacgcuuccugguaccu

SEQ ID NO: 1400709 - RNA, 19 nt, Artificial Sequence
  Description of Artificial Sequence: Synthetic oligonucleotide
gaguagagacugggcucuc

SEQ ID NO: 1400710 - RNA, 19 nt, Artificial Sequence
  Description of Artificial Sequence: Synthetic oligonucleotide
uucucugauuuggcccauu

SEQ ID NO: 1400711 - RNA, 19 nt, Artificial Sequence
  Description of Artificial Sequence: Synthetic oligonucleotide
gggcuaucaauagagucau

SEQ ID NO: 1400712 - RNA, 19 nt, Artificial Sequence
  Description of Artificial Sequence: Synthetic oligonucleotide
gcauaucgaagugcaagcu

SEQ ID NO: 1400713 - RNA, 19 nt, Artificial Sequence
  Description of Artificial Sequence: Synthetic oligonucleotide
cagucuucgccaggagaga

SEQ ID NO: 1400714 - RNA, 19 nt, Artificial Sequence
  Description of Artificial Sequence: Synthetic oligonucleotide
gacccggaugagauuuugu

SEQ ID NO: 1400715 - RNA, 19 nt, Artificial Sequence
  Description of Artificial Sequence: Synthetic oligonucleotide
ggcuuucggcagauuacuc

SEQ ID NO: 1400716 - RNA, 19 nt, Artificial Sequence
  Description of Artificial Sequence: Synthetic oligonucleotide
cuggccgccuaucgcugga

SEQ ID NO: 1400717 - RNA, 19 nt, Artificial Sequence
  Description of Artificial Sequence: Synthetic oligonucleotide
ccggagcucugcccgguag

SEQ ID NO: 1400718 - RNA, 19 nt, Artificial Sequence
  Description of Artificial Sequence: Synthetic oligonucleotide
ggcuagauauguguucaau

SEQ ID NO: 1400719 - RNA, 19 nt, Artificial Sequence
  Description of Artificial Sequence: Synthetic oligonucleotide
cgccuaucgcuggauacag

SEQ ID NO: 1400720 - RNA, 19 nt, Artificial Sequence
  Description of Artificial Sequence: Synthetic oligonucleotide
augacccggaugagauuuu

SEQ ID NO: 1400721 - RNA, 19 nt, Artificial Sequence
  Description of Artificial Sequence: Synthetic oligonucleotide
cggucggugcugaguagag

SEQ ID NO: 1400722 - RNA, 19 nt, Artificial Sequence
  Description of Artificial Sequence: Synthetic oligonucleotide
ggaccgcuacagauccaac

SEQ ID NO: 1400723 - RNA, 19 nt, Artificial Sequence
  Description of Artificial Sequence: Synthetic oligonucleotide
uggccgccuaucgcuggau

SEQ ID NO: 1400724 - RNA, 19 nt, Artificial Sequence
  Description of Artificial Sequence: Synthetic oligonucleotide
caaugacccggaugagauu

SEQ ID NO: 1400725 - RNA, 19 nt, Artificial Sequence
  Description of Artificial Sequence: Synthetic oligonucleotide
gugauagccuuggggcuau

SEQ ID NO: 1400726 - RNA, 19 nt, Artificial Sequence
  Description of Artificial Sequence: Synthetic oligonucleotide
ccuccaaugcuuggcguaa

SEQ ID NO: 1400727 - RNA, 19 nt, Artificial Sequence
  Description of Artificial Sequence: Synthetic oligonucleotide
ccgccuaucgcuggauaca

SEQ ID NO: 1400728 - RNA, 19 nt, Artificial Sequence
  Description of Artificial Sequence: Synthetic oligonucleotide
ccggucggugcugaguaga

SEQ ID NO: 1400729 - RNA, 19 nt, Artificial Sequence
  Description of Artificial Sequence: Synthetic oligonucleotide
gccuaucgcuggauacaga

SEQ ID NO: 1400730 - RNA, 19 nt, Artificial Sequence
  Description of Artificial Sequence: Synthetic oligonucleotide
cccaaauguaacgcuuccu

SEQ ID NO: 1400731 - RNA, 19 nt, Artificial Sequence
  Description of Artificial Sequence: Synthetic oligonucleotide
ggccgccuaucgcuggaua

SEQ ID NO: 1400732 - RNA, 19 nt, Artificial Sequence
  Description of Artificial Sequence: Synthetic oligonucleotide
cucucccgccacacacacu

SEQ ID NO: 1400733 - RNA, 19 nt, Artificial Sequence
  Description of Artificial Sequence: Synthetic oligonucleotide
ggacugccuccucaucauu

SEQ ID NO: 1400734 - RNA, 19 nt, Artificial Sequence
  Description of Artificial Sequence: Synthetic oligonucleotide
ggcuaucaauagagucaua

SEQ ID NO: 1400735 - RNA, 19 nt, Artificial Sequence
  Description of Artificial Sequence: Synthetic oligonucleotide
cacgucggccuuggagagu

SEQ ID NO: 1400736 - RNA, 19 nt, Artificial Sequence
  Description of Artificial Sequence: Synthetic oligonucleotide
ccacuacuuuacucauguu

SEQ ID NO: 1400737 - RNA, 19 nt, Artificial Sequence
  Description of Artificial Sequence: Synthetic oligonucleotide
cggagcucugcccgguagu

SEQ ID NO: 1400738 - RNA, 19 nt, Artificial Sequence
  Description of Artificial Sequence: Synthetic oligonucleotide
aaucacauaacauuauagc

SEQ ID NO: 1400739 - RNA, 19 nt, Artificial Sequence
  Description of Artificial Sequence: Synthetic oligonucleotide
aaguaaugaaaggagaugc

SEQ ID NO: 1400740 - RNA, 19 nt, Artificial Sequence
  Description of Artificial Sequence: Synthetic oligonucleotide
aauaauaaauauuccaaga

SEQ ID NO: 1400741 - RNA, 19 nt, Artificial Sequence
  Description of Artificial Sequence: Synthetic oligonucleotide
ugggaugugaauauuaacg

SEQ ID NO: 1400742 - RNA, 19 nt, Artificial Sequence
  Description of Artificial Sequence: Synthetic oligonucleotide
ucacauaacauuauagcgg

SEQ ID NO: 1400743 - RNA, 19 nt, Artificial Sequence
  Description of Artificial Sequence: Synthetic oligonucleotide
uguaauaauaaauauucca

SEQ ID NO: 1400744 - RNA, 19 nt, Artificial Sequence
  Description of Artificial Sequence: Synthetic oligonucleotide
ugucauguaagucagaaac

SEQ ID NO: 1400745 - RNA, 19 nt, Artificial Sequence
  Description of Artificial Sequence: Synthetic oligonucleotide
auaacauuauagcggaucc

SEQ ID NO: 1400746 - RNA, 19 nt, Artificial Sequence
  Description of Artificial Sequence: Synthetic oligonucleotide
aucacauaacauuauagcg

SEQ ID NO: 1400747 - RNA, 19 nt, Artificial Sequence
  Description of Artificial Sequence: Synthetic oligonucleotide
uguagaagaacauauguga

SEQ ID NO: 1400748 - RNA, 19 nt, Artificial Sequence
  Description of Artificial Sequence: Synthetic oligonucleotide
auguuugaaauauacuggc

SEQ ID NO: 1400749 - RNA, 19 nt, Artificial Sequence
  Description of Artificial Sequence: Synthetic oligonucleotide
aaaauauuagucugcgcag

SEQ ID NO: 1400750 - RNA, 19 nt, Artificial Sequence
  Description of Artificial Sequence: Synthetic oligonucleotide
aauauacuggccaacaguc

SEQ ID NO: 1400751 - RNA, 19 nt, Artificial Sequence
  Description of Artificial Sequence: Synthetic oligonucleotide
ugaauauuaacgugaacag

SEQ ID NO: 1400752 - RNA, 19 nt, Artificial Sequence
  Description of Artificial Sequence: Synthetic oligonucleotide
ucuaauguuguaauaauaa

SEQ ID NO: 1400753 - RNA, 19 nt, Artificial Sequence
  Description of Artificial Sequence: Synthetic oligonucleotide
uuuguagaagaacauaugu

SEQ ID NO: 1400754 - RNA, 19 nt, Artificial Sequence
  Description of Artificial Sequence: Synthetic oligonucleotide
uuuacuuuggaaacccggg

SEQ ID NO: 1400755 - RNA, 19 nt, Artificial Sequence
  Description of Artificial Sequence: Synthetic oligonucleotide
gauguuugaaauauacugg

SEQ ID NO: 1400756 - RNA, 19 nt, Artificial Sequence
  Description of Artificial Sequence: Synthetic oligonucleotide
uuugcuuaaucuucaaucc

SEQ ID NO: 1400757 - RNA, 19 nt, Artificial Sequence
  Description of Artificial Sequence: Synthetic oligonucleotide
uaaugaaaggagaugccgg

SEQ ID NO: 1400758 - RNA, 19 nt, Artificial Sequence
  Description of Artificial Sequence: Synthetic oligonucleotide
uguaguuuuacuugguggc

SEQ ID NO: 1400759 - RNA, 19 nt, Artificial Sequence
  Description of Artificial Sequence: Synthetic oligonucleotide
aauauuagucugcgcaggg

SEQ ID NO: 1400760 - RNA, 19 nt, Artificial Sequence
  Description of Artificial Sequence: Synthetic oligonucleotide
ugcaacuccauuuaggugu

SEQ ID NO: 1400761 - RNA, 19 nt, Artificial Sequence
  Description of Artificial Sequence: Synthetic oligonucleotide
uuuucuuacaguacuaaaa

SEQ ID NO: 1400762 - RNA, 19 nt, Artificial Sequence
  Description of Artificial Sequence: Synthetic oligonucleotide
ucgaacaucaaaagaauga

SEQ ID NO: 1400763 - RNA, 19 nt, Artificial Sequence
  Description of Artificial Sequence: Synthetic oligonucleotide
ugaaguaucacucguucug

SEQ ID NO: 1400764 - RNA, 19 nt, Artificial Sequence
  Description of Artificial Sequence: Synthetic oligonucleotide
guuuugauacuuccaaucg

SEQ ID NO: 1400765 - RNA, 19 nt, Artificial Sequence
  Description of Artificial Sequence: Synthetic oligonucleotide
aauauuaacgugaacagua

SEQ ID NO: 1400766 - RNA, 19 nt, Artificial Sequence
  Description of Artificial Sequence: Synthetic oligonucleotide
ucugcuaguucuaauguug

SEQ ID NO: 1400767 - RNA, 19 nt, Artificial Sequence
  Description of Artificial Sequence: Synthetic oligonucleotide
aacauuauagcggauccag

SEQ ID NO: 1400768 - RNA, 19 nt, Artificial Sequence
  Description of Artificial Sequence: Synthetic oligonucleotide
uaaaagaccagagacaaaa

SEQ ID NO: 1400769 - RNA, 19 nt, Artificial Sequence
  Description of Artificial Sequence: Synthetic oligonucleotide
uuguagaagaacauaugug

SEQ ID NO: 1400770 - RNA, 19 nt, Artificial Sequence
  Description of Artificial Sequence: Synthetic oligonucleotide
aguggcaagaaucacauaa

SEQ ID NO: 1400771 - RNA, 19 nt, Artificial Sequence
  Description of Artificial Sequence: Synthetic oligonucleotide
uuucuuacaguacuaaaau

SEQ ID NO: 1400772 - RNA, 19 nt, Artificial Sequence
  Description of Artificial Sequence: Synthetic oligonucleotide
ugaacaguacacucuagag

SEQ ID NO: 1400773 - RNA, 19 nt, Artificial Sequence
  Description of Artificial Sequence: Synthetic oligonucleotide
auuaacgugaacaguacac

SEQ ID NO: 1400774 - RNA, 19 nt, Artificial Sequence
  Description of Artificial Sequence: Synthetic oligonucleotide
ugaaaggagaugccggccg

SEQ ID NO: 1400775 - RNA, 19 nt, Artificial Sequence
  Description of Artificial Sequence: Synthetic oligonucleotide
acuguguuagcacucgaac

SEQ ID NO: 1400776 - RNA, 19 nt, Artificial Sequence
  Description of Artificial Sequence: Synthetic oligonucleotide
ucuucaauccaacuguagu

SEQ ID NO: 1400777 - RNA, 19 nt, Artificial Sequence
  Description of Artificial Sequence: Synthetic oligonucleotide
acauaugugaaguaucacu

SEQ ID NO: 1400778 - RNA, 19 nt, Artificial Sequence
  Description of Artificial Sequence: Synthetic oligonucleotide
cauaugugaaguaucacuc

SEQ ID NO: 1400779 - RNA, 19 nt, Artificial Sequence
  Description of Artificial Sequence: Synthetic oligonucleotide
aauccaacuguaguuuuac

SEQ ID NO: 1400780 - RNA, 19 nt, Artificial Sequence
  Description of Artificial Sequence: Synthetic oligonucleotide
ugaaguaaugaaaggagau

SEQ ID NO: 1400781 - RNA, 19 nt, Artificial Sequence
  Description of Artificial Sequence: Synthetic oligonucleotide
agaaaauauuagucugcgc

SEQ ID NO: 1400782 - RNA, 19 nt, Artificial Sequence
  Description of Artificial Sequence: Synthetic oligonucleotide
uucacagcgaucagcaacc

SEQ ID NO: 1400783 - RNA, 19 nt, Artificial Sequence
  Description of Artificial Sequence: Synthetic oligonucleotide
aaaauggucucuaauuucu

SEQ ID NO: 1400784 - RNA, 19 nt, Artificial Sequence
  Description of Artificial Sequence: Synthetic oligonucleotide
uguuuugauacuuccaauc

SEQ ID NO: 1400785 - RNA, 19 nt, Artificial Sequence
  Description of Artificial Sequence: Synthetic oligonucleotide
auaugugaaguaucacucg

SEQ ID NO: 1400786 - RNA, 19 nt, Artificial Sequence
  Description of Artificial Sequence: Synthetic oligonucleotide
uauuagucugcgcagggca

SEQ ID NO: 1400787 - RNA, 19 nt, Artificial Sequence
  Description of Artificial Sequence: Synthetic oligonucleotide
auaguuuacuuuggaaacc

SEQ ID NO: 1400788 - RNA, 19 nt, Artificial Sequence
  Description of Artificial Sequence: Synthetic oligonucleotide
ucaucugcuaguucuaaug

SEQ ID NO: 1400789 - RNA, 19 nt, Artificial Sequence
  Description of Artificial Sequence: Synthetic oligonucleotide
gaugugaauauuaacguga

SEQ ID NO: 1400790 - RNA, 19 nt, Artificial Sequence
  Description of Artificial Sequence: Synthetic oligonucleotide
uacaguacuaaaaucuaaa

SEQ ID NO: 1400791 - RNA, 19 nt, Artificial Sequence
  Description of Artificial Sequence: Synthetic oligonucleotide
guaaugaaaggagaugccg

SEQ ID NO: 1400792 - RNA, 19 nt, Artificial Sequence
  Description of Artificial Sequence: Synthetic oligonucleotide
agguuuacagaaccacugc

SEQ ID NO: 1400793 - RNA, 19 nt, Artificial Sequence
  Description of Artificial Sequence: Synthetic oligonucleotide
guuugaaauauacuggcca

SEQ ID NO: 1400794 - RNA, 19 nt, Artificial Sequence
  Description of Artificial Sequence: Synthetic oligonucleotide
uaugugaaguaucacucgu

SEQ ID NO: 1400795 - RNA, 19 nt, Artificial Sequence
  Description of Artificial Sequence: Synthetic oligonucleotide
uacaauguagguucuuccc

SEQ ID NO: 1400796 - RNA, 19 nt, Artificial Sequence
  Description of Artificial Sequence: Synthetic oligonucleotide
uuuaacuuugggucuguug

SEQ ID NO: 1400797 - RNA, 19 nt, Artificial Sequence
  Description of Artificial Sequence: Synthetic oligonucleotide
cauaauagugauguguuac

SEQ ID NO: 1400798 - RNA, 19 nt, Artificial Sequence
  Description of Artificial Sequence: Synthetic oligonucleotide
accuaauagacauuauugu

SEQ ID NO: 1400799 - RNA, 19 nt, Artificial Sequence
  Description of Artificial Sequence: Synthetic oligonucleotide
ugauacuuccaaucggcag

SEQ ID NO: 1400800 - RNA, 19 nt, Artificial Sequence
  Description of Artificial Sequence: Synthetic oligonucleotide
auuauuguagcagagcuaa

SEQ ID NO: 1400801 - RNA, 19 nt, Artificial Sequence
  Description of Artificial Sequence: Synthetic oligonucleotide
uggaucauggacaucguaa

SEQ ID NO: 1400802 - RNA, 19 nt, Artificial Sequence
  Description of Artificial Sequence: Synthetic oligonucleotide
uguauaguuuacuuuggaa

SEQ ID NO: 1400803 - RNA, 19 nt, Artificial Sequence
  Description of Artificial Sequence: Synthetic oligonucleotide
acugaaguaaugaaaggag

SEQ ID NO: 1400804 - RNA, 19 nt, Artificial Sequence
  Description of Artificial Sequence: Synthetic oligonucleotide
gacgcuucgcucuucacag

SEQ ID NO: 1400805 - RNA, 19 nt, Artificial Sequence
  Description of Artificial Sequence: Synthetic oligonucleotide
ugugaaguaucacucguuc

SEQ ID NO: 1400806 - RNA, 19 nt, Artificial Sequence
  Description of Artificial Sequence: Synthetic oligonucleotide
ucacugaaguaaugaaagg

SEQ ID NO: 1400807 - RNA, 19 nt, Artificial Sequence
  Description of Artificial Sequence: Synthetic oligonucleotide
ucagcaaccguguucaaaa

SEQ ID NO: 1400808 - RNA, 19 nt, Artificial Sequence
  Description of Artificial Sequence: Synthetic oligonucleotide
agacaaaagguuuucccug

SEQ ID NO: 1400809 - RNA, 19 nt, Artificial Sequence
  Description of Artificial Sequence: Synthetic oligonucleotide
ugcaauggcaccuauguuu

SEQ ID NO: 1400810 - RNA, 19 nt, Artificial Sequence
  Description of Artificial Sequence: Synthetic oligonucleotide
aagaacacuguccuauuaa

SEQ ID NO: 1400811 - RNA, 19 nt, Artificial Sequence
  Description of Artificial Sequence: Synthetic oligonucleotide
aguaaugaaaggagaugcc

SEQ ID NO: 1400812 - RNA, 19 nt, Artificial Sequence
  Description of Artificial Sequence: Synthetic oligonucleotide
guaucacucguucugagac

SEQ ID NO: 1400813 - RNA, 19 nt, Artificial Sequence
  Description of Artificial Sequence: Synthetic oligonucleotide
uauuaacgugaacaguaca

SEQ ID NO: 1400814 - RNA, 19 nt, Artificial Sequence
  Description of Artificial Sequence: Synthetic oligonucleotide
acuccauuuagguguauag

SEQ ID NO: 1400815 - RNA, 19 nt, Artificial Sequence
  Description of Artificial Sequence: Synthetic oligonucleotide
auugacaaccaauucaaua

SEQ ID NO: 1400816 - RNA, 19 nt, Artificial Sequence
  Description of Artificial Sequence: Synthetic oligonucleotide
uuacuuuggaaacccgggc

SEQ ID NO: 1400817 - RNA, 19 nt, Artificial Sequence
  Description of Artificial Sequence: Synthetic oligonucleotide
caacuguaguuuuacuugg

SEQ ID NO: 1400818 - RNA, 19 nt, Artificial Sequence
  Description of Artificial Sequence: Synthetic oligonucleotide
acagccaggaggucaacac

SEQ ID NO: 1400819 - RNA, 19 nt, Artificial Sequence
  Description of Artificial Sequence: Synthetic oligonucleotide
gacaucguaaguucgacaa

SEQ ID NO: 1400820 - RNA, 19 nt, Artificial Sequence
  Description of Artificial Sequence: Synthetic oligonucleotide
guaacugacagaaguagcc

SEQ ID NO: 1400821 - RNA, 19 nt, Artificial Sequence
  Description of Artificial Sequence: Synthetic oligonucleotide
ugauucaucaccgaauuua

SEQ ID NO: 1400822 - RNA, 19 nt, Artificial Sequence
  Description of Artificial Sequence: Synthetic oligonucleotide
uguggauauaagcucugca

SEQ ID NO: 1400823 - RNA, 19 nt, Artificial Sequence
  Description of Artificial Sequence: Synthetic oligonucleotide
aaaguauccgaguuagcuu

SEQ ID NO: 1400824 - RNA, 19 nt, Artificial Sequence
  Description of Artificial Sequence: Synthetic oligonucleotide
agaacauaugugaaguauc

SEQ ID NO: 1400825 - RNA, 19 nt, Artificial Sequence
  Description of Artificial Sequence: Synthetic oligonucleotide
aguucgacaagauaacuuu

SEQ ID NO: 1400826 - RNA, 19 nt, Artificial Sequence
  Description of Artificial Sequence: Synthetic oligonucleotide
uacuuuggaaacccgggca

SEQ ID NO: 1400827 - RNA, 19 nt, Artificial Sequence
  Description of Artificial Sequence: Synthetic oligonucleotide
gaacaguacacucuagaga

SEQ ID NO: 1400828 - RNA, 19 nt, Artificial Sequence
  Description of Artificial Sequence: Synthetic oligonucleotide
uaacugacagaaguagccg

SEQ ID NO: 1400829 - RNA, 19 nt, Artificial Sequence
  Description of Artificial Sequence: Synthetic oligonucleotide
guuuacuuuggaaacccgg

SEQ ID NO: 1400830 - RNA, 19 nt, Artificial Sequence
  Description of Artificial Sequence: Synthetic oligonucleotide
aguucuaauguuguaauaa

SEQ ID NO: 1400831 - RNA, 19 nt, Artificial Sequence
  Description of Artificial Sequence: Synthetic oligonucleotide
uucuaauguuguaauaaua

SEQ ID NO: 1400832 - RNA, 19 nt, Artificial Sequence
  Description of Artificial Sequence: Synthetic oligonucleotide
cuacaauguagguucuucc

SEQ ID NO: 1400833 - RNA, 19 nt, Artificial Sequence
  Description of Artificial Sequence: Synthetic oligonucleotide
uccgaguuagcuuugggau

SEQ ID NO: 1400834 - RNA, 19 nt, Artificial Sequence
  Description of Artificial Sequence: Synthetic oligonucleotide
aaucucaugaucgaacauu

SEQ ID NO: 1400835 - RNA, 19 nt, Artificial Sequence
  Description of Artificial Sequence: Synthetic oligonucleotide
aaguaucacucguucugag

SEQ ID NO: 1400836 - RNA, 19 nt, Artificial Sequence
  Description of Artificial Sequence: Synthetic oligonucleotide
uggauauaagcucugcauu

SEQ ID NO: 1400837 - RNA, 19 nt, Artificial Sequence
  Description of Artificial Sequence: Synthetic oligonucleotide
cauggacaucguaaguucg

SEQ ID NO: 1400838 - RNA, 19 nt, Artificial Sequence
  Description of Artificial Sequence: Synthetic oligonucleotide
agugauguguuacaugcaa

SEQ ID NO: 1400839 - RNA, 19 nt, Artificial Sequence
  Description of Artificial Sequence: Synthetic oligonucleotide
auauuaacgugaacaguac

SEQ ID NO: 1400840 - RNA, 19 nt, Artificial Sequence
  Description of Artificial Sequence: Synthetic oligonucleotide
uuagguguauaguuuacuu

SEQ ID NO: 1400841 - RNA, 19 nt, Artificial Sequence
  Description of Artificial Sequence: Synthetic oligonucleotide
auaagcucugcauuucaca

SEQ ID NO: 1400842 - RNA, 19 nt, Artificial Sequence
  Description of Artificial Sequence: Synthetic oligonucleotide
cauaacauuauagcggauc

SEQ ID NO: 1400843 - RNA, 19 nt, Artificial Sequence
  Description of Artificial Sequence: Synthetic oligonucleotide
uuagcacucgaacaucaaa

SEQ ID NO: 1400844 - RNA, 19 nt, Artificial Sequence
  Description of Artificial Sequence: Synthetic oligonucleotide
caucaccgaauuuauaauc

SEQ ID NO: 1400845 - RNA, 19 nt, Artificial Sequence
  Description of Artificial Sequence: Synthetic oligonucleotide
guuuacagaaccacugcag

SEQ ID NO: 1400846 - RNA, 19 nt, Artificial Sequence
  Description of Artificial Sequence: Synthetic oligonucleotide
uucuuacaguacuaaaauc

SEQ ID NO: 1400847 - RNA, 19 nt, Artificial Sequence
  Description of Artificial Sequence: Synthetic oligonucleotide
aaccguguucaaaauaucu

SEQ ID NO: 1400848 - RNA, 19 nt, Artificial Sequence
  Description of Artificial Sequence: Synthetic oligonucleotide
gaacauaugugaaguauca

SEQ ID NO: 1400849 - RNA, 19 nt, Artificial Sequence
  Description of Artificial Sequence: Synthetic oligonucleotide
uuugggaugcuugauguuc

SEQ ID NO: 1400850 - RNA, 19 nt, Artificial Sequence
  Description of Artificial Sequence: Synthetic oligonucleotide
auauuagucugcgcagggc

SEQ ID NO: 1400851 - RNA, 19 nt, Artificial Sequence
  Description of Artificial Sequence: Synthetic oligonucleotide
gaguguaacugacagaagu

SEQ ID NO: 1400852 - RNA, 19 nt, Artificial Sequence
  Description of Artificial Sequence: Synthetic oligonucleotide
cucgaacaucaaaagaaug

SEQ ID NO: 1400853 - RNA, 19 nt, Artificial Sequence
  Description of Artificial Sequence: Synthetic oligonucleotide
ugacgcuucgcucuucaca

SEQ ID NO: 1400854 - RNA, 19 nt, Artificial Sequence
  Description of Artificial Sequence: Synthetic oligonucleotide
acagcgaucagcaaccgug

SEQ ID NO: 1400855 - RNA, 19 nt, Artificial Sequence
  Description of Artificial Sequence: Synthetic oligonucleotide
guacacucuagagacagcc

SEQ ID NO: 1400856 - RNA, 19 nt, Artificial Sequence
  Description of Artificial Sequence: Synthetic oligonucleotide
cauuauugacaaccaauuc

SEQ ID NO: 1400857 - RNA, 19 nt, Artificial Sequence
  Description of Artificial Sequence: Synthetic oligonucleotide
uggcaagaaucacauaauc

SEQ ID NO: 1400858 - RNA, 19 nt, Artificial Sequence
  Description of Artificial Sequence: Synthetic oligonucleotide
uauccgaguuagcuuuggg

SEQ ID NO: 1400859 - RNA, 19 nt, Artificial Sequence
  Description of Artificial Sequence: Synthetic oligonucleotide
uaacgugaacaguacacuc

SEQ ID NO: 1400860 - RNA, 19 nt, Artificial Sequence
  Description of Artificial Sequence: Synthetic oligonucleotide
acuuccaaucggcaggucu

SEQ ID NO: 1400861 - RNA, 19 nt, Artificial Sequence
  Description of Artificial Sequence: Synthetic oligonucleotide
uuugacucuucugaaaaua

SEQ ID NO: 1400862 - RNA, 19 nt, Artificial Sequence
  Description of Artificial Sequence: Synthetic oligonucleotide
uuuagguguauaguuuacu

SEQ ID NO: 1400863 - RNA, 19 nt, Artificial Sequence
  Description of Artificial Sequence: Synthetic oligonucleotide
guguaacugacagaaguag

SEQ ID NO: 1400864 - RNA, 19 nt, Artificial Sequence
  Description of Artificial Sequence: Synthetic oligonucleotide
aacgugaacaguacacucu

SEQ ID NO: 1400865 - RNA, 19 nt, Artificial Sequence
  Description of Artificial Sequence: Synthetic oligonucleotide
ucuacaauguagguucuuc

SEQ ID NO: 1400866 - RNA, 19 nt, Artificial Sequence
  Description of Artificial Sequence: Synthetic oligonucleotide
aaggacugcaacugcuagu

SEQ ID NO: 1400867 - RNA, 19 nt, Artificial Sequence
  Description of Artificial Sequence: Synthetic oligonucleotide
aaacucgcugaggaaguuc

SEQ ID NO: 1400868 - RNA, 19 nt, Artificial Sequence
  Description of Artificial Sequence: Synthetic oligonucleotide
auuuagguguauaguuuac

SEQ ID NO: 1400869 - RNA, 19 nt, Artificial Sequence
  Description of Artificial Sequence: Synthetic oligonucleotide
ucaucaccgaauuuauaau

SEQ ID NO: 1400870 - RNA, 19 nt, Artificial Sequence
  Description of Artificial Sequence: Synthetic oligonucleotide
ucgcugaggaaguucauaa

SEQ ID NO: 1400871 - RNA, 19 nt, Artificial Sequence
  Description of Artificial Sequence: Synthetic oligonucleotide
uggaucuguggucugaauu

SEQ ID NO: 1400872 - RNA, 19 nt, Artificial Sequence
  Description of Artificial Sequence: Synthetic oligonucleotide
cugaaguaaugaaaggaga

SEQ ID NO: 1400873 - RNA, 19 nt, Artificial Sequence
  Description of Artificial Sequence: Synthetic oligonucleotide
ucaccgaauuuauaaucac

SEQ ID NO: 1400874 - RNA, 19 nt, Artificial Sequence
  Description of Artificial Sequence: Synthetic oligonucleotide
acaugcaacuccauuuagg

SEQ ID NO: 1400875 - RNA, 19 nt, Artificial Sequence
  Description of Artificial Sequence: Synthetic oligonucleotide
accguguucaaaauaucuc

SEQ ID NO: 1400876 - RNA, 19 nt, Artificial Sequence
  Description of Artificial Sequence: Synthetic oligonucleotide
accgaauuuauaaucacau

SEQ ID NO: 1400877 - RNA, 19 nt, Artificial Sequence
  Description of Artificial Sequence: Synthetic oligonucleotide
accccgaagguuuacagaa

SEQ ID NO: 1400878 - RNA, 19 nt, Artificial Sequence
  Description of Artificial Sequence: Synthetic oligonucleotide
caguacacucuagagacag

SEQ ID NO: 1400879 - RNA, 19 nt, Artificial Sequence
  Description of Artificial Sequence: Synthetic oligonucleotide
cuguccuauuaaaagacca

SEQ ID NO: 1400880 - RNA, 19 nt, Artificial Sequence
  Description of Artificial Sequence: Synthetic oligonucleotide
aucaccgaauuuauaauca

SEQ ID NO: 1400881 - RNA, 19 nt, Artificial Sequence
  Description of Artificial Sequence: Synthetic oligonucleotide
aguaucacucguucugaga

SEQ ID NO: 1400882 - RNA, 19 nt, Artificial Sequence
  Description of Artificial Sequence: Synthetic oligonucleotide
auccgaguuagcuuuggga

SEQ ID NO: 1400883 - RNA, 19 nt, Artificial Sequence
  Description of Artificial Sequence: Synthetic oligonucleotide
aagaaucacauaauccuuu

SEQ ID NO: 1400884 - RNA, 19 nt, Artificial Sequence
  Description of Artificial Sequence: Synthetic oligonucleotide
agguucuucccauuauuga

SEQ ID NO: 1400885 - RNA, 19 nt, Artificial Sequence
  Description of Artificial Sequence: Synthetic oligonucleotide
cagaguguaacugacagaa

SEQ ID NO: 1400886 - RNA, 19 nt, Artificial Sequence
  Description of Artificial Sequence: Synthetic oligonucleotide
uguagguucuucccauuau

SEQ ID NO: 1400887 - RNA, 19 nt, Artificial Sequence
  Description of Artificial Sequence: Synthetic oligonucleotide
ggaugugaauauuaacgug

SEQ ID NO: 1400888 - RNA, 19 nt, Artificial Sequence
  Description of Artificial Sequence: Synthetic oligonucleotide
uaaguucgacaagauaacu

SEQ ID NO: 1400889 - RNA, 19 nt, Artificial Sequence
  Description of Artificial Sequence: Synthetic oligonucleotide
uaucacucguucugagacc

SEQ ID NO: 1400890 - RNA, 19 nt, Artificial Sequence
  Description of Artificial Sequence: Synthetic oligonucleotide
aacuuugggucuguugcug

SEQ ID NO: 1400891 - RNA, 19 nt, Artificial Sequence
  Description of Artificial Sequence: Synthetic oligonucleotide
gauauaagcucugcauuuc

SEQ ID NO: 1400892 - RNA, 19 nt, Artificial Sequence
  Description of Artificial Sequence: Synthetic oligonucleotide
uuuggacuguggcugugga

SEQ ID NO: 1400893 - RNA, 19 nt, Artificial Sequence
  Description of Artificial Sequence: Synthetic oligonucleotide
uuguguugguuggugacgc

SEQ ID NO: 1400894 - RNA, 19 nt, Artificial Sequence
  Description of Artificial Sequence: Synthetic oligonucleotide
ucaccccgaagguuuacag

SEQ ID NO: 1400895 - RNA, 19 nt, Artificial Sequence
  Description of Artificial Sequence: Synthetic oligonucleotide
uggucugaauucagggaca

SEQ ID NO: 1400896 - RNA, 19 nt, Artificial Sequence
  Description of Artificial Sequence: Synthetic oligonucleotide
agcuguguuuacuuccucu

SEQ ID NO: 1400897 - RNA, 19 nt, Artificial Sequence
  Description of Artificial Sequence: Synthetic oligonucleotide
guaaguucgacaagauaac

SEQ ID NO: 1400898 - RNA, 19 nt, Artificial Sequence
  Description of Artificial Sequence: Synthetic oligonucleotide
uaauagugauguguuacau

SEQ ID NO: 1400899 - RNA, 19 nt, Artificial Sequence
  Description of Artificial Sequence: Synthetic oligonucleotide
aaguucgacaagauaacuu

SEQ ID NO: 1400900 - RNA, 19 nt, Artificial Sequence
  Description of Artificial Sequence: Synthetic oligonucleotide
auacaagcuguguuuacuu

SEQ ID NO: 1400901 - RNA, 19 nt, Artificial Sequence
  Description of Artificial Sequence: Synthetic oligonucleotide
cguaaguucgacaagauaa

SEQ ID NO: 1400902 - RNA, 19 nt, Artificial Sequence
  Description of Artificial Sequence: Synthetic oligonucleotide
gauguguuacaugcaacuc

SEQ ID NO: 1400903 - RNA, 19 nt, Artificial Sequence
  Description of Artificial Sequence: Synthetic oligonucleotide
uacaagcuguguuuacuuc

SEQ ID NO: 1400904 - RNA, 19 nt, Artificial Sequence
  Description of Artificial Sequence: Synthetic oligonucleotide
agucuucuauuugaaucuc

SEQ ID NO: 1400905 - RNA, 19 nt, Artificial Sequence
  Description of Artificial Sequence: Synthetic oligonucleotide
acaaccaauucaauagccu

SEQ ID NO: 1400906 - RNA, 19 nt, Artificial Sequence
  Description of Artificial Sequence: Synthetic oligonucleotide
uauugacaaccaauucaau

SEQ ID NO: 1400907 - RNA, 19 nt, Artificial Sequence
  Description of Artificial Sequence: Synthetic oligonucleotide
ucguaaguucgacaagaua

SEQ ID NO: 1400908 - RNA, 19 nt, Artificial Sequence
  Description of Artificial Sequence: Synthetic oligonucleotide
ggagaugccggccgcaagg

SEQ ID NO: 1400909 - RNA, 19 nt, Artificial Sequence
  Description of Artificial Sequence: Synthetic oligonucleotide
cagggagcauucuggauac

SEQ ID NO: 1400910 - RNA, 19 nt, Artificial Sequence
  Description of Artificial Sequence: Synthetic oligonucleotide
uaacauuauagcggaucca

SEQ ID NO: 1400911 - RNA, 19 nt, Artificial Sequence
  Description of Artificial Sequence: Synthetic oligonucleotide
gaaugagcaguugcuugag

SEQ ID NO: 1400912 - RNA, 19 nt, Artificial Sequence
  Description of Artificial Sequence: Synthetic oligonucleotide
agacauuauuguagcagag

SEQ ID NO: 1400913 - RNA, 19 nt, Artificial Sequence
  Description of Artificial Sequence: Synthetic oligonucleotide
ucaauccaacuguaguuuu

SEQ ID NO: 1400914 - RNA, 19 nt, Artificial Sequence
  Description of Artificial Sequence: Synthetic oligonucleotide
auuuggacuguggcugugg

SEQ ID NO: 1400915 - RNA, 19 nt, Artificial Sequence
  Description of Artificial Sequence: Synthetic oligonucleotide
caaucggcaggucuugcug

SEQ ID NO: 1400916 - RNA, 19 nt, Artificial Sequence
  Description of Artificial Sequence: Synthetic oligonucleotide
aucacucguucugagaccu

SEQ ID NO: 1400917 - RNA, 19 nt, Artificial Sequence
  Description of Artificial Sequence: Synthetic oligonucleotide
gugggaugugaauauuaac

SEQ ID NO: 1400918 - RNA, 19 nt, Artificial Sequence
  Description of Artificial Sequence: Synthetic oligonucleotide
uagcggauccaggaagggg

SEQ ID NO: 1400919 - RNA, 19 nt, Artificial Sequence
  Description of Artificial Sequence: Synthetic oligonucleotide
aguuuacuuuggaaacccg

SEQ ID NO: 1400920 - RNA, 19 nt, Artificial Sequence
  Description of Artificial Sequence: Synthetic oligonucleotide
ucccauuauugacaaccaa

SEQ ID NO: 1400921 - RNA, 19 nt, Artificial Sequence
  Description of Artificial Sequence: Synthetic oligonucleotide
cuagagacagccaggaggu

SEQ ID NO: 1400922 - RNA, 19 nt, Artificial Sequence
  Description of Artificial Sequence: Synthetic oligonucleotide
aaucaucugcuaguucuaa

SEQ ID NO: 1400923 - RNA, 19 nt, Artificial Sequence
  Description of Artificial Sequence: Synthetic oligonucleotide
acauaauagugauguguua

SEQ ID NO: 1400924 - RNA, 19 nt, Artificial Sequence
  Description of Artificial Sequence: Synthetic oligonucleotide
ugguguucuaguggcaaga

SEQ ID NO: 1400925 - RNA, 19 nt, Artificial Sequence
  Description of Artificial Sequence: Synthetic oligonucleotide
gaauauuaacgugaacagu

SEQ ID NO: 1400926 - RNA, 19 nt, Artificial Sequence
  Description of Artificial Sequence: Synthetic oligonucleotide
acucuagagacagccagga

SEQ ID NO: 1400927 - RNA, 19 nt, Artificial Sequence
  Description of Artificial Sequence: Synthetic oligonucleotide
uaguuuuacuugguggcuc

SEQ ID NO: 1400928 - RNA, 19 nt, Artificial Sequence
  Description of Artificial Sequence: Synthetic oligonucleotide
caccgaauuuauaaucaca

SEQ ID NO: 1400929 - RNA, 19 nt, Artificial Sequence
  Description of Artificial Sequence: Synthetic oligonucleotide
caaaguauccgaguuagcu

SEQ ID NO: 1400930 - RNA, 19 nt, Artificial Sequence
  Description of Artificial Sequence: Synthetic oligonucleotide
guccuauuaaaagaccaga

SEQ ID NO: 1400931 - RNA, 19 nt, Artificial Sequence
  Description of Artificial Sequence: Synthetic oligonucleotide
guguauaguuuacuuugga

SEQ ID NO: 1400932 - RNA, 19 nt, Artificial Sequence
  Description of Artificial Sequence: Synthetic oligonucleotide
aguacacucuagagacagc

SEQ ID NO: 1400933 - RNA, 19 nt, Artificial Sequence
  Description of Artificial Sequence: Synthetic oligonucleotide
agcggauccaggaagggga

SEQ ID NO: 1400934 - RNA, 19 nt, Artificial Sequence
  Description of Artificial Sequence: Synthetic oligonucleotide
acacaccuaauagacauua

SEQ ID NO: 1400935 - RNA, 19 nt, Artificial Sequence
  Description of Artificial Sequence: Synthetic oligonucleotide
cuagugcugcaauggcacc

SEQ ID NO: 1400936 - RNA, 19 nt, Artificial Sequence
  Description of Artificial Sequence: Synthetic oligonucleotide
acuuugggucuguugcugu

SEQ ID NO: 1400937 - RNA, 19 nt, Artificial Sequence
  Description of Artificial Sequence: Synthetic oligonucleotide
acgugaacaguacacucua

SEQ ID NO: 1400938 - RNA, 19 nt, Artificial Sequence
  Description of Artificial Sequence: Synthetic oligonucleotide
ucucaugaucgaacauuuc

SEQ ID NO: 1400939 - RNA, 19 nt, Artificial Sequence
  Description of Artificial Sequence: Synthetic oligonucleotide
aacuguguuagcacucgaa

SEQ ID NO: 1400940 - RNA, 19 nt, Artificial Sequence
  Description of Artificial Sequence: Synthetic oligonucleotide
guggauauaagcucugcau

SEQ ID NO: 1400941 - RNA, 19 nt, Artificial Sequence
  Description of Artificial Sequence: Synthetic oligonucleotide
gaagaacacuguccuauua

SEQ ID NO: 1400942 - RNA, 19 nt, Artificial Sequence
  Description of Artificial Sequence: Synthetic oligonucleotide
aucugcuaguucuaauguu

SEQ ID NO: 1400943 - RNA, 19 nt, Artificial Sequence
  Description of Artificial Sequence: Synthetic oligonucleotide
aaucuucaauccaacugua

SEQ ID NO: 1400944 - RNA, 19 nt, Artificial Sequence
  Description of Artificial Sequence: Synthetic oligonucleotide
auagcggauccaggaaggg

SEQ ID NO: 1400945 - RNA, 19 nt, Artificial Sequence
  Description of Artificial Sequence: Synthetic oligonucleotide
cuauguuuugcuuaaucuu

SEQ ID NO: 1400946 - RNA, 19 nt, Artificial Sequence
  Description of Artificial Sequence: Synthetic oligonucleotide
cuuugggucuguugcugug

SEQ ID NO: 1400947 - RNA, 19 nt, Artificial Sequence
  Description of Artificial Sequence: Synthetic oligonucleotide
ggagauugauguuugaaau

SEQ ID NO: 1400948 - RNA, 19 nt, Artificial Sequence
  Description of Artificial Sequence: Synthetic oligonucleotide
agcaaccguguucaaaaua

SEQ ID NO: 1400949 - RNA, 19 nt, Artificial Sequence
  Description of Artificial Sequence: Synthetic oligonucleotide
ugacaguccauagucuuuu

SEQ ID NO: 1400950 - RNA, 19 nt, Artificial Sequence
  Description of Artificial Sequence: Synthetic oligonucleotide
aguguaacugacagaagua

SEQ ID NO: 1400951 - RNA, 19 nt, Artificial Sequence
  Description of Artificial Sequence: Synthetic oligonucleotide
aacuccauuuagguguaua

SEQ ID NO: 1400952 - RNA, 19 nt, Artificial Sequence
  Description of Artificial Sequence: Synthetic oligonucleotide
acucgaacaucaaaagaau

SEQ ID NO: 1400953 - RNA, 19 nt, Artificial Sequence
  Description of Artificial Sequence: Synthetic oligonucleotide
cugcuagugcugcaauggc

SEQ ID NO: 1400954 - RNA, 19 nt, Artificial Sequence
  Description of Artificial Sequence: Synthetic oligonucleotide
agugggaugugaauauuaa

SEQ ID NO: 1400955 - RNA, 19 nt, Artificial Sequence
  Description of Artificial Sequence: Synthetic oligonucleotide
gggacaacuguguuagcac

SEQ ID NO: 1400956 - RNA, 19 nt, Artificial Sequence
  Description of Artificial Sequence: Synthetic oligonucleotide
gaagguuuacagaaccacu

SEQ ID NO: 1400957 - RNA, 19 nt, Artificial Sequence
  Description of Artificial Sequence: Synthetic oligonucleotide
cuaguucuaauguuguaau

SEQ ID NO: 1400958 - RNA, 19 nt, Artificial Sequence
  Description of Artificial Sequence: Synthetic oligonucleotide
auguagguucuucccauua

SEQ ID NO: 1400959 - RNA, 19 nt, Artificial Sequence
  Description of Artificial Sequence: Synthetic oligonucleotide
cccgaagguuuacagaacc

SEQ ID NO: 1400960 - RNA, 19 nt, Artificial Sequence
  Description of Artificial Sequence: Synthetic oligonucleotide
caaccguguucaaaauauc

SEQ ID NO: 1400961 - RNA, 19 nt, Artificial Sequence
  Description of Artificial Sequence: Synthetic oligonucleotide
aucucaugaucgaacauuu

SEQ ID NO: 1400962 - RNA, 19 nt, Artificial Sequence
  Description of Artificial Sequence: Synthetic oligonucleotide
cauguucuguggcccauuc

SEQ ID NO: 1400963 - RNA, 19 nt, Artificial Sequence
  Description of Artificial Sequence: Synthetic oligonucleotide
aaaggagaugccggccgca

SEQ ID NO: 1400964 - RNA, 19 nt, Artificial Sequence
  Description of Artificial Sequence: Synthetic oligonucleotide
guauccgaguuagcuuugg

SEQ ID NO: 1400965 - RNA, 19 nt, Artificial Sequence
  Description of Artificial Sequence: Synthetic oligonucleotide
uggauaccuggcuggcaug

SEQ ID NO: 1400966 - RNA, 19 nt, Artificial Sequence
  Description of Artificial Sequence: Synthetic oligonucleotide
ugcuaguucuaauguugua

SEQ ID NO: 1400967 - RNA, 19 nt, Artificial Sequence
  Description of Artificial Sequence: Synthetic oligonucleotide
augugaauauuaacgugaa

SEQ ID NO: 1400968 - RNA, 19 nt, Artificial Sequence
  Description of Artificial Sequence: Synthetic oligonucleotide
cuucaauccaacuguaguu

SEQ ID NO: 1400969 - RNA, 19 nt, Artificial Sequence
  Description of Artificial Sequence: Synthetic oligonucleotide
ccuaauagacauuauugua

SEQ ID NO: 1400970 - RNA, 19 nt, Artificial Sequence
  Description of Artificial Sequence: Synthetic oligonucleotide
gaucauggacaucguaagu

SEQ ID NO: 1400971 - RNA, 19 nt, Artificial Sequence
  Description of Artificial Sequence: Synthetic oligonucleotide
caucuuuaacuuugggucu

SEQ ID NO: 1400972 - RNA, 19 nt, Artificial Sequence
  Description of Artificial Sequence: Synthetic oligonucleotide
agcugauucaucaccgaau

SEQ ID NO: 1400973 - RNA, 19 nt, Artificial Sequence
  Description of Artificial Sequence: Synthetic oligonucleotide
ucuuuaacuuugggucugu

SEQ ID NO: 1400974 - RNA, 19 nt, Artificial Sequence
  Description of Artificial Sequence: Synthetic oligonucleotide
cagagcuaaucacugaagu

SEQ ID NO: 1400975 - RNA, 19 nt, Artificial Sequence
  Description of Artificial Sequence: Synthetic oligonucleotide
ucccuggagauugauguuu

SEQ ID NO: 1400976 - RNA, 19 nt, Artificial Sequence
  Description of Artificial Sequence: Synthetic oligonucleotide
uguggaucuguggucugaa

SEQ ID NO: 1400977 - RNA, 19 nt, Artificial Sequence
  Description of Artificial Sequence: Synthetic oligonucleotide
cucuagagacagccaggag

SEQ ID NO: 1400978 - RNA, 19 nt, Artificial Sequence
  Description of Artificial Sequence: Synthetic oligonucleotide
aaaacucgcugaggaaguu

SEQ ID NO: 1400979 - RNA, 19 nt, Artificial Sequence
  Description of Artificial Sequence: Synthetic oligonucleotide
auggacaucguaaguucga

SEQ ID NO: 1400980 - RNA, 19 nt, Artificial Sequence
  Description of Artificial Sequence: Synthetic oligonucleotide
aggagaugccggccgcaag

SEQ ID NO: 1400981 - RNA, 19 nt, Artificial Sequence
  Description of Artificial Sequence: Synthetic oligonucleotide
aaacccgggcagauaacaa

SEQ ID NO: 1400982 - RNA, 19 nt, Artificial Sequence
  Description of Artificial Sequence: Synthetic oligonucleotide
gauuuggacuguggcugug

SEQ ID NO: 1400983 - RNA, 19 nt, Artificial Sequence
  Description of Artificial Sequence: Synthetic oligonucleotide
uucgcucuucacagaggaa

SEQ ID NO: 1400984 - RNA, 19 nt, Artificial Sequence
  Description of Artificial Sequence: Synthetic oligonucleotide
cugaacucuuuggaucaug

SEQ ID NO: 1400985 - RNA, 19 nt, Artificial Sequence
  Description of Artificial Sequence: Synthetic oligonucleotide
gcacucgaacaucaaaaga

SEQ ID NO: 1400986 - RNA, 19 nt, Artificial Sequence
  Description of Artificial Sequence: Synthetic oligonucleotide
ggcaccuauguuuugcuua

SEQ ID NO: 1400987 - RNA, 19 nt, Artificial Sequence
  Description of Artificial Sequence: Synthetic oligonucleotide
gauugauguuugaaauaua

SEQ ID NO: 1400988 - RNA, 19 nt, Artificial Sequence
  Description of Artificial Sequence: Synthetic oligonucleotide
aucagcaaccguguucaaa

SEQ ID NO: 1400989 - RNA, 19 nt, Artificial Sequence
  Description of Artificial Sequence: Synthetic oligonucleotide
gugaaguaucacucguucu

SEQ ID NO: 1400990 - RNA, 19 nt, Artificial Sequence
  Description of Artificial Sequence: Synthetic oligonucleotide
uuggacuguggcuguggau

SEQ ID NO: 1400991 - RNA, 19 nt, Artificial Sequence
  Description of Artificial Sequence: Synthetic oligonucleotide
uccaaucggcaggucuugc

SEQ ID NO: 1400992 - RNA, 19 nt, Artificial Sequence
  Description of Artificial Sequence: Synthetic oligonucleotide
ggauauaagcucugcauuu

SEQ ID NO: 1400993 - RNA, 19 nt, Artificial Sequence
  Description of Artificial Sequence: Synthetic oligonucleotide
gcagagcuaaucacugaag

SEQ ID NO: 1400994 - RNA, 19 nt, Artificial Sequence
  Description of Artificial Sequence: Synthetic oligonucleotide
cgaguuagcuuugggaugc

SEQ ID NO: 1400995 - RNA, 19 nt, Artificial Sequence
  Description of Artificial Sequence: Synthetic oligonucleotide
aguauccgaguuagcuuug

SEQ ID NO: 1400996 - RNA, 19 nt, Artificial Sequence
  Description of Artificial Sequence: Synthetic oligonucleotide
gaugccggccgcaaggacu

SEQ ID NO: 1400997 - RNA, 19 nt, Artificial Sequence
  Description of Artificial Sequence: Synthetic oligonucleotide
auuagucugcgcagggcau

SEQ ID NO: 1400998 - RNA, 19 nt, Artificial Sequence
  Description of Artificial Sequence: Synthetic oligonucleotide
aucguaaguucgacaagau

SEQ ID NO: 1400999 - RNA, 19 nt, Artificial Sequence
  Description of Artificial Sequence: Synthetic oligonucleotide
ggauccaggaaggggaaca

SEQ ID NO: 1401000 - RNA, 19 nt, Artificial Sequence
  Description of Artificial Sequence: Synthetic oligonucleotide
aucaccccgaagguuuaca

SEQ ID NO: 1401001 - RNA, 19 nt, Artificial Sequence
  Description of Artificial Sequence: Synthetic oligonucleotide
guguuagcacucgaacauc

SEQ ID NO: 1401002 - RNA, 19 nt, Artificial Sequence
  Description of Artificial Sequence: Synthetic oligonucleotide
cucacaguuugacucuucu

SEQ ID NO: 1401003 - RNA, 19 nt, Artificial Sequence
  Description of Artificial Sequence: Synthetic oligonucleotide
ccgaguuagcuuugggaug

SEQ ID NO: 1401004 - RNA, 19 nt, Artificial Sequence
  Description of Artificial Sequence: Synthetic oligonucleotide
cgaagguuuacagaaccac

SEQ ID NO: 1401005 - RNA, 19 nt, Artificial Sequence
  Description of Artificial Sequence: Synthetic oligonucleotide
cugcuaguucuaauguugu

SEQ ID NO: 1401006 - RNA, 19 nt, Artificial Sequence
  Description of Artificial Sequence: Synthetic oligonucleotide
uucuacaauguagguucuu

SEQ ID NO: 1401007 - RNA, 19 nt, Artificial Sequence
  Description of Artificial Sequence: Synthetic oligonucleotide
uggcaccuauguuuugcuu

SEQ ID NO: 1401008 - RNA, 19 nt, Artificial Sequence
  Description of Artificial Sequence: Synthetic oligonucleotide
augccggccgcaaggacug

SEQ ID NO: 1401009 - RNA, 19 nt, Artificial Sequence
  Description of Artificial Sequence: Synthetic oligonucleotide
agucagaaacacaccuaau

SEQ ID NO: 1401010 - RNA, 19 nt, Artificial Sequence
  Description of Artificial Sequence: Synthetic oligonucleotide
gguuggugacgcuucgcuc

SEQ ID NO: 1401011 - RNA, 19 nt, Artificial Sequence
  Description of Artificial Sequence: Synthetic oligonucleotide
gcaaccguguucaaaauau

SEQ ID NO: 1401012 - RNA, 19 nt, Artificial Sequence
  Description of Artificial Sequence: Synthetic oligonucleotide
gcaccuauguuuugcuuaa

SEQ ID NO: 1401013 - RNA, 19 nt, Artificial Sequence
  Description of Artificial Sequence: Synthetic oligonucleotide
agggagcauucuggauacc

SEQ ID NO: 1401014 - RNA, 19 nt, Artificial Sequence
  Description of Artificial Sequence: Synthetic oligonucleotide
cuguuuugauacuuccaau

SEQ ID NO: 1401015 - RNA, 19 nt, Artificial Sequence
  Description of Artificial Sequence: Synthetic oligonucleotide
cuuccaaucggcaggucuu

SEQ ID NO: 1401016 - RNA, 19 nt, Artificial Sequence
  Description of Artificial Sequence: Synthetic oligonucleotide
uuggaaacccgggcagaua

SEQ ID NO: 1401017 - RNA, 19 nt, Artificial Sequence
  Description of Artificial Sequence: Synthetic oligonucleotide
ucacucguucugagaccuc

SEQ ID NO: 1401018 - RNA, 19 nt, Artificial Sequence
  Description of Artificial Sequence: Synthetic oligonucleotide
cccuggagauugauguuug

SEQ ID NO: 1401019 - RNA, 19 nt, Artificial Sequence
  Description of Artificial Sequence: Synthetic oligonucleotide
ggugacgcuucgcucuuca

SEQ ID NO: 1401020 - RNA, 19 nt, Artificial Sequence
  Description of Artificial Sequence: Synthetic oligonucleotide
agcgaucagcaaccguguu

SEQ ID NO: 1401021 - RNA, 19 nt, Artificial Sequence
  Description of Artificial Sequence: Synthetic oligonucleotide
guuagcacucgaacaucaa

SEQ ID NO: 1401022 - RNA, 19 nt, Artificial Sequence
  Description of Artificial Sequence: Synthetic oligonucleotide
ccagggagcauucuggaua

SEQ ID NO: 1401023 - RNA, 19 nt, Artificial Sequence
  Description of Artificial Sequence: Synthetic oligonucleotide
cccgggcagauaacaaagc

SEQ ID NO: 1401024 - RNA, 19 nt, Artificial Sequence
  Description of Artificial Sequence: Synthetic oligonucleotide
gcuucgcucuucacagagg

SEQ ID NO: 1401025 - RNA, 19 nt, Artificial Sequence
  Description of Artificial Sequence: Synthetic oligonucleotide
caacuguguuagcacucga

SEQ ID NO: 1401026 - RNA, 19 nt, Artificial Sequence
  Description of Artificial Sequence: Synthetic oligonucleotide
uagucugcgcagggcauuu

SEQ ID NO: 1401027 - RNA, 19 nt, Artificial Sequence
  Description of Artificial Sequence: Synthetic oligonucleotide
cgcuucgcucuucacagag

SEQ ID NO: 1401028 - RNA, 19 nt, Artificial Sequence
  Description of Artificial Sequence: Synthetic oligonucleotide
gggucuguugcuguggaua

SEQ ID NO: 1401029 - RNA, 19 nt, Artificial Sequence
  Description of Artificial Sequence: Synthetic oligonucleotide
ccgggcagauaacaaagca

SEQ ID NO: 1401030 - RNA, 19 nt, Artificial Sequence
  Description of Artificial Sequence: Synthetic oligonucleotide
acgcuucgcucuucacaga

SEQ ID NO: 1401031 - RNA, 19 nt, Artificial Sequence
  Description of Artificial Sequence: Synthetic oligonucleotide
guguucuaguggcaagaau

SEQ ID NO: 1401032 - RNA, 19 nt, Artificial Sequence
  Description of Artificial Sequence: Synthetic oligonucleotide
ggucaacacucuguuuuga

SEQ ID NO: 1401033 - RNA, 19 nt, Artificial Sequence
  Description of Artificial Sequence: Synthetic oligonucleotide
ggucuguugcuguggauau

SEQ ID NO: 1401034 - RNA, 19 nt, Artificial Sequence
  Description of Artificial Sequence: Synthetic oligonucleotide
ccgaagguuuacagaacca

SEQ ID NO: 1401035 - RNA, 19 nt, Artificial Sequence
  Description of Artificial Sequence: Synthetic oligonucleotide
caucaccccgaagguuuac

SEQ ID NO: 1401036 - RNA, 19 nt, Artificial Sequence
  Description of Artificial Sequence: Synthetic oligonucleotide
gcauucuggauaccuggcu

SEQ ID NO: 1401037 - RNA, 19 nt, Artificial Sequence
  Description of Artificial Sequence: Synthetic oligonucleotide
gguguucuaguggcaagaa

SEQ ID NO: 1401038 - RNA, 19 nt, Artificial Sequence
  Description of Artificial Sequence: Synthetic oligonucleotide
gcauuucacaucaccccga

SEQ ID NO: 1401039 - RNA, 19 nt, Artificial Sequence
  Description of Artificial Sequence: Synthetic oligonucleotide
ggucugaauucagggacaa

SEQ ID NO: 1401040 - RNA, 19 nt, Artificial Sequence
  Description of Artificial Sequence: Synthetic oligonucleotide
ccgaauuuauaaucacaua

SEQ ID NO: 1401041 - RNA, 19 nt, Artificial Sequence
  Description of Artificial Sequence: Synthetic oligonucleotide
cacucguucugagaccucu

SEQ ID NO: 1401042 - RNA, 19 nt, Artificial Sequence
  Description of Artificial Sequence: Synthetic oligonucleotide
ccgcaaggacugcaacugc

SEQ ID NO: 1401043 - RNA, 19 nt, Artificial Sequence
  Description of Artificial Sequence: Synthetic oligonucleotide
ccccgaagguuuacagaac

SEQ ID NO: 1401044 - RNA, 19 nt, Artificial Sequence
  Description of Artificial Sequence: Synthetic oligonucleotide
cacaccuaauagacauuau

SEQ ID NO: 1401045 - RNA, 19 nt, Artificial Sequence
  Description of Artificial Sequence: Synthetic oligonucleotide
uacuuccaaucggcagguc

SEQ ID NO: 1401046 - RNA, 19 nt, Artificial Sequence
  Description of Artificial Sequence: Synthetic oligonucleotide
ggccgcaaggacugcaacu

SEQ ID NO: 1401047 - RNA, 19 nt, Artificial Sequence
  Description of Artificial Sequence: Synthetic oligonucleotide
acucguucugagaccucuu

SEQ ID NO: 1401048 - RNA, 19 nt, Artificial Sequence
  Description of Artificial Sequence: Synthetic oligonucleotide
caacugcuagugcugcaau

SEQ ID NO: 1401049 - RNA, 19 nt, Artificial Sequence
  Description of Artificial Sequence: Synthetic oligonucleotide
uggugacgcuucgcucuuc

SEQ ID NO: 1401050 - RNA, 19 nt, Artificial Sequence
  Description of Artificial Sequence: Synthetic oligonucleotide
cacagcgaucagcaaccgu

SEQ ID NO: 1401051 - RNA, 19 nt, Artificial Sequence
  Description of Artificial Sequence: Synthetic oligonucleotide
cagcaaccguguucaaaau

SEQ ID NO: 1401052 - RNA, 19 nt, Artificial Sequence
  Description of Artificial Sequence: Synthetic oligonucleotide
gauaccuggcuggcauguu

SEQ ID NO: 1401053 - RNA, 19 nt, Artificial Sequence
  Description of Artificial Sequence: Synthetic oligonucleotide
agucugcgcagggcauuuu

SEQ ID NO: 1401054 - RNA, 19 nt, Artificial Sequence
  Description of Artificial Sequence: Synthetic oligonucleotide
ccaaucggcaggucuugcu

SEQ ID NO: 1401055 - RNA, 19 nt, Artificial Sequence
  Description of Artificial Sequence: Synthetic oligonucleotide
cccauucuucauccaaagu

SEQ ID NO: 1401056 - RNA, 19 nt, Artificial Sequence
  Description of Artificial Sequence: Synthetic oligonucleotide
ugccggccgcaaggacugc

SEQ ID NO: 1401057 - RNA, 19 nt, Artificial Sequence
  Description of Artificial Sequence: Synthetic oligonucleotide
cacugcagauuuggacugu

SEQ ID NO: 1401058 - RNA, 19 nt, Artificial Sequence
  Description of Artificial Sequence: Synthetic oligonucleotide
gcggauccaggaaggggaa

SEQ ID NO: 1401059 - RNA, 19 nt, Artificial Sequence
  Description of Artificial Sequence: Synthetic oligonucleotide
ccgacagugggaugugaau

SEQ ID NO: 1401060 - RNA, 19 nt, Artificial Sequence
  Description of Artificial Sequence: Synthetic oligonucleotide
cggcaggucuugcugaacu

SEQ ID NO: 1401061 - RNA, 19 nt, Artificial Sequence
  Description of Artificial Sequence: Synthetic oligonucleotide
ccggccgcaaggacugcaa

SEQ ID NO: 1401062 - RNA, 19 nt, Artificial Sequence
  Description of Artificial Sequence: Synthetic oligonucleotide
gccggccgcaaggacugca

SEQ ID NO: 1401063 - RNA, 19 nt, Artificial Sequence
  Description of Artificial Sequence: Synthetic oligonucleotide
cggauccaggaaggggaac

SEQ ID NO: 1401064 - RNA, 19 nt, Artificial Sequence
  Description of Artificial Sequence: Synthetic oligonucleotide
gcugaacucuuuggaucau

SEQ ID NO: 1401065 - RNA, 19 nt, Artificial Sequence
  Description of Artificial Sequence: Synthetic oligonucleotide
caccuauguuuugcuuaau

SEQ ID NO: 1401066 - RNA, 19 nt, Artificial Sequence
  Description of Artificial Sequence: Synthetic oligonucleotide
aaggcuagcuccuuagugc

SEQ ID NO: 1401067 - RNA, 19 nt, Artificial Sequence
  Description of Artificial Sequence: Synthetic oligonucleotide
cuaagaaugaacauugaac

SEQ ID NO: 1401068 - RNA, 19 nt, Artificial Sequence
  Description of Artificial Sequence: Synthetic oligonucleotide
uucucuauagggcaguagg

SEQ ID NO: 1401069 - RNA, 19 nt, Artificial Sequence
  Description of Artificial Sequence: Synthetic oligonucleotide
aguuucuugggucugcccc

SEQ ID NO: 1401070 - RNA, 19 nt, Artificial Sequence
  Description of Artificial Sequence: Synthetic oligonucleotide
auuagaggagcgcagcccc

SEQ ID NO: 1401071 - RNA, 19 nt, Artificial Sequence
  Description of Artificial Sequence: Synthetic oligonucleotide
aacggggcuugucagaugg

SEQ ID NO: 1401072 - RNA, 19 nt, Artificial Sequence
  Description of Artificial Sequence: Synthetic oligonucleotide
aauuagaggagcgcagccc

SEQ ID NO: 1401073 - RNA, 19 nt, Artificial Sequence
  Description of Artificial Sequence: Synthetic oligonucleotide
ugcaaauaggaaaccagag

SEQ ID NO: 1401074 - RNA, 19 nt, Artificial Sequence
  Description of Artificial Sequence: Synthetic oligonucleotide
ugcuaguccagucaacggg

SEQ ID NO: 1401075 - RNA, 19 nt, Artificial Sequence
  Description of Artificial Sequence: Synthetic oligonucleotide
cacaaauagccccagcucg

SEQ ID NO: 1401076 - RNA, 19 nt, Artificial Sequence
  Description of Artificial Sequence: Synthetic oligonucleotide
ugguggguaucuaagaaug

SEQ ID NO: 1401077 - RNA, 19 nt, Artificial Sequence
  Description of Artificial Sequence: Synthetic oligonucleotide
uggaccuacacccuuuucc

SEQ ID NO: 1401078 - RNA, 19 nt, Artificial Sequence
  Description of Artificial Sequence: Synthetic oligonucleotide
aaaagaugaaccagaaccu

SEQ ID NO: 1401079 - RNA, 19 nt, Artificial Sequence
  Description of Artificial Sequence: Synthetic oligonucleotide
aacucuuggcgcugguagc

SEQ ID NO: 1401080 - RNA, 19 nt, Artificial Sequence
  Description of Artificial Sequence: Synthetic oligonucleotide
aaugguggguaucuaagaa

SEQ ID NO: 1401081 - RNA, 19 nt, Artificial Sequence
  Description of Artificial Sequence: Synthetic oligonucleotide
ugaguuggcgcccaucugc

SEQ ID NO: 1401082 - RNA, 19 nt, Artificial Sequence
  Description of Artificial Sequence: Synthetic oligonucleotide
ugucuggggagaaugcagg

SEQ ID NO: 1401083 - RNA, 19 nt, Artificial Sequence
  Description of Artificial Sequence: Synthetic oligonucleotide
aaugcuccggggaugcucc

SEQ ID NO: 1401084 - RNA, 19 nt, Artificial Sequence
  Description of Artificial Sequence: Synthetic oligonucleotide
augaaccagaaccuugggg

SEQ ID NO: 1401085 - RNA, 19 nt, Artificial Sequence
  Description of Artificial Sequence: Synthetic oligonucleotide
cuuuggggcccuuuaaugc

SEQ ID NO: 1401086 - RNA, 19 nt, Artificial Sequence
  Description of Artificial Sequence: Synthetic oligonucleotide
aaacaacacaacuguccag

SEQ ID NO: 1401087 - RNA, 19 nt, Artificial Sequence
  Description of Artificial Sequence: Synthetic oligonucleotide
aggcuagcuccuuagugcc

SEQ ID NO: 1401088 - RNA, 19 nt, Artificial Sequence
  Description of Artificial Sequence: Synthetic oligonucleotide
aauagccccagcucggagu

SEQ ID NO: 1401089 - RNA, 19 nt, Artificial Sequence
  Description of Artificial Sequence: Synthetic oligonucleotide
agcacugucucuaagggag

SEQ ID NO: 1401090 - RNA, 19 nt, Artificial Sequence
  Description of Artificial Sequence: Synthetic oligonucleotide
uggguaucuaagaaugaac

SEQ ID NO: 1401091 - RNA, 19 nt, Artificial Sequence
  Description of Artificial Sequence: Synthetic oligonucleotide
ggaggaugaacucuuggcg

SEQ ID NO: 1401092 - RNA, 19 nt, Artificial Sequence
  Description of Artificial Sequence: Synthetic oligonucleotide
cucggagucccaauuagag

SEQ ID NO: 1401093 - RNA, 19 nt, Artificial Sequence
  Description of Artificial Sequence: Synthetic oligonucleotide
aaguuagccuugucgggag

SEQ ID NO: 1401094 - RNA, 19 nt, Artificial Sequence
  Description of Artificial Sequence: Synthetic oligonucleotide
ucggagucccaauuagagg

SEQ ID NO: 1401095 - RNA, 19 nt, Artificial Sequence
  Description of Artificial Sequence: Synthetic oligonucleotide
agaugaaccagaaccuugg

SEQ ID NO: 1401096 - RNA, 19 nt, Artificial Sequence
  Description of Artificial Sequence: Synthetic oligonucleotide
ugggaccuaagcaucccgg

SEQ ID NO: 1401097 - RNA, 19 nt, Artificial Sequence
  Description of Artificial Sequence: Synthetic oligonucleotide
acuguccagagguaguuug

SEQ ID NO: 1401098 - RNA, 19 nt, Artificial Sequence
  Description of Artificial Sequence: Synthetic oligonucleotide
gaugaaccagaaccuuggg

SEQ ID NO: 1401099 - RNA, 19 nt, Artificial Sequence
  Description of Artificial Sequence: Synthetic oligonucleotide
gaccuaagcaucccggcgc

SEQ ID NO: 1401100 - RNA, 19 nt, Artificial Sequence
  Description of Artificial Sequence: Synthetic oligonucleotide
aacaaggagcccagagagc

SEQ ID NO: 1401101 - RNA, 19 nt, Artificial Sequence
  Description of Artificial Sequence: Synthetic oligonucleotide
cuucugacucccuaccagc

SEQ ID NO: 1401102 - RNA, 19 nt, Artificial Sequence
  Description of Artificial Sequence: Synthetic oligonucleotide
acaaggagcccagagagca

SEQ ID NO: 1401103 - RNA, 19 nt, Artificial Sequence
  Description of Artificial Sequence: Synthetic oligonucleotide
aaauagccccagcucggag

SEQ ID NO: 1401104 - RNA, 19 nt, Artificial Sequence
  Description of Artificial Sequence: Synthetic oligonucleotide
caggccgggacaaauacug

SEQ ID NO: 1401105 - RNA, 19 nt, Artificial Sequence
  Description of Artificial Sequence: Synthetic oligonucleotide
agguaguuugugaacagag

SEQ ID NO: 1401106 - RNA, 19 nt, Artificial Sequence
  Description of Artificial Sequence: Synthetic oligonucleotide
caauuagaggagcgcagcc

SEQ ID NO: 1401107 - RNA, 19 nt, Artificial Sequence
  Description of Artificial Sequence: Synthetic oligonucleotide
guaaccagccugcugcgcc

SEQ ID NO: 1401108 - RNA, 19 nt, Artificial Sequence
  Description of Artificial Sequence: Synthetic oligonucleotide
acggggacaaauccugcuc

SEQ ID NO: 1401109 - RNA, 19 nt, Artificial Sequence
  Description of Artificial Sequence: Synthetic oligonucleotide
ucgguguuggcacuucacu

SEQ ID NO: 1401110 - RNA, 19 nt, Artificial Sequence
  Description of Artificial Sequence: Synthetic oligonucleotide
caaggcuagcuccuuagug

SEQ ID NO: 1401111 - RNA, 19 nt, Artificial Sequence
  Description of Artificial Sequence: Synthetic oligonucleotide
uuccccuagagugucuggg

SEQ ID NO: 1401112 - RNA, 19 nt, Artificial Sequence
  Description of Artificial Sequence: Synthetic oligonucleotide
cugucucuaagggaggugc

SEQ ID NO: 1401113 - RNA, 19 nt, Artificial Sequence
  Description of Artificial Sequence: Synthetic oligonucleotide
agcucggagucccaauuag

SEQ ID NO: 1401114 - RNA, 19 nt, Artificial Sequence
  Description of Artificial Sequence: Synthetic oligonucleotide
ugcgcguggucacugcucc

SEQ ID NO: 1401115 - RNA, 19 nt, Artificial Sequence
  Description of Artificial Sequence: Synthetic oligonucleotide
cugcaaauaggaaaccaga

SEQ ID NO: 1401116 - RNA, 19 nt, Artificial Sequence
  Description of Artificial Sequence: Synthetic oligonucleotide
agucaacggggcuugucag

SEQ ID NO: 1401117 - RNA, 19 nt, Artificial Sequence
  Description of Artificial Sequence: Synthetic oligonucleotide
cugacucccuaccagcgcc

SEQ ID NO: 1401118 - RNA, 19 nt, Artificial Sequence
  Description of Artificial Sequence: Synthetic oligonucleotide
cauccaaggggcagggccc

SEQ ID NO: 1401119 - RNA, 19 nt, Artificial Sequence
  Description of Artificial Sequence: Synthetic oligonucleotide
uggagccgcgccaacacca

SEQ ID NO: 1401120 - RNA, 19 nt, Artificial Sequence
  Description of Artificial Sequence: Synthetic oligonucleotide
ggaaguuagccuugucggg

SEQ ID NO: 1401121 - RNA, 19 nt, Artificial Sequence
  Description of Artificial Sequence: Synthetic oligonucleotide
ucccaauuagaggagcgca

SEQ ID NO: 1401122 - RNA, 19 nt, Artificial Sequence
  Description of Artificial Sequence: Synthetic oligonucleotide
ugcgguagugugcgguggg

SEQ ID NO: 1401123 - RNA, 19 nt, Artificial Sequence
  Description of Artificial Sequence: Synthetic oligonucleotide
gaaguuagccuugucggga

SEQ ID NO: 1401124 - RNA, 19 nt, Artificial Sequence
  Description of Artificial Sequence: Synthetic oligonucleotide
gacaaauacuggccacccc

SEQ ID NO: 1401125 - RNA, 19 nt, Artificial Sequence
  Description of Artificial Sequence: Synthetic oligonucleotide
uuagugccccucuggagga

SEQ ID NO: 1401126 - RNA, 19 nt, Artificial Sequence
  Description of Artificial Sequence: Synthetic oligonucleotide
aucugucguaagguggggc

SEQ ID NO: 1401127 - RNA, 19 nt, Artificial Sequence
  Description of Artificial Sequence: Synthetic oligonucleotide
gcuugcguggccuaccccg

SEQ ID NO: 1401128 - RNA, 19 nt, Artificial Sequence
  Description of Artificial Sequence: Synthetic oligonucleotide
gguaguuugugaacagagg

SEQ ID NO: 1401129 - RNA, 19 nt, Artificial Sequence
  Description of Artificial Sequence: Synthetic oligonucleotide
cucagucccguccuucucc

SEQ ID NO: 1401130 - RNA, 19 nt, Artificial Sequence
  Description of Artificial Sequence: Synthetic oligonucleotide
ugcugggaccuaagcaucc

SEQ ID NO: 1401131 - RNA, 19 nt, Artificial Sequence
  Description of Artificial Sequence: Synthetic oligonucleotide
agucgcagagccugcagcu

SEQ ID NO: 1401132 - RNA, 19 nt, Artificial Sequence
  Description of Artificial Sequence: Synthetic oligonucleotide
ugcucccucucucuacaag

SEQ ID NO: 1401133 - RNA, 19 nt, Artificial Sequence
  Description of Artificial Sequence: Synthetic oligonucleotide
ucucuaagggaggugcgca

SEQ ID NO: 1401134 - RNA, 19 nt, Artificial Sequence
  Description of Artificial Sequence: Synthetic oligonucleotide
ugguaaccagccugcugcg

SEQ ID NO: 1401135 - RNA, 19 nt, Artificial Sequence
  Description of Artificial Sequence: Synthetic oligonucleotide
agucccaauuagaggagcg

SEQ ID NO: 1401136 - RNA, 19 nt, Artificial Sequence
  Description of Artificial Sequence: Synthetic oligonucleotide
ugacucccuaccagcgccg

SEQ ID NO: 1401137 - RNA, 19 nt, Artificial Sequence
  Description of Artificial Sequence: Synthetic oligonucleotide
gcggcuaagaggaaguuag

SEQ ID NO: 1401138 - RNA, 19 nt, Artificial Sequence
  Description of Artificial Sequence: Synthetic oligonucleotide
ucuaagggaggugcgcagc

SEQ ID NO: 1401139 - RNA, 19 nt, Artificial Sequence
  Description of Artificial Sequence: Synthetic oligonucleotide
uuagccuugucgggagagg

SEQ ID NO: 1401140 - RNA, 19 nt, Artificial Sequence
  Description of Artificial Sequence: Synthetic oligonucleotide
uucgguguuggcacuucac

SEQ ID NO: 1401141 - RNA, 19 nt, Artificial Sequence
  Description of Artificial Sequence: Synthetic oligonucleotide
ggguaucuaagaaugaaca

SEQ ID NO: 1401142 - RNA, 19 nt, Artificial Sequence
  Description of Artificial Sequence: Synthetic oligonucleotide
guugguaaccagccugcug

SEQ ID NO: 1401143 - RNA, 19 nt, Artificial Sequence
  Description of Artificial Sequence: Synthetic oligonucleotide
aacagccuagaguccgagu

SEQ ID NO: 1401144 - RNA, 19 nt, Artificial Sequence
  Description of Artificial Sequence: Synthetic oligonucleotide
uuuccgugucuuggcagcg

SEQ ID NO: 1401145 - RNA, 19 nt, Artificial Sequence
  Description of Artificial Sequence: Synthetic oligonucleotide
cagaaguggcugagaaacc

SEQ ID NO: 1401146 - RNA, 19 nt, Artificial Sequence
  Description of Artificial Sequence: Synthetic oligonucleotide
cuaguccagucaacggggc

SEQ ID NO: 1401147 - RNA, 19 nt, Artificial Sequence
  Description of Artificial Sequence: Synthetic oligonucleotide
aggagcgcagccccggcuc

SEQ ID NO: 1401148 - RNA, 19 nt, Artificial Sequence
  Description of Artificial Sequence: Synthetic oligonucleotide
agcaucccggcgcugacca

SEQ ID NO: 1401149 - RNA, 19 nt, Artificial Sequence
  Description of Artificial Sequence: Synthetic oligonucleotide
ggaccuaagcaucccggcg

SEQ ID NO: 1401150 - RNA, 19 nt, Artificial Sequence
  Description of Artificial Sequence: Synthetic oligonucleotide
accagcgccgucccaggac

SEQ ID NO: 1401151 - RNA, 19 nt, Artificial Sequence
  Description of Artificial Sequence: Synthetic oligonucleotide
ccaucugucguaagguggg

SEQ ID NO: 1401152 - RNA, 19 nt, Artificial Sequence
  Description of Artificial Sequence: Synthetic oligonucleotide
gcugugguagcuuuccgug

SEQ ID NO: 1401153 - RNA, 19 nt, Artificial Sequence
  Description of Artificial Sequence: Synthetic oligonucleotide
cuucccuuuggucggcccc

SEQ ID NO: 1401154 - RNA, 19 nt, Artificial Sequence
  Description of Artificial Sequence: Synthetic oligonucleotide
cuugcguggccuaccccgg

SEQ ID NO: 1401155 - RNA, 19 nt, Artificial Sequence
  Description of Artificial Sequence: Synthetic oligonucleotide
guuagccuugucgggagag

SEQ ID NO: 1401156 - RNA, 19 nt, Artificial Sequence
  Description of Artificial Sequence: Synthetic oligonucleotide
uucccuuuggucggccccg

SEQ ID NO: 1401157 - RNA, 19 nt, Artificial Sequence
  Description of Artificial Sequence: Synthetic oligonucleotide
aacccaccuggugaguuug

SEQ ID NO: 1401158 - RNA, 19 nt, Artificial Sequence
  Description of Artificial Sequence: Synthetic oligonucleotide
ggcuaagaggaaguuagcc

SEQ ID NO: 1401159 - RNA, 19 nt, Artificial Sequence
  Description of Artificial Sequence: Synthetic oligonucleotide
cuuuaaugcuccggggaug

SEQ ID NO: 1401160 - RNA, 19 nt, Artificial Sequence
  Description of Artificial Sequence: Synthetic oligonucleotide
accuacacccuuuucccau

SEQ ID NO: 1401161 - RNA, 19 nt, Artificial Sequence
  Description of Artificial Sequence: Synthetic oligonucleotide
gcuaguccagucaacgggg

SEQ ID NO: 1401162 - RNA, 19 nt, Artificial Sequence
  Description of Artificial Sequence: Synthetic oligonucleotide
uaaccagccugcugcgccc

SEQ ID NO: 1401163 - RNA, 19 nt, Artificial Sequence
  Description of Artificial Sequence: Synthetic oligonucleotide
cucccuaccagcgccgucc

SEQ ID NO: 1401164 - RNA, 19 nt, Artificial Sequence
  Description of Artificial Sequence: Synthetic oligonucleotide
guaucuaagaaugaacauu

SEQ ID NO: 1401165 - RNA, 19 nt, Artificial Sequence
  Description of Artificial Sequence: Synthetic oligonucleotide
cucuaagggaggugcgcag

SEQ ID NO: 1401166 - RNA, 19 nt, Artificial Sequence
  Description of Artificial Sequence: Synthetic oligonucleotide
cugggaccuaagcaucccg

SEQ ID NO: 1401167 - RNA, 19 nt, Artificial Sequence
  Description of Artificial Sequence: Synthetic oligonucleotide
ucaacggggcuugucagau

SEQ ID NO: 1401168 - RNA, 19 nt, Artificial Sequence
  Description of Artificial Sequence: Synthetic oligonucleotide
gacuuugagcuggacucgc

SEQ ID NO: 1401169 - RNA, 19 nt, Artificial Sequence
  Description of Artificial Sequence: Synthetic oligonucleotide
gugucuggggagaaugcag

SEQ ID NO: 1401170 - RNA, 19 nt, Artificial Sequence
  Description of Artificial Sequence: Synthetic oligonucleotide
gagauggguggugacuccc

SEQ ID NO: 1401171 - RNA, 19 nt, Artificial Sequence
  Description of Artificial Sequence: Synthetic oligonucleotide
uuggagccgcgccaacacc

SEQ ID NO: 1401172 - RNA, 19 nt, Artificial Sequence
  Description of Artificial Sequence: Synthetic oligonucleotide
cagucgcagagccugcagc

SEQ ID NO: 1401173 - RNA, 19 nt, Artificial Sequence
  Description of Artificial Sequence: Synthetic oligonucleotide
aaacccaccuggugaguuu

SEQ ID NO: 1401174 - RNA, 19 nt, Artificial Sequence
  Description of Artificial Sequence: Synthetic oligonucleotide
cuugucgggagagggcagg

SEQ ID NO: 1401175 - RNA, 19 nt, Artificial Sequence
  Description of Artificial Sequence: Synthetic oligonucleotide
uuggucggccccgaggucu

SEQ ID NO: 1401176 - RNA, 19 nt, Artificial Sequence
  Description of Artificial Sequence: Synthetic oligonucleotide
gagucccaauuagaggagc

SEQ ID NO: 1401177 - RNA, 19 nt, Artificial Sequence
  Description of Artificial Sequence: Synthetic oligonucleotide
acucaccggaggcugcuug

SEQ ID NO: 1401178 - RNA, 19 nt, Artificial Sequence
  Description of Artificial Sequence: Synthetic oligonucleotide
ucagucccguccuucuccu

SEQ ID NO: 1401179 - RNA, 19 nt, Artificial Sequence
  Description of Artificial Sequence: Synthetic oligonucleotide
ggcaaggcuagcuccuuag

SEQ ID NO: 1401180 - RNA, 19 nt, Artificial Sequence
  Description of Artificial Sequence: Synthetic oligonucleotide
gagcacugucucuaaggga

SEQ ID NO: 1401181 - RNA, 19 nt, Artificial Sequence
  Description of Artificial Sequence: Synthetic oligonucleotide
ucaccggaggcugcuugcg

SEQ ID NO: 1401182 - RNA, 19 nt, Artificial Sequence
  Description of Artificial Sequence: Synthetic oligonucleotide
cucaccggaggcugcuugc

SEQ ID NO: 1401183 - RNA, 19 nt, Artificial Sequence
  Description of Artificial Sequence: Synthetic oligonucleotide
ucccucucucuacaaggaa

SEQ ID NO: 1401184 - RNA, 19 nt, Artificial Sequence
  Description of Artificial Sequence: Synthetic oligonucleotide
gaguuggcgcccaucugcc

SEQ ID NO: 1401185 - RNA, 19 nt, Artificial Sequence
  Description of Artificial Sequence: Synthetic oligonucleotide
ugucguaagguggggcaga

SEQ ID NO: 1401186 - RNA, 19 nt, Artificial Sequence
  Description of Artificial Sequence: Synthetic oligonucleotide
aggucucuucgguguuggc

SEQ ID NO: 1401187 - RNA, 19 nt, Artificial Sequence
  Description of Artificial Sequence: Synthetic oligonucleotide
uuggggcccuuuaaugcuc

SEQ ID NO: 1401188 - RNA, 19 nt, Artificial Sequence
  Description of Artificial Sequence: Synthetic oligonucleotide
accuaagcaucccggcgcu

SEQ ID NO: 1401189 - RNA, 19 nt, Artificial Sequence
  Description of Artificial Sequence: Synthetic oligonucleotide
gaacagccuagaguccgag

SEQ ID NO: 1401190 - RNA, 19 nt, Artificial Sequence
  Description of Artificial Sequence: Synthetic oligonucleotide
gcuaagaggaaguuagccu

SEQ ID NO: 1401191 - RNA, 19 nt, Artificial Sequence
  Description of Artificial Sequence: Synthetic oligonucleotide
guuggcgcccaucugccuc

SEQ ID NO: 1401192 - RNA, 19 nt, Artificial Sequence
  Description of Artificial Sequence: Synthetic oligonucleotide
cuuuccccuagagugucug

SEQ ID NO: 1401193 - RNA, 19 nt, Artificial Sequence
  Description of Artificial Sequence: Synthetic oligonucleotide
ggccgggacaaauacuggc

SEQ ID NO: 1401194 - RNA, 19 nt, Artificial Sequence
  Description of Artificial Sequence: Synthetic oligonucleotide
gucccaauuagaggagcgc

SEQ ID NO: 1401195 - RNA, 19 nt, Artificial Sequence
  Description of Artificial Sequence: Synthetic oligonucleotide
cuaccagcgccgucccagg

SEQ ID NO: 1401196 - RNA, 19 nt, Artificial Sequence
  Description of Artificial Sequence: Synthetic oligonucleotide
ccaacaccacaaauagccc

SEQ ID NO: 1401197 - RNA, 19 nt, Artificial Sequence
  Description of Artificial Sequence: Synthetic oligonucleotide
gaccuacacccuuuuccca

SEQ ID NO: 1401198 - RNA, 19 nt, Artificial Sequence
  Description of Artificial Sequence: Synthetic oligonucleotide
cuuggcgcugguagcagca

SEQ ID NO: 1401199 - RNA, 19 nt, Artificial Sequence
  Description of Artificial Sequence: Synthetic oligonucleotide
cucuacaaggaagccagga

SEQ ID NO: 1401200 - RNA, 19 nt, Artificial Sequence
  Description of Artificial Sequence: Synthetic oligonucleotide
ucucagucccguccuucuc

SEQ ID NO: 1401201 - RNA, 19 nt, Artificial Sequence
  Description of Artificial Sequence: Synthetic oligonucleotide
gcuuuccgugucuuggcag

SEQ ID NO: 1401202 - RNA, 19 nt, Artificial Sequence
  Description of Artificial Sequence: Synthetic oligonucleotide
cccaauuagaggagcgcag

SEQ ID NO: 1401203 - RNA, 19 nt, Artificial Sequence
  Description of Artificial Sequence: Synthetic oligonucleotide
aucuaagaaugaacauuga

SEQ ID NO: 1401204 - RNA, 19 nt, Artificial Sequence
  Description of Artificial Sequence: Synthetic oligonucleotide
ccuucugacucccuaccag

SEQ ID NO: 1401205 - RNA, 19 nt, Artificial Sequence
  Description of Artificial Sequence: Synthetic oligonucleotide
cuaagggaggugcgcagca

SEQ ID NO: 1401206 - RNA, 19 nt, Artificial Sequence
  Description of Artificial Sequence: Synthetic oligonucleotide
gugggugcggcagucgcag

SEQ ID NO: 1401207 - RNA, 19 nt, Artificial Sequence
  Description of Artificial Sequence: Synthetic oligonucleotide
acugcgcguggucacugcu

SEQ ID NO: 1401208 - RNA, 19 nt, Artificial Sequence
  Description of Artificial Sequence: Synthetic oligonucleotide
cggagucccaauuagagga

SEQ ID NO: 1401209 - RNA, 19 nt, Artificial Sequence
  Description of Artificial Sequence: Synthetic oligonucleotide
uggagcugugguagcuuuc

SEQ ID NO: 1401210 - RNA, 19 nt, Artificial Sequence
  Description of Artificial Sequence: Synthetic oligonucleotide
ccaauuagaggagcgcagc

SEQ ID NO: 1401211 - RNA, 19 nt, Artificial Sequence
  Description of Artificial Sequence: Synthetic oligonucleotide
ugcuugcguggccuacccc

SEQ ID NO: 1401212 - RNA, 19 nt, Artificial Sequence
  Description of Artificial Sequence: Synthetic oligonucleotide
cugcuugcguggccuaccc

SEQ ID NO: 1401213 - RNA, 19 nt, Artificial Sequence
  Description of Artificial Sequence: Synthetic oligonucleotide
cugucguaagguggggcag

SEQ ID NO: 1401214 - RNA, 19 nt, Artificial Sequence
  Description of Artificial Sequence: Synthetic oligonucleotide
aguuagccuugucgggaga

SEQ ID NO: 1401215 - RNA, 19 nt, Artificial Sequence
  Description of Artificial Sequence: Synthetic oligonucleotide
cuuuggucggccccgaggu

SEQ ID NO: 1401216 - RNA, 19 nt, Artificial Sequence
  Description of Artificial Sequence: Synthetic oligonucleotide
ugcggcuaagaggaaguua

SEQ ID NO: 1401217 - RNA, 19 nt, Artificial Sequence
  Description of Artificial Sequence: Synthetic oligonucleotide
uggugcgguagugugcggu

SEQ ID NO: 1401218 - RNA, 19 nt, Artificial Sequence
  Description of Artificial Sequence: Synthetic oligonucleotide
gguaucuaagaaugaacau

SEQ ID NO: 1401219 - RNA, 19 nt, Artificial Sequence
  Description of Artificial Sequence: Synthetic oligonucleotide
aggacucaccggaggcugc

SEQ ID NO: 1401220 - RNA, 19 nt, Artificial Sequence
  Description of Artificial Sequence: Synthetic oligonucleotide
caucugucguaaggugggg

SEQ ID NO: 1401221 - RNA, 19 nt, Artificial Sequence
  Description of Artificial Sequence: Synthetic oligonucleotide
cugggagccgggcuuccag

SEQ ID NO: 1401222 - RNA, 19 nt, Artificial Sequence
  Description of Artificial Sequence: Synthetic oligonucleotide
gugaguuggcgcccaucug

SEQ ID NO: 1401223 - RNA, 19 nt, Artificial Sequence
  Description of Artificial Sequence: Synthetic oligonucleotide
gucaacggggcuugucaga

SEQ ID NO: 1401224 - RNA, 19 nt, Artificial Sequence
  Description of Artificial Sequence: Synthetic oligonucleotide
gcccuuuaaugcuccgggg

SEQ ID NO: 1401225 - RNA, 19 nt, Artificial Sequence
  Description of Artificial Sequence: Synthetic oligonucleotide
uuuggucggccccgagguc

SEQ ID NO: 1401226 - RNA, 19 nt, Artificial Sequence
  Description of Artificial Sequence: Synthetic oligonucleotide
uacacccuuuucccaucaa

SEQ ID NO: 1401227 - RNA, 19 nt, Artificial Sequence
  Description of Artificial Sequence: Synthetic oligonucleotide
gggacaggcaaaacaagga

SEQ ID NO: 1401228 - RNA, 19 nt, Artificial Sequence
  Description of Artificial Sequence: Synthetic oligonucleotide
ucccuaccagcgccguccc

SEQ ID NO: 1401229 - RNA, 19 nt, Artificial Sequence
  Description of Artificial Sequence: Synthetic oligonucleotide
acucccuaccagcgccguc

SEQ ID NO: 1401230 - RNA, 19 nt, Artificial Sequence
  Description of Artificial Sequence: Synthetic oligonucleotide
uucuugggucugccccuug

SEQ ID NO: 1401231 - RNA, 19 nt, Artificial Sequence
  Description of Artificial Sequence: Synthetic oligonucleotide
gccgucccaggacucaccg

SEQ ID NO: 1401232 - RNA, 19 nt, Artificial Sequence
  Description of Artificial Sequence: Synthetic oligonucleotide
ccuuuggucggccccgagg

SEQ ID NO: 1401233 - RNA, 19 nt, Artificial Sequence
  Description of Artificial Sequence: Synthetic oligonucleotide
ggugcgguagugugcggug

SEQ ID NO: 1401234 - RNA, 19 nt, Artificial Sequence
  Description of Artificial Sequence: Synthetic oligonucleotide
ggugaguuggcgcccaucu

SEQ ID NO: 1401235 - RNA, 19 nt, Artificial Sequence
  Description of Artificial Sequence: Synthetic oligonucleotide
gugcgguagugugcggugg

SEQ ID NO: 1401236 - RNA, 19 nt, Artificial Sequence
  Description of Artificial Sequence: Synthetic oligonucleotide
gccgggacaaauacuggcc

SEQ ID NO: 1401237 - RNA, 19 nt, Artificial Sequence
  Description of Artificial Sequence: Synthetic oligonucleotide
caucaaaaugggcccaccu

SEQ ID NO: 1401238 - RNA, 19 nt, Artificial Sequence
  Description of Artificial Sequence: Synthetic oligonucleotide
ccuuagugccccucuggag

SEQ ID NO: 1401239 - RNA, 19 nt, Artificial Sequence
  Description of Artificial Sequence: Synthetic oligonucleotide
uucuuggagccgcgccaac

SEQ ID NO: 1401240 - RNA, 19 nt, Artificial Sequence
  Description of Artificial Sequence: Synthetic oligonucleotide
gguggugacucccaucugu

SEQ ID NO: 1401241 - RNA, 19 nt, Artificial Sequence
  Description of Artificial Sequence: Synthetic oligonucleotide
aggugaguuggcgcccauc

SEQ ID NO: 1401242 - RNA, 19 nt, Artificial Sequence
  Description of Artificial Sequence: Synthetic oligonucleotide
ggagucccaauuagaggag

SEQ ID NO: 1401243 - RNA, 19 nt, Artificial Sequence
  Description of Artificial Sequence: Synthetic oligonucleotide
ggccucgcuucucaguccc

SEQ ID NO: 1401244 - RNA, 19 nt, Artificial Sequence
  Description of Artificial Sequence: Synthetic oligonucleotide
ucguaagguggggcagaag

SEQ ID NO: 1401245 - RNA, 19 nt, Artificial Sequence
  Description of Artificial Sequence: Synthetic oligonucleotide
ugacucccaucugucguaa

SEQ ID NO: 1401246 - RNA, 19 nt, Artificial Sequence
  Description of Artificial Sequence: Synthetic oligonucleotide
ggaugcucccucucucuac

SEQ ID NO: 1401247 - RNA, 19 nt, Artificial Sequence
  Description of Artificial Sequence: Synthetic oligonucleotide
uaccagcgccgucccagga

SEQ ID NO: 1401248 - RNA, 19 nt, Artificial Sequence
  Description of Artificial Sequence: Synthetic oligonucleotide
aggccgggacaaauacugg

SEQ ID NO: 1401249 - RNA, 19 nt, Artificial Sequence
  Description of Artificial Sequence: Synthetic oligonucleotide
ugcggcagucgcagagccu

SEQ ID NO: 1401250 - RNA, 19 nt, Artificial Sequence
  Description of Artificial Sequence: Synthetic oligonucleotide
cccuagagugucuggggag

SEQ ID NO: 1401251 - RNA, 19 nt, Artificial Sequence
  Description of Artificial Sequence: Synthetic oligonucleotide
aguuggcgcccaucugccu

SEQ ID NO: 1401252 - RNA, 19 nt, Artificial Sequence
  Description of Artificial Sequence: Synthetic oligonucleotide
ggugacucccaucugucgu

SEQ ID NO: 1401253 - RNA, 19 nt, Artificial Sequence
  Description of Artificial Sequence: Synthetic oligonucleotide
uccggggaugcucccucuc

SEQ ID NO: 1401254 - RNA, 19 nt, Artificial Sequence
  Description of Artificial Sequence: Synthetic oligonucleotide
gugacucccaucugucgua

SEQ ID NO: 1401255 - RNA, 19 nt, Artificial Sequence
  Description of Artificial Sequence: Synthetic oligonucleotide
ccuaccagcgccgucccag

SEQ ID NO: 1401256 - RNA, 19 nt, Artificial Sequence
  Description of Artificial Sequence: Synthetic oligonucleotide
gcggcagucgcagagccug

SEQ ID NO: 1401257 - RNA, 19 nt, Artificial Sequence
  Description of Artificial Sequence: Synthetic oligonucleotide
cugcgcguggucacugcuc

SEQ ID NO: 1401258 - RNA, 19 nt, Artificial Sequence
  Description of Artificial Sequence: Synthetic oligonucleotide
cacugcgcguggucacugc

SEQ ID NO: 1401259 - RNA, 19 nt, Artificial Sequence
  Description of Artificial Sequence: Synthetic oligonucleotide
uuaaugcuccggggaugcu

SEQ ID NO: 1401260 - RNA, 19 nt, Artificial Sequence
  Description of Artificial Sequence: Synthetic oligonucleotide
uagagugucuggggagaau

SEQ ID NO: 1401261 - RNA, 19 nt, Artificial Sequence
  Description of Artificial Sequence: Synthetic oligonucleotide
gagcgcacggggacaaauc

SEQ ID NO: 1401262 - RNA, 19 nt, Artificial Sequence
  Description of Artificial Sequence: Synthetic oligonucleotide
guggccuaccccggccucg

SEQ ID NO: 1401263 - RNA, 19 nt, Artificial Sequence
  Description of Artificial Sequence: Synthetic oligonucleotide
ggcgugcugggaccuaagc

SEQ ID NO: 1401264 - RNA, 19 nt, Artificial Sequence
  Description of Artificial Sequence: Synthetic oligonucleotide
caaauagccccagcucgga

SEQ ID NO: 1401265 - RNA, 19 nt, Artificial Sequence
  Description of Artificial Sequence: Synthetic oligonucleotide
gcgugcugggaccuaagca

SEQ ID NO: 1401266 - RNA, 19 nt, Artificial Sequence
  Description of Artificial Sequence: Synthetic oligonucleotide
agauggguggugacuccca

SEQ ID NO: 1401267 - RNA, 19 nt, Artificial Sequence
  Description of Artificial Sequence: Synthetic oligonucleotide
cccuuuaaugcuccgggga

SEQ ID NO: 1401268 - RNA, 19 nt, Artificial Sequence
  Description of Artificial Sequence: Synthetic oligonucleotide
aucccggcgcugaccacac

SEQ ID NO: 1401269 - RNA, 19 nt, Artificial Sequence
  Description of Artificial Sequence: Synthetic oligonucleotide
cuucgguguuggcacuuca

SEQ ID NO: 1401270 - RNA, 19 nt, Artificial Sequence
  Description of Artificial Sequence: Synthetic oligonucleotide
aggugcgcagcaggacagg

SEQ ID NO: 1401271 - RNA, 19 nt, Artificial Sequence
  Description of Artificial Sequence: Synthetic oligonucleotide
cugcugcuaguccagucaa

SEQ ID NO: 1401272 - RNA, 19 nt, Artificial Sequence
  Description of Artificial Sequence: Synthetic oligonucleotide
ggcugcggcuaagaggaag

SEQ ID NO: 1401273 - RNA, 19 nt, Artificial Sequence
  Description of Artificial Sequence: Synthetic oligonucleotide
gucgcagagccugcagcug

SEQ ID NO: 1401274 - RNA, 19 nt, Artificial Sequence
  Description of Artificial Sequence: Synthetic oligonucleotide
caacggggcuugucagaug

SEQ ID NO: 1401275 - RNA, 19 nt, Artificial Sequence
  Description of Artificial Sequence: Synthetic oligonucleotide
gugccccucuggaggaagg

SEQ ID NO: 1401276 - RNA, 19 nt, Artificial Sequence
  Description of Artificial Sequence: Synthetic oligonucleotide
gguggguaucuaagaauga

SEQ ID NO: 1401277 - RNA, 19 nt, Artificial Sequence
  Description of Artificial Sequence: Synthetic oligonucleotide
guggaccuacacccuuuuc

SEQ ID NO: 1401278 - RNA, 19 nt, Artificial Sequence
  Description of Artificial Sequence: Synthetic oligonucleotide
ccaccuggugaguuuggug

SEQ ID NO: 1401279 - RNA, 19 nt, Artificial Sequence
  Description of Artificial Sequence: Synthetic oligonucleotide
caucccggcgcugaccaca

SEQ ID NO: 1401280 - RNA, 19 nt, Artificial Sequence
  Description of Artificial Sequence: Synthetic oligonucleotide
ggacaaauccugcucccgu

SEQ ID NO: 1401281 - RNA, 19 nt, Artificial Sequence
  Description of Artificial Sequence: Synthetic oligonucleotide
gaaacccaccuggugaguu

SEQ ID NO: 1401282 - RNA, 19 nt, Artificial Sequence
  Description of Artificial Sequence: Synthetic oligonucleotide
agccgcgccaacaccacaa

SEQ ID NO: 1401283 - RNA, 19 nt, Artificial Sequence
  Description of Artificial Sequence: Synthetic oligonucleotide
ccuaccccggccucgcuuc

SEQ ID NO: 1401284 - RNA, 19 nt, Artificial Sequence
  Description of Artificial Sequence: Synthetic oligonucleotide
cacggggacaaauccugcu

SEQ ID NO: 1401285 - RNA, 19 nt, Artificial Sequence
  Description of Artificial Sequence: Synthetic oligonucleotide
cugugguagcuuuccgugu

SEQ ID NO: 1401286 - RNA, 19 nt, Artificial Sequence
  Description of Artificial Sequence: Synthetic oligonucleotide
ccuacacccuuuucccauc

SEQ ID NO: 1401287 - RNA, 19 nt, Artificial Sequence
  Description of Artificial Sequence: Synthetic oligonucleotide
gaggagcgcacggggacaa

SEQ ID NO: 1401288 - RNA, 19 nt, Artificial Sequence
  Description of Artificial Sequence: Synthetic oligonucleotide
gcguggucacugcuccucc

SEQ ID NO: 1401289 - RNA, 19 nt, Artificial Sequence
  Description of Artificial Sequence: Synthetic oligonucleotide
ggggcccuuuaaugcuccg

SEQ ID NO: 1401290 - RNA, 19 nt, Artificial Sequence
  Description of Artificial Sequence: Synthetic oligonucleotide
acggggcuugucagauggg

SEQ ID NO: 1401291 - RNA, 19 nt, Artificial Sequence
  Description of Artificial Sequence: Synthetic oligonucleotide
ugggugcggcagucgcaga

SEQ ID NO: 1401292 - RNA, 19 nt, Artificial Sequence
  Description of Artificial Sequence: Synthetic oligonucleotide
gagccgcgccaacaccaca

SEQ ID NO: 1401293 - RNA, 19 nt, Artificial Sequence
  Description of Artificial Sequence: Synthetic oligonucleotide
gcucccgugggugcggcag

SEQ ID NO: 1401294 - RNA, 19 nt, Artificial Sequence
  Description of Artificial Sequence: Synthetic oligonucleotide
agcgccgucccaggacuca

SEQ ID NO: 1401295 - RNA, 19 nt, Artificial Sequence
  Description of Artificial Sequence: Synthetic oligonucleotide
ccuugucgggagagggcag

SEQ ID NO: 1401296 - RNA, 19 nt, Artificial Sequence
  Description of Artificial Sequence: Synthetic oligonucleotide
gucguaagguggggcagaa

SEQ ID NO: 1401297 - RNA, 19 nt, Artificial Sequence
  Description of Artificial Sequence: Synthetic oligonucleotide
gcgguagugugcggugggg

SEQ ID NO: 1401298 - RNA, 19 nt, Artificial Sequence
  Description of Artificial Sequence: Synthetic oligonucleotide
agguggaccuacacccuuu

SEQ ID NO: 1401299 - RNA, 19 nt, Artificial Sequence
  Description of Artificial Sequence: Synthetic oligonucleotide
ccuagagugucuggggaga

SEQ ID NO: 1401300 - RNA, 19 nt, Artificial Sequence
  Description of Artificial Sequence: Synthetic oligonucleotide
ccgugggugcggcagucgc

SEQ ID NO: 1401301 - RNA, 19 nt, Artificial Sequence
  Description of Artificial Sequence: Synthetic oligonucleotide
uccagucaacggggcuugu

SEQ ID NO: 1401302 - RNA, 19 nt, Artificial Sequence
  Description of Artificial Sequence: Synthetic oligonucleotide
gggaggugaguuggcgccc

SEQ ID NO: 1401303 - RNA, 19 nt, Artificial Sequence
  Description of Artificial Sequence: Synthetic oligonucleotide
gcucggagucccaauuaga

SEQ ID NO: 1401304 - RNA, 19 nt, Artificial Sequence
  Description of Artificial Sequence: Synthetic oligonucleotide
gccuagaguccgagugggg

SEQ ID NO: 1401305 - RNA, 19 nt, Artificial Sequence
  Description of Artificial Sequence: Synthetic oligonucleotide
ucccgugggugcggcaguc

SEQ ID NO: 1401306 - RNA, 19 nt, Artificial Sequence
  Description of Artificial Sequence: Synthetic oligonucleotide
ggguggugacucccaucug

SEQ ID NO: 1401307 - RNA, 19 nt, Artificial Sequence
  Description of Artificial Sequence: Synthetic oligonucleotide
ccuuuaaugcuccggggau

SEQ ID NO: 1401308 - RNA, 19 nt, Artificial Sequence
  Description of Artificial Sequence: Synthetic oligonucleotide
uagugccccucuggaggaa

SEQ ID NO: 1401309 - RNA, 19 nt, Artificial Sequence
  Description of Artificial Sequence: Synthetic oligonucleotide
ccgucccaggacucaccgg

SEQ ID NO: 1401310 - RNA, 19 nt, Artificial Sequence
  Description of Artificial Sequence: Synthetic oligonucleotide
gcugcggcuaagaggaagu

SEQ ID NO: 1401311 - RNA, 19 nt, Artificial Sequence
  Description of Artificial Sequence: Synthetic oligonucleotide
gggaggugcgcagcaggac

SEQ ID NO: 1401312 - RNA, 19 nt, Artificial Sequence
  Description of Artificial Sequence: Synthetic oligonucleotide
cagcgccgucccaggacuc

SEQ ID NO: 1401313 - RNA, 19 nt, Artificial Sequence
  Description of Artificial Sequence: Synthetic oligonucleotide
ggaggugaguuggcgccca

SEQ ID NO: 1401314 - RNA, 19 nt, Artificial Sequence
  Description of Artificial Sequence: Synthetic oligonucleotide
cugcucccgugggugcggc

SEQ ID NO: 1401315 - RNA, 19 nt, Artificial Sequence
  Description of Artificial Sequence: Synthetic oligonucleotide
ggagccgcgccaacaccac

SEQ ID NO: 1401316 - RNA, 19 nt, Artificial Sequence
  Description of Artificial Sequence: Synthetic oligonucleotide
ccccgaggucucuucggug

SEQ ID NO: 1401317 - RNA, 19 nt, Artificial Sequence
  Description of Artificial Sequence: Synthetic oligonucleotide
ggcgcccaucugccucugg

SEQ ID NO: 1401318 - RNA, 19 nt, Artificial Sequence
  Description of Artificial Sequence: Synthetic oligonucleotide
gcacugcgcguggucacug

SEQ ID NO: 1401319 - RNA, 19 nt, Artificial Sequence
  Description of Artificial Sequence: Synthetic oligonucleotide
ggcugcuugcguggccuac

SEQ ID NO: 1401320 - RNA, 19 nt, Artificial Sequence
  Description of Artificial Sequence: Synthetic oligonucleotide
gacucccuaccagcgccgu

SEQ ID NO: 1401321 - RNA, 19 nt, Artificial Sequence
  Description of Artificial Sequence: Synthetic oligonucleotide
uggcgcccaucugccucug

SEQ ID NO: 1401322 - RNA, 19 nt, Artificial Sequence
  Description of Artificial Sequence: Synthetic oligonucleotide
gccaaggagcaggcggcac

SEQ ID NO: 1401323 - RNA, 19 nt, Artificial Sequence
  Description of Artificial Sequence: Synthetic oligonucleotide
ccugcucccgugggugcgg

SEQ ID NO: 1401324 - RNA, 19 nt, Artificial Sequence
  Description of Artificial Sequence: Synthetic oligonucleotide
gguggaccuacacccuuuu

SEQ ID NO: 1401325 - RNA, 19 nt, Artificial Sequence
  Description of Artificial Sequence: Synthetic oligonucleotide
gggcaaggcuagcuccuua

SEQ ID NO: 1401326 - RNA, 19 nt, Artificial Sequence
  Description of Artificial Sequence: Synthetic oligonucleotide
ggagguggaccuacacccu

SEQ ID NO: 1401327 - RNA, 19 nt, Artificial Sequence
  Description of Artificial Sequence: Synthetic oligonucleotide
gguugguaaccagccugcu

SEQ ID NO: 1401328 - RNA, 19 nt, Artificial Sequence
  Description of Artificial Sequence: Synthetic oligonucleotide
gaggugaguuggcgcccau

SEQ ID NO: 1401329 - RNA, 19 nt, Artificial Sequence
  Description of Artificial Sequence: Synthetic oligonucleotide
caccggaggcugcuugcgu

SEQ ID NO: 1401330 - RNA, 19 nt, Artificial Sequence
  Description of Artificial Sequence: Synthetic oligonucleotide
ggagcgcacggggacaaau

SEQ ID NO: 1401331 - RNA, 19 nt, Artificial Sequence
  Description of Artificial Sequence: Synthetic oligonucleotide
cccggcgcugaccacaccu

SEQ ID NO: 1401332 - RNA, 19 nt, Artificial Sequence
  Description of Artificial Sequence: Synthetic oligonucleotide
cgcguggucacugcuccuc

SEQ ID NO: 1401333 - RNA, 19 nt, Artificial Sequence
  Description of Artificial Sequence: Synthetic oligonucleotide
ccuaagcaucccggcgcug

SEQ ID NO: 1401334 - RNA, 19 nt, Artificial Sequence
  Description of Artificial Sequence: Synthetic oligonucleotide
cggccccgaggucucuucg

SEQ ID NO: 1401335 - RNA, 19 nt, Artificial Sequence
  Description of Artificial Sequence: Synthetic oligonucleotide
gccgcgccaacaccacaaa

SEQ ID NO: 1401336 - RNA, 19 nt, Artificial Sequence
  Description of Artificial Sequence: Synthetic oligonucleotide
aggagcgcacggggacaaa

SEQ ID NO: 1401337 - RNA, 19 nt, Artificial Sequence
  Description of Artificial Sequence: Synthetic oligonucleotide
ccagcgccgucccaggacu

SEQ ID NO: 1401338 - RNA, 19 nt, Artificial Sequence
  Description of Artificial Sequence: Synthetic oligonucleotide
cuccggggaugcucccucu

SEQ ID NO: 1401339 - RNA, 19 nt, Artificial Sequence
  Description of Artificial Sequence: Synthetic oligonucleotide
ccaggccgggacaaauacu

SEQ ID NO: 1401340 - RNA, 19 nt, Artificial Sequence
  Description of Artificial Sequence: Synthetic oligonucleotide
cgccgucccaggacucacc

SEQ ID NO: 1401341 - RNA, 19 nt, Artificial Sequence
  Description of Artificial Sequence: Synthetic oligonucleotide
uggggcccuuuggggcccu

SEQ ID NO: 1401342 - RNA, 19 nt, Artificial Sequence
  Description of Artificial Sequence: Synthetic oligonucleotide
ggacucaccggaggcugcu

SEQ ID NO: 1401343 - RNA, 19 nt, Artificial Sequence
  Description of Artificial Sequence: Synthetic oligonucleotide
cgugggugcggcagucgca

SEQ ID NO: 1401344 - RNA, 19 nt, Artificial Sequence
  Description of Artificial Sequence: Synthetic oligonucleotide
gcgcacggggacaaauccu

SEQ ID NO: 1401345 - RNA, 19 nt, Artificial Sequence
  Description of Artificial Sequence: Synthetic oligonucleotide
gcgccgucccaggacucac

SEQ ID NO: 1401346 - RNA, 19 nt, Artificial Sequence
  Description of Artificial Sequence: Synthetic oligonucleotide
ccagcucggagucccaauu

SEQ ID NO: 1401347 - RNA, 19 nt, Artificial Sequence
  Description of Artificial Sequence: Synthetic oligonucleotide
cucccgugggugcggcagu

SEQ ID NO: 1401348 - RNA, 19 nt, Artificial Sequence
  Description of Artificial Sequence: Synthetic oligonucleotide
ccuucucuauagggcagua

SEQ ID NO: 1401349 - RNA, 19 nt, Artificial Sequence
  Description of Artificial Sequence: Synthetic oligonucleotide
cuaccccggccucgcuucu

SEQ ID NO: 1401350 - RNA, 19 nt, Artificial Sequence
  Description of Artificial Sequence: Synthetic oligonucleotide
gcguggccuaccccggccu

SEQ ID NO: 1401351 - RNA, 19 nt, Artificial Sequence
  Description of Artificial Sequence: Synthetic oligonucleotide
gacucaccggaggcugcuu

SEQ ID NO: 1401352 - RNA, 19 nt, Artificial Sequence
  Description of Artificial Sequence: Synthetic oligonucleotide
ggcacugcgcguggucacu

SEQ ID NO: 1401353 - RNA, 19 nt, Artificial Sequence
  Description of Artificial Sequence: Synthetic oligonucleotide
gcgcugguagcagcagcaa

SEQ ID NO: 1401354 - RNA, 19 nt, Artificial Sequence
  Description of Artificial Sequence: Synthetic oligonucleotide
cacuggcugugauggccuu

SEQ ID NO: 1401355 - RNA, 19 nt, Artificial Sequence
  Description of Artificial Sequence: Synthetic oligonucleotide
cugcggcuaagaggaaguu

SEQ ID NO: 1401356 - RNA, 19 nt, Artificial Sequence
  Description of Artificial Sequence: Synthetic oligonucleotide
ccccaggccgggacaaaua

SEQ ID NO: 1401357 - RNA, 19 nt, Artificial Sequence
  Description of Artificial Sequence: Synthetic oligonucleotide
ccggggaugcucccucucu

SEQ ID NO: 1401358 - RNA, 19 nt, Artificial Sequence
  Description of Artificial Sequence: Synthetic oligonucleotide
gccuaccccggccucgcuu

SEQ ID NO: 1401359 - RNA, 19 nt, Artificial Sequence
  Description of Artificial Sequence: Synthetic oligonucleotide
ggcgggcgugcugggaccu

SEQ ID NO: 1401360 - RNA, 19 nt, Artificial Sequence
  Description of Artificial Sequence: Synthetic oligonucleotide
gccccaggccgggacaaau

SEQ ID NO: 1401361 - RNA, 19 nt, Artificial Sequence
  Description of Artificial Sequence: Synthetic oligonucleotide
gcgcguggucacugcuccu

SEQ ID NO: 1401362 - RNA, 19 nt, Artificial Sequence
  Description of Artificial Sequence: Synthetic oligonucleotide
ccgcgccaacaccacaaau

SEQ ID NO: 1401363 - RNA, 19 nt, Artificial Sequence
  Description of Artificial Sequence: Synthetic oligonucleotide
cccuaccagcgccguccca

SEQ ID NO: 1401364 - RNA, 19 nt, Artificial Sequence
  Description of Artificial Sequence: Synthetic oligonucleotide
ggucggccccgaggucucu

SEQ ID NO: 1401365 - RNA, 19 nt, Artificial Sequence
  Description of Artificial Sequence: Synthetic oligonucleotide
gcgggcgugcugggaccua

SEQ ID NO: 1401366 - RNA, 19 nt, Artificial Sequence
  Description of Artificial Sequence: Synthetic oligonucleotide
gaugacgucaaucucaugg

SEQ ID NO: 1401367 - RNA, 19 nt, Artificial Sequence
  Description of Artificial Sequence: Synthetic oligonucleotide
aucaauagugaucacgucc

SEQ ID NO: 1401368 - RNA, 19 nt, Artificial Sequence
  Description of Artificial Sequence: Synthetic oligonucleotide
agagaaaagaucucacugc

SEQ ID NO: 1401369 - RNA, 19 nt, Artificial Sequence
  Description of Artificial Sequence: Synthetic oligonucleotide
gacucgaucaucuuggugc

SEQ ID NO: 1401370 - RNA, 19 nt, Artificial Sequence
  Description of Artificial Sequence: Synthetic oligonucleotide
uuaucaauagugaucacgu

SEQ ID NO: 1401371 - RNA, 19 nt, Artificial Sequence
  Description of Artificial Sequence: Synthetic oligonucleotide
gaacuuguagaaaacaagg

SEQ ID NO: 1401372 - RNA, 19 nt, Artificial Sequence
  Description of Artificial Sequence: Synthetic oligonucleotide
auuguuucgccuuugagcu

SEQ ID NO: 1401373 - RNA, 19 nt, Artificial Sequence
  Description of Artificial Sequence: Synthetic oligonucleotide
aucuccguagucuugaggg

SEQ ID NO: 1401374 - RNA, 19 nt, Artificial Sequence
  Description of Artificial Sequence: Synthetic oligonucleotide
gagcaagcggucuagaagg

SEQ ID NO: 1401375 - RNA, 19 nt, Artificial Sequence
  Description of Artificial Sequence: Synthetic oligonucleotide
gauguugacacaaugagca

SEQ ID NO: 1401376 - RNA, 19 nt, Artificial Sequence
  Description of Artificial Sequence: Synthetic oligonucleotide
uugauacggacaccgaugg

SEQ ID NO: 1401377 - RNA, 19 nt, Artificial Sequence
  Description of Artificial Sequence: Synthetic oligonucleotide
gaugcguagaaucugcuug

SEQ ID NO: 1401378 - RNA, 19 nt, Artificial Sequence
  Description of Artificial Sequence: Synthetic oligonucleotide
cuuaucaauagugaucacg

SEQ ID NO: 1401379 - RNA, 19 nt, Artificial Sequence
  Description of Artificial Sequence: Synthetic oligonucleotide
ucuagaaggucaaugggga

SEQ ID NO: 1401380 - RNA, 19 nt, Artificial Sequence
  Description of Artificial Sequence: Synthetic oligonucleotide
acucucaauaucuagcaug

SEQ ID NO: 1401381 - RNA, 19 nt, Artificial Sequence
  Description of Artificial Sequence: Synthetic oligonucleotide
ugagcaagcggucuagaag

SEQ ID NO: 1401382 - RNA, 19 nt, Artificial Sequence
  Description of Artificial Sequence: Synthetic oligonucleotide
uguccagcaaugaggacgg

SEQ ID NO: 1401383 - RNA, 19 nt, Artificial Sequence
  Description of Artificial Sequence: Synthetic oligonucleotide
auagugaucacguccccgg

SEQ ID NO: 1401384 - RNA, 19 nt, Artificial Sequence
  Description of Artificial Sequence: Synthetic oligonucleotide
gugagcaccaauucgcucg

SEQ ID NO: 1401385 - RNA, 19 nt, Artificial Sequence
  Description of Artificial Sequence: Synthetic oligonucleotide
aggagaaacucucaauauc

SEQ ID NO: 1401386 - RNA, 19 nt, Artificial Sequence
  Description of Artificial Sequence: Synthetic oligonucleotide
uuggaaaucuugccagugg

SEQ ID NO: 1401387 - RNA, 19 nt, Artificial Sequence
  Description of Artificial Sequence: Synthetic oligonucleotide
acagcggaugcguagaauc

SEQ ID NO: 1401388 - RNA, 19 nt, Artificial Sequence
  Description of Artificial Sequence: Synthetic oligonucleotide
ugacacaaugagcaagcgg

SEQ ID NO: 1401389 - RNA, 19 nt, Artificial Sequence
  Description of Artificial Sequence: Synthetic oligonucleotide
cucgauucuugucacaucc

SEQ ID NO: 1401390 - RNA, 19 nt, Artificial Sequence
  Description of Artificial Sequence: Synthetic oligonucleotide
agaaggucaauggggaugc

SEQ ID NO: 1401391 - RNA, 19 nt, Artificial Sequence
  Description of Artificial Sequence: Synthetic oligonucleotide
aauucgcucgauucuuguc

SEQ ID NO: 1401392 - RNA, 19 nt, Artificial Sequence
  Description of Artificial Sequence: Synthetic oligonucleotide
uuggucagagacucgauca

SEQ ID NO: 1401393 - RNA, 19 nt, Artificial Sequence
  Description of Artificial Sequence: Synthetic oligonucleotide
uuuccggcacaccagacug

SEQ ID NO: 1401394 - RNA, 19 nt, Artificial Sequence
  Description of Artificial Sequence: Synthetic oligonucleotide
aauagugaucacguccccg

SEQ ID NO: 1401395 - RNA, 19 nt, Artificial Sequence
  Description of Artificial Sequence: Synthetic oligonucleotide
uggaaaucuugccaguggc

SEQ ID NO: 1401396 - RNA, 19 nt, Artificial Sequence
  Description of Artificial Sequence: Synthetic oligonucleotide
uugagcucguugaagagga

SEQ ID NO: 1401397 - RNA, 19 nt, Artificial Sequence
  Description of Artificial Sequence: Synthetic oligonucleotide
gaugucgucuaccugcacc

SEQ ID NO: 1401398 - RNA, 19 nt, Artificial Sequence
  Description of Artificial Sequence: Synthetic oligonucleotide
uguuucgccuuugagcucg

SEQ ID NO: 1401399 - RNA, 19 nt, Artificial Sequence
  Description of Artificial Sequence: Synthetic oligonucleotide
guuugcccaccuuagaucc

SEQ ID NO: 1401400 - RNA, 19 nt, Artificial Sequence
  Description of Artificial Sequence: Synthetic oligonucleotide
uuauacagagucacagugu

SEQ ID NO: 1401401 - RNA, 19 nt, Artificial Sequence
  Description of Artificial Sequence: Synthetic oligonucleotide
aguuugcccaccuuagauc

SEQ ID NO: 1401402 - RNA, 19 nt, Artificial Sequence
  Description of Artificial Sequence: Synthetic oligonucleotide
aaggagaaacucucaauau

SEQ ID NO: 1401403 - RNA, 19 nt, Artificial Sequence
  Description of Artificial Sequence: Synthetic oligonucleotide
uguugacacaaugagcaag

SEQ ID NO: 1401404 - RNA, 19 nt, Artificial Sequence
  Description of Artificial Sequence: Synthetic oligonucleotide
cuguccagcaaugaggacg

SEQ ID NO: 1401405 - RNA, 19 nt, Artificial Sequence
  Description of Artificial Sequence: Synthetic oligonucleotide
guauacucguuugaugucg

SEQ ID NO: 1401406 - RNA, 19 nt, Artificial Sequence
  Description of Artificial Sequence: Synthetic oligonucleotide
ugugucggggcccagugcc

SEQ ID NO: 1401407 - RNA, 19 nt, Artificial Sequence
  Description of Artificial Sequence: Synthetic oligonucleotide
aguauacucguuugauguc

SEQ ID NO: 1401408 - RNA, 19 nt, Artificial Sequence
  Description of Artificial Sequence: Synthetic oligonucleotide
ucgaugaacagcaccccag

SEQ ID NO: 1401409 - RNA, 19 nt, Artificial Sequence
  Description of Artificial Sequence: Synthetic oligonucleotide
agugaucacguccccggcc

SEQ ID NO: 1401410 - RNA, 19 nt, Artificial Sequence
  Description of Artificial Sequence: Synthetic oligonucleotide
uggagcuucagcucaggag

SEQ ID NO: 1401411 - RNA, 19 nt, Artificial Sequence
  Description of Artificial Sequence: Synthetic oligonucleotide
acggcggaaggcuugaguc

SEQ ID NO: 1401412 - RNA, 19 nt, Artificial Sequence
  Description of Artificial Sequence: Synthetic oligonucleotide
uguaaagggugugucgggg

SEQ ID NO: 1401413 - RNA, 19 nt, Artificial Sequence
  Description of Artificial Sequence: Synthetic oligonucleotide
uguguaggcguccucacuc

SEQ ID NO: 1401414 - RNA, 19 nt, Artificial Sequence
  Description of Artificial Sequence: Synthetic oligonucleotide
uuagaucccgugccugugg

SEQ ID NO: 1401415 - RNA, 19 nt, Artificial Sequence
  Description of Artificial Sequence: Synthetic oligonucleotide
aggagguauccauuguuuc

SEQ ID NO: 1401416 - RNA, 19 nt, Artificial Sequence
  Description of Artificial Sequence: Synthetic oligonucleotide
cauggagggacacagugug

SEQ ID NO: 1401417 - RNA, 19 nt, Artificial Sequence
  Description of Artificial Sequence: Synthetic oligonucleotide
augcguagaaucugcuugg

SEQ ID NO: 1401418 - RNA, 19 nt, Artificial Sequence
  Description of Artificial Sequence: Synthetic oligonucleotide
ucgaucuggaucuccacca

SEQ ID NO: 1401419 - RNA, 19 nt, Artificial Sequence
  Description of Artificial Sequence: Synthetic oligonucleotide
gaugaucuccgccuugccc

SEQ ID NO: 1401420 - RNA, 19 nt, Artificial Sequence
  Description of Artificial Sequence: Synthetic oligonucleotide
auggucuccaucuccguag

SEQ ID NO: 1401421 - RNA, 19 nt, Artificial Sequence
  Description of Artificial Sequence: Synthetic oligonucleotide
gaggucucuagcccaaugc

SEQ ID NO: 1401422 - RNA, 19 nt, Artificial Sequence
  Description of Artificial Sequence: Synthetic oligonucleotide
cucagucuugcucaucucc

SEQ ID NO: 1401423 - RNA, 19 nt, Artificial Sequence
  Description of Artificial Sequence: Synthetic oligonucleotide
aaugaggacggcccgcccu

SEQ ID NO: 1401424 - RNA, 19 nt, Artificial Sequence
  Description of Artificial Sequence: Synthetic oligonucleotide
ggagguauccauuguuucg

SEQ ID NO: 1401425 - RNA, 19 nt, Artificial Sequence
  Description of Artificial Sequence: Synthetic oligonucleotide
guugacacaaugagcaagc

SEQ ID NO: 1401426 - RNA, 19 nt, Artificial Sequence
  Description of Artificial Sequence: Synthetic oligonucleotide
uagaaggucaauggggaug

SEQ ID NO: 1401427 - RNA, 19 nt, Artificial Sequence
  Description of Artificial Sequence: Synthetic oligonucleotide
gagguauccauuguuucgc

SEQ ID NO: 1401428 - RNA, 19 nt, Artificial Sequence
  Description of Artificial Sequence: Synthetic oligonucleotide
gacuuugguagcuggugcc

SEQ ID NO: 1401429 - RNA, 19 nt, Artificial Sequence
  Description of Artificial Sequence: Synthetic oligonucleotide
guugaugacgucaaucuca

SEQ ID NO: 1401430 - RNA, 19 nt, Artificial Sequence
  Description of Artificial Sequence: Synthetic oligonucleotide
agguauccauuguuucgcc

SEQ ID NO: 1401431 - RNA, 19 nt, Artificial Sequence
  Description of Artificial Sequence: Synthetic oligonucleotide
ucuccugagaagagggcca

SEQ ID NO: 1401432 - RNA, 19 nt, Artificial Sequence
  Description of Artificial Sequence: Synthetic oligonucleotide
aauggggaugccaugggga

SEQ ID NO: 1401433 - RNA, 19 nt, Artificial Sequence
  Description of Artificial Sequence: Synthetic oligonucleotide
cuccuugauacggacaccg

SEQ ID NO: 1401434 - RNA, 19 nt, Artificial Sequence
  Description of Artificial Sequence: Synthetic oligonucleotide
agcucguugaagaggaagg

SEQ ID NO: 1401435 - RNA, 19 nt, Artificial Sequence
  Description of Artificial Sequence: Synthetic oligonucleotide
gagggaguauacucguuug

SEQ ID NO: 1401436 - RNA, 19 nt, Artificial Sequence
  Description of Artificial Sequence: Synthetic oligonucleotide
caucccguaucucagggac

SEQ ID NO: 1401437 - RNA, 19 nt, Artificial Sequence
  Description of Artificial Sequence: Synthetic oligonucleotide
auggcggucuucccagugc

SEQ ID NO: 1401438 - RNA, 19 nt, Artificial Sequence
  Description of Artificial Sequence: Synthetic oligonucleotide
ggaagagggaguauacucg

SEQ ID NO: 1401439 - RNA, 19 nt, Artificial Sequence
  Description of Artificial Sequence: Synthetic oligonucleotide
gauacggacaccgauggaa

SEQ ID NO: 1401440 - RNA, 19 nt, Artificial Sequence
  Description of Artificial Sequence: Synthetic oligonucleotide
ggcaucauagucgcgagcg

SEQ ID NO: 1401441 - RNA, 19 nt, Artificial Sequence
  Description of Artificial Sequence: Synthetic oligonucleotide
ugucuugguuccaaggcau

SEQ ID NO: 1401442 - RNA, 19 nt, Artificial Sequence
  Description of Artificial Sequence: Synthetic oligonucleotide
caucauagucgcgagcgcg

SEQ ID NO: 1401443 - RNA, 19 nt, Artificial Sequence
  Description of Artificial Sequence: Synthetic oligonucleotide
agugagcaccaauucgcuc

SEQ ID NO: 1401444 - RNA, 19 nt, Artificial Sequence
  Description of Artificial Sequence: Synthetic oligonucleotide
acugcguggagcgggauuc

SEQ ID NO: 1401445 - RNA, 19 nt, Artificial Sequence
  Description of Artificial Sequence: Synthetic oligonucleotide
uucccuucucggaucaucu

SEQ ID NO: 1401446 - RNA, 19 nt, Artificial Sequence
  Description of Artificial Sequence: Synthetic oligonucleotide
accucaucgaugaacagca

SEQ ID NO: 1401447 - RNA, 19 nt, Artificial Sequence
  Description of Artificial Sequence: Synthetic oligonucleotide
augucgucuaccugcaccu

SEQ ID NO: 1401448 - RNA, 19 nt, Artificial Sequence
  Description of Artificial Sequence: Synthetic oligonucleotide
aaugcgggucagcacugug

SEQ ID NO: 1401449 - RNA, 19 nt, Artificial Sequence
  Description of Artificial Sequence: Synthetic oligonucleotide
ugcccuuucguuuccggca

SEQ ID NO: 1401450 - RNA, 19 nt, Artificial Sequence
  Description of Artificial Sequence: Synthetic oligonucleotide
ucaggagguauccauuguu

SEQ ID NO: 1401451 - RNA, 19 nt, Artificial Sequence
  Description of Artificial Sequence: Synthetic oligonucleotide
ucgauucuugucacauccc

SEQ ID NO: 1401452 - RNA, 19 nt, Artificial Sequence
  Description of Artificial Sequence: Synthetic oligonucleotide
cacaucccguaucucaggg

SEQ ID NO: 1401453 - RNA, 19 nt, Artificial Sequence
  Description of Artificial Sequence: Synthetic oligonucleotide
uugacacaaugagcaagcg

SEQ ID NO: 1401454 - RNA, 19 nt, Artificial Sequence
  Description of Artificial Sequence: Synthetic oligonucleotide
auacggacaccgauggaac

SEQ ID NO: 1401455 - RNA, 19 nt, Artificial Sequence
  Description of Artificial Sequence: Synthetic oligonucleotide
accaccucgccuucaauga

SEQ ID NO: 1401456 - RNA, 19 nt, Artificial Sequence
  Description of Artificial Sequence: Synthetic oligonucleotide
gcuguaaagggugugucgg

SEQ ID NO: 1401457 - RNA, 19 nt, Artificial Sequence
  Description of Artificial Sequence: Synthetic oligonucleotide
uccguagucuugaggguca

SEQ ID NO: 1401458 - RNA, 19 nt, Artificial Sequence
  Description of Artificial Sequence: Synthetic oligonucleotide
aacggcggaaggcuugagu

SEQ ID NO: 1401459 - RNA, 19 nt, Artificial Sequence
  Description of Artificial Sequence: Synthetic oligonucleotide
cuguaaagggugugucggg

SEQ ID NO: 1401460 - RNA, 19 nt, Artificial Sequence
  Description of Artificial Sequence: Synthetic oligonucleotide
uccauuguuucgccuuuga

SEQ ID NO: 1401461 - RNA, 19 nt, Artificial Sequence
  Description of Artificial Sequence: Synthetic oligonucleotide
ggagugagcaccaauucgc

SEQ ID NO: 1401462 - RNA, 19 nt, Artificial Sequence
  Description of Artificial Sequence: Synthetic oligonucleotide
uagggugauguugacacaa

SEQ ID NO: 1401463 - RNA, 19 nt, Artificial Sequence
  Description of Artificial Sequence: Synthetic oligonucleotide
guaaagggugugucggggc

SEQ ID NO: 1401464 - RNA, 19 nt, Artificial Sequence
  Description of Artificial Sequence: Synthetic oligonucleotide
ccugcgauggcuguaaagg

SEQ ID NO: 1401465 - RNA, 19 nt, Artificial Sequence
  Description of Artificial Sequence: Synthetic oligonucleotide
ggaguauacucguuugaug

SEQ ID NO: 1401466 - RNA, 19 nt, Artificial Sequence
  Description of Artificial Sequence: Synthetic oligonucleotide
uaucaauagugaucacguc

SEQ ID NO: 1401467 - RNA, 19 nt, Artificial Sequence
  Description of Artificial Sequence: Synthetic oligonucleotide
ucgucuaccugcaccucug

SEQ ID NO: 1401468 - RNA, 19 nt, Artificial Sequence
  Description of Artificial Sequence: Synthetic oligonucleotide
gcgggauucguccaggaag

SEQ ID NO: 1401469 - RNA, 19 nt, Artificial Sequence
  Description of Artificial Sequence: Synthetic oligonucleotide
gacaccgauggaacggcgg

SEQ ID NO: 1401470 - RNA, 19 nt, Artificial Sequence
  Description of Artificial Sequence: Synthetic oligonucleotide
cuuggaaaucuugccagug

SEQ ID NO: 1401471 - RNA, 19 nt, Artificial Sequence
  Description of Artificial Sequence: Synthetic oligonucleotide
uagaucccgugccuguggc

SEQ ID NO: 1401472 - RNA, 19 nt, Artificial Sequence
  Description of Artificial Sequence: Synthetic oligonucleotide
ucguuuccggcacaccaga

SEQ ID NO: 1401473 - RNA, 19 nt, Artificial Sequence
  Description of Artificial Sequence: Synthetic oligonucleotide
uggaacggcggaaggcuug

SEQ ID NO: 1401474 - RNA, 19 nt, Artificial Sequence
  Description of Artificial Sequence: Synthetic oligonucleotide
ugagcaccaauucgcucga

SEQ ID NO: 1401475 - RNA, 19 nt, Artificial Sequence
  Description of Artificial Sequence: Synthetic oligonucleotide
acggacaccgauggaacgg

SEQ ID NO: 1401476 - RNA, 19 nt, Artificial Sequence
  Description of Artificial Sequence: Synthetic oligonucleotide
uucgcucgauucuugucac

SEQ ID NO: 1401477 - RNA, 19 nt, Artificial Sequence
  Description of Artificial Sequence: Synthetic oligonucleotide
ucgcgagcgcgugugaagg

SEQ ID NO: 1401478 - RNA, 19 nt, Artificial Sequence
  Description of Artificial Sequence: Synthetic oligonucleotide
gacuuuugugguggcagcc

SEQ ID NO: 1401479 - RNA, 19 nt, Artificial Sequence
  Description of Artificial Sequence: Synthetic oligonucleotide
uggccggucgaucuggauc

SEQ ID NO: 1401480 - RNA, 19 nt, Artificial Sequence
  Description of Artificial Sequence: Synthetic oligonucleotide
cauggcaucauagucgcga

SEQ ID NO: 1401481 - RNA, 19 nt, Artificial Sequence
  Description of Artificial Sequence: Synthetic oligonucleotide
agggaguauacucguuuga

SEQ ID NO: 1401482 - RNA, 19 nt, Artificial Sequence
  Description of Artificial Sequence: Synthetic oligonucleotide
gaaaucuugccaguggccu

SEQ ID NO: 1401483 - RNA, 19 nt, Artificial Sequence
  Description of Artificial Sequence: Synthetic oligonucleotide
aaacuuggucugggagccc

SEQ ID NO: 1401484 - RNA, 19 nt, Artificial Sequence
  Description of Artificial Sequence: Synthetic oligonucleotide
ggcuguaaagggugugucg

SEQ ID NO: 1401485 - RNA, 19 nt, Artificial Sequence
  Description of Artificial Sequence: Synthetic oligonucleotide
ccauuuuauacagagucac

SEQ ID NO: 1401486 - RNA, 19 nt, Artificial Sequence
  Description of Artificial Sequence: Synthetic oligonucleotide
agacucgaucaucuuggug

SEQ ID NO: 1401487 - RNA, 19 nt, Artificial Sequence
  Description of Artificial Sequence: Synthetic oligonucleotide
gaucccgugccuguggcug

SEQ ID NO: 1401488 - RNA, 19 nt, Artificial Sequence
  Description of Artificial Sequence: Synthetic oligonucleotide
gaagagggaguauacucgu

SEQ ID NO: 1401489 - RNA, 19 nt, Artificial Sequence
  Description of Artificial Sequence: Synthetic oligonucleotide
uagugaucacguccccggc

SEQ ID NO: 1401490 - RNA, 19 nt, Artificial Sequence
  Description of Artificial Sequence: Synthetic oligonucleotide
guagcuggugccucggauc

SEQ ID NO: 1401491 - RNA, 19 nt, Artificial Sequence
  Description of Artificial Sequence: Synthetic oligonucleotide
ugcgggucagcacugugua

SEQ ID NO: 1401492 - RNA, 19 nt, Artificial Sequence
  Description of Artificial Sequence: Synthetic oligonucleotide
acaccgauggaacggcgga

SEQ ID NO: 1401493 - RNA, 19 nt, Artificial Sequence
  Description of Artificial Sequence: Synthetic oligonucleotide
uggucagagacucgaucau

SEQ ID NO: 1401494 - RNA, 19 nt, Artificial Sequence
  Description of Artificial Sequence: Synthetic oligonucleotide
caucauccagucccagacc

SEQ ID NO: 1401495 - RNA, 19 nt, Artificial Sequence
  Description of Artificial Sequence: Synthetic oligonucleotide
ugagggucaguuugcccac

SEQ ID NO: 1401496 - RNA, 19 nt, Artificial Sequence
  Description of Artificial Sequence: Synthetic oligonucleotide
agccacuuuggcauugauc

SEQ ID NO: 1401497 - RNA, 19 nt, Artificial Sequence
  Description of Artificial Sequence: Synthetic oligonucleotide
gagcgcgugugaaggagcg

SEQ ID NO: 1401498 - RNA, 19 nt, Artificial Sequence
  Description of Artificial Sequence: Synthetic oligonucleotide
caauagugaucacgucccc

SEQ ID NO: 1401499 - RNA, 19 nt, Artificial Sequence
  Description of Artificial Sequence: Synthetic oligonucleotide
augagcaagcggucuagaa

SEQ ID NO: 1401500 - RNA, 19 nt, Artificial Sequence
  Description of Artificial Sequence: Synthetic oligonucleotide
ucuccguagucuugagggu

SEQ ID NO: 1401501 - RNA, 19 nt, Artificial Sequence
  Description of Artificial Sequence: Synthetic oligonucleotide
uccuugauacggacaccga

SEQ ID NO: 1401502 - RNA, 19 nt, Artificial Sequence
  Description of Artificial Sequence: Synthetic oligonucleotide
auagucgcgagcgcgugug

SEQ ID NO: 1401503 - RNA, 19 nt, Artificial Sequence
  Description of Artificial Sequence: Synthetic oligonucleotide
gcccauggcaucauagucg

SEQ ID NO: 1401504 - RNA, 19 nt, Artificial Sequence
  Description of Artificial Sequence: Synthetic oligonucleotide
ugggaagccugucuugguu

SEQ ID NO: 1401505 - RNA, 19 nt, Artificial Sequence
  Description of Artificial Sequence: Synthetic oligonucleotide
ugauacggacaccgaugga

SEQ ID NO: 1401506 - RNA, 19 nt, Artificial Sequence
  Description of Artificial Sequence: Synthetic oligonucleotide
gcaccaauucgcucgauuc

SEQ ID NO: 1401507 - RNA, 19 nt, Artificial Sequence
  Description of Artificial Sequence: Synthetic oligonucleotide
agaaaagaucucacugccu

SEQ ID NO: 1401508 - RNA, 19 nt, Artificial Sequence
  Description of Artificial Sequence: Synthetic oligonucleotide
accgauggaacggcggaag

SEQ ID NO: 1401509 - RNA, 19 nt, Artificial Sequence
  Description of Artificial Sequence: Synthetic oligonucleotide
caucgaugaacagcacccc

SEQ ID NO: 1401510 - RNA, 19 nt, Artificial Sequence
  Description of Artificial Sequence: Synthetic oligonucleotide
augaggacggcccgcccug

SEQ ID NO: 1401511 - RNA, 19 nt, Artificial Sequence
  Description of Artificial Sequence: Synthetic oligonucleotide
ggauucguccaggaagagg

SEQ ID NO: 1401512 - RNA, 19 nt, Artificial Sequence
  Description of Artificial Sequence: Synthetic oligonucleotide
ccaccuuagaucccgugcc

SEQ ID NO: 1401513 - RNA, 19 nt, Artificial Sequence
  Description of Artificial Sequence: Synthetic oligonucleotide
gggugauguugacacaaug

SEQ ID NO: 1401514 - RNA, 19 nt, Artificial Sequence
  Description of Artificial Sequence: Synthetic oligonucleotide
ucauagucgcgagcgcgug

SEQ ID NO: 1401515 - RNA, 19 nt, Artificial Sequence
  Description of Artificial Sequence: Synthetic oligonucleotide
ggugccucggauccgggug

SEQ ID NO: 1401516 - RNA, 19 nt, Artificial Sequence
  Description of Artificial Sequence: Synthetic oligonucleotide
agcggaugcguagaaucug

SEQ ID NO: 1401517 - RNA, 19 nt, Artificial Sequence
  Description of Artificial Sequence: Synthetic oligonucleotide
gugcccuuucguuuccggc

SEQ ID NO: 1401518 - RNA, 19 nt, Artificial Sequence
  Description of Artificial Sequence: Synthetic oligonucleotide
cuuagaucccgugccugug

SEQ ID NO: 1401519 - RNA, 19 nt, Artificial Sequence
  Description of Artificial Sequence: Synthetic oligonucleotide
cacagugucagaacuugua

SEQ ID NO: 1401520 - RNA, 19 nt, Artificial Sequence
  Description of Artificial Sequence: Synthetic oligonucleotide
gccugucuugguuccaagg

SEQ ID NO: 1401521 - RNA, 19 nt, Artificial Sequence
  Description of Artificial Sequence: Synthetic oligonucleotide
agcaccaauucgcucgauu

SEQ ID NO: 1401522 - RNA, 19 nt, Artificial Sequence
  Description of Artificial Sequence: Synthetic oligonucleotide
gucgcgagcgcgugugaag

SEQ ID NO: 1401523 - RNA, 19 nt, Artificial Sequence
  Description of Artificial Sequence: Synthetic oligonucleotide
caccucgccuucaaugauc

SEQ ID NO: 1401524 - RNA, 19 nt, Artificial Sequence
  Description of Artificial Sequence: Synthetic oligonucleotide
cccuucucggaucaucucc

SEQ ID NO: 1401525 - RNA, 19 nt, Artificial Sequence
  Description of Artificial Sequence: Synthetic oligonucleotide
ucggauccgggugaugccu

SEQ ID NO: 1401526 - RNA, 19 nt, Artificial Sequence
  Description of Artificial Sequence: Synthetic oligonucleotide
cauagcgcagggaggucuc

SEQ ID NO: 1401527 - RNA, 19 nt, Artificial Sequence
  Description of Artificial Sequence: Synthetic oligonucleotide
cuccguagucuugaggguc

SEQ ID NO: 1401528 - RNA, 19 nt, Artificial Sequence
  Description of Artificial Sequence: Synthetic oligonucleotide
acagugugcaccaccuccu

SEQ ID NO: 1401529 - RNA, 19 nt, Artificial Sequence
  Description of Artificial Sequence: Synthetic oligonucleotide
accaauucgcucgauucuu

SEQ ID NO: 1401530 - RNA, 19 nt, Artificial Sequence
  Description of Artificial Sequence: Synthetic oligonucleotide
ucccguaucucagggacuu

SEQ ID NO: 1401531 - RNA, 19 nt, Artificial Sequence
  Description of Artificial Sequence: Synthetic oligonucleotide
ucacagcggaugcguagaa

SEQ ID NO: 1401532 - RNA, 19 nt, Artificial Sequence
  Description of Artificial Sequence: Synthetic oligonucleotide
ugaugacgucaaucucaug

SEQ ID NO: 1401533 - RNA, 19 nt, Artificial Sequence
  Description of Artificial Sequence: Synthetic oligonucleotide
guauccauuguuucgccuu

SEQ ID NO: 1401534 - RNA, 19 nt, Artificial Sequence
  Description of Artificial Sequence: Synthetic oligonucleotide
gagaaacucucaauaucua

SEQ ID NO: 1401535 - RNA, 19 nt, Artificial Sequence
  Description of Artificial Sequence: Synthetic oligonucleotide
aucauagucgcgagcgcgu

SEQ ID NO: 1401536 - RNA, 19 nt, Artificial Sequence
  Description of Artificial Sequence: Synthetic oligonucleotide
cucgccuucaaugaucucu

SEQ ID NO: 1401537 - RNA, 19 nt, Artificial Sequence
  Description of Artificial Sequence: Synthetic oligonucleotide
cccaccuuagaucccgugc

SEQ ID NO: 1401538 - RNA, 19 nt, Artificial Sequence
  Description of Artificial Sequence: Synthetic oligonucleotide
cuuucguuuccggcacacc

SEQ ID NO: 1401539 - RNA, 19 nt, Artificial Sequence
  Description of Artificial Sequence: Synthetic oligonucleotide
guaucucagggacuuuugu

SEQ ID NO: 1401540 - RNA, 19 nt, Artificial Sequence
  Description of Artificial Sequence: Synthetic oligonucleotide
gauccgggugaugccucgg

SEQ ID NO: 1401541 - RNA, 19 nt, Artificial Sequence
  Description of Artificial Sequence: Synthetic oligonucleotide
agcaccacgccggcugcac

SEQ ID NO: 1401542 - RNA, 19 nt, Artificial Sequence
  Description of Artificial Sequence: Synthetic oligonucleotide
accucgccuucaaugaucu

SEQ ID NO: 1401543 - RNA, 19 nt, Artificial Sequence
  Description of Artificial Sequence: Synthetic oligonucleotide
ggcggaaggcuugagucag

SEQ ID NO: 1401544 - RNA, 19 nt, Artificial Sequence
  Description of Artificial Sequence: Synthetic oligonucleotide
agcggcccagcuuggaaau

SEQ ID NO: 1401545 - RNA, 19 nt, Artificial Sequence
  Description of Artificial Sequence: Synthetic oligonucleotide
cguggagcgggauucgucc

SEQ ID NO: 1401546 - RNA, 19 nt, Artificial Sequence
  Description of Artificial Sequence: Synthetic oligonucleotide
ugcguagaaucugcuuggu

SEQ ID NO: 1401547 - RNA, 19 nt, Artificial Sequence
  Description of Artificial Sequence: Synthetic oligonucleotide
gcauugaucuguucucgga

SEQ ID NO: 1401548 - RNA, 19 nt, Artificial Sequence
  Description of Artificial Sequence: Synthetic oligonucleotide
gggaagccugucuugguuc

SEQ ID NO: 1401549 - RNA, 19 nt, Artificial Sequence
  Description of Artificial Sequence: Synthetic oligonucleotide
ggugugucggggcccagug

SEQ ID NO: 1401550 - RNA, 19 nt, Artificial Sequence
  Description of Artificial Sequence: Synthetic oligonucleotide
ggaaggguugggguggagc

SEQ ID NO: 1401551 - RNA, 19 nt, Artificial Sequence
  Description of Artificial Sequence: Synthetic oligonucleotide
gaugcacaccaaccgccaa

SEQ ID NO: 1401552 - RNA, 19 nt, Artificial Sequence
  Description of Artificial Sequence: Synthetic oligonucleotide
uacugcguggagcgggauu

SEQ ID NO: 1401553 - RNA, 19 nt, Artificial Sequence
  Description of Artificial Sequence: Synthetic oligonucleotide
guuuccggcacaccagacu

SEQ ID NO: 1401554 - RNA, 19 nt, Artificial Sequence
  Description of Artificial Sequence: Synthetic oligonucleotide
cacuguguaggcguccuca

SEQ ID NO: 1401555 - RNA, 19 nt, Artificial Sequence
  Description of Artificial Sequence: Synthetic oligonucleotide
guguaggcguccucacuca

SEQ ID NO: 1401556 - RNA, 19 nt, Artificial Sequence
  Description of Artificial Sequence: Synthetic oligonucleotide
caaugaggacggcccgccc

SEQ ID NO: 1401557 - RNA, 19 nt, Artificial Sequence
  Description of Artificial Sequence: Synthetic oligonucleotide
cguagaaucugcuuggugu

SEQ ID NO: 1401558 - RNA, 19 nt, Artificial Sequence
  Description of Artificial Sequence: Synthetic oligonucleotide
caccagacuggcugcugug

SEQ ID NO: 1401559 - RNA, 19 nt, Artificial Sequence
  Description of Artificial Sequence: Synthetic oligonucleotide
ggauccgggugaugccucg

SEQ ID NO: 1401560 - RNA, 19 nt, Artificial Sequence
  Description of Artificial Sequence: Synthetic oligonucleotide
agcgggauucguccaggaa

SEQ ID NO: 1401561 - RNA, 19 nt, Artificial Sequence
  Description of Artificial Sequence: Synthetic oligonucleotide
ccucggauccgggugaugc

SEQ ID NO: 1401562 - RNA, 19 nt, Artificial Sequence
  Description of Artificial Sequence: Synthetic oligonucleotide
ucccuucucggaucaucuc

SEQ ID NO: 1401563 - RNA, 19 nt, Artificial Sequence
  Description of Artificial Sequence: Synthetic oligonucleotide
agaucccgugccuguggcu

SEQ ID NO: 1401564 - RNA, 19 nt, Artificial Sequence
  Description of Artificial Sequence: Synthetic oligonucleotide
gugaucacguccccggccu

SEQ ID NO: 1401565 - RNA, 19 nt, Artificial Sequence
  Description of Artificial Sequence: Synthetic oligonucleotide
ugucggggcccagugccug

SEQ ID NO: 1401566 - RNA, 19 nt, Artificial Sequence
  Description of Artificial Sequence: Synthetic oligonucleotide
cucuagcccaaugcggguc

SEQ ID NO: 1401567 - RNA, 19 nt, Artificial Sequence
  Description of Artificial Sequence: Synthetic oligonucleotide
ggaaggcuugagucagagc

SEQ ID NO: 1401568 - RNA, 19 nt, Artificial Sequence
  Description of Artificial Sequence: Synthetic oligonucleotide
ucgcucgauucuugucaca

SEQ ID NO: 1401569 - RNA, 19 nt, Artificial Sequence
  Description of Artificial Sequence: Synthetic oligonucleotide
caaccauuuuauacagagu

SEQ ID NO: 1401570 - RNA, 19 nt, Artificial Sequence
  Description of Artificial Sequence: Synthetic oligonucleotide
augcgggucagcacugugu

SEQ ID NO: 1401571 - RNA, 19 nt, Artificial Sequence
  Description of Artificial Sequence: Synthetic oligonucleotide
aagagggaguauacucguu

SEQ ID NO: 1401572 - RNA, 19 nt, Artificial Sequence
  Description of Artificial Sequence: Synthetic oligonucleotide
agaccccggaugugggagu

SEQ ID NO: 1401573 - RNA, 19 nt, Artificial Sequence
  Description of Artificial Sequence: Synthetic oligonucleotide
guucucggacuucugacuu

SEQ ID NO: 1401574 - RNA, 19 nt, Artificial Sequence
  Description of Artificial Sequence: Synthetic oligonucleotide
gcguagaaucugcuuggug

SEQ ID NO: 1401575 - RNA, 19 nt, Artificial Sequence
  Description of Artificial Sequence: Synthetic oligonucleotide
ggaaggagaaacucucaau

SEQ ID NO: 1401576 - RNA, 19 nt, Artificial Sequence
  Description of Artificial Sequence: Synthetic oligonucleotide
gugucagaacuuguagaaa

SEQ ID NO: 1401577 - RNA, 19 nt, Artificial Sequence
  Description of Artificial Sequence: Synthetic oligonucleotide
gaccccggaugugggagug

SEQ ID NO: 1401578 - RNA, 19 nt, Artificial Sequence
  Description of Artificial Sequence: Synthetic oligonucleotide
uagucgcgagcgcguguga

SEQ ID NO: 1401579 - RNA, 19 nt, Artificial Sequence
  Description of Artificial Sequence: Synthetic oligonucleotide
gcggaugcguagaaucugc

SEQ ID NO: 1401580 - RNA, 19 nt, Artificial Sequence
  Description of Artificial Sequence: Synthetic oligonucleotide
agcgcgugugaaggagcgg

SEQ ID NO: 1401581 - RNA, 19 nt, Artificial Sequence
  Description of Artificial Sequence: Synthetic oligonucleotide
caauucgcucgauucuugu

SEQ ID NO: 1401582 - RNA, 19 nt, Artificial Sequence
  Description of Artificial Sequence: Synthetic oligonucleotide
ggagcgggauucguccagg

SEQ ID NO: 1401583 - RNA, 19 nt, Artificial Sequence
  Description of Artificial Sequence: Synthetic oligonucleotide
cuguagggugauguugaca

SEQ ID NO: 1401584 - RNA, 19 nt, Artificial Sequence
  Description of Artificial Sequence: Synthetic oligonucleotide
gcgcgugugaaggagcggc

SEQ ID NO: 1401585 - RNA, 19 nt, Artificial Sequence
  Description of Artificial Sequence: Synthetic oligonucleotide
gagcgggauucguccagga

SEQ ID NO: 1401586 - RNA, 19 nt, Artificial Sequence
  Description of Artificial Sequence: Synthetic oligonucleotide
cuggugccucggauccggg

SEQ ID NO: 1401587 - RNA, 19 nt, Artificial Sequence
  Description of Artificial Sequence: Synthetic oligonucleotide
gucgucuaccugcaccucu

SEQ ID NO: 1401588 - RNA, 19 nt, Artificial Sequence
  Description of Artificial Sequence: Synthetic oligonucleotide
ccgggugaugccucgguug

SEQ ID NO: 1401589 - RNA, 19 nt, Artificial Sequence
  Description of Artificial Sequence: Synthetic oligonucleotide
ccggaugugggagugagca

SEQ ID NO: 1401590 - RNA, 19 nt, Artificial Sequence
  Description of Artificial Sequence: Synthetic oligonucleotide
caccaauucgcucgauucu

SEQ ID NO: 1401591 - RNA, 19 nt, Artificial Sequence
  Description of Artificial Sequence: Synthetic oligonucleotide
gugccucggauccggguga

SEQ ID NO: 1401592 - RNA, 19 nt, Artificial Sequence
  Description of Artificial Sequence: Synthetic oligonucleotide
guggcuggccggucgaucu

SEQ ID NO: 1401593 - RNA, 19 nt, Artificial Sequence
  Description of Artificial Sequence: Synthetic oligonucleotide
guaggcguccucacucauc

SEQ ID NO: 1401594 - RNA, 19 nt, Artificial Sequence
  Description of Artificial Sequence: Synthetic oligonucleotide
caggagguauccauuguuu

SEQ ID NO: 1401595 - RNA, 19 nt, Artificial Sequence
  Description of Artificial Sequence: Synthetic oligonucleotide
ccgauggaacggcggaagg

SEQ ID NO: 1401596 - RNA, 19 nt, Artificial Sequence
  Description of Artificial Sequence: Synthetic oligonucleotide
gguggagcuucagcucagg

SEQ ID NO: 1401597 - RNA, 19 nt, Artificial Sequence
  Description of Artificial Sequence: Synthetic oligonucleotide
cguaucucagggacuuuug

SEQ ID NO: 1401598 - RNA, 19 nt, Artificial Sequence
  Description of Artificial Sequence: Synthetic oligonucleotide
ggccggucgaucuggaucu

SEQ ID NO: 1401599 - RNA, 19 nt, Artificial Sequence
  Description of Artificial Sequence: Synthetic oligonucleotide
cacaaugagcaagcggucu

SEQ ID NO: 1401600 - RNA, 19 nt, Artificial Sequence
  Description of Artificial Sequence: Synthetic oligonucleotide
ugucgucuaccugcaccuc

SEQ ID NO: 1401601 - RNA, 19 nt, Artificial Sequence
  Description of Artificial Sequence: Synthetic oligonucleotide
cagcggaugcguagaaucu

SEQ ID NO: 1401602 - RNA, 19 nt, Artificial Sequence
  Description of Artificial Sequence: Synthetic oligonucleotide
cuagaaggucaauggggau

SEQ ID NO: 1401603 - RNA, 19 nt, Artificial Sequence
  Description of Artificial Sequence: Synthetic oligonucleotide
agcuggugccucggauccg

SEQ ID NO: 1401604 - RNA, 19 nt, Artificial Sequence
  Description of Artificial Sequence: Synthetic oligonucleotide
ggcagcaagcugccccacc

SEQ ID NO: 1401605 - RNA, 19 nt, Artificial Sequence
  Description of Artificial Sequence: Synthetic oligonucleotide
gaacggcggaaggcuugag

SEQ ID NO: 1401606 - RNA, 19 nt, Artificial Sequence
  Description of Artificial Sequence: Synthetic oligonucleotide
cugcguggagcgggauucg

SEQ ID NO: 1401607 - RNA, 19 nt, Artificial Sequence
  Description of Artificial Sequence: Synthetic oligonucleotide
cacaccagacuggcugcug

SEQ ID NO: 1401608 - RNA, 19 nt, Artificial Sequence
  Description of Artificial Sequence: Synthetic oligonucleotide
ccaaugcgggucagcacug

SEQ ID NO: 1401609 - RNA, 19 nt, Artificial Sequence
  Description of Artificial Sequence: Synthetic oligonucleotide
ugaggacggcccgcccugc

SEQ ID NO: 1401610 - RNA, 19 nt, Artificial Sequence
  Description of Artificial Sequence: Synthetic oligonucleotide
agucgcgagcgcgugugaa

SEQ ID NO: 1401611 - RNA, 19 nt, Artificial Sequence
  Description of Artificial Sequence: Synthetic oligonucleotide
ggacaccgauggaacggcg

SEQ ID NO: 1401612 - RNA, 19 nt, Artificial Sequence
  Description of Artificial Sequence: Synthetic oligonucleotide
ugccugcgauggcuguaaa

SEQ ID NO: 1401613 - RNA, 19 nt, Artificial Sequence
  Description of Artificial Sequence: Synthetic oligonucleotide
auagcgcagggaggucucu

SEQ ID NO: 1401614 - RNA, 19 nt, Artificial Sequence
  Description of Artificial Sequence: Synthetic oligonucleotide
gcucgauucuugucacauc

SEQ ID NO: 1401615 - RNA, 19 nt, Artificial Sequence
  Description of Artificial Sequence: Synthetic oligonucleotide
agggugauguugacacaau

SEQ ID NO: 1401616 - RNA, 19 nt, Artificial Sequence
  Description of Artificial Sequence: Synthetic oligonucleotide
cccggccuggaccuugucc

SEQ ID NO: 1401617 - RNA, 19 nt, Artificial Sequence
  Description of Artificial Sequence: Synthetic oligonucleotide
gcgagcgcgugugaaggag

SEQ ID NO: 1401618 - RNA, 19 nt, Artificial Sequence
  Description of Artificial Sequence: Synthetic oligonucleotide
cagcucaggagguauccau

SEQ ID NO: 1401619 - RNA, 19 nt, Artificial Sequence
  Description of Artificial Sequence: Synthetic oligonucleotide
gcgugugaaggagcggccc

SEQ ID NO: 1401620 - RNA, 19 nt, Artificial Sequence
  Description of Artificial Sequence: Synthetic oligonucleotide
cagcaccccagggaugauc

SEQ ID NO: 1401621 - RNA, 19 nt, Artificial Sequence
  Description of Artificial Sequence: Synthetic oligonucleotide
agcccugagugcgggaguu

SEQ ID NO: 1401622 - RNA, 19 nt, Artificial Sequence
  Description of Artificial Sequence: Synthetic oligonucleotide
gcaccacgccggcugcacg

SEQ ID NO: 1401623 - RNA, 19 nt, Artificial Sequence
  Description of Artificial Sequence: Synthetic oligonucleotide
ccuuucguuuccggcacac

SEQ ID NO: 1401624 - RNA, 19 nt, Artificial Sequence
  Description of Artificial Sequence: Synthetic oligonucleotide
gggauucguccaggaagag

SEQ ID NO: 1401625 - RNA, 19 nt, Artificial Sequence
  Description of Artificial Sequence: Synthetic oligonucleotide
gggaguauacucguuugau

SEQ ID NO: 1401626 - RNA, 19 nt, Artificial Sequence
  Description of Artificial Sequence: Synthetic oligonucleotide
gcgggucagcacuguguag

SEQ ID NO: 1401627 - RNA, 19 nt, Artificial Sequence
  Description of Artificial Sequence: Synthetic oligonucleotide
cgagcgcgugugaaggagc

SEQ ID NO: 1401628 - RNA, 19 nt, Artificial Sequence
  Description of Artificial Sequence: Synthetic oligonucleotide
auggaacggcggaaggcuu

SEQ ID NO: 1401629 - RNA, 19 nt, Artificial Sequence
  Description of Artificial Sequence: Synthetic oligonucleotide
ccauggcaucauagucgcg

SEQ ID NO: 1401630 - RNA, 19 nt, Artificial Sequence
  Description of Artificial Sequence: Synthetic oligonucleotide
cauggggacuuugguagcu

SEQ ID NO: 1401631 - RNA, 19 nt, Artificial Sequence
  Description of Artificial Sequence: Synthetic oligonucleotide
gguagcuggugccucggau

SEQ ID NO: 1401632 - RNA, 19 nt, Artificial Sequence
  Description of Artificial Sequence: Synthetic oligonucleotide
gucccagaccccggaugug

SEQ ID NO: 1401633 - RNA, 19 nt, Artificial Sequence
  Description of Artificial Sequence: Synthetic oligonucleotide
ggaacggcggaaggcuuga

SEQ ID NO: 1401634 - RNA, 19 nt, Artificial Sequence
  Description of Artificial Sequence: Synthetic oligonucleotide
ggaugcguagaaucugcuu

SEQ ID NO: 1401635 - RNA, 19 nt, Artificial Sequence
  Description of Artificial Sequence: Synthetic oligonucleotide
gugcgggaguugaugacgu

SEQ ID NO: 1401636 - RNA, 19 nt, Artificial Sequence
  Description of Artificial Sequence: Synthetic oligonucleotide
cguuugaugucgucuaccu

SEQ ID NO: 1401637 - RNA, 19 nt, Artificial Sequence
  Description of Artificial Sequence: Synthetic oligonucleotide
ccucaucgaugaacagcac

SEQ ID NO: 1401638 - RNA, 19 nt, Artificial Sequence
  Description of Artificial Sequence: Synthetic oligonucleotide
ggguggagcuucagcucag

SEQ ID NO: 1401639 - RNA, 19 nt, Artificial Sequence
  Description of Artificial Sequence: Synthetic oligonucleotide
gcccaaugcgggucagcac

SEQ ID NO: 1401640 - RNA, 19 nt, Artificial Sequence
  Description of Artificial Sequence: Synthetic oligonucleotide
cauagucgcgagcgcgugu

SEQ ID NO: 1401641 - RNA, 19 nt, Artificial Sequence
  Description of Artificial Sequence: Synthetic oligonucleotide
cccgucugggcacugcaca

SEQ ID NO: 1401642 - RNA, 19 nt, Artificial Sequence
  Description of Artificial Sequence: Synthetic oligonucleotide
ccucagucuugcucaucuc

SEQ ID NO: 1401643 - RNA, 19 nt, Artificial Sequence
  Description of Artificial Sequence: Synthetic oligonucleotide
ccuugauacggacaccgau

SEQ ID NO: 1401644 - RNA, 19 nt, Artificial Sequence
  Description of Artificial Sequence: Synthetic oligonucleotide
gcauagcgcagggaggucu

SEQ ID NO: 1401645 - RNA, 19 nt, Artificial Sequence
  Description of Artificial Sequence: Synthetic oligonucleotide
cccggaugugggagugagc

SEQ ID NO: 1401646 - RNA, 19 nt, Artificial Sequence
  Description of Artificial Sequence: Synthetic oligonucleotide
agcuccccgucugggcacu

SEQ ID NO: 1401647 - RNA, 19 nt, Artificial Sequence
  Description of Artificial Sequence: Synthetic oligonucleotide
cggacaccgauggaacggc

SEQ ID NO: 1401648 - RNA, 19 nt, Artificial Sequence
  Description of Artificial Sequence: Synthetic oligonucleotide
uuucgccuuugagcucguu

SEQ ID NO: 1401649 - RNA, 19 nt, Artificial Sequence
  Description of Artificial Sequence: Synthetic oligonucleotide
ccuuagaucccgugccugu

SEQ ID NO: 1401650 - RNA, 19 nt, Artificial Sequence
  Description of Artificial Sequence: Synthetic oligonucleotide
caccgauggaacggcggaa

SEQ ID NO: 1401651 - RNA, 19 nt, Artificial Sequence
  Description of Artificial Sequence: Synthetic oligonucleotide
cccgcccugcaaucuuccc

SEQ ID NO: 1401652 - RNA, 19 nt, Artificial Sequence
  Description of Artificial Sequence: Synthetic oligonucleotide
ccggucgaucuggaucucc

SEQ ID NO: 1401653 - RNA, 19 nt, Artificial Sequence
  Description of Artificial Sequence: Synthetic oligonucleotide
caguggccuuaucaauagu

SEQ ID NO: 1401654 - RNA, 19 nt, Artificial Sequence
  Description of Artificial Sequence: Synthetic oligonucleotide
gcguggagcgggauucguc

SEQ ID NO: 1401655 - RNA, 19 nt, Artificial Sequence
  Description of Artificial Sequence: Synthetic oligonucleotide
ggcauagcgcagggagguc

SEQ ID NO: 1401656 - RNA, 19 nt, Artificial Sequence
  Description of Artificial Sequence: Synthetic oligonucleotide
gcccugcaaucuucccuuc

SEQ ID NO: 1401657 - RNA, 19 nt, Artificial Sequence
  Description of Artificial Sequence: Synthetic oligonucleotide
ggcccagugccugagccau

SEQ ID NO: 1401658 - RNA, 19 nt, Artificial Sequence
  Description of Artificial Sequence: Synthetic oligonucleotide
cacagcggaugcguagaau

SEQ ID NO: 1401659 - RNA, 19 nt, Artificial Sequence
  Description of Artificial Sequence: Synthetic oligonucleotide
caaugcgggucagcacugu

SEQ ID NO: 1401660 - RNA, 19 nt, Artificial Sequence
  Description of Artificial Sequence: Synthetic oligonucleotide
gcccugagugcgggaguug

SEQ ID NO: 1401661 - RNA, 19 nt, Artificial Sequence
  Description of Artificial Sequence: Synthetic oligonucleotide
ggacggcccgcccugcaau

SEQ ID NO: 1401662 - RNA, 19 nt, Artificial Sequence
  Description of Artificial Sequence: Synthetic oligonucleotide
ggacuggggccaugucacu

SEQ ID NO: 1401663 - RNA, 19 nt, Artificial Sequence
  Description of Artificial Sequence: Synthetic oligonucleotide
gcccugggaagccugucuu

SEQ ID NO: 1401664 - RNA, 19 nt, Artificial Sequence
  Description of Artificial Sequence: Synthetic oligonucleotide
cucggacuucugacuugau

SEQ ID NO: 1401665 - RNA, 19 nt, Artificial Sequence
  Description of Artificial Sequence: Synthetic oligonucleotide
gugucggggcccagugccu

SEQ ID NO: 1401666 - RNA, 19 nt, Artificial Sequence
  Description of Artificial Sequence: Synthetic oligonucleotide
ccgcccugcaaucuucccu

SEQ ID NO: 1401667 - RNA, 19 nt, Artificial Sequence
  Description of Artificial Sequence: Synthetic oligonucleotide
cagcaccacgccggcugca

SEQ ID NO: 1401668 - RNA, 19 nt, Artificial Sequence
  Description of Artificial Sequence: Synthetic oligonucleotide
guuucgccuuugagcucgu

SEQ ID NO: 1401669 - RNA, 19 nt, Artificial Sequence
  Description of Artificial Sequence: Synthetic oligonucleotide
gagcaccaauucgcucgau

SEQ ID NO: 1401670 - RNA, 19 nt, Artificial Sequence
  Description of Artificial Sequence: Synthetic oligonucleotide
gccucggauccgggugaug

SEQ ID NO: 1401671 - RNA, 19 nt, Artificial Sequence
  Description of Artificial Sequence: Synthetic oligonucleotide
gcggcccagcuuggaaauc

SEQ ID NO: 1401672 - RNA, 19 nt, Artificial Sequence
  Description of Artificial Sequence: Synthetic oligonucleotide
guacugcguggagcgggau

SEQ ID NO: 1401673 - RNA, 19 nt, Artificial Sequence
  Description of Artificial Sequence: Synthetic oligonucleotide
ccguaucucagggacuuuu

SEQ ID NO: 1401674 - RNA, 19 nt, Artificial Sequence
  Description of Artificial Sequence: Synthetic oligonucleotide
cggaugcguagaaucugcu

SEQ ID NO: 1401675 - RNA, 19 nt, Artificial Sequence
  Description of Artificial Sequence: Synthetic oligonucleotide
cgcccugcaaucuucccuu

SEQ ID NO: 1401676 - RNA, 19 nt, Artificial Sequence
  Description of Artificial Sequence: Synthetic oligonucleotide
gggugugucggggcccagu

SEQ ID NO: 1401677 - RNA, 19 nt, Artificial Sequence
  Description of Artificial Sequence: Synthetic oligonucleotide
ccaccucgccuucaaugau

SEQ ID NO: 1401678 - RNA, 19 nt, Artificial Sequence
  Description of Artificial Sequence: Synthetic oligonucleotide
cgcgagcgcgugugaagga

SEQ ID NO: 1401679 - RNA, 19 nt, Artificial Sequence
  Description of Artificial Sequence: Synthetic oligonucleotide
gccggucgaucuggaucuc

SEQ ID NO: 1401680 - RNA, 19 nt, Artificial Sequence
  Description of Artificial Sequence: Synthetic oligonucleotide
cgucuaccugcaccucugu

SEQ ID NO: 1401681 - RNA, 19 nt, Artificial Sequence
  Description of Artificial Sequence: Synthetic oligonucleotide
cccguaucucagggacuuu

SEQ ID NO: 1401682 - RNA, 19 nt, Artificial Sequence
  Description of Artificial Sequence: Synthetic oligonucleotide
aaugaauucaucaugaagg

SEQ ID NO: 1401683 - RNA, 19 nt, Artificial Sequence
  Description of Artificial Sequence: Synthetic oligonucleotide
aagaaaugggcccagaucg

SEQ ID NO: 1401684 - RNA, 19 nt, Artificial Sequence
  Description of Artificial Sequence: Synthetic oligonucleotide
uguugaucaauaaauaucc

SEQ ID NO: 1401685 - RNA, 19 nt, Artificial Sequence
  Description of Artificial Sequence: Synthetic oligonucleotide
aauggaauuggccaccgcc

SEQ ID NO: 1401686 - RNA, 19 nt, Artificial Sequence
  Description of Artificial Sequence: Synthetic oligonucleotide
agaccguagaccuugaacc

SEQ ID NO: 1401687 - RNA, 19 nt, Artificial Sequence
  Description of Artificial Sequence: Synthetic oligonucleotide
ucuguaaaagaaaugggcc

SEQ ID NO: 1401688 - RNA, 19 nt, Artificial Sequence
  Description of Artificial Sequence: Synthetic oligonucleotide
auaaauaucccuuccuuuc

SEQ ID NO: 1401689 - RNA, 19 nt, Artificial Sequence
  Description of Artificial Sequence: Synthetic oligonucleotide
gacaauaaggaugucaucc

SEQ ID NO: 1401690 - RNA, 19 nt, Artificial Sequence
  Description of Artificial Sequence: Synthetic oligonucleotide
aaugcuaaaugccuaguga

SEQ ID NO: 1401691 - RNA, 19 nt, Artificial Sequence
  Description of Artificial Sequence: Synthetic oligonucleotide
aagaccguagaccuugaac

SEQ ID NO: 1401692 - RNA, 19 nt, Artificial Sequence
  Description of Artificial Sequence: Synthetic oligonucleotide
uauuuauuugacuaccgug

SEQ ID NO: 1401693 - RNA, 19 nt, Artificial Sequence
  Description of Artificial Sequence: Synthetic oligonucleotide
aagacaacuauuguugauc

SEQ ID NO: 1401694 - RNA, 19 nt, Artificial Sequence
  Description of Artificial Sequence: Synthetic oligonucleotide
cuguaaaucacucagcuuc

SEQ ID NO: 1401695 - RNA, 19 nt, Artificial Sequence
  Description of Artificial Sequence: Synthetic oligonucleotide
uuuuaauuacuuuaggguu

SEQ ID NO: 1401696 - RNA, 19 nt, Artificial Sequence
  Description of Artificial Sequence: Synthetic oligonucleotide
uuuaauuacuuuaggguuc

SEQ ID NO: 1401697 - RNA, 19 nt, Artificial Sequence
  Description of Artificial Sequence: Synthetic oligonucleotide
aauuugacguucucuucgg

SEQ ID NO: 1401698 - RNA, 19 nt, Artificial Sequence
  Description of Artificial Sequence: Synthetic oligonucleotide
uuaggguucugauuugugg

SEQ ID NO: 1401699 - RNA, 19 nt, Artificial Sequence
  Description of Artificial Sequence: Synthetic oligonucleotide
uuuauaguaagcacaucac

SEQ ID NO: 1401700 - RNA, 19 nt, Artificial Sequence
  Description of Artificial Sequence: Synthetic oligonucleotide
uauuaugggcaccucggcg

SEQ ID NO: 1401701 - RNA, 19 nt, Artificial Sequence
  Description of Artificial Sequence: Synthetic oligonucleotide
agaccuuguaaauaaccac

SEQ ID NO: 1401702 - RNA, 19 nt, Artificial Sequence
  Description of Artificial Sequence: Synthetic oligonucleotide
uuauaguaagcacaucacu

SEQ ID NO: 1401703 - RNA, 19 nt, Artificial Sequence
  Description of Artificial Sequence: Synthetic oligonucleotide
cacaaugucaucacuagug

SEQ ID NO: 1401704 - RNA, 19 nt, Artificial Sequence
  Description of Artificial Sequence: Synthetic oligonucleotide
aaaagacaacuauuguuga

SEQ ID NO: 1401705 - RNA, 19 nt, Artificial Sequence
  Description of Artificial Sequence: Synthetic oligonucleotide
agcacgaugacgcaugaag

SEQ ID NO: 1401706 - RNA, 19 nt, Artificial Sequence
  Description of Artificial Sequence: Synthetic oligonucleotide
ucuucauugcaccucacgu

SEQ ID NO: 1401707 - RNA, 19 nt, Artificial Sequence
  Description of Artificial Sequence: Synthetic oligonucleotide
ucgagagguaacaugacga

SEQ ID NO: 1401708 - RNA, 19 nt, Artificial Sequence
  Description of Artificial Sequence: Synthetic oligonucleotide
guuagcagcacgaugacgc

SEQ ID NO: 1401709 - RNA, 19 nt, Artificial Sequence
  Description of Artificial Sequence: Synthetic oligonucleotide
uaugguuaguuuauaguaa

SEQ ID NO: 1401710 - RNA, 19 nt, Artificial Sequence
  Description of Artificial Sequence: Synthetic oligonucleotide
aaagcuaccccugcagugg

SEQ ID NO: 1401711 - RNA, 19 nt, Artificial Sequence
  Description of Artificial Sequence: Synthetic oligonucleotide
uguuguacauuuguggcag

SEQ ID NO: 1401712 - RNA, 19 nt, Artificial Sequence
  Description of Artificial Sequence: Synthetic oligonucleotide
ucugaacccagucaauggc

SEQ ID NO: 1401713 - RNA, 19 nt, Artificial Sequence
  Description of Artificial Sequence: Synthetic oligonucleotide
uuuauuugacuaccgugca

SEQ ID NO: 1401714 - RNA, 19 nt, Artificial Sequence
  Description of Artificial Sequence: Synthetic oligonucleotide
uaaugcuaaaugccuagug

SEQ ID NO: 1401715 - RNA, 19 nt, Artificial Sequence
  Description of Artificial Sequence: Synthetic oligonucleotide
auaguaagcacaucacucu

SEQ ID NO: 1401716 - RNA, 19 nt, Artificial Sequence
  Description of Artificial Sequence: Synthetic oligonucleotide
ggagaugagaucucgagag

SEQ ID NO: 1401717 - RNA, 19 nt, Artificial Sequence
  Description of Artificial Sequence: Synthetic oligonucleotide
agagguaacaugacgaguc

SEQ ID NO: 1401718 - RNA, 19 nt, Artificial Sequence
  Description of Artificial Sequence: Synthetic oligonucleotide
aucaauccaagccugugag

SEQ ID NO: 1401719 - RNA, 19 nt, Artificial Sequence
  Description of Artificial Sequence: Synthetic oligonucleotide
aguuccgugauccgcacgg

SEQ ID NO: 1401720 - RNA, 19 nt, Artificial Sequence
  Description of Artificial Sequence: Synthetic oligonucleotide
ucaucaugaaggacugagg

SEQ ID NO: 1401721 - RNA, 19 nt, Artificial Sequence
  Description of Artificial Sequence: Synthetic oligonucleotide
ugacguuccaggcagcuug

SEQ ID NO: 1401722 - RNA, 19 nt, Artificial Sequence
  Description of Artificial Sequence: Synthetic oligonucleotide
aguaaaaccucucuggcuu

SEQ ID NO: 1401723 - RNA, 19 nt, Artificial Sequence
  Description of Artificial Sequence: Synthetic oligonucleotide
ucuauucacaucaaccuuu

SEQ ID NO: 1401724 - RNA, 19 nt, Artificial Sequence
  Description of Artificial Sequence: Synthetic oligonucleotide
acuauuguugaucaauaaa

SEQ ID NO: 1401725 - RNA, 19 nt, Artificial Sequence
  Description of Artificial Sequence: Synthetic oligonucleotide
uauuugacuaccgugcaga

SEQ ID NO: 1401726 - RNA, 19 nt, Artificial Sequence
  Description of Artificial Sequence: Synthetic oligonucleotide
ugccugaaaaccacuaaug

SEQ ID NO: 1401727 - RNA, 19 nt, Artificial Sequence
  Description of Artificial Sequence: Synthetic oligonucleotide
auuacuuuaggguucugau

SEQ ID NO: 1401728 - RNA, 19 nt, Artificial Sequence
  Description of Artificial Sequence: Synthetic oligonucleotide
aagugcguugucuggauca

SEQ ID NO: 1401729 - RNA, 19 nt, Artificial Sequence
  Description of Artificial Sequence: Synthetic oligonucleotide
aauuacuuuaggguucuga

SEQ ID NO: 1401730 - RNA, 19 nt, Artificial Sequence
  Description of Artificial Sequence: Synthetic oligonucleotide
auaggcucgaagucucagc

SEQ ID NO: 1401731 - RNA, 19 nt, Artificial Sequence
  Description of Artificial Sequence: Synthetic oligonucleotide
aguacucacucuuuggcca

SEQ ID NO: 1401732 - RNA, 19 nt, Artificial Sequence
  Description of Artificial Sequence: Synthetic oligonucleotide
aaauaaccacuguuguaca

SEQ ID NO: 1401733 - RNA, 19 nt, Artificial Sequence
  Description of Artificial Sequence: Synthetic oligonucleotide
uuauuugacuaccgugcag

SEQ ID NO: 1401734 - RNA, 19 nt, Artificial Sequence
  Description of Artificial Sequence: Synthetic oligonucleotide
uugacguucucuucgguga

SEQ ID NO: 1401735 - RNA, 19 nt, Artificial Sequence
  Description of Artificial Sequence: Synthetic oligonucleotide
auuaugggcaccucggcga

SEQ ID NO: 1401736 - RNA, 19 nt, Artificial Sequence
  Description of Artificial Sequence: Synthetic oligonucleotide
gaccuaagcaaugagcacc

SEQ ID NO: 1401737 - RNA, 19 nt, Artificial Sequence
  Description of Artificial Sequence: Synthetic oligonucleotide
augaauucaucaugaagga

SEQ ID NO: 1401738 - RNA, 19 nt, Artificial Sequence
  Description of Artificial Sequence: Synthetic oligonucleotide
aggaugauaaggaggcucc

SEQ ID NO: 1401739 - RNA, 19 nt, Artificial Sequence
  Description of Artificial Sequence: Synthetic oligonucleotide
ugucaccggaauaacccgg

SEQ ID NO: 1401740 - RNA, 19 nt, Artificial Sequence
  Description of Artificial Sequence: Synthetic oligonucleotide
ugagcuaugguuaguuuau

SEQ ID NO: 1401741 - RNA, 19 nt, Artificial Sequence
  Description of Artificial Sequence: Synthetic oligonucleotide
ucauuaucccgguuccggg

SEQ ID NO: 1401742 - RNA, 19 nt, Artificial Sequence
  Description of Artificial Sequence: Synthetic oligonucleotide
uguaaaucacucagcuucu

SEQ ID NO: 1401743 - RNA, 19 nt, Artificial Sequence
  Description of Artificial Sequence: Synthetic oligonucleotide
agacaacuauuguugauca

SEQ ID NO: 1401744 - RNA, 19 nt, Artificial Sequence
  Description of Artificial Sequence: Synthetic oligonucleotide
ucugucuaacaccagugaa

SEQ ID NO: 1401745 - RNA, 19 nt, Artificial Sequence
  Description of Artificial Sequence: Synthetic oligonucleotide
cacauuguaguaaaaccuc

SEQ ID NO: 1401746 - RNA, 19 nt, Artificial Sequence
  Description of Artificial Sequence: Synthetic oligonucleotide
uugggauacaccgugugcc

SEQ ID NO: 1401747 - RNA, 19 nt, Artificial Sequence
  Description of Artificial Sequence: Synthetic oligonucleotide
auuggggucauuaucccgg

SEQ ID NO: 1401748 - RNA, 19 nt, Artificial Sequence
  Description of Artificial Sequence: Synthetic oligonucleotide
cugauuugugggaacagac

SEQ ID NO: 1401749 - RNA, 19 nt, Artificial Sequence
  Description of Artificial Sequence: Synthetic oligonucleotide
cauggcuuaacugagucug

SEQ ID NO: 1401750 - RNA, 19 nt, Artificial Sequence
  Description of Artificial Sequence: Synthetic oligonucleotide
agcuaugguuaguuuauag

SEQ ID NO: 1401751 - RNA, 19 nt, Artificial Sequence
  Description of Artificial Sequence: Synthetic oligonucleotide
ugacgcaugaaggagauua

SEQ ID NO: 1401752 - RNA, 19 nt, Artificial Sequence
  Description of Artificial Sequence: Synthetic oligonucleotide
ucuuucuauucacaucaac

SEQ ID NO: 1401753 - RNA, 19 nt, Artificial Sequence
  Description of Artificial Sequence: Synthetic oligonucleotide
uuugugggaacagaccuug

SEQ ID NO: 1401754 - RNA, 19 nt, Artificial Sequence
  Description of Artificial Sequence: Synthetic oligonucleotide
gauuugugggaacagaccu

SEQ ID NO: 1401755 - RNA, 19 nt, Artificial Sequence
  Description of Artificial Sequence: Synthetic oligonucleotide
ugaaaaccacuaaugcuaa

SEQ ID NO: 1401756 - RNA, 19 nt, Artificial Sequence
  Description of Artificial Sequence: Synthetic oligonucleotide
uaguaagcacaucacucug

SEQ ID NO: 1401757 - RNA, 19 nt, Artificial Sequence
  Description of Artificial Sequence: Synthetic oligonucleotide
agcacaucacucuggaucu

SEQ ID NO: 1401758 - RNA, 19 nt, Artificial Sequence
  Description of Artificial Sequence: Synthetic oligonucleotide
cugucuaacaccagugaac

SEQ ID NO: 1401759 - RNA, 19 nt, Artificial Sequence
  Description of Artificial Sequence: Synthetic oligonucleotide
cuaugguuaguuuauagua

SEQ ID NO: 1401760 - RNA, 19 nt, Artificial Sequence
  Description of Artificial Sequence: Synthetic oligonucleotide
gaguacucacucuuuggcc

SEQ ID NO: 1401761 - RNA, 19 nt, Artificial Sequence
  Description of Artificial Sequence: Synthetic oligonucleotide
uuuaggguucugauuugug

SEQ ID NO: 1401762 - RNA, 19 nt, Artificial Sequence
  Description of Artificial Sequence: Synthetic oligonucleotide
gaucucgagagguaacaug

SEQ ID NO: 1401763 - RNA, 19 nt, Artificial Sequence
  Description of Artificial Sequence: Synthetic oligonucleotide
aauaaccacuguuguacau

SEQ ID NO: 1401764 - RNA, 19 nt, Artificial Sequence
  Description of Artificial Sequence: Synthetic oligonucleotide
agucuguaaaagaaauggg

SEQ ID NO: 1401765 - RNA, 19 nt, Artificial Sequence
  Description of Artificial Sequence: Synthetic oligonucleotide
aaugguuucagggcgcagu

SEQ ID NO: 1401766 - RNA, 19 nt, Artificial Sequence
  Description of Artificial Sequence: Synthetic oligonucleotide
uuaauuacuuuaggguucu

SEQ ID NO: 1401767 - RNA, 19 nt, Artificial Sequence
  Description of Artificial Sequence: Synthetic oligonucleotide
cuagucuguaaaagaaaug

SEQ ID NO: 1401768 - RNA, 19 nt, Artificial Sequence
  Description of Artificial Sequence: Synthetic oligonucleotide
uaggcucgaagucucagcu

SEQ ID NO: 1401769 - RNA, 19 nt, Artificial Sequence
  Description of Artificial Sequence: Synthetic oligonucleotide
ugggcccagaucgagaggg

SEQ ID NO: 1401770 - RNA, 19 nt, Artificial Sequence
  Description of Artificial Sequence: Synthetic oligonucleotide
uuuaacccagagagggcag

SEQ ID NO: 1401771 - RNA, 19 nt, Artificial Sequence
  Description of Artificial Sequence: Synthetic oligonucleotide
ucuuuaacccagagagggc

SEQ ID NO: 1401772 - RNA, 19 nt, Artificial Sequence
  Description of Artificial Sequence: Synthetic oligonucleotide
aaccagaagggcucccaag

SEQ ID NO: 1401773 - RNA, 19 nt, Artificial Sequence
  Description of Artificial Sequence: Synthetic oligonucleotide
uugcaccucacgucaaggg

SEQ ID NO: 1401774 - RNA, 19 nt, Artificial Sequence
  Description of Artificial Sequence: Synthetic oligonucleotide
augucaccggaauaacccg

SEQ ID NO: 1401775 - RNA, 19 nt, Artificial Sequence
  Description of Artificial Sequence: Synthetic oligonucleotide
uaguaaaaccucucuggcu

SEQ ID NO: 1401776 - RNA, 19 nt, Artificial Sequence
  Description of Artificial Sequence: Synthetic oligonucleotide
aggagauuauguugugcuc

SEQ ID NO: 1401777 - RNA, 19 nt, Artificial Sequence
  Description of Artificial Sequence: Synthetic oligonucleotide
agggcagaacucuucgcac

SEQ ID NO: 1401778 - RNA, 19 nt, Artificial Sequence
  Description of Artificial Sequence: Synthetic oligonucleotide
agucuguaaaucacucagc

SEQ ID NO: 1401779 - RNA, 19 nt, Artificial Sequence
  Description of Artificial Sequence: Synthetic oligonucleotide
ugcucugucuaacaccagu

SEQ ID NO: 1401780 - RNA, 19 nt, Artificial Sequence
  Description of Artificial Sequence: Synthetic oligonucleotide
aaaaccucucuggcuugcc

SEQ ID NO: 1401781 - RNA, 19 nt, Artificial Sequence
  Description of Artificial Sequence: Synthetic oligonucleotide
uccgugauccgcacgguug

SEQ ID NO: 1401782 - RNA, 19 nt, Artificial Sequence
  Description of Artificial Sequence: Synthetic oligonucleotide
ugcguugucuggaucauau

SEQ ID NO: 1401783 - RNA, 19 nt, Artificial Sequence
  Description of Artificial Sequence: Synthetic oligonucleotide
agaagggcuaucuuucuau

SEQ ID NO: 1401784 - RNA, 19 nt, Artificial Sequence
  Description of Artificial Sequence: Synthetic oligonucleotide
ucggcgaugaagacccucc

SEQ ID NO: 1401785 - RNA, 19 nt, Artificial Sequence
  Description of Artificial Sequence: Synthetic oligonucleotide
ucacucuuuggccauuccu

SEQ ID NO: 1401786 - RNA, 19 nt, Artificial Sequence
  Description of Artificial Sequence: Synthetic oligonucleotide
uggaauuggccaccgccag

SEQ ID NO: 1401787 - RNA, 19 nt, Artificial Sequence
  Description of Artificial Sequence: Synthetic oligonucleotide
ucgaagucucagcuccugg

SEQ ID NO: 1401788 - RNA, 19 nt, Artificial Sequence
  Description of Artificial Sequence: Synthetic oligonucleotide
auuauguugugcucuuuau

SEQ ID NO: 1401789 - RNA, 19 nt, Artificial Sequence
  Description of Artificial Sequence: Synthetic oligonucleotide
gucauagggagccugugac

SEQ ID NO: 1401790 - RNA, 19 nt, Artificial Sequence
  Description of Artificial Sequence: Synthetic oligonucleotide
gucauuaucccgguuccgg

SEQ ID NO: 1401791 - RNA, 19 nt, Artificial Sequence
  Description of Artificial Sequence: Synthetic oligonucleotide
uccgaauggaauuggccac

SEQ ID NO: 1401792 - RNA, 19 nt, Artificial Sequence
  Description of Artificial Sequence: Synthetic oligonucleotide
ucggugaguuccgugaucc

SEQ ID NO: 1401793 - RNA, 19 nt, Artificial Sequence
  Description of Artificial Sequence: Synthetic oligonucleotide
ucggaguacucacucuuug

SEQ ID NO: 1401794 - RNA, 19 nt, Artificial Sequence
  Description of Artificial Sequence: Synthetic oligonucleotide
gaucaauccaagccuguga

SEQ ID NO: 1401795 - RNA, 19 nt, Artificial Sequence
  Description of Artificial Sequence: Synthetic oligonucleotide
aucucgagagguaacauga

SEQ ID NO: 1401796 - RNA, 19 nt, Artificial Sequence
  Description of Artificial Sequence: Synthetic oligonucleotide
cauuguaguaaaaccucuc

SEQ ID NO: 1401797 - RNA, 19 nt, Artificial Sequence
  Description of Artificial Sequence: Synthetic oligonucleotide
ucugaucuucauugcaccu

SEQ ID NO: 1401798 - RNA, 19 nt, Artificial Sequence
  Description of Artificial Sequence: Synthetic oligonucleotide
cuucauugcaccucacguc

SEQ ID NO: 1401799 - RNA, 19 nt, Artificial Sequence
  Description of Artificial Sequence: Synthetic oligonucleotide
gaccguagaccuugaaccc

SEQ ID NO: 1401800 - RNA, 19 nt, Artificial Sequence
  Description of Artificial Sequence: Synthetic oligonucleotide
gaacucuucgcacgugcag

SEQ ID NO: 1401801 - RNA, 19 nt, Artificial Sequence
  Description of Artificial Sequence: Synthetic oligonucleotide
aagcuaccccugcaguggg

SEQ ID NO: 1401802 - RNA, 19 nt, Artificial Sequence
  Description of Artificial Sequence: Synthetic oligonucleotide
cacucuuuggccauuccuc

SEQ ID NO: 1401803 - RNA, 19 nt, Artificial Sequence
  Description of Artificial Sequence: Synthetic oligonucleotide
gaaggagauuauguugugc

SEQ ID NO: 1401804 - RNA, 19 nt, Artificial Sequence
  Description of Artificial Sequence: Synthetic oligonucleotide
uggcguacggcauugcgac

SEQ ID NO: 1401805 - RNA, 19 nt, Artificial Sequence
  Description of Artificial Sequence: Synthetic oligonucleotide
ugcaccucacgucaagggu

SEQ ID NO: 1401806 - RNA, 19 nt, Artificial Sequence
  Description of Artificial Sequence: Synthetic oligonucleotide
cuugggauacaccgugugc

SEQ ID NO: 1401807 - RNA, 19 nt, Artificial Sequence
  Description of Artificial Sequence: Synthetic oligonucleotide
gagaggacaaugguuucag

SEQ ID NO: 1401808 - RNA, 19 nt, Artificial Sequence
  Description of Artificial Sequence: Synthetic oligonucleotide
cuccgaauggaauuggcca

SEQ ID NO: 1401809 - RNA, 19 nt, Artificial Sequence
  Description of Artificial Sequence: Synthetic oligonucleotide
gucagcuagucuguaaaag

SEQ ID NO: 1401810 - RNA, 19 nt, Artificial Sequence
  Description of Artificial Sequence: Synthetic oligonucleotide
cucauggcuuaacugaguc

SEQ ID NO: 1401811 - RNA, 19 nt, Artificial Sequence
  Description of Artificial Sequence: Synthetic oligonucleotide
agguccguguucucgauga

SEQ ID NO: 1401812 - RNA, 19 nt, Artificial Sequence
  Description of Artificial Sequence: Synthetic oligonucleotide
ucaauccaagccugugagc

SEQ ID NO: 1401813 - RNA, 19 nt, Artificial Sequence
  Description of Artificial Sequence: Synthetic oligonucleotide
cuauuaugggcaccucggc

SEQ ID NO: 1401814 - RNA, 19 nt, Artificial Sequence
  Description of Artificial Sequence: Synthetic oligonucleotide
ugacuaccgugcagaaggg

SEQ ID NO: 1401815 - RNA, 19 nt, Artificial Sequence
  Description of Artificial Sequence: Synthetic oligonucleotide
gguuaguuuauaguaagca

SEQ ID NO: 1401816 - RNA, 19 nt, Artificial Sequence
  Description of Artificial Sequence: Synthetic oligonucleotide
ugccuaagugcguugucug

SEQ ID NO: 1401817 - RNA, 19 nt, Artificial Sequence
  Description of Artificial Sequence: Synthetic oligonucleotide
gaaaugggcccagaucgag

SEQ ID NO: 1401818 - RNA, 19 nt, Artificial Sequence
  Description of Artificial Sequence: Synthetic oligonucleotide
cacgucaagggugaauucc

SEQ ID NO: 1401819 - RNA, 19 nt, Artificial Sequence
  Description of Artificial Sequence: Synthetic oligonucleotide
acucuucgcacgugcaguc

SEQ ID NO: 1401820 - RNA, 19 nt, Artificial Sequence
  Description of Artificial Sequence: Synthetic oligonucleotide
uuugacuaccgugcagaag

SEQ ID NO: 1401821 - RNA, 19 nt, Artificial Sequence
  Description of Artificial Sequence: Synthetic oligonucleotide
ugugacucguccucaucca

SEQ ID NO: 1401822 - RNA, 19 nt, Artificial Sequence
  Description of Artificial Sequence: Synthetic oligonucleotide
uguaguccagagccuagaa

SEQ ID NO: 1401823 - RNA, 19 nt, Artificial Sequence
  Description of Artificial Sequence: Synthetic oligonucleotide
uuacuuuaggguucugauu

SEQ ID NO: 1401824 - RNA, 19 nt, Artificial Sequence
  Description of Artificial Sequence: Synthetic oligonucleotide
auugcaccucacgucaagg

SEQ ID NO: 1401825 - RNA, 19 nt, Artificial Sequence
  Description of Artificial Sequence: Synthetic oligonucleotide
cuuuggccauuccucaggc

SEQ ID NO: 1401826 - RNA, 19 nt, Artificial Sequence
  Description of Artificial Sequence: Synthetic oligonucleotide
cucaguuagcagcacgaug

SEQ ID NO: 1401827 - RNA, 19 nt, Artificial Sequence
  Description of Artificial Sequence: Synthetic oligonucleotide
guaagcacaucacucugga

SEQ ID NO: 1401828 - RNA, 19 nt, Artificial Sequence
  Description of Artificial Sequence: Synthetic oligonucleotide
gccugaaaaccacuaaugc

SEQ ID NO: 1401829 - RNA, 19 nt, Artificial Sequence
  Description of Artificial Sequence: Synthetic oligonucleotide
guggcaggaugauaaggag

SEQ ID NO: 1401830 - RNA, 19 nt, Artificial Sequence
  Description of Artificial Sequence: Synthetic oligonucleotide
ugaccuaagcaaugagcac

SEQ ID NO: 1401831 - RNA, 19 nt, Artificial Sequence
  Description of Artificial Sequence: Synthetic oligonucleotide
aaccuuuuguuucguguuu

SEQ ID NO: 1401832 - RNA, 19 nt, Artificial Sequence
  Description of Artificial Sequence: Synthetic oligonucleotide
ugcagugggguuccacuug

SEQ ID NO: 1401833 - RNA, 19 nt, Artificial Sequence
  Description of Artificial Sequence: Synthetic oligonucleotide
guugaucaauaaauauccc

SEQ ID NO: 1401834 - RNA, 19 nt, Artificial Sequence
  Description of Artificial Sequence: Synthetic oligonucleotide
ggcucgaagucucagcucc

SEQ ID NO: 1401835 - RNA, 19 nt, Artificial Sequence
  Description of Artificial Sequence: Synthetic oligonucleotide
acgaugacgcaugaaggag

SEQ ID NO: 1401836 - RNA, 19 nt, Artificial Sequence
  Description of Artificial Sequence: Synthetic oligonucleotide
aggcuugggauacaccgug

SEQ ID NO: 1401837 - RNA, 19 nt, Artificial Sequence
  Description of Artificial Sequence: Synthetic oligonucleotide
gauccgcacgguuggcugg

SEQ ID NO: 1401838 - RNA, 19 nt, Artificial Sequence
  Description of Artificial Sequence: Synthetic oligonucleotide
ucaccggaauaacccgggg

SEQ ID NO: 1401839 - RNA, 19 nt, Artificial Sequence
  Description of Artificial Sequence: Synthetic oligonucleotide
cuugccguuggggucauag

SEQ ID NO: 1401840 - RNA, 19 nt, Artificial Sequence
  Description of Artificial Sequence: Synthetic oligonucleotide
ucauggcuuaacugagucu

SEQ ID NO: 1401841 - RNA, 19 nt, Artificial Sequence
  Description of Artificial Sequence: Synthetic oligonucleotide
guaaauaaccacuguugua

SEQ ID NO: 1401842 - RNA, 19 nt, Artificial Sequence
  Description of Artificial Sequence: Synthetic oligonucleotide
ucugcagcgggugagcuau

SEQ ID NO: 1401843 - RNA, 19 nt, Artificial Sequence
  Description of Artificial Sequence: Synthetic oligonucleotide
aguuagcagcacgaugacg

SEQ ID NO: 1401844 - RNA, 19 nt, Artificial Sequence
  Description of Artificial Sequence: Synthetic oligonucleotide
uauucacaucaaccuuuug

SEQ ID NO: 1401845 - RNA, 19 nt, Artificial Sequence
  Description of Artificial Sequence: Synthetic oligonucleotide
aggucagcuagucuguaaa

SEQ ID NO: 1401846 - RNA, 19 nt, Artificial Sequence
  Description of Artificial Sequence: Synthetic oligonucleotide
uguuucguguuuucuguuu

SEQ ID NO: 1401847 - RNA, 19 nt, Artificial Sequence
  Description of Artificial Sequence: Synthetic oligonucleotide
cuuuaacccagagagggca

SEQ ID NO: 1401848 - RNA, 19 nt, Artificial Sequence
  Description of Artificial Sequence: Synthetic oligonucleotide
aguuuauaguaagcacauc

SEQ ID NO: 1401849 - RNA, 19 nt, Artificial Sequence
  Description of Artificial Sequence: Synthetic oligonucleotide
uccggugacguuccaggca

SEQ ID NO: 1401850 - RNA, 19 nt, Artificial Sequence
  Description of Artificial Sequence: Synthetic oligonucleotide
ucguccucauccaguucgg

SEQ ID NO: 1401851 - RNA, 19 nt, Artificial Sequence
  Description of Artificial Sequence: Synthetic oligonucleotide
acuaccgugcagaagggcu

SEQ ID NO: 1401852 - RNA, 19 nt, Artificial Sequence
  Description of Artificial Sequence: Synthetic oligonucleotide
ugacugaccuaagcaauga

SEQ ID NO: 1401853 - RNA, 19 nt, Artificial Sequence
  Description of Artificial Sequence: Synthetic oligonucleotide
auggcuauuaugggcaccu

SEQ ID NO: 1401854 - RNA, 19 nt, Artificial Sequence
  Description of Artificial Sequence: Synthetic oligonucleotide
aggguucugauuuguggga

SEQ ID NO: 1401855 - RNA, 19 nt, Artificial Sequence
  Description of Artificial Sequence: Synthetic oligonucleotide
aucucauggcuuaacugag

SEQ ID NO: 1401856 - RNA, 19 nt, Artificial Sequence
  Description of Artificial Sequence: Synthetic oligonucleotide
uuagcagcacgaugacgca

SEQ ID NO: 1401857 - RNA, 19 nt, Artificial Sequence
  Description of Artificial Sequence: Synthetic oligonucleotide
cauugcgacccgcagccag

SEQ ID NO: 1401858 - RNA, 19 nt, Artificial Sequence
  Description of Artificial Sequence: Synthetic oligonucleotide
gacaaugguuucagggcgc

SEQ ID NO: 1401859 - RNA, 19 nt, Artificial Sequence
  Description of Artificial Sequence: Synthetic oligonucleotide
aguucggaguacucacucu

SEQ ID NO: 1401860 - RNA, 19 nt, Artificial Sequence
  Description of Artificial Sequence: Synthetic oligonucleotide
cacgaugacgcaugaagga

SEQ ID NO: 1401861 - RNA, 19 nt, Artificial Sequence
  Description of Artificial Sequence: Synthetic oligonucleotide
cuguuguacauuuguggca

SEQ ID NO: 1401862 - RNA, 19 nt, Artificial Sequence
  Description of Artificial Sequence: Synthetic oligonucleotide
cagcuagucuguaaaagaa

SEQ ID NO: 1401863 - RNA, 19 nt, Artificial Sequence
  Description of Artificial Sequence: Synthetic oligonucleotide
ugggauacaccgugugccu

SEQ ID NO: 1401864 - RNA, 19 nt, Artificial Sequence
  Description of Artificial Sequence: Synthetic oligonucleotide
ugaagacccuccgaaugga

SEQ ID NO: 1401865 - RNA, 19 nt, Artificial Sequence
  Description of Artificial Sequence: Synthetic oligonucleotide
agacccuccgaauggaauu

SEQ ID NO: 1401866 - RNA, 19 nt, Artificial Sequence
  Description of Artificial Sequence: Synthetic oligonucleotide
caugacgagucugaucuuc

SEQ ID NO: 1401867 - RNA, 19 nt, Artificial Sequence
  Description of Artificial Sequence: Synthetic oligonucleotide
aggugacucggccagccca

SEQ ID NO: 1401868 - RNA, 19 nt, Artificial Sequence
  Description of Artificial Sequence: Synthetic oligonucleotide
uaagugcguugucuggauc

SEQ ID NO: 1401869 - RNA, 19 nt, Artificial Sequence
  Description of Artificial Sequence: Synthetic oligonucleotide
cauugcaccucacgucaag

SEQ ID NO: 1401870 - RNA, 19 nt, Artificial Sequence
  Description of Artificial Sequence: Synthetic oligonucleotide
auuugacuaccgugcagaa

SEQ ID NO: 1401871 - RNA, 19 nt, Artificial Sequence
  Description of Artificial Sequence: Synthetic oligonucleotide
gucaccggaauaacccggg

SEQ ID NO: 1401872 - RNA, 19 nt, Artificial Sequence
  Description of Artificial Sequence: Synthetic oligonucleotide
gaauggaauuggccaccgc

SEQ ID NO: 1401873 - RNA, 19 nt, Artificial Sequence
  Description of Artificial Sequence: Synthetic oligonucleotide
gggcagaacucuucgcacg

SEQ ID NO: 1401874 - RNA, 19 nt, Artificial Sequence
  Description of Artificial Sequence: Synthetic oligonucleotide
caguucggaguacucacuc

SEQ ID NO: 1401875 - RNA, 19 nt, Artificial Sequence
  Description of Artificial Sequence: Synthetic oligonucleotide
agucccgcagcgcgccugc

SEQ ID NO: 1401876 - RNA, 19 nt, Artificial Sequence
  Description of Artificial Sequence: Synthetic oligonucleotide
uuaacccagagagggcaga

SEQ ID NO: 1401877 - RNA, 19 nt, Artificial Sequence
  Description of Artificial Sequence: Synthetic oligonucleotide
ugcagcgggugagcuaugg

SEQ ID NO: 1401878 - RNA, 19 nt, Artificial Sequence
  Description of Artificial Sequence: Synthetic oligonucleotide
aaaugggcccagaucgaga

SEQ ID NO: 1401879 - RNA, 19 nt, Artificial Sequence
  Description of Artificial Sequence: Synthetic oligonucleotide
gcacgaugacgcaugaagg

SEQ ID NO: 1401880 - RNA, 19 nt, Artificial Sequence
  Description of Artificial Sequence: Synthetic oligonucleotide
uguucucgaugaugaauuu

SEQ ID NO: 1401881 - RNA, 19 nt, Artificial Sequence
  Description of Artificial Sequence: Synthetic oligonucleotide
guagaccuugaacccaguc

SEQ ID NO: 1401882 - RNA, 19 nt, Artificial Sequence
  Description of Artificial Sequence: Synthetic oligonucleotide
ugugccuaagugcguuguc

SEQ ID NO: 1401883 - RNA, 19 nt, Artificial Sequence
  Description of Artificial Sequence: Synthetic oligonucleotide
caauggcuauuaugggcac

SEQ ID NO: 1401884 - RNA, 19 nt, Artificial Sequence
  Description of Artificial Sequence: Synthetic oligonucleotide
aagacccuccgaauggaau

SEQ ID NO: 1401885 - RNA, 19 nt, Artificial Sequence
  Description of Artificial Sequence: Synthetic oligonucleotide
gacccuccgaauggaauug

SEQ ID NO: 1401886 - RNA, 19 nt, Artificial Sequence
  Description of Artificial Sequence: Synthetic oligonucleotide
caucacucuggaucucaug

SEQ ID NO: 1401887 - RNA, 19 nt, Artificial Sequence
  Description of Artificial Sequence: Synthetic oligonucleotide
cuuaacugagucuguaaau

SEQ ID NO: 1401888 - RNA, 19 nt, Artificial Sequence
  Description of Artificial Sequence: Synthetic oligonucleotide
gucuaacaccagugaaccc

SEQ ID NO: 1401889 - RNA, 19 nt, Artificial Sequence
  Description of Artificial Sequence: Synthetic oligonucleotide
acggcauugcgacccgcag

SEQ ID NO: 1401890 - RNA, 19 nt, Artificial Sequence
  Description of Artificial Sequence: Synthetic oligonucleotide
uucggaguacucacucuuu

SEQ ID NO: 1401891 - RNA, 19 nt, Artificial Sequence
  Description of Artificial Sequence: Synthetic oligonucleotide
agguaacaugacgagucug

SEQ ID NO: 1401892 - RNA, 19 nt, Artificial Sequence
  Description of Artificial Sequence: Synthetic oligonucleotide
cacguagucauugggguca

SEQ ID NO: 1401893 - RNA, 19 nt, Artificial Sequence
  Description of Artificial Sequence: Synthetic oligonucleotide
acgguuggcugguuggcgu

SEQ ID NO: 1401894 - RNA, 19 nt, Artificial Sequence
  Description of Artificial Sequence: Synthetic oligonucleotide
gauacaccgugugccuaag

SEQ ID NO: 1401895 - RNA, 19 nt, Artificial Sequence
  Description of Artificial Sequence: Synthetic oligonucleotide
ugaguuccgugauccgcac

SEQ ID NO: 1401896 - RNA, 19 nt, Artificial Sequence
  Description of Artificial Sequence: Synthetic oligonucleotide
cauuaucccgguuccggga

SEQ ID NO: 1401897 - RNA, 19 nt, Artificial Sequence
  Description of Artificial Sequence: Synthetic oligonucleotide
cucugucuaacaccaguga

SEQ ID NO: 1401898 - RNA, 19 nt, Artificial Sequence
  Description of Artificial Sequence: Synthetic oligonucleotide
acgcaugaaggagauuaug

SEQ ID NO: 1401899 - RNA, 19 nt, Artificial Sequence
  Description of Artificial Sequence: Synthetic oligonucleotide
augaugaauuugacguucu

SEQ ID NO: 1401900 - RNA, 19 nt, Artificial Sequence
  Description of Artificial Sequence: Synthetic oligonucleotide
ggaauuggccaccgccagg

SEQ ID NO: 1401901 - RNA, 19 nt, Artificial Sequence
  Description of Artificial Sequence: Synthetic oligonucleotide
ucacgucaagggugaauuc

SEQ ID NO: 1401902 - RNA, 19 nt, Artificial Sequence
  Description of Artificial Sequence: Synthetic oligonucleotide
gcuaugguuaguuuauagu

SEQ ID NO: 1401903 - RNA, 19 nt, Artificial Sequence
  Description of Artificial Sequence: Synthetic oligonucleotide
cucccaagaccguagaccu

SEQ ID NO: 1401904 - RNA, 19 nt, Artificial Sequence
  Description of Artificial Sequence: Synthetic oligonucleotide
agcuagucuguaaaagaaa

SEQ ID NO: 1401905 - RNA, 19 nt, Artificial Sequence
  Description of Artificial Sequence: Synthetic oligonucleotide
gaauuggccaccgccaggu

SEQ ID NO: 1401906 - RNA, 19 nt, Artificial Sequence
  Description of Artificial Sequence: Synthetic oligonucleotide
acgucaagggugaauucca

SEQ ID NO: 1401907 - RNA, 19 nt, Artificial Sequence
  Description of Artificial Sequence: Synthetic oligonucleotide
gccuaagugcguugucugg

SEQ ID NO: 1401908 - RNA, 19 nt, Artificial Sequence
  Description of Artificial Sequence: Synthetic oligonucleotide
cacuaaugcuaaaugccua

SEQ ID NO: 1401909 - RNA, 19 nt, Artificial Sequence
  Description of Artificial Sequence: Synthetic oligonucleotide
uggcuugccguugggguca

SEQ ID NO: 1401910 - RNA, 19 nt, Artificial Sequence
  Description of Artificial Sequence: Synthetic oligonucleotide
gacuaccgugcagaagggc

SEQ ID NO: 1401911 - RNA, 19 nt, Artificial Sequence
  Description of Artificial Sequence: Synthetic oligonucleotide
uggggucauagggagccug

SEQ ID NO: 1401912 - RNA, 19 nt, Artificial Sequence
  Description of Artificial Sequence: Synthetic oligonucleotide
caguuagcagcacgaugac

SEQ ID NO: 1401913 - RNA, 19 nt, Artificial Sequence
  Description of Artificial Sequence: Synthetic oligonucleotide
gugaguuccgugauccgca

SEQ ID NO: 1401914 - RNA, 19 nt, Artificial Sequence
  Description of Artificial Sequence: Synthetic oligonucleotide
ucgcacgugcagucccggg

SEQ ID NO: 1401915 - RNA, 19 nt, Artificial Sequence
  Description of Artificial Sequence: Synthetic oligonucleotide
caagggugaauuccacaga

SEQ ID NO: 1401916 - RNA, 19 nt, Artificial Sequence
  Description of Artificial Sequence: Synthetic oligonucleotide
gaugauaaggaggcucccu

SEQ ID NO: 1401917 - RNA, 19 nt, Artificial Sequence
  Description of Artificial Sequence: Synthetic oligonucleotide
ugacucggccagcccagcu

SEQ ID NO: 1401918 - RNA, 19 nt, Artificial Sequence
  Description of Artificial Sequence: Synthetic oligonucleotide
accguagaccuugaaccca

SEQ ID NO: 1401919 - RNA, 19 nt, Artificial Sequence
  Description of Artificial Sequence: Synthetic oligonucleotide
caccucggcgaugaagacc

SEQ ID NO: 1401920 - RNA, 19 nt, Artificial Sequence
  Description of Artificial Sequence: Synthetic oligonucleotide
gagguaacaugacgagucu

SEQ ID NO: 1401921 - RNA, 19 nt, Artificial Sequence
  Description of Artificial Sequence: Synthetic oligonucleotide
agccagggaggugacucgg

SEQ ID NO: 1401922 - RNA, 19 nt, Artificial Sequence
  Description of Artificial Sequence: Synthetic oligonucleotide
ugguuggcguacggcauug

SEQ ID NO: 1401923 - RNA, 19 nt, Artificial Sequence
  Description of Artificial Sequence: Synthetic oligonucleotide
agaucucgagagguaacau

SEQ ID NO: 1401924 - RNA, 19 nt, Artificial Sequence
  Description of Artificial Sequence: Synthetic oligonucleotide
agaaaugggcccagaucga

SEQ ID NO: 1401925 - RNA, 19 nt, Artificial Sequence
  Description of Artificial Sequence: Synthetic oligonucleotide
cacgguuggcugguuggcg

SEQ ID NO: 1401926 - RNA, 19 nt, Artificial Sequence
  Description of Artificial Sequence: Synthetic oligonucleotide
gaggugacucggccagccc

SEQ ID NO: 1401927 - RNA, 19 nt, Artificial Sequence
  Description of Artificial Sequence: Synthetic oligonucleotide
ggaucaauccaagccugug

SEQ ID NO: 1401928 - RNA, 19 nt, Artificial Sequence
  Description of Artificial Sequence: Synthetic oligonucleotide
uuccgugauccgcacgguu

SEQ ID NO: 1401929 - RNA, 19 nt, Artificial Sequence
  Description of Artificial Sequence: Synthetic oligonucleotide
gcucugucuaacaccagug

SEQ ID NO: 1401930 - RNA, 19 nt, Artificial Sequence
  Description of Artificial Sequence: Synthetic oligonucleotide
cgagagguaacaugacgag

SEQ ID NO: 1401931 - RNA, 19 nt, Artificial Sequence
  Description of Artificial Sequence: Synthetic oligonucleotide
ccggugacguuccaggcag

SEQ ID NO: 1401932 - RNA, 19 nt, Artificial Sequence
  Description of Artificial Sequence: Synthetic oligonucleotide
cucuggaucucauggcuua

SEQ ID NO: 1401933 - RNA, 19 nt, Artificial Sequence
  Description of Artificial Sequence: Synthetic oligonucleotide
agugaaccccuggcaaucu

SEQ ID NO: 1401934 - RNA, 19 nt, Artificial Sequence
  Description of Artificial Sequence: Synthetic oligonucleotide
acccuccgaauggaauugg

SEQ ID NO: 1401935 - RNA, 19 nt, Artificial Sequence
  Description of Artificial Sequence: Synthetic oligonucleotide
uaauuacuuuaggguucug

SEQ ID NO: 1401936 - RNA, 19 nt, Artificial Sequence
  Description of Artificial Sequence: Synthetic oligonucleotide
agcgggugagcuaugguua

SEQ ID NO: 1401937 - RNA, 19 nt, Artificial Sequence
  Description of Artificial Sequence: Synthetic oligonucleotide
gagauuauguugugcucuu

SEQ ID NO: 1401938 - RNA, 19 nt, Artificial Sequence
  Description of Artificial Sequence: Synthetic oligonucleotide
ggucauagggagccuguga

SEQ ID NO: 1401939 - RNA, 19 nt, Artificial Sequence
  Description of Artificial Sequence: Synthetic oligonucleotide
ccuagaaaccagaagggcu

SEQ ID NO: 1401940 - RNA, 19 nt, Artificial Sequence
  Description of Artificial Sequence: Synthetic oligonucleotide
ccugaaaaccacuaaugcu

SEQ ID NO: 1401941 - RNA, 19 nt, Artificial Sequence
  Description of Artificial Sequence: Synthetic oligonucleotide
cuggaucucauggcuuaac

SEQ ID NO: 1401942 - RNA, 19 nt, Artificial Sequence
  Description of Artificial Sequence: Synthetic oligonucleotide
guuccgggaugucaccgga

SEQ ID NO: 1401943 - RNA, 19 nt, Artificial Sequence
  Description of Artificial Sequence: Synthetic oligonucleotide
gaugacgcaugaaggagau

SEQ ID NO: 1401944 - RNA, 19 nt, Artificial Sequence
  Description of Artificial Sequence: Synthetic oligonucleotide
auacaccgugugccuaagu

SEQ ID NO: 1401945 - RNA, 19 nt, Artificial Sequence
  Description of Artificial Sequence: Synthetic oligonucleotide
ccguuggggucauagggag

SEQ ID NO: 1401946 - RNA, 19 nt, Artificial Sequence
  Description of Artificial Sequence: Synthetic oligonucleotide
gcaccucacgucaagggug

SEQ ID NO: 1401947 - RNA, 19 nt, Artificial Sequence
  Description of Artificial Sequence: Synthetic oligonucleotide
uuccgggaugucaccggaa

SEQ ID NO: 1401948 - RNA, 19 nt, Artificial Sequence
  Description of Artificial Sequence: Synthetic oligonucleotide
caccucacgucaaggguga

SEQ ID NO: 1401949 - RNA, 19 nt, Artificial Sequence
  Description of Artificial Sequence: Synthetic oligonucleotide
aagggcucccaagaccgua

SEQ ID NO: 1401950 - RNA, 19 nt, Artificial Sequence
  Description of Artificial Sequence: Synthetic oligonucleotide
cucuucgcacgugcagucc

SEQ ID NO: 1401951 - RNA, 19 nt, Artificial Sequence
  Description of Artificial Sequence: Synthetic oligonucleotide
gugcucuuuauugccaaaa

SEQ ID NO: 1401952 - RNA, 19 nt, Artificial Sequence
  Description of Artificial Sequence: Synthetic oligonucleotide
gcguacggcauugcgaccc

SEQ ID NO: 1401953 - RNA, 19 nt, Artificial Sequence
  Description of Artificial Sequence: Synthetic oligonucleotide
cccaagaccguagaccuug

SEQ ID NO: 1401954 - RNA, 19 nt, Artificial Sequence
  Description of Artificial Sequence: Synthetic oligonucleotide
ggucauuaucccgguuccg

SEQ ID NO: 1401955 - RNA, 19 nt, Artificial Sequence
  Description of Artificial Sequence: Synthetic oligonucleotide
guucggaguacucacucuu

SEQ ID NO: 1401956 - RNA, 19 nt, Artificial Sequence
  Description of Artificial Sequence: Synthetic oligonucleotide
cggaguacucacucuuugg

SEQ ID NO: 1401957 - RNA, 19 nt, Artificial Sequence
  Description of Artificial Sequence: Synthetic oligonucleotide
gcuagucuguaaaagaaau

SEQ ID NO: 1401958 - RNA, 19 nt, Artificial Sequence
  Description of Artificial Sequence: Synthetic oligonucleotide
agaucgagagggaggcaga

SEQ ID NO: 1401959 - RNA, 19 nt, Artificial Sequence
  Description of Artificial Sequence: Synthetic oligonucleotide
gugggguuccacuuggcau

SEQ ID NO: 1401960 - RNA, 19 nt, Artificial Sequence
  Description of Artificial Sequence: Synthetic oligonucleotide
cugugagcaaugaauucau

SEQ ID NO: 1401961 - RNA, 19 nt, Artificial Sequence
  Description of Artificial Sequence: Synthetic oligonucleotide
gaccuugaacccagucuuc

SEQ ID NO: 1401962 - RNA, 19 nt, Artificial Sequence
  Description of Artificial Sequence: Synthetic oligonucleotide
ccgugauccgcacgguugg

SEQ ID NO: 1401963 - RNA, 19 nt, Artificial Sequence
  Description of Artificial Sequence: Synthetic oligonucleotide
gacgagucugaucuucauu

SEQ ID NO: 1401964 - RNA, 19 nt, Artificial Sequence
  Description of Artificial Sequence: Synthetic oligonucleotide
auugcgacccgcagccagu

SEQ ID NO: 1401965 - RNA, 19 nt, Artificial Sequence
  Description of Artificial Sequence: Synthetic oligonucleotide
cuaccgugcagaagggcua

SEQ ID NO: 1401966 - RNA, 19 nt, Artificial Sequence
  Description of Artificial Sequence: Synthetic oligonucleotide
gaucuucauugcaccucac

SEQ ID NO: 1401967 - RNA, 19 nt, Artificial Sequence
  Description of Artificial Sequence: Synthetic oligonucleotide
gacucguccucauccaguu

SEQ ID NO: 1401968 - RNA, 19 nt, Artificial Sequence
  Description of Artificial Sequence: Synthetic oligonucleotide
gcgggugagcuaugguuag

SEQ ID NO: 1401969 - RNA, 19 nt, Artificial Sequence
  Description of Artificial Sequence: Synthetic oligonucleotide
agugcguugucuggaucau

SEQ ID NO: 1401970 - RNA, 19 nt, Artificial Sequence
  Description of Artificial Sequence: Synthetic oligonucleotide
ggugacucggccagcccag

SEQ ID NO: 1401971 - RNA, 19 nt, Artificial Sequence
  Description of Artificial Sequence: Synthetic oligonucleotide
gcccagaucgagagggagg

SEQ ID NO: 1401972 - RNA, 19 nt, Artificial Sequence
  Description of Artificial Sequence: Synthetic oligonucleotide
ggcucaguuagcagcacga

SEQ ID NO: 1401973 - RNA, 19 nt, Artificial Sequence
  Description of Artificial Sequence: Synthetic oligonucleotide
cagguccguguucucgaug

SEQ ID NO: 1401974 - RNA, 19 nt, Artificial Sequence
  Description of Artificial Sequence: Synthetic oligonucleotide
ggauacaccgugugccuaa

SEQ ID NO: 1401975 - RNA, 19 nt, Artificial Sequence
  Description of Artificial Sequence: Synthetic oligonucleotide
gaagacccuccgaauggaa

SEQ ID NO: 1401976 - RNA, 19 nt, Artificial Sequence
  Description of Artificial Sequence: Synthetic oligonucleotide
accucucuggcuugccguu

SEQ ID NO: 1401977 - RNA, 19 nt, Artificial Sequence
  Description of Artificial Sequence: Synthetic oligonucleotide
ggaggugacucggccagcc

SEQ ID NO: 1401978 - RNA, 19 nt, Artificial Sequence
  Description of Artificial Sequence: Synthetic oligonucleotide
auggcuuaacugagucugu

SEQ ID NO: 1401979 - RNA, 19 nt, Artificial Sequence
  Description of Artificial Sequence: Synthetic oligonucleotide
cugcucugucuaacaccag

SEQ ID NO: 1401980 - RNA, 19 nt, Artificial Sequence
  Description of Artificial Sequence: Synthetic oligonucleotide
uaccgugcagaagggcuau

SEQ ID NO: 1401981 - RNA, 19 nt, Artificial Sequence
  Description of Artificial Sequence: Synthetic oligonucleotide
ccagaagggcucccaagac

SEQ ID NO: 1401982 - RNA, 19 nt, Artificial Sequence
  Description of Artificial Sequence: Synthetic oligonucleotide
cucacgucaagggugaauu

SEQ ID NO: 1401983 - RNA, 19 nt, Artificial Sequence
  Description of Artificial Sequence: Synthetic oligonucleotide
caaugguuucagggcgcag

SEQ ID NO: 1401984 - RNA, 19 nt, Artificial Sequence
  Description of Artificial Sequence: Synthetic oligonucleotide
gugaaccccuggcaaucuc

SEQ ID NO: 1401985 - RNA, 19 nt, Artificial Sequence
  Description of Artificial Sequence: Synthetic oligonucleotide
agauuauguugugcucuuu

SEQ ID NO: 1401986 - RNA, 19 nt, Artificial Sequence
  Description of Artificial Sequence: Synthetic oligonucleotide
gaacccagucaauggcuau

SEQ ID NO: 1401987 - RNA, 19 nt, Artificial Sequence
  Description of Artificial Sequence: Synthetic oligonucleotide
cuuuaggguucugauuugu

SEQ ID NO: 1401988 - RNA, 19 nt, Artificial Sequence
  Description of Artificial Sequence: Synthetic oligonucleotide
acaugacgagucugaucuu

SEQ ID NO: 1401989 - RNA, 19 nt, Artificial Sequence
  Description of Artificial Sequence: Synthetic oligonucleotide
cgcacgguuggcugguugg

SEQ ID NO: 1401990 - RNA, 19 nt, Artificial Sequence
  Description of Artificial Sequence: Synthetic oligonucleotide
ucggccagcccagcucuga

SEQ ID NO: 1401991 - RNA, 19 nt, Artificial Sequence
  Description of Artificial Sequence: Synthetic oligonucleotide
cucggcgaugaagacccuc

SEQ ID NO: 1401992 - RNA, 19 nt, Artificial Sequence
  Description of Artificial Sequence: Synthetic oligonucleotide
cuaaugcuaaaugccuagu

SEQ ID NO: 1401993 - RNA, 19 nt, Artificial Sequence
  Description of Artificial Sequence: Synthetic oligonucleotide
ugcgacccgcagccagucu

SEQ ID NO: 1401994 - RNA, 19 nt, Artificial Sequence
  Description of Artificial Sequence: Synthetic oligonucleotide
ccgaauggaauuggccacc

SEQ ID NO: 1401995 - RNA, 19 nt, Artificial Sequence
  Description of Artificial Sequence: Synthetic oligonucleotide
gcuguaguccagagccuag

SEQ ID NO: 1401996 - RNA, 19 nt, Artificial Sequence
  Description of Artificial Sequence: Synthetic oligonucleotide
cccuccgaauggaauuggc

SEQ ID NO: 1401997 - RNA, 19 nt, Artificial Sequence
  Description of Artificial Sequence: Synthetic oligonucleotide
gugccuaagugcguugucu

SEQ ID NO: 1401998 - RNA, 19 nt, Artificial Sequence
  Description of Artificial Sequence: Synthetic oligonucleotide
cuaagugcguugucuggau

SEQ ID NO: 1401999 - RNA, 19 nt, Artificial Sequence
  Description of Artificial Sequence: Synthetic oligonucleotide
ggcccagaucgagagggag

SEQ ID NO: 1402000 - RNA, 19 nt, Artificial Sequence
  Description of Artificial Sequence: Synthetic oligonucleotide
uggggucauuaucccgguu

SEQ ID NO: 1402001 - RNA, 19 nt, Artificial Sequence
  Description of Artificial Sequence: Synthetic oligonucleotide
guaacaugacgagucugau

SEQ ID NO: 1402002 - RNA, 19 nt, Artificial Sequence
  Description of Artificial Sequence: Synthetic oligonucleotide
agccugugacucguccuca

SEQ ID NO: 1402003 - RNA, 19 nt, Artificial Sequence
  Description of Artificial Sequence: Synthetic oligonucleotide
agcuaccccugcagugggg

SEQ ID NO: 1402004 - RNA, 19 nt, Artificial Sequence
  Description of Artificial Sequence: Synthetic oligonucleotide
uugcgacccgcagccaguc

SEQ ID NO: 1402005 - RNA, 19 nt, Artificial Sequence
  Description of Artificial Sequence: Synthetic oligonucleotide
gcgacccgcagccagucuc

SEQ ID NO: 1402006 - RNA, 19 nt, Artificial Sequence
  Description of Artificial Sequence: Synthetic oligonucleotide
cauuuguggcaggaugaua

SEQ ID NO: 1402007 - RNA, 19 nt, Artificial Sequence
  Description of Artificial Sequence: Synthetic oligonucleotide
ccuaagugcguugucugga

SEQ ID NO: 1402008 - RNA, 19 nt, Artificial Sequence
  Description of Artificial Sequence: Synthetic oligonucleotide
ggcagaacucuucgcacgu

SEQ ID NO: 1402009 - RNA, 19 nt, Artificial Sequence
  Description of Artificial Sequence: Synthetic oligonucleotide
cagcgggugagcuaugguu

SEQ ID NO: 1402010 - RNA, 19 nt, Artificial Sequence
  Description of Artificial Sequence: Synthetic oligonucleotide
accgugcagaagggcuauc

SEQ ID NO: 1402011 - RNA, 19 nt, Artificial Sequence
  Description of Artificial Sequence: Synthetic oligonucleotide
uccucaggcuugggauaca

SEQ ID NO: 1402012 - RNA, 19 nt, Artificial Sequence
  Description of Artificial Sequence: Synthetic oligonucleotide
uggcuauuaugggcaccuc

SEQ ID NO: 1402013 - RNA, 19 nt, Artificial Sequence
  Description of Artificial Sequence: Synthetic oligonucleotide
cgaugacgcaugaaggaga

SEQ ID NO: 1402014 - RNA, 19 nt, Artificial Sequence
  Description of Artificial Sequence: Synthetic oligonucleotide
auccgcacgguuggcuggu

SEQ ID NO: 1402015 - RNA, 19 nt, Artificial Sequence
  Description of Artificial Sequence: Synthetic oligonucleotide
gacgcaugaaggagauuau

SEQ ID NO: 1402016 - RNA, 19 nt, Artificial Sequence
  Description of Artificial Sequence: Synthetic oligonucleotide
gccguuggggucauaggga

SEQ ID NO: 1402017 - RNA, 19 nt, Artificial Sequence
  Description of Artificial Sequence: Synthetic oligonucleotide
caagaccguagaccuugaa

SEQ ID NO: 1402018 - RNA, 19 nt, Artificial Sequence
  Description of Artificial Sequence: Synthetic oligonucleotide
guacggcauugcgacccgc

SEQ ID NO: 1402019 - RNA, 19 nt, Artificial Sequence
  Description of Artificial Sequence: Synthetic oligonucleotide
ggcguacggcauugcgacc

SEQ ID NO: 1402020 - RNA, 19 nt, Artificial Sequence
  Description of Artificial Sequence: Synthetic oligonucleotide
ggguucugauuugugggaa

SEQ ID NO: 1402021 - RNA, 19 nt, Artificial Sequence
  Description of Artificial Sequence: Synthetic oligonucleotide
gcaaucucuccggugacgu

SEQ ID NO: 1402022 - RNA, 19 nt, Artificial Sequence
  Description of Artificial Sequence: Synthetic oligonucleotide
accgugugccuaagugcgu

SEQ ID NO: 1402023 - RNA, 19 nt, Artificial Sequence
  Description of Artificial Sequence: Synthetic oligonucleotide
ccuuguaaauaaccacugu

SEQ ID NO: 1402024 - RNA, 19 nt, Artificial Sequence
  Description of Artificial Sequence: Synthetic oligonucleotide
gugugccuaagugcguugu

SEQ ID NO: 1402025 - RNA, 19 nt, Artificial Sequence
  Description of Artificial Sequence: Synthetic oligonucleotide
gcacgguuggcugguuggc

SEQ ID NO: 1402026 - RNA, 19 nt, Artificial Sequence
  Description of Artificial Sequence: Synthetic oligonucleotide
gggcgcagugagccacagg

SEQ ID NO: 1402027 - RNA, 19 nt, Artificial Sequence
  Description of Artificial Sequence: Synthetic oligonucleotide
ccgagccagucccgcagcg

SEQ ID NO: 1402028 - RNA, 19 nt, Artificial Sequence
  Description of Artificial Sequence: Synthetic oligonucleotide
gcaucaaucugaacccagu

SEQ ID NO: 1402029 - RNA, 19 nt, Artificial Sequence
  Description of Artificial Sequence: Synthetic oligonucleotide
cagucccgcagcgcgccug

SEQ ID NO: 1402030 - RNA, 19 nt, Artificial Sequence
  Description of Artificial Sequence: Synthetic oligonucleotide
ggugagcuaugguuaguuu

SEQ ID NO: 1402031 - RNA, 19 nt, Artificial Sequence
  Description of Artificial Sequence: Synthetic oligonucleotide
cguacggcauugcgacccg

SEQ ID NO: 1402032 - RNA, 19 nt, Artificial Sequence
  Description of Artificial Sequence: Synthetic oligonucleotide
caccgccagguccguguuc

SEQ ID NO: 1402033 - RNA, 19 nt, Artificial Sequence
  Description of Artificial Sequence: Synthetic oligonucleotide
cugcagcgggugagcuaug

SEQ ID NO: 1402034 - RNA, 19 nt, Artificial Sequence
  Description of Artificial Sequence: Synthetic oligonucleotide
augacgcaugaaggagauu

SEQ ID NO: 1402035 - RNA, 19 nt, Artificial Sequence
  Description of Artificial Sequence: Synthetic oligonucleotide
cgugugccuaagugcguug

SEQ ID NO: 1402036 - RNA, 19 nt, Artificial Sequence
  Description of Artificial Sequence: Synthetic oligonucleotide
cggugaguuccgugauccg

SEQ ID NO: 1402037 - RNA, 19 nt, Artificial Sequence
  Description of Artificial Sequence: Synthetic oligonucleotide
cgccagguccguguucucg

SEQ ID NO: 1402038 - RNA, 19 nt, Artificial Sequence
  Description of Artificial Sequence: Synthetic oligonucleotide
cugguuggcguacggcauu

SEQ ID NO: 1402039 - RNA, 19 nt, Artificial Sequence
  Description of Artificial Sequence: Synthetic oligonucleotide
gcauaggcucgaagucuca

SEQ ID NO: 1402040 - RNA, 19 nt, Artificial Sequence
  Description of Artificial Sequence: Synthetic oligonucleotide
gggauacaccgugugccua

SEQ ID NO: 1402041 - RNA, 19 nt, Artificial Sequence
  Description of Artificial Sequence: Synthetic oligonucleotide
gggaucaauccaagccugu

SEQ ID NO: 1402042 - RNA, 19 nt, Artificial Sequence
  Description of Artificial Sequence: Synthetic oligonucleotide
ccaagaccguagaccuuga

SEQ ID NO: 1402043 - RNA, 19 nt, Artificial Sequence
  Description of Artificial Sequence: Synthetic oligonucleotide
ccgcacgguuggcugguug

SEQ ID NO: 1402044 - RNA, 19 nt, Artificial Sequence
  Description of Artificial Sequence: Synthetic oligonucleotide
gugcguugucuggaucaua

SEQ ID NO: 1402045 - RNA, 19 nt, Artificial Sequence
  Description of Artificial Sequence: Synthetic oligonucleotide
ccaguucggaguacucacu

SEQ ID NO: 1402046 - RNA, 19 nt, Artificial Sequence
  Description of Artificial Sequence: Synthetic oligonucleotide
cgcacgugcagucccggga

SEQ ID NO: 1402047 - RNA, 19 nt, Artificial Sequence
  Description of Artificial Sequence: Synthetic oligonucleotide
accucacgucaagggugaa

SEQ ID NO: 1402048 - RNA, 19 nt, Artificial Sequence
  Description of Artificial Sequence: Synthetic oligonucleotide
cagcacgaugacgcaugaa

SEQ ID NO: 1402049 - RNA, 19 nt, Artificial Sequence
  Description of Artificial Sequence: Synthetic oligonucleotide
ggggucauagggagccugu

SEQ ID NO: 1402050 - RNA, 19 nt, Artificial Sequence
  Description of Artificial Sequence: Synthetic oligonucleotide
gcugguuggcguacggcau

SEQ ID NO: 1402051 - RNA, 19 nt, Artificial Sequence
  Description of Artificial Sequence: Synthetic oligonucleotide
gcucaguuagcagcacgau

SEQ ID NO: 1402052 - RNA, 19 nt, Artificial Sequence
  Description of Artificial Sequence: Synthetic oligonucleotide
cgugauccgcacgguuggc

SEQ ID NO: 1402053 - RNA, 19 nt, Artificial Sequence
  Description of Artificial Sequence: Synthetic oligonucleotide
cccugcagugggguuccac

SEQ ID NO: 1402054 - RNA, 19 nt, Artificial Sequence
  Description of Artificial Sequence: Synthetic oligonucleotide
cuaccccugcagugggguu

SEQ ID NO: 1402055 - RNA, 19 nt, Artificial Sequence
  Description of Artificial Sequence: Synthetic oligonucleotide
ccgggaugucaccggaaua

SEQ ID NO: 1402056 - RNA, 19 nt, Artificial Sequence
  Description of Artificial Sequence: Synthetic oligonucleotide
ccguguucucgaugaugaa

SEQ ID NO: 1402057 - RNA, 19 nt, Artificial Sequence
  Description of Artificial Sequence: Synthetic oligonucleotide
ccuaagcaaugagcaccca

SEQ ID NO: 1402058 - RNA, 19 nt, Artificial Sequence
  Description of Artificial Sequence: Synthetic oligonucleotide
gguccguguucucgaugau

SEQ ID NO: 1402059 - RNA, 19 nt, Artificial Sequence
  Description of Artificial Sequence: Synthetic oligonucleotide
gcauugcgacccgcagcca

SEQ ID NO: 1402060 - RNA, 19 nt, Artificial Sequence
  Description of Artificial Sequence: Synthetic oligonucleotide
gcguugucuggaucauauu

SEQ ID NO: 1402061 - RNA, 19 nt, Artificial Sequence
  Description of Artificial Sequence: Synthetic oligonucleotide
ccucacgucaagggugaau

SEQ ID NO: 1402062 - RNA, 19 nt, Artificial Sequence
  Description of Artificial Sequence: Synthetic oligonucleotide
ccagguccguguucucgau

SEQ ID NO: 1402063 - RNA, 19 nt, Artificial Sequence
  Description of Artificial Sequence: Synthetic oligonucleotide
cguagaccuugaacccagu

SEQ ID NO: 1402064 - RNA, 19 nt, Artificial Sequence
  Description of Artificial Sequence: Synthetic oligonucleotide
ccgugugccuaagugcguu

SEQ ID NO: 1402065 - RNA, 19 nt, Artificial Sequence
  Description of Artificial Sequence: Synthetic oligonucleotide
ccucggcgaugaagacccu

SEQ ID NO: 1402066 - RNA, 19 nt, Artificial Sequence
  Description of Artificial Sequence: Synthetic oligonucleotide
ggcuugccguuggggucau

SEQ ID NO: 1402067 - RNA, 19 nt, Artificial Sequence
  Description of Artificial Sequence: Synthetic oligonucleotide
gcuugccguuggggucaua

SEQ ID NO: 1402068 - RNA, 19 nt, Artificial Sequence
  Description of Artificial Sequence: Synthetic oligonucleotide
aguacuguagguuagacuc

SEQ ID NO: 1402069 - RNA, 19 nt, Artificial Sequence
  Description of Artificial Sequence: Synthetic oligonucleotide
ugacuuaugaacaggaagg

SEQ ID NO: 1402070 - RNA, 19 nt, Artificial Sequence
  Description of Artificial Sequence: Synthetic oligonucleotide
gauaccauaagauuagaag

SEQ ID NO: 1402071 - RNA, 19 nt, Artificial Sequence
  Description of Artificial Sequence: Synthetic oligonucleotide
cuuaugaacaggaaggagg

SEQ ID NO: 1402072 - RNA, 19 nt, Artificial Sequence
  Description of Artificial Sequence: Synthetic oligonucleotide
auuaccaucaccuuucaag

SEQ ID NO: 1402073 - RNA, 19 nt, Artificial Sequence
  Description of Artificial Sequence: Synthetic oligonucleotide
ugaaugaugaccuucccag

SEQ ID NO: 1402074 - RNA, 19 nt, Artificial Sequence
  Description of Artificial Sequence: Synthetic oligonucleotide
uguacuggcauuuggagag

SEQ ID NO: 1402075 - RNA, 19 nt, Artificial Sequence
  Description of Artificial Sequence: Synthetic oligonucleotide
aaggcaaagucucaugcgg

SEQ ID NO: 1402076 - RNA, 19 nt, Artificial Sequence
  Description of Artificial Sequence: Synthetic oligonucleotide
aaaaggguuugguaacccc

SEQ ID NO: 1402077 - RNA, 19 nt, Artificial Sequence
  Description of Artificial Sequence: Synthetic oligonucleotide
uuggacauuaccaucaccu

SEQ ID NO: 1402078 - RNA, 19 nt, Artificial Sequence
  Description of Artificial Sequence: Synthetic oligonucleotide
auuagaagaacgguuaggg

SEQ ID NO: 1402079 - RNA, 19 nt, Artificial Sequence
  Description of Artificial Sequence: Synthetic oligonucleotide
aacgguuagggaaaggccc

SEQ ID NO: 1402080 - RNA, 19 nt, Artificial Sequence
  Description of Artificial Sequence: Synthetic oligonucleotide
ucucaugcggagcagaugc

SEQ ID NO: 1402081 - RNA, 19 nt, Artificial Sequence
  Description of Artificial Sequence: Synthetic oligonucleotide
agaacgguuagggaaaggc

SEQ ID NO: 1402082 - RNA, 19 nt, Artificial Sequence
  Description of Artificial Sequence: Synthetic oligonucleotide
uuuggagagaccauuccug

SEQ ID NO: 1402083 - RNA, 19 nt, Artificial Sequence
  Description of Artificial Sequence: Synthetic oligonucleotide
uacacaccgaacucgaucc

SEQ ID NO: 1402084 - RNA, 19 nt, Artificial Sequence
  Description of Artificial Sequence: Synthetic oligonucleotide
uaagauuagaagaacgguu

SEQ ID NO: 1402085 - RNA, 19 nt, Artificial Sequence
  Description of Artificial Sequence: Synthetic oligonucleotide
guagguuagacucccaaag

SEQ ID NO: 1402086 - RNA, 19 nt, Artificial Sequence
  Description of Artificial Sequence: Synthetic oligonucleotide
ucaccuuucaaguucagaa

SEQ ID NO: 1402087 - RNA, 19 nt, Artificial Sequence
  Description of Artificial Sequence: Synthetic oligonucleotide
aaaucugggucagauuucg

SEQ ID NO: 1402088 - RNA, 19 nt, Artificial Sequence
  Description of Artificial Sequence: Synthetic oligonucleotide
gugacuuaugaacaggaag

SEQ ID NO: 1402089 - RNA, 19 nt, Artificial Sequence
  Description of Artificial Sequence: Synthetic oligonucleotide
gaugugauuuuguacuggc

SEQ ID NO: 1402090 - RNA, 19 nt, Artificial Sequence
  Description of Artificial Sequence: Synthetic oligonucleotide
ugggauuuuggacauuacc

SEQ ID NO: 1402091 - RNA, 19 nt, Artificial Sequence
  Description of Artificial Sequence: Synthetic oligonucleotide
uugguaaccccugaggccg

SEQ ID NO: 1402092 - RNA, 19 nt, Artificial Sequence
  Description of Artificial Sequence: Synthetic oligonucleotide
gaaggcaaagucucaugcg

SEQ ID NO: 1402093 - RNA, 19 nt, Artificial Sequence
  Description of Artificial Sequence: Synthetic oligonucleotide
cugagugucguucacauuc

SEQ ID NO: 1402094 - RNA, 19 nt, Artificial Sequence
  Description of Artificial Sequence: Synthetic oligonucleotide
cuuucaaccagcaccacuc

SEQ ID NO: 1402095 - RNA, 19 nt, Artificial Sequence
  Description of Artificial Sequence: Synthetic oligonucleotide
caauagugagccaagggac

SEQ ID NO: 1402096 - RNA, 19 nt, Artificial Sequence
  Description of Artificial Sequence: Synthetic oligonucleotide
guuugguaaccccugaggc

SEQ ID NO: 1402097 - RNA, 19 nt, Artificial Sequence
  Description of Artificial Sequence: Synthetic oligonucleotide
uccguagcacuucuuaaag

SEQ ID NO: 1402098 - RNA, 19 nt, Artificial Sequence
  Description of Artificial Sequence: Synthetic oligonucleotide
gauuagaagaacgguuagg

SEQ ID NO: 1402099 - RNA, 19 nt, Artificial Sequence
  Description of Artificial Sequence: Synthetic oligonucleotide
gauugccagaguccgaucc

SEQ ID NO: 1402100 - RNA, 19 nt, Artificial Sequence
  Description of Artificial Sequence: Synthetic oligonucleotide
ucgaguuggacucccacug

SEQ ID NO: 1402101 - RNA, 19 nt, Artificial Sequence
  Description of Artificial Sequence: Synthetic oligonucleotide
caauagacggugcaggaag

SEQ ID NO: 1402102 - RNA, 19 nt, Artificial Sequence
  Description of Artificial Sequence: Synthetic oligonucleotide
aauagacggugcaggaagc

SEQ ID NO: 1402103 - RNA, 19 nt, Artificial Sequence
  Description of Artificial Sequence: Synthetic oligonucleotide
gaguuggcaauagugagcc

SEQ ID NO: 1402104 - RNA, 19 nt, Artificial Sequence
  Description of Artificial Sequence: Synthetic oligonucleotide
agugggacauaccuccugg

SEQ ID NO: 1402105 - RNA, 19 nt, Artificial Sequence
  Description of Artificial Sequence: Synthetic oligonucleotide
auggaugucgagcccaagg

SEQ ID NO: 1402106 - RNA, 19 nt, Artificial Sequence
  Description of Artificial Sequence: Synthetic oligonucleotide
cauuccaucauguggcuug

SEQ ID NO: 1402107 - RNA, 19 nt, Artificial Sequence
  Description of Artificial Sequence: Synthetic oligonucleotide
ugauuuccguuccuuguag

SEQ ID NO: 1402108 - RNA, 19 nt, Artificial Sequence
  Description of Artificial Sequence: Synthetic oligonucleotide
uugcagauugcacacugug

SEQ ID NO: 1402109 - RNA, 19 nt, Artificial Sequence
  Description of Artificial Sequence: Synthetic oligonucleotide
agcgguagaggaucucucc

SEQ ID NO: 1402110 - RNA, 19 nt, Artificial Sequence
  Description of Artificial Sequence: Synthetic oligonucleotide
uuaaugggucgauugccag

SEQ ID NO: 1402111 - RNA, 19 nt, Artificial Sequence
  Description of Artificial Sequence: Synthetic oligonucleotide
auaagauuagaagaacggu

SEQ ID NO: 1402112 - RNA, 19 nt, Artificial Sequence
  Description of Artificial Sequence: Synthetic oligonucleotide
aaguucagaaggugcucuc

SEQ ID NO: 1402113 - RNA, 19 nt, Artificial Sequence
  Description of Artificial Sequence: Synthetic oligonucleotide
accauaagauuagaagaac

SEQ ID NO: 1402114 - RNA, 19 nt, Artificial Sequence
  Description of Artificial Sequence: Synthetic oligonucleotide
acggacuucacuccggcag

SEQ ID NO: 1402115 - RNA, 19 nt, Artificial Sequence
  Description of Artificial Sequence: Synthetic oligonucleotide
aagauuagaagaacgguua

SEQ ID NO: 1402116 - RNA, 19 nt, Artificial Sequence
  Description of Artificial Sequence: Synthetic oligonucleotide
ugguucaaggacaacuccu

SEQ ID NO: 1402117 - RNA, 19 nt, Artificial Sequence
  Description of Artificial Sequence: Synthetic oligonucleotide
aucuguagcuaccguggcc

SEQ ID NO: 1402118 - RNA, 19 nt, Artificial Sequence
  Description of Artificial Sequence: Synthetic oligonucleotide
uuagaagaacgguuaggga

SEQ ID NO: 1402119 - RNA, 19 nt, Artificial Sequence
  Description of Artificial Sequence: Synthetic oligonucleotide
ugcucuuucucgcuucgag

SEQ ID NO: 1402120 - RNA, 19 nt, Artificial Sequence
  Description of Artificial Sequence: Synthetic oligonucleotide
gaagacucuccccaaggug

SEQ ID NO: 1402121 - RNA, 19 nt, Artificial Sequence
  Description of Artificial Sequence: Synthetic oligonucleotide
auuuuggacauuaccauca

SEQ ID NO: 1402122 - RNA, 19 nt, Artificial Sequence
  Description of Artificial Sequence: Synthetic oligonucleotide
ugaugugauuuuguacugg

SEQ ID NO: 1402123 - RNA, 19 nt, Artificial Sequence
  Description of Artificial Sequence: Synthetic oligonucleotide
ugaagcugggguaucgacu

SEQ ID NO: 1402124 - RNA, 19 nt, Artificial Sequence
  Description of Artificial Sequence: Synthetic oligonucleotide
ccauaagauuagaagaacg

SEQ ID NO: 1402125 - RNA, 19 nt, Artificial Sequence
  Description of Artificial Sequence: Synthetic oligonucleotide
aaagcggagcucuucugga

SEQ ID NO: 1402126 - RNA, 19 nt, Artificial Sequence
  Description of Artificial Sequence: Synthetic oligonucleotide
cucgcuucgaguuggacuc

SEQ ID NO: 1402127 - RNA, 19 nt, Artificial Sequence
  Description of Artificial Sequence: Synthetic oligonucleotide
caaagcggagcucuucugg

SEQ ID NO: 1402128 - RNA, 19 nt, Artificial Sequence
  Description of Artificial Sequence: Synthetic oligonucleotide
gacauuaccaucaccuuuc

SEQ ID NO: 1402129 - RNA, 19 nt, Artificial Sequence
  Description of Artificial Sequence: Synthetic oligonucleotide
uggaugucgagcccaaggu

SEQ ID NO: 1402130 - RNA, 19 nt, Artificial Sequence
  Description of Artificial Sequence: Synthetic oligonucleotide
gaacuuuccaccaccagca

SEQ ID NO: 1402131 - RNA, 19 nt, Artificial Sequence
  Description of Artificial Sequence: Synthetic oligonucleotide
ucugaaucacuggggauag

SEQ ID NO: 1402132 - RNA, 19 nt, Artificial Sequence
  Description of Artificial Sequence: Synthetic oligonucleotide
agccuuaaugggucgauug

SEQ ID NO: 1402133 - RNA, 19 nt, Artificial Sequence
  Description of Artificial Sequence: Synthetic oligonucleotide
ggaacuuuccaccaccagc

SEQ ID NO: 1402134 - RNA, 19 nt, Artificial Sequence
  Description of Artificial Sequence: Synthetic oligonucleotide
gaagggaaggcaaagucuc

SEQ ID NO: 1402135 - RNA, 19 nt, Artificial Sequence
  Description of Artificial Sequence: Synthetic oligonucleotide
accacuccaugccugacag

SEQ ID NO: 1402136 - RNA, 19 nt, Artificial Sequence
  Description of Artificial Sequence: Synthetic oligonucleotide
ucucgcuucgaguuggacu

SEQ ID NO: 1402137 - RNA, 19 nt, Artificial Sequence
  Description of Artificial Sequence: Synthetic oligonucleotide
aauagugagccaagggacu

SEQ ID NO: 1402138 - RNA, 19 nt, Artificial Sequence
  Description of Artificial Sequence: Synthetic oligonucleotide
ucaaccagcaccacuccau

SEQ ID NO: 1402139 - RNA, 19 nt, Artificial Sequence
  Description of Artificial Sequence: Synthetic oligonucleotide
ucucucagaccccagcggu

SEQ ID NO: 1402140 - RNA, 19 nt, Artificial Sequence
  Description of Artificial Sequence: Synthetic oligonucleotide
ugaaaaggcuaaugcuggc

SEQ ID NO: 1402141 - RNA, 19 nt, Artificial Sequence
  Description of Artificial Sequence: Synthetic oligonucleotide
uuuaucaugcuggucgcgu

SEQ ID NO: 1402142 - RNA, 19 nt, Artificial Sequence
  Description of Artificial Sequence: Synthetic oligonucleotide
uucaguauguacagcucuc

SEQ ID NO: 1402143 - RNA, 19 nt, Artificial Sequence
  Description of Artificial Sequence: Synthetic oligonucleotide
uguagguuagacucccaaa

SEQ ID NO: 1402144 - RNA, 19 nt, Artificial Sequence
  Description of Artificial Sequence: Synthetic oligonucleotide
ucugacacgucuccugagu

SEQ ID NO: 1402145 - RNA, 19 nt, Artificial Sequence
  Description of Artificial Sequence: Synthetic oligonucleotide
ugugacagucugaaucacu

SEQ ID NO: 1402146 - RNA, 19 nt, Artificial Sequence
  Description of Artificial Sequence: Synthetic oligonucleotide
uccgaaaccauuccaucau

SEQ ID NO: 1402147 - RNA, 19 nt, Artificial Sequence
  Description of Artificial Sequence: Synthetic oligonucleotide
ugcuauguuccagccaccg

SEQ ID NO: 1402148 - RNA, 19 nt, Artificial Sequence
  Description of Artificial Sequence: Synthetic oligonucleotide
ugccugacagccauacuga

SEQ ID NO: 1402149 - RNA, 19 nt, Artificial Sequence
  Description of Artificial Sequence: Synthetic oligonucleotide
gugucguucacauucagua

SEQ ID NO: 1402150 - RNA, 19 nt, Artificial Sequence
  Description of Artificial Sequence: Synthetic oligonucleotide
ugaaagcauccacugugga

SEQ ID NO: 1402151 - RNA, 19 nt, Artificial Sequence
  Description of Artificial Sequence: Synthetic oligonucleotide
ucuuucucgcuucgaguug

SEQ ID NO: 1402152 - RNA, 19 nt, Artificial Sequence
  Description of Artificial Sequence: Synthetic oligonucleotide
ucgacugugggauaccaua

SEQ ID NO: 1402153 - RNA, 19 nt, Artificial Sequence
  Description of Artificial Sequence: Synthetic oligonucleotide
uuccguuccuuguaguaga

SEQ ID NO: 1402154 - RNA, 19 nt, Artificial Sequence
  Description of Artificial Sequence: Synthetic oligonucleotide
uuuuaucaugcuggucgcg

SEQ ID NO: 1402155 - RNA, 19 nt, Artificial Sequence
  Description of Artificial Sequence: Synthetic oligonucleotide
uccaucauguggcuuguau

SEQ ID NO: 1402156 - RNA, 19 nt, Artificial Sequence
  Description of Artificial Sequence: Synthetic oligonucleotide
aucauguggcuuguauggc

SEQ ID NO: 1402157 - RNA, 19 nt, Artificial Sequence
  Description of Artificial Sequence: Synthetic oligonucleotide
cucgaucccuuugugaggg

SEQ ID NO: 1402158 - RNA, 19 nt, Artificial Sequence
  Description of Artificial Sequence: Synthetic oligonucleotide
uugauuuccguuccuugua

SEQ ID NO: 1402159 - RNA, 19 nt, Artificial Sequence
  Description of Artificial Sequence: Synthetic oligonucleotide
agccauacugaagggaagg

SEQ ID NO: 1402160 - RNA, 19 nt, Artificial Sequence
  Description of Artificial Sequence: Synthetic oligonucleotide
uguggacucaauagacggu

SEQ ID NO: 1402161 - RNA, 19 nt, Artificial Sequence
  Description of Artificial Sequence: Synthetic oligonucleotide
agaguccgauccuucccgc

SEQ ID NO: 1402162 - RNA, 19 nt, Artificial Sequence
  Description of Artificial Sequence: Synthetic oligonucleotide
gaacgguuagggaaaggcc

SEQ ID NO: 1402163 - RNA, 19 nt, Artificial Sequence
  Description of Artificial Sequence: Synthetic oligonucleotide
cuuucucgcuucgaguugg

SEQ ID NO: 1402164 - RNA, 19 nt, Artificial Sequence
  Description of Artificial Sequence: Synthetic oligonucleotide
ugagugucguucacauuca

SEQ ID NO: 1402165 - RNA, 19 nt, Artificial Sequence
  Description of Artificial Sequence: Synthetic oligonucleotide
cguuccuuguaguagaagg

SEQ ID NO: 1402166 - RNA, 19 nt, Artificial Sequence
  Description of Artificial Sequence: Synthetic oligonucleotide
gacucaauagacggugcag

SEQ ID NO: 1402167 - RNA, 19 nt, Artificial Sequence
  Description of Artificial Sequence: Synthetic oligonucleotide
ugggucgauugccagaguc

SEQ ID NO: 1402168 - RNA, 19 nt, Artificial Sequence
  Description of Artificial Sequence: Synthetic oligonucleotide
ggcaauagugagccaaggg

SEQ ID NO: 1402169 - RNA, 19 nt, Artificial Sequence
  Description of Artificial Sequence: Synthetic oligonucleotide
aagcggagcucuucuggag

SEQ ID NO: 1402170 - RNA, 19 nt, Artificial Sequence
  Description of Artificial Sequence: Synthetic oligonucleotide
aguggcugcaguacacacc

SEQ ID NO: 1402171 - RNA, 19 nt, Artificial Sequence
  Description of Artificial Sequence: Synthetic oligonucleotide
uucggaccaaggcaaagau

SEQ ID NO: 1402172 - RNA, 19 nt, Artificial Sequence
  Description of Artificial Sequence: Synthetic oligonucleotide
acucgaucccuuugugagg

SEQ ID NO: 1402173 - RNA, 19 nt, Artificial Sequence
  Description of Artificial Sequence: Synthetic oligonucleotide
uacuguagguuagacuccc

SEQ ID NO: 1402174 - RNA, 19 nt, Artificial Sequence
  Description of Artificial Sequence: Synthetic oligonucleotide
uucgaguuggacucccacu

SEQ ID NO: 1402175 - RNA, 19 nt, Artificial Sequence
  Description of Artificial Sequence: Synthetic oligonucleotide
gguuagacucccaaagcgg

SEQ ID NO: 1402176 - RNA, 19 nt, Artificial Sequence
  Description of Artificial Sequence: Synthetic oligonucleotide
cccaaauggaugucgagcc

SEQ ID NO: 1402177 - RNA, 19 nt, Artificial Sequence
  Description of Artificial Sequence: Synthetic oligonucleotide
uuucggaccaaggcaaaga

SEQ ID NO: 1402178 - RNA, 19 nt, Artificial Sequence
  Description of Artificial Sequence: Synthetic oligonucleotide
uggacucaauagacggugc

SEQ ID NO: 1402179 - RNA, 19 nt, Artificial Sequence
  Description of Artificial Sequence: Synthetic oligonucleotide
uggacgagauccuuccuuc

SEQ ID NO: 1402180 - RNA, 19 nt, Artificial Sequence
  Description of Artificial Sequence: Synthetic oligonucleotide
agcauuuuauggcguccuc

SEQ ID NO: 1402181 - RNA, 19 nt, Artificial Sequence
  Description of Artificial Sequence: Synthetic oligonucleotide
caaagucucaugcggagca

SEQ ID NO: 1402182 - RNA, 19 nt, Artificial Sequence
  Description of Artificial Sequence: Synthetic oligonucleotide
gggauuuuggacauuacca

SEQ ID NO: 1402183 - RNA, 19 nt, Artificial Sequence
  Description of Artificial Sequence: Synthetic oligonucleotide
agcgaccaaaccuggacga

SEQ ID NO: 1402184 - RNA, 19 nt, Artificial Sequence
  Description of Artificial Sequence: Synthetic oligonucleotide
aggacacaaacuucagcga

SEQ ID NO: 1402185 - RNA, 19 nt, Artificial Sequence
  Description of Artificial Sequence: Synthetic oligonucleotide
uguaguacuguagguuaga

SEQ ID NO: 1402186 - RNA, 19 nt, Artificial Sequence
  Description of Artificial Sequence: Synthetic oligonucleotide
guggacucaauagacggug

SEQ ID NO: 1402187 - RNA, 19 nt, Artificial Sequence
  Description of Artificial Sequence: Synthetic oligonucleotide
guacacaccgaacucgauc

SEQ ID NO: 1402188 - RNA, 19 nt, Artificial Sequence
  Description of Artificial Sequence: Synthetic oligonucleotide
acacaccgaacucgauccc

SEQ ID NO: 1402189 - RNA, 19 nt, Artificial Sequence
  Description of Artificial Sequence: Synthetic oligonucleotide
cagcgaccaaaccuggacg

SEQ ID NO: 1402190 - RNA, 19 nt, Artificial Sequence
  Description of Artificial Sequence: Synthetic oligonucleotide
guagaggaucucuccguag

SEQ ID NO: 1402191 - RNA, 19 nt, Artificial Sequence
  Description of Artificial Sequence: Synthetic oligonucleotide
ccaaaccuggacgagaucc

SEQ ID NO: 1402192 - RNA, 19 nt, Artificial Sequence
  Description of Artificial Sequence: Synthetic oligonucleotide
uaucaugcuggucgcguuc

SEQ ID NO: 1402193 - RNA, 19 nt, Artificial Sequence
  Description of Artificial Sequence: Synthetic oligonucleotide
aaggguuugguaaccccug

SEQ ID NO: 1402194 - RNA, 19 nt, Artificial Sequence
  Description of Artificial Sequence: Synthetic oligonucleotide
ucccagcagccuuaauggg

SEQ ID NO: 1402195 - RNA, 19 nt, Artificial Sequence
  Description of Artificial Sequence: Synthetic oligonucleotide
aagaacgguuagggaaagg

SEQ ID NO: 1402196 - RNA, 19 nt, Artificial Sequence
  Description of Artificial Sequence: Synthetic oligonucleotide
auuuccguuccuuguagua

SEQ ID NO: 1402197 - RNA, 19 nt, Artificial Sequence
  Description of Artificial Sequence: Synthetic oligonucleotide
aguuggacucccacuguac

SEQ ID NO: 1402198 - RNA, 19 nt, Artificial Sequence
  Description of Artificial Sequence: Synthetic oligonucleotide
ucuccguagcacuucuuaa

SEQ ID NO: 1402199 - RNA, 19 nt, Artificial Sequence
  Description of Artificial Sequence: Synthetic oligonucleotide
uggguccgaaaccauucca

SEQ ID NO: 1402200 - RNA, 19 nt, Artificial Sequence
  Description of Artificial Sequence: Synthetic oligonucleotide
caaaaggguuugguaaccc

SEQ ID NO: 1402201 - RNA, 19 nt, Artificial Sequence
  Description of Artificial Sequence: Synthetic oligonucleotide
aaaggcccaaaaggguuug

SEQ ID NO: 1402202 - RNA, 19 nt, Artificial Sequence
  Description of Artificial Sequence: Synthetic oligonucleotide
agaagaacgguuagggaaa

SEQ ID NO: 1402203 - RNA, 19 nt, Artificial Sequence
  Description of Artificial Sequence: Synthetic oligonucleotide
agcuaccguggccagcgac

SEQ ID NO: 1402204 - RNA, 19 nt, Artificial Sequence
  Description of Artificial Sequence: Synthetic oligonucleotide
agaggaucucuccguagca

SEQ ID NO: 1402205 - RNA, 19 nt, Artificial Sequence
  Description of Artificial Sequence: Synthetic oligonucleotide
aaccuggacgagauccuuc

SEQ ID NO: 1402206 - RNA, 19 nt, Artificial Sequence
  Description of Artificial Sequence: Synthetic oligonucleotide
gaagaacgguuagggaaag

SEQ ID NO: 1402207 - RNA, 19 nt, Artificial Sequence
  Description of Artificial Sequence: Synthetic oligonucleotide
gauggcacacuggaaugug

SEQ ID NO: 1402208 - RNA, 19 nt, Artificial Sequence
  Description of Artificial Sequence: Synthetic oligonucleotide
guuagacucccaaagcgga

SEQ ID NO: 1402209 - RNA, 19 nt, Artificial Sequence
  Description of Artificial Sequence: Synthetic oligonucleotide
uuccugcuauguuccagcc

SEQ ID NO: 1402210 - RNA, 19 nt, Artificial Sequence
  Description of Artificial Sequence: Synthetic oligonucleotide
uugcacacugugugccacg

SEQ ID NO: 1402211 - RNA, 19 nt, Artificial Sequence
  Description of Artificial Sequence: Synthetic oligonucleotide
cagugacuuaugaacagga

SEQ ID NO: 1402212 - RNA, 19 nt, Artificial Sequence
  Description of Artificial Sequence: Synthetic oligonucleotide
gugggauaccauaagauua

SEQ ID NO: 1402213 - RNA, 19 nt, Artificial Sequence
  Description of Artificial Sequence: Synthetic oligonucleotide
uucugacacgucuccugag

SEQ ID NO: 1402214 - RNA, 19 nt, Artificial Sequence
  Description of Artificial Sequence: Synthetic oligonucleotide
ucaugcggagcagaugcug

SEQ ID NO: 1402215 - RNA, 19 nt, Artificial Sequence
  Description of Artificial Sequence: Synthetic oligonucleotide
uccagcauuuuauggcguc

SEQ ID NO: 1402216 - RNA, 19 nt, Artificial Sequence
  Description of Artificial Sequence: Synthetic oligonucleotide
ggucgauugccagaguccg

SEQ ID NO: 1402217 - RNA, 19 nt, Artificial Sequence
  Description of Artificial Sequence: Synthetic oligonucleotide
gacgagauccuuccuucca

SEQ ID NO: 1402218 - RNA, 19 nt, Artificial Sequence
  Description of Artificial Sequence: Synthetic oligonucleotide
gagauccuuccuuccaaca

SEQ ID NO: 1402219 - RNA, 19 nt, Artificial Sequence
  Description of Artificial Sequence: Synthetic oligonucleotide
guuagggaaaggcccaaaa

SEQ ID NO: 1402220 - RNA, 19 nt, Artificial Sequence
  Description of Artificial Sequence: Synthetic oligonucleotide
gaugucgagcccaaggugu

SEQ ID NO: 1402221 - RNA, 19 nt, Artificial Sequence
  Description of Artificial Sequence: Synthetic oligonucleotide
auuucggaccaaggcaaag

SEQ ID NO: 1402222 - RNA, 19 nt, Artificial Sequence
  Description of Artificial Sequence: Synthetic oligonucleotide
uccuuccuuccaacaagca

SEQ ID NO: 1402223 - RNA, 19 nt, Artificial Sequence
  Description of Artificial Sequence: Synthetic oligonucleotide
guuggacucccacuguaca

SEQ ID NO: 1402224 - RNA, 19 nt, Artificial Sequence
  Description of Artificial Sequence: Synthetic oligonucleotide
gucgcccaaauggaugucg

SEQ ID NO: 1402225 - RNA, 19 nt, Artificial Sequence
  Description of Artificial Sequence: Synthetic oligonucleotide
cugggguaucgacuguggg

SEQ ID NO: 1402226 - RNA, 19 nt, Artificial Sequence
  Description of Artificial Sequence: Synthetic oligonucleotide
uaucgacugugggauacca

SEQ ID NO: 1402227 - RNA, 19 nt, Artificial Sequence
  Description of Artificial Sequence: Synthetic oligonucleotide
aggugaagacauguguucu

SEQ ID NO: 1402228 - RNA, 19 nt, Artificial Sequence
  Description of Artificial Sequence: Synthetic oligonucleotide
acauguguucugucucucu

SEQ ID NO: 1402229 - RNA, 19 nt, Artificial Sequence
  Description of Artificial Sequence: Synthetic oligonucleotide
ucggaccaaggcaaagauc

SEQ ID NO: 1402230 - RNA, 19 nt, Artificial Sequence
  Description of Artificial Sequence: Synthetic oligonucleotide
ugcguauuggcagggucca

SEQ ID NO: 1402231 - RNA, 19 nt, Artificial Sequence
  Description of Artificial Sequence: Synthetic oligonucleotide
ggugaagacauguguucug

SEQ ID NO: 1402232 - RNA, 19 nt, Artificial Sequence
  Description of Artificial Sequence: Synthetic oligonucleotide
cuauguuccagccaccggu

SEQ ID NO: 1402233 - RNA, 19 nt, Artificial Sequence
  Description of Artificial Sequence: Synthetic oligonucleotide
gguguaguacuguagguua

SEQ ID NO: 1402234 - RNA, 19 nt, Artificial Sequence
  Description of Artificial Sequence: Synthetic oligonucleotide
cuuguauggccgccaugcc

SEQ ID NO: 1402235 - RNA, 19 nt, Artificial Sequence
  Description of Artificial Sequence: Synthetic oligonucleotide
aauggaugucgagcccaag

SEQ ID NO: 1402236 - RNA, 19 nt, Artificial Sequence
  Description of Artificial Sequence: Synthetic oligonucleotide
accgaacucgaucccuuug

SEQ ID NO: 1402237 - RNA, 19 nt, Artificial Sequence
  Description of Artificial Sequence: Synthetic oligonucleotide
agcggagcucuucuggaga

SEQ ID NO: 1402238 - RNA, 19 nt, Artificial Sequence
  Description of Artificial Sequence: Synthetic oligonucleotide
aaccccugaggccgggacu

SEQ ID NO: 1402239 - RNA, 19 nt, Artificial Sequence
  Description of Artificial Sequence: Synthetic oligonucleotide
agucugaaucacuggggau

SEQ ID NO: 1402240 - RNA, 19 nt, Artificial Sequence
  Description of Artificial Sequence: Synthetic oligonucleotide
agaccccagcgguagagga

SEQ ID NO: 1402241 - RNA, 19 nt, Artificial Sequence
  Description of Artificial Sequence: Synthetic oligonucleotide
uggacucccacuguacaaa

SEQ ID NO: 1402242 - RNA, 19 nt, Artificial Sequence
  Description of Artificial Sequence: Synthetic oligonucleotide
cuugauuuccguuccuugu

SEQ ID NO: 1402243 - RNA, 19 nt, Artificial Sequence
  Description of Artificial Sequence: Synthetic oligonucleotide
uaaccccugaggccgggac

SEQ ID NO: 1402244 - RNA, 19 nt, Artificial Sequence
  Description of Artificial Sequence: Synthetic oligonucleotide
guaguacuguagguuagac

SEQ ID NO: 1402245 - RNA, 19 nt, Artificial Sequence
  Description of Artificial Sequence: Synthetic oligonucleotide
guguaguacuguagguuag

SEQ ID NO: 1402246 - RNA, 19 nt, Artificial Sequence
  Description of Artificial Sequence: Synthetic oligonucleotide
agacucccaaagcggagcu

SEQ ID NO: 1402247 - RNA, 19 nt, Artificial Sequence
  Description of Artificial Sequence: Synthetic oligonucleotide
caaauggaugucgagccca

SEQ ID NO: 1402248 - RNA, 19 nt, Artificial Sequence
  Description of Artificial Sequence: Synthetic oligonucleotide
ggugcuuuuccccaugaaa

SEQ ID NO: 1402249 - RNA, 19 nt, Artificial Sequence
  Description of Artificial Sequence: Synthetic oligonucleotide
cuggguccgaaaccauucc

SEQ ID NO: 1402250 - RNA, 19 nt, Artificial Sequence
  Description of Artificial Sequence: Synthetic oligonucleotide
aucacuggggauagcccgg

SEQ ID NO: 1402251 - RNA, 19 nt, Artificial Sequence
  Description of Artificial Sequence: Synthetic oligonucleotide
gaggccgcguucuucugac

SEQ ID NO: 1402252 - RNA, 19 nt, Artificial Sequence
  Description of Artificial Sequence: Synthetic oligonucleotide
uuaucaugcuggucgcguu

SEQ ID NO: 1402253 - RNA, 19 nt, Artificial Sequence
  Description of Artificial Sequence: Synthetic oligonucleotide
acgagauccuuccuuccaa

SEQ ID NO: 1402254 - RNA, 19 nt, Artificial Sequence
  Description of Artificial Sequence: Synthetic oligonucleotide
acauuaccaucaccuuuca

SEQ ID NO: 1402255 - RNA, 19 nt, Artificial Sequence
  Description of Artificial Sequence: Synthetic oligonucleotide
guacuguagguuagacucc

SEQ ID NO: 1402256 - RNA, 19 nt, Artificial Sequence
  Description of Artificial Sequence: Synthetic oligonucleotide
gcagaaagccuccuccagc

SEQ ID NO: 1402257 - RNA, 19 nt, Artificial Sequence
  Description of Artificial Sequence: Synthetic oligonucleotide
cagccauacugaagggaag

SEQ ID NO: 1402258 - RNA, 19 nt, Artificial Sequence
  Description of Artificial Sequence: Synthetic oligonucleotide
uggagaagacucuccccaa

SEQ ID NO: 1402259 - RNA, 19 nt, Artificial Sequence
  Description of Artificial Sequence: Synthetic oligonucleotide
aucacggaguuggcaauag

SEQ ID NO: 1402260 - RNA, 19 nt, Artificial Sequence
  Description of Artificial Sequence: Synthetic oligonucleotide
gcgguagaggaucucuccg

SEQ ID NO: 1402261 - RNA, 19 nt, Artificial Sequence
  Description of Artificial Sequence: Synthetic oligonucleotide
gacggugcaggaagcaaac

SEQ ID NO: 1402262 - RNA, 19 nt, Artificial Sequence
  Description of Artificial Sequence: Synthetic oligonucleotide
accaaaccuggacgagauc

SEQ ID NO: 1402263 - RNA, 19 nt, Artificial Sequence
  Description of Artificial Sequence: Synthetic oligonucleotide
uguggcuuguauggccgcc

SEQ ID NO: 1402264 - RNA, 19 nt, Artificial Sequence
  Description of Artificial Sequence: Synthetic oligonucleotide
ugguaaccccugaggccgg

SEQ ID NO: 1402265 - RNA, 19 nt, Artificial Sequence
  Description of Artificial Sequence: Synthetic oligonucleotide
agcgaccucugcccgcuuc

SEQ ID NO: 1402266 - RNA, 19 nt, Artificial Sequence
  Description of Artificial Sequence: Synthetic oligonucleotide
gggacauaccuccuggguc

SEQ ID NO: 1402267 - RNA, 19 nt, Artificial Sequence
  Description of Artificial Sequence: Synthetic oligonucleotide
acucuccccaaggugaaga

SEQ ID NO: 1402268 - RNA, 19 nt, Artificial Sequence
  Description of Artificial Sequence: Synthetic oligonucleotide
gccuuaaugggucgauugc

SEQ ID NO: 1402269 - RNA, 19 nt, Artificial Sequence
  Description of Artificial Sequence: Synthetic oligonucleotide
caaccagcaccacuccaug

SEQ ID NO: 1402270 - RNA, 19 nt, Artificial Sequence
  Description of Artificial Sequence: Synthetic oligonucleotide
ggaugucgagcccaaggug

SEQ ID NO: 1402271 - RNA, 19 nt, Artificial Sequence
  Description of Artificial Sequence: Synthetic oligonucleotide
aucaccuuucaaguucaga

SEQ ID NO: 1402272 - RNA, 19 nt, Artificial Sequence
  Description of Artificial Sequence: Synthetic oligonucleotide
ccuuaaugggucgauugcc

SEQ ID NO: 1402273 - RNA, 19 nt, Artificial Sequence
  Description of Artificial Sequence: Synthetic oligonucleotide
caugcuggucgcguucccg

SEQ ID NO: 1402274 - RNA, 19 nt, Artificial Sequence
  Description of Artificial Sequence: Synthetic oligonucleotide
cccaaaaggguuugguaac

SEQ ID NO: 1402275 - RNA, 19 nt, Artificial Sequence
  Description of Artificial Sequence: Synthetic oligonucleotide
gucugaaucacuggggaua

SEQ ID NO: 1402276 - RNA, 19 nt, Artificial Sequence
  Description of Artificial Sequence: Synthetic oligonucleotide
augcggagcagaugcugug

SEQ ID NO: 1402277 - RNA, 19 nt, Artificial Sequence
  Description of Artificial Sequence: Synthetic oligonucleotide
caguacacaccgaacucga

SEQ ID NO: 1402278 - RNA, 19 nt, Artificial Sequence
  Description of Artificial Sequence: Synthetic oligonucleotide
gcuauguuccagccaccgg

SEQ ID NO: 1402279 - RNA, 19 nt, Artificial Sequence
  Description of Artificial Sequence: Synthetic oligonucleotide
agcauagccaaggucugaa

SEQ ID NO: 1402280 - RNA, 19 nt, Artificial Sequence
  Description of Artificial Sequence: Synthetic oligonucleotide
aaauggaugucgagcccaa

SEQ ID NO: 1402281 - RNA, 19 nt, Artificial Sequence
  Description of Artificial Sequence: Synthetic oligonucleotide
gguaucgacugugggauac

SEQ ID NO: 1402282 - RNA, 19 nt, Artificial Sequence
  Description of Artificial Sequence: Synthetic oligonucleotide
auagacggugcaggaagca

SEQ ID NO: 1402283 - RNA, 19 nt, Artificial Sequence
  Description of Artificial Sequence: Synthetic oligonucleotide
agaggccgcguucuucuga

SEQ ID NO: 1402284 - RNA, 19 nt, Artificial Sequence
  Description of Artificial Sequence: Synthetic oligonucleotide
agcccaagguguuuccaaa

SEQ ID NO: 1402285 - RNA, 19 nt, Artificial Sequence
  Description of Artificial Sequence: Synthetic oligonucleotide
uguugaacccugggucuga

SEQ ID NO: 1402286 - RNA, 19 nt, Artificial Sequence
  Description of Artificial Sequence: Synthetic oligonucleotide
uccguuccuuguaguagaa

SEQ ID NO: 1402287 - RNA, 19 nt, Artificial Sequence
  Description of Artificial Sequence: Synthetic oligonucleotide
ggaaugugaagcccuugca

SEQ ID NO: 1402288 - RNA, 19 nt, Artificial Sequence
  Description of Artificial Sequence: Synthetic oligonucleotide
cuccguagcacuucuuaaa

SEQ ID NO: 1402289 - RNA, 19 nt, Artificial Sequence
  Description of Artificial Sequence: Synthetic oligonucleotide
ggauuuuggacauuaccau

SEQ ID NO: 1402290 - RNA, 19 nt, Artificial Sequence
  Description of Artificial Sequence: Synthetic oligonucleotide
agugacuuaugaacaggaa

SEQ ID NO: 1402291 - RNA, 19 nt, Artificial Sequence
  Description of Artificial Sequence: Synthetic oligonucleotide
ugcggagcagaugcuguga

SEQ ID NO: 1402292 - RNA, 19 nt, Artificial Sequence
  Description of Artificial Sequence: Synthetic oligonucleotide
uuucucgcuucgaguugga

SEQ ID NO: 1402293 - RNA, 19 nt, Artificial Sequence
  Description of Artificial Sequence: Synthetic oligonucleotide
uugaacccugggucugaca

SEQ ID NO: 1402294 - RNA, 19 nt, Artificial Sequence
  Description of Artificial Sequence: Synthetic oligonucleotide
aaaccuggacgagauccuu

SEQ ID NO: 1402295 - RNA, 19 nt, Artificial Sequence
  Description of Artificial Sequence: Synthetic oligonucleotide
gugccacggacuucacucc

SEQ ID NO: 1402296 - RNA, 19 nt, Artificial Sequence
  Description of Artificial Sequence: Synthetic oligonucleotide
aggcuaaugcuggcucugg

SEQ ID NO: 1402297 - RNA, 19 nt, Artificial Sequence
  Description of Artificial Sequence: Synthetic oligonucleotide
gcccaaauggaugucgagc

SEQ ID NO: 1402298 - RNA, 19 nt, Artificial Sequence
  Description of Artificial Sequence: Synthetic oligonucleotide
augugauuuuguacuggca

SEQ ID NO: 1402299 - RNA, 19 nt, Artificial Sequence
  Description of Artificial Sequence: Synthetic oligonucleotide
ucagcgaccucugcccgcu

SEQ ID NO: 1402300 - RNA, 19 nt, Artificial Sequence
  Description of Artificial Sequence: Synthetic oligonucleotide
gagcccaagguguuuccaa

SEQ ID NO: 1402301 - RNA, 19 nt, Artificial Sequence
  Description of Artificial Sequence: Synthetic oligonucleotide
gggaaggcaaagucucaug

SEQ ID NO: 1402302 - RNA, 19 nt, Artificial Sequence
  Description of Artificial Sequence: Synthetic oligonucleotide
gacauguguucugucucuc

SEQ ID NO: 1402303 - RNA, 19 nt, Artificial Sequence
  Description of Artificial Sequence: Synthetic oligonucleotide
caaggugaagacauguguu

SEQ ID NO: 1402304 - RNA, 19 nt, Artificial Sequence
  Description of Artificial Sequence: Synthetic oligonucleotide
gguccgaaaccauuccauc

SEQ ID NO: 1402305 - RNA, 19 nt, Artificial Sequence
  Description of Artificial Sequence: Synthetic oligonucleotide
ggguuugguaaccccugag

SEQ ID NO: 1402306 - RNA, 19 nt, Artificial Sequence
  Description of Artificial Sequence: Synthetic oligonucleotide
ccagugacuuaugaacagg

SEQ ID NO: 1402307 - RNA, 19 nt, Artificial Sequence
  Description of Artificial Sequence: Synthetic oligonucleotide
agcugggguaucgacugug

SEQ ID NO: 1402308 - RNA, 19 nt, Artificial Sequence
  Description of Artificial Sequence: Synthetic oligonucleotide
agggaaggcaaagucucau

SEQ ID NO: 1402309 - RNA, 19 nt, Artificial Sequence
  Description of Artificial Sequence: Synthetic oligonucleotide
augaccuucccagcagccu

SEQ ID NO: 1402310 - RNA, 19 nt, Artificial Sequence
  Description of Artificial Sequence: Synthetic oligonucleotide
cuccccaaggugaagacau

SEQ ID NO: 1402311 - RNA, 19 nt, Artificial Sequence
  Description of Artificial Sequence: Synthetic oligonucleotide
cagcagccuuaaugggucg

SEQ ID NO: 1402312 - RNA, 19 nt, Artificial Sequence
  Description of Artificial Sequence: Synthetic oligonucleotide
gaucucuccguagcacuuc

SEQ ID NO: 1402313 - RNA, 19 nt, Artificial Sequence
  Description of Artificial Sequence: Synthetic oligonucleotide
ggacucaauagacggugca

SEQ ID NO: 1402314 - RNA, 19 nt, Artificial Sequence
  Description of Artificial Sequence: Synthetic oligonucleotide
acgguuagggaaaggccca

SEQ ID NO: 1402315 - RNA, 19 nt, Artificial Sequence
  Description of Artificial Sequence: Synthetic oligonucleotide
cagcgguagaggaucucuc

SEQ ID NO: 1402316 - RNA, 19 nt, Artificial Sequence
  Description of Artificial Sequence: Synthetic oligonucleotide
uccgauccuucccgcuuac

SEQ ID NO: 1402317 - RNA, 19 nt, Artificial Sequence
  Description of Artificial Sequence: Synthetic oligonucleotide
guaucgacugugggauacc

SEQ ID NO: 1402318 - RNA, 19 nt, Artificial Sequence
  Description of Artificial Sequence: Synthetic oligonucleotide
caacuccugaaaaggcuaa

SEQ ID NO: 1402319 - RNA, 19 nt, Artificial Sequence
  Description of Artificial Sequence: Synthetic oligonucleotide
cucuuucucgcuucgaguu

SEQ ID NO: 1402320 - RNA, 19 nt, Artificial Sequence
  Description of Artificial Sequence: Synthetic oligonucleotide
cuguagcuaccguggccag

SEQ ID NO: 1402321 - RNA, 19 nt, Artificial Sequence
  Description of Artificial Sequence: Synthetic oligonucleotide
cucuccguagcacuucuua

SEQ ID NO: 1402322 - RNA, 19 nt, Artificial Sequence
  Description of Artificial Sequence: Synthetic oligonucleotide
ggacgagauccuuccuucc

SEQ ID NO: 1402323 - RNA, 19 nt, Artificial Sequence
  Description of Artificial Sequence: Synthetic oligonucleotide
gggucgauugccagagucc

SEQ ID NO: 1402324 - RNA, 19 nt, Artificial Sequence
  Description of Artificial Sequence: Synthetic oligonucleotide
gccgcguucuucugacacg

SEQ ID NO: 1402325 - RNA, 19 nt, Artificial Sequence
  Description of Artificial Sequence: Synthetic oligonucleotide
ggccgcguucuucugacac

SEQ ID NO: 1402326 - RNA, 19 nt, Artificial Sequence
  Description of Artificial Sequence: Synthetic oligonucleotide
cagaccccagcgguagagg

SEQ ID NO: 1402327 - RNA, 19 nt, Artificial Sequence
  Description of Artificial Sequence: Synthetic oligonucleotide
aguuggcaauagugagcca

SEQ ID NO: 1402328 - RNA, 19 nt, Artificial Sequence
  Description of Artificial Sequence: Synthetic oligonucleotide
cccaaggugaagacaugug

SEQ ID NO: 1402329 - RNA, 19 nt, Artificial Sequence
  Description of Artificial Sequence: Synthetic oligonucleotide
gcuaccguggccagcgacc

SEQ ID NO: 1402330 - RNA, 19 nt, Artificial Sequence
  Description of Artificial Sequence: Synthetic oligonucleotide
auggcguccucugggauuu

SEQ ID NO: 1402331 - RNA, 19 nt, Artificial Sequence
  Description of Artificial Sequence: Synthetic oligonucleotide
gauuucggaccaaggcaaa

SEQ ID NO: 1402332 - RNA, 19 nt, Artificial Sequence
  Description of Artificial Sequence: Synthetic oligonucleotide
gucucaugcggagcagaug

SEQ ID NO: 1402333 - RNA, 19 nt, Artificial Sequence
  Description of Artificial Sequence: Synthetic oligonucleotide
cugucgcccaaauggaugu

SEQ ID NO: 1402334 - RNA, 19 nt, Artificial Sequence
  Description of Artificial Sequence: Synthetic oligonucleotide
aggugcuuuuccccaugaa

SEQ ID NO: 1402335 - RNA, 19 nt, Artificial Sequence
  Description of Artificial Sequence: Synthetic oligonucleotide
uucucgcuucgaguuggac

SEQ ID NO: 1402336 - RNA, 19 nt, Artificial Sequence
  Description of Artificial Sequence: Synthetic oligonucleotide
accguggccagcgaccaaa

SEQ ID NO: 1402337 - RNA, 19 nt, Artificial Sequence
  Description of Artificial Sequence: Synthetic oligonucleotide
agucucaugcggagcagau

SEQ ID NO: 1402338 - RNA, 19 nt, Artificial Sequence
  Description of Artificial Sequence: Synthetic oligonucleotide
gacucuccccaaggugaag

SEQ ID NO: 1402339 - RNA, 19 nt, Artificial Sequence
  Description of Artificial Sequence: Synthetic oligonucleotide
agcagccuuaaugggucga

SEQ ID NO: 1402340 - RNA, 19 nt, Artificial Sequence
  Description of Artificial Sequence: Synthetic oligonucleotide
gguagaggaucucuccgua

SEQ ID NO: 1402341 - RNA, 19 nt, Artificial Sequence
  Description of Artificial Sequence: Synthetic oligonucleotide
gccauacugaagggaaggc

SEQ ID NO: 1402342 - RNA, 19 nt, Artificial Sequence
  Description of Artificial Sequence: Synthetic oligonucleotide
ccagcauuuuauggcgucc

SEQ ID NO: 1402343 - RNA, 19 nt, Artificial Sequence
  Description of Artificial Sequence: Synthetic oligonucleotide
gaccaaaccuggacgagau

SEQ ID NO: 1402344 - RNA, 19 nt, Artificial Sequence
  Description of Artificial Sequence: Synthetic oligonucleotide
guugaacccugggucugac

SEQ ID NO: 1402345 - RNA, 19 nt, Artificial Sequence
  Description of Artificial Sequence: Synthetic oligonucleotide
caccacuccaugccugaca

SEQ ID NO: 1402346 - RNA, 19 nt, Artificial Sequence
  Description of Artificial Sequence: Synthetic oligonucleotide
auaccuccuggguccgaaa

SEQ ID NO: 1402347 - RNA, 19 nt, Artificial Sequence
  Description of Artificial Sequence: Synthetic oligonucleotide
ggacauuaccaucaccuuu

SEQ ID NO: 1402348 - RNA, 19 nt, Artificial Sequence
  Description of Artificial Sequence: Synthetic oligonucleotide
ggagagaccauuccugguu

SEQ ID NO: 1402349 - RNA, 19 nt, Artificial Sequence
  Description of Artificial Sequence: Synthetic oligonucleotide
cccgcuucucucucagacc

SEQ ID NO: 1402350 - RNA, 19 nt, Artificial Sequence
  Description of Artificial Sequence: Synthetic oligonucleotide
cauuaccaucaccuuucaa

SEQ ID NO: 1402351 - RNA, 19 nt, Artificial Sequence
  Description of Artificial Sequence: Synthetic oligonucleotide
ccgaaaccauuccaucaug

SEQ ID NO: 1402352 - RNA, 19 nt, Artificial Sequence
  Description of Artificial Sequence: Synthetic oligonucleotide
ucgcuucgaguuggacucc

SEQ ID NO: 1402353 - RNA, 19 nt, Artificial Sequence
  Description of Artificial Sequence: Synthetic oligonucleotide
cuggucgcguucccgcuca

SEQ ID NO: 1402354 - RNA, 19 nt, Artificial Sequence
  Description of Artificial Sequence: Synthetic oligonucleotide
ucgaucccuuugugagggu

SEQ ID NO: 1402355 - RNA, 19 nt, Artificial Sequence
  Description of Artificial Sequence: Synthetic oligonucleotide
cuaccguggccagcgacca

SEQ ID NO: 1402356 - RNA, 19 nt, Artificial Sequence
  Description of Artificial Sequence: Synthetic oligonucleotide
aguacacaccgaacucgau

SEQ ID NO: 1402357 - RNA, 19 nt, Artificial Sequence
  Description of Artificial Sequence: Synthetic oligonucleotide
ccaugccugacagccauac

SEQ ID NO: 1402358 - RNA, 19 nt, Artificial Sequence
  Description of Artificial Sequence: Synthetic oligonucleotide
caggaggacaggacacaaa

SEQ ID NO: 1402359 - RNA, 19 nt, Artificial Sequence
  Description of Artificial Sequence: Synthetic oligonucleotide
acuguagguuagacuccca

SEQ ID NO: 1402360 - RNA, 19 nt, Artificial Sequence
  Description of Artificial Sequence: Synthetic oligonucleotide
ggcuaaugcuggcucugga

SEQ ID NO: 1402361 - RNA, 19 nt, Artificial Sequence
  Description of Artificial Sequence: Synthetic oligonucleotide
augggucgauugccagagu

SEQ ID NO: 1402362 - RNA, 19 nt, Artificial Sequence
  Description of Artificial Sequence: Synthetic oligonucleotide
gggguaucgacugugggau

SEQ ID NO: 1402363 - RNA, 19 nt, Artificial Sequence
  Description of Artificial Sequence: Synthetic oligonucleotide
agacucuccccaaggugaa

SEQ ID NO: 1402364 - RNA, 19 nt, Artificial Sequence
  Description of Artificial Sequence: Synthetic oligonucleotide
uagcuaccguggccagcga

SEQ ID NO: 1402365 - RNA, 19 nt, Artificial Sequence
  Description of Artificial Sequence: Synthetic oligonucleotide
ccacggacuucacuccggc

SEQ ID NO: 1402366 - RNA, 19 nt, Artificial Sequence
  Description of Artificial Sequence: Synthetic oligonucleotide
aucgacugugggauaccau

SEQ ID NO: 1402367 - RNA, 19 nt, Artificial Sequence
  Description of Artificial Sequence: Synthetic oligonucleotide
gaguccgauccuucccgcu

SEQ ID NO: 1402368 - RNA, 19 nt, Artificial Sequence
  Description of Artificial Sequence: Synthetic oligonucleotide
cauaccuccuggguccgaa

SEQ ID NO: 1402369 - RNA, 19 nt, Artificial Sequence
  Description of Artificial Sequence: Synthetic oligonucleotide
acaccgaacucgaucccuu

SEQ ID NO: 1402370 - RNA, 19 nt, Artificial Sequence
  Description of Artificial Sequence: Synthetic oligonucleotide
guccgauccuucccgcuua

SEQ ID NO: 1402371 - RNA, 19 nt, Artificial Sequence
  Description of Artificial Sequence: Synthetic oligonucleotide
cacggacuucacuccggca

SEQ ID NO: 1402372 - RNA, 19 nt, Artificial Sequence
  Description of Artificial Sequence: Synthetic oligonucleotide
ugucgagcccaagguguuu

SEQ ID NO: 1402373 - RNA, 19 nt, Artificial Sequence
  Description of Artificial Sequence: Synthetic oligonucleotide
ccaccgguguugaacccug

SEQ ID NO: 1402374 - RNA, 19 nt, Artificial Sequence
  Description of Artificial Sequence: Synthetic oligonucleotide
gcucuuucucgcuucgagu

SEQ ID NO: 1402375 - RNA, 19 nt, Artificial Sequence
  Description of Artificial Sequence: Synthetic oligonucleotide
gggaaaggcccaaaagggu

SEQ ID NO: 1402376 - RNA, 19 nt, Artificial Sequence
  Description of Artificial Sequence: Synthetic oligonucleotide
augucgagcccaagguguu

SEQ ID NO: 1402377 - RNA, 19 nt, Artificial Sequence
  Description of Artificial Sequence: Synthetic oligonucleotide
gcgaccaaaccuggacgag

SEQ ID NO: 1402378 - RNA, 19 nt, Artificial Sequence
  Description of Artificial Sequence: Synthetic oligonucleotide
guacuggcauuuggagaga

SEQ ID NO: 1402379 - RNA, 19 nt, Artificial Sequence
  Description of Artificial Sequence: Synthetic oligonucleotide
uaccguggccagcgaccaa

SEQ ID NO: 1402380 - RNA, 19 nt, Artificial Sequence
  Description of Artificial Sequence: Synthetic oligonucleotide
gguaaccccugaggccggg

SEQ ID NO: 1402381 - RNA, 19 nt, Artificial Sequence
  Description of Artificial Sequence: Synthetic oligonucleotide
gucgauugccagaguccga

SEQ ID NO: 1402382 - RNA, 19 nt, Artificial Sequence
  Description of Artificial Sequence: Synthetic oligonucleotide
caucaaacugcugcguauu

SEQ ID NO: 1402383 - RNA, 19 nt, Artificial Sequence
  Description of Artificial Sequence: Synthetic oligonucleotide
aggccgcguucuucugaca

SEQ ID NO: 1402384 - RNA, 19 nt, Artificial Sequence
  Description of Artificial Sequence: Synthetic oligonucleotide
cacaccgaacucgaucccu

SEQ ID NO: 1402385 - RNA, 19 nt, Artificial Sequence
  Description of Artificial Sequence: Synthetic oligonucleotide
uggucgcguucccgcucac

SEQ ID NO: 1402386 - RNA, 19 nt, Artificial Sequence
  Description of Artificial Sequence: Synthetic oligonucleotide
cucaugcggagcagaugcu

SEQ ID NO: 1402387 - RNA, 19 nt, Artificial Sequence
  Description of Artificial Sequence: Synthetic oligonucleotide
cucagaccccagcgguaga

SEQ ID NO: 1402388 - RNA, 19 nt, Artificial Sequence
  Description of Artificial Sequence: Synthetic oligonucleotide
ccuuucaaccagcaccacu

SEQ ID NO: 1402389 - RNA, 19 nt, Artificial Sequence
  Description of Artificial Sequence: Synthetic oligonucleotide
guaaccccugaggccggga

SEQ ID NO: 1402390 - RNA, 19 nt, Artificial Sequence
  Description of Artificial Sequence: Synthetic oligonucleotide
ccguuccuuguaguagaag

SEQ ID NO: 1402391 - RNA, 19 nt, Artificial Sequence
  Description of Artificial Sequence: Synthetic oligonucleotide
gguuagggaaaggcccaaa

SEQ ID NO: 1402392 - RNA, 19 nt, Artificial Sequence
  Description of Artificial Sequence: Synthetic oligonucleotide
gcuuacuuuuccaccuccu

SEQ ID NO: 1402393 - RNA, 19 nt, Artificial Sequence
  Description of Artificial Sequence: Synthetic oligonucleotide
cgacugugggauaccauaa

SEQ ID NO: 1402394 - RNA, 19 nt, Artificial Sequence
  Description of Artificial Sequence: Synthetic oligonucleotide
ggggauagcccggguucug

SEQ ID NO: 1402395 - RNA, 19 nt, Artificial Sequence
  Description of Artificial Sequence: Synthetic oligonucleotide
ggguccgaaaccauuccau

SEQ ID NO: 1402396 - RNA, 19 nt, Artificial Sequence
  Description of Artificial Sequence: Synthetic oligonucleotide
cgccaugcccacaggucag

SEQ ID NO: 1402397 - RNA, 19 nt, Artificial Sequence
  Description of Artificial Sequence: Synthetic oligonucleotide
ccgaacucgaucccuuugu

SEQ ID NO: 1402398 - RNA, 19 nt, Artificial Sequence
  Description of Artificial Sequence: Synthetic oligonucleotide
gaccccagcgguagaggau

SEQ ID NO: 1402399 - RNA, 19 nt, Artificial Sequence
  Description of Artificial Sequence: Synthetic oligonucleotide
cugcucuuucucgcuucga

SEQ ID NO: 1402400 - RNA, 19 nt, Artificial Sequence
  Description of Artificial Sequence: Synthetic oligonucleotide
ggucaggcagaaguuggau

SEQ ID NO: 1402401 - RNA, 19 nt, Artificial Sequence
  Description of Artificial Sequence: Synthetic oligonucleotide
ccguagcacuucuuaaagu

SEQ ID NO: 1402402 - RNA, 19 nt, Artificial Sequence
  Description of Artificial Sequence: Synthetic oligonucleotide
ccguggccagcgaccaaac

SEQ ID NO: 1402403 - RNA, 19 nt, Artificial Sequence
  Description of Artificial Sequence: Synthetic oligonucleotide
gcguauuggcaggguccag

SEQ ID NO: 1402404 - RNA, 19 nt, Artificial Sequence
  Description of Artificial Sequence: Synthetic oligonucleotide
ggguaucgacugugggaua

SEQ ID NO: 1402405 - RNA, 19 nt, Artificial Sequence
  Description of Artificial Sequence: Synthetic oligonucleotide
cgcuucgaguuggacuccc

SEQ ID NO: 1402406 - RNA, 19 nt, Artificial Sequence
  Description of Artificial Sequence: Synthetic oligonucleotide
ccagcgguagaggaucucu

SEQ ID NO: 1402407 - RNA, 19 nt, Artificial Sequence
  Description of Artificial Sequence: Synthetic oligonucleotide
caccgaacucgaucccuuu

SEQ ID NO: 1402408 - RNA, 19 nt, Artificial Sequence
  Description of Artificial Sequence: Synthetic oligonucleotide
ccccaaggugaagacaugu

SEQ ID NO: 1402409 - RNA, 19 nt, Artificial Sequence
  Description of Artificial Sequence: Synthetic oligonucleotide
gccaccgguguugaacccu

SEQ ID NO: 1402410 - RNA, 19 nt, Artificial Sequence
  Description of Artificial Sequence: Synthetic oligonucleotide
gcagccuuaaugggucgau

SEQ ID NO: 1402411 - RNA, 19 nt, Artificial Sequence
  Description of Artificial Sequence: Synthetic oligonucleotide
cgauccuucccgcuuacuu

SEQ ID NO: 1402412 - RNA, 19 nt, Artificial Sequence
  Description of Artificial Sequence: Synthetic oligonucleotide
aggccgggacugggcuuca

SEQ ID NO: 1402413 - RNA, 19 nt, Artificial Sequence
  Description of Artificial Sequence: Synthetic oligonucleotide
cagccuuaaugggucgauu

SEQ ID NO: 1402414 - RNA, 19 nt, Artificial Sequence
  Description of Artificial Sequence: Synthetic oligonucleotide
ccgcguucuucugacacgu

SEQ ID NO: 1402415 - RNA, 19 nt, Artificial Sequence
  Description of Artificial Sequence: Synthetic oligonucleotide
cacuggggauagcccgggu

SEQ ID NO: 1402416 - RNA, 19 nt, Artificial Sequence
  Description of Artificial Sequence: Synthetic oligonucleotide
cccagcgguagaggaucuc

SEQ ID NO: 1402417 - RNA, 19 nt, Artificial Sequence
  Description of Artificial Sequence: Synthetic oligonucleotide
cgcguucuucugacacguc

SEQ ID NO: 1402418 - RNA, 19 nt, Artificial Sequence
  Description of Artificial Sequence: Synthetic oligonucleotide
ccuggacgagauccuuccu

SEQ ID NO: 1402419 - RNA, 19 nt, Artificial Sequence
  Description of Artificial Sequence: Synthetic oligonucleotide
cgaguuggacucccacugu

SEQ ID NO: 1402420 - RNA, 19 nt, Artificial Sequence
  Description of Artificial Sequence: Synthetic oligonucleotide
ccugagugucguucacauu

SEQ ID NO: 1402421 - RNA, 19 nt, Artificial Sequence
  Description of Artificial Sequence: Synthetic oligonucleotide
ccccagcgguagaggaucu

SEQ ID NO: 1402422 - RNA, 19 nt, Artificial Sequence
  Description of Artificial Sequence: Synthetic oligonucleotide
cccuugcagauugcacacu

SEQ ID NO: 1402423 - RNA, 19 nt, Artificial Sequence
  Description of Artificial Sequence: Synthetic oligonucleotide
ggccgggacugggcuucaa

SEQ ID NO: 1402424 - RNA, 19 nt, Artificial Sequence
  Description of Artificial Sequence: Synthetic oligonucleotide
ccgauccuucccgcuuacu

SEQ ID NO: 1402425 - RNA, 19 nt, Artificial Sequence
  Description of Artificial Sequence: Synthetic oligonucleotide
cagcgaccucugcccgcuu

SEQ ID NO: 1402426 - RNA, 19 nt, Artificial Sequence
  Description of Artificial Sequence: Synthetic oligonucleotide
aauucuucuguguuaaacc

SEQ ID NO: 1402427 - RNA, 19 nt, Artificial Sequence
  Description of Artificial Sequence: Synthetic oligonucleotide
aauaugaaggaauaacuuc

SEQ ID NO: 1402428 - RNA, 19 nt, Artificial Sequence
  Description of Artificial Sequence: Synthetic oligonucleotide
  modified_base (7)..(7): a, c, u, g, unknown or other
aauuccnuauggcuuaagc

SEQ ID NO: 1402429 - RNA, 19 nt, Artificial Sequence
  Description of Artificial Sequence: Synthetic oligonucleotide
aagauugaaaucuguaugg

SEQ ID NO: 1402430 - RNA, 19 nt, Artificial Sequence
  Description of Artificial Sequence: Synthetic oligonucleotide
aauguaacuacuuuugaug

SEQ ID NO: 1402431 - RNA, 19 nt, Artificial Sequence
  Description of Artificial Sequence: Synthetic oligonucleotide
aauacuacacucaaauugc

SEQ ID NO: 1402432 - RNA, 19 nt, Artificial Sequence
  Description of Artificial Sequence: Synthetic oligonucleotide
aauuuggaaagcuauucac

SEQ ID NO: 1402433 - RNA, 19 nt, Artificial Sequence
  Description of Artificial Sequence: Synthetic oligonucleotide
aaugagcacuguuacaagc

SEQ ID NO: 1402434 - RNA, 19 nt, Artificial Sequence
  Description of Artificial Sequence: Synthetic oligonucleotide
agaaauaccacaucuggac

SEQ ID NO: 1402435 - RNA, 19 nt, Artificial Sequence
  Description of Artificial Sequence: Synthetic oligonucleotide
aaaggaacaaucucuugac

SEQ ID NO: 1402436 - RNA, 19 nt, Artificial Sequence
  Description of Artificial Sequence: Synthetic oligonucleotide
aacaacagcugacacauuc

SEQ ID NO: 1402437 - RNA, 19 nt, Artificial Sequence
  Description of Artificial Sequence: Synthetic oligonucleotide
aaagcucaaauuuggaaag

SEQ ID NO: 1402438 - RNA, 19 nt, Artificial Sequence
  Description of Artificial Sequence: Synthetic oligonucleotide
gaugcuuacaagcagcagg

SEQ ID NO: 1402439 - RNA, 19 nt, Artificial Sequence
  Description of Artificial Sequence: Synthetic oligonucleotide
uaauucuuaggacacaagc

SEQ ID NO: 1402440 - RNA, 19 nt, Artificial Sequence
  Description of Artificial Sequence: Synthetic oligonucleotide
ucuaauggcagcaaugagc

SEQ ID NO: 1402441 - RNA, 19 nt, Artificial Sequence
  Description of Artificial Sequence: Synthetic oligonucleotide
aaauggugguaucauuugc

SEQ ID NO: 1402442 - RNA, 19 nt, Artificial Sequence
  Description of Artificial Sequence: Synthetic oligonucleotide
uguauacugacaauguuug

SEQ ID NO: 1402443 - RNA, 19 nt, Artificial Sequence
  Description of Artificial Sequence: Synthetic oligonucleotide
aaggucuaaacuuugggga

SEQ ID NO: 1402444 - RNA, 19 nt, Artificial Sequence
  Description of Artificial Sequence: Synthetic oligonucleotide
  modified_base (4)..(4): a, c, u, g, unknown or other
uccnuauggcuuaagcugg

SEQ ID NO: 1402445 - RNA, 19 nt, Artificial Sequence
  Description of Artificial Sequence: Synthetic oligonucleotide
aaacauguaaagcucaaau

SEQ ID NO: 1402446 - RNA, 19 nt, Artificial Sequence
  Description of Artificial Sequence: Synthetic oligonucleotide
aacccaacaaggucuaaac

SEQ ID NO: 1402447 - RNA, 19 nt, Artificial Sequence
  Description of Artificial Sequence: Synthetic oligonucleotide
  modified_base (5)..(5): a, c, u, g, unknown or other
uuccnuauggcuuaagcug

SEQ ID NO: 1402448 - RNA, 19 nt, Artificial Sequence
  Description of Artificial Sequence: Synthetic oligonucleotide
uggaaaaggaacaaucucu

SEQ ID NO: 1402449 - RNA, 19 nt, Artificial Sequence
  Description of Artificial Sequence: Synthetic oligonucleotide
uauaacaguaguugaaucu

SEQ ID NO: 1402450 - RNA, 19 nt, Artificial Sequence
  Description of Artificial Sequence: Synthetic oligonucleotide
augaaagagauaaugcugc

SEQ ID NO: 1402451 - RNA, 19 nt, Artificial Sequence
  Description of Artificial Sequence: Synthetic oligonucleotide
aaaccccaugcacugaagc

SEQ ID NO: 1402452 - RNA, 19 nt, Artificial Sequence
  Description of Artificial Sequence: Synthetic oligonucleotide
aguuuauuaauucuucugu

SEQ ID NO: 1402453 - RNA, 19 nt, Artificial Sequence
  Description of Artificial Sequence: Synthetic oligonucleotide
aaaugggaugucauaaggc

SEQ ID NO: 1402454 - RNA, 19 nt, Artificial Sequence
  Description of Artificial Sequence: Synthetic oligonucleotide
aaggaauaacuucuuguag

SEQ ID NO: 1402455 - RNA, 19 nt, Artificial Sequence
  Description of Artificial Sequence: Synthetic oligonucleotide
aguacauuguuuucuuuac

SEQ ID NO: 1402456 - RNA, 19 nt, Artificial Sequence
  Description of Artificial Sequence: Synthetic oligonucleotide
uguaauaauuuuguaacug

SEQ ID NO: 1402457 - RNA, 19 nt, Artificial Sequence
  Description of Artificial Sequence: Synthetic oligonucleotide
aaauaccacaucuggacug

SEQ ID NO: 1402458 - RNA, 19 nt, Artificial Sequence
  Description of Artificial Sequence: Synthetic oligonucleotide
auugaaaucuguauggguc

SEQ ID NO: 1402459 - RNA, 19 nt, Artificial Sequence
  Description of Artificial Sequence: Synthetic oligonucleotide
aagcuauucacaauacuac

SEQ ID NO: 1402460 - RNA, 19 nt, Artificial Sequence
  Description of Artificial Sequence: Synthetic oligonucleotide
aaccccaugcacugaagcc

SEQ ID NO: 1402461 - RNA, 19 nt, Artificial Sequence
  Description of Artificial Sequence: Synthetic oligonucleotide
uugacuuuuaaauuucgcu

SEQ ID NO: 1402462 - RNA, 19 nt, Artificial Sequence
  Description of Artificial Sequence: Synthetic oligonucleotide
uuuugauguacuaaugauc

SEQ ID NO: 1402463 - RNA, 19 nt, Artificial Sequence
  Description of Artificial Sequence: Synthetic oligonucleotide
uuuagguaggcacaauaug

SEQ ID NO: 1402464 - RNA, 19 nt, Artificial Sequence
  Description of Artificial Sequence: Synthetic oligonucleotide
uucauuaccuguaauaauu

SEQ ID NO: 1402465 - RNA, 19 nt, Artificial Sequence
  Description of Artificial Sequence: Synthetic oligonucleotide
uuauucguuccgcagaaug

SEQ ID NO: 1402466 - RNA, 19 nt, Artificial Sequence
  Description of Artificial Sequence: Synthetic oligonucleotide
aacuuuggggaauaaggug

SEQ ID NO: 1402467 - RNA, 19 nt, Artificial Sequence
  Description of Artificial Sequence: Synthetic oligonucleotide
caaagcgaugcuuacaagc

SEQ ID NO: 1402468 - RNA, 19 nt, Artificial Sequence
  Description of Artificial Sequence: Synthetic oligonucleotide
auauaacaguaguugaauc

SEQ ID NO: 1402469 - RNA, 19 nt, Artificial Sequence
  Description of Artificial Sequence: Synthetic oligonucleotide
uuaguauuuggaaaaggaa

SEQ ID NO: 1402470 - RNA, 19 nt, Artificial Sequence
  Description of Artificial Sequence: Synthetic oligonucleotide
uugauuacacacaccaaug

SEQ ID NO: 1402471 - RNA, 19 nt, Artificial Sequence
  Description of Artificial Sequence: Synthetic oligonucleotide
ggugguaucauuugcaucc

SEQ ID NO: 1402472 - RNA, 19 nt, Artificial Sequence
  Description of Artificial Sequence: Synthetic oligonucleotide
aauugacuuauucguuccg

SEQ ID NO: 1402473 - RNA, 19 nt, Artificial Sequence
  Description of Artificial Sequence: Synthetic oligonucleotide
uuuacucacuuccugaaaa

SEQ ID NO: 1402474 - RNA, 19 nt, Artificial Sequence
  Description of Artificial Sequence: Synthetic oligonucleotide
ucgcauuucgccaccaacg

SEQ ID NO: 1402475 - RNA, 19 nt, Artificial Sequence
  Description of Artificial Sequence: Synthetic oligonucleotide
aucacuaggaaaucuacca

SEQ ID NO: 1402476 - RNA, 19 nt, Artificial Sequence
  Description of Artificial Sequence: Synthetic oligonucleotide
caaggucuaaacuuugggg

SEQ ID NO: 1402477 - RNA, 19 nt, Artificial Sequence
  Description of Artificial Sequence: Synthetic oligonucleotide
aaaucuaccacaguccagu

SEQ ID NO: 1402478 - RNA, 19 nt, Artificial Sequence
  Description of Artificial Sequence: Synthetic oligonucleotide
uuaauugacuuauucguuc

SEQ ID NO: 1402479 - RNA, 19 nt, Artificial Sequence
  Description of Artificial Sequence: Synthetic oligonucleotide
ugauuacacacaccaaugc

SEQ ID NO: 1402480 - RNA, 19 nt, Artificial Sequence
  Description of Artificial Sequence: Synthetic oligonucleotide
acucaaauugcacaggaga

SEQ ID NO: 1402481 - RNA, 19 nt, Artificial Sequence
  Description of Artificial Sequence: Synthetic oligonucleotide
auauagcugugaaauaucc

SEQ ID NO: 1402482 - RNA, 19 nt, Artificial Sequence
  Description of Artificial Sequence: Synthetic oligonucleotide
ucuugacuuuuaaauuucg

SEQ ID NO: 1402483 - RNA, 19 nt, Artificial Sequence
  Description of Artificial Sequence: Synthetic oligonucleotide
guaaugaaagagauaaugc

SEQ ID NO: 1402484 - RNA, 19 nt, Artificial Sequence
  Description of Artificial Sequence: Synthetic oligonucleotide
aaauacucgaucaaagcga

SEQ ID NO: 1402485 - RNA, 19 nt, Artificial Sequence
  Description of Artificial Sequence: Synthetic oligonucleotide
ugauguacuaaugauccag

SEQ ID NO: 1402486 - RNA, 19 nt, Artificial Sequence
  Description of Artificial Sequence: Synthetic oligonucleotide
aauauagcugugaaauauc

SEQ ID NO: 1402487 - RNA, 19 nt, Artificial Sequence
  Description of Artificial Sequence: Synthetic oligonucleotide
agaacuacugcaaacaugu

SEQ ID NO: 1402488 - RNA, 19 nt, Artificial Sequence
  Description of Artificial Sequence: Synthetic oligonucleotide
gucgguuagaucaacauag

SEQ ID NO: 1402489 - RNA, 19 nt, Artificial Sequence
  Description of Artificial Sequence: Synthetic oligonucleotide
aaugauccaguuuauuaau

SEQ ID NO: 1402490 - RNA, 19 nt, Artificial Sequence
  Description of Artificial Sequence: Synthetic oligonucleotide
uacucgaucaaagcgaugc

SEQ ID NO: 1402491 - RNA, 19 nt, Artificial Sequence
  Description of Artificial Sequence: Synthetic oligonucleotide
uggaaagcuauucacaaua

SEQ ID NO: 1402492 - RNA, 19 nt, Artificial Sequence
  Description of Artificial Sequence: Synthetic oligonucleotide
aggaauaacuucuuguaga

SEQ ID NO: 1402493 - RNA, 19 nt, Artificial Sequence
  Description of Artificial Sequence: Synthetic oligonucleotide
uuaaaccuagcuuuccuga

SEQ ID NO: 1402494 - RNA, 19 nt, Artificial Sequence
  Description of Artificial Sequence: Synthetic oligonucleotide
ucaugaucucguaaguuug

SEQ ID NO: 1402495 - RNA, 19 nt, Artificial Sequence
  Description of Artificial Sequence: Synthetic oligonucleotide
aggaacacaccccucgagc

SEQ ID NO: 1402496 - RNA, 19 nt, Artificial Sequence
  Description of Artificial Sequence: Synthetic oligonucleotide
ucggacaggaaguuguggg

SEQ ID NO: 1402497 - RNA, 19 nt, Artificial Sequence
  Description of Artificial Sequence: Synthetic oligonucleotide
ucuucuuuagguaggcaca

SEQ ID NO: 1402498 - RNA, 19 nt, Artificial Sequence
  Description of Artificial Sequence: Synthetic oligonucleotide
uaauugacuuauucguucc

SEQ ID NO: 1402499 - RNA, 19 nt, Artificial Sequence
  Description of Artificial Sequence: Synthetic oligonucleotide
  modified_base (6)..(6): a, c, u, g, unknown or other
auuccnuauggcuuaagcu

SEQ ID NO: 1402500 - RNA, 19 nt, Artificial Sequence
  Description of Artificial Sequence: Synthetic oligonucleotide
gaaguugugggccaucgug

SEQ ID NO: 1402501 - RNA, 19 nt, Artificial Sequence
  Description of Artificial Sequence: Synthetic oligonucleotide
guuagaucaacauaggccu

SEQ ID NO: 1402502 - RNA, 19 nt, Artificial Sequence
  Description of Artificial Sequence: Synthetic oligonucleotide
uucuguguuaaaccuagcu

SEQ ID NO: 1402503 - RNA, 19 nt, Artificial Sequence
  Description of Artificial Sequence: Synthetic oligonucleotide
gaucucguaaguuuguauc

SEQ ID NO: 1402504 - RNA, 19 nt, Artificial Sequence
  Description of Artificial Sequence: Synthetic oligonucleotide
uuccaacccaacaaggucu

SEQ ID NO: 1402505 - RNA, 19 nt, Artificial Sequence
  Description of Artificial Sequence: Synthetic oligonucleotide
ugcuuaauucuuaggacac

SEQ ID NO: 1402506 - RNA, 19 nt, Artificial Sequence
  Description of Artificial Sequence: Synthetic oligonucleotide
uuggaaaaggaacaaucuc

SEQ ID NO: 1402507 - RNA, 19 nt, Artificial Sequence
  Description of Artificial Sequence: Synthetic oligonucleotide
uggacugguuucuaaaaug

SEQ ID NO: 1402508 - RNA, 19 nt, Artificial Sequence
  Description of Artificial Sequence: Synthetic oligonucleotide
uguaaagcucaaauuugga

SEQ ID NO: 1402509 - RNA, 19 nt, Artificial Sequence
  Description of Artificial Sequence: Synthetic oligonucleotide
acaucuggacuguacaaag

SEQ ID NO: 1402510 - RNA, 19 nt, Artificial Sequence
  Description of Artificial Sequence: Synthetic oligonucleotide
acaauaugaaggaauaacu

SEQ ID NO: 1402511 - RNA, 19 nt, Artificial Sequence
  Description of Artificial Sequence: Synthetic oligonucleotide
cugagauuaguauuuguuc

SEQ ID NO: 1402512 - RNA, 19 nt, Artificial Sequence
  Description of Artificial Sequence: Synthetic oligonucleotide
accuguaauaauuuuguaa

SEQ ID NO: 1402513 - RNA, 19 nt, Artificial Sequence
  Description of Artificial Sequence: Synthetic oligonucleotide
caaauugcacaggagaccc

SEQ ID NO: 1402514 - RNA, 19 nt, Artificial Sequence
  Description of Artificial Sequence: Synthetic oligonucleotide
guacuaaugauccaguuua

SEQ ID NO: 1402515 - RNA, 19 nt, Artificial Sequence
  Description of Artificial Sequence: Synthetic oligonucleotide
cacaauaugaaggaauaac

SEQ ID NO: 1402516 - RNA, 19 nt, Artificial Sequence
  Description of Artificial Sequence: Synthetic oligonucleotide
uuaccaagccacuacuuga

SEQ ID NO: 1402517 - RNA, 19 nt, Artificial Sequence
  Description of Artificial Sequence: Synthetic oligonucleotide
uaaaccgccacauuugaua

SEQ ID NO: 1402518 - RNA, 19 nt, Artificial Sequence
  Description of Artificial Sequence: Synthetic oligonucleotide
uaaguuuguaucuccugca

SEQ ID NO: 1402519 - RNA, 19 nt, Artificial Sequence
  Description of Artificial Sequence: Synthetic oligonucleotide
uguacuaaugauccaguuu

SEQ ID NO: 1402520 - RNA, 19 nt, Artificial Sequence
  Description of Artificial Sequence: Synthetic oligonucleotide
gguuagaucaacauaggcc

SEQ ID NO: 1402521 - RNA, 19 nt, Artificial Sequence
  Description of Artificial Sequence: Synthetic oligonucleotide
uacuuuugauguacuaaug

SEQ ID NO: 1402522 - RNA, 19 nt, Artificial Sequence
  Description of Artificial Sequence: Synthetic oligonucleotide
ucaacauaggccucggauc

SEQ ID NO: 1402523 - RNA, 19 nt, Artificial Sequence
  Description of Artificial Sequence: Synthetic oligonucleotide
uuccagguaaugaaagaga

SEQ ID NO: 1402524 - RNA, 19 nt, Artificial Sequence
  Description of Artificial Sequence: Synthetic oligonucleotide
uaaauuucgcuuuuccuuu

SEQ ID NO: 1402525 - RNA, 19 nt, Artificial Sequence
  Description of Artificial Sequence: Synthetic oligonucleotide
auucuuaggacacaagcua

SEQ ID NO: 1402526 - RNA, 19 nt, Artificial Sequence
  Description of Artificial Sequence: Synthetic oligonucleotide
ugaucacuaggaaaucuac

SEQ ID NO: 1402527 - RNA, 19 nt, Artificial Sequence
  Description of Artificial Sequence: Synthetic oligonucleotide
uucuuaggacacaagcuac

SEQ ID NO: 1402528 - RNA, 19 nt, Artificial Sequence
  Description of Artificial Sequence: Synthetic oligonucleotide
uccaguuuauuaauucuuc

SEQ ID NO: 1402529 - RNA, 19 nt, Artificial Sequence
  Description of Artificial Sequence: Synthetic oligonucleotide
uuuccaacccaacaagguc

SEQ ID NO: 1402530 - RNA, 19 nt, Artificial Sequence
  Description of Artificial Sequence: Synthetic oligonucleotide
aaagcgaugcuuacaagca

SEQ ID NO: 1402531 - RNA, 19 nt, Artificial Sequence
  Description of Artificial Sequence: Synthetic oligonucleotide
auacugacaauguuugggu

SEQ ID NO: 1402532 - RNA, 19 nt, Artificial Sequence
  Description of Artificial Sequence: Synthetic oligonucleotide
ugaaguucuaauggcagca

SEQ ID NO: 1402533 - RNA, 19 nt, Artificial Sequence
  Description of Artificial Sequence: Synthetic oligonucleotide
ucaaauugcacaggagacc

SEQ ID NO: 1402534 - RNA, 19 nt, Artificial Sequence
  Description of Artificial Sequence: Synthetic oligonucleotide
uucucggacaggaaguugu

SEQ ID NO: 1402535 - RNA, 19 nt, Artificial Sequence
  Description of Artificial Sequence: Synthetic oligonucleotide
aucaaagcgaugcuuacaa

SEQ ID NO: 1402536 - RNA, 19 nt, Artificial Sequence
  Description of Artificial Sequence: Synthetic oligonucleotide
acauugucagguaaaccgc

SEQ ID NO: 1402537 - RNA, 19 nt, Artificial Sequence
  Description of Artificial Sequence: Synthetic oligonucleotide
ugauaacuucaugaucucg

SEQ ID NO: 1402538 - RNA, 19 nt, Artificial Sequence
  Description of Artificial Sequence: Synthetic oligonucleotide
auuuuguaacugcuugcuc

SEQ ID NO: 1402539 - RNA, 19 nt, Artificial Sequence
  Description of Artificial Sequence: Synthetic oligonucleotide
cuggguguaaucauuacca

SEQ ID NO: 1402540 - RNA, 19 nt, Artificial Sequence
  Description of Artificial Sequence: Synthetic oligonucleotide
uauagcugugaaauauccu

SEQ ID NO: 1402541 - RNA, 19 nt, Artificial Sequence
  Description of Artificial Sequence: Synthetic oligonucleotide
guaacuacuuuugauguac

SEQ ID NO: 1402542 - RNA, 19 nt, Artificial Sequence
  Description of Artificial Sequence: Synthetic oligonucleotide
agagauaaugcugcuaucu

SEQ ID NO: 1402543 - RNA, 19 nt, Artificial Sequence
  Description of Artificial Sequence: Synthetic oligonucleotide
ugacuuauucguuccgcag

SEQ ID NO: 1402544 - RNA, 19 nt, Artificial Sequence
  Description of Artificial Sequence: Synthetic oligonucleotide
ucgguuagaucaacauagg

SEQ ID NO: 1402545 - RNA, 19 nt, Artificial Sequence
  Description of Artificial Sequence: Synthetic oligonucleotide
aauggugguaucauuugca

SEQ ID NO: 1402546 - RNA, 19 nt, Artificial Sequence
  Description of Artificial Sequence: Synthetic oligonucleotide
uguguuaaaccuagcuuuc

SEQ ID NO: 1402547 - RNA, 19 nt, Artificial Sequence
  Description of Artificial Sequence: Synthetic oligonucleotide
uaucccauguauacugaca

SEQ ID NO: 1402548 - RNA, 19 nt, Artificial Sequence
  Description of Artificial Sequence: Synthetic oligonucleotide
aucaacauaggccucggau

SEQ ID NO: 1402549 - RNA, 19 nt, Artificial Sequence
  Description of Artificial Sequence: Synthetic oligonucleotide
uaucuucuagaggaggucc

SEQ ID NO: 1402550 - RNA, 19 nt, Artificial Sequence
  Description of Artificial Sequence: Synthetic oligonucleotide
ucuuaggacacaagcuaca

SEQ ID NO: 1402551 - RNA, 19 nt, Artificial Sequence
  Description of Artificial Sequence: Synthetic oligonucleotide
uccagaacuacugcaaaca

SEQ ID NO: 1402552 - RNA, 19 nt, Artificial Sequence
  Description of Artificial Sequence: Synthetic oligonucleotide
aagcgaugcuuacaagcag

SEQ ID NO: 1402553 - RNA, 19 nt, Artificial Sequence
  Description of Artificial Sequence: Synthetic oligonucleotide
aaagcaugcuuugauuaca

SEQ ID NO: 1402554 - RNA, 19 nt, Artificial Sequence
  Description of Artificial Sequence: Synthetic oligonucleotide
ucauaaggcaaaauucauu

SEQ ID NO: 1402555 - RNA, 19 nt, Artificial Sequence
  Description of Artificial Sequence: Synthetic oligonucleotide
agcuauucacaauacuaca

SEQ ID NO: 1402556 - RNA, 19 nt, Artificial Sequence
  Description of Artificial Sequence: Synthetic oligonucleotide
ucaaauuuggaaagcuauu

SEQ ID NO: 1402557 - RNA, 19 nt, Artificial Sequence
  Description of Artificial Sequence: Synthetic oligonucleotide
aucguggugucgcauuucg

SEQ ID NO: 1402558 - RNA, 19 nt, Artificial Sequence
  Description of Artificial Sequence: Synthetic oligonucleotide
cucgcauucacacacagaa

SEQ ID NO: 1402559 - RNA, 19 nt, Artificial Sequence
  Description of Artificial Sequence: Synthetic oligonucleotide
cuaaugauccaguuuauua

SEQ ID NO: 1402560 - RNA, 19 nt, Artificial Sequence
  Description of Artificial Sequence: Synthetic oligonucleotide
aucucguaaguuuguaucu

SEQ ID NO: 1402561 - RNA, 19 nt, Artificial Sequence
  Description of Artificial Sequence: Synthetic oligonucleotide
aggaacaaucucuugacuu

SEQ ID NO: 1402562 - RNA, 19 nt, Artificial Sequence
  Description of Artificial Sequence: Synthetic oligonucleotide
cauugucagguaaaccgcc

SEQ ID NO: 1402563 - RNA, 19 nt, Artificial Sequence
  Description of Artificial Sequence: Synthetic oligonucleotide
uggcagauugcuuccaucu

SEQ ID NO: 1402564 - RNA, 19 nt, Artificial Sequence
  Description of Artificial Sequence: Synthetic oligonucleotide
agcgcuuuguccaucugcc

SEQ ID NO: 1402565 - RNA, 19 nt, Artificial Sequence
  Description of Artificial Sequence: Synthetic oligonucleotide
agcgaugcuuacaagcagc

SEQ ID NO: 1402566 - RNA, 19 nt, Artificial Sequence
  Description of Artificial Sequence: Synthetic oligonucleotide
ucgaucaaagcgaugcuua

SEQ ID NO: 1402567 - RNA, 19 nt, Artificial Sequence
  Description of Artificial Sequence: Synthetic oligonucleotide
uaaucauuaccaagccacu

SEQ ID NO: 1402568 - RNA, 19 nt, Artificial Sequence
  Description of Artificial Sequence: Synthetic oligonucleotide
ucuaaaauggugguaucau

SEQ ID NO: 1402569 - RNA, 19 nt, Artificial Sequence
  Description of Artificial Sequence: Synthetic oligonucleotide
acacagaagguuucucauc

SEQ ID NO: 1402570 - RNA, 19 nt, Artificial Sequence
  Description of Artificial Sequence: Synthetic oligonucleotide
acuuccugaaaaguauuuc

SEQ ID NO: 1402571 - RNA, 19 nt, Artificial Sequence
  Description of Artificial Sequence: Synthetic oligonucleotide
cucguaaguuuguaucucc

SEQ ID NO: 1402572 - RNA, 19 nt, Artificial Sequence
  Description of Artificial Sequence: Synthetic oligonucleotide
ugggaugucauaaggcaaa

SEQ ID NO: 1402573 - RNA, 19 nt, Artificial Sequence
  Description of Artificial Sequence: Synthetic oligonucleotide
uugacuuauucguuccgca

SEQ ID NO: 1402574 - RNA, 19 nt, Artificial Sequence
  Description of Artificial Sequence: Synthetic oligonucleotide
acuaggaaaucuaccacag

SEQ ID NO: 1402575 - RNA, 19 nt, Artificial Sequence
  Description of Artificial Sequence: Synthetic oligonucleotide
uuacaagcagcaggaaucc

SEQ ID NO: 1402576 - RNA, 19 nt, Artificial Sequence
  Description of Artificial Sequence: Synthetic oligonucleotide
gucguucucggacaggaag

SEQ ID NO: 1402577 - RNA, 19 nt, Artificial Sequence
  Description of Artificial Sequence: Synthetic oligonucleotide
ucuagaggagguccagaug

SEQ ID NO: 1402578 - RNA, 19 nt, Artificial Sequence
  Description of Artificial Sequence: Synthetic oligonucleotide
ugcuaucuucuagaggagg

SEQ ID NO: 1402579 - RNA, 19 nt, Artificial Sequence
  Description of Artificial Sequence: Synthetic oligonucleotide
aucaauauuccagguaaug

SEQ ID NO: 1402580 - RNA, 19 nt, Artificial Sequence
  Description of Artificial Sequence: Synthetic oligonucleotide
aaguuuguaucuccugcaa

SEQ ID NO: 1402581 - RNA, 19 nt, Artificial Sequence
  Description of Artificial Sequence: Synthetic oligonucleotide
cugugaaauauccuucuuc

SEQ ID NO: 1402582 - RNA, 19 nt, Artificial Sequence
  Description of Artificial Sequence: Synthetic oligonucleotide
gguaucauuugcauccucg

SEQ ID NO: 1402583 - RNA, 19 nt, Artificial Sequence
  Description of Artificial Sequence: Synthetic oligonucleotide
gaccccagugaucacuagg

SEQ ID NO: 1402584 - RNA, 19 nt, Artificial Sequence
  Description of Artificial Sequence: Synthetic oligonucleotide
uguaucccauguauacuga

SEQ ID NO: 1402585 - RNA, 19 nt, Artificial Sequence
  Description of Artificial Sequence: Synthetic oligonucleotide
ucauuaccuguaauaauuu

SEQ ID NO: 1402586 - RNA, 19 nt, Artificial Sequence
  Description of Artificial Sequence: Synthetic oligonucleotide
ucgccaccaacgcaaaacc

SEQ ID NO: 1402587 - RNA, 19 nt, Artificial Sequence
  Description of Artificial Sequence: Synthetic oligonucleotide
aaaccuagcuuuccugaaa

SEQ ID NO: 1402588 - RNA, 19 nt, Artificial Sequence
  Description of Artificial Sequence: Synthetic oligonucleotide
aauacucgaucaaagcgau

SEQ ID NO: 1402589 - RNA, 19 nt, Artificial Sequence
  Description of Artificial Sequence: Synthetic oligonucleotide
guauacugacaauguuugg

SEQ ID NO: 1402590 - RNA, 19 nt, Artificial Sequence
  Description of Artificial Sequence: Synthetic oligonucleotide
cuaaacuuuggggaauaag

SEQ ID NO: 1402591 - RNA, 19 nt, Artificial Sequence
  Description of Artificial Sequence: Synthetic oligonucleotide
gacuuauucguuccgcaga

SEQ ID NO: 1402592 - RNA, 19 nt, Artificial Sequence
  Description of Artificial Sequence: Synthetic oligonucleotide
agauugcuuccaucuaguc

SEQ ID NO: 1402593 - RNA, 19 nt, Artificial Sequence
  Description of Artificial Sequence: Synthetic oligonucleotide
aaccgccacauuugauaac

SEQ ID NO: 1402594 - RNA, 19 nt, Artificial Sequence
  Description of Artificial Sequence: Synthetic oligonucleotide
cuacugcaaacauguaaag

SEQ ID NO: 1402595 - RNA, 19 nt, Artificial Sequence
  Description of Artificial Sequence: Synthetic oligonucleotide
ucguaaguuuguaucuccu

SEQ ID NO: 1402596 - RNA, 19 nt, Artificial Sequence
  Description of Artificial Sequence: Synthetic oligonucleotide
aguucuaauggcagcaaug

SEQ ID NO: 1402597 - RNA, 19 nt, Artificial Sequence
  Description of Artificial Sequence: Synthetic oligonucleotide
ucaaagcgaugcuuacaag

SEQ ID NO: 1402598 - RNA, 19 nt, Artificial Sequence
  Description of Artificial Sequence: Synthetic oligonucleotide
gauuacacacaccaaugcu

SEQ ID NO: 1402599 - RNA, 19 nt, Artificial Sequence
  Description of Artificial Sequence: Synthetic oligonucleotide
caaaagcaugcuuugauua

SEQ ID NO: 1402600 - RNA, 19 nt, Artificial Sequence
  Description of Artificial Sequence: Synthetic oligonucleotide
uucuagaggagguccagau

SEQ ID NO: 1402601 - RNA, 19 nt, Artificial Sequence
  Description of Artificial Sequence: Synthetic oligonucleotide
aagccgccgucucuucacc

SEQ ID NO: 1402602 - RNA, 19 nt, Artificial Sequence
  Description of Artificial Sequence: Synthetic oligonucleotide
gauaacuucaugaucucgu

SEQ ID NO: 1402603 - RNA, 19 nt, Artificial Sequence
  Description of Artificial Sequence: Synthetic oligonucleotide
uguucuuguaucccaugua

SEQ ID NO: 1402604 - RNA, 19 nt, Artificial Sequence
  Description of Artificial Sequence: Synthetic oligonucleotide
uucgccaccaacgcaaaac

SEQ ID NO: 1402605 - RNA, 19 nt, Artificial Sequence
  Description of Artificial Sequence: Synthetic oligonucleotide
acuuauucguuccgcagaa

SEQ ID NO: 1402606 - RNA, 19 nt, Artificial Sequence
  Description of Artificial Sequence: Synthetic oligonucleotide
aaaucuguauggguccaga

SEQ ID NO: 1402607 - RNA, 19 nt, Artificial Sequence
  Description of Artificial Sequence: Synthetic oligonucleotide
uuaggacacaagcuacaaa

SEQ ID NO: 1402608 - RNA, 19 nt, Artificial Sequence
  Description of Artificial Sequence: Synthetic oligonucleotide
uccaucuuaccaguaacaa

SEQ ID NO: 1402609 - RNA, 19 nt, Artificial Sequence
  Description of Artificial Sequence: Synthetic oligonucleotide
ggcgguucgaaguaggcgc

SEQ ID NO: 1402610 - RNA, 19 nt, Artificial Sequence
  Description of Artificial Sequence: Synthetic oligonucleotide
uguuacaagcugaguggcu

SEQ ID NO: 1402611 - RNA, 19 nt, Artificial Sequence
  Description of Artificial Sequence: Synthetic oligonucleotide
uaaaccuagcuuuccugaa

SEQ ID NO: 1402612 - RNA, 19 nt, Artificial Sequence
  Description of Artificial Sequence: Synthetic oligonucleotide
gauugaaaucuguaugggu

SEQ ID NO: 1402613 - RNA, 19 nt, Artificial Sequence
  Description of Artificial Sequence: Synthetic oligonucleotide
aacaguaguugaaucugga

SEQ ID NO: 1402614 - RNA, 19 nt, Artificial Sequence
  Description of Artificial Sequence: Synthetic oligonucleotide
guauuuguucuuguauccc

SEQ ID NO: 1402615 - RNA, 19 nt, Artificial Sequence
  Description of Artificial Sequence: Synthetic oligonucleotide
ucgcauucacacacagaag

SEQ ID NO: 1402616 - RNA, 19 nt, Artificial Sequence
  Description of Artificial Sequence: Synthetic oligonucleotide
uucuccggcgguucgaagu

SEQ ID NO: 1402617 - RNA, 19 nt, Artificial Sequence
  Description of Artificial Sequence: Synthetic oligonucleotide
gaaguaggcgcucagcgcu

SEQ ID NO: 1402618 - RNA, 19 nt, Artificial Sequence
  Description of Artificial Sequence: Synthetic oligonucleotide
uguaacuacuuuugaugua

SEQ ID NO: 1402619 - RNA, 19 nt, Artificial Sequence
  Description of Artificial Sequence: Synthetic oligonucleotide
cauuucgccaccaacgcaa

SEQ ID NO: 1402620 - RNA, 19 nt, Artificial Sequence
  Description of Artificial Sequence: Synthetic oligonucleotide
uuuccacccacacucgcau

SEQ ID NO: 1402621 - RNA, 19 nt, Artificial Sequence
  Description of Artificial Sequence: Synthetic oligonucleotide
uaacuacuuuugauguacu

SEQ ID NO: 1402622 - RNA, 19 nt, Artificial Sequence
  Description of Artificial Sequence: Synthetic oligonucleotide
agugaucacuaggaaaucu

SEQ ID NO: 1402623 - RNA, 19 nt, Artificial Sequence
  Description of Artificial Sequence: Synthetic oligonucleotide
uucuuguaucccauguaua

SEQ ID NO: 1402624 - RNA, 19 nt, Artificial Sequence
  Description of Artificial Sequence: Synthetic oligonucleotide
ugaucucguaaguuuguau

SEQ ID NO: 1402625 - RNA, 19 nt, Artificial Sequence
  Description of Artificial Sequence: Synthetic oligonucleotide
uaccaagccacuacuugaa

SEQ ID NO: 1402626 - RNA, 19 nt, Artificial Sequence
  Description of Artificial Sequence: Synthetic oligonucleotide
caaugagcacuguuacaag

SEQ ID NO: 1402627 - RNA, 19 nt, Artificial Sequence
  Description of Artificial Sequence: Synthetic oligonucleotide
cagcaaugagcacuguuac

SEQ ID NO: 1402628 - RNA, 19 nt, Artificial Sequence
  Description of Artificial Sequence: Synthetic oligonucleotide
gaacacaccccucgagccc

SEQ ID NO: 1402629 - RNA, 19 nt, Artificial Sequence
  Description of Artificial Sequence: Synthetic oligonucleotide
aguuuguaucuccugcaaa

SEQ ID NO: 1402630 - RNA, 19 nt, Artificial Sequence
  Description of Artificial Sequence: Synthetic oligonucleotide
aggucuaaacuuuggggaa

SEQ ID NO: 1402631 - RNA, 19 nt, Artificial Sequence
  Description of Artificial Sequence: Synthetic oligonucleotide
uuacaagcugaguggcucu

SEQ ID NO: 1402632 - RNA, 19 nt, Artificial Sequence
  Description of Artificial Sequence: Synthetic oligonucleotide
aggaaguugugggccaucg

SEQ ID NO: 1402633 - RNA, 19 nt, Artificial Sequence
  Description of Artificial Sequence: Synthetic oligonucleotide
uccggcgguucgaaguagg

SEQ ID NO: 1402634 - RNA, 19 nt, Artificial Sequence
  Description of Artificial Sequence: Synthetic oligonucleotide
cacucaaauugcacaggag

SEQ ID NO: 1402635 - RNA, 19 nt, Artificial Sequence
  Description of Artificial Sequence: Synthetic oligonucleotide
agcucaaauuuggaaagcu

SEQ ID NO: 1402636 - RNA, 19 nt, Artificial Sequence
  Description of Artificial Sequence: Synthetic oligonucleotide
cuguuacaagcugaguggc

SEQ ID NO: 1402637 - RNA, 19 nt, Artificial Sequence
  Description of Artificial Sequence: Synthetic oligonucleotide
ggaacacaccccucgagcc

SEQ ID NO: 1402638 - RNA, 19 nt, Artificial Sequence
  Description of Artificial Sequence: Synthetic oligonucleotide
acacaagcuacaaaguaaa

SEQ ID NO: 1402639 - RNA, 19 nt, Artificial Sequence
  Description of Artificial Sequence: Synthetic oligonucleotide
auaagguggcccucuucug

SEQ ID NO: 1402640 - RNA, 19 nt, Artificial Sequence
  Description of Artificial Sequence: Synthetic oligonucleotide
guuuguaucuccugcaaau

SEQ ID NO: 1402641 - RNA, 19 nt, Artificial Sequence
  Description of Artificial Sequence: Synthetic oligonucleotide
augcugcuaucuucuagag

SEQ ID NO: 1402642 - RNA, 19 nt, Artificial Sequence
  Description of Artificial Sequence: Synthetic oligonucleotide
  modified_base (8)..(8): a, c, u, g, unknown or other
aaauuccnuauggcuuaag

SEQ ID NO: 1402643 - RNA, 19 nt, Artificial Sequence
  Description of Artificial Sequence: Synthetic oligonucleotide
uuuguaucuccugcaaaua

SEQ ID NO: 1402644 - RNA, 19 nt, Artificial Sequence
  Description of Artificial Sequence: Synthetic oligonucleotide
uacuaaugauccaguuuau

SEQ ID NO: 1402645 - RNA, 19 nt, Artificial Sequence
  Description of Artificial Sequence: Synthetic oligonucleotide
agaagguuucucaucauuu

SEQ ID NO: 1402646 - RNA, 19 nt, Artificial Sequence
  Description of Artificial Sequence: Synthetic oligonucleotide
cacaccaaugcuuaauucu

SEQ ID NO: 1402647 - RNA, 19 nt, Artificial Sequence
  Description of Artificial Sequence: Synthetic oligonucleotide
cauuugauaacuucaugau

SEQ ID NO: 1402648 - RNA, 19 nt, Artificial Sequence
  Description of Artificial Sequence: Synthetic oligonucleotide
aacacaccccucgagcccu

SEQ ID NO: 1402649 - RNA, 19 nt, Artificial Sequence
  Description of Artificial Sequence: Synthetic oligonucleotide
ugggccaucguggugucgc

SEQ ID NO: 1402650 - RNA, 19 nt, Artificial Sequence
  Description of Artificial Sequence: Synthetic oligonucleotide
gcuggguguaaucauuacc

SEQ ID NO: 1402651 - RNA, 19 nt, Artificial Sequence
  Description of Artificial Sequence: Synthetic oligonucleotide
uggguguaaucauuaccaa

SEQ ID NO: 1402652 - RNA, 19 nt, Artificial Sequence
  Description of Artificial Sequence: Synthetic oligonucleotide
guaucccauguauacugac

SEQ ID NO: 1402653 - RNA, 19 nt, Artificial Sequence
  Description of Artificial Sequence: Synthetic oligonucleotide
ucucguaaguuuguaucuc

SEQ ID NO: 1402654 - RNA, 19 nt, Artificial Sequence
  Description of Artificial Sequence: Synthetic oligonucleotide
cagcgcuuuguccaucugc

SEQ ID NO: 1402655 - RNA, 19 nt, Artificial Sequence
  Description of Artificial Sequence: Synthetic oligonucleotide
cugccagucguucucggac

SEQ ID NO: 1402656 - RNA, 19 nt, Artificial Sequence
  Description of Artificial Sequence: Synthetic oligonucleotide
gaagccgccgucucuucac

SEQ ID NO: 1402657 - RNA, 19 nt, Artificial Sequence
  Description of Artificial Sequence: Synthetic oligonucleotide
agguaaaccgccacauuug

SEQ ID NO: 1402658 - RNA, 19 nt, Artificial Sequence
  Description of Artificial Sequence: Synthetic oligonucleotide
uggugguaucauuugcauc

SEQ ID NO: 1402659 - RNA, 19 nt, Artificial Sequence
  Description of Artificial Sequence: Synthetic oligonucleotide
uucgaaguaggcgcucagc

SEQ ID NO: 1402660 - RNA, 19 nt, Artificial Sequence
  Description of Artificial Sequence: Synthetic oligonucleotide
guccagaacuacugcaaac

SEQ ID NO: 1402661 - RNA, 19 nt, Artificial Sequence
  Description of Artificial Sequence: Synthetic oligonucleotide
cuacuuuugauguacuaau

SEQ ID NO: 1402662 - RNA, 19 nt, Artificial Sequence
  Description of Artificial Sequence: Synthetic oligonucleotide
accaagccacuacuugaag

SEQ ID NO: 1402663 - RNA, 19 nt, Artificial Sequence
  Description of Artificial Sequence: Synthetic oligonucleotide
  modified_base (9)..(9): a, c, u, g, unknown or other
aaaauuccnuauggcuuaa

SEQ ID NO: 1402664 - RNA, 19 nt, Artificial Sequence
  Description of Artificial Sequence: Synthetic oligonucleotide
gcuauucacaauacuacac

SEQ ID NO: 1402665 - RNA, 19 nt, Artificial Sequence
  Description of Artificial Sequence: Synthetic oligonucleotide
uauuuccaucuuaccagua

SEQ ID NO: 1402666 - RNA, 19 nt, Artificial Sequence
  Description of Artificial Sequence: Synthetic oligonucleotide
caaagcuaggcaggaacac

SEQ ID NO: 1402667 - RNA, 19 nt, Artificial Sequence
  Description of Artificial Sequence: Synthetic oligonucleotide
ugaagccgccgucucuuca

SEQ ID NO: 1402668 - RNA, 19 nt, Artificial Sequence
  Description of Artificial Sequence: Synthetic oligonucleotide
gucgcauuucgccaccaac

SEQ ID NO: 1402669 - RNA, 19 nt, Artificial Sequence
  Description of Artificial Sequence: Synthetic oligonucleotide
aaucuaccacaguccaguu

SEQ ID NO: 1402670 - RNA, 19 nt, Artificial Sequence
  Description of Artificial Sequence: Synthetic oligonucleotide
uggugucgcauuucgccac

SEQ ID NO: 1402671 - RNA, 19 nt, Artificial Sequence
  Description of Artificial Sequence: Synthetic oligonucleotide
caauauagcugugaaauau

SEQ ID NO: 1402672 - RNA, 19 nt, Artificial Sequence
  Description of Artificial Sequence: Synthetic oligonucleotide
uaccuguaauaauuuugua

SEQ ID NO: 1402673 - RNA, 19 nt, Artificial Sequence
  Description of Artificial Sequence: Synthetic oligonucleotide
gcaaugagcacuguuacaa

SEQ ID NO: 1402674 - RNA, 19 nt, Artificial Sequence
  Description of Artificial Sequence: Synthetic oligonucleotide
cuuuagguaggcacaauau

SEQ ID NO: 1402675 - RNA, 19 nt, Artificial Sequence
  Description of Artificial Sequence: Synthetic oligonucleotide
augcacugaagccgccguc

SEQ ID NO: 1402676 - RNA, 19 nt, Artificial Sequence
  Description of Artificial Sequence: Synthetic oligonucleotide
uccaacccaacaaggucua

SEQ ID NO: 1402677 - RNA, 19 nt, Artificial Sequence
  Description of Artificial Sequence: Synthetic oligonucleotide
aggcacaauaugaaggaau

SEQ ID NO: 1402678 - RNA, 19 nt, Artificial Sequence
  Description of Artificial Sequence: Synthetic oligonucleotide
ccugaaagauugaaaucug

SEQ ID NO: 1402679 - RNA, 19 nt, Artificial Sequence
  Description of Artificial Sequence: Synthetic oligonucleotide
cuaucuucuagaggagguc

SEQ ID NO: 1402680 - RNA, 19 nt, Artificial Sequence
  Description of Artificial Sequence: Synthetic oligonucleotide
caacaauauagcugugaaa

SEQ ID NO: 1402681 - RNA, 19 nt, Artificial Sequence
  Description of Artificial Sequence: Synthetic oligonucleotide
cucgagcccucucuggcag

SEQ ID NO: 1402682 - RNA, 19 nt, Artificial Sequence
  Description of Artificial Sequence: Synthetic oligonucleotide
uguuuggguuugcccaaaa

SEQ ID NO: 1402683 - RNA, 19 nt, Artificial Sequence
  Description of Artificial Sequence: Synthetic oligonucleotide
cugcuaucuucuagaggag

SEQ ID NO: 1402684 - RNA, 19 nt, Artificial Sequence
  Description of Artificial Sequence: Synthetic oligonucleotide
ucagguaaaccgccacauu

SEQ ID NO: 1402685 - RNA, 19 nt, Artificial Sequence
  Description of Artificial Sequence: Synthetic oligonucleotide
acgcaaaaccccaugcacu

SEQ ID NO: 1402686 - RNA, 19 nt, Artificial Sequence
  Description of Artificial Sequence: Synthetic oligonucleotide
ccaacgcaaaaccccaugc

SEQ ID NO: 1402687 - RNA, 19 nt, Artificial Sequence
  Description of Artificial Sequence: Synthetic oligonucleotide
uugcauccucgucgguuag

SEQ ID NO: 1402688 - RNA, 19 nt, Artificial Sequence
  Description of Artificial Sequence: Synthetic oligonucleotide
gaagguuucucaucauuuu

SEQ ID NO: 1402689 - RNA, 19 nt, Artificial Sequence
  Description of Artificial Sequence: Synthetic oligonucleotide
gauguacuaaugauccagu

SEQ ID NO: 1402690 - RNA, 19 nt, Artificial Sequence
  Description of Artificial Sequence: Synthetic oligonucleotide
acaccaaugcuuaauucuu

SEQ ID NO: 1402691 - RNA, 19 nt, Artificial Sequence
  Description of Artificial Sequence: Synthetic oligonucleotide
auucguuccgcagaauguu

SEQ ID NO: 1402692 - RNA, 19 nt, Artificial Sequence
  Description of Artificial Sequence: Synthetic oligonucleotide
ucguggugucgcauuucgc

SEQ ID NO: 1402693 - RNA, 19 nt, Artificial Sequence
  Description of Artificial Sequence: Synthetic oligonucleotide
acuaaugauccaguuuauu

SEQ ID NO: 1402694 - RNA, 19 nt, Artificial Sequence
  Description of Artificial Sequence: Synthetic oligonucleotide
ucuccggcgguucgaagua

SEQ ID NO: 1402695 - RNA, 19 nt, Artificial Sequence
  Description of Artificial Sequence: Synthetic oligonucleotide
gguaaaccgccacauuuga

SEQ ID NO: 1402696 - RNA, 19 nt, Artificial Sequence
  Description of Artificial Sequence: Synthetic oligonucleotide
auacuacacucaaauugca

SEQ ID NO: 1402697 - RNA, 19 nt, Artificial Sequence
  Description of Artificial Sequence: Synthetic oligonucleotide
guggugucgcauuucgcca

SEQ ID NO: 1402698 - RNA, 19 nt, Artificial Sequence
  Description of Artificial Sequence: Synthetic oligonucleotide
gccaccaacgcaaaacccc

SEQ ID NO: 1402699 - RNA, 19 nt, Artificial Sequence
  Description of Artificial Sequence: Synthetic oligonucleotide
caacauaggccucggaucu

SEQ ID NO: 1402700 - RNA, 19 nt, Artificial Sequence
  Description of Artificial Sequence: Synthetic oligonucleotide
ggaaagcuauucacaauac

SEQ ID NO: 1402701 - RNA, 19 nt, Artificial Sequence
  Description of Artificial Sequence: Synthetic oligonucleotide
gucguucuccggcgguucg

SEQ ID NO: 1402702 - RNA, 19 nt, Artificial Sequence
  Description of Artificial Sequence: Synthetic oligonucleotide
ggacacaagcuacaaagua

SEQ ID NO: 1402703 - RNA, 19 nt, Artificial Sequence
  Description of Artificial Sequence: Synthetic oligonucleotide
ucccauguauacugacaau

SEQ ID NO: 1402704 - RNA, 19 nt, Artificial Sequence
  Description of Artificial Sequence: Synthetic oligonucleotide
uaggcacaauaugaaggaa

SEQ ID NO: 1402705 - RNA, 19 nt, Artificial Sequence
  Description of Artificial Sequence: Synthetic oligonucleotide
gagauaaugcugcuaucuu

SEQ ID NO: 1402706 - RNA, 19 nt, Artificial Sequence
  Description of Artificial Sequence: Synthetic oligonucleotide
acauaggccucggaucuga

SEQ ID NO: 1402707 - RNA, 19 nt, Artificial Sequence
  Description of Artificial Sequence: Synthetic oligonucleotide
cacgcggggucguucuccg

SEQ ID NO: 1402708 - RNA, 19 nt, Artificial Sequence
  Description of Artificial Sequence: Synthetic oligonucleotide
gaaguucuaauggcagcaa

SEQ ID NO: 1402709 - RNA, 19 nt, Artificial Sequence
  Description of Artificial Sequence: Synthetic oligonucleotide
ugucgcauuucgccaccaa

SEQ ID NO: 1402710 - RNA, 19 nt, Artificial Sequence
  Description of Artificial Sequence: Synthetic oligonucleotide
cuuaggacacaagcuacaa

SEQ ID NO: 1402711 - RNA, 19 nt, Artificial Sequence
  Description of Artificial Sequence: Synthetic oligonucleotide
uuucgccaccaacgcaaaa

SEQ ID NO: 1402712 - RNA, 19 nt, Artificial Sequence
  Description of Artificial Sequence: Synthetic oligonucleotide
  modified_base (3)..(3): a, c, u, g, unknown or other
ccnuauggcuuaagcuggg

SEQ ID NO: 1402713 - RNA, 19 nt, Artificial Sequence
  Description of Artificial Sequence: Synthetic oligonucleotide
ggaauccugagauuaguau

SEQ ID NO: 1402714 - RNA, 19 nt, Artificial Sequence
  Description of Artificial Sequence: Synthetic oligonucleotide
cacuacuugaaguucuaau

SEQ ID NO: 1402715 - RNA, 19 nt, Artificial Sequence
  Description of Artificial Sequence: Synthetic oligonucleotide
cucgucgguuagaucaaca

SEQ ID NO: 1402716 - RNA, 19 nt, Artificial Sequence
  Description of Artificial Sequence: Synthetic oligonucleotide
cagucguucucggacagga

SEQ ID NO: 1402717 - RNA, 19 nt, Artificial Sequence
  Description of Artificial Sequence: Synthetic oligonucleotide
ggcacaauaugaaggaaua

SEQ ID NO: 1402718 - RNA, 19 nt, Artificial Sequence
  Description of Artificial Sequence: Synthetic oligonucleotide
cuucuuuagguaggcacaa

SEQ ID NO: 1402719 - RNA, 19 nt, Artificial Sequence
  Description of Artificial Sequence: Synthetic oligonucleotide
cgguuagaucaacauaggc

SEQ ID NO: 1402720 - RNA, 19 nt, Artificial Sequence
  Description of Artificial Sequence: Synthetic oligonucleotide
aggaauccugagauuagua

SEQ ID NO: 1402721 - RNA, 19 nt, Artificial Sequence
  Description of Artificial Sequence: Synthetic oligonucleotide
caugaucucguaaguuugu

SEQ ID NO: 1402722 - RNA, 19 nt, Artificial Sequence
  Description of Artificial Sequence: Synthetic oligonucleotide
auggcuuaagcugggugua

SEQ ID NO: 1402723 - RNA, 19 nt, Artificial Sequence
  Description of Artificial Sequence: Synthetic oligonucleotide
augaucucguaaguuugua

SEQ ID NO: 1402724 - RNA, 19 nt, Artificial Sequence
  Description of Artificial Sequence: Synthetic oligonucleotide
cacacagaagguuucucau

SEQ ID NO: 1402725 - RNA, 19 nt, Artificial Sequence
  Description of Artificial Sequence: Synthetic oligonucleotide
cagauugcuuccaucuagu

SEQ ID NO: 1402726 - RNA, 19 nt, Artificial Sequence
  Description of Artificial Sequence: Synthetic oligonucleotide
accccucgagcccucucug

SEQ ID NO: 1402727 - RNA, 19 nt, Artificial Sequence
  Description of Artificial Sequence: Synthetic oligonucleotide
cagugaucacuaggaaauc

SEQ ID NO: 1402728 - RNA, 19 nt, Artificial Sequence
  Description of Artificial Sequence: Synthetic oligonucleotide
gugaaauauccuucuucau

SEQ ID NO: 1402729 - RNA, 19 nt, Artificial Sequence
  Description of Artificial Sequence: Synthetic oligonucleotide
ggugucgcauuucgccacc

SEQ ID NO: 1402730 - RNA, 19 nt, Artificial Sequence
  Description of Artificial Sequence: Synthetic oligonucleotide
ugcauccucgucgguuaga

SEQ ID NO: 1402731 - RNA, 19 nt, Artificial Sequence
  Description of Artificial Sequence: Synthetic oligonucleotide
cgaaguaggcgcucagcgc

SEQ ID NO: 1402732 - RNA, 19 nt, Artificial Sequence
  Description of Artificial Sequence: Synthetic oligonucleotide
cgcauuucgccaccaacgc

SEQ ID NO: 1402733 - RNA, 19 nt, Artificial Sequence
  Description of Artificial Sequence: Synthetic oligonucleotide
ugcuuacaagcagcaggaa

SEQ ID NO: 1402734 - RNA, 19 nt, Artificial Sequence
  Description of Artificial Sequence: Synthetic oligonucleotide
acucgcauucacacacaga

SEQ ID NO: 1402735 - RNA, 19 nt, Artificial Sequence
  Description of Artificial Sequence: Synthetic oligonucleotide
auacucgaucaaagcgaug

SEQ ID NO: 1402736 - RNA, 19 nt, Artificial Sequence
  Description of Artificial Sequence: Synthetic oligonucleotide
gccagucguucucggacag

SEQ ID NO: 1402737 - RNA, 19 nt, Artificial Sequence
  Description of Artificial Sequence: Synthetic oligonucleotide
gucagguaaaccgccacau

SEQ ID NO: 1402738 - RNA, 19 nt, Artificial Sequence
  Description of Artificial Sequence: Synthetic oligonucleotide
uggcuuaagcuggguguaa

SEQ ID NO: 1402739 - RNA, 19 nt, Artificial Sequence
  Description of Artificial Sequence: Synthetic oligonucleotide
ccaucuuaccaguaacaaa

SEQ ID NO: 1402740 - RNA, 19 nt, Artificial Sequence
  Description of Artificial Sequence: Synthetic oligonucleotide
ccauguauacugacaaugu

SEQ ID NO: 1402741 - RNA, 19 nt, Artificial Sequence
  Description of Artificial Sequence: Synthetic oligonucleotide
ucgagcccucucuggcaga

SEQ ID NO: 1402742 - RNA, 19 nt, Artificial Sequence
  Description of Artificial Sequence: Synthetic oligonucleotide
ucguucuccggcgguucga

SEQ ID NO: 1402743 - RNA, 19 nt, Artificial Sequence
  Description of Artificial Sequence: Synthetic oligonucleotide
caucaauauuccagguaau

SEQ ID NO: 1402744 - RNA, 19 nt, Artificial Sequence
  Description of Artificial Sequence: Synthetic oligonucleotide
ccugagauuaguauuuguu

SEQ ID NO: 1402745 - RNA, 19 nt, Artificial Sequence
  Description of Artificial Sequence: Synthetic oligonucleotide
gcauuucgccaccaacgca

SEQ ID NO: 1402746 - RNA, 19 nt, Artificial Sequence
  Description of Artificial Sequence: Synthetic oligonucleotide
cauuaccaagccacuacuu

SEQ ID NO: 1402747 - RNA, 19 nt, Artificial Sequence
  Description of Artificial Sequence: Synthetic oligonucleotide
gcuuaauucuuaggacaca

SEQ ID NO: 1402748 - RNA, 19 nt, Artificial Sequence
  Description of Artificial Sequence: Synthetic oligonucleotide
cugaagccgccgucucuuc

SEQ ID NO: 1402749 - RNA, 19 nt, Artificial Sequence
  Description of Artificial Sequence: Synthetic oligonucleotide
guaggcgcucagcgcuuug

SEQ ID NO: 1402750 - RNA, 19 nt, Artificial Sequence
  Description of Artificial Sequence: Synthetic oligonucleotide
gcggggucguucuccggcg

SEQ ID NO: 1402751 - RNA, 19 nt, Artificial Sequence
  Description of Artificial Sequence: Synthetic oligonucleotide
gcuaucuucuagaggaggu

SEQ ID NO: 1402752 - RNA, 19 nt, Artificial Sequence
  Description of Artificial Sequence: Synthetic oligonucleotide
caucguggugucgcauuuc

SEQ ID NO: 1402753 - RNA, 19 nt, Artificial Sequence
  Description of Artificial Sequence: Synthetic oligonucleotide
caucggaggcuggcguggc

SEQ ID NO: 1402754 - RNA, 19 nt, Artificial Sequence
  Description of Artificial Sequence: Synthetic oligonucleotide
caugcacugaagccgccgu

SEQ ID NO: 1402755 - RNA, 19 nt, Artificial Sequence
  Description of Artificial Sequence: Synthetic oligonucleotide
cgccacauuugauaacuuc

SEQ ID NO: 1402756 - RNA, 19 nt, Artificial Sequence
  Description of Artificial Sequence: Synthetic oligonucleotide
auuucgccaccaacgcaaa

SEQ ID NO: 1402757 - RNA, 19 nt, Artificial Sequence
  Description of Artificial Sequence: Synthetic oligonucleotide
guacaaagcuaggcaggaa

SEQ ID NO: 1402758 - RNA, 19 nt, Artificial Sequence
  Description of Artificial Sequence: Synthetic oligonucleotide
acgcggggucguucuccgg

SEQ ID NO: 1402759 - RNA, 19 nt, Artificial Sequence
  Description of Artificial Sequence: Synthetic oligonucleotide
gaacuacugcaaacaugua

SEQ ID NO: 1402760 - RNA, 19 nt, Artificial Sequence
  Description of Artificial Sequence: Synthetic oligonucleotide
cucggaucugaaggacauc

SEQ ID NO: 1402761 - RNA, 19 nt, Artificial Sequence
  Description of Artificial Sequence: Synthetic oligonucleotide
gcacaauaugaaggaauaa

SEQ ID NO: 1402762 - RNA, 19 nt, Artificial Sequence
  Description of Artificial Sequence: Synthetic oligonucleotide
gcgaugcuuacaagcagca

SEQ ID NO: 1402763 - RNA, 19 nt, Artificial Sequence
  Description of Artificial Sequence: Synthetic oligonucleotide
ccaagccacuacuugaagu

SEQ ID NO: 1402764 - RNA, 19 nt, Artificial Sequence
  Description of Artificial Sequence: Synthetic oligonucleotide
cugaaggacaucggaggcu

SEQ ID NO: 1402765 - RNA, 19 nt, Artificial Sequence
  Description of Artificial Sequence: Synthetic oligonucleotide
ggcagauugcuuccaucua

SEQ ID NO: 1402766 - RNA, 19 nt, Artificial Sequence
  Description of Artificial Sequence: Synthetic oligonucleotide
cuccggcgguucgaaguag

SEQ ID NO: 1402767 - RNA, 19 nt, Artificial Sequence
  Description of Artificial Sequence: Synthetic oligonucleotide
cgccaccaacgcaaaaccc

SEQ ID NO: 1402768 - RNA, 19 nt, Artificial Sequence
  Description of Artificial Sequence: Synthetic oligonucleotide
ccggcgguucgaaguaggc

SEQ ID NO: 1402769 - RNA, 19 nt, Artificial Sequence
  Description of Artificial Sequence: Synthetic oligonucleotide
ccagguaaugaaagagaua

SEQ ID NO: 1402770 - RNA, 19 nt, Artificial Sequence
  Description of Artificial Sequence: Synthetic oligonucleotide
cauaggccucggaucugaa

SEQ ID NO: 1402771 - RNA, 19 nt, Artificial Sequence
  Description of Artificial Sequence: Synthetic oligonucleotide
ccacauuugauaacuucau

SEQ ID NO: 1402772 - RNA, 19 nt, Artificial Sequence
  Description of Artificial Sequence: Synthetic oligonucleotide
ggacaucggaggcuggcgu

SEQ ID NO: 1402773 - RNA, 19 nt, Artificial Sequence
  Description of Artificial Sequence: Synthetic oligonucleotide
aguaggcgcucagcgcuuu

SEQ ID NO: 1402774 - RNA, 19 nt, Artificial Sequence
  Description of Artificial Sequence: Synthetic oligonucleotide
ccgccgucucuucacccgg

SEQ ID NO: 1402775 - RNA, 19 nt, Artificial Sequence
  Description of Artificial Sequence: Synthetic oligonucleotide
  modified_base (2)..(2): a, c, u, g, unknown or other
cnuauggcuuaagcugggu

SEQ ID NO: 1402776 - RNA, 19 nt, Artificial Sequence
  Description of Artificial Sequence: Synthetic oligonucleotide
cggcgguucgaaguaggcg

SEQ ID NO: 1402777 - RNA, 19 nt, Artificial Sequence
  Description of Artificial Sequence: Synthetic oligonucleotide
ggaaguugugggccaucgu

SEQ ID NO: 1402778 - RNA, 19 nt, Artificial Sequence
  Description of Artificial Sequence: Synthetic oligonucleotide
ccagucguucucggacagg

SEQ ID NO: 1402779 - RNA, 19 nt, Artificial Sequence
  Description of Artificial Sequence: Synthetic oligonucleotide
ggucguucuccggcgguuc

SEQ ID NO: 1402780 - RNA, 19 nt, Artificial Sequence
  Description of Artificial Sequence: Synthetic oligonucleotide
gugucgcauuucgccacca

SEQ ID NO: 1402781 - RNA, 19 nt, Artificial Sequence
  Description of Artificial Sequence: Synthetic oligonucleotide
caccccucgagcccucucu

SEQ ID NO: 1402782 - RNA, 19 nt, Artificial Sequence
  Description of Artificial Sequence: Synthetic oligonucleotide
uggccacgcggggucguuc

SEQ ID NO: 1402783 - RNA, 19 nt, Artificial Sequence
  Description of Artificial Sequence: Synthetic oligonucleotide
ccacgcggggucguucucc

SEQ ID NO: 1402784 - RNA, 19 nt, Artificial Sequence
  Description of Artificial Sequence: Synthetic oligonucleotide
cgucgguuagaucaacaua

SEQ ID NO: 1402785 - RNA, 19 nt, Artificial Sequence
  Description of Artificial Sequence: Synthetic oligonucleotide
ggaauaagguggcccucuu

SEQ ID NO: 1402786 - RNA, 19 nt, Artificial Sequence
  Description of Artificial Sequence: Synthetic oligonucleotide
cuuauucguuccgcagaau

SEQ ID NO: 1402787 - RNA, 19 nt, Artificial Sequence
  Description of Artificial Sequence: Synthetic oligonucleotide
caccaacgcaaaaccccau

SEQ ID NO: 1402788 - RNA, 19 nt, Artificial Sequence
  Description of Artificial Sequence: Synthetic oligonucleotide
gccacuacuugaaguucua

SEQ ID NO: 1402789 - RNA, 19 nt, Artificial Sequence
  Description of Artificial Sequence: Synthetic oligonucleotide
gggccaucguggugucgca

SEQ ID NO: 1402790 - RNA, 19 nt, Artificial Sequence
  Description of Artificial Sequence: Synthetic oligonucleotide
gccaucguggugucgcauu

SEQ ID NO: 1402791 - RNA, 19 nt, Artificial Sequence
  Description of Artificial Sequence: Synthetic oligonucleotide
ccacuacuugaaguucuaa

SEQ ID NO: 1402792 - RNA, 19 nt, Artificial Sequence
  Description of Artificial Sequence: Synthetic oligonucleotide
ggccacgcggggucguucu

SEQ ID NO: 1402793 - RNA, 19 nt, Artificial Sequence
  Description of Artificial Sequence: Synthetic oligonucleotide
gcgguucgaaguaggcgcu

SEQ ID NO: 1402794 - RNA, 19 nt, Artificial Sequence
  Description of Artificial Sequence: Synthetic oligonucleotide
ccagauggacugguuucua

SEQ ID NO: 1402795 - RNA, 19 nt, Artificial Sequence
  Description of Artificial Sequence: Synthetic oligonucleotide
gccacgcggggucguucuc

SEQ ID NO: 1402796 - RNA, 19 nt, Artificial Sequence
  Description of Artificial Sequence: Synthetic oligonucleotide
cgguucgaaguaggcgcuc

SEQ ID NO: 1402797 - RNA, 19 nt, Artificial Sequence
  Description of Artificial Sequence: Synthetic oligonucleotide
cguucuccggcgguucgaa

SEQ ID NO: 1402798 - RNA, 19 nt, Artificial Sequence
  Description of Artificial Sequence: Synthetic oligonucleotide
gggucguucuccggcgguu

SEQ ID NO: 1402799 - RNA, 19 nt, Artificial Sequence
  Description of Artificial Sequence: Synthetic oligonucleotide
ggccaucguggugucgcau

SEQ ID NO: 1402800 - RNA, 19 nt, Artificial Sequence
  Description of Artificial Sequence: Synthetic oligonucleotide
cguucucggacaggaaguu

SEQ ID NO: 1402801 - RNA, 19 nt, Artificial Sequence
  Description of Artificial Sequence: Synthetic oligonucleotide
cguggccacgcggggucgu

SEQ ID NO: 1402802 - RNA, 19 nt, Artificial Sequence
  Description of Artificial Sequence: Synthetic oligonucleotide
aaaaugagacuuuucaagc

SEQ ID NO: 1402803 - RNA, 19 nt, Artificial Sequence
  Description of Artificial Sequence: Synthetic oligonucleotide
aaauucaaacaguacaagc

SEQ ID NO: 1402804 - RNA, 19 nt, Artificial Sequence
  Description of Artificial Sequence: Synthetic oligonucleotide
uguccaauaagguauaucg

SEQ ID NO: 1402805 - RNA, 19 nt, Artificial Sequence
  Description of Artificial Sequence: Synthetic oligonucleotide
aauucaaacaguacaagcc

SEQ ID NO: 1402806 - RNA, 19 nt, Artificial Sequence
  Description of Artificial Sequence: Synthetic oligonucleotide
uaugaguuuagcaagcugc

SEQ ID NO: 1402807 - RNA, 19 nt, Artificial Sequence
  Description of Artificial Sequence: Synthetic oligonucleotide
aaugagacuuuucaagcac

SEQ ID NO: 1402808 - RNA, 19 nt, Artificial Sequence
  Description of Artificial Sequence: Synthetic oligonucleotide
acuguuaacaacucgauca

SEQ ID NO: 1402809 - RNA, 19 nt, Artificial Sequence
  Description of Artificial Sequence: Synthetic oligonucleotide
aauggcaacauuagcaagc

SEQ ID NO: 1402810 - RNA, 19 nt, Artificial Sequence
  Description of Artificial Sequence: Synthetic oligonucleotide
agguauaucguuuaugauc

SEQ ID NO: 1402811 - RNA, 19 nt, Artificial Sequence
  Description of Artificial Sequence: Synthetic oligonucleotide
uuuguuagguuuuaauucc

SEQ ID NO: 1402812 - RNA, 19 nt, Artificial Sequence
  Description of Artificial Sequence: Synthetic oligonucleotide
aagcaugaaaccuggaaag

SEQ ID NO: 1402813 - RNA, 19 nt, Artificial Sequence
  Description of Artificial Sequence: Synthetic oligonucleotide
gaguauagcaaauucaaac

SEQ ID NO: 1402814 - RNA, 19 nt, Artificial Sequence
  Description of Artificial Sequence: Synthetic oligonucleotide
uaagguauaucguuuauga

SEQ ID NO: 1402815 - RNA, 19 nt, Artificial Sequence
  Description of Artificial Sequence: Synthetic oligonucleotide
uuuuguuagguuuuaauuc

SEQ ID NO: 1402816 - RNA, 19 nt, Artificial Sequence
  Description of Artificial Sequence: Synthetic oligonucleotide
agcaacaaagggcauaucg

SEQ ID NO: 1402817 - RNA, 19 nt, Artificial Sequence
  Description of Artificial Sequence: Synthetic oligonucleotide
acauuuaauggucaucugg

SEQ ID NO: 1402818 - RNA, 19 nt, Artificial Sequence
  Description of Artificial Sequence: Synthetic oligonucleotide
auuccaauuguuuucuaac

SEQ ID NO: 1402819 - RNA, 19 nt, Artificial Sequence
  Description of Artificial Sequence: Synthetic oligonucleotide
uaugaguauagcaaauuca

SEQ ID NO: 1402820 - RNA, 19 nt, Artificial Sequence
  Description of Artificial Sequence: Synthetic oligonucleotide
augcaagacauguugaacg

SEQ ID NO: 1402821 - RNA, 19 nt, Artificial Sequence
  Description of Artificial Sequence: Synthetic oligonucleotide
auaugaguauagcaaauuc

SEQ ID NO: 1402822 - RNA, 19 nt, Artificial Sequence
  Description of Artificial Sequence: Synthetic oligonucleotide
ucauuuguuuacaaagugc

SEQ ID NO: 1402823 - RNA, 19 nt, Artificial Sequence
  Description of Artificial Sequence: Synthetic oligonucleotide
ucucuguuuggcaaaaucc

SEQ ID NO: 1402824 - RNA, 19 nt, Artificial Sequence
  Description of Artificial Sequence: Synthetic oligonucleotide
ucaagcacugacuacgggg

SEQ ID NO: 1402825 - RNA, 19 nt, Artificial Sequence
  Description of Artificial Sequence: Synthetic oligonucleotide
aguauagcaaauucaaaca

SEQ ID NO: 1402826 - RNA, 19 nt, Artificial Sequence
  Description of Artificial Sequence: Synthetic oligonucleotide
uugguugcaacauacgaag

SEQ ID NO: 1402827 - RNA, 19 nt, Artificial Sequence
  Description of Artificial Sequence: Synthetic oligonucleotide
cuucaugaaguuuagacuc

SEQ ID NO: 1402828 - RNA, 19 nt, Artificial Sequence
  Description of Artificial Sequence: Synthetic oligonucleotide
uaaaacuccauuuccacgu

SEQ ID NO: 1402829 - RNA, 19 nt, Artificial Sequence
  Description of Artificial Sequence: Synthetic oligonucleotide
aacaacucgaucauugcac

SEQ ID NO: 1402830 - RNA, 19 nt, Artificial Sequence
  Description of Artificial Sequence: Synthetic oligonucleotide
acuuuaguuaucugguugg

SEQ ID NO: 1402831 - RNA, 19 nt, Artificial Sequence
  Description of Artificial Sequence: Synthetic oligonucleotide
cuuuccagcaacaaagggc

SEQ ID NO: 1402832 - RNA, 19 nt, Artificial Sequence
  Description of Artificial Sequence: Synthetic oligonucleotide
uguaaugaagcuugggccc

SEQ ID NO: 1402833 - RNA, 19 nt, Artificial Sequence
  Description of Artificial Sequence: Synthetic oligonucleotide
ugugcaccaaaauaguucc

SEQ ID NO: 1402834 - RNA, 19 nt, Artificial Sequence
  Description of Artificial Sequence: Synthetic oligonucleotide
uaagacauccgacaguucu

SEQ ID NO: 1402835 - RNA, 19 nt, Artificial Sequence
  Description of Artificial Sequence: Synthetic oligonucleotide
ucgaucauugcacaaagcu

SEQ ID NO: 1402836 - RNA, 19 nt, Artificial Sequence
  Description of Artificial Sequence: Synthetic oligonucleotide
ucuggugucaguaauccca

SEQ ID NO: 1402837 - RNA, 19 nt, Artificial Sequence
  Description of Artificial Sequence: Synthetic oligonucleotide
aagggcauaucgccuaagc

SEQ ID NO: 1402838 - RNA, 19 nt, Artificial Sequence
  Description of Artificial Sequence: Synthetic oligonucleotide
ucauauuucgcauguauuc

SEQ ID NO: 1402839 - RNA, 19 nt, Artificial Sequence
  Description of Artificial Sequence: Synthetic oligonucleotide
aaaugagacuuuucaagca

SEQ ID NO: 1402840 - RNA, 19 nt, Artificial Sequence
  Description of Artificial Sequence: Synthetic oligonucleotide
ucuucaugaaguuuagacu

SEQ ID NO: 1402841 - RNA, 19 nt, Artificial Sequence
  Description of Artificial Sequence: Synthetic oligonucleotide
uauaucguuuaugaucugg

SEQ ID NO: 1402842 - RNA, 19 nt, Artificial Sequence
  Description of Artificial Sequence: Synthetic oligonucleotide
gaaaguagaggucacuuca

SEQ ID NO: 1402843 - RNA, 19 nt, Artificial Sequence
  Description of Artificial Sequence: Synthetic oligonucleotide
uuuguuuacaaagugcagu

SEQ ID NO: 1402844 - RNA, 19 nt, Artificial Sequence
  Description of Artificial Sequence: Synthetic oligonucleotide
auuucugcgugcuuuauca

SEQ ID NO: 1402845 - RNA, 19 nt, Artificial Sequence
  Description of Artificial Sequence: Synthetic oligonucleotide
uguugguugcaacauacga

SEQ ID NO: 1402846 - RNA, 19 nt, Artificial Sequence
  Description of Artificial Sequence: Synthetic oligonucleotide
aguaauggcaacauuagca

SEQ ID NO: 1402847 - RNA, 19 nt, Artificial Sequence
  Description of Artificial Sequence: Synthetic oligonucleotide
ugcugcaugacacaagaga

SEQ ID NO: 1402848 - RNA, 19 nt, Artificial Sequence
  Description of Artificial Sequence: Synthetic oligonucleotide
aucguagugaguuugcugu

SEQ ID NO: 1402849 - RNA, 19 nt, Artificial Sequence
  Description of Artificial Sequence: Synthetic oligonucleotide
aguauaugaguauagcaaa

SEQ ID NO: 1402850 - RNA, 19 nt, Artificial Sequence
  Description of Artificial Sequence: Synthetic oligonucleotide
ucuguaauguggcugugca

SEQ ID NO: 1402851 - RNA, 19 nt, Artificial Sequence
  Description of Artificial Sequence: Synthetic oligonucleotide
uccuguaugaguuuagcaa

SEQ ID NO: 1402852 - RNA, 19 nt, Artificial Sequence
  Description of Artificial Sequence: Synthetic oligonucleotide
gacacaagagacuguaaug

SEQ ID NO: 1402853 - RNA, 19 nt, Artificial Sequence
  Description of Artificial Sequence: Synthetic oligonucleotide
caguacaagccucucaugg

SEQ ID NO: 1402854 - RNA, 19 nt, Artificial Sequence
  Description of Artificial Sequence: Synthetic oligonucleotide
ucucaugguguaaaacucc

SEQ ID NO: 1402855 - RNA, 19 nt, Artificial Sequence
  Description of Artificial Sequence: Synthetic oligonucleotide
uuuagacuccaacucuugc

SEQ ID NO: 1402856 - RNA, 19 nt, Artificial Sequence
  Description of Artificial Sequence: Synthetic oligonucleotide
aucguuuaugaucuggugu

SEQ ID NO: 1402857 - RNA, 19 nt, Artificial Sequence
  Description of Artificial Sequence: Synthetic oligonucleotide
ucuuacuacuccugcaacc

SEQ ID NO: 1402858 - RNA, 19 nt, Artificial Sequence
  Description of Artificial Sequence: Synthetic oligonucleotide
uuuacuguggugcuucauc

SEQ ID NO: 1402859 - RNA, 19 nt, Artificial Sequence
  Description of Artificial Sequence: Synthetic oligonucleotide
uuucaagcacugacuacgg

SEQ ID NO: 1402860 - RNA, 19 nt, Artificial Sequence
  Description of Artificial Sequence: Synthetic oligonucleotide
uccaauaagguauaucguu

SEQ ID NO: 1402861 - RNA, 19 nt, Artificial Sequence
  Description of Artificial Sequence: Synthetic oligonucleotide
caagacauguugaacguug

SEQ ID NO: 1402862 - RNA, 19 nt, Artificial Sequence
  Description of Artificial Sequence: Synthetic oligonucleotide
uaacaacucgaucauugca

SEQ ID NO: 1402863 - RNA, 19 nt, Artificial Sequence
  Description of Artificial Sequence: Synthetic oligonucleotide
cagucugcaacucugcugc

SEQ ID NO: 1402864 - RNA, 19 nt, Artificial Sequence
  Description of Artificial Sequence: Synthetic oligonucleotide
ugcaugacacaagagacug

SEQ ID NO: 1402865 - RNA, 19 nt, Artificial Sequence
  Description of Artificial Sequence: Synthetic oligonucleotide
aauaagguauaucguuuau

SEQ ID NO: 1402866 - RNA, 19 nt, Artificial Sequence
  Description of Artificial Sequence: Synthetic oligonucleotide
auaucgccuaagcacaauc

SEQ ID NO: 1402867 - RNA, 19 nt, Artificial Sequence
  Description of Artificial Sequence: Synthetic oligonucleotide
ucguuuaugaucugguguc

SEQ ID NO: 1402868 - RNA, 19 nt, Artificial Sequence
  Description of Artificial Sequence: Synthetic oligonucleotide
auuagcaagcaugaaaccu

SEQ ID NO: 1402869 - RNA, 19 nt, Artificial Sequence
  Description of Artificial Sequence: Synthetic oligonucleotide
guagaggucacuucaugcc

SEQ ID NO: 1402870 - RNA, 19 nt, Artificial Sequence
  Description of Artificial Sequence: Synthetic oligonucleotide
uugcaacauacgaagaagu

SEQ ID NO: 1402871 - RNA, 19 nt, Artificial Sequence
  Description of Artificial Sequence: Synthetic oligonucleotide
uugucuuaucuucaaaaua

SEQ ID NO: 1402872 - RNA, 19 nt, Artificial Sequence
  Description of Artificial Sequence: Synthetic oligonucleotide
ugaguuugcuguauuccug

SEQ ID NO: 1402873 - RNA, 19 nt, Artificial Sequence
  Description of Artificial Sequence: Synthetic oligonucleotide
uacauauaguccuacuuua

SEQ ID NO: 1402874 - RNA, 19 nt, Artificial Sequence
  Description of Artificial Sequence: Synthetic oligonucleotide
cauauuucgcauguauucc

SEQ ID NO: 1402875 - RNA, 19 nt, Artificial Sequence
  Description of Artificial Sequence: Synthetic oligonucleotide
ugagacuuuucaagcacug

SEQ ID NO: 1402876 - RNA, 19 nt, Artificial Sequence
  Description of Artificial Sequence: Synthetic oligonucleotide
uaauggcaacauuagcaag

SEQ ID NO: 1402877 - RNA, 19 nt, Artificial Sequence
  Description of Artificial Sequence: Synthetic oligonucleotide
aagacagauguccucucca

SEQ ID NO: 1402878 - RNA, 19 nt, Artificial Sequence
  Description of Artificial Sequence: Synthetic oligonucleotide
agacauguugaacguuggc

SEQ ID NO: 1402879 - RNA, 19 nt, Artificial Sequence
  Description of Artificial Sequence: Synthetic oligonucleotide
uguauuccaauuguuuucu

SEQ ID NO: 1402880 - RNA, 19 nt, Artificial Sequence
  Description of Artificial Sequence: Synthetic oligonucleotide
uaguaauggcaacauuagc

SEQ ID NO: 1402881 - RNA, 19 nt, Artificial Sequence
  Description of Artificial Sequence: Synthetic oligonucleotide
aaguagaggucacuucaug

SEQ ID NO: 1402882 - RNA, 19 nt, Artificial Sequence
  Description of Artificial Sequence: Synthetic oligonucleotide
cuauguuuuguuucuccag

SEQ ID NO: 1402883 - RNA, 19 nt, Artificial Sequence
  Description of Artificial Sequence: Synthetic oligonucleotide
ugguauuuccgcacuuuag

SEQ ID NO: 1402884 - RNA, 19 nt, Artificial Sequence
  Description of Artificial Sequence: Synthetic oligonucleotide
aacguuggcuaccacggca

SEQ ID NO: 1402885 - RNA, 19 nt, Artificial Sequence
  Description of Artificial Sequence: Synthetic oligonucleotide
aauucacacuccaaguugu

SEQ ID NO: 1402886 - RNA, 19 nt, Artificial Sequence
  Description of Artificial Sequence: Synthetic oligonucleotide
guaaucccaacacagauua

SEQ ID NO: 1402887 - RNA, 19 nt, Artificial Sequence
  Description of Artificial Sequence: Synthetic oligonucleotide
auuuccacguaguugugcu

SEQ ID NO: 1402888 - RNA, 19 nt, Artificial Sequence
  Description of Artificial Sequence: Synthetic oligonucleotide
acucgaucauugcacaaag

SEQ ID NO: 1402889 - RNA, 19 nt, Artificial Sequence
  Description of Artificial Sequence: Synthetic oligonucleotide
ucuaagacauccgacaguu

SEQ ID NO: 1402890 - RNA, 19 nt, Artificial Sequence
  Description of Artificial Sequence: Synthetic oligonucleotide
auuuccgcacuuuaguuau

SEQ ID NO: 1402891 - RNA, 19 nt, Artificial Sequence
  Description of Artificial Sequence: Synthetic oligonucleotide
guugcaacauacgaagaag

SEQ ID NO: 1402892 - RNA, 19 nt, Artificial Sequence
  Description of Artificial Sequence: Synthetic oligonucleotide
caguauaugaguauagcaa

SEQ ID NO: 1402893 - RNA, 19 nt, Artificial Sequence
  Description of Artificial Sequence: Synthetic oligonucleotide
auauuucgcauguauucca

SEQ ID NO: 1402894 - RNA, 19 nt, Artificial Sequence
  Description of Artificial Sequence: Synthetic oligonucleotide
gaucuggugucaguaaucc

SEQ ID NO: 1402895 - RNA, 19 nt, Artificial Sequence
  Description of Artificial Sequence: Synthetic oligonucleotide
gacacuguuaacaacucga

SEQ ID NO: 1402896 - RNA, 19 nt, Artificial Sequence
  Description of Artificial Sequence: Synthetic oligonucleotide
uaucguuuaugaucuggug

SEQ ID NO: 1402897 - RNA, 19 nt, Artificial Sequence
  Description of Artificial Sequence: Synthetic oligonucleotide
cacuuuaguuaucugguug

SEQ ID NO: 1402898 - RNA, 19 nt, Artificial Sequence
  Description of Artificial Sequence: Synthetic oligonucleotide
cugugcaccaaaauaguuc

SEQ ID NO: 1402899 - RNA, 19 nt, Artificial Sequence
  Description of Artificial Sequence: Synthetic oligonucleotide
uuuaguuaucugguuggcc

SEQ ID NO: 1402900 - RNA, 19 nt, Artificial Sequence
  Description of Artificial Sequence: Synthetic oligonucleotide
cuugcuuugccaaggggac

SEQ ID NO: 1402901 - RNA, 19 nt, Artificial Sequence
  Description of Artificial Sequence: Synthetic oligonucleotide
ugaguauagcaaauucaaa

SEQ ID NO: 1402902 - RNA, 19 nt, Artificial Sequence
  Description of Artificial Sequence: Synthetic oligonucleotide
uaucgccuaagcacaaucu

SEQ ID NO: 1402903 - RNA, 19 nt, Artificial Sequence
  Description of Artificial Sequence: Synthetic oligonucleotide
ugcaguauaugaguauagc

SEQ ID NO: 1402904 - RNA, 19 nt, Artificial Sequence
  Description of Artificial Sequence: Synthetic oligonucleotide
uggugaucaaagcucauuu

SEQ ID NO: 1402905 - RNA, 19 nt, Artificial Sequence
  Description of Artificial Sequence: Synthetic oligonucleotide
cuguaugaguuuagcaagc

SEQ ID NO: 1402906 - RNA, 19 nt, Artificial Sequence
  Description of Artificial Sequence: Synthetic oligonucleotide
uccuugugacuccagguga

SEQ ID NO: 1402907 - RNA, 19 nt, Artificial Sequence
  Description of Artificial Sequence: Synthetic oligonucleotide
guaauggcaacauuagcaa

SEQ ID NO: 1402908 - RNA, 19 nt, Artificial Sequence
  Description of Artificial Sequence: Synthetic oligonucleotide
cccaauuuacauauagucc

SEQ ID NO: 1402909 - RNA, 19 nt, Artificial Sequence
  Description of Artificial Sequence: Synthetic oligonucleotide
uucugcuuaucuauguuuu

SEQ ID NO: 1402910 - RNA, 19 nt, Artificial Sequence
  Description of Artificial Sequence: Synthetic oligonucleotide
ucuagugaaaccugcuuuu

SEQ ID NO: 1402911 - RNA, 19 nt, Artificial Sequence
  Description of Artificial Sequence: Synthetic oligonucleotide
caaauucaaacaguacaag

SEQ ID NO: 1402912 - RNA, 19 nt, Artificial Sequence
  Description of Artificial Sequence: Synthetic oligonucleotide
uggagaggggaaaguagag

SEQ ID NO: 1402913 - RNA, 19 nt, Artificial Sequence
  Description of Artificial Sequence: Synthetic oligonucleotide
aagacauguugaacguugg

SEQ ID NO: 1402914 - RNA, 19 nt, Artificial Sequence
  Description of Artificial Sequence: Synthetic oligonucleotide
ucgcauguauuccaauugu

SEQ ID NO: 1402915 - RNA, 19 nt, Artificial Sequence
  Description of Artificial Sequence: Synthetic oligonucleotide
ugcaagacauguugaacgu

SEQ ID NO: 1402916 - RNA, 19 nt, Artificial Sequence
  Description of Artificial Sequence: Synthetic oligonucleotide
uauuuccgcacuuuaguua

SEQ ID NO: 1402917 - RNA, 19 nt, Artificial Sequence
  Description of Artificial Sequence: Synthetic oligonucleotide
aagguauaucguuuaugau

SEQ ID NO: 1402918 - RNA, 19 nt, Artificial Sequence
  Description of Artificial Sequence: Synthetic oligonucleotide
acauguugaacguuggcua

SEQ ID NO: 1402919 - RNA, 19 nt, Artificial Sequence
  Description of Artificial Sequence: Synthetic oligonucleotide
uucaagcacugacuacggg

SEQ ID NO: 1402920 - RNA, 19 nt, Artificial Sequence
  Description of Artificial Sequence: Synthetic oligonucleotide
uagaggucacuucaugccu

SEQ ID NO: 1402921 - RNA, 19 nt, Artificial Sequence
  Description of Artificial Sequence: Synthetic oligonucleotide
guuuugaucauguugccgu

SEQ ID NO: 1402922 - RNA, 19 nt, Artificial Sequence
  Description of Artificial Sequence: Synthetic oligonucleotide
auaagguauaucguuuaug

SEQ ID NO: 1402923 - RNA, 19 nt, Artificial Sequence
  Description of Artificial Sequence: Synthetic oligonucleotide
uuuaugaucuggugucagu

SEQ ID NO: 1402924 - RNA, 19 nt, Artificial Sequence
  Description of Artificial Sequence: Synthetic oligonucleotide
acaagagacuguaaugaag

SEQ ID NO: 1402925 - RNA, 19 nt, Artificial Sequence
  Description of Artificial Sequence: Synthetic oligonucleotide
ucauuugcccaaauucauc

SEQ ID NO: 1402926 - RNA, 19 nt, Artificial Sequence
  Description of Artificial Sequence: Synthetic oligonucleotide
gucucuaagacauccgaca

SEQ ID NO: 1402927 - RNA, 19 nt, Artificial Sequence
  Description of Artificial Sequence: Synthetic oligonucleotide
ucgccuaagcacaaucugu

SEQ ID NO: 1402928 - RNA, 19 nt, Artificial Sequence
  Description of Artificial Sequence: Synthetic oligonucleotide
augaguauagcaaauucaa

SEQ ID NO: 1402929 - RNA, 19 nt, Artificial Sequence
  Description of Artificial Sequence: Synthetic oligonucleotide
ggcaacauuagcaagcaug

SEQ ID NO: 1402930 - RNA, 19 nt, Artificial Sequence
  Description of Artificial Sequence: Synthetic oligonucleotide
uagcaaauucaaacaguac

SEQ ID NO: 1402931 - RNA, 19 nt, Artificial Sequence
  Description of Artificial Sequence: Synthetic oligonucleotide
aucgccuaagcacaaucug

SEQ ID NO: 1402932 - RNA, 19 nt, Artificial Sequence
  Description of Artificial Sequence: Synthetic oligonucleotide
uuguuagguuuuaauuccu

SEQ ID NO: 1402933 - RNA, 19 nt, Artificial Sequence
  Description of Artificial Sequence: Synthetic oligonucleotide
ucugcuuaucuauguuuug

SEQ ID NO: 1402934 - RNA, 19 nt, Artificial Sequence
  Description of Artificial Sequence: Synthetic oligonucleotide
uuucuagugaaaccugcuu

SEQ ID NO: 1402935 - RNA, 19 nt, Artificial Sequence
  Description of Artificial Sequence: Synthetic oligonucleotide
cauacgcuuccuuuccugc

SEQ ID NO: 1402936 - RNA, 19 nt, Artificial Sequence
  Description of Artificial Sequence: Synthetic oligonucleotide
uucuuacuacuccugcaac

SEQ ID NO: 1402937 - RNA, 19 nt, Artificial Sequence
  Description of Artificial Sequence: Synthetic oligonucleotide
aguacaagccucucauggu

SEQ ID NO: 1402938 - RNA, 19 nt, Artificial Sequence
  Description of Artificial Sequence: Synthetic oligonucleotide
aagugcaguauaugaguau

SEQ ID NO: 1402939 - RNA, 19 nt, Artificial Sequence
  Description of Artificial Sequence: Synthetic oligonucleotide
agugaaaccugcuuuucua

SEQ ID NO: 1402940 - RNA, 19 nt, Artificial Sequence
  Description of Artificial Sequence: Synthetic oligonucleotide
aauaguuccuaggaccuuu

SEQ ID NO: 1402941 - RNA, 19 nt, Artificial Sequence
  Description of Artificial Sequence: Synthetic oligonucleotide
acaacucgaucauugcaca

SEQ ID NO: 1402942 - RNA, 19 nt, Artificial Sequence
  Description of Artificial Sequence: Synthetic oligonucleotide
cauguugaacguuggcuac

SEQ ID NO: 1402943 - RNA, 19 nt, Artificial Sequence
  Description of Artificial Sequence: Synthetic oligonucleotide
uuucgcauguauuccaauu

SEQ ID NO: 1402944 - RNA, 19 nt, Artificial Sequence
  Description of Artificial Sequence: Synthetic oligonucleotide
uacuugugguccuugugac

SEQ ID NO: 1402945 - RNA, 19 nt, Artificial Sequence
  Description of Artificial Sequence: Synthetic oligonucleotide
aucuguaauguggcugugc

SEQ ID NO: 1402946 - RNA, 19 nt, Artificial Sequence
  Description of Artificial Sequence: Synthetic oligonucleotide
ugcaacauacgaagaaguu

SEQ ID NO: 1402947 - RNA, 19 nt, Artificial Sequence
  Description of Artificial Sequence: Synthetic oligonucleotide
aacaaagggcauaucgccu

SEQ ID NO: 1402948 - RNA, 19 nt, Artificial Sequence
  Description of Artificial Sequence: Synthetic oligonucleotide
uccugcaaccucgugaaca

SEQ ID NO: 1402949 - RNA, 19 nt, Artificial Sequence
  Description of Artificial Sequence: Synthetic oligonucleotide
uaugaucuggugucaguaa

SEQ ID NO: 1402950 - RNA, 19 nt, Artificial Sequence
  Description of Artificial Sequence: Synthetic oligonucleotide
aguuggugacuccuguaug

SEQ ID NO: 1402951 - RNA, 19 nt, Artificial Sequence
  Description of Artificial Sequence: Synthetic oligonucleotide
gggcauaucgccuaagcac

SEQ ID NO: 1402952 - RNA, 19 nt, Artificial Sequence
  Description of Artificial Sequence: Synthetic oligonucleotide
gcuaccacggcauggcugg

SEQ ID NO: 1402953 - RNA, 19 nt, Artificial Sequence
  Description of Artificial Sequence: Synthetic oligonucleotide
uauuguccaauaagguaua

SEQ ID NO: 1402954 - RNA, 19 nt, Artificial Sequence
  Description of Artificial Sequence: Synthetic oligonucleotide
auguugaacguuggcuacc

SEQ ID NO: 1402955 - RNA, 19 nt, Artificial Sequence
  Description of Artificial Sequence: Synthetic oligonucleotide
agaugcaagacauguugaa

SEQ ID NO: 1402956 - RNA, 19 nt, Artificial Sequence
  Description of Artificial Sequence: Synthetic oligonucleotide
aacucgaucauugcacaaa

SEQ ID NO: 1402957 - RNA, 19 nt, Artificial Sequence
  Description of Artificial Sequence: Synthetic oligonucleotide
acgaagaaguugucuuauc

SEQ ID NO: 1402958 - RNA, 19 nt, Artificial Sequence
  Description of Artificial Sequence: Synthetic oligonucleotide
uguaugaguuuagcaagcu

SEQ ID NO: 1402959 - RNA, 19 nt, Artificial Sequence
  Description of Artificial Sequence: Synthetic oligonucleotide
guaguugugcugcaugaca

SEQ ID NO: 1402960 - RNA, 19 nt, Artificial Sequence
  Description of Artificial Sequence: Synthetic oligonucleotide
cuuacuugugguccuugug

SEQ ID NO: 1402961 - RNA, 19 nt, Artificial Sequence
  Description of Artificial Sequence: Synthetic oligonucleotide
gucuuaucuucaaaauaag

SEQ ID NO: 1402962 - RNA, 19 nt, Artificial Sequence
  Description of Artificial Sequence: Synthetic oligonucleotide
accacggcauggcugggac

SEQ ID NO: 1402963 - RNA, 19 nt, Artificial Sequence
  Description of Artificial Sequence: Synthetic oligonucleotide
agggcauaucgccuaagca

SEQ ID NO: 1402964 - RNA, 19 nt, Artificial Sequence
  Description of Artificial Sequence: Synthetic oligonucleotide
agacauccgacaguucuuc

SEQ ID NO: 1402965 - RNA, 19 nt, Artificial Sequence
  Description of Artificial Sequence: Synthetic oligonucleotide
uguuagguuuuaauuccuu

SEQ ID NO: 1402966 - RNA, 19 nt, Artificial Sequence
  Description of Artificial Sequence: Synthetic oligonucleotide
gcaguauaugaguauagca

SEQ ID NO: 1402967 - RNA, 19 nt, Artificial Sequence
  Description of Artificial Sequence: Synthetic oligonucleotide
ugguuuugaucauguugcc

SEQ ID NO: 1402968 - RNA, 19 nt, Artificial Sequence
  Description of Artificial Sequence: Synthetic oligonucleotide
aaccucgugaacaggcuug

SEQ ID NO: 1402969 - RNA, 19 nt, Artificial Sequence
  Description of Artificial Sequence: Synthetic oligonucleotide
ucuuacuugugguccuugu

SEQ ID NO: 1402970 - RNA, 19 nt, Artificial Sequence
  Description of Artificial Sequence: Synthetic oligonucleotide
auaucguuuaugaucuggu

SEQ ID NO: 1402971 - RNA, 19 nt, Artificial Sequence
  Description of Artificial Sequence: Synthetic oligonucleotide
gaucauugcacaaagcuuu

SEQ ID NO: 1402972 - RNA, 19 nt, Artificial Sequence
  Description of Artificial Sequence: Synthetic oligonucleotide
ugcuuaucuauguuuuguu

SEQ ID NO: 1402973 - RNA, 19 nt, Artificial Sequence
  Description of Artificial Sequence: Synthetic oligonucleotide
aacuccauuuccacguagu

SEQ ID NO: 1402974 - RNA, 19 nt, Artificial Sequence
  Description of Artificial Sequence: Synthetic oligonucleotide
guuuaugaucuggugucag

SEQ ID NO: 1402975 - RNA, 19 nt, Artificial Sequence
  Description of Artificial Sequence: Synthetic oligonucleotide
auuugcccaaauucauccu

SEQ ID NO: 1402976 - RNA, 19 nt, Artificial Sequence
  Description of Artificial Sequence: Synthetic oligonucleotide
caagcacugacuacgggga

SEQ ID NO: 1402977 - RNA, 19 nt, Artificial Sequence
  Description of Artificial Sequence: Synthetic oligonucleotide
accugcuaguaauggcaac

SEQ ID NO: 1402978 - RNA, 19 nt, Artificial Sequence
  Description of Artificial Sequence: Synthetic oligonucleotide
cuuuaguuaucugguuggc

SEQ ID NO: 1402979 - RNA, 19 nt, Artificial Sequence
  Description of Artificial Sequence: Synthetic oligonucleotide
aaaacuccauuuccacgua

SEQ ID NO: 1402980 - RNA, 19 nt, Artificial Sequence
  Description of Artificial Sequence: Synthetic oligonucleotide
caaagugcaguauaugagu

SEQ ID NO: 1402981 - RNA, 19 nt, Artificial Sequence
  Description of Artificial Sequence: Synthetic oligonucleotide
uguugaacguuggcuacca

SEQ ID NO: 1402982 - RNA, 19 nt, Artificial Sequence
  Description of Artificial Sequence: Synthetic oligonucleotide
uuaucugguuggccuuugc

SEQ ID NO: 1402983 - RNA, 19 nt, Artificial Sequence
  Description of Artificial Sequence: Synthetic oligonucleotide
ugguugcaacauacgaaga

SEQ ID NO: 1402984 - RNA, 19 nt, Artificial Sequence
  Description of Artificial Sequence: Synthetic oligonucleotide
ugcuugguauuuccgcacu

SEQ ID NO: 1402985 - RNA, 19 nt, Artificial Sequence
  Description of Artificial Sequence: Synthetic oligonucleotide
cugcauacgcuuccuuucc

SEQ ID NO: 1402986 - RNA, 19 nt, Artificial Sequence
  Description of Artificial Sequence: Synthetic oligonucleotide
ccgcacuuuaguuaucugg

SEQ ID NO: 1402987 - RNA, 19 nt, Artificial Sequence
  Description of Artificial Sequence: Synthetic oligonucleotide
ggugaucaaagcucauuug

SEQ ID NO: 1402988 - RNA, 19 nt, Artificial Sequence
  Description of Artificial Sequence: Synthetic oligonucleotide
agugcaguauaugaguaua

SEQ ID NO: 1402989 - RNA, 19 nt, Artificial Sequence
  Description of Artificial Sequence: Synthetic oligonucleotide
cucgaucauugcacaaagc

SEQ ID NO: 1402990 - RNA, 19 nt, Artificial Sequence
  Description of Artificial Sequence: Synthetic oligonucleotide
cauauaguccuacuuuaaa

SEQ ID NO: 1402991 - RNA, 19 nt, Artificial Sequence
  Description of Artificial Sequence: Synthetic oligonucleotide
ccaauuuacauauaguccu

SEQ ID NO: 1402992 - RNA, 19 nt, Artificial Sequence
  Description of Artificial Sequence: Synthetic oligonucleotide
gguuuugaucauguugccg

SEQ ID NO: 1402993 - RNA, 19 nt, Artificial Sequence
  Description of Artificial Sequence: Synthetic oligonucleotide
uucugcgugcuuuaucaua

SEQ ID NO: 1402994 - RNA, 19 nt, Artificial Sequence
  Description of Artificial Sequence: Synthetic oligonucleotide
cuucaucagaugcaagaca

SEQ ID NO: 1402995 - RNA, 19 nt, Artificial Sequence
  Description of Artificial Sequence: Synthetic oligonucleotide
aaaguagaggucacuucau

SEQ ID NO: 1402996 - RNA, 19 nt, Artificial Sequence
  Description of Artificial Sequence: Synthetic oligonucleotide
guaaugaagcuugggcccc

SEQ ID NO: 1402997 - RNA, 19 nt, Artificial Sequence
  Description of Artificial Sequence: Synthetic oligonucleotide
aguuccuaggaccuuucuu

SEQ ID NO: 1402998 - RNA, 19 nt, Artificial Sequence
  Description of Artificial Sequence: Synthetic oligonucleotide
uccaggugaccgauugcug

SEQ ID NO: 1402999 - RNA, 19 nt, Artificial Sequence
  Description of Artificial Sequence: Synthetic oligonucleotide
acaguacaagccucucaug

SEQ ID NO: 1403000 - RNA, 19 nt, Artificial Sequence
  Description of Artificial Sequence: Synthetic oligonucleotide
ggaccugcaucguagugag

SEQ ID NO: 1403001 - RNA, 19 nt, Artificial Sequence
  Description of Artificial Sequence: Synthetic oligonucleotide
guugguugcaacauacgaa

SEQ ID NO: 1403002 - RNA, 19 nt, Artificial Sequence
  Description of Artificial Sequence: Synthetic oligonucleotide
cacguaguugugcugcaug

SEQ ID NO: 1403003 - RNA, 19 nt, Artificial Sequence
  Description of Artificial Sequence: Synthetic oligonucleotide
gcuaguaauggcaacauua

SEQ ID NO: 1403004 - RNA, 19 nt, Artificial Sequence
  Description of Artificial Sequence: Synthetic oligonucleotide
aggaccugcaucguaguga

SEQ ID NO: 1403005 - RNA, 19 nt, Artificial Sequence
  Description of Artificial Sequence: Synthetic oligonucleotide
cacuguuaacaacucgauc

SEQ ID NO: 1403006 - RNA, 19 nt, Artificial Sequence
  Description of Artificial Sequence: Synthetic oligonucleotide
accugcaucguagugaguu

SEQ ID NO: 1403007 - RNA, 19 nt, Artificial Sequence
  Description of Artificial Sequence: Synthetic oligonucleotide
caauaagguauaucguuua

SEQ ID NO: 1403008 - RNA, 19 nt, Artificial Sequence
  Description of Artificial Sequence: Synthetic oligonucleotide
cuguauuccuguucaagaa

SEQ ID NO: 1403009 - RNA, 19 nt, Artificial Sequence
  Description of Artificial Sequence: Synthetic oligonucleotide
accucgugaacaggcuugc

SEQ ID NO: 1403010 - RNA, 19 nt, Artificial Sequence
  Description of Artificial Sequence: Synthetic oligonucleotide
guggcugugcaccaaaaua

SEQ ID NO: 1403011 - RNA, 19 nt, Artificial Sequence
  Description of Artificial Sequence: Synthetic oligonucleotide
uuguccaauaagguauauc

SEQ ID NO: 1403012 - RNA, 19 nt, Artificial Sequence
  Description of Artificial Sequence: Synthetic oligonucleotide
guuuagacuccaacucuug

SEQ ID NO: 1403013 - RNA, 19 nt, Artificial Sequence
  Description of Artificial Sequence: Synthetic oligonucleotide
aaagggcauaucgccuaag

SEQ ID NO: 1403014 - RNA, 19 nt, Artificial Sequence
  Description of Artificial Sequence: Synthetic oligonucleotide
gaccgauugcugcuguuuc

SEQ ID NO: 1403015 - RNA, 19 nt, Artificial Sequence
  Description of Artificial Sequence: Synthetic oligonucleotide
ugcauacgcuuccuuuccu

SEQ ID NO: 1403016 - RNA, 19 nt, Artificial Sequence
  Description of Artificial Sequence: Synthetic oligonucleotide
agacagauguccucuccau

SEQ ID NO: 1403017 - RNA, 19 nt, Artificial Sequence
  Description of Artificial Sequence: Synthetic oligonucleotide
gugcaguauaugaguauag

SEQ ID NO: 1403018 - RNA, 19 nt, Artificial Sequence
  Description of Artificial Sequence: Synthetic oligonucleotide
cacuaaugccuccaauuca

SEQ ID NO: 1403019 - RNA, 19 nt, Artificial Sequence
  Description of Artificial Sequence: Synthetic oligonucleotide
agcaugaaaccuggaaagu

SEQ ID NO: 1403020 - RNA, 19 nt, Artificial Sequence
  Description of Artificial Sequence: Synthetic oligonucleotide
ucuucccacuaaugccucc

SEQ ID NO: 1403021 - RNA, 19 nt, Artificial Sequence
  Description of Artificial Sequence: Synthetic oligonucleotide
gguugcaacauacgaagaa

SEQ ID NO: 1403022 - RNA, 19 nt, Artificial Sequence
  Description of Artificial Sequence: Synthetic oligonucleotide
auuucgcauguauuccaau

SEQ ID NO: 1403023 - RNA, 19 nt, Artificial Sequence
  Description of Artificial Sequence: Synthetic oligonucleotide
ggaaaguagaggucacuuc

SEQ ID NO: 1403024 - RNA, 19 nt, Artificial Sequence
  Description of Artificial Sequence: Synthetic oligonucleotide
ugacuacggggacagccuc

SEQ ID NO: 1403025 - RNA, 19 nt, Artificial Sequence
  Description of Artificial Sequence: Synthetic oligonucleotide
guguugguugcaacauacg

SEQ ID NO: 1403026 - RNA, 19 nt, Artificial Sequence
  Description of Artificial Sequence: Synthetic oligonucleotide
cuccuguaugaguuuagca

SEQ ID NO: 1403027 - RNA, 19 nt, Artificial Sequence
  Description of Artificial Sequence: Synthetic oligonucleotide
gaacguuggcuaccacggc

SEQ ID NO: 1403028 - RNA, 19 nt, Artificial Sequence
  Description of Artificial Sequence: Synthetic oligonucleotide
ccugcagagucucuaagac

SEQ ID NO: 1403029 - RNA, 19 nt, Artificial Sequence
  Description of Artificial Sequence: Synthetic oligonucleotide
ugcaaggaccugcaucgua

SEQ ID NO: 1403030 - RNA, 19 nt, Artificial Sequence
  Description of Artificial Sequence: Synthetic oligonucleotide
aagccucucaugguguaaa

SEQ ID NO: 1403031 - RNA, 19 nt, Artificial Sequence
  Description of Artificial Sequence: Synthetic oligonucleotide
uaguuccuaggaccuuucu

SEQ ID NO: 1403032 - RNA, 19 nt, Artificial Sequence
  Description of Artificial Sequence: Synthetic oligonucleotide
auaguuccuaggaccuuuc

SEQ ID NO: 1403033 - RNA, 19 nt, Artificial Sequence
  Description of Artificial Sequence: Synthetic oligonucleotide
accagucugcaacucugcu

SEQ ID NO: 1403034 - RNA, 19 nt, Artificial Sequence
  Description of Artificial Sequence: Synthetic oligonucleotide
cacuucaugccuggggaag

SEQ ID NO: 1403035 - RNA, 19 nt, Artificial Sequence
  Description of Artificial Sequence: Synthetic oligonucleotide
gguauuuccgcacuuuagu

SEQ ID NO: 1403036 - RNA, 19 nt, Artificial Sequence
  Description of Artificial Sequence: Synthetic oligonucleotide
ugcuaguaauggcaacauu

SEQ ID NO: 1403037 - RNA, 19 nt, Artificial Sequence
  Description of Artificial Sequence: Synthetic oligonucleotide
aguaaucccaacacagauu

SEQ ID NO: 1403038 - RNA, 19 nt, Artificial Sequence
  Description of Artificial Sequence: Synthetic oligonucleotide
gcaaggaccugcaucguag

SEQ ID NO: 1403039 - RNA, 19 nt, Artificial Sequence
  Description of Artificial Sequence: Synthetic oligonucleotide
gacuuuucaagcacugacu

SEQ ID NO: 1403040 - RNA, 19 nt, Artificial Sequence
  Description of Artificial Sequence: Synthetic oligonucleotide
gacuccuguaugaguuuag

SEQ ID NO: 1403041 - RNA, 19 nt, Artificial Sequence
  Description of Artificial Sequence: Synthetic oligonucleotide
auucacacuccaaguuguc

SEQ ID NO: 1403042 - RNA, 19 nt, Artificial Sequence
  Description of Artificial Sequence: Synthetic oligonucleotide
caguuccacaguuggugac

SEQ ID NO: 1403043 - RNA, 19 nt, Artificial Sequence
  Description of Artificial Sequence: Synthetic oligonucleotide
cuugugacuccaggugacc

SEQ ID NO: 1403044 - RNA, 19 nt, Artificial Sequence
  Description of Artificial Sequence: Synthetic oligonucleotide
caauuuacauauaguccua

SEQ ID NO: 1403045 - RNA, 19 nt, Artificial Sequence
  Description of Artificial Sequence: Synthetic oligonucleotide
cugcaucguagugaguuug

SEQ ID NO: 1403046 - RNA, 19 nt, Artificial Sequence
  Description of Artificial Sequence: Synthetic oligonucleotide
cacaagagacuguaaugaa

SEQ ID NO: 1403047 - RNA, 19 nt, Artificial Sequence
  Description of Artificial Sequence: Synthetic oligonucleotide
acauauaguccuacuuuaa

SEQ ID NO: 1403048 - RNA, 19 nt, Artificial Sequence
  Description of Artificial Sequence: Synthetic oligonucleotide
ggcauaucgccuaagcaca

SEQ ID NO: 1403049 - RNA, 19 nt, Artificial Sequence
  Description of Artificial Sequence: Synthetic oligonucleotide
aaugaagcuugggccccug

SEQ ID NO: 1403050 - RNA, 19 nt, Artificial Sequence
  Description of Artificial Sequence: Synthetic oligonucleotide
uuucugcgugcuuuaucau

SEQ ID NO: 1403051 - RNA, 19 nt, Artificial Sequence
  Description of Artificial Sequence: Synthetic oligonucleotide
agacuguaaugaagcuugg

SEQ ID NO: 1403052 - RNA, 19 nt, Artificial Sequence
  Description of Artificial Sequence: Synthetic oligonucleotide
ccacuaaugccuccaauuc

SEQ ID NO: 1403053 - RNA, 19 nt, Artificial Sequence
  Description of Artificial Sequence: Synthetic oligonucleotide
uguuaacaacucgaucauu

SEQ ID NO: 1403054 - RNA, 19 nt, Artificial Sequence
  Description of Artificial Sequence: Synthetic oligonucleotide
guauaucguuuaugaucug

SEQ ID NO: 1403055 - RNA, 19 nt, Artificial Sequence
  Description of Artificial Sequence: Synthetic oligonucleotide
ucccacuaaugccuccaau

SEQ ID NO: 1403056 - RNA, 19 nt, Artificial Sequence
  Description of Artificial Sequence: Synthetic oligonucleotide
cuuacuacuccugcaaccu

SEQ ID NO: 1403057 - RNA, 19 nt, Artificial Sequence
  Description of Artificial Sequence: Synthetic oligonucleotide
gugaacaggcuugcuuugc

SEQ ID NO: 1403058 - RNA, 19 nt, Artificial Sequence
  Description of Artificial Sequence: Synthetic oligonucleotide
ucuguaugguuugcauguc

SEQ ID NO: 1403059 - RNA, 19 nt, Artificial Sequence
  Description of Artificial Sequence: Synthetic oligonucleotide
gaccagucugcaacucugc

SEQ ID NO: 1403060 - RNA, 19 nt, Artificial Sequence
  Description of Artificial Sequence: Synthetic oligonucleotide
cacugacuucuuacuacuc

SEQ ID NO: 1403061 - RNA, 19 nt, Artificial Sequence
  Description of Artificial Sequence: Synthetic oligonucleotide
ugccaaggggacacuguua

SEQ ID NO: 1403062 - RNA, 19 nt, Artificial Sequence
  Description of Artificial Sequence: Synthetic oligonucleotide
acaguuggugacuccugua

SEQ ID NO: 1403063 - RNA, 19 nt, Artificial Sequence
  Description of Artificial Sequence: Synthetic oligonucleotide
ugaccgauugcugcuguuu

SEQ ID NO: 1403064 - RNA, 19 nt, Artificial Sequence
  Description of Artificial Sequence: Synthetic oligonucleotide
uucccacuaaugccuccaa

SEQ ID NO: 1403065 - RNA, 19 nt, Artificial Sequence
  Description of Artificial Sequence: Synthetic oligonucleotide
ucguagugaguuugcugua

SEQ ID NO: 1403066 - RNA, 19 nt, Artificial Sequence
  Description of Artificial Sequence: Synthetic oligonucleotide
gcaugaaaccuggaaaguc

SEQ ID NO: 1403067 - RNA, 19 nt, Artificial Sequence
  Description of Artificial Sequence: Synthetic oligonucleotide
guauuuccgcacuuuaguu

SEQ ID NO: 1403068 - RNA, 19 nt, Artificial Sequence
  Description of Artificial Sequence: Synthetic oligonucleotide
uuucugcaaggaccugcau

SEQ ID NO: 1403069 - RNA, 19 nt, Artificial Sequence
  Description of Artificial Sequence: Synthetic oligonucleotide
gcauacgcuuccuuuccug

SEQ ID NO: 1403070 - RNA, 19 nt, Artificial Sequence
  Description of Artificial Sequence: Synthetic oligonucleotide
augaaaccuggaaagucuu

SEQ ID NO: 1403071 - RNA, 19 nt, Artificial Sequence
  Description of Artificial Sequence: Synthetic oligonucleotide
cuggacaccugcuaguaau

SEQ ID NO: 1403072 - RNA, 19 nt, Artificial Sequence
  Description of Artificial Sequence: Synthetic oligonucleotide
uaaugaagcuugggccccu

SEQ ID NO: 1403073 - RNA, 19 nt, Artificial Sequence
  Description of Artificial Sequence: Synthetic oligonucleotide
guauaugaguauagcaaau

SEQ ID NO: 1403074 - RNA, 19 nt, Artificial Sequence
  Description of Artificial Sequence: Synthetic oligonucleotide
cauccgacaguucuucacu

SEQ ID NO: 1403075 - RNA, 19 nt, Artificial Sequence
  Description of Artificial Sequence: Synthetic oligonucleotide
cacaaagcuuuacuguggu

SEQ ID NO: 1403076 - RNA, 19 nt, Artificial Sequence
  Description of Artificial Sequence: Synthetic oligonucleotide
ccgacaguucuucacugac

SEQ ID NO: 1403077 - RNA, 19 nt, Artificial Sequence
  Description of Artificial Sequence: Synthetic oligonucleotide
guugaacguuggcuaccac

SEQ ID NO: 1403078 - RNA, 19 nt, Artificial Sequence
  Description of Artificial Sequence: Synthetic oligonucleotide
cugcaugacacaagagacu

SEQ ID NO: 1403079 - RNA, 19 nt, Artificial Sequence
  Description of Artificial Sequence: Synthetic oligonucleotide
cuguuaacaacucgaucau

SEQ ID NO: 1403080 - RNA, 19 nt, Artificial Sequence
  Description of Artificial Sequence: Synthetic oligonucleotide
gccuggggaagauuuaaaa

SEQ ID NO: 1403081 - RNA, 19 nt, Artificial Sequence
  Description of Artificial Sequence: Synthetic oligonucleotide
acuacggggacagccucau

SEQ ID NO: 1403082 - RNA, 19 nt, Artificial Sequence
  Description of Artificial Sequence: Synthetic oligonucleotide
cugcuuaucuauguuuugu

SEQ ID NO: 1403083 - RNA, 19 nt, Artificial Sequence
  Description of Artificial Sequence: Synthetic oligonucleotide
caccugcuaguaauggcaa

SEQ ID NO: 1403084 - RNA, 19 nt, Artificial Sequence
  Description of Artificial Sequence: Synthetic oligonucleotide
cugacuacggggacagccu

SEQ ID NO: 1403085 - RNA, 19 nt, Artificial Sequence
  Description of Artificial Sequence: Synthetic oligonucleotide
guccaauaagguauaucgu

SEQ ID NO: 1403086 - RNA, 19 nt, Artificial Sequence
  Description of Artificial Sequence: Synthetic oligonucleotide
gcucugaacaugguuuuga

SEQ ID NO: 1403087 - RNA, 19 nt, Artificial Sequence
  Description of Artificial Sequence: Synthetic oligonucleotide
caacucgaucauugcacaa

SEQ ID NO: 1403088 - RNA, 19 nt, Artificial Sequence
  Description of Artificial Sequence: Synthetic oligonucleotide
agucugcaacucugcugcu

SEQ ID NO: 1403089 - RNA, 19 nt, Artificial Sequence
  Description of Artificial Sequence: Synthetic oligonucleotide
cccaacacagauuacugcu

SEQ ID NO: 1403090 - RNA, 19 nt, Artificial Sequence
  Description of Artificial Sequence: Synthetic oligonucleotide
gugcugcaugacacaagag

SEQ ID NO: 1403091 - RNA, 19 nt, Artificial Sequence
  Description of Artificial Sequence: Synthetic oligonucleotide
aggugaccgauugcugcug

SEQ ID NO: 1403092 - RNA, 19 nt, Artificial Sequence
  Description of Artificial Sequence: Synthetic oligonucleotide
gacuacggggacagccuca

SEQ ID NO: 1403093 - RNA, 19 nt, Artificial Sequence
  Description of Artificial Sequence: Synthetic oligonucleotide
ccugcuaguaauggcaaca

SEQ ID NO: 1403094 - RNA, 19 nt, Artificial Sequence
  Description of Artificial Sequence: Synthetic oligonucleotide
uaccacggcauggcuggga

SEQ ID NO: 1403095 - RNA, 19 nt, Artificial Sequence
  Description of Artificial Sequence: Synthetic oligonucleotide
cagugaauucuguaugguu

SEQ ID NO: 1403096 - RNA, 19 nt, Artificial Sequence
  Description of Artificial Sequence: Synthetic oligonucleotide
augacacaagagacuguaa

SEQ ID NO: 1403097 - RNA, 19 nt, Artificial Sequence
  Description of Artificial Sequence: Synthetic oligonucleotide
caaagggcauaucgccuaa

SEQ ID NO: 1403098 - RNA, 19 nt, Artificial Sequence
  Description of Artificial Sequence: Synthetic oligonucleotide
gguccuugugacuccaggu

SEQ ID NO: 1403099 - RNA, 19 nt, Artificial Sequence
  Description of Artificial Sequence: Synthetic oligonucleotide
caguuggugacuccuguau

SEQ ID NO: 1403100 - RNA, 19 nt, Artificial Sequence
  Description of Artificial Sequence: Synthetic oligonucleotide
guggacuuuccagcaacaa

SEQ ID NO: 1403101 - RNA, 19 nt, Artificial Sequence
  Description of Artificial Sequence: Synthetic oligonucleotide
uucaugccuggggaagauu

SEQ ID NO: 1403102 - RNA, 19 nt, Artificial Sequence
  Description of Artificial Sequence: Synthetic oligonucleotide
ccaauaagguauaucguuu

SEQ ID NO: 1403103 - RNA, 19 nt, Artificial Sequence
  Description of Artificial Sequence: Synthetic oligonucleotide
caggugaccgauugcugcu

SEQ ID NO: 1403104 - RNA, 19 nt, Artificial Sequence
  Description of Artificial Sequence: Synthetic oligonucleotide
gccucucaugguguaaaac

SEQ ID NO: 1403105 - RNA, 19 nt, Artificial Sequence
  Description of Artificial Sequence: Synthetic oligonucleotide
agcaagcaugaaaccugga

SEQ ID NO: 1403106 - RNA, 19 nt, Artificial Sequence
  Description of Artificial Sequence: Synthetic oligonucleotide
caaggaccugcaucguagu

SEQ ID NO: 1403107 - RNA, 19 nt, Artificial Sequence
  Description of Artificial Sequence: Synthetic oligonucleotide
cugguggacuuuccagcaa

SEQ ID NO: 1403108 - RNA, 19 nt, Artificial Sequence
  Description of Artificial Sequence: Synthetic oligonucleotide
gcuuuacuguggugcuuca

SEQ ID NO: 1403109 - RNA, 19 nt, Artificial Sequence
  Description of Artificial Sequence: Synthetic oligonucleotide
caagccucucaugguguaa

SEQ ID NO: 1403110 - RNA, 19 nt, Artificial Sequence
  Description of Artificial Sequence: Synthetic oligonucleotide
cugcuaguaauggcaacau

SEQ ID NO: 1403111 - RNA, 19 nt, Artificial Sequence
  Description of Artificial Sequence: Synthetic oligonucleotide
cuggugaucaaagcucauu

SEQ ID NO: 1403112 - RNA, 19 nt, Artificial Sequence
  Description of Artificial Sequence: Synthetic oligonucleotide
ccuccaauucacacuccaa

SEQ ID NO: 1403113 - RNA, 19 nt, Artificial Sequence
  Description of Artificial Sequence: Synthetic oligonucleotide
ggugaccgauugcugcugu

SEQ ID NO: 1403114 - RNA, 19 nt, Artificial Sequence
  Description of Artificial Sequence: Synthetic oligonucleotide
gguuugcauguccuucaau

SEQ ID NO: 1403115 - RNA, 19 nt, Artificial Sequence
  Description of Artificial Sequence: Synthetic oligonucleotide
gcacuuuaguuaucugguu

SEQ ID NO: 1403116 - RNA, 19 nt, Artificial Sequence
  Description of Artificial Sequence: Synthetic oligonucleotide
cgaucauugcacaaagcuu

SEQ ID NO: 1403117 - RNA, 19 nt, Artificial Sequence
  Description of Artificial Sequence: Synthetic oligonucleotide
gcauaucgccuaagcacaa

SEQ ID NO: 1403118 - RNA, 19 nt, Artificial Sequence
  Description of Artificial Sequence: Synthetic oligonucleotide
cauaucgccuaagcacaau

SEQ ID NO: 1403119 - RNA, 19 nt, Artificial Sequence
  Description of Artificial Sequence: Synthetic oligonucleotide
cguuuaugaucugguguca

SEQ ID NO: 1403120 - RNA, 19 nt, Artificial Sequence
  Description of Artificial Sequence: Synthetic oligonucleotide
gugaccgauugcugcuguu

SEQ ID NO: 1403121 - RNA, 19 nt, Artificial Sequence
  Description of Artificial Sequence: Synthetic oligonucleotide
ccgauugcugcuguuuccu

SEQ ID NO: 1403122 - RNA, 19 nt, Artificial Sequence
  Description of Artificial Sequence: Synthetic oligonucleotide
cgcauguauuccaauuguu

SEQ ID NO: 1403123 - RNA, 19 nt, Artificial Sequence
  Description of Artificial Sequence: Synthetic oligonucleotide
gaccugcaucguagugagu

SEQ ID NO: 1403124 - RNA, 19 nt, Artificial Sequence
  Description of Artificial Sequence: Synthetic oligonucleotide
ccugcaucguagugaguuu

SEQ ID NO: 1403125 - RNA, 19 nt, Artificial Sequence
  Description of Artificial Sequence: Synthetic oligonucleotide
ggucucuguuuggcaaaau

SEQ ID NO: 1403126 - RNA, 19 nt, Artificial Sequence
  Description of Artificial Sequence: Synthetic oligonucleotide
gcuggugaucaaagcucau

SEQ ID NO: 1403127 - RNA, 19 nt, Artificial Sequence
  Description of Artificial Sequence: Synthetic oligonucleotide
gcuuugccaaggggacacu

SEQ ID NO: 1403128 - RNA, 19 nt, Artificial Sequence
  Description of Artificial Sequence: Synthetic oligonucleotide
cuacggggacagccucauu

SEQ ID NO: 1403129 - RNA, 19 nt, Artificial Sequence
  Description of Artificial Sequence: Synthetic oligonucleotide
ccucgugaacaggcuugcu

SEQ ID NO: 1403130 - RNA, 19 nt, Artificial Sequence
  Description of Artificial Sequence: Synthetic oligonucleotide
ucaaaauugaagaaucugg

SEQ ID NO: 1403131 - RNA, 19 nt, Artificial Sequence
  Description of Artificial Sequence: Synthetic oligonucleotide
aagauaacaguuuccauuc

SEQ ID NO: 1403132 - RNA, 19 nt, Artificial Sequence
  Description of Artificial Sequence: Synthetic oligonucleotide
agcaauuuggcucagaaag

SEQ ID NO: 1403133 - RNA, 19 nt, Artificial Sequence
  Description of Artificial Sequence: Synthetic oligonucleotide
aaaggaaguucucuguugc

SEQ ID NO: 1403134 - RNA, 19 nt, Artificial Sequence
  Description of Artificial Sequence: Synthetic oligonucleotide
aauugaagaaucuggaacu

SEQ ID NO: 1403135 - RNA, 19 nt, Artificial Sequence
  Description of Artificial Sequence: Synthetic oligonucleotide
cuuugcuaaagaaagagcc

SEQ ID NO: 1403136 - RNA, 19 nt, Artificial Sequence
  Description of Artificial Sequence: Synthetic oligonucleotide
uuuucgaucagcccaaugc

SEQ ID NO: 1403137 - RNA, 19 nt, Artificial Sequence
  Description of Artificial Sequence: Synthetic oligonucleotide
uccaauucuacaaagccag

SEQ ID NO: 1403138 - RNA, 19 nt, Artificial Sequence
  Description of Artificial Sequence: Synthetic oligonucleotide
aaugauauucuacauaauu

SEQ ID NO: 1403139 - RNA, 19 nt, Artificial Sequence
  Description of Artificial Sequence: Synthetic oligonucleotide
ucagauauauucuacacaa

SEQ ID NO: 1403140 - RNA, 19 nt, Artificial Sequence
  Description of Artificial Sequence: Synthetic oligonucleotide
aguuaaaacacuguccagc

SEQ ID NO: 1403141 - RNA, 19 nt, Artificial Sequence
  Description of Artificial Sequence: Synthetic oligonucleotide
ugcuagaugguaaaggaag

SEQ ID NO: 1403142 - RNA, 19 nt, Artificial Sequence
  Description of Artificial Sequence: Synthetic oligonucleotide
uacauaauucuacagaaaa

SEQ ID NO: 1403143 - RNA, 19 nt, Artificial Sequence
  Description of Artificial Sequence: Synthetic oligonucleotide
uggguacucagaaugaagg

SEQ ID NO: 1403144 - RNA, 19 nt, Artificial Sequence
  Description of Artificial Sequence: Synthetic oligonucleotide
uauauaaugccaaugggua

SEQ ID NO: 1403145 - RNA, 19 nt, Artificial Sequence
  Description of Artificial Sequence: Synthetic oligonucleotide
gauaacuccacacccacag

SEQ ID NO: 1403146 - RNA, 19 nt, Artificial Sequence
  Description of Artificial Sequence: Synthetic oligonucleotide
uuccauuccaaacugagac

SEQ ID NO: 1403147 - RNA, 19 nt, Artificial Sequence
  Description of Artificial Sequence: Synthetic oligonucleotide
aucauuuuaacugggcucc

SEQ ID NO: 1403148 - RNA, 19 nt, Artificial Sequence
  Description of Artificial Sequence: Synthetic oligonucleotide
aacagucagaucuucagca

SEQ ID NO: 1403149 - RNA, 19 nt, Artificial Sequence
  Description of Artificial Sequence: Synthetic oligonucleotide
uguaguuugcccauuguca

SEQ ID NO: 1403150 - RNA, 19 nt, Artificial Sequence
  Description of Artificial Sequence: Synthetic oligonucleotide
ucaacaucaaugcugugug

SEQ ID NO: 1403151 - RNA, 19 nt, Artificial Sequence
  Description of Artificial Sequence: Synthetic oligonucleotide
aaugcuguguguaagauaa

SEQ ID NO: 1403152 - RNA, 19 nt, Artificial Sequence
  Description of Artificial Sequence: Synthetic oligonucleotide
uguaagauaacaguuucca

SEQ ID NO: 1403153 - RNA, 19 nt, Artificial Sequence
  Description of Artificial Sequence: Synthetic oligonucleotide
acaauauccuagugaaggc

SEQ ID NO: 1403154 - RNA, 19 nt, Artificial Sequence
  Description of Artificial Sequence: Synthetic oligonucleotide
ucuccaucauuuuaacugg

SEQ ID NO: 1403155 - RNA, 19 nt, Artificial Sequence
  Description of Artificial Sequence: Synthetic oligonucleotide
gaaggauaacuccacaccc

SEQ ID NO: 1403156 - RNA, 19 nt, Artificial Sequence
  Description of Artificial Sequence: Synthetic oligonucleotide
ugaucuuuccuccaucacc

SEQ ID NO: 1403157 - RNA, 19 nt, Artificial Sequence
  Description of Artificial Sequence: Synthetic oligonucleotide
aauauccuagugaaggcgg

SEQ ID NO: 1403158 - RNA, 19 nt, Artificial Sequence
  Description of Artificial Sequence: Synthetic oligonucleotide
uuugauggaaccugcaaga

SEQ ID NO: 1403159 - RNA, 19 nt, Artificial Sequence
  Description of Artificial Sequence: Synthetic oligonucleotide
uucggcugcugcuagaugg

SEQ ID NO: 1403160 - RNA, 19 nt, Artificial Sequence
  Description of Artificial Sequence: Synthetic oligonucleotide
cugaccaaagacaaagggg

SEQ ID NO: 1403161 - RNA, 19 nt, Artificial Sequence
  Description of Artificial Sequence: Synthetic oligonucleotide
aauacuauauaaugccaau

SEQ ID NO: 1403162 - RNA, 19 nt, Artificial Sequence
  Description of Artificial Sequence: Synthetic oligonucleotide
ucuuuauguaguuugccca

SEQ ID NO: 1403163 - RNA, 19 nt, Artificial Sequence
  Description of Artificial Sequence: Synthetic oligonucleotide
uucuauuuuggggugauag

SEQ ID NO: 1403164 - RNA, 19 nt, Artificial Sequence
  Description of Artificial Sequence: Synthetic oligonucleotide
agaacugcaauguaacucu

SEQ ID NO: 1403165 - RNA, 19 nt, Artificial Sequence
  Description of Artificial Sequence: Synthetic oligonucleotide
auauaaugccaauggguac

SEQ ID NO: 1403166 - RNA, 19 nt, Artificial Sequence
  Description of Artificial Sequence: Synthetic oligonucleotide
uaguaauauaaaaccaugu

SEQ ID NO: 1403167 - RNA, 19 nt, Artificial Sequence
  Description of Artificial Sequence: Synthetic oligonucleotide
uucagauauauucuacaca

SEQ ID NO: 1403168 - RNA, 19 nt, Artificial Sequence
  Description of Artificial Sequence: Synthetic oligonucleotide
aaucgcuuuugcuucagug

SEQ ID NO: 1403169 - RNA, 19 nt, Artificial Sequence
  Description of Artificial Sequence: Synthetic oligonucleotide
agaaagugcaaauugcagu

SEQ ID NO: 1403170 - RNA, 19 nt, Artificial Sequence
  Description of Artificial Sequence: Synthetic oligonucleotide
aauagaaccuuuccucugu

SEQ ID NO: 1403171 - RNA, 19 nt, Artificial Sequence
  Description of Artificial Sequence: Synthetic oligonucleotide
uguguaagauaacaguuuc

SEQ ID NO: 1403172 - RNA, 19 nt, Artificial Sequence
  Description of Artificial Sequence: Synthetic oligonucleotide
uaucucuugaaugauauuc

SEQ ID NO: 1403173 - RNA, 19 nt, Artificial Sequence
  Description of Artificial Sequence: Synthetic oligonucleotide
ugcaauguaacucuccauc

SEQ ID NO: 1403174 - RNA, 19 nt, Artificial Sequence
  Description of Artificial Sequence: Synthetic oligonucleotide
uguuaggcagcauuuucgg

SEQ ID NO: 1403175 - RNA, 19 nt, Artificial Sequence
  Description of Artificial Sequence: Synthetic oligonucleotide
aaauagaaccuuuccucug

SEQ ID NO: 1403176 - RNA, 19 nt, Artificial Sequence
  Description of Artificial Sequence: Synthetic oligonucleotide
ucaggugagaucucaauac

SEQ ID NO: 1403177 - RNA, 19 nt, Artificial Sequence
  Description of Artificial Sequence: Synthetic oligonucleotide
uguguguaagauaacaguu

SEQ ID NO: 1403178 - RNA, 19 nt, Artificial Sequence
  Description of Artificial Sequence: Synthetic oligonucleotide
uuucgaucagcccaaugcc

SEQ ID NO: 1403179 - RNA, 19 nt, Artificial Sequence
  Description of Artificial Sequence: Synthetic oligonucleotide
aguaauauaaaaccauguu

SEQ ID NO: 1403180 - RNA, 19 nt, Artificial Sequence
  Description of Artificial Sequence: Synthetic oligonucleotide
uuuggggugauagacaaca

SEQ ID NO: 1403181 - RNA, 19 nt, Artificial Sequence
  Description of Artificial Sequence: Synthetic oligonucleotide
uuggcggucagaacaauag

SEQ ID NO: 1403182 - RNA, 19 nt, Artificial Sequence
  Description of Artificial Sequence: Synthetic oligonucleotide
acacccacagaacuucucc

SEQ ID NO: 1403183 - RNA, 19 nt, Artificial Sequence
  Description of Artificial Sequence: Synthetic oligonucleotide
aacucuccaucauuuuaac

SEQ ID NO: 1403184 - RNA, 19 nt, Artificial Sequence
  Description of Artificial Sequence: Synthetic oligonucleotide
ugcagauugcacaauuagc

SEQ ID NO: 1403185 - RNA, 19 nt, Artificial Sequence
  Description of Artificial Sequence: Synthetic oligonucleotide
ucagaaaguaaaaucucuc

SEQ ID NO: 1403186 - RNA, 19 nt, Artificial Sequence
  Description of Artificial Sequence: Synthetic oligonucleotide
uggucuguugcuuaccucc

SEQ ID NO: 1403187 - RNA, 19 nt, Artificial Sequence
  Description of Artificial Sequence: Synthetic oligonucleotide
aaugcaggaugguccaauc

SEQ ID NO: 1403188 - RNA, 19 nt, Artificial Sequence
  Description of Artificial Sequence: Synthetic oligonucleotide
auagacaacaauucguuuu

SEQ ID NO: 1403189 - RNA, 19 nt, Artificial Sequence
  Description of Artificial Sequence: Synthetic oligonucleotide
ggugauagacaacaauucg

SEQ ID NO: 1403190 - RNA, 19 nt, Artificial Sequence
  Description of Artificial Sequence: Synthetic oligonucleotide
aaaucuuuggcggucagaa

SEQ ID NO: 1403191 - RNA, 19 nt, Artificial Sequence
  Description of Artificial Sequence: Synthetic oligonucleotide
ugauagacaacaauucguu

SEQ ID NO: 1403192 - RNA, 19 nt, Artificial Sequence
  Description of Artificial Sequence: Synthetic oligonucleotide
aauuccaauacuauauaau

SEQ ID NO: 1403193 - RNA, 19 nt, Artificial Sequence
  Description of Artificial Sequence: Synthetic oligonucleotide
agcaauguauccugugcac

SEQ ID NO: 1403194 - RNA, 19 nt, Artificial Sequence
  Description of Artificial Sequence: Synthetic oligonucleotide
ucuguaauuccaauacuau

SEQ ID NO: 1403195 - RNA, 19 nt, Artificial Sequence
  Description of Artificial Sequence: Synthetic oligonucleotide
guacugaccaaagacaaag

SEQ ID NO: 1403196 - RNA, 19 nt, Artificial Sequence
  Description of Artificial Sequence: Synthetic oligonucleotide
cuguuaggcagcauuuucg

SEQ ID NO: 1403197 - RNA, 19 nt, Artificial Sequence
  Description of Artificial Sequence: Synthetic oligonucleotide
uauucuacacaauauccua

SEQ ID NO: 1403198 - RNA, 19 nt, Artificial Sequence
  Description of Artificial Sequence: Synthetic oligonucleotide
uauaaccuggcuuucugac

SEQ ID NO: 1403199 - RNA, 19 nt, Artificial Sequence
  Description of Artificial Sequence: Synthetic oligonucleotide
ugagaucucaauacuugga

SEQ ID NO: 1403200 - RNA, 19 nt, Artificial Sequence
  Description of Artificial Sequence: Synthetic oligonucleotide
uucaacaucaaugcugugu

SEQ ID NO: 1403201 - RNA, 19 nt, Artificial Sequence
  Description of Artificial Sequence: Synthetic oligonucleotide
aguucucuguugcaggcgg

SEQ ID NO: 1403202 - RNA, 19 nt, Artificial Sequence
  Description of Artificial Sequence: Synthetic oligonucleotide
ggguuaaaaucuuuggcgg

SEQ ID NO: 1403203 - RNA, 19 nt, Artificial Sequence
  Description of Artificial Sequence: Synthetic oligonucleotide
uuauguaguuugcccauug

SEQ ID NO: 1403204 - RNA, 19 nt, Artificial Sequence
  Description of Artificial Sequence: Synthetic oligonucleotide
aaccauguucuucuguacu

SEQ ID NO: 1403205 - RNA, 19 nt, Artificial Sequence
  Description of Artificial Sequence: Synthetic oligonucleotide
aaucuuuggcggucagaac

SEQ ID NO: 1403206 - RNA, 19 nt, Artificial Sequence
  Description of Artificial Sequence: Synthetic oligonucleotide
cuuaacgaggcugucgugg

SEQ ID NO: 1403207 - RNA, 19 nt, Artificial Sequence
  Description of Artificial Sequence: Synthetic oligonucleotide
caaaauugaagaaucugga

SEQ ID NO: 1403208 - RNA, 19 nt, Artificial Sequence
  Description of Artificial Sequence: Synthetic oligonucleotide
aguuugcccauugucaugg

SEQ ID NO: 1403209 - RNA, 19 nt, Artificial Sequence
  Description of Artificial Sequence: Synthetic oligonucleotide
gugagaucucaauacuugg

SEQ ID NO: 1403210 - RNA, 19 nt, Artificial Sequence
  Description of Artificial Sequence: Synthetic oligonucleotide
uccugugcacaucugcagg

SEQ ID NO: 1403211 - RNA, 19 nt, Artificial Sequence
  Description of Artificial Sequence: Synthetic oligonucleotide
cuauuuuggggugauagac

SEQ ID NO: 1403212 - RNA, 19 nt, Artificial Sequence
  Description of Artificial Sequence: Synthetic oligonucleotide
agauaacaguuuccauucc

SEQ ID NO: 1403213 - RNA, 19 nt, Artificial Sequence
  Description of Artificial Sequence: Synthetic oligonucleotide
aauugcaguaucucuugaa

SEQ ID NO: 1403214 - RNA, 19 nt, Artificial Sequence
  Description of Artificial Sequence: Synthetic oligonucleotide
uggaacuucaacuguagua

SEQ ID NO: 1403215 - RNA, 19 nt, Artificial Sequence
  Description of Artificial Sequence: Synthetic oligonucleotide
uaaucagguacaaaaucua

SEQ ID NO: 1403216 - RNA, 19 nt, Artificial Sequence
  Description of Artificial Sequence: Synthetic oligonucleotide
guuaaaacacuguccagca

SEQ ID NO: 1403217 - RNA, 19 nt, Artificial Sequence
  Description of Artificial Sequence: Synthetic oligonucleotide
ucugccagauucacaaaca

SEQ ID NO: 1403218 - RNA, 19 nt, Artificial Sequence
  Description of Artificial Sequence: Synthetic oligonucleotide
ugcaagauacgccuuucga

SEQ ID NO: 1403219 - RNA, 19 nt, Artificial Sequence
  Description of Artificial Sequence: Synthetic oligonucleotide
ggcaauguccuguauaacc

SEQ ID NO: 1403220 - RNA, 19 nt, Artificial Sequence
  Description of Artificial Sequence: Synthetic oligonucleotide
ccguauuucagauauauuc

SEQ ID NO: 1403221 - RNA, 19 nt, Artificial Sequence
  Description of Artificial Sequence: Synthetic oligonucleotide
uuucugacuucucuggguc

SEQ ID NO: 1403222 - RNA, 19 nt, Artificial Sequence
  Description of Artificial Sequence: Synthetic oligonucleotide
ugccucaacacugaggaug

SEQ ID NO: 1403223 - RNA, 19 nt, Artificial Sequence
  Description of Artificial Sequence: Synthetic oligonucleotide
ucuauuuuggggugauaga

SEQ ID NO: 1403224 - RNA, 19 nt, Artificial Sequence
  Description of Artificial Sequence: Synthetic oligonucleotide
aaaauggugcuagauuggu

SEQ ID NO: 1403225 - RNA, 19 nt, Artificial Sequence
  Description of Artificial Sequence: Synthetic oligonucleotide
ugucgaugccacaccaggg

SEQ ID NO: 1403226 - RNA, 19 nt, Artificial Sequence
  Description of Artificial Sequence: Synthetic oligonucleotide
caauauccuagugaaggcg

SEQ ID NO: 1403227 - RNA, 19 nt, Artificial Sequence
  Description of Artificial Sequence: Synthetic oligonucleotide
ucguggaaggauaacucca

SEQ ID NO: 1403228 - RNA, 19 nt, Artificial Sequence
  Description of Artificial Sequence: Synthetic oligonucleotide
ugucuuugauggaaccugc

SEQ ID NO: 1403229 - RNA, 19 nt, Artificial Sequence
  Description of Artificial Sequence: Synthetic oligonucleotide
uccuguauaaccuggcuuu

SEQ ID NO: 1403230 - RNA, 19 nt, Artificial Sequence
  Description of Artificial Sequence: Synthetic oligonucleotide
cuuaccuccaauucuacaa

SEQ ID NO: 1403231 - RNA, 19 nt, Artificial Sequence
  Description of Artificial Sequence: Synthetic oligonucleotide
aaauugcaguaucucuuga

SEQ ID NO: 1403232 - RNA, 19 nt, Artificial Sequence
  Description of Artificial Sequence: Synthetic oligonucleotide
cuguaguaauauaaaacca

SEQ ID NO: 1403233 - RNA, 19 nt, Artificial Sequence
  Description of Artificial Sequence: Synthetic oligonucleotide
aauguauccugugcacauc

SEQ ID NO: 1403234 - RNA, 19 nt, Artificial Sequence
  Description of Artificial Sequence: Synthetic oligonucleotide
cuucagugccucaacacug

SEQ ID NO: 1403235 - RNA, 19 nt, Artificial Sequence
  Description of Artificial Sequence: Synthetic oligonucleotide
ugucguggaaggauaacuc

SEQ ID NO: 1403236 - RNA, 19 nt, Artificial Sequence
  Description of Artificial Sequence: Synthetic oligonucleotide
cuauauaaugccaaugggu

SEQ ID NO: 1403237 - RNA, 19 nt, Artificial Sequence
  Description of Artificial Sequence: Synthetic oligonucleotide
uuuuagggcaauguccugu

SEQ ID NO: 1403238 - RNA, 19 nt, Artificial Sequence
  Description of Artificial Sequence: Synthetic oligonucleotide
cugcagauugcacaauuag

SEQ ID NO: 1403239 - RNA, 19 nt, Artificial Sequence
  Description of Artificial Sequence: Synthetic oligonucleotide
ugcuguguguaagauaaca

SEQ ID NO: 1403240 - RNA, 19 nt, Artificial Sequence
  Description of Artificial Sequence: Synthetic oligonucleotide
auacuauauaaugccaaug

SEQ ID NO: 1403241 - RNA, 19 nt, Artificial Sequence
  Description of Artificial Sequence: Synthetic oligonucleotide
gaugguccaauccugucga

SEQ ID NO: 1403242 - RNA, 19 nt, Artificial Sequence
  Description of Artificial Sequence: Synthetic oligonucleotide
aaggcggcauauuucucug

SEQ ID NO: 1403243 - RNA, 19 nt, Artificial Sequence
  Description of Artificial Sequence: Synthetic oligonucleotide
ucgaucagcccaaugccga

SEQ ID NO: 1403244 - RNA, 19 nt, Artificial Sequence
  Description of Artificial Sequence: Synthetic oligonucleotide
uggugaucucacuaucugc

SEQ ID NO: 1403245 - RNA, 19 nt, Artificial Sequence
  Description of Artificial Sequence: Synthetic oligonucleotide
caaugucuuugauggaacc

SEQ ID NO: 1403246 - RNA, 19 nt, Artificial Sequence
  Description of Artificial Sequence: Synthetic oligonucleotide
gagaucucaauacuuggaa

SEQ ID NO: 1403247 - RNA, 19 nt, Artificial Sequence
  Description of Artificial Sequence: Synthetic oligonucleotide
uggcagauccccuugguaa

SEQ ID NO: 1403248 - RNA, 19 nt, Artificial Sequence
  Description of Artificial Sequence: Synthetic oligonucleotide
ugccagauucacaaacaca

SEQ ID NO: 1403249 - RNA, 19 nt, Artificial Sequence
  Description of Artificial Sequence: Synthetic oligonucleotide
ugaccaauuucuuuaugua

SEQ ID NO: 1403250 - RNA, 19 nt, Artificial Sequence
  Description of Artificial Sequence: Synthetic oligonucleotide
cugucgaugccacaccagg

SEQ ID NO: 1403251 - RNA, 19 nt, Artificial Sequence
  Description of Artificial Sequence: Synthetic oligonucleotide
cagaaaguaaaaucucuca

SEQ ID NO: 1403252 - RNA, 19 nt, Artificial Sequence
  Description of Artificial Sequence: Synthetic oligonucleotide
cuuucgacuaucaaagucu

SEQ ID NO: 1403253 - RNA, 19 nt, Artificial Sequence
  Description of Artificial Sequence: Synthetic oligonucleotide
acaaugucuuugauggaac

SEQ ID NO: 1403254 - RNA, 19 nt, Artificial Sequence
  Description of Artificial Sequence: Synthetic oligonucleotide
acagaaaacauagcaauuu

SEQ ID NO: 1403255 - RNA, 19 nt, Artificial Sequence
  Description of Artificial Sequence: Synthetic oligonucleotide
auuuuaacugggcucccgu

SEQ ID NO: 1403256 - RNA, 19 nt, Artificial Sequence
  Description of Artificial Sequence: Synthetic oligonucleotide
aaaagcaaacugugaguua

SEQ ID NO: 1403257 - RNA, 19 nt, Artificial Sequence
  Description of Artificial Sequence: Synthetic oligonucleotide
ugcaaguggagcgauggug

SEQ ID NO: 1403258 - RNA, 19 nt, Artificial Sequence
  Description of Artificial Sequence: Synthetic oligonucleotide
agcagaucccuuaacgagg

SEQ ID NO: 1403259 - RNA, 19 nt, Artificial Sequence
  Description of Artificial Sequence: Synthetic oligonucleotide
uggaggugcauguaggaau

SEQ ID NO: 1403260 - RNA, 19 nt, Artificial Sequence
  Description of Artificial Sequence: Synthetic oligonucleotide
uuucggagcagcagauccc

SEQ ID NO: 1403261 - RNA, 19 nt, Artificial Sequence
  Description of Artificial Sequence: Synthetic oligonucleotide
aacgaggcugucguggaag

SEQ ID NO: 1403262 - RNA, 19 nt, Artificial Sequence
  Description of Artificial Sequence: Synthetic oligonucleotide
auucuacacaauauccuag

SEQ ID NO: 1403263 - RNA, 19 nt, Artificial Sequence
  Description of Artificial Sequence: Synthetic oligonucleotide
cagauugcacaauuagcug

SEQ ID NO: 1403264 - RNA, 19 nt, Artificial Sequence
  Description of Artificial Sequence: Synthetic oligonucleotide
gucguggaaggauaacucc

SEQ ID NO: 1403265 - RNA, 19 nt, Artificial Sequence
  Description of Artificial Sequence: Synthetic oligonucleotide
uugcuuaccuccaauucua

SEQ ID NO: 1403266 - RNA, 19 nt, Artificial Sequence
  Description of Artificial Sequence: Synthetic oligonucleotide
ccaauggguacucagaaug

SEQ ID NO: 1403267 - RNA, 19 nt, Artificial Sequence
  Description of Artificial Sequence: Synthetic oligonucleotide
aucaaugcuguguguaaga

SEQ ID NO: 1403268 - RNA, 19 nt, Artificial Sequence
  Description of Artificial Sequence: Synthetic oligonucleotide
ggaugguccaauccugucg

SEQ ID NO: 1403269 - RNA, 19 nt, Artificial Sequence
  Description of Artificial Sequence: Synthetic oligonucleotide
uuaacgaggcugucgugga

SEQ ID NO: 1403270 - RNA, 19 nt, Artificial Sequence
  Description of Artificial Sequence: Synthetic oligonucleotide
aaguucucuguugcaggcg

SEQ ID NO: 1403271 - RNA, 19 nt, Artificial Sequence
  Description of Artificial Sequence: Synthetic oligonucleotide
agaucucaauacuuggaaa

SEQ ID NO: 1403272 - RNA, 19 nt, Artificial Sequence
  Description of Artificial Sequence: Synthetic oligonucleotide
uucagugccucaacacuga

SEQ ID NO: 1403273 - RNA, 19 nt, Artificial Sequence
  Description of Artificial Sequence: Synthetic oligonucleotide
ucuguucggcugcugcuag

SEQ ID NO: 1403274 - RNA, 19 nt, Artificial Sequence
  Description of Artificial Sequence: Synthetic oligonucleotide
ugucauggucucuuuugca

SEQ ID NO: 1403275 - RNA, 19 nt, Artificial Sequence
  Description of Artificial Sequence: Synthetic oligonucleotide
uagauuggugaagauuucu

SEQ ID NO: 1403276 - RNA, 19 nt, Artificial Sequence
  Description of Artificial Sequence: Synthetic oligonucleotide
ucuuuggcggucagaacaa

SEQ ID NO: 1403277 - RNA, 19 nt, Artificial Sequence
  Description of Artificial Sequence: Synthetic oligonucleotide
guaucggccgccacaaccg

SEQ ID NO: 1403278 - RNA, 19 nt, Artificial Sequence
  Description of Artificial Sequence: Synthetic oligonucleotide
auaaccuggcuuucugacu

SEQ ID NO: 1403279 - RNA, 19 nt, Artificial Sequence
  Description of Artificial Sequence: Synthetic oligonucleotide
aagauacgccuuucgacua

SEQ ID NO: 1403280 - RNA, 19 nt, Artificial Sequence
  Description of Artificial Sequence: Synthetic oligonucleotide
ccuccaauucuacaaagcc

SEQ ID NO: 1403281 - RNA, 19 nt, Artificial Sequence
  Description of Artificial Sequence: Synthetic oligonucleotide
uguacugaccaaagacaaa

SEQ ID NO: 1403282 - RNA, 19 nt, Artificial Sequence
  Description of Artificial Sequence: Synthetic oligonucleotide
gucgaugccacaccagggc

SEQ ID NO: 1403283 - RNA, 19 nt, Artificial Sequence
  Description of Artificial Sequence: Synthetic oligonucleotide
auuccaaacugagacacaa

SEQ ID NO: 1403284 - RNA, 19 nt, Artificial Sequence
  Description of Artificial Sequence: Synthetic oligonucleotide
uuucgacuaucaaagucuu

SEQ ID NO: 1403285 - RNA, 19 nt, Artificial Sequence
  Description of Artificial Sequence: Synthetic oligonucleotide
aaggauaacuccacaccca

SEQ ID NO: 1403286 - RNA, 19 nt, Artificial Sequence
  Description of Artificial Sequence: Synthetic oligonucleotide
ucagcugcguaucggccgc

SEQ ID NO: 1403287 - RNA, 19 nt, Artificial Sequence
  Description of Artificial Sequence: Synthetic oligonucleotide
auauccuagugaaggcggc

SEQ ID NO: 1403288 - RNA, 19 nt, Artificial Sequence
  Description of Artificial Sequence: Synthetic oligonucleotide
ucuuuugcaaguggagcga

SEQ ID NO: 1403289 - RNA, 19 nt, Artificial Sequence
  Description of Artificial Sequence: Synthetic oligonucleotide
agaucccuuaacgaggcug

SEQ ID NO: 1403290 - RNA, 19 nt, Artificial Sequence
  Description of Artificial Sequence: Synthetic oligonucleotide
guuaaaaucuuuggcgguc

SEQ ID NO: 1403291 - RNA, 19 nt, Artificial Sequence
  Description of Artificial Sequence: Synthetic oligonucleotide
cuccaauucuacaaagcca

SEQ ID NO: 1403292 - RNA, 19 nt, Artificial Sequence
  Description of Artificial Sequence: Synthetic oligonucleotide
uggaaccugcaagauacgc

SEQ ID NO: 1403293 - RNA, 19 nt, Artificial Sequence
  Description of Artificial Sequence: Synthetic oligonucleotide
ucgaugccacaccagggca

SEQ ID NO: 1403294 - RNA, 19 nt, Artificial Sequence
  Description of Artificial Sequence: Synthetic oligonucleotide
uccuuuucgaucagcccaa

SEQ ID NO: 1403295 - RNA, 19 nt, Artificial Sequence
  Description of Artificial Sequence: Synthetic oligonucleotide
aaauggugcuagauuggug

SEQ ID NO: 1403296 - RNA, 19 nt, Artificial Sequence
  Description of Artificial Sequence: Synthetic oligonucleotide
acgccuuucgacuaucaaa

SEQ ID NO: 1403297 - RNA, 19 nt, Artificial Sequence
  Description of Artificial Sequence: Synthetic oligonucleotide
ucccuuaacgaggcugucg

SEQ ID NO: 1403298 - RNA, 19 nt, Artificial Sequence
  Description of Artificial Sequence: Synthetic oligonucleotide
cacagaacuucuccauuag

SEQ ID NO: 1403299 - RNA, 19 nt, Artificial Sequence
  Description of Artificial Sequence: Synthetic oligonucleotide
auugcacaauuagcugacc

SEQ ID NO: 1403300 - RNA, 19 nt, Artificial Sequence
  Description of Artificial Sequence: Synthetic oligonucleotide
agauccccuugguaagaac

SEQ ID NO: 1403301 - RNA, 19 nt, Artificial Sequence
  Description of Artificial Sequence: Synthetic oligonucleotide
ggugagaucucaauacuug

SEQ ID NO: 1403302 - RNA, 19 nt, Artificial Sequence
  Description of Artificial Sequence: Synthetic oligonucleotide
agugcaaauugcaguaucu

SEQ ID NO: 1403303 - RNA, 19 nt, Artificial Sequence
  Description of Artificial Sequence: Synthetic oligonucleotide
uccugucgaugccacacca

SEQ ID NO: 1403304 - RNA, 19 nt, Artificial Sequence
  Description of Artificial Sequence: Synthetic oligonucleotide
uguauccugugcacaucug

SEQ ID NO: 1403305 - RNA, 19 nt, Artificial Sequence
  Description of Artificial Sequence: Synthetic oligonucleotide
uuuagggcaauguccugua

SEQ ID NO: 1403306 - RNA, 19 nt, Artificial Sequence
  Description of Artificial Sequence: Synthetic oligonucleotide
gcaagauacgccuuucgac

SEQ ID NO: 1403307 - RNA, 19 nt, Artificial Sequence
  Description of Artificial Sequence: Synthetic oligonucleotide
auaaugccaauggguacuc

SEQ ID NO: 1403308 - RNA, 19 nt, Artificial Sequence
  Description of Artificial Sequence: Synthetic oligonucleotide
uuuggcggucagaacaaua

SEQ ID NO: 1403309 - RNA, 19 nt, Artificial Sequence
  Description of Artificial Sequence: Synthetic oligonucleotide
caagauacgccuuucgacu

SEQ ID NO: 1403310 - RNA, 19 nt, Artificial Sequence
  Description of Artificial Sequence: Synthetic oligonucleotide
acuuggaaauaaaucauua

SEQ ID NO: 1403311 - RNA, 19 nt, Artificial Sequence
  Description of Artificial Sequence: Synthetic oligonucleotide
aaguggagcgauggugauc

SEQ ID NO: 1403312 - RNA, 19 nt, Artificial Sequence
  Description of Artificial Sequence: Synthetic oligonucleotide
gaucuuuccuccaucaccu

SEQ ID NO: 1403313 - RNA, 19 nt, Artificial Sequence
  Description of Artificial Sequence: Synthetic oligonucleotide
cugccagauucacaaacac

SEQ ID NO: 1403314 - RNA, 19 nt, Artificial Sequence
  Description of Artificial Sequence: Synthetic oligonucleotide
uaguuugcccauugucaug

SEQ ID NO: 1403315 - RNA, 19 nt, Artificial Sequence
  Description of Artificial Sequence: Synthetic oligonucleotide
guaacucuccaucauuuua

SEQ ID NO: 1403316 - RNA, 19 nt, Artificial Sequence
  Description of Artificial Sequence: Synthetic oligonucleotide
aaagugcaaauugcaguau

SEQ ID NO: 1403317 - RNA, 19 nt, Artificial Sequence
  Description of Artificial Sequence: Synthetic oligonucleotide
guguaagauaacaguuucc

SEQ ID NO: 1403318 - RNA, 19 nt, Artificial Sequence
  Description of Artificial Sequence: Synthetic oligonucleotide
cauuuuaacugggcucccg

SEQ ID NO: 1403319 - RNA, 19 nt, Artificial Sequence
  Description of Artificial Sequence: Synthetic oligonucleotide
gaaggcggcauauuucucu

SEQ ID NO: 1403320 - RNA, 19 nt, Artificial Sequence
  Description of Artificial Sequence: Synthetic oligonucleotide
aucagcccaaugccgagca

SEQ ID NO: 1403321 - RNA, 19 nt, Artificial Sequence
  Description of Artificial Sequence: Synthetic oligonucleotide
cuagauuggugaagauuuc

SEQ ID NO: 1403322 - RNA, 19 nt, Artificial Sequence
  Description of Artificial Sequence: Synthetic oligonucleotide
cagugccucaacacugagg

SEQ ID NO: 1403323 - RNA, 19 nt, Artificial Sequence
  Description of Artificial Sequence: Synthetic oligonucleotide
ggcggcauauuucucuggg

SEQ ID NO: 1403324 - RNA, 19 nt, Artificial Sequence
  Description of Artificial Sequence: Synthetic oligonucleotide
cugaccaauuucuuuaugu

SEQ ID NO: 1403325 - RNA, 19 nt, Artificial Sequence
  Description of Artificial Sequence: Synthetic oligonucleotide
uagcaauuuggcucagaaa

SEQ ID NO: 1403326 - RNA, 19 nt, Artificial Sequence
  Description of Artificial Sequence: Synthetic oligonucleotide
ucaaugcuguguguaagau

SEQ ID NO: 1403327 - RNA, 19 nt, Artificial Sequence
  Description of Artificial Sequence: Synthetic oligonucleotide
uggcggucagaacaauaga

SEQ ID NO: 1403328 - RNA, 19 nt, Artificial Sequence
  Description of Artificial Sequence: Synthetic oligonucleotide
aacacaucguagaggucug

SEQ ID NO: 1403329 - RNA, 19 nt, Artificial Sequence
  Description of Artificial Sequence: Synthetic oligonucleotide
auggguacucagaaugaag

SEQ ID NO: 1403330 - RNA, 19 nt, Artificial Sequence
  Description of Artificial Sequence: Synthetic oligonucleotide
guauaaccuggcuuucuga

SEQ ID NO: 1403331 - RNA, 19 nt, Artificial Sequence
  Description of Artificial Sequence: Synthetic oligonucleotide
aggcgggaaucgcuuuugc

SEQ ID NO: 1403332 - RNA, 19 nt, Artificial Sequence
  Description of Artificial Sequence: Synthetic oligonucleotide
aacuucaacuguaguaaua

SEQ ID NO: 1403333 - RNA, 19 nt, Artificial Sequence
  Description of Artificial Sequence: Synthetic oligonucleotide
ggugcauguaggaaugcag

SEQ ID NO: 1403334 - RNA, 19 nt, Artificial Sequence
  Description of Artificial Sequence: Synthetic oligonucleotide
ugcuaaagaaagagccauu

SEQ ID NO: 1403335 - RNA, 19 nt, Artificial Sequence
  Description of Artificial Sequence: Synthetic oligonucleotide
acagucagaucuucagcau

SEQ ID NO: 1403336 - RNA, 19 nt, Artificial Sequence
  Description of Artificial Sequence: Synthetic oligonucleotide
cuacauaauucuacagaaa

SEQ ID NO: 1403337 - RNA, 19 nt, Artificial Sequence
  Description of Artificial Sequence: Synthetic oligonucleotide
guaggaaugcaggaugguc

SEQ ID NO: 1403338 - RNA, 19 nt, Artificial Sequence
  Description of Artificial Sequence: Synthetic oligonucleotide
cgccuuucgacuaucaaag

SEQ ID NO: 1403339 - RNA, 19 nt, Artificial Sequence
  Description of Artificial Sequence: Synthetic oligonucleotide
ugggcucccguauuucaga

SEQ ID NO: 1403340 - RNA, 19 nt, Artificial Sequence
  Description of Artificial Sequence: Synthetic oligonucleotide
uucugacuucucugggucu

SEQ ID NO: 1403341 - RNA, 19 nt, Artificial Sequence
  Description of Artificial Sequence: Synthetic oligonucleotide
ugcuuaccuccaauucuac

SEQ ID NO: 1403342 - RNA, 19 nt, Artificial Sequence
  Description of Artificial Sequence: Synthetic oligonucleotide
uacgccuuucgacuaucaa

SEQ ID NO: 1403343 - RNA, 19 nt, Artificial Sequence
  Description of Artificial Sequence: Synthetic oligonucleotide
uucggagcagcagaucccu

SEQ ID NO: 1403344 - RNA, 19 nt, Artificial Sequence
  Description of Artificial Sequence: Synthetic oligonucleotide
gugauagacaacaauucgu

SEQ ID NO: 1403345 - RNA, 19 nt, Artificial Sequence
  Description of Artificial Sequence: Synthetic oligonucleotide
uggagcgauggugaucuca

SEQ ID NO: 1403346 - RNA, 19 nt, Artificial Sequence
  Description of Artificial Sequence: Synthetic oligonucleotide
uguaggaaugcaggauggu

SEQ ID NO: 1403347 - RNA, 19 nt, Artificial Sequence
  Description of Artificial Sequence: Synthetic oligonucleotide
ggaaccugcaagauacgcc

SEQ ID NO: 1403348 - RNA, 19 nt, Artificial Sequence
  Description of Artificial Sequence: Synthetic oligonucleotide
uauccuagugaaggcggca

SEQ ID NO: 1403349 - RNA, 19 nt, Artificial Sequence
  Description of Artificial Sequence: Synthetic oligonucleotide
cuuuucgaucagcccaaug

SEQ ID NO: 1403350 - RNA, 19 nt, Artificial Sequence
  Description of Artificial Sequence: Synthetic oligonucleotide
cacaaugucuuugauggaa

SEQ ID NO: 1403351 - RNA, 19 nt, Artificial Sequence
  Description of Artificial Sequence: Synthetic oligonucleotide
caucguagaggucuggucu

SEQ ID NO: 1403352 - RNA, 19 nt, Artificial Sequence
  Description of Artificial Sequence: Synthetic oligonucleotide
ucauuuuaacugggcuccc

SEQ ID NO: 1403353 - RNA, 19 nt, Artificial Sequence
  Description of Artificial Sequence: Synthetic oligonucleotide
gauccccuugguaagaacu

SEQ ID NO: 1403354 - RNA, 19 nt, Artificial Sequence
  Description of Artificial Sequence: Synthetic oligonucleotide
ccuuucgacuaucaaaguc

SEQ ID NO: 1403355 - RNA, 19 nt, Artificial Sequence
  Description of Artificial Sequence: Synthetic oligonucleotide
gcauuuucggagcagcaga

SEQ ID NO: 1403356 - RNA, 19 nt, Artificial Sequence
  Description of Artificial Sequence: Synthetic oligonucleotide
uaucggccgccacaaccgc

SEQ ID NO: 1403357 - RNA, 19 nt, Artificial Sequence
  Description of Artificial Sequence: Synthetic oligonucleotide
gaaugaagggaaguucugu

SEQ ID NO: 1403358 - RNA, 19 nt, Artificial Sequence
  Description of Artificial Sequence: Synthetic oligonucleotide
gcagauugcacaauuagcu

SEQ ID NO: 1403359 - RNA, 19 nt, Artificial Sequence
  Description of Artificial Sequence: Synthetic oligonucleotide
ggcagauccccuugguaag

SEQ ID NO: 1403360 - RNA, 19 nt, Artificial Sequence
  Description of Artificial Sequence: Synthetic oligonucleotide
guuaggcagcauuuucgga

SEQ ID NO: 1403361 - RNA, 19 nt, Artificial Sequence
  Description of Artificial Sequence: Synthetic oligonucleotide
uguugcaggcgggaaucgc

SEQ ID NO: 1403362 - RNA, 19 nt, Artificial Sequence
  Description of Artificial Sequence: Synthetic oligonucleotide
guaguuugcccauugucau

SEQ ID NO: 1403363 - RNA, 19 nt, Artificial Sequence
  Description of Artificial Sequence: Synthetic oligonucleotide
agcaaacugugaguuaaaa

SEQ ID NO: 1403364 - RNA, 19 nt, Artificial Sequence
  Description of Artificial Sequence: Synthetic oligonucleotide
agcugaccaauuucuuuau

SEQ ID NO: 1403365 - RNA, 19 nt, Artificial Sequence
  Description of Artificial Sequence: Synthetic oligonucleotide
ucggcugcugcuagauggu

SEQ ID NO: 1403366 - RNA, 19 nt, Artificial Sequence
  Description of Artificial Sequence: Synthetic oligonucleotide
uugcaaguggagcgauggu

SEQ ID NO: 1403367 - RNA, 19 nt, Artificial Sequence
  Description of Artificial Sequence: Synthetic oligonucleotide
aggcggcauauuucucugg

SEQ ID NO: 1403368 - RNA, 19 nt, Artificial Sequence
  Description of Artificial Sequence: Synthetic oligonucleotide
gauagacaacaauucguuu

SEQ ID NO: 1403369 - RNA, 19 nt, Artificial Sequence
  Description of Artificial Sequence: Synthetic oligonucleotide
uuggggugauagacaacaa

SEQ ID NO: 1403370 - RNA, 19 nt, Artificial Sequence
  Description of Artificial Sequence: Synthetic oligonucleotide
gaucagcccaaugccgagc

SEQ ID NO: 1403371 - RNA, 19 nt, Artificial Sequence
  Description of Artificial Sequence: Synthetic oligonucleotide
uguucggcugcugcuagau

SEQ ID NO: 1403372 - RNA, 19 nt, Artificial Sequence
  Description of Artificial Sequence: Synthetic oligonucleotide
agauuggugaagauuucuu

SEQ ID NO: 1403373 - RNA, 19 nt, Artificial Sequence
  Description of Artificial Sequence: Synthetic oligonucleotide
ugcguaucggccgccacaa

SEQ ID NO: 1403374 - RNA, 19 nt, Artificial Sequence
  Description of Artificial Sequence: Synthetic oligonucleotide
gggugauagacaacaauuc

SEQ ID NO: 1403375 - RNA, 19 nt, Artificial Sequence
  Description of Artificial Sequence: Synthetic oligonucleotide
cagcuucuauuuuggggug

SEQ ID NO: 1403376 - RNA, 19 nt, Artificial Sequence
  Description of Artificial Sequence: Synthetic oligonucleotide
ccaauacuauauaaugcca

SEQ ID NO: 1403377 - RNA, 19 nt, Artificial Sequence
  Description of Artificial Sequence: Synthetic oligonucleotide
agauacgccuuucgacuau

SEQ ID NO: 1403378 - RNA, 19 nt, Artificial Sequence
  Description of Artificial Sequence: Synthetic oligonucleotide
uuagggcaauguccuguau

SEQ ID NO: 1403379 - RNA, 19 nt, Artificial Sequence
  Description of Artificial Sequence: Synthetic oligonucleotide
ggaggugcauguaggaaug

SEQ ID NO: 1403380 - RNA, 19 nt, Artificial Sequence
  Description of Artificial Sequence: Synthetic oligonucleotide
uccuagugaaggcggcaua

SEQ ID NO: 1403381 - RNA, 19 nt, Artificial Sequence
  Description of Artificial Sequence: Synthetic oligonucleotide
cugcuagaugguaaaggaa

SEQ ID NO: 1403382 - RNA, 19 nt, Artificial Sequence
  Description of Artificial Sequence: Synthetic oligonucleotide
uucgacuaucaaagucuuu

SEQ ID NO: 1403383 - RNA, 19 nt, Artificial Sequence
  Description of Artificial Sequence: Synthetic oligonucleotide
cccaaugccgagcaucagc

SEQ ID NO: 1403384 - RNA, 19 nt, Artificial Sequence
  Description of Artificial Sequence: Synthetic oligonucleotide
gaucccuuaacgaggcugu

SEQ ID NO: 1403385 - RNA, 19 nt, Artificial Sequence
  Description of Artificial Sequence: Synthetic oligonucleotide
uugcaggcgggaaucgcuu

SEQ ID NO: 1403386 - RNA, 19 nt, Artificial Sequence
  Description of Artificial Sequence: Synthetic oligonucleotide
uaacgaggcugucguggaa

SEQ ID NO: 1403387 - RNA, 19 nt, Artificial Sequence
  Description of Artificial Sequence: Synthetic oligonucleotide
gauacgccuuucgacuauc

SEQ ID NO: 1403388 - RNA, 19 nt, Artificial Sequence
  Description of Artificial Sequence: Synthetic oligonucleotide
augccaauggguacucaga

SEQ ID NO: 1403389 - RNA, 19 nt, Artificial Sequence
  Description of Artificial Sequence: Synthetic oligonucleotide
gaacuucaacuguaguaau

SEQ ID NO: 1403390 - RNA, 19 nt, Artificial Sequence
  Description of Artificial Sequence: Synthetic oligonucleotide
gcucagaaaguaaaaucuc

SEQ ID NO: 1403391 - RNA, 19 nt, Artificial Sequence
  Description of Artificial Sequence: Synthetic oligonucleotide
cguaucggccgccacaacc

SEQ ID NO: 1403392 - RNA, 19 nt, Artificial Sequence
  Description of Artificial Sequence: Synthetic oligonucleotide
cuggucuguugcuuaccuc

SEQ ID NO: 1403393 - RNA, 19 nt, Artificial Sequence
  Description of Artificial Sequence: Synthetic oligonucleotide
gcagaucccuuaacgaggc

SEQ ID NO: 1403394 - RNA, 19 nt, Artificial Sequence
  Description of Artificial Sequence: Synthetic oligonucleotide
caaugccgagcaucagcug

SEQ ID NO: 1403395 - RNA, 19 nt, Artificial Sequence
  Description of Artificial Sequence: Synthetic oligonucleotide
gaggugcauguaggaaugc

SEQ ID NO: 1403396 - RNA, 19 nt, Artificial Sequence
  Description of Artificial Sequence: Synthetic oligonucleotide
agcccaaugccgagcauca

SEQ ID NO: 1403397 - RNA, 19 nt, Artificial Sequence
  Description of Artificial Sequence: Synthetic oligonucleotide
auggaaccugcaagauacg

SEQ ID NO: 1403398 - RNA, 19 nt, Artificial Sequence
  Description of Artificial Sequence: Synthetic oligonucleotide
aggugagaucucaauacuu

SEQ ID NO: 1403399 - RNA, 19 nt, Artificial Sequence
  Description of Artificial Sequence: Synthetic oligonucleotide
agcuucuauuuugggguga

SEQ ID NO: 1403400 - RNA, 19 nt, Artificial Sequence
  Description of Artificial Sequence: Synthetic oligonucleotide
auccuagugaaggcggcau

SEQ ID NO: 1403401 - RNA, 19 nt, Artificial Sequence
  Description of Artificial Sequence: Synthetic oligonucleotide
aucucacuaucugccagau

SEQ ID NO: 1403402 - RNA, 19 nt, Artificial Sequence
  Description of Artificial Sequence: Synthetic oligonucleotide
gcucccguauuucagauau

SEQ ID NO: 1403403 - RNA, 19 nt, Artificial Sequence
  Description of Artificial Sequence: Synthetic oligonucleotide
cagcauuuucggagcagca

SEQ ID NO: 1403404 - RNA, 19 nt, Artificial Sequence
  Description of Artificial Sequence: Synthetic oligonucleotide
gucuugcuguggaacaguc

SEQ ID NO: 1403405 - RNA, 19 nt, Artificial Sequence
  Description of Artificial Sequence: Synthetic oligonucleotide
guucggcugcugcuagaug

SEQ ID NO: 1403406 - RNA, 19 nt, Artificial Sequence
  Description of Artificial Sequence: Synthetic oligonucleotide
aucccuuaacgaggcuguc

SEQ ID NO: 1403407 - RNA, 19 nt, Artificial Sequence
  Description of Artificial Sequence: Synthetic oligonucleotide
augcuguguguaagauaac

SEQ ID NO: 1403408 - RNA, 19 nt, Artificial Sequence
  Description of Artificial Sequence: Synthetic oligonucleotide
gcuuaccuccaauucuaca

SEQ ID NO: 1403409 - RNA, 19 nt, Artificial Sequence
  Description of Artificial Sequence: Synthetic oligonucleotide
guguguaagauaacaguuu

SEQ ID NO: 1403410 - RNA, 19 nt, Artificial Sequence
  Description of Artificial Sequence: Synthetic oligonucleotide
cauuuucggagcagcagau

SEQ ID NO: 1403411 - RNA, 19 nt, Artificial Sequence
  Description of Artificial Sequence: Synthetic oligonucleotide
caggugagaucucaauacu

SEQ ID NO: 1403412 - RNA, 19 nt, Artificial Sequence
  Description of Artificial Sequence: Synthetic oligonucleotide
caucuguuaggcagcauuu

SEQ ID NO: 1403413 - RNA, 19 nt, Artificial Sequence
  Description of Artificial Sequence: Synthetic oligonucleotide
gucuggucuguugcuuacc

SEQ ID NO: 1403414 - RNA, 19 nt, Artificial Sequence
  Description of Artificial Sequence: Synthetic oligonucleotide
acauagcaauuuggcucag

SEQ ID NO: 1403415 - RNA, 19 nt, Artificial Sequence
  Description of Artificial Sequence: Synthetic oligonucleotide
gaaugcaggaugguccaau

SEQ ID NO: 1403416 - RNA, 19 nt, Artificial Sequence
  Description of Artificial Sequence: Synthetic oligonucleotide
guccuguauaaccuggcuu

SEQ ID NO: 1403417 - RNA, 19 nt, Artificial Sequence
  Description of Artificial Sequence: Synthetic oligonucleotide
cgggaaucgcuuuugcuuc

SEQ ID NO: 1403418 - RNA, 19 nt, Artificial Sequence
  Description of Artificial Sequence: Synthetic oligonucleotide
cugcguaucggccgccaca

SEQ ID NO: 1403419 - RNA, 19 nt, Artificial Sequence
  Description of Artificial Sequence: Synthetic oligonucleotide
ggggugauagacaacaauu

SEQ ID NO: 1403420 - RNA, 19 nt, Artificial Sequence
  Description of Artificial Sequence: Synthetic oligonucleotide
ugcaggcgggaaucgcuuu

SEQ ID NO: 1403421 - RNA, 19 nt, Artificial Sequence
  Description of Artificial Sequence: Synthetic oligonucleotide
caggcgggaaucgcuuuug

SEQ ID NO: 1403422 - RNA, 19 nt, Artificial Sequence
  Description of Artificial Sequence: Synthetic oligonucleotide
acaaagggguggaggaguu

SEQ ID NO: 1403423 - RNA, 19 nt, Artificial Sequence
  Description of Artificial Sequence: Synthetic oligonucleotide
auacgccuuucgacuauca

SEQ ID NO: 1403424 - RNA, 19 nt, Artificial Sequence
  Description of Artificial Sequence: Synthetic oligonucleotide
ccugucgaugccacaccag

SEQ ID NO: 1403425 - RNA, 19 nt, Artificial Sequence
  Description of Artificial Sequence: Synthetic oligonucleotide
gaaucgcuuuugcuucagu

SEQ ID NO: 1403426 - RNA, 19 nt, Artificial Sequence
  Description of Artificial Sequence: Synthetic oligonucleotide
ggcagcauuuucggagcag

SEQ ID NO: 1403427 - RNA, 19 nt, Artificial Sequence
  Description of Artificial Sequence: Synthetic oligonucleotide
gcggucagaacaauagaaa

SEQ ID NO: 1403428 - RNA, 19 nt, Artificial Sequence
  Description of Artificial Sequence: Synthetic oligonucleotide
cauagcaauuuggcucaga

SEQ ID NO: 1403429 - RNA, 19 nt, Artificial Sequence
  Description of Artificial Sequence: Synthetic oligonucleotide
aaccugcaagauacgccuu

SEQ ID NO: 1403430 - RNA, 19 nt, Artificial Sequence
  Description of Artificial Sequence: Synthetic oligonucleotide
ccaaugccgagcaucagcu

SEQ ID NO: 1403431 - RNA, 19 nt, Artificial Sequence
  Description of Artificial Sequence: Synthetic oligonucleotide
cuggcagauccccuuggua

SEQ ID NO: 1403432 - RNA, 19 nt, Artificial Sequence
  Description of Artificial Sequence: Synthetic oligonucleotide
cuagaugguaaaggaaguu

SEQ ID NO: 1403433 - RNA, 19 nt, Artificial Sequence
  Description of Artificial Sequence: Synthetic oligonucleotide
gggaaucgcuuuugcuuca

SEQ ID NO: 1403434 - RNA, 19 nt, Artificial Sequence
  Description of Artificial Sequence: Synthetic oligonucleotide
gcgggaaucgcuuuugcuu

SEQ ID NO: 1403435 - RNA, 19 nt, Artificial Sequence
  Description of Artificial Sequence: Synthetic oligonucleotide
gcuagaugguaaaggaagu

SEQ ID NO: 1403436 - RNA, 19 nt, Artificial Sequence
  Description of Artificial Sequence: Synthetic oligonucleotide
ugccgagcaucagcugcgu

SEQ ID NO: 1403437 - RNA, 19 nt, Artificial Sequence
  Description of Artificial Sequence: Synthetic oligonucleotide
gcacaauuagcugaccaau

SEQ ID NO: 1403438 - RNA, 19 nt, Artificial Sequence
  Description of Artificial Sequence: Synthetic oligonucleotide
ccuuaacgaggcugucgug

SEQ ID NO: 1403439 - RNA, 19 nt, Artificial Sequence
  Description of Artificial Sequence: Synthetic oligonucleotide
ggccccaaaagauuugcuu

SEQ ID NO: 1403440 - RNA, 19 nt, Artificial Sequence
  Description of Artificial Sequence: Synthetic oligonucleotide
ggucuguugcuuaccucca

SEQ ID NO: 1403441 - RNA, 19 nt, Artificial Sequence
  Description of Artificial Sequence: Synthetic oligonucleotide
gagcgauggugaucucacu

SEQ ID NO: 1403442 - RNA, 19 nt, Artificial Sequence
  Description of Artificial Sequence: Synthetic oligonucleotide
cuguauaaccuggcuuucu

SEQ ID NO: 1403443 - RNA, 19 nt, Artificial Sequence
  Description of Artificial Sequence: Synthetic oligonucleotide
gcugucguggaaggauaac

SEQ ID NO: 1403444 - RNA, 19 nt, Artificial Sequence
  Description of Artificial Sequence: Synthetic oligonucleotide
cacaucguagaggucuggu

SEQ ID NO: 1403445 - RNA, 19 nt, Artificial Sequence
  Description of Artificial Sequence: Synthetic oligonucleotide
agcugcguaucggccgcca

SEQ ID NO: 1403446 - RNA, 19 nt, Artificial Sequence
  Description of Artificial Sequence: Synthetic oligonucleotide
cgaucagcccaaugccgag

SEQ ID NO: 1403447 - RNA, 19 nt, Artificial Sequence
  Description of Artificial Sequence: Synthetic oligonucleotide
cagauccccuugguaagaa

SEQ ID NO: 1403448 - RNA, 19 nt, Artificial Sequence
  Description of Artificial Sequence: Synthetic oligonucleotide
cccuuaacgaggcugucgu

SEQ ID NO: 1403449 - RNA, 19 nt, Artificial Sequence
  Description of Artificial Sequence: Synthetic oligonucleotide
ggcgggaaucgcuuuugcu

SEQ ID NO: 1403450 - RNA, 19 nt, Artificial Sequence
  Description of Artificial Sequence: Synthetic oligonucleotide
cgagcaucagcugcguauc

SEQ ID NO: 1403451 - RNA, 19 nt, Artificial Sequence
  Description of Artificial Sequence: Synthetic oligonucleotide
gcagauccccuugguaaga

SEQ ID NO: 1403452 - RNA, 19 nt, Artificial Sequence
  Description of Artificial Sequence: Synthetic oligonucleotide
gcugcguaucggccgccac

SEQ ID NO: 1403453 - RNA, 19 nt, Artificial Sequence
  Description of Artificial Sequence: Synthetic oligonucleotide
gugcuagauuggugaagau

SEQ ID NO: 1403454 - RNA, 19 nt, Artificial Sequence
  Description of Artificial Sequence: Synthetic oligonucleotide
gcaguaucucuugaaugau

SEQ ID NO: 1403455 - RNA, 19 nt, Artificial Sequence
  Description of Artificial Sequence: Synthetic oligonucleotide
gcggcauauuucucugggu

SEQ ID NO: 1403456 - RNA, 19 nt, Artificial Sequence
  Description of Artificial Sequence: Synthetic oligonucleotide
gccuuucgacuaucaaagu

SEQ ID NO: 1403457 - RNA, 19 nt, Artificial Sequence
  Description of Artificial Sequence: Synthetic oligonucleotide
cagcugcguaucggccgcc

SEQ ID NO: 1403458 - RNA, 19 nt, Artificial Sequence
  Description of Artificial Sequence: Synthetic oligonucleotide
ggcucccguauuucagaua

SEQ ID NO: 1403459 - RNA, 19 nt, Artificial Sequence
  Description of Artificial Sequence: Synthetic oligonucleotide
cuagugaaggcggcauauu

SEQ ID NO: 1403460 - RNA, 19 nt, Artificial Sequence
  Description of Artificial Sequence: Synthetic oligonucleotide
guggagcgauggugaucuc

SEQ ID NO: 1403461 - RNA, 19 nt, Artificial Sequence
  Description of Artificial Sequence: Synthetic oligonucleotide
ggaaugcaggaugguccaa

SEQ ID NO: 1403462 - RNA, 19 nt, Artificial Sequence
  Description of Artificial Sequence: Synthetic oligonucleotide
gugccucaacacugaggau

SEQ ID NO: 1403463 - RNA, 19 nt, Artificial Sequence
  Description of Artificial Sequence: Synthetic oligonucleotide
cuuuggcggucagaacaau

SEQ ID NO: 1403464 - RNA, 19 nt, Artificial Sequence
  Description of Artificial Sequence: Synthetic oligonucleotide
cagaucccuuaacgaggcu

SEQ ID NO: 1403465 - RNA, 19 nt, Artificial Sequence
  Description of Artificial Sequence: Synthetic oligonucleotide
gcguaucggccgccacaac

SEQ ID NO: 1403466 - RNA, 19 nt, Artificial Sequence
  Description of Artificial Sequence: Synthetic oligonucleotide
cccauugucauggucucuu

SEQ ID NO: 1403467 - RNA, 19 nt, Artificial Sequence
  Description of Artificial Sequence: Synthetic oligonucleotide
ccuuuucgaucagcccaau

SEQ ID NO: 1403468 - RNA, 19 nt, Artificial Sequence
  Description of Artificial Sequence: Synthetic oligonucleotide
aaucaacaagcucauaucc

SEQ ID NO: 1403469 - RNA, 19 nt, Artificial Sequence
  Description of Artificial Sequence: Synthetic oligonucleotide
ucaucauaugcuaagauga

SEQ ID NO: 1403470 - RNA, 19 nt, Artificial Sequence
  Description of Artificial Sequence: Synthetic oligonucleotide
aaucucauggguuacagca

SEQ ID NO: 1403471 - RNA, 19 nt, Artificial Sequence
  Description of Artificial Sequence: Synthetic oligonucleotide
uucgacacaaagaugaucc

SEQ ID NO: 1403472 - RNA, 19 nt, Artificial Sequence
  Description of Artificial Sequence: Synthetic oligonucleotide
aguaaguugagccuccacc

SEQ ID NO: 1403473 - RNA, 19 nt, Artificial Sequence
  Description of Artificial Sequence: Synthetic oligonucleotide
uguaauagaaugccaagag

SEQ ID NO: 1403474 - RNA, 19 nt, Artificial Sequence
  Description of Artificial Sequence: Synthetic oligonucleotide
agcaaugacucuuuuauac

SEQ ID NO: 1403475 - RNA, 19 nt, Artificial Sequence
  Description of Artificial Sequence: Synthetic oligonucleotide
aggaguuaaguucugauuc

SEQ ID NO: 1403476 - RNA, 19 nt, Artificial Sequence
  Description of Artificial Sequence: Synthetic oligonucleotide
gauaacaaacuccggaucc

SEQ ID NO: 1403477 - RNA, 19 nt, Artificial Sequence
  Description of Artificial Sequence: Synthetic oligonucleotide
aaucggauggccuuccggg

SEQ ID NO: 1403478 - RNA, 19 nt, Artificial Sequence
  Description of Artificial Sequence: Synthetic oligonucleotide
aauuguggggaaccuuucc

SEQ ID NO: 1403479 - RNA, 19 nt, Artificial Sequence
  Description of Artificial Sequence: Synthetic oligonucleotide
aucgacagcugacagacgc

SEQ ID NO: 1403480 - RNA, 19 nt, Artificial Sequence
  Description of Artificial Sequence: Synthetic oligonucleotide
agggacacaaacuugugac

SEQ ID NO: 1403481 - RNA, 19 nt, Artificial Sequence
  Description of Artificial Sequence: Synthetic oligonucleotide
aagaacucuggcgagaggg

SEQ ID NO: 1403482 - RNA, 19 nt, Artificial Sequence
  Description of Artificial Sequence: Synthetic oligonucleotide
acaagaaggccucauuuac

SEQ ID NO: 1403483 - RNA, 19 nt, Artificial Sequence
  Description of Artificial Sequence: Synthetic oligonucleotide
ugaaucugaacguggaaag

SEQ ID NO: 1403484 - RNA, 19 nt, Artificial Sequence
  Description of Artificial Sequence: Synthetic oligonucleotide
ucucucuaagcucagacac

SEQ ID NO: 1403485 - RNA, 19 nt, Artificial Sequence
  Description of Artificial Sequence: Synthetic oligonucleotide
uuaaguugaaucugaacgu

SEQ ID NO: 1403486 - RNA, 19 nt, Artificial Sequence
  Description of Artificial Sequence: Synthetic oligonucleotide
ucuuuuaaguugaaucuga

SEQ ID NO: 1403487 - RNA, 19 nt, Artificial Sequence
  Description of Artificial Sequence: Synthetic oligonucleotide
guucaauccauuaagauga

SEQ ID NO: 1403488 - RNA, 19 nt, Artificial Sequence
  Description of Artificial Sequence: Synthetic oligonucleotide
uucaucuacaauucugaag

SEQ ID NO: 1403489 - RNA, 19 nt, Artificial Sequence
  Description of Artificial Sequence: Synthetic oligonucleotide
aauccauuaagaugacucu

SEQ ID NO: 1403490 - RNA, 19 nt, Artificial Sequence
  Description of Artificial Sequence: Synthetic oligonucleotide
uucaagacuugggagaugg

SEQ ID NO: 1403491 - RNA, 19 nt, Artificial Sequence
  Description of Artificial Sequence: Synthetic oligonucleotide
gauagcuucagggugcugg

SEQ ID NO: 1403492 - RNA, 19 nt, Artificial Sequence
  Description of Artificial Sequence: Synthetic oligonucleotide
acaguugaccaauuguggg

SEQ ID NO: 1403493 - RNA, 19 nt, Artificial Sequence
  Description of Artificial Sequence: Synthetic oligonucleotide
ugagaggauuccaacaagc

SEQ ID NO: 1403494 - RNA, 19 nt, Artificial Sequence
  Description of Artificial Sequence: Synthetic oligonucleotide
ucaacaagcucauauccca

SEQ ID NO: 1403495 - RNA, 19 nt, Artificial Sequence
  Description of Artificial Sequence: Synthetic oligonucleotide
agaugauccaaucuguaca

SEQ ID NO: 1403496 - RNA, 19 nt, Artificial Sequence
  Description of Artificial Sequence: Synthetic oligonucleotide
cagugguucaaaaucaggc

SEQ ID NO: 1403497 - RNA, 19 nt, Artificial Sequence
  Description of Artificial Sequence: Synthetic oligonucleotide
aagcucagacacuaaugac

SEQ ID NO: 1403498 - RNA, 19 nt, Artificial Sequence
  Description of Artificial Sequence: Synthetic oligonucleotide
gauuccaacaagcuuucgc

SEQ ID NO: 1403499 - RNA, 19 nt, Artificial Sequence
  Description of Artificial Sequence: Synthetic oligonucleotide
aguacgugugauaacaaac

SEQ ID NO: 1403500 - RNA, 19 nt, Artificial Sequence
  Description of Artificial Sequence: Synthetic oligonucleotide
uuuaagcaaacugggacag

SEQ ID NO: 1403501 - RNA, 19 nt, Artificial Sequence
  Description of Artificial Sequence: Synthetic oligonucleotide
aaaucaggcagaguaacca

SEQ ID NO: 1403502 - RNA, 19 nt, Artificial Sequence
  Description of Artificial Sequence: Synthetic oligonucleotide
gaaaguacgugugauaaca

SEQ ID NO: 1403503 - RNA, 19 nt, Artificial Sequence
  Description of Artificial Sequence: Synthetic oligonucleotide
caacaguugaccaauugug

SEQ ID NO: 1403504 - RNA, 19 nt, Artificial Sequence
  Description of Artificial Sequence: Synthetic oligonucleotide
acaucaugcgcucgggagc

SEQ ID NO: 1403505 - RNA, 19 nt, Artificial Sequence
  Description of Artificial Sequence: Synthetic oligonucleotide
aaagucuggucaagaaagc

SEQ ID NO: 1403506 - RNA, 19 nt, Artificial Sequence
  Description of Artificial Sequence: Synthetic oligonucleotide
aacugggacaguaaucaac

SEQ ID NO: 1403507 - RNA, 19 nt, Artificial Sequence
  Description of Artificial Sequence: Synthetic oligonucleotide
ugugggcuguaauagaaug

SEQ ID NO: 1403508 - RNA, 19 nt, Artificial Sequence
  Description of Artificial Sequence: Synthetic oligonucleotide
guaauagaaugccaagagc

SEQ ID NO: 1403509 - RNA, 19 nt, Artificial Sequence
  Description of Artificial Sequence: Synthetic oligonucleotide
uaaccagagggacacaaac

SEQ ID NO: 1403510 - RNA, 19 nt, Artificial Sequence
  Description of Artificial Sequence: Synthetic oligonucleotide
cugacagacgcucaccucg

SEQ ID NO: 1403511 - RNA, 19 nt, Artificial Sequence
  Description of Artificial Sequence: Synthetic oligonucleotide
uccaaucuguacaaagucu

SEQ ID NO: 1403512 - RNA, 19 nt, Artificial Sequence
  Description of Artificial Sequence: Synthetic oligonucleotide
auaugcuaagaugagagga

SEQ ID NO: 1403513 - RNA, 19 nt, Artificial Sequence
  Description of Artificial Sequence: Synthetic oligonucleotide
uaaucaacaagcucauauc

SEQ ID NO: 1403514 - RNA, 19 nt, Artificial Sequence
  Description of Artificial Sequence: Synthetic oligonucleotide
ugggagauggcgaaaccag

SEQ ID NO: 1403515 - RNA, 19 nt, Artificial Sequence
  Description of Artificial Sequence: Synthetic oligonucleotide
gacaucaugcgcucgggag

SEQ ID NO: 1403516 - RNA, 19 nt, Artificial Sequence
  Description of Artificial Sequence: Synthetic oligonucleotide
acgugugauaacaaacucc

SEQ ID NO: 1403517 - RNA, 19 nt, Artificial Sequence
  Description of Artificial Sequence: Synthetic oligonucleotide
aucaacaagcucauauccc

SEQ ID NO: 1403518 - RNA, 19 nt, Artificial Sequence
  Description of Artificial Sequence: Synthetic oligonucleotide
aagaaggcgccugaccagc

SEQ ID NO: 1403519 - RNA, 19 nt, Artificial Sequence
  Description of Artificial Sequence: Synthetic oligonucleotide
aaguaaguugagccuccac

SEQ ID NO: 1403520 - RNA, 19 nt, Artificial Sequence
  Description of Artificial Sequence: Synthetic oligonucleotide
uacaauucugaagauggca

SEQ ID NO: 1403521 - RNA, 19 nt, Artificial Sequence
  Description of Artificial Sequence: Synthetic oligonucleotide
uaugcuaagaugagaggau

SEQ ID NO: 1403522 - RNA, 19 nt, Artificial Sequence
  Description of Artificial Sequence: Synthetic oligonucleotide
agaggacguaggcagaauc

SEQ ID NO: 1403523 - RNA, 19 nt, Artificial Sequence
  Description of Artificial Sequence: Synthetic oligonucleotide
aguuaaguucugauucucc

SEQ ID NO: 1403524 - RNA, 19 nt, Artificial Sequence
  Description of Artificial Sequence: Synthetic oligonucleotide
aaguugaaucugaacgugg

SEQ ID NO: 1403525 - RNA, 19 nt, Artificial Sequence
  Description of Artificial Sequence: Synthetic oligonucleotide
cauaugcuaagaugagagg

SEQ ID NO: 1403526 - RNA, 19 nt, Artificial Sequence
  Description of Artificial Sequence: Synthetic oligonucleotide
caggauugcguuagaaucc

SEQ ID NO: 1403527 - RNA, 19 nt, Artificial Sequence
  Description of Artificial Sequence: Synthetic oligonucleotide
aaacuccggauccaggagu

SEQ ID NO: 1403528 - RNA, 19 nt, Artificial Sequence
  Description of Artificial Sequence: Synthetic oligonucleotide
caaaccugaacauuucauc

SEQ ID NO: 1403529 - RNA, 19 nt, Artificial Sequence
  Description of Artificial Sequence: Synthetic oligonucleotide
cuagaccugagcuccaagc

SEQ ID NO: 1403530 - RNA, 19 nt, Artificial Sequence
  Description of Artificial Sequence: Synthetic oligonucleotide
ucgccaguuuucuugaggc

SEQ ID NO: 1403531 - RNA, 19 nt, Artificial Sequence
  Description of Artificial Sequence: Synthetic oligonucleotide
uggaaaguacgugugauaa

SEQ ID NO: 1403532 - RNA, 19 nt, Artificial Sequence
  Description of Artificial Sequence: Synthetic oligonucleotide
caguugaccaauugugggg

SEQ ID NO: 1403533 - RNA, 19 nt, Artificial Sequence
  Description of Artificial Sequence: Synthetic oligonucleotide
agacugacuucuuuuaagu

SEQ ID NO: 1403534 - RNA, 19 nt, Artificial Sequence
  Description of Artificial Sequence: Synthetic oligonucleotide
ugguucaaaaucaggcaga

SEQ ID NO: 1403535 - RNA, 19 nt, Artificial Sequence
  Description of Artificial Sequence: Synthetic oligonucleotide
aacaagcucauaucccaga

SEQ ID NO: 1403536 - RNA, 19 nt, Artificial Sequence
  Description of Artificial Sequence: Synthetic oligonucleotide
ugggauagcuucagggugc

SEQ ID NO: 1403537 - RNA, 19 nt, Artificial Sequence
  Description of Artificial Sequence: Synthetic oligonucleotide
aagggaaguaggucuugag

SEQ ID NO: 1403538 - RNA, 19 nt, Artificial Sequence
  Description of Artificial Sequence: Synthetic oligonucleotide
guuaaguucugauucucca

SEQ ID NO: 1403539 - RNA, 19 nt, Artificial Sequence
  Description of Artificial Sequence: Synthetic oligonucleotide
uggagcaccguaagggaag

SEQ ID NO: 1403540 - RNA, 19 nt, Artificial Sequence
  Description of Artificial Sequence: Synthetic oligonucleotide
aggcgauuucucuugcugg

SEQ ID NO: 1403541 - RNA, 19 nt, Artificial Sequence
  Description of Artificial Sequence: Synthetic oligonucleotide
guaaguugagccuccacca

SEQ ID NO: 1403542 - RNA, 19 nt, Artificial Sequence
  Description of Artificial Sequence: Synthetic oligonucleotide
aaguacgugugauaacaaa

SEQ ID NO: 1403543 - RNA, 19 nt, Artificial Sequence
  Description of Artificial Sequence: Synthetic oligonucleotide
cgugugauaacaaacuccg

SEQ ID NO: 1403544 - RNA, 19 nt, Artificial Sequence
  Description of Artificial Sequence: Synthetic oligonucleotide
agccauccggcuuugagug

SEQ ID NO: 1403545 - RNA, 19 nt, Artificial Sequence
  Description of Artificial Sequence: Synthetic oligonucleotide
uacgugugauaacaaacuc

SEQ ID NO: 1403546 - RNA, 19 nt, Artificial Sequence
  Description of Artificial Sequence: Synthetic oligonucleotide
gcuucgaagaacucuggcg

SEQ ID NO: 1403547 - RNA, 19 nt, Artificial Sequence
  Description of Artificial Sequence: Synthetic oligonucleotide
aaucugaacguggaaagua

SEQ ID NO: 1403548 - RNA, 19 nt, Artificial Sequence
  Description of Artificial Sequence: Synthetic oligonucleotide
uguacaaagucuggucaag

SEQ ID NO: 1403549 - RNA, 19 nt, Artificial Sequence
  Description of Artificial Sequence: Synthetic oligonucleotide
uggguuacagcauccgugu

SEQ ID NO: 1403550 - RNA, 19 nt, Artificial Sequence
  Description of Artificial Sequence: Synthetic oligonucleotide
ugaacguggaaaguacgug

SEQ ID NO: 1403551 - RNA, 19 nt, Artificial Sequence
  Description of Artificial Sequence: Synthetic oligonucleotide
augagaggauuccaacaag

SEQ ID NO: 1403552 - RNA, 19 nt, Artificial Sequence
  Description of Artificial Sequence: Synthetic oligonucleotide
ucucgaagggaguuugcug

SEQ ID NO: 1403553 - RNA, 19 nt, Artificial Sequence
  Description of Artificial Sequence: Synthetic oligonucleotide
uucgaagaacucuggcgag

SEQ ID NO: 1403554 - RNA, 19 nt, Artificial Sequence
  Description of Artificial Sequence: Synthetic oligonucleotide
aaaccagaggcugaccaca

SEQ ID NO: 1403555 - RNA, 19 nt, Artificial Sequence
  Description of Artificial Sequence: Synthetic oligonucleotide
ggauccaggaguuaaguuc

SEQ ID NO: 1403556 - RNA, 19 nt, Artificial Sequence
  Description of Artificial Sequence: Synthetic oligonucleotide
auaccugaagagcagcuau

SEQ ID NO: 1403557 - RNA, 19 nt, Artificial Sequence
  Description of Artificial Sequence: Synthetic oligonucleotide
ugaccaauuguggggaacc

SEQ ID NO: 1403558 - RNA, 19 nt, Artificial Sequence
  Description of Artificial Sequence: Synthetic oligonucleotide
gaggcuucgacacaaagau

SEQ ID NO: 1403559 - RNA, 19 nt, Artificial Sequence
  Description of Artificial Sequence: Synthetic oligonucleotide
ugacagacgcucaccucgg

SEQ ID NO: 1403560 - RNA, 19 nt, Artificial Sequence
  Description of Artificial Sequence: Synthetic oligonucleotide
aaccugaacauuucaucua

SEQ ID NO: 1403561 - RNA, 19 nt, Artificial Sequence
  Description of Artificial Sequence: Synthetic oligonucleotide
acucuuuuauacagcacuc

SEQ ID NO: 1403562 - RNA, 19 nt, Artificial Sequence
  Description of Artificial Sequence: Synthetic oligonucleotide
gugggauagcuucagggug

SEQ ID NO: 1403563 - RNA, 19 nt, Artificial Sequence
  Description of Artificial Sequence: Synthetic oligonucleotide
cuacaauucugaagauggc

SEQ ID NO: 1403564 - RNA, 19 nt, Artificial Sequence
  Description of Artificial Sequence: Synthetic oligonucleotide
aacguggaaaguacgugug

SEQ ID NO: 1403565 - RNA, 19 nt, Artificial Sequence
  Description of Artificial Sequence: Synthetic oligonucleotide
ugcuuucugcacaucgaca

SEQ ID NO: 1403566 - RNA, 19 nt, Artificial Sequence
  Description of Artificial Sequence: Synthetic oligonucleotide
cagacgcucaccucggagc

SEQ ID NO: 1403567 - RNA, 19 nt, Artificial Sequence
  Description of Artificial Sequence: Synthetic oligonucleotide
ugcaccaggugaauaccug

SEQ ID NO: 1403568 - RNA, 19 nt, Artificial Sequence
  Description of Artificial Sequence: Synthetic oligonucleotide
ucgaagggaguuugcuggg

SEQ ID NO: 1403569 - RNA, 19 nt, Artificial Sequence
  Description of Artificial Sequence: Synthetic oligonucleotide
acaagcuuucgccaacagu

SEQ ID NO: 1403570 - RNA, 19 nt, Artificial Sequence
  Description of Artificial Sequence: Synthetic oligonucleotide
uccaggauugcguuagaau

SEQ ID NO: 1403571 - RNA, 19 nt, Artificial Sequence
  Description of Artificial Sequence: Synthetic oligonucleotide
gaguugggaaaugugcagc

SEQ ID NO: 1403572 - RNA, 19 nt, Artificial Sequence
  Description of Artificial Sequence: Synthetic oligonucleotide
uuucgccaacaguugacca

SEQ ID NO: 1403573 - RNA, 19 nt, Artificial Sequence
  Description of Artificial Sequence: Synthetic oligonucleotide
ccaggauugcguuagaauc

SEQ ID NO: 1403574 - RNA, 19 nt, Artificial Sequence
  Description of Artificial Sequence: Synthetic oligonucleotide
aaccuuuccaggauugcgu

SEQ ID NO: 1403575 - RNA, 19 nt, Artificial Sequence
  Description of Artificial Sequence: Synthetic oligonucleotide
uucacguccaugguaagua

SEQ ID NO: 1403576 - RNA, 19 nt, Artificial Sequence
  Description of Artificial Sequence: Synthetic oligonucleotide
gcuguaauagaaugccaag

SEQ ID NO: 1403577 - RNA, 19 nt, Artificial Sequence
  Description of Artificial Sequence: Synthetic oligonucleotide
cauaugggugacagcuucc

SEQ ID NO: 1403578 - RNA, 19 nt, Artificial Sequence
  Description of Artificial Sequence: Synthetic oligonucleotide
cagcuaucacuucuggggc

SEQ ID NO: 1403579 - RNA, 19 nt, Artificial Sequence
  Description of Artificial Sequence: Synthetic oligonucleotide
ugcacaucgacagcugaca

SEQ ID NO: 1403580 - RNA, 19 nt, Artificial Sequence
  Description of Artificial Sequence: Synthetic oligonucleotide
ugacucuuuuauacagcac

SEQ ID NO: 1403581 - RNA, 19 nt, Artificial Sequence
  Description of Artificial Sequence: Synthetic oligonucleotide
aguugaccaauugugggga

SEQ ID NO: 1403582 - RNA, 19 nt, Artificial Sequence
  Description of Artificial Sequence: Synthetic oligonucleotide
uucgccaacaguugaccaa

SEQ ID NO: 1403583 - RNA, 19 nt, Artificial Sequence
  Description of Artificial Sequence: Synthetic oligonucleotide
auccugugggcuguaauag

SEQ ID NO: 1403584 - RNA, 19 nt, Artificial Sequence
  Description of Artificial Sequence: Synthetic oligonucleotide
uccaccagugguucaaaau

SEQ ID NO: 1403585 - RNA, 19 nt, Artificial Sequence
  Description of Artificial Sequence: Synthetic oligonucleotide
caaucggauggccuuccgg

SEQ ID NO: 1403586 - RNA, 19 nt, Artificial Sequence
  Description of Artificial Sequence: Synthetic oligonucleotide
cuuucgccaacaguugacc

SEQ ID NO: 1403587 - RNA, 19 nt, Artificial Sequence
  Description of Artificial Sequence: Synthetic oligonucleotide
uccggauccaggaguuaag

SEQ ID NO: 1403588 - RNA, 19 nt, Artificial Sequence
  Description of Artificial Sequence: Synthetic oligonucleotide
auggguuacagcauccgug

SEQ ID NO: 1403589 - RNA, 19 nt, Artificial Sequence
  Description of Artificial Sequence: Synthetic oligonucleotide
aaagaugauccaaucugua

SEQ ID NO: 1403590 - RNA, 19 nt, Artificial Sequence
  Description of Artificial Sequence: Synthetic oligonucleotide
gagggacacaaacuuguga

SEQ ID NO: 1403591 - RNA, 19 nt, Artificial Sequence
  Description of Artificial Sequence: Synthetic oligonucleotide
guaaguaaguugagccucc

SEQ ID NO: 1403592 - RNA, 19 nt, Artificial Sequence
  Description of Artificial Sequence: Synthetic oligonucleotide
aaacugggacaguaaucaa

SEQ ID NO: 1403593 - RNA, 19 nt, Artificial Sequence
  Description of Artificial Sequence: Synthetic oligonucleotide
auggcgaaaccagaggcug

SEQ ID NO: 1403594 - RNA, 19 nt, Artificial Sequence
  Description of Artificial Sequence: Synthetic oligonucleotide
gugaauaccugaagagcag

SEQ ID NO: 1403595 - RNA, 19 nt, Artificial Sequence
  Description of Artificial Sequence: Synthetic oligonucleotide
aguugaaucugaacgugga

SEQ ID NO: 1403596 - RNA, 19 nt, Artificial Sequence
  Description of Artificial Sequence: Synthetic oligonucleotide
uucaauccauuaagaugac

SEQ ID NO: 1403597 - RNA, 19 nt, Artificial Sequence
  Description of Artificial Sequence: Synthetic oligonucleotide
auaacaaacuccggaucca

SEQ ID NO: 1403598 - RNA, 19 nt, Artificial Sequence
  Description of Artificial Sequence: Synthetic oligonucleotide
ucccaggcgauuucucuug

SEQ ID NO: 1403599 - RNA, 19 nt, Artificial Sequence
  Description of Artificial Sequence: Synthetic oligonucleotide
cacguccaugguaaguaag

SEQ ID NO: 1403600 - RNA, 19 nt, Artificial Sequence
  Description of Artificial Sequence: Synthetic oligonucleotide
cugcuuucugcacaucgac

SEQ ID NO: 1403601 - RNA, 19 nt, Artificial Sequence
  Description of Artificial Sequence: Synthetic oligonucleotide
ucgacacaaagaugaucca

SEQ ID NO: 1403602 - RNA, 19 nt, Artificial Sequence
  Description of Artificial Sequence: Synthetic oligonucleotide
aguaaccagagggacacaa

SEQ ID NO: 1403603 - RNA, 19 nt, Artificial Sequence
  Description of Artificial Sequence: Synthetic oligonucleotide
gauccaggaguuaaguucu

SEQ ID NO: 1403604 - RNA, 19 nt, Artificial Sequence
  Description of Artificial Sequence: Synthetic oligonucleotide
agauggcuaagcaaugccu

SEQ ID NO: 1403605 - RNA, 19 nt, Artificial Sequence
  Description of Artificial Sequence: Synthetic oligonucleotide
cucaccucggagcagcauc

SEQ ID NO: 1403606 - RNA, 19 nt, Artificial Sequence
  Description of Artificial Sequence: Synthetic oligonucleotide
caccagugguucaaaauca

SEQ ID NO: 1403607 - RNA, 19 nt, Artificial Sequence
  Description of Artificial Sequence: Synthetic oligonucleotide
gcuaagaugagaggauucc

SEQ ID NO: 1403608 - RNA, 19 nt, Artificial Sequence
  Description of Artificial Sequence: Synthetic oligonucleotide
uaugggugacagcuucccu

SEQ ID NO: 1403609 - RNA, 19 nt, Artificial Sequence
  Description of Artificial Sequence: Synthetic oligonucleotide
aaaguacgugugauaacaa

SEQ ID NO: 1403610 - RNA, 19 nt, Artificial Sequence
  Description of Artificial Sequence: Synthetic oligonucleotide
caugcaccaggugaauacc

SEQ ID NO: 1403611 - RNA, 19 nt, Artificial Sequence
  Description of Artificial Sequence: Synthetic oligonucleotide
ucaagacuugggagauggc

SEQ ID NO: 1403612 - RNA, 19 nt, Artificial Sequence
  Description of Artificial Sequence: Synthetic oligonucleotide
caucaugcgcucgggagcc

SEQ ID NO: 1403613 - RNA, 19 nt, Artificial Sequence
  Description of Artificial Sequence: Synthetic oligonucleotide
ugaccagcugcccgcauau

SEQ ID NO: 1403614 - RNA, 19 nt, Artificial Sequence
  Description of Artificial Sequence: Synthetic oligonucleotide
agaucaacccauccuccaa

SEQ ID NO: 1403615 - RNA, 19 nt, Artificial Sequence
  Description of Artificial Sequence: Synthetic oligonucleotide
aggauuccaacaagcuuuc

SEQ ID NO: 1403616 - RNA, 19 nt, Artificial Sequence
  Description of Artificial Sequence: Synthetic oligonucleotide
ucaauccauuaagaugacu

SEQ ID NO: 1403617 - RNA, 19 nt, Artificial Sequence
  Description of Artificial Sequence: Synthetic oligonucleotide
acgcucaccucggagcagc

SEQ ID NO: 1403618 - RNA, 19 nt, Artificial Sequence
  Description of Artificial Sequence: Synthetic oligonucleotide
cuaagaagaaggcgccuga

SEQ ID NO: 1403619 - RNA, 19 nt, Artificial Sequence
  Description of Artificial Sequence: Synthetic oligonucleotide
cugcacaucgacagcugac

SEQ ID NO: 1403620 - RNA, 19 nt, Artificial Sequence
  Description of Artificial Sequence: Synthetic oligonucleotide
augcgcucgggagccaucc

SEQ ID NO: 1403621 - RNA, 19 nt, Artificial Sequence
  Description of Artificial Sequence: Synthetic oligonucleotide
gaaguaggucuugagggaa

SEQ ID NO: 1403622 - RNA, 19 nt, Artificial Sequence
  Description of Artificial Sequence: Synthetic oligonucleotide
cucucucuaagcucagaca

SEQ ID NO: 1403623 - RNA, 19 nt, Artificial Sequence
  Description of Artificial Sequence: Synthetic oligonucleotide
cuucgacacaaagaugauc

SEQ ID NO: 1403624 - RNA, 19 nt, Artificial Sequence
  Description of Artificial Sequence: Synthetic oligonucleotide
caauuguggggaaccuuuc

SEQ ID NO: 1403625 - RNA, 19 nt, Artificial Sequence
  Description of Artificial Sequence: Synthetic oligonucleotide
uggggaaccuuuccaggau

SEQ ID NO: 1403626 - RNA, 19 nt, Artificial Sequence
  Description of Artificial Sequence: Synthetic oligonucleotide
uugaccaauuguggggaac

SEQ ID NO: 1403627 - RNA, 19 nt, Artificial Sequence
  Description of Artificial Sequence: Synthetic oligonucleotide
ucgaagaacucuggcgaga

SEQ ID NO: 1403628 - RNA, 19 nt, Artificial Sequence
  Description of Artificial Sequence: Synthetic oligonucleotide
ccagugguucaaaaucagg

SEQ ID NO: 1403629 - RNA, 19 nt, Artificial Sequence
  Description of Artificial Sequence: Synthetic oligonucleotide
uaucacuucuggggcuccg

SEQ ID NO: 1403630 - RNA, 19 nt, Artificial Sequence
  Description of Artificial Sequence: Synthetic oligonucleotide
acguggaaaguacguguga

SEQ ID NO: 1403631 - RNA, 19 nt, Artificial Sequence
  Description of Artificial Sequence: Synthetic oligonucleotide
agguucacguccaugguaa

SEQ ID NO: 1403632 - RNA, 19 nt, Artificial Sequence
  Description of Artificial Sequence: Synthetic oligonucleotide
guggggaaccuuuccagga

SEQ ID NO: 1403633 - RNA, 19 nt, Artificial Sequence
  Description of Artificial Sequence: Synthetic oligonucleotide
guugaaucugaacguggaa

SEQ ID NO: 1403634 - RNA, 19 nt, Artificial Sequence
  Description of Artificial Sequence: Synthetic oligonucleotide
ggcuccgucagucuccagc

SEQ ID NO: 1403635 - RNA, 19 nt, Artificial Sequence
  Description of Artificial Sequence: Synthetic oligonucleotide
ucacguccaugguaaguaa

SEQ ID NO: 1403636 - RNA, 19 nt, Artificial Sequence
  Description of Artificial Sequence: Synthetic oligonucleotide
gugugauaacaaacuccgg

SEQ ID NO: 1403637 - RNA, 19 nt, Artificial Sequence
  Description of Artificial Sequence: Synthetic oligonucleotide
guacgugugauaacaaacu

SEQ ID NO: 1403638 - RNA, 19 nt, Artificial Sequence
  Description of Artificial Sequence: Synthetic oligonucleotide
uggcgaaaccagaggcuga

SEQ ID NO: 1403639 - RNA, 19 nt, Artificial Sequence
  Description of Artificial Sequence: Synthetic oligonucleotide
cagagggacacaaacuugu

SEQ ID NO: 1403640 - RNA, 19 nt, Artificial Sequence
  Description of Artificial Sequence: Synthetic oligonucleotide
cuguacaaagucuggucaa

SEQ ID NO: 1403641 - RNA, 19 nt, Artificial Sequence
  Description of Artificial Sequence: Synthetic oligonucleotide
ucgccaacaguugaccaau

SEQ ID NO: 1403642 - RNA, 19 nt, Artificial Sequence
  Description of Artificial Sequence: Synthetic oligonucleotide
ggaaaguacgugugauaac

SEQ ID NO: 1403643 - RNA, 19 nt, Artificial Sequence
  Description of Artificial Sequence: Synthetic oligonucleotide
uuuccaggauugcguuaga

SEQ ID NO: 1403644 - RNA, 19 nt, Artificial Sequence
  Description of Artificial Sequence: Synthetic oligonucleotide
gaaggcgccugaccagcug

SEQ ID NO: 1403645 - RNA, 19 nt, Artificial Sequence
  Description of Artificial Sequence: Synthetic oligonucleotide
accuuuccaggauugcguu

SEQ ID NO: 1403646 - RNA, 19 nt, Artificial Sequence
  Description of Artificial Sequence: Synthetic oligonucleotide
ccagaucaacccauccucc

SEQ ID NO: 1403647 - RNA, 19 nt, Artificial Sequence
  Description of Artificial Sequence: Synthetic oligonucleotide
cauuaagaugacucucucu

SEQ ID NO: 1403648 - RNA, 19 nt, Artificial Sequence
  Description of Artificial Sequence: Synthetic oligonucleotide
guacaaagucuggucaaga

SEQ ID NO: 1403649 - RNA, 19 nt, Artificial Sequence
  Description of Artificial Sequence: Synthetic oligonucleotide
cagaucaacccauccucca

SEQ ID NO: 1403650 - RNA, 19 nt, Artificial Sequence
  Description of Artificial Sequence: Synthetic oligonucleotide
cacaucgacagcugacaga

SEQ ID NO: 1403651 - RNA, 19 nt, Artificial Sequence
  Description of Artificial Sequence: Synthetic oligonucleotide
uucgacaagaaggccucau

SEQ ID NO: 1403652 - RNA, 19 nt, Artificial Sequence
  Description of Artificial Sequence: Synthetic oligonucleotide
gcaccguaagggaaguagg

SEQ ID NO: 1403653 - RNA, 19 nt, Artificial Sequence
  Description of Artificial Sequence: Synthetic oligonucleotide
aggacguaggcagaaucau

SEQ ID NO: 1403654 - RNA, 19 nt, Artificial Sequence
  Description of Artificial Sequence: Synthetic oligonucleotide
gagccauccggcuuugagu

SEQ ID NO: 1403655 - RNA, 19 nt, Artificial Sequence
  Description of Artificial Sequence: Synthetic oligonucleotide
ggcgagagggcuuccugag

SEQ ID NO: 1403656 - RNA, 19 nt, Artificial Sequence
  Description of Artificial Sequence: Synthetic oligonucleotide
cagcaacugcugcacggcc

SEQ ID NO: 1403657 - RNA, 19 nt, Artificial Sequence
  Description of Artificial Sequence: Synthetic oligonucleotide
ccaggugaauaccugaaga

SEQ ID NO: 1403658 - RNA, 19 nt, Artificial Sequence
  Description of Artificial Sequence: Synthetic oligonucleotide
aacuugugacagggacauc

SEQ ID NO: 1403659 - RNA, 19 nt, Artificial Sequence
  Description of Artificial Sequence: Synthetic oligonucleotide
gccaacaguugaccaauug

SEQ ID NO: 1403660 - RNA, 19 nt, Artificial Sequence
  Description of Artificial Sequence: Synthetic oligonucleotide
cugaacguggaaaguacgu

SEQ ID NO: 1403661 - RNA, 19 nt, Artificial Sequence
  Description of Artificial Sequence: Synthetic oligonucleotide
gcagaguaaccagagggac

SEQ ID NO: 1403662 - RNA, 19 nt, Artificial Sequence
  Description of Artificial Sequence: Synthetic oligonucleotide
ggucuugagggaaaacuuc

SEQ ID NO: 1403663 - RNA, 19 nt, Artificial Sequence
  Description of Artificial Sequence: Synthetic oligonucleotide
agagggacacaaacuugug

SEQ ID NO: 1403664 - RNA, 19 nt, Artificial Sequence
  Description of Artificial Sequence: Synthetic oligonucleotide
gauggcgaaaccagaggcu

SEQ ID NO: 1403665 - RNA, 19 nt, Artificial Sequence
  Description of Artificial Sequence: Synthetic oligonucleotide
ugauucuccagggguccgu

SEQ ID NO: 1403666 - RNA, 19 nt, Artificial Sequence
  Description of Artificial Sequence: Synthetic oligonucleotide
gaaucugaacguggaaagu

SEQ ID NO: 1403667 - RNA, 19 nt, Artificial Sequence
  Description of Artificial Sequence: Synthetic oligonucleotide
guggaaaguacgugugaua

SEQ ID NO: 1403668 - RNA, 19 nt, Artificial Sequence
  Description of Artificial Sequence: Synthetic oligonucleotide
gcuaagcaaugccuucagc

SEQ ID NO: 1403669 - RNA, 19 nt, Artificial Sequence
  Description of Artificial Sequence: Synthetic oligonucleotide
ggcgauuucucuugcugga

SEQ ID NO: 1403670 - RNA, 19 nt, Artificial Sequence
  Description of Artificial Sequence: Synthetic oligonucleotide
gcagauggcuaagcaaugc

SEQ ID NO: 1403671 - RNA, 19 nt, Artificial Sequence
  Description of Artificial Sequence: Synthetic oligonucleotide
ggaguuaaguucugauucu

SEQ ID NO: 1403672 - RNA, 19 nt, Artificial Sequence
  Description of Artificial Sequence: Synthetic oligonucleotide
uuucgacaagaaggccuca

SEQ ID NO: 1403673 - RNA, 19 nt, Artificial Sequence
  Description of Artificial Sequence: Synthetic oligonucleotide
agggguccgugguucuuug

SEQ ID NO: 1403674 - RNA, 19 nt, Artificial Sequence
  Description of Artificial Sequence: Synthetic oligonucleotide
gguccgugguucuuuguuc

SEQ ID NO: 1403675 - RNA, 19 nt, Artificial Sequence
  Description of Artificial Sequence: Synthetic oligonucleotide
augcaccaggugaauaccu

SEQ ID NO: 1403676 - RNA, 19 nt, Artificial Sequence
  Description of Artificial Sequence: Synthetic oligonucleotide
gaguuugcugggacccaug

SEQ ID NO: 1403677 - RNA, 19 nt, Artificial Sequence
  Description of Artificial Sequence: Synthetic oligonucleotide
ccauuaagaugacucucuc

SEQ ID NO: 1403678 - RNA, 19 nt, Artificial Sequence
  Description of Artificial Sequence: Synthetic oligonucleotide
aaggccucauuuacagcuu

SEQ ID NO: 1403679 - RNA, 19 nt, Artificial Sequence
  Description of Artificial Sequence: Synthetic oligonucleotide
uccggcuuugaguguucaa

SEQ ID NO: 1403680 - RNA, 19 nt, Artificial Sequence
  Description of Artificial Sequence: Synthetic oligonucleotide
uccgugguucuuuguucau

SEQ ID NO: 1403681 - RNA, 19 nt, Artificial Sequence
  Description of Artificial Sequence: Synthetic oligonucleotide
ugacagcuucccuggcaau

SEQ ID NO: 1403682 - RNA, 19 nt, Artificial Sequence
  Description of Artificial Sequence: Synthetic oligonucleotide
gcuagaccugagcuccaag

SEQ ID NO: 1403683 - RNA, 19 nt, Artificial Sequence
  Description of Artificial Sequence: Synthetic oligonucleotide
ggccucauuuacagcuucg

SEQ ID NO: 1403684 - RNA, 19 nt, Artificial Sequence
  Description of Artificial Sequence: Synthetic oligonucleotide
gguucacguccaugguaag

SEQ ID NO: 1403685 - RNA, 19 nt, Artificial Sequence
  Description of Artificial Sequence: Synthetic oligonucleotide
auacagcacuccaccucuc

SEQ ID NO: 1403686 - RNA, 19 nt, Artificial Sequence
  Description of Artificial Sequence: Synthetic oligonucleotide
acggccagaucaacccauc

SEQ ID NO: 1403687 - RNA, 19 nt, Artificial Sequence
  Description of Artificial Sequence: Synthetic oligonucleotide
accaauuguggggaaccuu

SEQ ID NO: 1403688 - RNA, 19 nt, Artificial Sequence
  Description of Artificial Sequence: Synthetic oligonucleotide
caggaguuaaguucugauu

SEQ ID NO: 1403689 - RNA, 19 nt, Artificial Sequence
  Description of Artificial Sequence: Synthetic oligonucleotide
caccguaagggaaguaggu

SEQ ID NO: 1403690 - RNA, 19 nt, Artificial Sequence
  Description of Artificial Sequence: Synthetic oligonucleotide
gcgcucgggagccauccgg

SEQ ID NO: 1403691 - RNA, 19 nt, Artificial Sequence
  Description of Artificial Sequence: Synthetic oligonucleotide
aggcuucgacacaaagaug

SEQ ID NO: 1403692 - RNA, 19 nt, Artificial Sequence
  Description of Artificial Sequence: Synthetic oligonucleotide
gggacccaugaguaggguc

SEQ ID NO: 1403693 - RNA, 19 nt, Artificial Sequence
  Description of Artificial Sequence: Synthetic oligonucleotide
uggcaaucggauggccuuc

SEQ ID NO: 1403694 - RNA, 19 nt, Artificial Sequence
  Description of Artificial Sequence: Synthetic oligonucleotide
guaaccagagggacacaaa

SEQ ID NO: 1403695 - RNA, 19 nt, Artificial Sequence
  Description of Artificial Sequence: Synthetic oligonucleotide
ggacccaugaguagggucu

SEQ ID NO: 1403696 - RNA, 19 nt, Artificial Sequence
  Description of Artificial Sequence: Synthetic oligonucleotide
cuccgucagucuccagcag

SEQ ID NO: 1403697 - RNA, 19 nt, Artificial Sequence
  Description of Artificial Sequence: Synthetic oligonucleotide
gcaaucggauggccuuccg

SEQ ID NO: 1403698 - RNA, 19 nt, Artificial Sequence
  Description of Artificial Sequence: Synthetic oligonucleotide
gcgagagggcuuccugagg

SEQ ID NO: 1403699 - RNA, 19 nt, Artificial Sequence
  Description of Artificial Sequence: Synthetic oligonucleotide
cauggguuacagcauccgu

SEQ ID NO: 1403700 - RNA, 19 nt, Artificial Sequence
  Description of Artificial Sequence: Synthetic oligonucleotide
ccgcauaugggugcucugg

SEQ ID NO: 1403701 - RNA, 19 nt, Artificial Sequence
  Description of Artificial Sequence: Synthetic oligonucleotide
gacuucuuuuaaguugaau

SEQ ID NO: 1403702 - RNA, 19 nt, Artificial Sequence
  Description of Artificial Sequence: Synthetic oligonucleotide
gacgcucaccucggagcag

SEQ ID NO: 1403703 - RNA, 19 nt, Artificial Sequence
  Description of Artificial Sequence: Synthetic oligonucleotide
gacagacgcucaccucgga

SEQ ID NO: 1403704 - RNA, 19 nt, Artificial Sequence
  Description of Artificial Sequence: Synthetic oligonucleotide
gcuuucgccaacaguugac

SEQ ID NO: 1403705 - RNA, 19 nt, Artificial Sequence
  Description of Artificial Sequence: Synthetic oligonucleotide
cgaaaccagaggcugacca

SEQ ID NO: 1403706 - RNA, 19 nt, Artificial Sequence
  Description of Artificial Sequence: Synthetic oligonucleotide
ugugggccauaugggugac

SEQ ID NO: 1403707 - RNA, 19 nt, Artificial Sequence
  Description of Artificial Sequence: Synthetic oligonucleotide
cauccggcuuugaguguuc

SEQ ID NO: 1403708 - RNA, 19 nt, Artificial Sequence
  Description of Artificial Sequence: Synthetic oligonucleotide
ucaugcgcucgggagccau

SEQ ID NO: 1403709 - RNA, 19 nt, Artificial Sequence
  Description of Artificial Sequence: Synthetic oligonucleotide
ccguaagggaaguaggucu

SEQ ID NO: 1403710 - RNA, 19 nt, Artificial Sequence
  Description of Artificial Sequence: Synthetic oligonucleotide
ugggacccaugaguagggu

SEQ ID NO: 1403711 - RNA, 19 nt, Artificial Sequence
  Description of Artificial Sequence: Synthetic oligonucleotide
gcuaucacuucuggggcuc

SEQ ID NO: 1403712 - RNA, 19 nt, Artificial Sequence
  Description of Artificial Sequence: Synthetic oligonucleotide
cgaagaacucuggcgagag

SEQ ID NO: 1403713 - RNA, 19 nt, Artificial Sequence
  Description of Artificial Sequence: Synthetic oligonucleotide
cuccggauccaggaguuaa

SEQ ID NO: 1403714 - RNA, 19 nt, Artificial Sequence
  Description of Artificial Sequence: Synthetic oligonucleotide
ggguuacagcauccgugug

SEQ ID NO: 1403715 - RNA, 19 nt, Artificial Sequence
  Description of Artificial Sequence: Synthetic oligonucleotide
cauccgugugggccauaug

SEQ ID NO: 1403716 - RNA, 19 nt, Artificial Sequence
  Description of Artificial Sequence: Synthetic oligonucleotide
ggacguaggcagaaucauc

SEQ ID NO: 1403717 - RNA, 19 nt, Artificial Sequence
  Description of Artificial Sequence: Synthetic oligonucleotide
cuggcaaucggauggccuu

SEQ ID NO: 1403718 - RNA, 19 nt, Artificial Sequence
  Description of Artificial Sequence: Synthetic oligonucleotide
cucuaagcucagacacuaa

SEQ ID NO: 1403719 - RNA, 19 nt, Artificial Sequence
  Description of Artificial Sequence: Synthetic oligonucleotide
gcugacagacgcucaccuc

SEQ ID NO: 1403720 - RNA, 19 nt, Artificial Sequence
  Description of Artificial Sequence: Synthetic oligonucleotide
guucacguccaugguaagu

SEQ ID NO: 1403721 - RNA, 19 nt, Artificial Sequence
  Description of Artificial Sequence: Synthetic oligonucleotide
cuugugacagggacaucau

SEQ ID NO: 1403722 - RNA, 19 nt, Artificial Sequence
  Description of Artificial Sequence: Synthetic oligonucleotide
ggcaaucggauggccuucc

SEQ ID NO: 1403723 - RNA, 19 nt, Artificial Sequence
  Description of Artificial Sequence: Synthetic oligonucleotide
gaccaauuguggggaaccu

SEQ ID NO: 1403724 - RNA, 19 nt, Artificial Sequence
  Description of Artificial Sequence: Synthetic oligonucleotide
agaaggcgccugaccagcu

SEQ ID NO: 1403725 - RNA, 19 nt, Artificial Sequence
  Description of Artificial Sequence: Synthetic oligonucleotide
cucucgaagggaguuugcu

SEQ ID NO: 1403726 - RNA, 19 nt, Artificial Sequence
  Description of Artificial Sequence: Synthetic oligonucleotide
ggcuuucaucauaugcuaa

SEQ ID NO: 1403727 - RNA, 19 nt, Artificial Sequence
  Description of Artificial Sequence: Synthetic oligonucleotide
ccaauuguggggaaccuuu

SEQ ID NO: 1403728 - RNA, 19 nt, Artificial Sequence
  Description of Artificial Sequence: Synthetic oligonucleotide
gaguaaccagagggacaca

SEQ ID NO: 1403729 - RNA, 19 nt, Artificial Sequence
  Description of Artificial Sequence: Synthetic oligonucleotide
caccucggagcagcaucag

SEQ ID NO: 1403730 - RNA, 19 nt, Artificial Sequence
  Description of Artificial Sequence: Synthetic oligonucleotide
cccaggcgauuucucuugc

SEQ ID NO: 1403731 - RNA, 19 nt, Artificial Sequence
  Description of Artificial Sequence: Synthetic oligonucleotide
caagcucauaucccagauu

SEQ ID NO: 1403732 - RNA, 19 nt, Artificial Sequence
  Description of Artificial Sequence: Synthetic oligonucleotide
cacggccagaucaacccau

SEQ ID NO: 1403733 - RNA, 19 nt, Artificial Sequence
  Description of Artificial Sequence: Synthetic oligonucleotide
cugcuagaccugagcucca

SEQ ID NO: 1403734 - RNA, 19 nt, Artificial Sequence
  Description of Artificial Sequence: Synthetic oligonucleotide
cuggugucucugugggaua

SEQ ID NO: 1403735 - RNA, 19 nt, Artificial Sequence
  Description of Artificial Sequence: Synthetic oligonucleotide
gcacggccagaucaaccca

SEQ ID NO: 1403736 - RNA, 19 nt, Artificial Sequence
  Description of Artificial Sequence: Synthetic oligonucleotide
cucugaggaguugggaaau

SEQ ID NO: 1403737 - RNA, 19 nt, Artificial Sequence
  Description of Artificial Sequence: Synthetic oligonucleotide
ccaggaguuaaguucugau

SEQ ID NO: 1403738 - RNA, 19 nt, Artificial Sequence
  Description of Artificial Sequence: Synthetic oligonucleotide
gagagggcuuccugagguu

SEQ ID NO: 1403739 - RNA, 19 nt, Artificial Sequence
  Description of Artificial Sequence: Synthetic oligonucleotide
gcucucgaagggaguuugc

SEQ ID NO: 1403740 - RNA, 19 nt, Artificial Sequence
  Description of Artificial Sequence: Synthetic oligonucleotide
cucccaggcgauuucucuu

SEQ ID NO: 1403741 - RNA, 19 nt, Artificial Sequence
  Description of Artificial Sequence: Synthetic oligonucleotide
gcgaaaccagaggcugacc

SEQ ID NO: 1403742 - RNA, 19 nt, Artificial Sequence
  Description of Artificial Sequence: Synthetic oligonucleotide
ggguccgugguucuuuguu

SEQ ID NO: 1403743 - RNA, 19 nt, Artificial Sequence
  Description of Artificial Sequence: Synthetic oligonucleotide
aucaugcgcucgggagcca

SEQ ID NO: 1403744 - RNA, 19 nt, Artificial Sequence
  Description of Artificial Sequence: Synthetic oligonucleotide
acuccggauccaggaguua

SEQ ID NO: 1403745 - RNA, 19 nt, Artificial Sequence
  Description of Artificial Sequence: Synthetic oligonucleotide
ggauagcuucagggugcug

SEQ ID NO: 1403746 - RNA, 19 nt, Artificial Sequence
  Description of Artificial Sequence: Synthetic oligonucleotide
ggagcaccguaagggaagu

SEQ ID NO: 1403747 - RNA, 19 nt, Artificial Sequence
  Description of Artificial Sequence: Synthetic oligonucleotide
ggaguuugcugggacccau

SEQ ID NO: 1403748 - RNA, 19 nt, Artificial Sequence
  Description of Artificial Sequence: Synthetic oligonucleotide
gcucucucgccaguuuucu

SEQ ID NO: 1403749 - RNA, 19 nt, Artificial Sequence
  Description of Artificial Sequence: Synthetic oligonucleotide
ccgugugggccauaugggu

SEQ ID NO: 1403750 - RNA, 19 nt, Artificial Sequence
  Description of Artificial Sequence: Synthetic oligonucleotide
ccggcuuugaguguucaau

SEQ ID NO: 1403751 - RNA, 19 nt, Artificial Sequence
  Description of Artificial Sequence: Synthetic oligonucleotide
cucucucgccaguuuucuu

SEQ ID NO: 1403752 - RNA, 19 nt, Artificial Sequence
  Description of Artificial Sequence: Synthetic oligonucleotide
cguggaaaguacgugugau

SEQ ID NO: 1403753 - RNA, 19 nt, Artificial Sequence
  Description of Artificial Sequence: Synthetic oligonucleotide
gcaccauauuagauauuuu

SEQ ID NO: 1403754 - RNA, 19 nt, Artificial Sequence
  Description of Artificial Sequence: Synthetic oligonucleotide
cagaggacguaggcagaau

SEQ ID NO: 1403755 - RNA, 19 nt, Artificial Sequence
  Description of Artificial Sequence: Synthetic oligonucleotide
ccggauccaggaguuaagu

SEQ ID NO: 1403756 - RNA, 19 nt, Artificial Sequence
  Description of Artificial Sequence: Synthetic oligonucleotide
gcauccgugugggccauau

SEQ ID NO: 1403757 - RNA, 19 nt, Artificial Sequence
  Description of Artificial Sequence: Synthetic oligonucleotide
gccauccggcuuugagugu

SEQ ID NO: 1403758 - RNA, 19 nt, Artificial Sequence
  Description of Artificial Sequence: Synthetic oligonucleotide
cgaagggaguuugcuggga

SEQ ID NO: 1403759 - RNA, 19 nt, Artificial Sequence
  Description of Artificial Sequence: Synthetic oligonucleotide
cugcccgcauaugggugcu

SEQ ID NO: 1403760 - RNA, 19 nt, Artificial Sequence
  Description of Artificial Sequence: Synthetic oligonucleotide
gggguccgugguucuuugu

SEQ ID NO: 1403761 - RNA, 19 nt, Artificial Sequence
  Description of Artificial Sequence: Synthetic oligonucleotide
ccauccggcuuugaguguu

SEQ ID NO: 1403762 - RNA, 19 nt, Artificial Sequence
  Description of Artificial Sequence: Synthetic oligonucleotide
gcucaccucggagcagcau

SEQ ID NO: 1403763 - RNA, 19 nt, Artificial Sequence
  Description of Artificial Sequence: Synthetic oligonucleotide
aauuuuguuuccuacaacc

SEQ ID NO: 1403764 - RNA, 19 nt, Artificial Sequence
  Description of Artificial Sequence: Synthetic oligonucleotide
aaccaaaucaaaucaaggc

SEQ ID NO: 1403765 - RNA, 19 nt, Artificial Sequence
  Description of Artificial Sequence: Synthetic oligonucleotide
aaaauaucaaucuauguca

SEQ ID NO: 1403766 - RNA, 19 nt, Artificial Sequence
  Description of Artificial Sequence: Synthetic oligonucleotide
aauacuucgaagccuaggc

SEQ ID NO: 1403767 - RNA, 19 nt, Artificial Sequence
  Description of Artificial Sequence: Synthetic oligonucleotide
aaacauaacagauaguugu

SEQ ID NO: 1403768 - RNA, 19 nt, Artificial Sequence
  Description of Artificial Sequence: Synthetic oligonucleotide
acauuaagagccuagaauc

SEQ ID NO: 1403769 - RNA, 19 nt, Artificial Sequence
  Description of Artificial Sequence: Synthetic oligonucleotide
aaaccuaugugauaaagug

SEQ ID NO: 1403770 - RNA, 19 nt, Artificial Sequence
  Description of Artificial Sequence: Synthetic oligonucleotide
aaacggaacauuuauagga

SEQ ID NO: 1403771 - RNA, 19 nt, Artificial Sequence
  Description of Artificial Sequence: Synthetic oligonucleotide
aacugagucauauaaaacu

SEQ ID NO: 1403772 - RNA, 19 nt, Artificial Sequence
  Description of Artificial Sequence: Synthetic oligonucleotide
auaaacggaacauuuauag

SEQ ID NO: 1403773 - RNA, 19 nt, Artificial Sequence
  Description of Artificial Sequence: Synthetic oligonucleotide
uagaaucucacuuuuagcc

SEQ ID NO: 1403774 - RNA, 19 nt, Artificial Sequence
  Description of Artificial Sequence: Synthetic oligonucleotide
uauuuauaaaaguuggcca

SEQ ID NO: 1403775 - RNA, 19 nt, Artificial Sequence
  Description of Artificial Sequence: Synthetic oligonucleotide
acuaaucucagcuuagagg

SEQ ID NO: 1403776 - RNA, 19 nt, Artificial Sequence
  Description of Artificial Sequence: Synthetic oligonucleotide
aaaauuuugcccacacucc

SEQ ID NO: 1403777 - RNA, 19 nt, Artificial Sequence
  Description of Artificial Sequence: Synthetic oligonucleotide
uuucucgauacuuagaaga

SEQ ID NO: 1403778 - RNA, 19 nt, Artificial Sequence
  Description of Artificial Sequence: Synthetic oligonucleotide
auaaaaguuggccauacug

SEQ ID NO: 1403779 - RNA, 19 nt, Artificial Sequence
  Description of Artificial Sequence: Synthetic oligonucleotide
uguggauuauacgagaagg

SEQ ID NO: 1403780 - RNA, 19 nt, Artificial Sequence
  Description of Artificial Sequence: Synthetic oligonucleotide
uguggguagauacacaacc

SEQ ID NO: 1403781 - RNA, 19 nt, Artificial Sequence
  Description of Artificial Sequence: Synthetic oligonucleotide
ugugauaaagugcugaguc

SEQ ID NO: 1403782 - RNA, 19 nt, Artificial Sequence
  Description of Artificial Sequence: Synthetic oligonucleotide
ugagucgucaauaucuuag

SEQ ID NO: 1403783 - RNA, 19 nt, Artificial Sequence
  Description of Artificial Sequence: Synthetic oligonucleotide
ugggucaagacauuaagag

SEQ ID NO: 1403784 - RNA, 19 nt, Artificial Sequence
  Description of Artificial Sequence: Synthetic oligonucleotide
aauaaggugggagauaugu

SEQ ID NO: 1403785 - RNA, 19 nt, Artificial Sequence
  Description of Artificial Sequence: Synthetic oligonucleotide
ucgucaauaucuuaggggc

SEQ ID NO: 1403786 - RNA, 19 nt, Artificial Sequence
  Description of Artificial Sequence: Synthetic oligonucleotide
aauacggcugccuuagaag

SEQ ID NO: 1403787 - RNA, 19 nt, Artificial Sequence
  Description of Artificial Sequence: Synthetic oligonucleotide
caucauguuucauaaacgg

SEQ ID NO: 1403788 - RNA, 19 nt, Artificial Sequence
  Description of Artificial Sequence: Synthetic oligonucleotide
guaacaauucaguaaauac

SEQ ID NO: 1403789 - RNA, 19 nt, Artificial Sequence
  Description of Artificial Sequence: Synthetic oligonucleotide
ugauaauucuguaagggaa

SEQ ID NO: 1403790 - RNA, 19 nt, Artificial Sequence
  Description of Artificial Sequence: Synthetic oligonucleotide
uaaaaguuggccauacugu

SEQ ID NO: 1403791 - RNA, 19 nt, Artificial Sequence
  Description of Artificial Sequence: Synthetic oligonucleotide
uuauguauuacagacgcug

SEQ ID NO: 1403792 - RNA, 19 nt, Artificial Sequence
  Description of Artificial Sequence: Synthetic oligonucleotide
aacaucuacaguaagagaa

SEQ ID NO: 1403793 - RNA, 19 nt, Artificial Sequence
  Description of Artificial Sequence: Synthetic oligonucleotide
uucuguguggauuauacga

SEQ ID NO: 1403794 - RNA, 19 nt, Artificial Sequence
  Description of Artificial Sequence: Synthetic oligonucleotide
gauacuuagaagauucucc

SEQ ID NO: 1403795 - RNA, 19 nt, Artificial Sequence
  Description of Artificial Sequence: Synthetic oligonucleotide
ucacuuuuagccauuggcc

SEQ ID NO: 1403796 - RNA, 19 nt, Artificial Sequence
  Description of Artificial Sequence: Synthetic oligonucleotide
guaagagaaguaaauacgg

SEQ ID NO: 1403797 - RNA, 19 nt, Artificial Sequence
  Description of Artificial Sequence: Synthetic oligonucleotide
acuacugcuacacaacauc

SEQ ID NO: 1403798 - RNA, 19 nt, Artificial Sequence
  Description of Artificial Sequence: Synthetic oligonucleotide
uuuaauugaggcaaaguuu

SEQ ID NO: 1403799 - RNA, 19 nt, Artificial Sequence
  Description of Artificial Sequence: Synthetic oligonucleotide
cuauuuguuagcuuucccc

SEQ ID NO: 1403800 - RNA, 19 nt, Artificial Sequence
  Description of Artificial Sequence: Synthetic oligonucleotide
uguucuaaguguuuuaaaa

SEQ ID NO: 1403801 - RNA, 19 nt, Artificial Sequence
  Description of Artificial Sequence: Synthetic oligonucleotide
uauacgagaaggaugaauu

SEQ ID NO: 1403802 - RNA, 19 nt, Artificial Sequence
  Description of Artificial Sequence: Synthetic oligonucleotide
aauggguuuguauucgugu

SEQ ID NO: 1403803 - RNA, 19 nt, Artificial Sequence
  Description of Artificial Sequence: Synthetic oligonucleotide
auucacacuauuuguuagc

SEQ ID NO: 1403804 - RNA, 19 nt, Artificial Sequence
  Description of Artificial Sequence: Synthetic oligonucleotide
gauuauacgagaaggauga

SEQ ID NO: 1403805 - RNA, 19 nt, Artificial Sequence
  Description of Artificial Sequence: Synthetic oligonucleotide
ugcuacacaacaucuacag

SEQ ID NO: 1403806 - RNA, 19 nt, Artificial Sequence
  Description of Artificial Sequence: Synthetic oligonucleotide
ugagucaggaaauacaaau

SEQ ID NO: 1403807 - RNA, 19 nt, Artificial Sequence
  Description of Artificial Sequence: Synthetic oligonucleotide
accaaaucaaaucaaggca

SEQ ID NO: 1403808 - RNA, 19 nt, Artificial Sequence
  Description of Artificial Sequence: Synthetic oligonucleotide
agacacauacuacugcuac

SEQ ID NO: 1403809 - RNA, 19 nt, Artificial Sequence
  Description of Artificial Sequence: Synthetic oligonucleotide
uguauucguguucucaaag

SEQ ID NO: 1403810 - RNA, 19 nt, Artificial Sequence
  Description of Artificial Sequence: Synthetic oligonucleotide
ugcugagucgucaauaucu

SEQ ID NO: 1403811 - RNA, 19 nt, Artificial Sequence
  Description of Artificial Sequence: Synthetic oligonucleotide
ucaaucuaugucaaccuca

SEQ ID NO: 1403812 - RNA, 19 nt, Artificial Sequence
  Description of Artificial Sequence: Synthetic oligonucleotide
uauucguguucucaaagug

SEQ ID NO: 1403813 - RNA, 19 nt, Artificial Sequence
  Description of Artificial Sequence: Synthetic oligonucleotide
ucuguguggauuauacgag

SEQ ID NO: 1403814 - RNA, 19 nt, Artificial Sequence
  Description of Artificial Sequence: Synthetic oligonucleotide
aaccuaugugauaaagugc

SEQ ID NO: 1403815 - RNA, 19 nt, Artificial Sequence
  Description of Artificial Sequence: Synthetic oligonucleotide
cugaucaugauauagcuga

SEQ ID NO: 1403816 - RNA, 19 nt, Artificial Sequence
  Description of Artificial Sequence: Synthetic oligonucleotide
uauuuguuagcuuuccccu

SEQ ID NO: 1403817 - RNA, 19 nt, Artificial Sequence
  Description of Artificial Sequence: Synthetic oligonucleotide
agcaaauggguuuguauuc

SEQ ID NO: 1403818 - RNA, 19 nt, Artificial Sequence
  Description of Artificial Sequence: Synthetic oligonucleotide
gucgucaauaucuuagggg

SEQ ID NO: 1403819 - RNA, 19 nt, Artificial Sequence
  Description of Artificial Sequence: Synthetic oligonucleotide
cuuccuaauaacaucccag

SEQ ID NO: 1403820 - RNA, 19 nt, Artificial Sequence
  Description of Artificial Sequence: Synthetic oligonucleotide
acuauuuguuagcuuuccc

SEQ ID NO: 1403821 - RNA, 19 nt, Artificial Sequence
  Description of Artificial Sequence: Synthetic oligonucleotide
agucggugcucuuagcugc

SEQ ID NO: 1403822 - RNA, 19 nt, Artificial Sequence
  Description of Artificial Sequence: Synthetic oligonucleotide
ugauauagcugauuaaaau

SEQ ID NO: 1403823 - RNA, 19 nt, Artificial Sequence
  Description of Artificial Sequence: Synthetic oligonucleotide
cauggcaugcccaugcugg

SEQ ID NO: 1403824 - RNA, 19 nt, Artificial Sequence
  Description of Artificial Sequence: Synthetic oligonucleotide
cucgauacuuagaagauuc

SEQ ID NO: 1403825 - RNA, 19 nt, Artificial Sequence
  Description of Artificial Sequence: Synthetic oligonucleotide
acacaaccaaaucaaauca

SEQ ID NO: 1403826 - RNA, 19 nt, Artificial Sequence
  Description of Artificial Sequence: Synthetic oligonucleotide
aucuccaacccaaaguucc

SEQ ID NO: 1403827 - RNA, 19 nt, Artificial Sequence
  Description of Artificial Sequence: Synthetic oligonucleotide
agaaucauaucuaauguca

SEQ ID NO: 1403828 - RNA, 19 nt, Artificial Sequence
  Description of Artificial Sequence: Synthetic oligonucleotide
uuucccacauauaaauaca

SEQ ID NO: 1403829 - RNA, 19 nt, Artificial Sequence
  Description of Artificial Sequence: Synthetic oligonucleotide
auacuuagaagauucuccu

SEQ ID NO: 1403830 - RNA, 19 nt, Artificial Sequence
  Description of Artificial Sequence: Synthetic oligonucleotide
ggucaagacauuaagagcc

SEQ ID NO: 1403831 - RNA, 19 nt, Artificial Sequence
  Description of Artificial Sequence: Synthetic oligonucleotide
guugccaaccuuuucacug

SEQ ID NO: 1403832 - RNA, 19 nt, Artificial Sequence
  Description of Artificial Sequence: Synthetic oligonucleotide
aaauacuucgaagccuagg

SEQ ID NO: 1403833 - RNA, 19 nt, Artificial Sequence
  Description of Artificial Sequence: Synthetic oligonucleotide
ucauugcucucacaggaag

SEQ ID NO: 1403834 - RNA, 19 nt, Artificial Sequence
  Description of Artificial Sequence: Synthetic oligonucleotide
gagaaguaaauacggcugc

SEQ ID NO: 1403835 - RNA, 19 nt, Artificial Sequence
  Description of Artificial Sequence: Synthetic oligonucleotide
aacacauuccuuugggaaa

SEQ ID NO: 1403836 - RNA, 19 nt, Artificial Sequence
  Description of Artificial Sequence: Synthetic oligonucleotide
uauaggagugggcucagga

SEQ ID NO: 1403837 - RNA, 19 nt, Artificial Sequence
  Description of Artificial Sequence: Synthetic oligonucleotide
aucaaucuaugucaaccuc

SEQ ID NO: 1403838 - RNA, 19 nt, Artificial Sequence
  Description of Artificial Sequence: Synthetic oligonucleotide
auucguguucucaaagugc

SEQ ID NO: 1403839 - RNA, 19 nt, Artificial Sequence
  Description of Artificial Sequence: Synthetic oligonucleotide
ugcugauaauucuguaagg

SEQ ID NO: 1403840 - RNA, 19 nt, Artificial Sequence
  Description of Artificial Sequence: Synthetic oligonucleotide
aucaugauauagcugauua

SEQ ID NO: 1403841 - RNA, 19 nt, Artificial Sequence
  Description of Artificial Sequence: Synthetic oligonucleotide
agauucugaauucacacua

SEQ ID NO: 1403842 - RNA, 19 nt, Artificial Sequence
  Description of Artificial Sequence: Synthetic oligonucleotide
guucuuccuaauaacaucc

SEQ ID NO: 1403843 - RNA, 19 nt, Artificial Sequence
  Description of Artificial Sequence: Synthetic oligonucleotide
uuuucucgauacuuagaag

SEQ ID NO: 1403844 - RNA, 19 nt, Artificial Sequence
  Description of Artificial Sequence: Synthetic oligonucleotide
uuccuaauaacaucccaga

SEQ ID NO: 1403845 - RNA, 19 nt, Artificial Sequence
  Description of Artificial Sequence: Synthetic oligonucleotide
aacggaacauuuauaggag

SEQ ID NO: 1403846 - RNA, 19 nt, Artificial Sequence
  Description of Artificial Sequence: Synthetic oligonucleotide
cuagaaucucacuuuuagc

SEQ ID NO: 1403847 - RNA, 19 nt, Artificial Sequence
  Description of Artificial Sequence: Synthetic oligonucleotide
aucauaucuaaugucaagu

SEQ ID NO: 1403848 - RNA, 19 nt, Artificial Sequence
  Description of Artificial Sequence: Synthetic oligonucleotide
uauguauuacagacgcugu

SEQ ID NO: 1403849 - RNA, 19 nt, Artificial Sequence
  Description of Artificial Sequence: Synthetic oligonucleotide
agucgucaauaucuuaggg

SEQ ID NO: 1403850 - RNA, 19 nt, Artificial Sequence
  Description of Artificial Sequence: Synthetic oligonucleotide
aaauacggcugccuuagaa

SEQ ID NO: 1403851 - RNA, 19 nt, Artificial Sequence
  Description of Artificial Sequence: Synthetic oligonucleotide
uccaucuccaacccaaagu

SEQ ID NO: 1403852 - RNA, 19 nt, Artificial Sequence
  Description of Artificial Sequence: Synthetic oligonucleotide
guuuccuacaaccuucgug

SEQ ID NO: 1403853 - RNA, 19 nt, Artificial Sequence
  Description of Artificial Sequence: Synthetic oligonucleotide
cauacuacugcuacacaac

SEQ ID NO: 1403854 - RNA, 19 nt, Artificial Sequence
  Description of Artificial Sequence: Synthetic oligonucleotide
gagucgucaauaucuuagg

SEQ ID NO: 1403855 - RNA, 19 nt, Artificial Sequence
  Description of Artificial Sequence: Synthetic oligonucleotide
aaaacauggccaacaaugu

SEQ ID NO: 1403856 - RNA, 19 nt, Artificial Sequence
  Description of Artificial Sequence: Synthetic oligonucleotide
caaagacacauacuacugc

SEQ ID NO: 1403857 - RNA, 19 nt, Artificial Sequence
  Description of Artificial Sequence: Synthetic oligonucleotide
acagaaaccuaugugauaa

SEQ ID NO: 1403858 - RNA, 19 nt, Artificial Sequence
  Description of Artificial Sequence: Synthetic oligonucleotide
cuaucauugcucucacagg

SEQ ID NO: 1403859 - RNA, 19 nt, Artificial Sequence
  Description of Artificial Sequence: Synthetic oligonucleotide
auuaagagccuagaaucuc

SEQ ID NO: 1403860 - RNA, 19 nt, Artificial Sequence
  Description of Artificial Sequence: Synthetic oligonucleotide
acauacuacugcuacacaa

SEQ ID NO: 1403861 - RNA, 19 nt, Artificial Sequence
  Description of Artificial Sequence: Synthetic oligonucleotide
agaaguaaauacggcugcc

SEQ ID NO: 1403862 - RNA, 19 nt, Artificial Sequence
  Description of Artificial Sequence: Synthetic oligonucleotide
acggugguucacuaauccc

SEQ ID NO: 1403863 - RNA, 19 nt, Artificial Sequence
  Description of Artificial Sequence: Synthetic oligonucleotide
ugcaauaacugagucauau

SEQ ID NO: 1403864 - RNA, 19 nt, Artificial Sequence
  Description of Artificial Sequence: Synthetic oligonucleotide
ucuguacaugugcugauaa

SEQ ID NO: 1403865 - RNA, 19 nt, Artificial Sequence
  Description of Artificial Sequence: Synthetic oligonucleotide
agagccuagaaucucacuu

SEQ ID NO: 1403866 - RNA, 19 nt, Artificial Sequence
  Description of Artificial Sequence: Synthetic oligonucleotide
caagacauuaagagccuag

SEQ ID NO: 1403867 - RNA, 19 nt, Artificial Sequence
  Description of Artificial Sequence: Synthetic oligonucleotide
agcugauuaaaauuacaaa

SEQ ID NO: 1403868 - RNA, 19 nt, Artificial Sequence
  Description of Artificial Sequence: Synthetic oligonucleotide
uuauaaaaguuggccauac

SEQ ID NO: 1403869 - RNA, 19 nt, Artificial Sequence
  Description of Artificial Sequence: Synthetic oligonucleotide
aaucccuggccuugccuac

SEQ ID NO: 1403870 - RNA, 19 nt, Artificial Sequence
  Description of Artificial Sequence: Synthetic oligonucleotide
uguggaucuaucuggcaga

SEQ ID NO: 1403871 - RNA, 19 nt, Artificial Sequence
  Description of Artificial Sequence: Synthetic oligonucleotide
ucgugugucacaaaauauu

SEQ ID NO: 1403872 - RNA, 19 nt, Artificial Sequence
  Description of Artificial Sequence: Synthetic oligonucleotide
aaguaaauacggcugccuu

SEQ ID NO: 1403873 - RNA, 19 nt, Artificial Sequence
  Description of Artificial Sequence: Synthetic oligonucleotide
uguaugagucaggaaauac

SEQ ID NO: 1403874 - RNA, 19 nt, Artificial Sequence
  Description of Artificial Sequence: Synthetic oligonucleotide
uguauuacagacgcuguuc

SEQ ID NO: 1403875 - RNA, 19 nt, Artificial Sequence
  Description of Artificial Sequence: Synthetic oligonucleotide
uuacauuccaccgggaaau

SEQ ID NO: 1403876 - RNA, 19 nt, Artificial Sequence
  Description of Artificial Sequence: Synthetic oligonucleotide
ucuccaacccaaaguuccg

SEQ ID NO: 1403877 - RNA, 19 nt, Artificial Sequence
  Description of Artificial Sequence: Synthetic oligonucleotide
gacggugguucacuaaucc

SEQ ID NO: 1403878 - RNA, 19 nt, Artificial Sequence
  Description of Artificial Sequence: Synthetic oligonucleotide
uguacaugugcugauaauu

SEQ ID NO: 1403879 - RNA, 19 nt, Artificial Sequence
  Description of Artificial Sequence: Synthetic oligonucleotide
ggagauucugaauucacac

SEQ ID NO: 1403880 - RNA, 19 nt, Artificial Sequence
  Description of Artificial Sequence: Synthetic oligonucleotide
uguguggauuauacgagaa

SEQ ID NO: 1403881 - RNA, 19 nt, Artificial Sequence
  Description of Artificial Sequence: Synthetic oligonucleotide
uucccacauauaaauacaa

SEQ ID NO: 1403882 - RNA, 19 nt, Artificial Sequence
  Description of Artificial Sequence: Synthetic oligonucleotide
uccaccgggaaauuuauuu

SEQ ID NO: 1403883 - RNA, 19 nt, Artificial Sequence
  Description of Artificial Sequence: Synthetic oligonucleotide
aagacauuaagagccuaga

SEQ ID NO: 1403884 - RNA, 19 nt, Artificial Sequence
  Description of Artificial Sequence: Synthetic oligonucleotide
uuuauguauuacagacgcu

SEQ ID NO: 1403885 - RNA, 19 nt, Artificial Sequence
  Description of Artificial Sequence: Synthetic oligonucleotide
agugaaguuucauggcaug

SEQ ID NO: 1403886 - RNA, 19 nt, Artificial Sequence
  Description of Artificial Sequence: Synthetic oligonucleotide
ugcgcauugaguugugacu

SEQ ID NO: 1403887 - RNA, 19 nt, Artificial Sequence
  Description of Artificial Sequence: Synthetic oligonucleotide
uucucgauacuuagaagau

SEQ ID NO: 1403888 - RNA, 19 nt, Artificial Sequence
  Description of Artificial Sequence: Synthetic oligonucleotide
uuggccauacuguaaaguu

SEQ ID NO: 1403889 - RNA, 19 nt, Artificial Sequence
  Description of Artificial Sequence: Synthetic oligonucleotide
agauauguaguggguugcc

SEQ ID NO: 1403890 - RNA, 19 nt, Artificial Sequence
  Description of Artificial Sequence: Synthetic oligonucleotide
ugguucacuaaucccuggc

SEQ ID NO: 1403891 - RNA, 19 nt, Artificial Sequence
  Description of Artificial Sequence: Synthetic oligonucleotide
uccuaauaacaucccagaa

SEQ ID NO: 1403892 - RNA, 19 nt, Artificial Sequence
  Description of Artificial Sequence: Synthetic oligonucleotide
uauaaaaguuggccauacu

SEQ ID NO: 1403893 - RNA, 19 nt, Artificial Sequence
  Description of Artificial Sequence: Synthetic oligonucleotide
uggguagauacacaaccaa

SEQ ID NO: 1403894 - RNA, 19 nt, Artificial Sequence
  Description of Artificial Sequence: Synthetic oligonucleotide
ugccaccugauauuuauaa

SEQ ID NO: 1403895 - RNA, 19 nt, Artificial Sequence
  Description of Artificial Sequence: Synthetic oligonucleotide
uucuuccuaauaacauccc

SEQ ID NO: 1403896 - RNA, 19 nt, Artificial Sequence
  Description of Artificial Sequence: Synthetic oligonucleotide
ugccuuagaagcagcugag

SEQ ID NO: 1403897 - RNA, 19 nt, Artificial Sequence
  Description of Artificial Sequence: Synthetic oligonucleotide
uucacacuauuuguuagcu

SEQ ID NO: 1403898 - RNA, 19 nt, Artificial Sequence
  Description of Artificial Sequence: Synthetic oligonucleotide
auguuucauaaacggaaca

SEQ ID NO: 1403899 - RNA, 19 nt, Artificial Sequence
  Description of Artificial Sequence: Synthetic oligonucleotide
cuaauaacaucccagaauu

SEQ ID NO: 1403900 - RNA, 19 nt, Artificial Sequence
  Description of Artificial Sequence: Synthetic oligonucleotide
gucaauaucuuaggggcag

SEQ ID NO: 1403901 - RNA, 19 nt, Artificial Sequence
  Description of Artificial Sequence: Synthetic oligonucleotide
aauaucuuaggggcagcca

SEQ ID NO: 1403902 - RNA, 19 nt, Artificial Sequence
  Description of Artificial Sequence: Synthetic oligonucleotide
cacagugaaguuucauggc

SEQ ID NO: 1403903 - RNA, 19 nt, Artificial Sequence
  Description of Artificial Sequence: Synthetic oligonucleotide
uggauuauacgagaaggau

SEQ ID NO: 1403904 - RNA, 19 nt, Artificial Sequence
  Description of Artificial Sequence: Synthetic oligonucleotide
ggaacauuuauaggagugg

SEQ ID NO: 1403905 - RNA, 19 nt, Artificial Sequence
  Description of Artificial Sequence: Synthetic oligonucleotide
ggagauauguaguggguug

SEQ ID NO: 1403906 - RNA, 19 nt, Artificial Sequence
  Description of Artificial Sequence: Synthetic oligonucleotide
acuaaucccuggccuugcc

SEQ ID NO: 1403907 - RNA, 19 nt, Artificial Sequence
  Description of Artificial Sequence: Synthetic oligonucleotide
uuauacgagaaggaugaau

SEQ ID NO: 1403908 - RNA, 19 nt, Artificial Sequence
  Description of Artificial Sequence: Synthetic oligonucleotide
uaucuuaggggcagccaca

SEQ ID NO: 1403909 - RNA, 19 nt, Artificial Sequence
  Description of Artificial Sequence: Synthetic oligonucleotide
cauuuaaagacacuggaau

SEQ ID NO: 1403910 - RNA, 19 nt, Artificial Sequence
  Description of Artificial Sequence: Synthetic oligonucleotide
gauaauucuguaagggaaa

SEQ ID NO: 1403911 - RNA, 19 nt, Artificial Sequence
  Description of Artificial Sequence: Synthetic oligonucleotide
uaagagccuagaaucucac

SEQ ID NO: 1403912 - RNA, 19 nt, Artificial Sequence
  Description of Artificial Sequence: Synthetic oligonucleotide
ccuagaaucucacuuuuag

SEQ ID NO: 1403913 - RNA, 19 nt, Artificial Sequence
  Description of Artificial Sequence: Synthetic oligonucleotide
aaauggguuuguauucgug

SEQ ID NO: 1403914 - RNA, 19 nt, Artificial Sequence
  Description of Artificial Sequence: Synthetic oligonucleotide
uguaguggguugccaaccu

SEQ ID NO: 1403915 - RNA, 19 nt, Artificial Sequence
  Description of Artificial Sequence: Synthetic oligonucleotide
aaaguuccgcugaucauga

SEQ ID NO: 1403916 - RNA, 19 nt, Artificial Sequence
  Description of Artificial Sequence: Synthetic oligonucleotide
gagauauguaguggguugc

SEQ ID NO: 1403917 - RNA, 19 nt, Artificial Sequence
  Description of Artificial Sequence: Synthetic oligonucleotide
uggccauacuguaaaguuc

SEQ ID NO: 1403918 - RNA, 19 nt, Artificial Sequence
  Description of Artificial Sequence: Synthetic oligonucleotide
aguaaauacggcugccuua

SEQ ID NO: 1403919 - RNA, 19 nt, Artificial Sequence
  Description of Artificial Sequence: Synthetic oligonucleotide
cauuuauaggagugggcuc

SEQ ID NO: 1403920 - RNA, 19 nt, Artificial Sequence
  Description of Artificial Sequence: Synthetic oligonucleotide
ucuggugcgcauugaguug

SEQ ID NO: 1403921 - RNA, 19 nt, Artificial Sequence
  Description of Artificial Sequence: Synthetic oligonucleotide
guugccucccgcuacccag

SEQ ID NO: 1403922 - RNA, 19 nt, Artificial Sequence
  Description of Artificial Sequence: Synthetic oligonucleotide
uacgagaaggaugaauuau

SEQ ID NO: 1403923 - RNA, 19 nt, Artificial Sequence
  Description of Artificial Sequence: Synthetic oligonucleotide
ggcaauuuuaggaugcccc

SEQ ID NO: 1403924 - RNA, 19 nt, Artificial Sequence
  Description of Artificial Sequence: Synthetic oligonucleotide
agcugagacugcuacaaau

SEQ ID NO: 1403925 - RNA, 19 nt, Artificial Sequence
  Description of Artificial Sequence: Synthetic oligonucleotide
ggauuauacgagaaggaug

SEQ ID NO: 1403926 - RNA, 19 nt, Artificial Sequence
  Description of Artificial Sequence: Synthetic oligonucleotide
guguggauuauacgagaag

SEQ ID NO: 1403927 - RNA, 19 nt, Artificial Sequence
  Description of Artificial Sequence: Synthetic oligonucleotide
cacuuuuagccauuggcca

SEQ ID NO: 1403928 - RNA, 19 nt, Artificial Sequence
  Description of Artificial Sequence: Synthetic oligonucleotide
agacauuaagagccuagaa

SEQ ID NO: 1403929 - RNA, 19 nt, Artificial Sequence
  Description of Artificial Sequence: Synthetic oligonucleotide
gacugcuacaaauccaucu

SEQ ID NO: 1403930 - RNA, 19 nt, Artificial Sequence
  Description of Artificial Sequence: Synthetic oligonucleotide
ucauggcaugcccaugcug

SEQ ID NO: 1403931 - RNA, 19 nt, Artificial Sequence
  Description of Artificial Sequence: Synthetic oligonucleotide
acuuuuagccauuggccau

SEQ ID NO: 1403932 - RNA, 19 nt, Artificial Sequence
  Description of Artificial Sequence: Synthetic oligonucleotide
uggguuuguauucguguuc

SEQ ID NO: 1403933 - RNA, 19 nt, Artificial Sequence
  Description of Artificial Sequence: Synthetic oligonucleotide
aagagccuagaaucucacu

SEQ ID NO: 1403934 - RNA, 19 nt, Artificial Sequence
  Description of Artificial Sequence: Synthetic oligonucleotide
ucccgcuacccagaaaagg

SEQ ID NO: 1403935 - RNA, 19 nt, Artificial Sequence
  Description of Artificial Sequence: Synthetic oligonucleotide
aaaauacuucgaagccuag

SEQ ID NO: 1403936 - RNA, 19 nt, Artificial Sequence
  Description of Artificial Sequence: Synthetic oligonucleotide
ugggagauauguagugggu

SEQ ID NO: 1403937 - RNA, 19 nt, Artificial Sequence
  Description of Artificial Sequence: Synthetic oligonucleotide
gggucaagacauuaagagc

SEQ ID NO: 1403938 - RNA, 19 nt, Artificial Sequence
  Description of Artificial Sequence: Synthetic oligonucleotide
accuucgugugucacaaaa

SEQ ID NO: 1403939 - RNA, 19 nt, Artificial Sequence
  Description of Artificial Sequence: Synthetic oligonucleotide
uccuacaaccuucgugugu

SEQ ID NO: 1403940 - RNA, 19 nt, Artificial Sequence
  Description of Artificial Sequence: Synthetic oligonucleotide
ucaaggcacuaacagcaau

SEQ ID NO: 1403941 - RNA, 19 nt, Artificial Sequence
  Description of Artificial Sequence: Synthetic oligonucleotide
gcaucauguuucauaaacg

SEQ ID NO: 1403942 - RNA, 19 nt, Artificial Sequence
  Description of Artificial Sequence: Synthetic oligonucleotide
cugaguaacagaaaccuau

SEQ ID NO: 1403943 - RNA, 19 nt, Artificial Sequence
  Description of Artificial Sequence: Synthetic oligonucleotide
guuuguauucguguucuca

SEQ ID NO: 1403944 - RNA, 19 nt, Artificial Sequence
  Description of Artificial Sequence: Synthetic oligonucleotide
acaaccuucgugugucaca

SEQ ID NO: 1403945 - RNA, 19 nt, Artificial Sequence
  Description of Artificial Sequence: Synthetic oligonucleotide
acugagucauauaaaacua

SEQ ID NO: 1403946 - RNA, 19 nt, Artificial Sequence
  Description of Artificial Sequence: Synthetic oligonucleotide
gggcuguggaucuaucugg

SEQ ID NO: 1403947 - RNA, 19 nt, Artificial Sequence
  Description of Artificial Sequence: Synthetic oligonucleotide
uaauaacaucccagaauuu

SEQ ID NO: 1403948 - RNA, 19 nt, Artificial Sequence
  Description of Artificial Sequence: Synthetic oligonucleotide
cagcuuagaggcuacaaaa

SEQ ID NO: 1403949 - RNA, 19 nt, Artificial Sequence
  Description of Artificial Sequence: Synthetic oligonucleotide
gacacauacuacugcuaca

SEQ ID NO: 1403950 - RNA, 19 nt, Artificial Sequence
  Description of Artificial Sequence: Synthetic oligonucleotide
aggacggugguucacuaau

SEQ ID NO: 1403951 - RNA, 19 nt, Artificial Sequence
  Description of Artificial Sequence: Synthetic oligonucleotide
acggaacauuuauaggagu

SEQ ID NO: 1403952 - RNA, 19 nt, Artificial Sequence
  Description of Artificial Sequence: Synthetic oligonucleotide
uccaacccaaaguuccgcu

SEQ ID NO: 1403953 - RNA, 19 nt, Artificial Sequence
  Description of Artificial Sequence: Synthetic oligonucleotide
aucauguuucauaaacgga

SEQ ID NO: 1403954 - RNA, 19 nt, Artificial Sequence
  Description of Artificial Sequence: Synthetic oligonucleotide
aggaugccccuaucauugc

SEQ ID NO: 1403955 - RNA, 19 nt, Artificial Sequence
  Description of Artificial Sequence: Synthetic oligonucleotide
gaaucauaucuaaugucaa

SEQ ID NO: 1403956 - RNA, 19 nt, Artificial Sequence
  Description of Artificial Sequence: Synthetic oligonucleotide
aguuggccauacuguaaag

SEQ ID NO: 1403957 - RNA, 19 nt, Artificial Sequence
  Description of Artificial Sequence: Synthetic oligonucleotide
cugaauucacacuauuugu

SEQ ID NO: 1403958 - RNA, 19 nt, Artificial Sequence
  Description of Artificial Sequence: Synthetic oligonucleotide
uuuauaggagugggcucag

SEQ ID NO: 1403959 - RNA, 19 nt, Artificial Sequence
  Description of Artificial Sequence: Synthetic oligonucleotide
aguuccgcugaucaugaua

SEQ ID NO: 1403960 - RNA, 19 nt, Artificial Sequence
  Description of Artificial Sequence: Synthetic oligonucleotide
acacuauuuguuagcuuuc

SEQ ID NO: 1403961 - RNA, 19 nt, Artificial Sequence
  Description of Artificial Sequence: Synthetic oligonucleotide
uacugcuacacaacaucua

SEQ ID NO: 1403962 - RNA, 19 nt, Artificial Sequence
  Description of Artificial Sequence: Synthetic oligonucleotide
aaguuucauggcaugccca

SEQ ID NO: 1403963 - RNA, 19 nt, Artificial Sequence
  Description of Artificial Sequence: Synthetic oligonucleotide
auacgagaaggaugaauua

SEQ ID NO: 1403964 - RNA, 19 nt, Artificial Sequence
  Description of Artificial Sequence: Synthetic oligonucleotide
gguucacuaaucccuggcc

SEQ ID NO: 1403965 - RNA, 19 nt, Artificial Sequence
  Description of Artificial Sequence: Synthetic oligonucleotide
ucacuaaucccuggccuug

SEQ ID NO: 1403966 - RNA, 19 nt, Artificial Sequence
  Description of Artificial Sequence: Synthetic oligonucleotide
ugaucaugauauagcugau

SEQ ID NO: 1403967 - RNA, 19 nt, Artificial Sequence
  Description of Artificial Sequence: Synthetic oligonucleotide
aaucacucauccacauacu

SEQ ID NO: 1403968 - RNA, 19 nt, Artificial Sequence
  Description of Artificial Sequence: Synthetic oligonucleotide
cuucgugugucacaaaaua

SEQ ID NO: 1403969 - RNA, 19 nt, Artificial Sequence
  Description of Artificial Sequence: Synthetic oligonucleotide
augauauagcugauuaaaa

SEQ ID NO: 1403970 - RNA, 19 nt, Artificial Sequence
  Description of Artificial Sequence: Synthetic oligonucleotide
auacuacacagaaaucacu

SEQ ID NO: 1403971 - RNA, 19 nt, Artificial Sequence
  Description of Artificial Sequence: Synthetic oligonucleotide
auggguuuguauucguguu

SEQ ID NO: 1403972 - RNA, 19 nt, Artificial Sequence
  Description of Artificial Sequence: Synthetic oligonucleotide
cauguugccucccgcuacc

SEQ ID NO: 1403973 - RNA, 19 nt, Artificial Sequence
  Description of Artificial Sequence: Synthetic oligonucleotide
gaaucucacuuuuagccau

SEQ ID NO: 1403974 - RNA, 19 nt, Artificial Sequence
  Description of Artificial Sequence: Synthetic oligonucleotide
cuuuuagccauuggccaug

SEQ ID NO: 1403975 - RNA, 19 nt, Artificial Sequence
  Description of Artificial Sequence: Synthetic oligonucleotide
caaucuaugucaaccucaa

SEQ ID NO: 1403976 - RNA, 19 nt, Artificial Sequence
  Description of Artificial Sequence: Synthetic oligonucleotide
ucaauaucuuaggggcagc

SEQ ID NO: 1403977 - RNA, 19 nt, Artificial Sequence
  Description of Artificial Sequence: Synthetic oligonucleotide
cacacuauuuguuagcuuu

SEQ ID NO: 1403978 - RNA, 19 nt, Artificial Sequence
  Description of Artificial Sequence: Synthetic oligonucleotide
gaguaacagaaaccuaugu

SEQ ID NO: 1403979 - RNA, 19 nt, Artificial Sequence
  Description of Artificial Sequence: Synthetic oligonucleotide
gauauguaguggguugcca

SEQ ID NO: 1403980 - RNA, 19 nt, Artificial Sequence
  Description of Artificial Sequence: Synthetic oligonucleotide
gaucuaucuggcagaagga

SEQ ID NO: 1403981 - RNA, 19 nt, Artificial Sequence
  Description of Artificial Sequence: Synthetic oligonucleotide
gugguucacuaaucccugg

SEQ ID NO: 1403982 - RNA, 19 nt, Artificial Sequence
  Description of Artificial Sequence: Synthetic oligonucleotide
uacuuagaagauucuccuu

SEQ ID NO: 1403983 - RNA, 19 nt, Artificial Sequence
  Description of Artificial Sequence: Synthetic oligonucleotide
guauuacagacgcuguucu

SEQ ID NO: 1403984 - RNA, 19 nt, Artificial Sequence
  Description of Artificial Sequence: Synthetic oligonucleotide
uauuacagacgcuguucua

SEQ ID NO: 1403985 - RNA, 19 nt, Artificial Sequence
  Description of Artificial Sequence: Synthetic oligonucleotide
cauuaagagccuagaaucu

SEQ ID NO: 1403986 - RNA, 19 nt, Artificial Sequence
  Description of Artificial Sequence: Synthetic oligonucleotide
gugcgcauugaguugugac

SEQ ID NO: 1403987 - RNA, 19 nt, Artificial Sequence
  Description of Artificial Sequence: Synthetic oligonucleotide
uugccuacucaggaucugc

SEQ ID NO: 1403988 - RNA, 19 nt, Artificial Sequence
  Description of Artificial Sequence: Synthetic oligonucleotide
caucuccaacccaaaguuc

SEQ ID NO: 1403989 - RNA, 19 nt, Artificial Sequence
  Description of Artificial Sequence: Synthetic oligonucleotide
aacccaaaguuccgcugau

SEQ ID NO: 1403990 - RNA, 19 nt, Artificial Sequence
  Description of Artificial Sequence: Synthetic oligonucleotide
guggauuauacgagaagga

SEQ ID NO: 1403991 - RNA, 19 nt, Artificial Sequence
  Description of Artificial Sequence: Synthetic oligonucleotide
aaggacggugguucacuaa

SEQ ID NO: 1403992 - RNA, 19 nt, Artificial Sequence
  Description of Artificial Sequence: Synthetic oligonucleotide
aucuuaggggcagccacag

SEQ ID NO: 1403993 - RNA, 19 nt, Artificial Sequence
  Description of Artificial Sequence: Synthetic oligonucleotide
cauuccaccgggaaauuua

SEQ ID NO: 1403994 - RNA, 19 nt, Artificial Sequence
  Description of Artificial Sequence: Synthetic oligonucleotide
augccccuaucauugcucu

SEQ ID NO: 1403995 - RNA, 19 nt, Artificial Sequence
  Description of Artificial Sequence: Synthetic oligonucleotide
guauucguguucucaaagu

SEQ ID NO: 1403996 - RNA, 19 nt, Artificial Sequence
  Description of Artificial Sequence: Synthetic oligonucleotide
agaaggacggugguucacu

SEQ ID NO: 1403997 - RNA, 19 nt, Artificial Sequence
  Description of Artificial Sequence: Synthetic oligonucleotide
cuguguggauuauacgaga

SEQ ID NO: 1403998 - RNA, 19 nt, Artificial Sequence
  Description of Artificial Sequence: Synthetic oligonucleotide
caaggcacuaacagcaaua

SEQ ID NO: 1403999 - RNA, 19 nt, Artificial Sequence
  Description of Artificial Sequence: Synthetic oligonucleotide
acacauuccuuugggaaaa

SEQ ID NO: 1404000 - RNA, 19 nt, Artificial Sequence
  Description of Artificial Sequence: Synthetic oligonucleotide
guucacuaaucccuggccu

SEQ ID NO: 1404001 - RNA, 19 nt, Artificial Sequence
  Description of Artificial Sequence: Synthetic oligonucleotide
gugcuucauuuaaagacac

SEQ ID NO: 1404002 - RNA, 19 nt, Artificial Sequence
  Description of Artificial Sequence: Synthetic oligonucleotide
uaaauacggcugccuuaga

SEQ ID NO: 1404003 - RNA, 19 nt, Artificial Sequence
  Description of Artificial Sequence: Synthetic oligonucleotide
caacccaaaguuccgcuga

SEQ ID NO: 1404004 - RNA, 19 nt, Artificial Sequence
  Description of Artificial Sequence: Synthetic oligonucleotide
uguaagcaaauggguuugu

SEQ ID NO: 1404005 - RNA, 19 nt, Artificial Sequence
  Description of Artificial Sequence: Synthetic oligonucleotide
cuaggcuuuucccacauau

SEQ ID NO: 1404006 - RNA, 19 nt, Artificial Sequence
  Description of Artificial Sequence: Synthetic oligonucleotide
aagacacauacuacugcua

SEQ ID NO: 1404007 - RNA, 19 nt, Artificial Sequence
  Description of Artificial Sequence: Synthetic oligonucleotide
gcucuuagcugcuaagcca

SEQ ID NO: 1404008 - RNA, 19 nt, Artificial Sequence
  Description of Artificial Sequence: Synthetic oligonucleotide
gagacugcuacaaauccau

SEQ ID NO: 1404009 - RNA, 19 nt, Artificial Sequence
  Description of Artificial Sequence: Synthetic oligonucleotide
ucacacuauuuguuagcuu

SEQ ID NO: 1404010 - RNA, 19 nt, Artificial Sequence
  Description of Artificial Sequence: Synthetic oligonucleotide
uuuuagccauuggccaugu

SEQ ID NO: 1404011 - RNA, 19 nt, Artificial Sequence
  Description of Artificial Sequence: Synthetic oligonucleotide
cuacugcuacacaacaucu

SEQ ID NO: 1404012 - RNA, 19 nt, Artificial Sequence
  Description of Artificial Sequence: Synthetic oligonucleotide
caauaaggugggagauaug

SEQ ID NO: 1404013 - RNA, 19 nt, Artificial Sequence
  Description of Artificial Sequence: Synthetic oligonucleotide
ccgcugaucaugauauagc

SEQ ID NO: 1404014 - RNA, 19 nt, Artificial Sequence
  Description of Artificial Sequence: Synthetic oligonucleotide
guggguagauacacaacca

SEQ ID NO: 1404015 - RNA, 19 nt, Artificial Sequence
  Description of Artificial Sequence: Synthetic oligonucleotide
guuccgcugaucaugauau

SEQ ID NO: 1404016 - RNA, 19 nt, Artificial Sequence
  Description of Artificial Sequence: Synthetic oligonucleotide
gcucugaguaacagaaacc

SEQ ID NO: 1404017 - RNA, 19 nt, Artificial Sequence
  Description of Artificial Sequence: Synthetic oligonucleotide
aucucacuuuuagccauug

SEQ ID NO: 1404018 - RNA, 19 nt, Artificial Sequence
  Description of Artificial Sequence: Synthetic oligonucleotide
ucuuagcugcuaagccauc

SEQ ID NO: 1404019 - RNA, 19 nt, Artificial Sequence
  Description of Artificial Sequence: Synthetic oligonucleotide
cuccaacccaaaguuccgc

SEQ ID NO: 1404020 - RNA, 19 nt, Artificial Sequence
  Description of Artificial Sequence: Synthetic oligonucleotide
ggugguucacuaaucccug

SEQ ID NO: 1404021 - RNA, 19 nt, Artificial Sequence
  Description of Artificial Sequence: Synthetic oligonucleotide
agacugcuacaaauccauc

SEQ ID NO: 1404022 - RNA, 19 nt, Artificial Sequence
  Description of Artificial Sequence: Synthetic oligonucleotide
gguagauacacaaccaaau

SEQ ID NO: 1404023 - RNA, 19 nt, Artificial Sequence
  Description of Artificial Sequence: Synthetic oligonucleotide
cucccgcuacccagaaaag

SEQ ID NO: 1404024 - RNA, 19 nt, Artificial Sequence
  Description of Artificial Sequence: Synthetic oligonucleotide
caaauccaucuccaaccca

SEQ ID NO: 1404025 - RNA, 19 nt, Artificial Sequence
  Description of Artificial Sequence: Synthetic oligonucleotide
gagccuagaaucucacuuu

SEQ ID NO: 1404026 - RNA, 19 nt, Artificial Sequence
  Description of Artificial Sequence: Synthetic oligonucleotide
auuccaccgggaaauuuau

SEQ ID NO: 1404027 - RNA, 19 nt, Artificial Sequence
  Description of Artificial Sequence: Synthetic oligonucleotide
gaaggacggugguucacua

SEQ ID NO: 1404028 - RNA, 19 nt, Artificial Sequence
  Description of Artificial Sequence: Synthetic oligonucleotide
ugccaaccuuuucacugua

SEQ ID NO: 1404029 - RNA, 19 nt, Artificial Sequence
  Description of Artificial Sequence: Synthetic oligonucleotide
uugcaauaacugagucaua

SEQ ID NO: 1404030 - RNA, 19 nt, Artificial Sequence
  Description of Artificial Sequence: Synthetic oligonucleotide
agcaauaaggugggagaua

SEQ ID NO: 1404031 - RNA, 19 nt, Artificial Sequence
  Description of Artificial Sequence: Synthetic oligonucleotide
ggguugccaaccuuuucac

SEQ ID NO: 1404032 - RNA, 19 nt, Artificial Sequence
  Description of Artificial Sequence: Synthetic oligonucleotide
caaccuucgugugucacaa

SEQ ID NO: 1404033 - RNA, 19 nt, Artificial Sequence
  Description of Artificial Sequence: Synthetic oligonucleotide
gauucugaauucacacuau

SEQ ID NO: 1404034 - RNA, 19 nt, Artificial Sequence
  Description of Artificial Sequence: Synthetic oligonucleotide
gcacuaacagcaauaaggu

SEQ ID NO: 1404035 - RNA, 19 nt, Artificial Sequence
  Description of Artificial Sequence: Synthetic oligonucleotide
guuggccauacuguaaagu

SEQ ID NO: 1404036 - RNA, 19 nt, Artificial Sequence
  Description of Artificial Sequence: Synthetic oligonucleotide
agccuaggcuuuucccaca

SEQ ID NO: 1404037 - RNA, 19 nt, Artificial Sequence
  Description of Artificial Sequence: Synthetic oligonucleotide
cacuaaucccuggccuugc

SEQ ID NO: 1404038 - RNA, 19 nt, Artificial Sequence
  Description of Artificial Sequence: Synthetic oligonucleotide
cuugccuacucaggaucug

SEQ ID NO: 1404039 - RNA, 19 nt, Artificial Sequence
  Description of Artificial Sequence: Synthetic oligonucleotide
aaguuccgcugaucaugau

SEQ ID NO: 1404040 - RNA, 19 nt, Artificial Sequence
  Description of Artificial Sequence: Synthetic oligonucleotide
cccgcuacccagaaaagga

SEQ ID NO: 1404041 - RNA, 19 nt, Artificial Sequence
  Description of Artificial Sequence: Synthetic oligonucleotide
gugcugagucgucaauauc

SEQ ID NO: 1404042 - RNA, 19 nt, Artificial Sequence
  Description of Artificial Sequence: Synthetic oligonucleotide
gggagauucugaauucaca

SEQ ID NO: 1404043 - RNA, 19 nt, Artificial Sequence
  Description of Artificial Sequence: Synthetic oligonucleotide
ucucagcuuagaggcuaca

SEQ ID NO: 1404044 - RNA, 19 nt, Artificial Sequence
  Description of Artificial Sequence: Synthetic oligonucleotide
gcaauuuuaggaugccccu

SEQ ID NO: 1404045 - RNA, 19 nt, Artificial Sequence
  Description of Artificial Sequence: Synthetic oligonucleotide
ccuaauaacaucccagaau

SEQ ID NO: 1404046 - RNA, 19 nt, Artificial Sequence
  Description of Artificial Sequence: Synthetic oligonucleotide
auuauacgagaaggaugaa

SEQ ID NO: 1404047 - RNA, 19 nt, Artificial Sequence
  Description of Artificial Sequence: Synthetic oligonucleotide
ccuaugugauaaagugcug

SEQ ID NO: 1404048 - RNA, 19 nt, Artificial Sequence
  Description of Artificial Sequence: Synthetic oligonucleotide
aaccuucgugugucacaaa

SEQ ID NO: 1404049 - RNA, 19 nt, Artificial Sequence
  Description of Artificial Sequence: Synthetic oligonucleotide
cacuguggguagauacaca

SEQ ID NO: 1404050 - RNA, 19 nt, Artificial Sequence
  Description of Artificial Sequence: Synthetic oligonucleotide
gcaauaaggugggagauau

SEQ ID NO: 1404051 - RNA, 19 nt, Artificial Sequence
  Description of Artificial Sequence: Synthetic oligonucleotide
ccucccgcuacccagaaaa

SEQ ID NO: 1404052 - RNA, 19 nt, Artificial Sequence
  Description of Artificial Sequence: Synthetic oligonucleotide
ggggagauucugaauucac

SEQ ID NO: 1404053 - RNA, 19 nt, Artificial Sequence
  Description of Artificial Sequence: Synthetic oligonucleotide
agacgcuguucuaaguguu

SEQ ID NO: 1404054 - RNA, 19 nt, Artificial Sequence
  Description of Artificial Sequence: Synthetic oligonucleotide
aggaccggcugcggugugg

SEQ ID NO: 1404055 - RNA, 19 nt, Artificial Sequence
  Description of Artificial Sequence: Synthetic oligonucleotide
gaucaugauauagcugauu

SEQ ID NO: 1404056 - RNA, 19 nt, Artificial Sequence
  Description of Artificial Sequence: Synthetic oligonucleotide
cagaaggacggugguucac

SEQ ID NO: 1404057 - RNA, 19 nt, Artificial Sequence
  Description of Artificial Sequence: Synthetic oligonucleotide
cagugaaguuucauggcau

SEQ ID NO: 1404058 - RNA, 19 nt, Artificial Sequence
  Description of Artificial Sequence: Synthetic oligonucleotide
cucagcuuagaggcuacaa

SEQ ID NO: 1404059 - RNA, 19 nt, Artificial Sequence
  Description of Artificial Sequence: Synthetic oligonucleotide
aucaaggcacuaacagcaa

SEQ ID NO: 1404060 - RNA, 19 nt, Artificial Sequence
  Description of Artificial Sequence: Synthetic oligonucleotide
cugagucgucaauaucuua

SEQ ID NO: 1404061 - RNA, 19 nt, Artificial Sequence
  Description of Artificial Sequence: Synthetic oligonucleotide
uuuagccauuggccauguu

SEQ ID NO: 1404062 - RNA, 19 nt, Artificial Sequence
  Description of Artificial Sequence: Synthetic oligonucleotide
aguggguugccaaccuuuu

SEQ ID NO: 1404063 - RNA, 19 nt, Artificial Sequence
  Description of Artificial Sequence: Synthetic oligonucleotide
gucaagacauuaagagccu

SEQ ID NO: 1404064 - RNA, 19 nt, Artificial Sequence
  Description of Artificial Sequence: Synthetic oligonucleotide
gaagcagcugagacugcua

SEQ ID NO: 1404065 - RNA, 19 nt, Artificial Sequence
  Description of Artificial Sequence: Synthetic oligonucleotide
cagaaaccuaugugauaaa

SEQ ID NO: 1404066 - RNA, 19 nt, Artificial Sequence
  Description of Artificial Sequence: Synthetic oligonucleotide
gccaccugauauuuauaaa

SEQ ID NO: 1404067 - RNA, 19 nt, Artificial Sequence
  Description of Artificial Sequence: Synthetic oligonucleotide
guggaucuaucuggcagaa

SEQ ID NO: 1404068 - RNA, 19 nt, Artificial Sequence
  Description of Artificial Sequence: Synthetic oligonucleotide
ugccccuaucauugcucuc

SEQ ID NO: 1404069 - RNA, 19 nt, Artificial Sequence
  Description of Artificial Sequence: Synthetic oligonucleotide
uuccgcugaucaugauaua

SEQ ID NO: 1404070 - RNA, 19 nt, Artificial Sequence
  Description of Artificial Sequence: Synthetic oligonucleotide
cuacaaccuucguguguca

SEQ ID NO: 1404071 - RNA, 19 nt, Artificial Sequence
  Description of Artificial Sequence: Synthetic oligonucleotide
gguuuguauucguguucuc

SEQ ID NO: 1404072 - RNA, 19 nt, Artificial Sequence
  Description of Artificial Sequence: Synthetic oligonucleotide
guugugacuucuggacaaa

SEQ ID NO: 1404073 - RNA, 19 nt, Artificial Sequence
  Description of Artificial Sequence: Synthetic oligonucleotide
ggaccggcugcgguguggg

SEQ ID NO: 1404074 - RNA, 19 nt, Artificial Sequence
  Description of Artificial Sequence: Synthetic oligonucleotide
aggcagaguguaagcaaau

SEQ ID NO: 1404075 - RNA, 19 nt, Artificial Sequence
  Description of Artificial Sequence: Synthetic oligonucleotide
ugucaaccucaaggcaauu

SEQ ID NO: 1404076 - RNA, 19 nt, Artificial Sequence
  Description of Artificial Sequence: Synthetic oligonucleotide
gcuacacaacaucuacagu

SEQ ID NO: 1404077 - RNA, 19 nt, Artificial Sequence
  Description of Artificial Sequence: Synthetic oligonucleotide
gguugccaaccuuuucacu

SEQ ID NO: 1404078 - RNA, 19 nt, Artificial Sequence
  Description of Artificial Sequence: Synthetic oligonucleotide
ggacggugguucacuaauc

SEQ ID NO: 1404079 - RNA, 19 nt, Artificial Sequence
  Description of Artificial Sequence: Synthetic oligonucleotide
gacgcuguucuaaguguuu

SEQ ID NO: 1404080 - RNA, 19 nt, Artificial Sequence
  Description of Artificial Sequence: Synthetic oligonucleotide
guaguggguugccaaccuu

SEQ ID NO: 1404081 - RNA, 19 nt, Artificial Sequence
  Description of Artificial Sequence: Synthetic oligonucleotide
ggccauguugccucccgcu

SEQ ID NO: 1404082 - RNA, 19 nt, Artificial Sequence
  Description of Artificial Sequence: Synthetic oligonucleotide
gggagauauguaguggguu

SEQ ID NO: 1404083 - RNA, 19 nt, Artificial Sequence
  Description of Artificial Sequence: Synthetic oligonucleotide
ggugcgcauugaguuguga

SEQ ID NO: 1404084 - RNA, 19 nt, Artificial Sequence
  Description of Artificial Sequence: Synthetic oligonucleotide
cgcauugaguugugacuuc

SEQ ID NO: 1404085 - RNA, 19 nt, Artificial Sequence
  Description of Artificial Sequence: Synthetic oligonucleotide
ccgcuacccagaaaaggaa

SEQ ID NO: 1404086 - RNA, 19 nt, Artificial Sequence
  Description of Artificial Sequence: Synthetic oligonucleotide
gcgcauugaguugugacuu

SEQ ID NO: 1404087 - RNA, 19 nt, Artificial Sequence
  Description of Artificial Sequence: Synthetic oligonucleotide
gagccacuguggguagaua

SEQ ID NO: 1404088 - RNA, 19 nt, Artificial Sequence
  Description of Artificial Sequence: Synthetic oligonucleotide
ccuucgugugucacaaaau

SEQ ID NO: 1404089 - RNA, 19 nt, Artificial Sequence
  Description of Artificial Sequence: Synthetic oligonucleotide
ccaccgggaaauuuauuuu

SEQ ID NO: 1404090 - RNA, 19 nt, Artificial Sequence
  Description of Artificial Sequence: Synthetic oligonucleotide
ggaaaaccaugagguauuu

SEQ ID NO: 1404091 - RNA, 19 nt, Artificial Sequence
  Description of Artificial Sequence: Synthetic oligonucleotide
ccaaaguuccgcugaucau

SEQ ID NO: 1404092 - RNA, 19 nt, Artificial Sequence
  Description of Artificial Sequence: Synthetic oligonucleotide
gcugagucgucaauaucuu

SEQ ID NO: 1404093 - RNA, 19 nt, Artificial Sequence
  Description of Artificial Sequence: Synthetic oligonucleotide
ccgggaaauuuauuuuaau

SEQ ID NO: 1404094 - RNA, 19 nt, Artificial Sequence
  Description of Artificial Sequence: Synthetic oligonucleotide
gccuaggcuuuucccacau

SEQ ID NO: 1404095 - RNA, 19 nt, Artificial Sequence
  Description of Artificial Sequence: Synthetic oligonucleotide
cuucgaagccuaggcuuuu

SEQ ID NO: 1404096 - RNA, 19 nt, Artificial Sequence
  Description of Artificial Sequence: Synthetic oligonucleotide
gcggugugggcagcucuga

SEQ ID NO: 1404097 - RNA, 19 nt, Artificial Sequence
  Description of Artificial Sequence: Synthetic oligonucleotide
ccuaggcuuuucccacaua

SEQ ID NO: 1404098 - RNA, 19 nt, Artificial Sequence
  Description of Artificial Sequence: Synthetic oligonucleotide
gccucccgcuacccagaaa

SEQ ID NO: 1404099 - RNA, 19 nt, Artificial Sequence
  Description of Artificial Sequence: Synthetic oligonucleotide
aacauuauagcuuugaggg

SEQ ID NO: 1404100 - RNA, 19 nt, Artificial Sequence
  Description of Artificial Sequence: Synthetic oligonucleotide
uguaucauaagcuugaacc

SEQ ID NO: 1404101 - RNA, 19 nt, Artificial Sequence
  Description of Artificial Sequence: Synthetic oligonucleotide
aaaauuugcauacaauguc

SEQ ID NO: 1404102 - RNA, 19 nt, Artificial Sequence
  Description of Artificial Sequence: Synthetic oligonucleotide
ucaauauucucauucagcg

SEQ ID NO: 1404103 - RNA, 19 nt, Artificial Sequence
  Description of Artificial Sequence: Synthetic oligonucleotide
auugagaccauguugauuc

SEQ ID NO: 1404104 - RNA, 19 nt, Artificial Sequence
  Description of Artificial Sequence: Synthetic oligonucleotide
aaugaggacauuuuaugac

SEQ ID NO: 1404105 - RNA, 19 nt, Artificial Sequence
  Description of Artificial Sequence: Synthetic oligonucleotide
agcuuaucaacauuggugc

SEQ ID NO: 1404106 - RNA, 19 nt, Artificial Sequence
  Description of Artificial Sequence: Synthetic oligonucleotide
auuuaaaccagacacauga

SEQ ID NO: 1404107 - RNA, 19 nt, Artificial Sequence
  Description of Artificial Sequence: Synthetic oligonucleotide
uguaaaguaaauccaauga

SEQ ID NO: 1404108 - RNA, 19 nt, Artificial Sequence
  Description of Artificial Sequence: Synthetic oligonucleotide
ugaagauugaccaaggagu

SEQ ID NO: 1404109 - RNA, 19 nt, Artificial Sequence
  Description of Artificial Sequence: Synthetic oligonucleotide
uaagcuugaacccuaagag

SEQ ID NO: 1404110 - RNA, 19 nt, Artificial Sequence
  Description of Artificial Sequence: Synthetic oligonucleotide
aaugcaugaaauugguagg

SEQ ID NO: 1404111 - RNA, 19 nt, Artificial Sequence
  Description of Artificial Sequence: Synthetic oligonucleotide
auucauauggcauacagga

SEQ ID NO: 1404112 - RNA, 19 nt, Artificial Sequence
  Description of Artificial Sequence: Synthetic oligonucleotide
agugcaacaugccagauuc

SEQ ID NO: 1404113 - RNA, 19 nt, Artificial Sequence
  Description of Artificial Sequence: Synthetic oligonucleotide
agaacuuuagauuaugugu

SEQ ID NO: 1404114 - RNA, 19 nt, Artificial Sequence
  Description of Artificial Sequence: Synthetic oligonucleotide
uucauuugaaaccaagagc

SEQ ID NO: 1404115 - RNA, 19 nt, Artificial Sequence
  Description of Artificial Sequence: Synthetic oligonucleotide
aaaugaaagguggugcucc

SEQ ID NO: 1404116 - RNA, 19 nt, Artificial Sequence
  Description of Artificial Sequence: Synthetic oligonucleotide
aaggaguuacuguauugcc

SEQ ID NO: 1404117 - RNA, 19 nt, Artificial Sequence
  Description of Artificial Sequence: Synthetic oligonucleotide
ucauucagcgcacacaucc

SEQ ID NO: 1404118 - RNA, 19 nt, Artificial Sequence
  Description of Artificial Sequence: Synthetic oligonucleotide
aacgaauacaacucgguca

SEQ ID NO: 1404119 - RNA, 19 nt, Artificial Sequence
  Description of Artificial Sequence: Synthetic oligonucleotide
aagcuugaacccuaagagc

SEQ ID NO: 1404120 - RNA, 19 nt, Artificial Sequence
  Description of Artificial Sequence: Synthetic oligonucleotide
uagaguaauuacuaaauga

SEQ ID NO: 1404121 - RNA, 19 nt, Artificial Sequence
  Description of Artificial Sequence: Synthetic oligonucleotide
aagagcaaaucaugaaacg

SEQ ID NO: 1404122 - RNA, 19 nt, Artificial Sequence
  Description of Artificial Sequence: Synthetic oligonucleotide
uuaaacaucacacuacuuu

SEQ ID NO: 1404123 - RNA, 19 nt, Artificial Sequence
  Description of Artificial Sequence: Synthetic oligonucleotide
uuuaacuuaguguaaagua

SEQ ID NO: 1404124 - RNA, 19 nt, Artificial Sequence
  Description of Artificial Sequence: Synthetic oligonucleotide
ugcuccacaagguagagag

SEQ ID NO: 1404125 - RNA, 19 nt, Artificial Sequence
  Description of Artificial Sequence: Synthetic oligonucleotide
aaguaguucacagugcaac

SEQ ID NO: 1404126 - RNA, 19 nt, Artificial Sequence
  Description of Artificial Sequence: Synthetic oligonucleotide
acuaaaugaaguuaaaauu

SEQ ID NO: 1404127 - RNA, 19 nt, Artificial Sequence
  Description of Artificial Sequence: Synthetic oligonucleotide
uguccuuuagaccaaaagu

SEQ ID NO: 1404128 - RNA, 19 nt, Artificial Sequence
  Description of Artificial Sequence: Synthetic oligonucleotide
uuaacuuaguguaaaguaa

SEQ ID NO: 1404129 - RNA, 19 nt, Artificial Sequence
  Description of Artificial Sequence: Synthetic oligonucleotide
aaaucaugaaacgucauga

SEQ ID NO: 1404130 - RNA, 19 nt, Artificial Sequence
  Description of Artificial Sequence: Synthetic oligonucleotide
uccaaugaaacauuauagc

SEQ ID NO: 1404131 - RNA, 19 nt, Artificial Sequence
  Description of Artificial Sequence: Synthetic oligonucleotide
uagaucuuguguuaaagug

SEQ ID NO: 1404132 - RNA, 19 nt, Artificial Sequence
  Description of Artificial Sequence: Synthetic oligonucleotide
ucaagacucaaggauaugg

SEQ ID NO: 1404133 - RNA, 19 nt, Artificial Sequence
  Description of Artificial Sequence: Synthetic oligonucleotide
ucuccguucucaaaggagg

SEQ ID NO: 1404134 - RNA, 19 nt, Artificial Sequence
  Description of Artificial Sequence: Synthetic oligonucleotide
uuaaagugugcguauagca

SEQ ID NO: 1404135 - RNA, 19 nt, Artificial Sequence
  Description of Artificial Sequence: Synthetic oligonucleotide
uacaacucggucaauauuc

SEQ ID NO: 1404136 - RNA, 19 nt, Artificial Sequence
  Description of Artificial Sequence: Synthetic oligonucleotide
uugaaagugacccaucuau

SEQ ID NO: 1404137 - RNA, 19 nt, Artificial Sequence
  Description of Artificial Sequence: Synthetic oligonucleotide
uuuaugacagacuauuuua

SEQ ID NO: 1404138 - RNA, 19 nt, Artificial Sequence
  Description of Artificial Sequence: Synthetic oligonucleotide
aaguccauggcauaugcga

SEQ ID NO: 1404139 - RNA, 19 nt, Artificial Sequence
  Description of Artificial Sequence: Synthetic oligonucleotide
uuuguguugaguuggucag

SEQ ID NO: 1404140 - RNA, 19 nt, Artificial Sequence
  Description of Artificial Sequence: Synthetic oligonucleotide
ucauauggcauacaggaau

SEQ ID NO: 1404141 - RNA, 19 nt, Artificial Sequence
  Description of Artificial Sequence: Synthetic oligonucleotide
gaaauugguagguuuggcc

SEQ ID NO: 1404142 - RNA, 19 nt, Artificial Sequence
  Description of Artificial Sequence: Synthetic oligonucleotide
uguauugccuuuccaaagc

SEQ ID NO: 1404143 - RNA, 19 nt, Artificial Sequence
  Description of Artificial Sequence: Synthetic oligonucleotide
uccuuuagaccaaaagucc

SEQ ID NO: 1404144 - RNA, 19 nt, Artificial Sequence
  Description of Artificial Sequence: Synthetic oligonucleotide
gaaacauuauagcuuugag

SEQ ID NO: 1404145 - RNA, 19 nt, Artificial Sequence
  Description of Artificial Sequence: Synthetic oligonucleotide
aaaaccuuucaguuugcug

SEQ ID NO: 1404146 - RNA, 19 nt, Artificial Sequence
  Description of Artificial Sequence: Synthetic oligonucleotide
aguaauuacuaaaugaagu

SEQ ID NO: 1404147 - RNA, 19 nt, Artificial Sequence
  Description of Artificial Sequence: Synthetic oligonucleotide
aacccuaagagcaaaagga

SEQ ID NO: 1404148 - RNA, 19 nt, Artificial Sequence
  Description of Artificial Sequence: Synthetic oligonucleotide
agauugaccaaggaguuac

SEQ ID NO: 1404149 - RNA, 19 nt, Artificial Sequence
  Description of Artificial Sequence: Synthetic oligonucleotide
acacugaucaguaaacccc

SEQ ID NO: 1404150 - RNA, 19 nt, Artificial Sequence
  Description of Artificial Sequence: Synthetic oligonucleotide
uucgaguuucauuugaaac

SEQ ID NO: 1404151 - RNA, 19 nt, Artificial Sequence
  Description of Artificial Sequence: Synthetic oligonucleotide
uuuuaugacagacuauuuu

SEQ ID NO: 1404152 - RNA, 19 nt, Artificial Sequence
  Description of Artificial Sequence: Synthetic oligonucleotide
uuuugaaagugacccaucu

SEQ ID NO: 1404153 - RNA, 19 nt, Artificial Sequence
  Description of Artificial Sequence: Synthetic oligonucleotide
gguaaaaucuccuagagua

SEQ ID NO: 1404154 - RNA, 19 nt, Artificial Sequence
  Description of Artificial Sequence: Synthetic oligonucleotide
uugaugcuacagcagaucc

SEQ ID NO: 1404155 - RNA, 19 nt, Artificial Sequence
  Description of Artificial Sequence: Synthetic oligonucleotide
aauacaacucggucaauau

SEQ ID NO: 1404156 - RNA, 19 nt, Artificial Sequence
  Description of Artificial Sequence: Synthetic oligonucleotide
ugaucaguaaaccccagaa

SEQ ID NO: 1404157 - RNA, 19 nt, Artificial Sequence
  Description of Artificial Sequence: Synthetic oligonucleotide
agcguuuuccuuucaggcc

SEQ ID NO: 1404158 - RNA, 19 nt, Artificial Sequence
  Description of Artificial Sequence: Synthetic oligonucleotide
uugacaugagcaauuacaa

SEQ ID NO: 1404159 - RNA, 19 nt, Artificial Sequence
  Description of Artificial Sequence: Synthetic oligonucleotide
aaagccuuugcaaggguac

SEQ ID NO: 1404160 - RNA, 19 nt, Artificial Sequence
  Description of Artificial Sequence: Synthetic oligonucleotide
aucacacuacuuuucaaag

SEQ ID NO: 1404161 - RNA, 19 nt, Artificial Sequence
  Description of Artificial Sequence: Synthetic oligonucleotide
aauauaaguaaagguaaaa

SEQ ID NO: 1404162 - RNA, 19 nt, Artificial Sequence
  Description of Artificial Sequence: Synthetic oligonucleotide
aaggacuaggauuuuaguu

SEQ ID NO: 1404163 - RNA, 19 nt, Artificial Sequence
  Description of Artificial Sequence: Synthetic oligonucleotide
uaacuuaguguaaaguaaa

SEQ ID NO: 1404164 - RNA, 19 nt, Artificial Sequence
  Description of Artificial Sequence: Synthetic oligonucleotide
augacagacuauuuuaacu

SEQ ID NO: 1404165 - RNA, 19 nt, Artificial Sequence
  Description of Artificial Sequence: Synthetic oligonucleotide
uugcauacaauguccaaug

SEQ ID NO: 1404166 - RNA, 19 nt, Artificial Sequence
  Description of Artificial Sequence: Synthetic oligonucleotide
auugacaugagcaauuaca

SEQ ID NO: 1404167 - RNA, 19 nt, Artificial Sequence
  Description of Artificial Sequence: Synthetic oligonucleotide
acgggcuuuauuuaaacca

SEQ ID NO: 1404168 - RNA, 19 nt, Artificial Sequence
  Description of Artificial Sequence: Synthetic oligonucleotide
caugaaauugguagguuug

SEQ ID NO: 1404169 - RNA, 19 nt, Artificial Sequence
  Description of Artificial Sequence: Synthetic oligonucleotide
cauucauauggcauacagg

SEQ ID NO: 1404170 - RNA, 19 nt, Artificial Sequence
  Description of Artificial Sequence: Synthetic oligonucleotide
acagaacaaaaguaguuca

SEQ ID NO: 1404171 - RNA, 19 nt, Artificial Sequence
  Description of Artificial Sequence: Synthetic oligonucleotide
uuagaucuuguguuaaagu

SEQ ID NO: 1404172 - RNA, 19 nt, Artificial Sequence
  Description of Artificial Sequence: Synthetic oligonucleotide
uauagcauccucuuuugaa

SEQ ID NO: 1404173 - RNA, 19 nt, Artificial Sequence
  Description of Artificial Sequence: Synthetic oligonucleotide
cauguugauucugagaaag

SEQ ID NO: 1404174 - RNA, 19 nt, Artificial Sequence
  Description of Artificial Sequence: Synthetic oligonucleotide
aaaucguucauagucuccu

SEQ ID NO: 1404175 - RNA, 19 nt, Artificial Sequence
  Description of Artificial Sequence: Synthetic oligonucleotide
ucuucaagacucaaggaua

SEQ ID NO: 1404176 - RNA, 19 nt, Artificial Sequence
  Description of Artificial Sequence: Synthetic oligonucleotide
aagugugcguauagcaucc

SEQ ID NO: 1404177 - RNA, 19 nt, Artificial Sequence
  Description of Artificial Sequence: Synthetic oligonucleotide
aguguauagauaguuaaga

SEQ ID NO: 1404178 - RNA, 19 nt, Artificial Sequence
  Description of Artificial Sequence: Synthetic oligonucleotide
acuuaguguaaaguaaauc

SEQ ID NO: 1404179 - RNA, 19 nt, Artificial Sequence
  Description of Artificial Sequence: Synthetic oligonucleotide
gaaugaggacauuuuauga

SEQ ID NO: 1404180 - RNA, 19 nt, Artificial Sequence
  Description of Artificial Sequence: Synthetic oligonucleotide
ucuccuagaguaauuacua

SEQ ID NO: 1404181 - RNA, 19 nt, Artificial Sequence
  Description of Artificial Sequence: Synthetic oligonucleotide
uuacaacaaauaaagugua

SEQ ID NO: 1404182 - RNA, 19 nt, Artificial Sequence
  Description of Artificial Sequence: Synthetic oligonucleotide
aacccuuuccuuuaaguuu

SEQ ID NO: 1404183 - RNA, 19 nt, Artificial Sequence
  Description of Artificial Sequence: Synthetic oligonucleotide
uuugagggguacaaagaca

SEQ ID NO: 1404184 - RNA, 19 nt, Artificial Sequence
  Description of Artificial Sequence: Synthetic oligonucleotide
aaaggacuaggauuuuagu

SEQ ID NO: 1404185 - RNA, 19 nt, Artificial Sequence
  Description of Artificial Sequence: Synthetic oligonucleotide
gaaaguucccaacgaauac

SEQ ID NO: 1404186 - RNA, 19 nt, Artificial Sequence
  Description of Artificial Sequence: Synthetic oligonucleotide
ugugcguauagcauccucu

SEQ ID NO: 1404187 - RNA, 19 nt, Artificial Sequence
  Description of Artificial Sequence: Synthetic oligonucleotide
cuagaguaauuacuaaaug

SEQ ID NO: 1404188 - RNA, 19 nt, Artificial Sequence
  Description of Artificial Sequence: Synthetic oligonucleotide
uccguaaauguccuucacc

SEQ ID NO: 1404189 - RNA, 19 nt, Artificial Sequence
  Description of Artificial Sequence: Synthetic oligonucleotide
ucucaaaggaggcuguuuc

SEQ ID NO: 1404190 - RNA, 19 nt, Artificial Sequence
  Description of Artificial Sequence: Synthetic oligonucleotide
ucuacugcgcaucagucau

SEQ ID NO: 1404191 - RNA, 19 nt, Artificial Sequence
  Description of Artificial Sequence: Synthetic oligonucleotide
augugugccacuuucauua

SEQ ID NO: 1404192 - RNA, 19 nt, Artificial Sequence
  Description of Artificial Sequence: Synthetic oligonucleotide
ucguucauagucuccuccg

SEQ ID NO: 1404193 - RNA, 19 nt, Artificial Sequence
  Description of Artificial Sequence: Synthetic oligonucleotide
agaguaauuacuaaaugaa

SEQ ID NO: 1404194 - RNA, 19 nt, Artificial Sequence
  Description of Artificial Sequence: Synthetic oligonucleotide
aaucaugaaacgucaugaa

SEQ ID NO: 1404195 - RNA, 19 nt, Artificial Sequence
  Description of Artificial Sequence: Synthetic oligonucleotide
acagcguuuuccuuucagg

SEQ ID NO: 1404196 - RNA, 19 nt, Artificial Sequence
  Description of Artificial Sequence: Synthetic oligonucleotide
acauuauagcuuugagggg

SEQ ID NO: 1404197 - RNA, 19 nt, Artificial Sequence
  Description of Artificial Sequence: Synthetic oligonucleotide
augaggacauuuuaugaca

SEQ ID NO: 1404198 - RNA, 19 nt, Artificial Sequence
  Description of Artificial Sequence: Synthetic oligonucleotide
uucccaacgaauacaacuc

SEQ ID NO: 1404199 - RNA, 19 nt, Artificial Sequence
  Description of Artificial Sequence: Synthetic oligonucleotide
aacagcguuuuccuuucag

SEQ ID NO: 1404200 - RNA, 19 nt, Artificial Sequence
  Description of Artificial Sequence: Synthetic oligonucleotide
ucaucuacugcgcaucagu

SEQ ID NO: 1404201 - RNA, 19 nt, Artificial Sequence
  Description of Artificial Sequence: Synthetic oligonucleotide
uauggaaaugaaagguggu

SEQ ID NO: 1404202 - RNA, 19 nt, Artificial Sequence
  Description of Artificial Sequence: Synthetic oligonucleotide
ucccaacgaauacaacucg

SEQ ID NO: 1404203 - RNA, 19 nt, Artificial Sequence
  Description of Artificial Sequence: Synthetic oligonucleotide
aaaguucccaacgaauaca

SEQ ID NO: 1404204 - RNA, 19 nt, Artificial Sequence
  Description of Artificial Sequence: Synthetic oligonucleotide
ucaguaaaccccagaagaa

SEQ ID NO: 1404205 - RNA, 19 nt, Artificial Sequence
  Description of Artificial Sequence: Synthetic oligonucleotide
aaguguauagauaguuaag

SEQ ID NO: 1404206 - RNA, 19 nt, Artificial Sequence
  Description of Artificial Sequence: Synthetic oligonucleotide
uucuccguucucaaaggag

SEQ ID NO: 1404207 - RNA, 19 nt, Artificial Sequence
  Description of Artificial Sequence: Synthetic oligonucleotide
uuauauuccccauuuugua

SEQ ID NO: 1404208 - RNA, 19 nt, Artificial Sequence
  Description of Artificial Sequence: Synthetic oligonucleotide
aacucggucaauauucuca

SEQ ID NO: 1404209 - RNA, 19 nt, Artificial Sequence
  Description of Artificial Sequence: Synthetic oligonucleotide
aauuaccacacugaucagu

SEQ ID NO: 1404210 - RNA, 19 nt, Artificial Sequence
  Description of Artificial Sequence: Synthetic oligonucleotide
ucaaggauauggaaaugaa

SEQ ID NO: 1404211 - RNA, 19 nt, Artificial Sequence
  Description of Artificial Sequence: Synthetic oligonucleotide
ucagucauuuugaacaguu

SEQ ID NO: 1404212 - RNA, 19 nt, Artificial Sequence
  Description of Artificial Sequence: Synthetic oligonucleotide
acagagacgggcuuuauuu

SEQ ID NO: 1404213 - RNA, 19 nt, Artificial Sequence
  Description of Artificial Sequence: Synthetic oligonucleotide
ugaaagguggugcuccaca

SEQ ID NO: 1404214 - RNA, 19 nt, Artificial Sequence
  Description of Artificial Sequence: Synthetic oligonucleotide
uaauuacuaaaugaaguua

SEQ ID NO: 1404215 - RNA, 19 nt, Artificial Sequence
  Description of Artificial Sequence: Synthetic oligonucleotide
aaucguucauagucuccuc

SEQ ID NO: 1404216 - RNA, 19 nt, Artificial Sequence
  Description of Artificial Sequence: Synthetic oligonucleotide
gaggugaagauugaccaag

SEQ ID NO: 1404217 - RNA, 19 nt, Artificial Sequence
  Description of Artificial Sequence: Synthetic oligonucleotide
guuagaucuuguguuaaag

SEQ ID NO: 1404218 - RNA, 19 nt, Artificial Sequence
  Description of Artificial Sequence: Synthetic oligonucleotide
ugcgcaucagucauuuuga

SEQ ID NO: 1404219 - RNA, 19 nt, Artificial Sequence
  Description of Artificial Sequence: Synthetic oligonucleotide
cauacaauguccaaugugu

SEQ ID NO: 1404220 - RNA, 19 nt, Artificial Sequence
  Description of Artificial Sequence: Synthetic oligonucleotide
aucaacauuggugcugucg

SEQ ID NO: 1404221 - RNA, 19 nt, Artificial Sequence
  Description of Artificial Sequence: Synthetic oligonucleotide
agacgggcuuuauuuaaac

SEQ ID NO: 1404222 - RNA, 19 nt, Artificial Sequence
  Description of Artificial Sequence: Synthetic oligonucleotide
cuuuguguugaguugguca

SEQ ID NO: 1404223 - RNA, 19 nt, Artificial Sequence
  Description of Artificial Sequence: Synthetic oligonucleotide
uuugcauacaauguccaau

SEQ ID NO: 1404224 - RNA, 19 nt, Artificial Sequence
  Description of Artificial Sequence: Synthetic oligonucleotide
acgaauacaacucggucaa

SEQ ID NO: 1404225 - RNA, 19 nt, Artificial Sequence
  Description of Artificial Sequence: Synthetic oligonucleotide
auuuuguaucauaagcuug

SEQ ID NO: 1404226 - RNA, 19 nt, Artificial Sequence
  Description of Artificial Sequence: Synthetic oligonucleotide
guacccuccauccaaaaga

SEQ ID NO: 1404227 - RNA, 19 nt, Artificial Sequence
  Description of Artificial Sequence: Synthetic oligonucleotide
uaucauaagcuugaacccu

SEQ ID NO: 1404228 - RNA, 19 nt, Artificial Sequence
  Description of Artificial Sequence: Synthetic oligonucleotide
uuugcaaggguacccucca

SEQ ID NO: 1404229 - RNA, 19 nt, Artificial Sequence
  Description of Artificial Sequence: Synthetic oligonucleotide
gagacgucaccuucucugg

SEQ ID NO: 1404230 - RNA, 19 nt, Artificial Sequence
  Description of Artificial Sequence: Synthetic oligonucleotide
agcuugaacccuaagagca

SEQ ID NO: 1404231 - RNA, 19 nt, Artificial Sequence
  Description of Artificial Sequence: Synthetic oligonucleotide
cuguauugccuuuccaaag

SEQ ID NO: 1404232 - RNA, 19 nt, Artificial Sequence
  Description of Artificial Sequence: Synthetic oligonucleotide
uauagauaguuaagaggaa

SEQ ID NO: 1404233 - RNA, 19 nt, Artificial Sequence
  Description of Artificial Sequence: Synthetic oligonucleotide
cccauuuuguaucauaagc

SEQ ID NO: 1404234 - RNA, 19 nt, Artificial Sequence
  Description of Artificial Sequence: Synthetic oligonucleotide
gguagagaggugaagauug

SEQ ID NO: 1404235 - RNA, 19 nt, Artificial Sequence
  Description of Artificial Sequence: Synthetic oligonucleotide
aagagcaaaaggacuagga

SEQ ID NO: 1404236 - RNA, 19 nt, Artificial Sequence
  Description of Artificial Sequence: Synthetic oligonucleotide
aagguagagaggugaagau

SEQ ID NO: 1404237 - RNA, 19 nt, Artificial Sequence
  Description of Artificial Sequence: Synthetic oligonucleotide
guccuuuagaccaaaaguc

SEQ ID NO: 1404238 - RNA, 19 nt, Artificial Sequence
  Description of Artificial Sequence: Synthetic oligonucleotide
uaccacacugaucaguaaa

SEQ ID NO: 1404239 - RNA, 19 nt, Artificial Sequence
  Description of Artificial Sequence: Synthetic oligonucleotide
aaauuaccacacugaucag

SEQ ID NO: 1404240 - RNA, 19 nt, Artificial Sequence
  Description of Artificial Sequence: Synthetic oligonucleotide
uuuagaccaaaaguccaug

SEQ ID NO: 1404241 - RNA, 19 nt, Artificial Sequence
  Description of Artificial Sequence: Synthetic oligonucleotide
guuacuguauugccuuucc

SEQ ID NO: 1404242 - RNA, 19 nt, Artificial Sequence
  Description of Artificial Sequence: Synthetic oligonucleotide
ugaaagugacccaucuauc

SEQ ID NO: 1404243 - RNA, 19 nt, Artificial Sequence
  Description of Artificial Sequence: Synthetic oligonucleotide
aguaguucacagugcaaca

SEQ ID NO: 1404244 - RNA, 19 nt, Artificial Sequence
  Description of Artificial Sequence: Synthetic oligonucleotide
uucauagucuccuccguaa

SEQ ID NO: 1404245 - RNA, 19 nt, Artificial Sequence
  Description of Artificial Sequence: Synthetic oligonucleotide
aaugaaagguggugcucca

SEQ ID NO: 1404246 - RNA, 19 nt, Artificial Sequence
  Description of Artificial Sequence: Synthetic oligonucleotide
aagugacccaucuaucuua

SEQ ID NO: 1404247 - RNA, 19 nt, Artificial Sequence
  Description of Artificial Sequence: Synthetic oligonucleotide
uguguuaaagugugcguau

SEQ ID NO: 1404248 - RNA, 19 nt, Artificial Sequence
  Description of Artificial Sequence: Synthetic oligonucleotide
aacaugccagauucgaguu

SEQ ID NO: 1404249 - RNA, 19 nt, Artificial Sequence
  Description of Artificial Sequence: Synthetic oligonucleotide
agauucgaguuucauuuga

SEQ ID NO: 1404250 - RNA, 19 nt, Artificial Sequence
  Description of Artificial Sequence: Synthetic oligonucleotide
cugcgcaucagucauuuug

SEQ ID NO: 1404251 - RNA, 19 nt, Artificial Sequence
  Description of Artificial Sequence: Synthetic oligonucleotide
gacccaucuaucuuaacaa

SEQ ID NO: 1404252 - RNA, 19 nt, Artificial Sequence
  Description of Artificial Sequence: Synthetic oligonucleotide
uuguaucauaagcuugaac

SEQ ID NO: 1404253 - RNA, 19 nt, Artificial Sequence
  Description of Artificial Sequence: Synthetic oligonucleotide
gaugguuagaucuuguguu

SEQ ID NO: 1404254 - RNA, 19 nt, Artificial Sequence
  Description of Artificial Sequence: Synthetic oligonucleotide
aacuuuagauuauguguuu

SEQ ID NO: 1404255 - RNA, 19 nt, Artificial Sequence
  Description of Artificial Sequence: Synthetic oligonucleotide
ucacacuacuuuucaaagu

SEQ ID NO: 1404256 - RNA, 19 nt, Artificial Sequence
  Description of Artificial Sequence: Synthetic oligonucleotide
gagcaaaucaugaaacguc

SEQ ID NO: 1404257 - RNA, 19 nt, Artificial Sequence
  Description of Artificial Sequence: Synthetic oligonucleotide
gacgggcuuuauuuaaacc

SEQ ID NO: 1404258 - RNA, 19 nt, Artificial Sequence
  Description of Artificial Sequence: Synthetic oligonucleotide
gaaagugacccaucuaucu

SEQ ID NO: 1404259 - RNA, 19 nt, Artificial Sequence
  Description of Artificial Sequence: Synthetic oligonucleotide
uguugauucugagaaaguu

SEQ ID NO: 1404260 - RNA, 19 nt, Artificial Sequence
  Description of Artificial Sequence: Synthetic oligonucleotide
agcaaaaggacuaggauuu

SEQ ID NO: 1404261 - RNA, 19 nt, Artificial Sequence
  Description of Artificial Sequence: Synthetic oligonucleotide
uucagcgcacacauccgag

SEQ ID NO: 1404262 - RNA, 19 nt, Artificial Sequence
  Description of Artificial Sequence: Synthetic oligonucleotide
ugaaauugguagguuuggc

SEQ ID NO: 1404263 - RNA, 19 nt, Artificial Sequence
  Description of Artificial Sequence: Synthetic oligonucleotide
ugacaugagcaauuacaac

SEQ ID NO: 1404264 - RNA, 19 nt, Artificial Sequence
  Description of Artificial Sequence: Synthetic oligonucleotide
aacauuggugcugucgccu

SEQ ID NO: 1404265 - RNA, 19 nt, Artificial Sequence
  Description of Artificial Sequence: Synthetic oligonucleotide
acccuaagagcaaaaggac

SEQ ID NO: 1404266 - RNA, 19 nt, Artificial Sequence
  Description of Artificial Sequence: Synthetic oligonucleotide
ggccaaaucguucauaguc

SEQ ID NO: 1404267 - RNA, 19 nt, Artificial Sequence
  Description of Artificial Sequence: Synthetic oligonucleotide
uccaaaagaugguuagauc

SEQ ID NO: 1404268 - RNA, 19 nt, Artificial Sequence
  Description of Artificial Sequence: Synthetic oligonucleotide
augaacagcguuuuccuuu

SEQ ID NO: 1404269 - RNA, 19 nt, Artificial Sequence
  Description of Artificial Sequence: Synthetic oligonucleotide
ugcaacaugccagauucga

SEQ ID NO: 1404270 - RNA, 19 nt, Artificial Sequence
  Description of Artificial Sequence: Synthetic oligonucleotide
accacacugaucaguaaac

SEQ ID NO: 1404271 - RNA, 19 nt, Artificial Sequence
  Description of Artificial Sequence: Synthetic oligonucleotide
guauugccuuuccaaagcc

SEQ ID NO: 1404272 - RNA, 19 nt, Artificial Sequence
  Description of Artificial Sequence: Synthetic oligonucleotide
agguaaaaucuccuagagu

SEQ ID NO: 1404273 - RNA, 19 nt, Artificial Sequence
  Description of Artificial Sequence: Synthetic oligonucleotide
uuugaaagugacccaucua

SEQ ID NO: 1404274 - RNA, 19 nt, Artificial Sequence
  Description of Artificial Sequence: Synthetic oligonucleotide
uuaaugcaugaaauuggua

SEQ ID NO: 1404275 - RNA, 19 nt, Artificial Sequence
  Description of Artificial Sequence: Synthetic oligonucleotide
auuugaaaccaagagcaaa

SEQ ID NO: 1404276 - RNA, 19 nt, Artificial Sequence
  Description of Artificial Sequence: Synthetic oligonucleotide
agacgucaccuucucuggc

SEQ ID NO: 1404277 - RNA, 19 nt, Artificial Sequence
  Description of Artificial Sequence: Synthetic oligonucleotide
ugccaaagcuugaugcuac

SEQ ID NO: 1404278 - RNA, 19 nt, Artificial Sequence
  Description of Artificial Sequence: Synthetic oligonucleotide
uuguguuaaagugugcgua

SEQ ID NO: 1404279 - RNA, 19 nt, Artificial Sequence
  Description of Artificial Sequence: Synthetic oligonucleotide
uguuucaucuacugcgcau

SEQ ID NO: 1404280 - RNA, 19 nt, Artificial Sequence
  Description of Artificial Sequence: Synthetic oligonucleotide
agcaaaucaugaaacguca

SEQ ID NO: 1404281 - RNA, 19 nt, Artificial Sequence
  Description of Artificial Sequence: Synthetic oligonucleotide
accaauguggcacgggcga

SEQ ID NO: 1404282 - RNA, 19 nt, Artificial Sequence
  Description of Artificial Sequence: Synthetic oligonucleotide
uucauauggcauacaggaa

SEQ ID NO: 1404283 - RNA, 19 nt, Artificial Sequence
  Description of Artificial Sequence: Synthetic oligonucleotide
gauugacaugagcaauuac

SEQ ID NO: 1404284 - RNA, 19 nt, Artificial Sequence
  Description of Artificial Sequence: Synthetic oligonucleotide
aguuacuguauugccuuuc

SEQ ID NO: 1404285 - RNA, 19 nt, Artificial Sequence
  Description of Artificial Sequence: Synthetic oligonucleotide
ugcugucgccuuuagcugc

SEQ ID NO: 1404286 - RNA, 19 nt, Artificial Sequence
  Description of Artificial Sequence: Synthetic oligonucleotide
cauucagcgcacacauccg

SEQ ID NO: 1404287 - RNA, 19 nt, Artificial Sequence
  Description of Artificial Sequence: Synthetic oligonucleotide
agugcuuucagcuguccuu

SEQ ID NO: 1404288 - RNA, 19 nt, Artificial Sequence
  Description of Artificial Sequence: Synthetic oligonucleotide
cacauccgagcaauggagc

SEQ ID NO: 1404289 - RNA, 19 nt, Artificial Sequence
  Description of Artificial Sequence: Synthetic oligonucleotide
uucucauucagcgcacaca

SEQ ID NO: 1404290 - RNA, 19 nt, Artificial Sequence
  Description of Artificial Sequence: Synthetic oligonucleotide
caacgaauacaacucgguc

SEQ ID NO: 1404291 - RNA, 19 nt, Artificial Sequence
  Description of Artificial Sequence: Synthetic oligonucleotide
aucuccuagaguaauuacu

SEQ ID NO: 1404292 - RNA, 19 nt, Artificial Sequence
  Description of Artificial Sequence: Synthetic oligonucleotide
ugcgagcaacuucauugag

SEQ ID NO: 1404293 - RNA, 19 nt, Artificial Sequence
  Description of Artificial Sequence: Synthetic oligonucleotide
uaguuaagaggaagaucac

SEQ ID NO: 1404294 - RNA, 19 nt, Artificial Sequence
  Description of Artificial Sequence: Synthetic oligonucleotide
caucacacuacuuuucaaa

SEQ ID NO: 1404295 - RNA, 19 nt, Artificial Sequence
  Description of Artificial Sequence: Synthetic oligonucleotide
ugcaaggguacccuccauc

SEQ ID NO: 1404296 - RNA, 19 nt, Artificial Sequence
  Description of Artificial Sequence: Synthetic oligonucleotide
aacagagacgggcuuuauu

SEQ ID NO: 1404297 - RNA, 19 nt, Artificial Sequence
  Description of Artificial Sequence: Synthetic oligonucleotide
uaacccucauguuccaaaa

SEQ ID NO: 1404298 - RNA, 19 nt, Artificial Sequence
  Description of Artificial Sequence: Synthetic oligonucleotide
gcauacaauguccaaugug

SEQ ID NO: 1404299 - RNA, 19 nt, Artificial Sequence
  Description of Artificial Sequence: Synthetic oligonucleotide
caagacucaaggauaugga

SEQ ID NO: 1404300 - RNA, 19 nt, Artificial Sequence
  Description of Artificial Sequence: Synthetic oligonucleotide
acucggucaauauucucau

SEQ ID NO: 1404301 - RNA, 19 nt, Artificial Sequence
  Description of Artificial Sequence: Synthetic oligonucleotide
caagguagagaggugaaga

SEQ ID NO: 1404302 - RNA, 19 nt, Artificial Sequence
  Description of Artificial Sequence: Synthetic oligonucleotide
cuccguucucaaaggaggc

SEQ ID NO: 1404303 - RNA, 19 nt, Artificial Sequence
  Description of Artificial Sequence: Synthetic oligonucleotide
caucuacugcgcaucaguc

SEQ ID NO: 1404304 - RNA, 19 nt, Artificial Sequence
  Description of Artificial Sequence: Synthetic oligonucleotide
ggugcugucgccuuuagcu

SEQ ID NO: 1404305 - RNA, 19 nt, Artificial Sequence
  Description of Artificial Sequence: Synthetic oligonucleotide
auucagcgcacacauccga

SEQ ID NO: 1404306 - RNA, 19 nt, Artificial Sequence
  Description of Artificial Sequence: Synthetic oligonucleotide
gaccaauguggcacgggcg

SEQ ID NO: 1404307 - RNA, 19 nt, Artificial Sequence
  Description of Artificial Sequence: Synthetic oligonucleotide
auuaccacacugaucagua

SEQ ID NO: 1404308 - RNA, 19 nt, Artificial Sequence
  Description of Artificial Sequence: Synthetic oligonucleotide
auacaauguccaaugugug

SEQ ID NO: 1404309 - RNA, 19 nt, Artificial Sequence
  Description of Artificial Sequence: Synthetic oligonucleotide
gaacuuuagauuauguguu

SEQ ID NO: 1404310 - RNA, 19 nt, Artificial Sequence
  Description of Artificial Sequence: Synthetic oligonucleotide
ccaaaagaugguuagaucu

SEQ ID NO: 1404311 - RNA, 19 nt, Artificial Sequence
  Description of Artificial Sequence: Synthetic oligonucleotide
aguccauggcauaugcgag

SEQ ID NO: 1404312 - RNA, 19 nt, Artificial Sequence
  Description of Artificial Sequence: Synthetic oligonucleotide
aaaaucuccuagaguaauu

SEQ ID NO: 1404313 - RNA, 19 nt, Artificial Sequence
  Description of Artificial Sequence: Synthetic oligonucleotide
uugaacccuaagagcaaaa

SEQ ID NO: 1404314 - RNA, 19 nt, Artificial Sequence
  Description of Artificial Sequence: Synthetic oligonucleotide
caccuugauugacaugagc

SEQ ID NO: 1404315 - RNA, 19 nt, Artificial Sequence
  Description of Artificial Sequence: Synthetic oligonucleotide
auguugccaaagcuugaug

SEQ ID NO: 1404316 - RNA, 19 nt, Artificial Sequence
  Description of Artificial Sequence: Synthetic oligonucleotide
augguuagaucuuguguua

SEQ ID NO: 1404317 - RNA, 19 nt, Artificial Sequence
  Description of Artificial Sequence: Synthetic oligonucleotide
aggaaugaggacauuuuau

SEQ ID NO: 1404318 - RNA, 19 nt, Artificial Sequence
  Description of Artificial Sequence: Synthetic oligonucleotide
gcauacaggaaugaggaca

SEQ ID NO: 1404319 - RNA, 19 nt, Artificial Sequence
  Description of Artificial Sequence: Synthetic oligonucleotide
gaaagguggugcuccacaa

SEQ ID NO: 1404320 - RNA, 19 nt, Artificial Sequence
  Description of Artificial Sequence: Synthetic oligonucleotide
ugauugacaugagcaauua

SEQ ID NO: 1404321 - RNA, 19 nt, Artificial Sequence
  Description of Artificial Sequence: Synthetic oligonucleotide
caacauuggugcugucgcc

SEQ ID NO: 1404322 - RNA, 19 nt, Artificial Sequence
  Description of Artificial Sequence: Synthetic oligonucleotide
cacugaucaguaaacccca

SEQ ID NO: 1404323 - RNA, 19 nt, Artificial Sequence
  Description of Artificial Sequence: Synthetic oligonucleotide
gacgucaccuucucuggca

SEQ ID NO: 1404324 - RNA, 19 nt, Artificial Sequence
  Description of Artificial Sequence: Synthetic oligonucleotide
aggaguuacuguauugccu

SEQ ID NO: 1404325 - RNA, 19 nt, Artificial Sequence
  Description of Artificial Sequence: Synthetic oligonucleotide
cauuauagcuuugaggggu

SEQ ID NO: 1404326 - RNA, 19 nt, Artificial Sequence
  Description of Artificial Sequence: Synthetic oligonucleotide
cagauucgaguuucauuug

SEQ ID NO: 1404327 - RNA, 19 nt, Artificial Sequence
  Description of Artificial Sequence: Synthetic oligonucleotide
acgggcgaggucuucuuug

SEQ ID NO: 1404328 - RNA, 19 nt, Artificial Sequence
  Description of Artificial Sequence: Synthetic oligonucleotide
ggauauggaaaugaaaggu

SEQ ID NO: 1404329 - RNA, 19 nt, Artificial Sequence
  Description of Artificial Sequence: Synthetic oligonucleotide
aaaguaguucacagugcaa

SEQ ID NO: 1404330 - RNA, 19 nt, Artificial Sequence
  Description of Artificial Sequence: Synthetic oligonucleotide
aggugaagauugaccaagg

SEQ ID NO: 1404331 - RNA, 19 nt, Artificial Sequence
  Description of Artificial Sequence: Synthetic oligonucleotide
gaggacauuuuaugacaga

SEQ ID NO: 1404332 - RNA, 19 nt, Artificial Sequence
  Description of Artificial Sequence: Synthetic oligonucleotide
uucaucuacugcgcaucag

SEQ ID NO: 1404333 - RNA, 19 nt, Artificial Sequence
  Description of Artificial Sequence: Synthetic oligonucleotide
cagucauuuugaacaguuc

SEQ ID NO: 1404334 - RNA, 19 nt, Artificial Sequence
  Description of Artificial Sequence: Synthetic oligonucleotide
acccaucuaucuuaacaaa

SEQ ID NO: 1404335 - RNA, 19 nt, Artificial Sequence
  Description of Artificial Sequence: Synthetic oligonucleotide
ccguaaauguccuucacca

SEQ ID NO: 1404336 - RNA, 19 nt, Artificial Sequence
  Description of Artificial Sequence: Synthetic oligonucleotide
acuuuagauuauguguuua

SEQ ID NO: 1404337 - RNA, 19 nt, Artificial Sequence
  Description of Artificial Sequence: Synthetic oligonucleotide
augaaagguggugcuccac

SEQ ID NO: 1404338 - RNA, 19 nt, Artificial Sequence
  Description of Artificial Sequence: Synthetic oligonucleotide
ugguuagaucuuguguuaa

SEQ ID NO: 1404339 - RNA, 19 nt, Artificial Sequence
  Description of Artificial Sequence: Synthetic oligonucleotide
cccaacgaauacaacucgg

SEQ ID NO: 1404340 - RNA, 19 nt, Artificial Sequence
  Description of Artificial Sequence: Synthetic oligonucleotide
gauucgaguuucauuugaa

SEQ ID NO: 1404341 - RNA, 19 nt, Artificial Sequence
  Description of Artificial Sequence: Synthetic oligonucleotide
uucaagacucaaggauaug

SEQ ID NO: 1404342 - RNA, 19 nt, Artificial Sequence
  Description of Artificial Sequence: Synthetic oligonucleotide
gugcugucgccuuuagcug

SEQ ID NO: 1404343 - RNA, 19 nt, Artificial Sequence
  Description of Artificial Sequence: Synthetic oligonucleotide
aggccucucuuaaacauca

SEQ ID NO: 1404344 - RNA, 19 nt, Artificial Sequence
  Description of Artificial Sequence: Synthetic oligonucleotide
uauucucauucagcgcaca

SEQ ID NO: 1404345 - RNA, 19 nt, Artificial Sequence
  Description of Artificial Sequence: Synthetic oligonucleotide
guugccaaagcuugaugcu

SEQ ID NO: 1404346 - RNA, 19 nt, Artificial Sequence
  Description of Artificial Sequence: Synthetic oligonucleotide
aagauugaccaaggaguua

SEQ ID NO: 1404347 - RNA, 19 nt, Artificial Sequence
  Description of Artificial Sequence: Synthetic oligonucleotide
ugcguauagcauccucuuu

SEQ ID NO: 1404348 - RNA, 19 nt, Artificial Sequence
  Description of Artificial Sequence: Synthetic oligonucleotide
auuuuaugacagacuauuu

SEQ ID NO: 1404349 - RNA, 19 nt, Artificial Sequence
  Description of Artificial Sequence: Synthetic oligonucleotide
uggugcugucgccuuuagc

SEQ ID NO: 1404350 - RNA, 19 nt, Artificial Sequence
  Description of Artificial Sequence: Synthetic oligonucleotide
ggcgaggucuucuuugcug

SEQ ID NO: 1404351 - RNA, 19 nt, Artificial Sequence
  Description of Artificial Sequence: Synthetic oligonucleotide
acaacucggucaauauucu

SEQ ID NO: 1404352 - RNA, 19 nt, Artificial Sequence
  Description of Artificial Sequence: Synthetic oligonucleotide
uuauagcuuugagggguac

SEQ ID NO: 1404353 - RNA, 19 nt, Artificial Sequence
  Description of Artificial Sequence: Synthetic oligonucleotide
ccuaagagcaaaaggacua

SEQ ID NO: 1404354 - RNA, 19 nt, Artificial Sequence
  Description of Artificial Sequence: Synthetic oligonucleotide
guucuccguucucaaagga

SEQ ID NO: 1404355 - RNA, 19 nt, Artificial Sequence
  Description of Artificial Sequence: Synthetic oligonucleotide
cuccguaaauguccuucac

SEQ ID NO: 1404356 - RNA, 19 nt, Artificial Sequence
  Description of Artificial Sequence: Synthetic oligonucleotide
caacucggucaauauucuc

SEQ ID NO: 1404357 - RNA, 19 nt, Artificial Sequence
  Description of Artificial Sequence: Synthetic oligonucleotide
ccuuuagaccaaaagucca

SEQ ID NO: 1404358 - RNA, 19 nt, Artificial Sequence
  Description of Artificial Sequence: Synthetic oligonucleotide
cuuuagaccaaaaguccau

SEQ ID NO: 1404359 - RNA, 19 nt, Artificial Sequence
  Description of Artificial Sequence: Synthetic oligonucleotide
gaagauugaccaaggaguu

SEQ ID NO: 1404360 - RNA, 19 nt, Artificial Sequence
  Description of Artificial Sequence: Synthetic oligonucleotide
uacugcgcaucagucauuu

SEQ ID NO: 1404361 - RNA, 19 nt, Artificial Sequence
  Description of Artificial Sequence: Synthetic oligonucleotide
caaagccuuugcaagggua

SEQ ID NO: 1404362 - RNA, 19 nt, Artificial Sequence
  Description of Artificial Sequence: Synthetic oligonucleotide
uccuuucaggccucucuua

SEQ ID NO: 1404363 - RNA, 19 nt, Artificial Sequence
  Description of Artificial Sequence: Synthetic oligonucleotide
aucauaagcuugaacccua

SEQ ID NO: 1404364 - RNA, 19 nt, Artificial Sequence
  Description of Artificial Sequence: Synthetic oligonucleotide
ccaaaucguucauagucuc

SEQ ID NO: 1404365 - RNA, 19 nt, Artificial Sequence
  Description of Artificial Sequence: Synthetic oligonucleotide
ggugaagauugaccaagga

SEQ ID NO: 1404366 - RNA, 19 nt, Artificial Sequence
  Description of Artificial Sequence: Synthetic oligonucleotide
aucagucauuuugaacagu

SEQ ID NO: 1404367 - RNA, 19 nt, Artificial Sequence
  Description of Artificial Sequence: Synthetic oligonucleotide
gugaccaauguggcacggg

SEQ ID NO: 1404368 - RNA, 19 nt, Artificial Sequence
  Description of Artificial Sequence: Synthetic oligonucleotide
auguugauucugagaaagu

SEQ ID NO: 1404369 - RNA, 19 nt, Artificial Sequence
  Description of Artificial Sequence: Synthetic oligonucleotide
auggcauaugcgagcaacu

SEQ ID NO: 1404370 - RNA, 19 nt, Artificial Sequence
  Description of Artificial Sequence: Synthetic oligonucleotide
ccagauucgaguuucauuu

SEQ ID NO: 1404371 - RNA, 19 nt, Artificial Sequence
  Description of Artificial Sequence: Synthetic oligonucleotide
ccaacagggccccaacagc

SEQ ID NO: 1404372 - RNA, 19 nt, Artificial Sequence
  Description of Artificial Sequence: Synthetic oligonucleotide
cuccuagaguaauuacuaa

SEQ ID NO: 1404373 - RNA, 19 nt, Artificial Sequence
  Description of Artificial Sequence: Synthetic oligonucleotide
cagacuauuuuaacuuagu

SEQ ID NO: 1404374 - RNA, 19 nt, Artificial Sequence
  Description of Artificial Sequence: Synthetic oligonucleotide
acaugccagauucgaguuu

SEQ ID NO: 1404375 - RNA, 19 nt, Artificial Sequence
  Description of Artificial Sequence: Synthetic oligonucleotide
ggaguuacuguauugccuu

SEQ ID NO: 1404376 - RNA, 19 nt, Artificial Sequence
  Description of Artificial Sequence: Synthetic oligonucleotide
aggagacgucaccuucucu

SEQ ID NO: 1404377 - RNA, 19 nt, Artificial Sequence
  Description of Artificial Sequence: Synthetic oligonucleotide
cacaagguagagaggugaa

SEQ ID NO: 1404378 - RNA, 19 nt, Artificial Sequence
  Description of Artificial Sequence: Synthetic oligonucleotide
caacagggccccaacagcu

SEQ ID NO: 1404379 - RNA, 19 nt, Artificial Sequence
  Description of Artificial Sequence: Synthetic oligonucleotide
acauuggugcugucgccuu

SEQ ID NO: 1404380 - RNA, 19 nt, Artificial Sequence
  Description of Artificial Sequence: Synthetic oligonucleotide
gugugcguauagcauccuc

SEQ ID NO: 1404381 - RNA, 19 nt, Artificial Sequence
  Description of Artificial Sequence: Synthetic oligonucleotide
caguuugcugccauucaua

SEQ ID NO: 1404382 - RNA, 19 nt, Artificial Sequence
  Description of Artificial Sequence: Synthetic oligonucleotide
gagacgggcuuuauuuaaa

SEQ ID NO: 1404383 - RNA, 19 nt, Artificial Sequence
  Description of Artificial Sequence: Synthetic oligonucleotide
cuuucaggccucucuuaaa

SEQ ID NO: 1404384 - RNA, 19 nt, Artificial Sequence
  Description of Artificial Sequence: Synthetic oligonucleotide
cguauagcauccucuuuug

SEQ ID NO: 1404385 - RNA, 19 nt, Artificial Sequence
  Description of Artificial Sequence: Synthetic oligonucleotide
aguuccaacagggccccaa

SEQ ID NO: 1404386 - RNA, 19 nt, Artificial Sequence
  Description of Artificial Sequence: Synthetic oligonucleotide
gugcaacaugccagauucg

SEQ ID NO: 1404387 - RNA, 19 nt, Artificial Sequence
  Description of Artificial Sequence: Synthetic oligonucleotide
ucccaacagagacgggcuu

SEQ ID NO: 1404388 - RNA, 19 nt, Artificial Sequence
  Description of Artificial Sequence: Synthetic oligonucleotide
agcgcacacauccgagcaa

SEQ ID NO: 1404389 - RNA, 19 nt, Artificial Sequence
  Description of Artificial Sequence: Synthetic oligonucleotide
ccacacugaucaguaaacc

SEQ ID NO: 1404390 - RNA, 19 nt, Artificial Sequence
  Description of Artificial Sequence: Synthetic oligonucleotide
cguaaauguccuucaccag

SEQ ID NO: 1404391 - RNA, 19 nt, Artificial Sequence
  Description of Artificial Sequence: Synthetic oligonucleotide
gcguuuuccuuucaggccu

SEQ ID NO: 1404392 - RNA, 19 nt, Artificial Sequence
  Description of Artificial Sequence: Synthetic oligonucleotide
ugccagauucgaguuucau

SEQ ID NO: 1404393 - RNA, 19 nt, Artificial Sequence
  Description of Artificial Sequence: Synthetic oligonucleotide
cagagacgggcuuuauuua

SEQ ID NO: 1404394 - RNA, 19 nt, Artificial Sequence
  Description of Artificial Sequence: Synthetic oligonucleotide
gccaauguuguuggugaug

SEQ ID NO: 1404395 - RNA, 19 nt, Artificial Sequence
  Description of Artificial Sequence: Synthetic oligonucleotide
uaucaacauuggugcuguc

SEQ ID NO: 1404396 - RNA, 19 nt, Artificial Sequence
  Description of Artificial Sequence: Synthetic oligonucleotide
guuuaacuuuguguugagu

SEQ ID NO: 1404397 - RNA, 19 nt, Artificial Sequence
  Description of Artificial Sequence: Synthetic oligonucleotide
gaacagcguuuuccuuuca

SEQ ID NO: 1404398 - RNA, 19 nt, Artificial Sequence
  Description of Artificial Sequence: Synthetic oligonucleotide
cgcaucagucauuuugaac

SEQ ID NO: 1404399 - RNA, 19 nt, Artificial Sequence
  Description of Artificial Sequence: Synthetic oligonucleotide
guguuaaagugugcguaua

SEQ ID NO: 1404400 - RNA, 19 nt, Artificial Sequence
  Description of Artificial Sequence: Synthetic oligonucleotide
gugacccaucuaucuuaac

SEQ ID NO: 1404401 - RNA, 19 nt, Artificial Sequence
  Description of Artificial Sequence: Synthetic oligonucleotide
gcguauagcauccucuuuu

SEQ ID NO: 1404402 - RNA, 19 nt, Artificial Sequence
  Description of Artificial Sequence: Synthetic oligonucleotide
guuggugauggugaccaau

SEQ ID NO: 1404403 - RNA, 19 nt, Artificial Sequence
  Description of Artificial Sequence: Synthetic oligonucleotide
agugugcguauagcauccu

SEQ ID NO: 1404404 - RNA, 19 nt, Artificial Sequence
  Description of Artificial Sequence: Synthetic oligonucleotide
acagugcaacaugccagau

SEQ ID NO: 1404405 - RNA, 19 nt, Artificial Sequence
  Description of Artificial Sequence: Synthetic oligonucleotide
gccaaaucguucauagucu

SEQ ID NO: 1404406 - RNA, 19 nt, Artificial Sequence
  Description of Artificial Sequence: Synthetic oligonucleotide
ccacaagguagagagguga

SEQ ID NO: 1404407 - RNA, 19 nt, Artificial Sequence
  Description of Artificial Sequence: Synthetic oligonucleotide
gauugaccaaggaguuacu

SEQ ID NO: 1404408 - RNA, 19 nt, Artificial Sequence
  Description of Artificial Sequence: Synthetic oligonucleotide
gugcguauagcauccucuu

SEQ ID NO: 1404409 - RNA, 19 nt, Artificial Sequence
  Description of Artificial Sequence: Synthetic oligonucleotide
ccaacgaauacaacucggu

SEQ ID NO: 1404410 - RNA, 19 nt, Artificial Sequence
  Description of Artificial Sequence: Synthetic oligonucleotide
cccuaagagcaaaaggacu

SEQ ID NO: 1404411 - RNA, 19 nt, Artificial Sequence
  Description of Artificial Sequence: Synthetic oligonucleotide
gcuuaucaacauuggugcu

SEQ ID NO: 1404412 - RNA, 19 nt, Artificial Sequence
  Description of Artificial Sequence: Synthetic oligonucleotide
ccuuucaggccucucuuaa

SEQ ID NO: 1404413 - RNA, 19 nt, Artificial Sequence
  Description of Artificial Sequence: Synthetic oligonucleotide
gaguuacuguauugccuuu

SEQ ID NO: 1404414 - RNA, 19 nt, Artificial Sequence
  Description of Artificial Sequence: Synthetic oligonucleotide
gccaaagcuugaugcuaca

SEQ ID NO: 1404415 - RNA, 19 nt, Artificial Sequence
  Description of Artificial Sequence: Synthetic oligonucleotide
gcaccuugauugacaugag

SEQ ID NO: 1404416 - RNA, 19 nt, Artificial Sequence
  Description of Artificial Sequence: Synthetic oligonucleotide
cuuucaguuugcugccauu

SEQ ID NO: 1404417 - RNA, 19 nt, Artificial Sequence
  Description of Artificial Sequence: Synthetic oligonucleotide
cagugcuuucagcuguccu

SEQ ID NO: 1404418 - RNA, 19 nt, Artificial Sequence
  Description of Artificial Sequence: Synthetic oligonucleotide
cauugagaccauguugauu

SEQ ID NO: 1404419 - RNA, 19 nt, Artificial Sequence
  Description of Artificial Sequence: Synthetic oligonucleotide
augccagauucgaguuuca

SEQ ID NO: 1404420 - RNA, 19 nt, Artificial Sequence
  Description of Artificial Sequence: Synthetic oligonucleotide
cgggcgaggucuucuuugc

SEQ ID NO: 1404421 - RNA, 19 nt, Artificial Sequence
  Description of Artificial Sequence: Synthetic oligonucleotide
cgagcaauggagccaaugu

SEQ ID NO: 1404422 - RNA, 19 nt, Artificial Sequence
  Description of Artificial Sequence: Synthetic oligonucleotide
ccuccauccaaaagauggu

SEQ ID NO: 1404423 - RNA, 19 nt, Artificial Sequence
  Description of Artificial Sequence: Synthetic oligonucleotide
ccuugaaggccaaaucguu

SEQ ID NO: 1404424 - RNA, 19 nt, Artificial Sequence
  Description of Artificial Sequence: Synthetic oligonucleotide
gcaaaucaugaaacgucau

SEQ ID NO: 1404425 - RNA, 19 nt, Artificial Sequence
  Description of Artificial Sequence: Synthetic oligonucleotide
cguuuuccuuucaggccuc

SEQ ID NO: 1404426 - RNA, 19 nt, Artificial Sequence
  Description of Artificial Sequence: Synthetic oligonucleotide
gcuugaugcuacagcagau

SEQ ID NO: 1404427 - RNA, 19 nt, Artificial Sequence
  Description of Artificial Sequence: Synthetic oligonucleotide
ggccucucuuaaacaucac

SEQ ID NO: 1404428 - RNA, 19 nt, Artificial Sequence
  Description of Artificial Sequence: Synthetic oligonucleotide
cucggucaauauucucauu

SEQ ID NO: 1404429 - RNA, 19 nt, Artificial Sequence
  Description of Artificial Sequence: Synthetic oligonucleotide
uggcacgggcgaggucuuc

SEQ ID NO: 1404430 - RNA, 19 nt, Artificial Sequence
  Description of Artificial Sequence: Synthetic oligonucleotide
cauuggugcugucgccuuu

SEQ ID NO: 1404431 - RNA, 19 nt, Artificial Sequence
  Description of Artificial Sequence: Synthetic oligonucleotide
cuacugcgcaucagucauu

SEQ ID NO: 1404432 - RNA, 19 nt, Artificial Sequence
  Description of Artificial Sequence: Synthetic oligonucleotide
gcgcacacauccgagcaau

SEQ ID NO: 1404433 - RNA, 19 nt, Artificial Sequence
  Description of Artificial Sequence: Synthetic oligonucleotide
gggcgaggucuucuuugcu

SEQ ID NO: 1404434 - RNA, 19 nt, Artificial Sequence
  Description of Artificial Sequence: Synthetic oligonucleotide
ggcacgggcgaggucuucu

SEQ ID NO: 1404435 - RNA, 19 nt, Artificial Sequence
  Description of Artificial Sequence: Synthetic oligonucleotide
ccauuagcaucaacuucuu

SEQ ID NO: 1404436 - RNA, 19 nt, Artificial Sequence
  Description of Artificial Sequence: Synthetic oligonucleotide
ccacuuucauuaacccuuu

SEQ ID NO: 1404437 - RNA, 19 nt, Artificial Sequence
  Description of Artificial Sequence: Synthetic oligonucleotide
cacgggcgaggucuucuuu

SEQ ID NO: 1404438 - RNA, 19 nt, Artificial Sequence
  Description of Artificial Sequence: Synthetic oligonucleotide
cccaaggagacgucaccuu

SEQ ID NO: 1404439 - RNA, 19 nt, Artificial Sequence
  Description of Artificial Sequence: Synthetic oligonucleotide
gcacgggcgaggucuucuu

SEQ ID NO: 1404440 - RNA, 19 nt, Artificial Sequence
  Description of Artificial Sequence: Synthetic oligonucleotide
cgaauacaacucggucaau

SEQ ID NO: 1404441 - RNA, 19 nt, Artificial Sequence
  Description of Artificial Sequence: Synthetic oligonucleotide
auuaucacuucuuaaagag

SEQ ID NO: 1404442 - RNA, 19 nt, Artificial Sequence
  Description of Artificial Sequence: Synthetic oligonucleotide
uuuaauucuuguaaggcug

SEQ ID NO: 1404443 - RNA, 19 nt, Artificial Sequence
  Description of Artificial Sequence: Synthetic oligonucleotide
uguauucaaauaaaccccg

SEQ ID NO: 1404444 - RNA, 19 nt, Artificial Sequence
  Description of Artificial Sequence: Synthetic oligonucleotide
uguacaaacgugccgaccg

SEQ ID NO: 1404445 - RNA, 19 nt, Artificial Sequence
  Description of Artificial Sequence: Synthetic oligonucleotide
ucugagaguaauuucuggg

SEQ ID NO: 1404446 - RNA, 19 nt, Artificial Sequence
  Description of Artificial Sequence: Synthetic oligonucleotide
uucaaagauucaaucgugg

SEQ ID NO: 1404447 - RNA, 19 nt, Artificial Sequence
  Description of Artificial Sequence: Synthetic oligonucleotide
auucuuguaaggcuguaac

SEQ ID NO: 1404448 - RNA, 19 nt, Artificial Sequence
  Description of Artificial Sequence: Synthetic oligonucleotide
cuguauucaaauaaacccc

SEQ ID NO: 1404449 - RNA, 19 nt, Artificial Sequence
  Description of Artificial Sequence: Synthetic oligonucleotide
uucguacuucaauagaagg

SEQ ID NO: 1404450 - RNA, 19 nt, Artificial Sequence
  Description of Artificial Sequence: Synthetic oligonucleotide
gaagcuucaggccagcucc

SEQ ID NO: 1404451 - RNA, 19 nt, Artificial Sequence
  Description of Artificial Sequence: Synthetic oligonucleotide
uauucaaauaaaccccgag

SEQ ID NO: 1404452 - RNA, 19 nt, Artificial Sequence
  Description of Artificial Sequence: Synthetic oligonucleotide
ugcaagagaaauuucauua

SEQ ID NO: 1404453 - RNA, 19 nt, Artificial Sequence
  Description of Artificial Sequence: Synthetic oligonucleotide
caaauaaaccccgaggugc

SEQ ID NO: 1404454 - RNA, 19 nt, Artificial Sequence
  Description of Artificial Sequence: Synthetic oligonucleotide
uauuaucacuucuuaaaga

SEQ ID NO: 1404455 - RNA, 19 nt, Artificial Sequence
  Description of Artificial Sequence: Synthetic oligonucleotide
uccgacuaccuucagauga

SEQ ID NO: 1404456 - RNA, 19 nt, Artificial Sequence
  Description of Artificial Sequence: Synthetic oligonucleotide
auuuucaaccaguagguga

SEQ ID NO: 1404457 - RNA, 19 nt, Artificial Sequence
  Description of Artificial Sequence: Synthetic oligonucleotide
agcugaaaggcucagauaa

SEQ ID NO: 1404458 - RNA, 19 nt, Artificial Sequence
  Description of Artificial Sequence: Synthetic oligonucleotide
guaauugaguuucaguuac

SEQ ID NO: 1404459 - RNA, 19 nt, Artificial Sequence
  Description of Artificial Sequence: Synthetic oligonucleotide
uaaaccuuuccuccgagcu

SEQ ID NO: 1404460 - RNA, 19 nt, Artificial Sequence
  Description of Artificial Sequence: Synthetic oligonucleotide
uuuaugucuucuacaacca

SEQ ID NO: 1404461 - RNA, 19 nt, Artificial Sequence
  Description of Artificial Sequence: Synthetic oligonucleotide
ggugauggcaacuggaugg

SEQ ID NO: 1404462 - RNA, 19 nt, Artificial Sequence
  Description of Artificial Sequence: Synthetic oligonucleotide
ugagaguaauuucugggca

SEQ ID NO: 1404463 - RNA, 19 nt, Artificial Sequence
  Description of Artificial Sequence: Synthetic oligonucleotide
uuuaucucuguuuauuauc

SEQ ID NO: 1404464 - RNA, 19 nt, Artificial Sequence
  Description of Artificial Sequence: Synthetic oligonucleotide
ucaauagaaggucuaucca

SEQ ID NO: 1404465 - RNA, 19 nt, Artificial Sequence
  Description of Artificial Sequence: Synthetic oligonucleotide
ucaaagauucaaucguggc

SEQ ID NO: 1404466 - RNA, 19 nt, Artificial Sequence
  Description of Artificial Sequence: Synthetic oligonucleotide
uuuucaaccaguaggugau

SEQ ID NO: 1404467 - RNA, 19 nt, Artificial Sequence
  Description of Artificial Sequence: Synthetic oligonucleotide
agagaaauuucauuaugca

SEQ ID NO: 1404468 - RNA, 19 nt, Artificial Sequence
  Description of Artificial Sequence: Synthetic oligonucleotide
aaacgugccgaccggcagc

SEQ ID NO: 1404469 - RNA, 19 nt, Artificial Sequence
  Description of Artificial Sequence: Synthetic oligonucleotide
uuacauaaucacccaagca

SEQ ID NO: 1404470 - RNA, 19 nt, Artificial Sequence
  Description of Artificial Sequence: Synthetic oligonucleotide
uucaguuaccugcagggug

SEQ ID NO: 1404471 - RNA, 19 nt, Artificial Sequence
  Description of Artificial Sequence: Synthetic oligonucleotide
uuguaaggcuguaacuagg

SEQ ID NO: 1404472 - RNA, 19 nt, Artificial Sequence
  Description of Artificial Sequence: Synthetic oligonucleotide
uuaucacuucuuaaagagc

SEQ ID NO: 1404473 - RNA, 19 nt, Artificial Sequence
  Description of Artificial Sequence: Synthetic oligonucleotide
augacaaauuuauccauug

SEQ ID NO: 1404474 - RNA, 19 nt, Artificial Sequence
  Description of Artificial Sequence: Synthetic oligonucleotide
uauucuggguccuaggcgu

SEQ ID NO: 1404475 - RNA, 19 nt, Artificial Sequence
  Description of Artificial Sequence: Synthetic oligonucleotide
ucguacuucaauagaaggu

SEQ ID NO: 1404476 - RNA, 19 nt, Artificial Sequence
  Description of Artificial Sequence: Synthetic oligonucleotide
aaauaaaccccgaggugcg

SEQ ID NO: 1404477 - RNA, 19 nt, Artificial Sequence
  Description of Artificial Sequence: Synthetic oligonucleotide
aauugaguuucaguuaccu

SEQ ID NO: 1404478 - RNA, 19 nt, Artificial Sequence
  Description of Artificial Sequence: Synthetic oligonucleotide
gaaaggcucagauaaguga

SEQ ID NO: 1404479 - RNA, 19 nt, Artificial Sequence
  Description of Artificial Sequence: Synthetic oligonucleotide
auaaagugguaacuucauc

SEQ ID NO: 1404480 - RNA, 19 nt, Artificial Sequence
  Description of Artificial Sequence: Synthetic oligonucleotide
ugugcgucccgucaggcag

SEQ ID NO: 1404481 - RNA, 19 nt, Artificial Sequence
  Description of Artificial Sequence: Synthetic oligonucleotide
uuugucgaucgcaacaccu

SEQ ID NO: 1404482 - RNA, 19 nt, Artificial Sequence
  Description of Artificial Sequence: Synthetic oligonucleotide
acauaaucacccaagcagg

SEQ ID NO: 1404483 - RNA, 19 nt, Artificial Sequence
  Description of Artificial Sequence: Synthetic oligonucleotide
cuuguaaggcuguaacuag

SEQ ID NO: 1404484 - RNA, 19 nt, Artificial Sequence
  Description of Artificial Sequence: Synthetic oligonucleotide
uccccuaaggucuuccagg

SEQ ID NO: 1404485 - RNA, 19 nt, Artificial Sequence
  Description of Artificial Sequence: Synthetic oligonucleotide
ucacuucguacuucaauag

SEQ ID NO: 1404486 - RNA, 19 nt, Artificial Sequence
  Description of Artificial Sequence: Synthetic oligonucleotide
gaccuaucuuugucgaucg

SEQ ID NO: 1404487 - RNA, 19 nt, Artificial Sequence
  Description of Artificial Sequence: Synthetic oligonucleotide
cucggugugaacuucuuug

SEQ ID NO: 1404488 - RNA, 19 nt, Artificial Sequence
  Description of Artificial Sequence: Synthetic oligonucleotide
uguaaggcuguaacuaggu

SEQ ID NO: 1404489 - RNA, 19 nt, Artificial Sequence
  Description of Artificial Sequence: Synthetic oligonucleotide
uaaggcccguuaaugagcc

SEQ ID NO: 1404490 - RNA, 19 nt, Artificial Sequence
  Description of Artificial Sequence: Synthetic oligonucleotide
ucggugugaacuucuuugg

SEQ ID NO: 1404491 - RNA, 19 nt, Artificial Sequence
  Description of Artificial Sequence: Synthetic oligonucleotide
cuuugaauggcggagcgag

SEQ ID NO: 1404492 - RNA, 19 nt, Artificial Sequence
  Description of Artificial Sequence: Synthetic oligonucleotide
uuagaaaccucagcauggg

SEQ ID NO: 1404493 - RNA, 19 nt, Artificial Sequence
  Description of Artificial Sequence: Synthetic oligonucleotide
agcuaaugaagccgcuccc

SEQ ID NO: 1404494 - RNA, 19 nt, Artificial Sequence
  Description of Artificial Sequence: Synthetic oligonucleotide
cuucguacuucaauagaag

SEQ ID NO: 1404495 - RNA, 19 nt, Artificial Sequence
  Description of Artificial Sequence: Synthetic oligonucleotide
uugaucaggaagcuccaac

SEQ ID NO: 1404496 - RNA, 19 nt, Artificial Sequence
  Description of Artificial Sequence: Synthetic oligonucleotide
agcugucuaaacucagggg

SEQ ID NO: 1404497 - RNA, 19 nt, Artificial Sequence
  Description of Artificial Sequence: Synthetic oligonucleotide
ugugaccuaucuuugucga

SEQ ID NO: 1404498 - RNA, 19 nt, Artificial Sequence
  Description of Artificial Sequence: Synthetic oligonucleotide
aucacuucguacuucaaua

SEQ ID NO: 1404499 - RNA, 19 nt, Artificial Sequence
  Description of Artificial Sequence: Synthetic oligonucleotide
auggaaccgagugagcagc

SEQ ID NO: 1404500 - RNA, 19 nt, Artificial Sequence
  Description of Artificial Sequence: Synthetic oligonucleotide
aaccgagugagcagcagcg

SEQ ID NO: 1404501 - RNA, 19 nt, Artificial Sequence
  Description of Artificial Sequence: Synthetic oligonucleotide
gauggaaccgagugagcag

SEQ ID NO: 1404502 - RNA, 19 nt, Artificial Sequence
  Description of Artificial Sequence: Synthetic oligonucleotide
ugucgaucgcaacaccucc

SEQ ID NO: 1404503 - RNA, 19 nt, Artificial Sequence
  Description of Artificial Sequence: Synthetic oligonucleotide
agucuuugaauggcggagc

SEQ ID NO: 1404504 - RNA, 19 nt, Artificial Sequence
  Description of Artificial Sequence: Synthetic oligonucleotide
auaagugagcgcuggcaag

SEQ ID NO: 1404505 - RNA, 19 nt, Artificial Sequence
  Description of Artificial Sequence: Synthetic oligonucleotide
agaugaaacguuucccgcu

SEQ ID NO: 1404506 - RNA, 19 nt, Artificial Sequence
  Description of Artificial Sequence: Synthetic oligonucleotide
uuugaauggcggagcgagg

SEQ ID NO: 1404507 - RNA, 19 nt, Artificial Sequence
  Description of Artificial Sequence: Synthetic oligonucleotide
auugaguuucaguuaccug

SEQ ID NO: 1404508 - RNA, 19 nt, Artificial Sequence
  Description of Artificial Sequence: Synthetic oligonucleotide
cacccuuccauuguguugg

SEQ ID NO: 1404509 - RNA, 19 nt, Artificial Sequence
  Description of Artificial Sequence: Synthetic oligonucleotide
ucaaucguggcuugcuugu

SEQ ID NO: 1404510 - RNA, 19 nt, Artificial Sequence
  Description of Artificial Sequence: Synthetic oligonucleotide
ucuacagagccuguauuca

SEQ ID NO: 1404511 - RNA, 19 nt, Artificial Sequence
  Description of Artificial Sequence: Synthetic oligonucleotide
uugaauggcggagcgaggc

SEQ ID NO: 1404512 - RNA, 19 nt, Artificial Sequence
  Description of Artificial Sequence: Synthetic oligonucleotide
auuguguugggugauggca

SEQ ID NO: 1404513 - RNA, 19 nt, Artificial Sequence
  Description of Artificial Sequence: Synthetic oligonucleotide
gauaagugagcgcuggcaa

SEQ ID NO: 1404514 - RNA, 19 nt, Artificial Sequence
  Description of Artificial Sequence: Synthetic oligonucleotide
uaauugaguuucaguuacc

SEQ ID NO: 1404515 - RNA, 19 nt, Artificial Sequence
  Description of Artificial Sequence: Synthetic oligonucleotide
uaaucacccaagcaggcuu

SEQ ID NO: 1404516 - RNA, 19 nt, Artificial Sequence
  Description of Artificial Sequence: Synthetic oligonucleotide
uuaugucuucuacaaccac

SEQ ID NO: 1404517 - RNA, 19 nt, Artificial Sequence
  Description of Artificial Sequence: Synthetic oligonucleotide
gaugaaacguuucccgcuc

SEQ ID NO: 1404518 - RNA, 19 nt, Artificial Sequence
  Description of Artificial Sequence: Synthetic oligonucleotide
uucacauaugcaucuuuuc

SEQ ID NO: 1404519 - RNA, 19 nt, Artificial Sequence
  Description of Artificial Sequence: Synthetic oligonucleotide
gucuuugaauggcggagcg

SEQ ID NO: 1404520 - RNA, 19 nt, Artificial Sequence
  Description of Artificial Sequence: Synthetic oligonucleotide
uaagugagcgcuggcaagc

SEQ ID NO: 1404521 - RNA, 19 nt, Artificial Sequence
  Description of Artificial Sequence: Synthetic oligonucleotide
acagccgacacccgcauca

SEQ ID NO: 1404522 - RNA, 19 nt, Artificial Sequence
  Description of Artificial Sequence: Synthetic oligonucleotide
gaaccgagugagcagcagc

SEQ ID NO: 1404523 - RNA, 19 nt, Artificial Sequence
  Description of Artificial Sequence: Synthetic oligonucleotide
uucgaaugacaaauuuauc

SEQ ID NO: 1404524 - RNA, 19 nt, Artificial Sequence
  Description of Artificial Sequence: Synthetic oligonucleotide
acuggauggcgcuuccuag

SEQ ID NO: 1404525 - RNA, 19 nt, Artificial Sequence
  Description of Artificial Sequence: Synthetic oligonucleotide
caaagagaacagacagggg

SEQ ID NO: 1404526 - RNA, 19 nt, Artificial Sequence
  Description of Artificial Sequence: Synthetic oligonucleotide
agugaaaccugucacccuu

SEQ ID NO: 1404527 - RNA, 19 nt, Artificial Sequence
  Description of Artificial Sequence: Synthetic oligonucleotide
uuaaugagccgggagcaga

SEQ ID NO: 1404528 - RNA, 19 nt, Artificial Sequence
  Description of Artificial Sequence: Synthetic oligonucleotide
gguaaggcccguuaaugag

SEQ ID NO: 1404529 - RNA, 19 nt, Artificial Sequence
  Description of Artificial Sequence: Synthetic oligonucleotide
agugggcucaccccugggg

SEQ ID NO: 1404530 - RNA, 19 nt, Artificial Sequence
  Description of Artificial Sequence: Synthetic oligonucleotide
ggugcgggaagcuucaggc

SEQ ID NO: 1404531 - RNA, 19 nt, Artificial Sequence
  Description of Artificial Sequence: Synthetic oligonucleotide
agccuguauucaaauaaac

SEQ ID NO: 1404532 - RNA, 19 nt, Artificial Sequence
  Description of Artificial Sequence: Synthetic oligonucleotide
uauuuucaaccaguaggug

SEQ ID NO: 1404533 - RNA, 19 nt, Artificial Sequence
  Description of Artificial Sequence: Synthetic oligonucleotide
aauaaaccccgaggugcgg

SEQ ID NO: 1404534 - RNA, 19 nt, Artificial Sequence
  Description of Artificial Sequence: Synthetic oligonucleotide
ugaccuaucuuugucgauc

SEQ ID NO: 1404535 - RNA, 19 nt, Artificial Sequence
  Description of Artificial Sequence: Synthetic oligonucleotide
cuuuccuccgagcuguuuc

SEQ ID NO: 1404536 - RNA, 19 nt, Artificial Sequence
  Description of Artificial Sequence: Synthetic oligonucleotide
caagacacgccaccucugg

SEQ ID NO: 1404537 - RNA, 19 nt, Artificial Sequence
  Description of Artificial Sequence: Synthetic oligonucleotide
ucaaccaguaggugaucca

SEQ ID NO: 1404538 - RNA, 19 nt, Artificial Sequence
  Description of Artificial Sequence: Synthetic oligonucleotide
uauccagcacagccgacac

SEQ ID NO: 1404539 - RNA, 19 nt, Artificial Sequence
  Description of Artificial Sequence: Synthetic oligonucleotide
aaucguggcuugcuuguaa

SEQ ID NO: 1404540 - RNA, 19 nt, Artificial Sequence
  Description of Artificial Sequence: Synthetic oligonucleotide
uacuucaauagaaggucua

SEQ ID NO: 1404541 - RNA, 19 nt, Artificial Sequence
  Description of Artificial Sequence: Synthetic oligonucleotide
uggauggcgcuuccuagug

SEQ ID NO: 1404542 - RNA, 19 nt, Artificial Sequence
  Description of Artificial Sequence: Synthetic oligonucleotide
agcgcaaggcagcuaauga

SEQ ID NO: 1404543 - RNA, 19 nt, Artificial Sequence
  Description of Artificial Sequence: Synthetic oligonucleotide
uguugggugauggcaacug

SEQ ID NO: 1404544 - RNA, 19 nt, Artificial Sequence
  Description of Artificial Sequence: Synthetic oligonucleotide
uggcgaaauaaagugguaa

SEQ ID NO: 1404545 - RNA, 19 nt, Artificial Sequence
  Description of Artificial Sequence: Synthetic oligonucleotide
uugucgaucgcaacaccuc

SEQ ID NO: 1404546 - RNA, 19 nt, Artificial Sequence
  Description of Artificial Sequence: Synthetic oligonucleotide
aacuggauggcgcuuccua

SEQ ID NO: 1404547 - RNA, 19 nt, Artificial Sequence
  Description of Artificial Sequence: Synthetic oligonucleotide
accguccuccgguaaggcc

SEQ ID NO: 1404548 - RNA, 19 nt, Artificial Sequence
  Description of Artificial Sequence: Synthetic oligonucleotide
acuucguacuucaauagaa

SEQ ID NO: 1404549 - RNA, 19 nt, Artificial Sequence
  Description of Artificial Sequence: Synthetic oligonucleotide
gaguuuagaggugucccug

SEQ ID NO: 1404550 - RNA, 19 nt, Artificial Sequence
  Description of Artificial Sequence: Synthetic oligonucleotide
aacgugccgaccggcagcg

SEQ ID NO: 1404551 - RNA, 19 nt, Artificial Sequence
  Description of Artificial Sequence: Synthetic oligonucleotide
agauaagugagcgcuggca

SEQ ID NO: 1404552 - RNA, 19 nt, Artificial Sequence
  Description of Artificial Sequence: Synthetic oligonucleotide
cugggguugagcaaagaga

SEQ ID NO: 1404553 - RNA, 19 nt, Artificial Sequence
  Description of Artificial Sequence: Synthetic oligonucleotide
ugaauggcggagcgaggcc

SEQ ID NO: 1404554 - RNA, 19 nt, Artificial Sequence
  Description of Artificial Sequence: Synthetic oligonucleotide
ggcgaaauaaagugguaac

SEQ ID NO: 1404555 - RNA, 19 nt, Artificial Sequence
  Description of Artificial Sequence: Synthetic oligonucleotide
auaaaccccgaggugcggg

SEQ ID NO: 1404556 - RNA, 19 nt, Artificial Sequence
  Description of Artificial Sequence: Synthetic oligonucleotide
aauauccagcacagccgac

SEQ ID NO: 1404557 - RNA, 19 nt, Artificial Sequence
  Description of Artificial Sequence: Synthetic oligonucleotide
uccgagcuguuucuucugc

SEQ ID NO: 1404558 - RNA, 19 nt, Artificial Sequence
  Description of Artificial Sequence: Synthetic oligonucleotide
auagaaggucuauccaaau

SEQ ID NO: 1404559 - RNA, 19 nt, Artificial Sequence
  Description of Artificial Sequence: Synthetic oligonucleotide
cacaaugugaccuaucuuu

SEQ ID NO: 1404560 - RNA, 19 nt, Artificial Sequence
  Description of Artificial Sequence: Synthetic oligonucleotide
auccauuguugggugcucc

SEQ ID NO: 1404561 - RNA, 19 nt, Artificial Sequence
  Description of Artificial Sequence: Synthetic oligonucleotide
acaaugugaccuaucuuug

SEQ ID NO: 1404562 - RNA, 19 nt, Artificial Sequence
  Description of Artificial Sequence: Synthetic oligonucleotide
agcagcagcgguaauugag

SEQ ID NO: 1404563 - RNA, 19 nt, Artificial Sequence
  Description of Artificial Sequence: Synthetic oligonucleotide
gucuguacaaacgugccga

SEQ ID NO: 1404564 - RNA, 19 nt, Artificial Sequence
  Description of Artificial Sequence: Synthetic oligonucleotide
auccccuaaggucuuccag

SEQ ID NO: 1404565 - RNA, 19 nt, Artificial Sequence
  Description of Artificial Sequence: Synthetic oligonucleotide
guaaaccuuuccuccgagc

SEQ ID NO: 1404566 - RNA, 19 nt, Artificial Sequence
  Description of Artificial Sequence: Synthetic oligonucleotide
cauuguguugggugauggc

SEQ ID NO: 1404567 - RNA, 19 nt, Artificial Sequence
  Description of Artificial Sequence: Synthetic oligonucleotide
uuuccuccgagcuguuucu

SEQ ID NO: 1404568 - RNA, 19 nt, Artificial Sequence
  Description of Artificial Sequence: Synthetic oligonucleotide
guacaaacgugccgaccgg

SEQ ID NO: 1404569 - RNA, 19 nt, Artificial Sequence
  Description of Artificial Sequence: Synthetic oligonucleotide
guaaggcccguuaaugagc

SEQ ID NO: 1404570 - RNA, 19 nt, Artificial Sequence
  Description of Artificial Sequence: Synthetic oligonucleotide
cuaucuuugucgaucgcaa

SEQ ID NO: 1404571 - RNA, 19 nt, Artificial Sequence
  Description of Artificial Sequence: Synthetic oligonucleotide
ggucuguacaaacgugccg

SEQ ID NO: 1404572 - RNA, 19 nt, Artificial Sequence
  Description of Artificial Sequence: Synthetic oligonucleotide
auggcaacuggauggcgcu

SEQ ID NO: 1404573 - RNA, 19 nt, Artificial Sequence
  Description of Artificial Sequence: Synthetic oligonucleotide
aggcguucgaaugacaaau

SEQ ID NO: 1404574 - RNA, 19 nt, Artificial Sequence
  Description of Artificial Sequence: Synthetic oligonucleotide
auauccagcacagccgaca

SEQ ID NO: 1404575 - RNA, 19 nt, Artificial Sequence
  Description of Artificial Sequence: Synthetic oligonucleotide
cuuguucacaaugugaccu

SEQ ID NO: 1404576 - RNA, 19 nt, Artificial Sequence
  Description of Artificial Sequence: Synthetic oligonucleotide
cuuugucgaucgcaacacc

SEQ ID NO: 1404577 - RNA, 19 nt, Artificial Sequence
  Description of Artificial Sequence: Synthetic oligonucleotide
ucuguacaaacgugccgac

SEQ ID NO: 1404578 - RNA, 19 nt, Artificial Sequence
  Description of Artificial Sequence: Synthetic oligonucleotide
aggaagcuccaacauaguu

SEQ ID NO: 1404579 - RNA, 19 nt, Artificial Sequence
  Description of Artificial Sequence: Synthetic oligonucleotide
caaagauucaaucguggcu

SEQ ID NO: 1404580 - RNA, 19 nt, Artificial Sequence
  Description of Artificial Sequence: Synthetic oligonucleotide
aucaggaagcuccaacaua

SEQ ID NO: 1404581 - RNA, 19 nt, Artificial Sequence
  Description of Artificial Sequence: Synthetic oligonucleotide
ugcuccgacuaccuucaga

SEQ ID NO: 1404582 - RNA, 19 nt, Artificial Sequence
  Description of Artificial Sequence: Synthetic oligonucleotide
uuguugggugcuccgacua

SEQ ID NO: 1404583 - RNA, 19 nt, Artificial Sequence
  Description of Artificial Sequence: Synthetic oligonucleotide
auaaucacccaagcaggcu

SEQ ID NO: 1404584 - RNA, 19 nt, Artificial Sequence
  Description of Artificial Sequence: Synthetic oligonucleotide
uuuugugggucuguacaaa

SEQ ID NO: 1404585 - RNA, 19 nt, Artificial Sequence
  Description of Artificial Sequence: Synthetic oligonucleotide
cuaggcguucgaaugacaa

SEQ ID NO: 1404586 - RNA, 19 nt, Artificial Sequence
  Description of Artificial Sequence: Synthetic oligonucleotide
aacaccuccuuggagggua

SEQ ID NO: 1404587 - RNA, 19 nt, Artificial Sequence
  Description of Artificial Sequence: Synthetic oligonucleotide
cgcaacaccuccuuggagg

SEQ ID NO: 1404588 - RNA, 19 nt, Artificial Sequence
  Description of Artificial Sequence: Synthetic oligonucleotide
aaggucuauccaaauguuu

SEQ ID NO: 1404589 - RNA, 19 nt, Artificial Sequence
  Description of Artificial Sequence: Synthetic oligonucleotide
cucaaaagagucuuugaau

SEQ ID NO: 1404590 - RNA, 19 nt, Artificial Sequence
  Description of Artificial Sequence: Synthetic oligonucleotide
acuucaauagaaggucuau

SEQ ID NO: 1404591 - RNA, 19 nt, Artificial Sequence
  Description of Artificial Sequence: Synthetic oligonucleotide
uacaaacgugccgaccggc

SEQ ID NO: 1404592 - RNA, 19 nt, Artificial Sequence
  Description of Artificial Sequence: Synthetic oligonucleotide
aaccugucacccuuccauu

SEQ ID NO: 1404593 - RNA, 19 nt, Artificial Sequence
  Description of Artificial Sequence: Synthetic oligonucleotide
uguugggugcuccgacuac

SEQ ID NO: 1404594 - RNA, 19 nt, Artificial Sequence
  Description of Artificial Sequence: Synthetic oligonucleotide
uuguucacaaugugaccua

SEQ ID NO: 1404595 - RNA, 19 nt, Artificial Sequence
  Description of Artificial Sequence: Synthetic oligonucleotide
ugauggcaacuggauggcg

SEQ ID NO: 1404596 - RNA, 19 nt, Artificial Sequence
  Description of Artificial Sequence: Synthetic oligonucleotide
gagcaaguacaauuuacau

SEQ ID NO: 1404597 - RNA, 19 nt, Artificial Sequence
  Description of Artificial Sequence: Synthetic oligonucleotide
guuaccugcaggguggcga

SEQ ID NO: 1404598 - RNA, 19 nt, Artificial Sequence
  Description of Artificial Sequence: Synthetic oligonucleotide
uaaaccccgaggugcggga

SEQ ID NO: 1404599 - RNA, 19 nt, Artificial Sequence
  Description of Artificial Sequence: Synthetic oligonucleotide
uccgguaaggcccguuaau

SEQ ID NO: 1404600 - RNA, 19 nt, Artificial Sequence
  Description of Artificial Sequence: Synthetic oligonucleotide
uugggugcuccgacuaccu

SEQ ID NO: 1404601 - RNA, 19 nt, Artificial Sequence
  Description of Artificial Sequence: Synthetic oligonucleotide
aaggcccguuaaugagccg

SEQ ID NO: 1404602 - RNA, 19 nt, Artificial Sequence
  Description of Artificial Sequence: Synthetic oligonucleotide
uaggcguucgaaugacaaa

SEQ ID NO: 1404603 - RNA, 19 nt, Artificial Sequence
  Description of Artificial Sequence: Synthetic oligonucleotide
uuggcaagacacgccaccu

SEQ ID NO: 1404604 - RNA, 19 nt, Artificial Sequence
  Description of Artificial Sequence: Synthetic oligonucleotide
ccuagugacagccgugugc

SEQ ID NO: 1404605 - RNA, 19 nt, Artificial Sequence
  Description of Artificial Sequence: Synthetic oligonucleotide
agcgccagcgcaaggcagc

SEQ ID NO: 1404606 - RNA, 19 nt, Artificial Sequence
  Description of Artificial Sequence: Synthetic oligonucleotide
agaaaguuuuccacucggu

SEQ ID NO: 1404607 - RNA, 19 nt, Artificial Sequence
  Description of Artificial Sequence: Synthetic oligonucleotide
ccguuaaugagccgggagc

SEQ ID NO: 1404608 - RNA, 19 nt, Artificial Sequence
  Description of Artificial Sequence: Synthetic oligonucleotide
ucuuugaauggcggagcga

SEQ ID NO: 1404609 - RNA, 19 nt, Artificial Sequence
  Description of Artificial Sequence: Synthetic oligonucleotide
guuaaugagccgggagcag

SEQ ID NO: 1404610 - RNA, 19 nt, Artificial Sequence
  Description of Artificial Sequence: Synthetic oligonucleotide
ugcgggcuauucugggucc

SEQ ID NO: 1404611 - RNA, 19 nt, Artificial Sequence
  Description of Artificial Sequence: Synthetic oligonucleotide
cauauucugucugaaggaa

SEQ ID NO: 1404612 - RNA, 19 nt, Artificial Sequence
  Description of Artificial Sequence: Synthetic oligonucleotide
gacacgccaccucuggguc

SEQ ID NO: 1404613 - RNA, 19 nt, Artificial Sequence
  Description of Artificial Sequence: Synthetic oligonucleotide
uccuagugacagccgugug

SEQ ID NO: 1404614 - RNA, 19 nt, Artificial Sequence
  Description of Artificial Sequence: Synthetic oligonucleotide
cagauaagugagcgcuggc

SEQ ID NO: 1404615 - RNA, 19 nt, Artificial Sequence
  Description of Artificial Sequence: Synthetic oligonucleotide
guugggugcuccgacuacc

SEQ ID NO: 1404616 - RNA, 19 nt, Artificial Sequence
  Description of Artificial Sequence: Synthetic oligonucleotide
uguucacaaugugaccuau

SEQ ID NO: 1404617 - RNA, 19 nt, Artificial Sequence
  Description of Artificial Sequence: Synthetic oligonucleotide
ucgaucgcaacaccuccuu

SEQ ID NO: 1404618 - RNA, 19 nt, Artificial Sequence
  Description of Artificial Sequence: Synthetic oligonucleotide
gaaaccugucacccuucca

SEQ ID NO: 1404619 - RNA, 19 nt, Artificial Sequence
  Description of Artificial Sequence: Synthetic oligonucleotide
accagagcucgcaccgucc

SEQ ID NO: 1404620 - RNA, 19 nt, Artificial Sequence
  Description of Artificial Sequence: Synthetic oligonucleotide
augaaacguuucccgcuca

SEQ ID NO: 1404621 - RNA, 19 nt, Artificial Sequence
  Description of Artificial Sequence: Synthetic oligonucleotide
cacuucguacuucaauaga

SEQ ID NO: 1404622 - RNA, 19 nt, Artificial Sequence
  Description of Artificial Sequence: Synthetic oligonucleotide
cuguacaaacgugccgacc

SEQ ID NO: 1404623 - RNA, 19 nt, Artificial Sequence
  Description of Artificial Sequence: Synthetic oligonucleotide
ccugggguugagcaaagag

SEQ ID NO: 1404624 - RNA, 19 nt, Artificial Sequence
  Description of Artificial Sequence: Synthetic oligonucleotide
ccguccuccgguaaggccc

SEQ ID NO: 1404625 - RNA, 19 nt, Artificial Sequence
  Description of Artificial Sequence: Synthetic oligonucleotide
guaagucugcaagagaaau

SEQ ID NO: 1404626 - RNA, 19 nt, Artificial Sequence
  Description of Artificial Sequence: Synthetic oligonucleotide
gugauggcaacuggauggc

SEQ ID NO: 1404627 - RNA, 19 nt, Artificial Sequence
  Description of Artificial Sequence: Synthetic oligonucleotide
uuugaucaggaagcuccaa

SEQ ID NO: 1404628 - RNA, 19 nt, Artificial Sequence
  Description of Artificial Sequence: Synthetic oligonucleotide
acguuucccgcucaauauu

SEQ ID NO: 1404629 - RNA, 19 nt, Artificial Sequence
  Description of Artificial Sequence: Synthetic oligonucleotide
uccuaggcguucgaaugac

SEQ ID NO: 1404630 - RNA, 19 nt, Artificial Sequence
  Description of Artificial Sequence: Synthetic oligonucleotide
ggauggaaccgagugagca

SEQ ID NO: 1404631 - RNA, 19 nt, Artificial Sequence
  Description of Artificial Sequence: Synthetic oligonucleotide
guauucaaauaaaccccga

SEQ ID NO: 1404632 - RNA, 19 nt, Artificial Sequence
  Description of Artificial Sequence: Synthetic oligonucleotide
aguaagucugcaagagaaa

SEQ ID NO: 1404633 - RNA, 19 nt, Artificial Sequence
  Description of Artificial Sequence: Synthetic oligonucleotide
aagugagcgcuggcaagca

SEQ ID NO: 1404634 - RNA, 19 nt, Artificial Sequence
  Description of Artificial Sequence: Synthetic oligonucleotide
accggcagcgccccgcucu

SEQ ID NO: 1404635 - RNA, 19 nt, Artificial Sequence
  Description of Artificial Sequence: Synthetic oligonucleotide
gcuuuaaugugaagaccag

SEQ ID NO: 1404636 - RNA, 19 nt, Artificial Sequence
  Description of Artificial Sequence: Synthetic oligonucleotide
ccuucagaugauugaggag

SEQ ID NO: 1404637 - RNA, 19 nt, Artificial Sequence
  Description of Artificial Sequence: Synthetic oligonucleotide
gugggucuguacaaacgug

SEQ ID NO: 1404638 - RNA, 19 nt, Artificial Sequence
  Description of Artificial Sequence: Synthetic oligonucleotide
agcgccccgcucuucaccu

SEQ ID NO: 1404639 - RNA, 19 nt, Artificial Sequence
  Description of Artificial Sequence: Synthetic oligonucleotide
guccuaggcguucgaauga

SEQ ID NO: 1404640 - RNA, 19 nt, Artificial Sequence
  Description of Artificial Sequence: Synthetic oligonucleotide
uggaggguauuuucuucuu

SEQ ID NO: 1404641 - RNA, 19 nt, Artificial Sequence
  Description of Artificial Sequence: Synthetic oligonucleotide
ccauauucugucugaagga

SEQ ID NO: 1404642 - RNA, 19 nt, Artificial Sequence
  Description of Artificial Sequence: Synthetic oligonucleotide
ccggaucucagcucugugc

SEQ ID NO: 1404643 - RNA, 19 nt, Artificial Sequence
  Description of Artificial Sequence: Synthetic oligonucleotide
ccgggagcagagaugaaac

SEQ ID NO: 1404644 - RNA, 19 nt, Artificial Sequence
  Description of Artificial Sequence: Synthetic oligonucleotide
gagcucgcaccguccuccg

SEQ ID NO: 1404645 - RNA, 19 nt, Artificial Sequence
  Description of Artificial Sequence: Synthetic oligonucleotide
guuugaucaggaagcucca

SEQ ID NO: 1404646 - RNA, 19 nt, Artificial Sequence
  Description of Artificial Sequence: Synthetic oligonucleotide
caggguggcgaaauaaagu

SEQ ID NO: 1404647 - RNA, 19 nt, Artificial Sequence
  Description of Artificial Sequence: Synthetic oligonucleotide
ggcucagauaagugagcgc

SEQ ID NO: 1404648 - RNA, 19 nt, Artificial Sequence
  Description of Artificial Sequence: Synthetic oligonucleotide
gggugcuccgacuaccuuc

SEQ ID NO: 1404649 - RNA, 19 nt, Artificial Sequence
  Description of Artificial Sequence: Synthetic oligonucleotide
acaaacgugccgaccggca

SEQ ID NO: 1404650 - RNA, 19 nt, Artificial Sequence
  Description of Artificial Sequence: Synthetic oligonucleotide
agccgugugcgucccguca

SEQ ID NO: 1404651 - RNA, 19 nt, Artificial Sequence
  Description of Artificial Sequence: Synthetic oligonucleotide
cuccgagcuguuucuucug

SEQ ID NO: 1404652 - RNA, 19 nt, Artificial Sequence
  Description of Artificial Sequence: Synthetic oligonucleotide
acucggugugaacuucuuu

SEQ ID NO: 1404653 - RNA, 19 nt, Artificial Sequence
  Description of Artificial Sequence: Synthetic oligonucleotide
aguuaccugcaggguggcg

SEQ ID NO: 1404654 - RNA, 19 nt, Artificial Sequence
  Description of Artificial Sequence: Synthetic oligonucleotide
cuccgacuaccuucagaug

SEQ ID NO: 1404655 - RNA, 19 nt, Artificial Sequence
  Description of Artificial Sequence: Synthetic oligonucleotide
gggucuguacaaacgugcc

SEQ ID NO: 1404656 - RNA, 19 nt, Artificial Sequence
  Description of Artificial Sequence: Synthetic oligonucleotide
uuccauuguguugggugau

SEQ ID NO: 1404657 - RNA, 19 nt, Artificial Sequence
  Description of Artificial Sequence: Synthetic oligonucleotide
gguggcgaaauaaaguggu

SEQ ID NO: 1404658 - RNA, 19 nt, Artificial Sequence
  Description of Artificial Sequence: Synthetic oligonucleotide
ugcgucccgucaggcagcg

SEQ ID NO: 1404659 - RNA, 19 nt, Artificial Sequence
  Description of Artificial Sequence: Synthetic oligonucleotide
gcuccgacuaccuucagau

SEQ ID NO: 1404660 - RNA, 19 nt, Artificial Sequence
  Description of Artificial Sequence: Synthetic oligonucleotide
uuucaaccaguaggugauc

SEQ ID NO: 1404661 - RNA, 19 nt, Artificial Sequence
  Description of Artificial Sequence: Synthetic oligonucleotide
guacuucaauagaaggucu

SEQ ID NO: 1404662 - RNA, 19 nt, Artificial Sequence
  Description of Artificial Sequence: Synthetic oligonucleotide
cagcgcaaggcagcuaaug

SEQ ID NO: 1404663 - RNA, 19 nt, Artificial Sequence
  Description of Artificial Sequence: Synthetic oligonucleotide
acccuuccauuguguuggg

SEQ ID NO: 1404664 - RNA, 19 nt, Artificial Sequence
  Description of Artificial Sequence: Synthetic oligonucleotide
cagcgccagcgcaaggcag

SEQ ID NO: 1404665 - RNA, 19 nt, Artificial Sequence
  Description of Artificial Sequence: Synthetic oligonucleotide
ccgagcuguuucuucugcg

SEQ ID NO: 1404666 - RNA, 19 nt, Artificial Sequence
  Description of Artificial Sequence: Synthetic oligonucleotide
caaugugaccuaucuuugu

SEQ ID NO: 1404667 - RNA, 19 nt, Artificial Sequence
  Description of Artificial Sequence: Synthetic oligonucleotide
gaaggucuauccaaauguu

SEQ ID NO: 1404668 - RNA, 19 nt, Artificial Sequence
  Description of Artificial Sequence: Synthetic oligonucleotide
acacgccaccucugggucu

SEQ ID NO: 1404669 - RNA, 19 nt, Artificial Sequence
  Description of Artificial Sequence: Synthetic oligonucleotide
cgcucaauauuuucaacca

SEQ ID NO: 1404670 - RNA, 19 nt, Artificial Sequence
  Description of Artificial Sequence: Synthetic oligonucleotide
acagccgugugcgucccgu

SEQ ID NO: 1404671 - RNA, 19 nt, Artificial Sequence
  Description of Artificial Sequence: Synthetic oligonucleotide
aggcccgucucccggggcu

SEQ ID NO: 1404672 - RNA, 19 nt, Artificial Sequence
  Description of Artificial Sequence: Synthetic oligonucleotide
ggcaagacacgccaccucu

SEQ ID NO: 1404673 - RNA, 19 nt, Artificial Sequence
  Description of Artificial Sequence: Synthetic oligonucleotide
ucccggaucucagcucugu

SEQ ID NO: 1404674 - RNA, 19 nt, Artificial Sequence
  Description of Artificial Sequence: Synthetic oligonucleotide
gcuaaugaagccgcuccca

SEQ ID NO: 1404675 - RNA, 19 nt, Artificial Sequence
  Description of Artificial Sequence: Synthetic oligonucleotide
gcaucggagcugucuaaac

SEQ ID NO: 1404676 - RNA, 19 nt, Artificial Sequence
  Description of Artificial Sequence: Synthetic oligonucleotide
ggugcuccgacuaccuuca

SEQ ID NO: 1404677 - RNA, 19 nt, Artificial Sequence
  Description of Artificial Sequence: Synthetic oligonucleotide
ggcuuguguagacauauuu

SEQ ID NO: 1404678 - RNA, 19 nt, Artificial Sequence
  Description of Artificial Sequence: Synthetic oligonucleotide
ccccauauucugucugaag

SEQ ID NO: 1404679 - RNA, 19 nt, Artificial Sequence
  Description of Artificial Sequence: Synthetic oligonucleotide
aggcaucggagcugucuaa

SEQ ID NO: 1404680 - RNA, 19 nt, Artificial Sequence
  Description of Artificial Sequence: Synthetic oligonucleotide
aggcuguaacuagguuuuc

SEQ ID NO: 1404681 - RNA, 19 nt, Artificial Sequence
  Description of Artificial Sequence: Synthetic oligonucleotide
cauccccuaaggucuucca

SEQ ID NO: 1404682 - RNA, 19 nt, Artificial Sequence
  Description of Artificial Sequence: Synthetic oligonucleotide
cagagccuguauucaaaua

SEQ ID NO: 1404683 - RNA, 19 nt, Artificial Sequence
  Description of Artificial Sequence: Synthetic oligonucleotide
gcgaaauaaagugguaacu

SEQ ID NO: 1404684 - RNA, 19 nt, Artificial Sequence
  Description of Artificial Sequence: Synthetic oligonucleotide
uggguccuaggcguucgaa

SEQ ID NO: 1404685 - RNA, 19 nt, Artificial Sequence
  Description of Artificial Sequence: Synthetic oligonucleotide
ccgguaaggcccguuaaug

SEQ ID NO: 1404686 - RNA, 19 nt, Artificial Sequence
  Description of Artificial Sequence: Synthetic oligonucleotide
gugugcgucccgucaggca

SEQ ID NO: 1404687 - RNA, 19 nt, Artificial Sequence
  Description of Artificial Sequence: Synthetic oligonucleotide
ugggugcuccgacuaccuu

SEQ ID NO: 1404688 - RNA, 19 nt, Artificial Sequence
  Description of Artificial Sequence: Synthetic oligonucleotide
cgggagcagagaugaaacg

SEQ ID NO: 1404689 - RNA, 19 nt, Artificial Sequence
  Description of Artificial Sequence: Synthetic oligonucleotide
caguuaccugcaggguggc

SEQ ID NO: 1404690 - RNA, 19 nt, Artificial Sequence
  Description of Artificial Sequence: Synthetic oligonucleotide
ggcccguuaaugagccggg

SEQ ID NO: 1404691 - RNA, 19 nt, Artificial Sequence
  Description of Artificial Sequence: Synthetic oligonucleotide
cucaccccugggguugagc

SEQ ID NO: 1404692 - RNA, 19 nt, Artificial Sequence
  Description of Artificial Sequence: Synthetic oligonucleotide
cuggauggcgcuuccuagu

SEQ ID NO: 1404693 - RNA, 19 nt, Artificial Sequence
  Description of Artificial Sequence: Synthetic oligonucleotide
gcgguaauugaguuucagu

SEQ ID NO: 1404694 - RNA, 19 nt, Artificial Sequence
  Description of Artificial Sequence: Synthetic oligonucleotide
ccgaggugcgggaagcuuc

SEQ ID NO: 1404695 - RNA, 19 nt, Artificial Sequence
  Description of Artificial Sequence: Synthetic oligonucleotide
guaaggcuguaacuagguu

SEQ ID NO: 1404696 - RNA, 19 nt, Artificial Sequence
  Description of Artificial Sequence: Synthetic oligonucleotide
cguucgaaugacaaauuua

SEQ ID NO: 1404697 - RNA, 19 nt, Artificial Sequence
  Description of Artificial Sequence: Synthetic oligonucleotide
ccgucaggcagcgccagcg

SEQ ID NO: 1404698 - RNA, 19 nt, Artificial Sequence
  Description of Artificial Sequence: Synthetic oligonucleotide
gcuuccuagugacagccgu

SEQ ID NO: 1404699 - RNA, 19 nt, Artificial Sequence
  Description of Artificial Sequence: Synthetic oligonucleotide
gaaacguuucccgcucaau

SEQ ID NO: 1404700 - RNA, 19 nt, Artificial Sequence
  Description of Artificial Sequence: Synthetic oligonucleotide
cugcaggguggcgaaauaa

SEQ ID NO: 1404701 - RNA, 19 nt, Artificial Sequence
  Description of Artificial Sequence: Synthetic oligonucleotide
gagcagagaugaaacguuu

SEQ ID NO: 1404702 - RNA, 19 nt, Artificial Sequence
  Description of Artificial Sequence: Synthetic oligonucleotide
gugccgaccggcagcgccc

SEQ ID NO: 1404703 - RNA, 19 nt, Artificial Sequence
  Description of Artificial Sequence: Synthetic oligonucleotide
cgguaauugaguuucaguu

SEQ ID NO: 1404704 - RNA, 19 nt, Artificial Sequence
  Description of Artificial Sequence: Synthetic oligonucleotide
ucgcaccguccuccgguaa

SEQ ID NO: 1404705 - RNA, 19 nt, Artificial Sequence
  Description of Artificial Sequence: Synthetic oligonucleotide
cagagcucgcaccguccuc

SEQ ID NO: 1404706 - RNA, 19 nt, Artificial Sequence
  Description of Artificial Sequence: Synthetic oligonucleotide
caccguccuccgguaaggc

SEQ ID NO: 1404707 - RNA, 19 nt, Artificial Sequence
  Description of Artificial Sequence: Synthetic oligonucleotide
cugggcccguccucggguc

SEQ ID NO: 1404708 - RNA, 19 nt, Artificial Sequence
  Description of Artificial Sequence: Synthetic oligonucleotide
cuucaggccagcuccucau

SEQ ID NO: 1404709 - RNA, 19 nt, Artificial Sequence
  Description of Artificial Sequence: Synthetic oligonucleotide
ggauggcgcuuccuaguga

SEQ ID NO: 1404710 - RNA, 19 nt, Artificial Sequence
  Description of Artificial Sequence: Synthetic oligonucleotide
gcaagacacgccaccucug

SEQ ID NO: 1404711 - RNA, 19 nt, Artificial Sequence
  Description of Artificial Sequence: Synthetic oligonucleotide
caaccaguaggugauccau

SEQ ID NO: 1404712 - RNA, 19 nt, Artificial Sequence
  Description of Artificial Sequence: Synthetic oligonucleotide
cuugcgcaucuuguucaca

SEQ ID NO: 1404713 - RNA, 19 nt, Artificial Sequence
  Description of Artificial Sequence: Synthetic oligonucleotide
cucccggaucucagcucug

SEQ ID NO: 1404714 - RNA, 19 nt, Artificial Sequence
  Description of Artificial Sequence: Synthetic oligonucleotide
cccggggcuccccauauuc

SEQ ID NO: 1404715 - RNA, 19 nt, Artificial Sequence
  Description of Artificial Sequence: Synthetic oligonucleotide
guggcgaaauaaaguggua

SEQ ID NO: 1404716 - RNA, 19 nt, Artificial Sequence
  Description of Artificial Sequence: Synthetic oligonucleotide
ugccgaccggcagcgcccc

SEQ ID NO: 1404717 - RNA, 19 nt, Artificial Sequence
  Description of Artificial Sequence: Synthetic oligonucleotide
gugcgucccgucaggcagc

SEQ ID NO: 1404718 - RNA, 19 nt, Artificial Sequence
  Description of Artificial Sequence: Synthetic oligonucleotide
gcaagcagggcuggucuca

SEQ ID NO: 1404719 - RNA, 19 nt, Artificial Sequence
  Description of Artificial Sequence: Synthetic oligonucleotide
gcucccggaucucagcucu

SEQ ID NO: 1404720 - RNA, 19 nt, Artificial Sequence
  Description of Artificial Sequence: Synthetic oligonucleotide
gugaccuaucuuugucgau

SEQ ID NO: 1404721 - RNA, 19 nt, Artificial Sequence
  Description of Artificial Sequence: Synthetic oligonucleotide
cgguaaggcccguuaauga

SEQ ID NO: 1404722 - RNA, 19 nt, Artificial Sequence
  Description of Artificial Sequence: Synthetic oligonucleotide
cagcgguaauugaguuuca

SEQ ID NO: 1404723 - RNA, 19 nt, Artificial Sequence
  Description of Artificial Sequence: Synthetic oligonucleotide
caggcccgucucccggggc

SEQ ID NO: 1404724 - RNA, 19 nt, Artificial Sequence
  Description of Artificial Sequence: Synthetic oligonucleotide
uggcggagcgaggcccagc

SEQ ID NO: 1404725 - RNA, 19 nt, Artificial Sequence
  Description of Artificial Sequence: Synthetic oligonucleotide
cagccgacacccgcaucac

SEQ ID NO: 1404726 - RNA, 19 nt, Artificial Sequence
  Description of Artificial Sequence: Synthetic oligonucleotide
gcguucgaaugacaaauuu

SEQ ID NO: 1404727 - RNA, 19 nt, Artificial Sequence
  Description of Artificial Sequence: Synthetic oligonucleotide
ggcaucggagcugucuaaa

SEQ ID NO: 1404728 - RNA, 19 nt, Artificial Sequence
  Description of Artificial Sequence: Synthetic oligonucleotide
gugcuccgacuaccuucag

SEQ ID NO: 1404729 - RNA, 19 nt, Artificial Sequence
  Description of Artificial Sequence: Synthetic oligonucleotide
cagccgugugcgucccguc

SEQ ID NO: 1404730 - RNA, 19 nt, Artificial Sequence
  Description of Artificial Sequence: Synthetic oligonucleotide
ccgugugcgucccgucagg

SEQ ID NO: 1404731 - RNA, 19 nt, Artificial Sequence
  Description of Artificial Sequence: Synthetic oligonucleotide
caccccugggguugagcaa

SEQ ID NO: 1404732 - RNA, 19 nt, Artificial Sequence
  Description of Artificial Sequence: Synthetic oligonucleotide
ucccggggcuccccauauu

SEQ ID NO: 1404733 - RNA, 19 nt, Artificial Sequence
  Description of Artificial Sequence: Synthetic oligonucleotide
aggcuuguguagacauauu

SEQ ID NO: 1404734 - RNA, 19 nt, Artificial Sequence
  Description of Artificial Sequence: Synthetic oligonucleotide
gcucgcaccguccuccggu

SEQ ID NO: 1404735 - RNA, 19 nt, Artificial Sequence
  Description of Artificial Sequence: Synthetic oligonucleotide
cgcaccguccuccgguaag

SEQ ID NO: 1404736 - RNA, 19 nt, Artificial Sequence
  Description of Artificial Sequence: Synthetic oligonucleotide
acgugccgaccggcagcgc

SEQ ID NO: 1404737 - RNA, 19 nt, Artificial Sequence
  Description of Artificial Sequence: Synthetic oligonucleotide
cucgcaccguccuccggua

SEQ ID NO: 1404738 - RNA, 19 nt, Artificial Sequence
  Description of Artificial Sequence: Synthetic oligonucleotide
ccuaggcguucgaaugaca

SEQ ID NO: 1404739 - RNA, 19 nt, Artificial Sequence
  Description of Artificial Sequence: Synthetic oligonucleotide
cagcagcgguaauugaguu

SEQ ID NO: 1404740 - RNA, 19 nt, Artificial Sequence
  Description of Artificial Sequence: Synthetic oligonucleotide
cgaucgcaacaccuccuug

SEQ ID NO: 1404741 - RNA, 19 nt, Artificial Sequence
  Description of Artificial Sequence: Synthetic oligonucleotide
cccggaucucagcucugug

SEQ ID NO: 1404742 - RNA, 19 nt, Artificial Sequence
  Description of Artificial Sequence: Synthetic oligonucleotide
ccuccgagcuguuucuucu

SEQ ID NO: 1404743 - RNA, 19 nt, Artificial Sequence
  Description of Artificial Sequence: Synthetic oligonucleotide
uccuccgguaaggcccguu

SEQ ID NO: 1404744 - RNA, 19 nt, Artificial Sequence
  Description of Artificial Sequence: Synthetic oligonucleotide
caaucguggcuugcuugua

SEQ ID NO: 1404745 - RNA, 19 nt, Artificial Sequence
  Description of Artificial Sequence: Synthetic oligonucleotide
cgugugcgucccgucaggc

SEQ ID NO: 1404746 - RNA, 19 nt, Artificial Sequence
  Description of Artificial Sequence: Synthetic oligonucleotide
ccgacacccgcaucaccca

SEQ ID NO: 1404747 - RNA, 19 nt, Artificial Sequence
  Description of Artificial Sequence: Synthetic oligonucleotide
gcgcugggcccguccucgg

SEQ ID NO: 1404748 - RNA, 19 nt, Artificial Sequence
  Description of Artificial Sequence: Synthetic oligonucleotide
ccgagugagcagcagcggu

SEQ ID NO: 1404749 - RNA, 19 nt, Artificial Sequence
  Description of Artificial Sequence: Synthetic oligonucleotide
ccgcaucacccaaacucaa

SEQ ID NO: 1404750 - RNA, 19 nt, Artificial Sequence
  Description of Artificial Sequence: Synthetic oligonucleotide
ccgacuaccuucagaugau

SEQ ID NO: 1404751 - RNA, 19 nt, Artificial Sequence
  Description of Artificial Sequence: Synthetic oligonucleotide
ccgaccggcagcgccccgc

SEQ ID NO: 1404752 - RNA, 19 nt, Artificial Sequence
  Description of Artificial Sequence: Synthetic oligonucleotide
ccucuacagagccuguauu

SEQ ID NO: 1404753 - RNA, 19 nt, Artificial Sequence
  Description of Artificial Sequence: Synthetic oligonucleotide
ggcguucgaaugacaaauu

SEQ ID NO: 1404754 - RNA, 19 nt, Artificial Sequence
  Description of Artificial Sequence: Synthetic oligonucleotide
cacccgcaucacccaaacu

SEQ ID NO: 1404755 - RNA, 19 nt, Artificial Sequence
  Description of Artificial Sequence: Synthetic oligonucleotide
caacaccuccuuggagggu

SEQ ID NO: 1404756 - RNA, 19 nt, Artificial Sequence
  Description of Artificial Sequence: Synthetic oligonucleotide
cggagcgaggcccagcgcu

SEQ ID NO: 1404757 - RNA, 19 nt, Artificial Sequence
  Description of Artificial Sequence: Synthetic oligonucleotide
gccgaccggcagcgccccg

SEQ ID NO: 1404758 - RNA, 19 nt, Artificial Sequence
  Description of Artificial Sequence: Synthetic oligonucleotide
ccguccucgggucacuuuu

SEQ ID NO: 1404759 - RNA, 19 nt, Artificial Sequence
  Description of Artificial Sequence: Synthetic oligonucleotide
gcccgucucccggggcucc

SEQ ID NO: 1404760 - RNA, 19 nt, Artificial Sequence
  Description of Artificial Sequence: Synthetic oligonucleotide
ccggggcuccccauauucu

SEQ ID NO: 1404761 - RNA, 19 nt, Artificial Sequence
  Description of Artificial Sequence: Synthetic oligonucleotide
gcucaccccugggguugag

SEQ ID NO: 1404762 - RNA, 19 nt, Artificial Sequence
  Description of Artificial Sequence: Synthetic oligonucleotide
ggcccgucucccggggcuc

SEQ ID NO: 1404763 - RNA, 19 nt, Artificial Sequence
  Description of Artificial Sequence: Synthetic oligonucleotide
cccauccccuaaggucuuc

SEQ ID NO: 1404764 - RNA, 19 nt, Artificial Sequence
  Description of Artificial Sequence: Synthetic oligonucleotide
cgacacccgcaucacccaa

SEQ ID NO: 1404765 - RNA, 19 nt, Artificial Sequence
  Description of Artificial Sequence: Synthetic oligonucleotide
ccagcgcaaggcagcuaau

SEQ ID NO: 1404766 - RNA, 19 nt, Artificial Sequence
  Description of Artificial Sequence: Synthetic oligonucleotide
gcgucccgucaggcagcgc

SEQ ID NO: 1404767 - RNA, 19 nt, Artificial Sequence
  Description of Artificial Sequence: Synthetic oligonucleotide
cccguccucgggucacuuu

SEQ ID NO: 1404768 - RNA, 19 nt, Artificial Sequence
  Description of Artificial Sequence: Synthetic oligonucleotide
cgacuaccuucagaugauu

SEQ ID NO: 1404769 - RNA, 19 nt, Artificial Sequence
  Description of Artificial Sequence: Synthetic oligonucleotide
aaugauuccaggaaggucc

SEQ ID NO: 1404770 - RNA, 19 nt, Artificial Sequence
  Description of Artificial Sequence: Synthetic oligonucleotide
aauguggguuauuagcucc

SEQ ID NO: 1404771 - RNA, 19 nt, Artificial Sequence
  Description of Artificial Sequence: Synthetic oligonucleotide
aggaaagccaaucagugcc

SEQ ID NO: 1404772 - RNA, 19 nt, Artificial Sequence
  Description of Artificial Sequence: Synthetic oligonucleotide
uggacuuacccacagaagg

SEQ ID NO: 1404773 - RNA, 19 nt, Artificial Sequence
  Description of Artificial Sequence: Synthetic oligonucleotide
aagcuuaugaaacagcuga

SEQ ID NO: 1404774 - RNA, 19 nt, Artificial Sequence
  Description of Artificial Sequence: Synthetic oligonucleotide
aggcuuauaggauaugucc

SEQ ID NO: 1404775 - RNA, 19 nt, Artificial Sequence
  Description of Artificial Sequence: Synthetic oligonucleotide
aggaaacaaagccagauuc

SEQ ID NO: 1404776 - RNA, 19 nt, Artificial Sequence
  Description of Artificial Sequence: Synthetic oligonucleotide
uaucacaauaggcuuauag

SEQ ID NO: 1404777 - RNA, 19 nt, Artificial Sequence
  Description of Artificial Sequence: Synthetic oligonucleotide
aucacaauaggcuuauagg

SEQ ID NO: 1404778 - RNA, 19 nt, Artificial Sequence
  Description of Artificial Sequence: Synthetic oligonucleotide
aaagccuaucacaauaggc

SEQ ID NO: 1404779 - RNA, 19 nt, Artificial Sequence
  Description of Artificial Sequence: Synthetic oligonucleotide
ucaauuuuguuauacacau

SEQ ID NO: 1404780 - RNA, 19 nt, Artificial Sequence
  Description of Artificial Sequence: Synthetic oligonucleotide
ucacaauaggcuuauagga

SEQ ID NO: 1404781 - RNA, 19 nt, Artificial Sequence
  Description of Artificial Sequence: Synthetic oligonucleotide
acacguguucaacagaggc

SEQ ID NO: 1404782 - RNA, 19 nt, Artificial Sequence
  Description of Artificial Sequence: Synthetic oligonucleotide
uuuagaaguaggcugauuu

SEQ ID NO: 1404783 - RNA, 19 nt, Artificial Sequence
  Description of Artificial Sequence: Synthetic oligonucleotide
aguacuucggcguugaaga

SEQ ID NO: 1404784 - RNA, 19 nt, Artificial Sequence
  Description of Artificial Sequence: Synthetic oligonucleotide
uugggcuugaaguagaugu

SEQ ID NO: 1404785 - RNA, 19 nt, Artificial Sequence
  Description of Artificial Sequence: Synthetic oligonucleotide
uuuguauucaaugacccca

SEQ ID NO: 1404786 - RNA, 19 nt, Artificial Sequence
  Description of Artificial Sequence: Synthetic oligonucleotide
gauaacuacacuguugggc

SEQ ID NO: 1404787 - RNA, 19 nt, Artificial Sequence
  Description of Artificial Sequence: Synthetic oligonucleotide
auaacuacacuguugggcu

SEQ ID NO: 1404788 - RNA, 19 nt, Artificial Sequence
  Description of Artificial Sequence: Synthetic oligonucleotide
ugggguauauacuuuuccg

SEQ ID NO: 1404789 - RNA, 19 nt, Artificial Sequence
  Description of Artificial Sequence: Synthetic oligonucleotide
uuuggaugguuccaggagc

SEQ ID NO: 1404790 - RNA, 19 nt, Artificial Sequence
  Description of Artificial Sequence: Synthetic oligonucleotide
uugguguaaaugcagguga

SEQ ID NO: 1404791 - RNA, 19 nt, Artificial Sequence
  Description of Artificial Sequence: Synthetic oligonucleotide
uacucaugcaggaugagcu

SEQ ID NO: 1404792 - RNA, 19 nt, Artificial Sequence
  Description of Artificial Sequence: Synthetic oligonucleotide
caggagucaaguaagcagg

SEQ ID NO: 1404793 - RNA, 19 nt, Artificial Sequence
  Description of Artificial Sequence: Synthetic oligonucleotide
aaguaggcugauuuggaug

SEQ ID NO: 1404794 - RNA, 19 nt, Artificial Sequence
  Description of Artificial Sequence: Synthetic oligonucleotide
auacaggcagggcauauac

SEQ ID NO: 1404795 - RNA, 19 nt, Artificial Sequence
  Description of Artificial Sequence: Synthetic oligonucleotide
uagaaguaggcugauuugg

SEQ ID NO: 1404796 - RNA, 19 nt, Artificial Sequence
  Description of Artificial Sequence: Synthetic oligonucleotide
ucuacuucuuccaucgaga

SEQ ID NO: 1404797 - RNA, 19 nt, Artificial Sequence
  Description of Artificial Sequence: Synthetic oligonucleotide
ugaccguggaguuaaagga

SEQ ID NO: 1404798 - RNA, 19 nt, Artificial Sequence
  Description of Artificial Sequence: Synthetic oligonucleotide
guagauguugggcuuaugc

SEQ ID NO: 1404799 - RNA, 19 nt, Artificial Sequence
  Description of Artificial Sequence: Synthetic oligonucleotide
aagccaaucagugccacuc

SEQ ID NO: 1404800 - RNA, 19 nt, Artificial Sequence
  Description of Artificial Sequence: Synthetic oligonucleotide
aagccuaucacaauaggcu

SEQ ID NO: 1404801 - RNA, 19 nt, Artificial Sequence
  Description of Artificial Sequence: Synthetic oligonucleotide
ugacuauuucuucacaauc

SEQ ID NO: 1404802 - RNA, 19 nt, Artificial Sequence
  Description of Artificial Sequence: Synthetic oligonucleotide
cuuaugaaacagcugacuc

SEQ ID NO: 1404803 - RNA, 19 nt, Artificial Sequence
  Description of Artificial Sequence: Synthetic oligonucleotide
uauaggauauguccucagc

SEQ ID NO: 1404804 - RNA, 19 nt, Artificial Sequence
  Description of Artificial Sequence: Synthetic oligonucleotide
auaggaugcagcuucgcug

SEQ ID NO: 1404805 - RNA, 19 nt, Artificial Sequence
  Description of Artificial Sequence: Synthetic oligonucleotide
auuuggaugguuccaggag

SEQ ID NO: 1404806 - RNA, 19 nt, Artificial Sequence
  Description of Artificial Sequence: Synthetic oligonucleotide
accuuuguauucaaugacc

SEQ ID NO: 1404807 - RNA, 19 nt, Artificial Sequence
  Description of Artificial Sequence: Synthetic oligonucleotide
uuagaaguaggcugauuug

SEQ ID NO: 1404808 - RNA, 19 nt, Artificial Sequence
  Description of Artificial Sequence: Synthetic oligonucleotide
aaggcauacuugaacuggc

SEQ ID NO: 1404809 - RNA, 19 nt, Artificial Sequence
  Description of Artificial Sequence: Synthetic oligonucleotide
ucucggaagaguacuucgg

SEQ ID NO: 1404810 - RNA, 19 nt, Artificial Sequence
  Description of Artificial Sequence: Synthetic oligonucleotide
augacaucgaauccuucuc

SEQ ID NO: 1404811 - RNA, 19 nt, Artificial Sequence
  Description of Artificial Sequence: Synthetic oligonucleotide
ucggaagaguacuucggcg

SEQ ID NO: 1404812 - RNA, 19 nt, Artificial Sequence
  Description of Artificial Sequence: Synthetic oligonucleotide
uggagagcagucuucucgg

SEQ ID NO: 1404813 - RNA, 19 nt, Artificial Sequence
  Description of Artificial Sequence: Synthetic oligonucleotide
uucaaugaccccagggaug

SEQ ID NO: 1404814 - RNA, 19 nt, Artificial Sequence
  Description of Artificial Sequence: Synthetic oligonucleotide
aaugaccccagggaugcac

SEQ ID NO: 1404815 - RNA, 19 nt, Artificial Sequence
  Description of Artificial Sequence: Synthetic oligonucleotide
aagugcuagagcugcuguc

SEQ ID NO: 1404816 - RNA, 19 nt, Artificial Sequence
  Description of Artificial Sequence: Synthetic oligonucleotide
gaggcgaaugcccacagac

SEQ ID NO: 1404817 - RNA, 19 nt, Artificial Sequence
  Description of Artificial Sequence: Synthetic oligonucleotide
uauauacuuuuccgguuug

SEQ ID NO: 1404818 - RNA, 19 nt, Artificial Sequence
  Description of Artificial Sequence: Synthetic oligonucleotide
ucagacucaagaaggugga

SEQ ID NO: 1404819 - RNA, 19 nt, Artificial Sequence
  Description of Artificial Sequence: Synthetic oligonucleotide
cuugagagcccacaugggc

SEQ ID NO: 1404820 - RNA, 19 nt, Artificial Sequence
  Description of Artificial Sequence: Synthetic oligonucleotide
ugauuuggaugguuccagg

SEQ ID NO: 1404821 - RNA, 19 nt, Artificial Sequence
  Description of Artificial Sequence: Synthetic oligonucleotide
ugugucagugugaccgugg

SEQ ID NO: 1404822 - RNA, 19 nt, Artificial Sequence
  Description of Artificial Sequence: Synthetic oligonucleotide
cuuuguauucaaugacccc

SEQ ID NO: 1404823 - RNA, 19 nt, Artificial Sequence
  Description of Artificial Sequence: Synthetic oligonucleotide
augacgacgacaucagcug

SEQ ID NO: 1404824 - RNA, 19 nt, Artificial Sequence
  Description of Artificial Sequence: Synthetic oligonucleotide
uuauaggauauguccucag

SEQ ID NO: 1404825 - RNA, 19 nt, Artificial Sequence
  Description of Artificial Sequence: Synthetic oligonucleotide
gcauacuugaacuggcugg

SEQ ID NO: 1404826 - RNA, 19 nt, Artificial Sequence
  Description of Artificial Sequence: Synthetic oligonucleotide
uguauucaaugaccccagg

SEQ ID NO: 1404827 - RNA, 19 nt, Artificial Sequence
  Description of Artificial Sequence: Synthetic oligonucleotide
gauguugggcuuaugcuug

SEQ ID NO: 1404828 - RNA, 19 nt, Artificial Sequence
  Description of Artificial Sequence: Synthetic oligonucleotide
agucaaguaagcaggcugg

SEQ ID NO: 1404829 - RNA, 19 nt, Artificial Sequence
  Description of Artificial Sequence: Synthetic oligonucleotide
ugugggagguuucauccug

SEQ ID NO: 1404830 - RNA, 19 nt, Artificial Sequence
  Description of Artificial Sequence: Synthetic oligonucleotide
ugauaacuacacuguuggg

SEQ ID NO: 1404831 - RNA, 19 nt, Artificial Sequence
  Description of Artificial Sequence: Synthetic oligonucleotide
uauacuuuuccgguuugug

SEQ ID NO: 1404832 - RNA, 19 nt, Artificial Sequence
  Description of Artificial Sequence: Synthetic oligonucleotide
ugguguaaaugcaggugag

SEQ ID NO: 1404833 - RNA, 19 nt, Artificial Sequence
  Description of Artificial Sequence: Synthetic oligonucleotide
gggguauauacuuuuccgg

SEQ ID NO: 1404834 - RNA, 19 nt, Artificial Sequence
  Description of Artificial Sequence: Synthetic oligonucleotide
uggaguuaaaggagaugcc

SEQ ID NO: 1404835 - RNA, 19 nt, Artificial Sequence
  Description of Artificial Sequence: Synthetic oligonucleotide
auucaaugaccccagggau

SEQ ID NO: 1404836 - RNA, 19 nt, Artificial Sequence
  Description of Artificial Sequence: Synthetic oligonucleotide
gaugcgauggcacacgugu

SEQ ID NO: 1404837 - RNA, 19 nt, Artificial Sequence
  Description of Artificial Sequence: Synthetic oligonucleotide
aggguggugaacucauagg

SEQ ID NO: 1404838 - RNA, 19 nt, Artificial Sequence
  Description of Artificial Sequence: Synthetic oligonucleotide
uuccaucgagaucugguca

SEQ ID NO: 1404839 - RNA, 19 nt, Artificial Sequence
  Description of Artificial Sequence: Synthetic oligonucleotide
ugugagucaggccuacccu

SEQ ID NO: 1404840 - RNA, 19 nt, Artificial Sequence
  Description of Artificial Sequence: Synthetic oligonucleotide
uaggauauguccucagcaa

SEQ ID NO: 1404841 - RNA, 19 nt, Artificial Sequence
  Description of Artificial Sequence: Synthetic oligonucleotide
uuauuagcuccuugagagc

SEQ ID NO: 1404842 - RNA, 19 nt, Artificial Sequence
  Description of Artificial Sequence: Synthetic oligonucleotide
cacguguucaacagaggcc

SEQ ID NO: 1404843 - RNA, 19 nt, Artificial Sequence
  Description of Artificial Sequence: Synthetic oligonucleotide
agggaugcacgucagggug

SEQ ID NO: 1404844 - RNA, 19 nt, Artificial Sequence
  Description of Artificial Sequence: Synthetic oligonucleotide
ucggcguugaagaucuugu

SEQ ID NO: 1404845 - RNA, 19 nt, Artificial Sequence
  Description of Artificial Sequence: Synthetic oligonucleotide
uacuggagaagcuuaugaa

SEQ ID NO: 1404846 - RNA, 19 nt, Artificial Sequence
  Description of Artificial Sequence: Synthetic oligonucleotide
uaggcuuauaggauauguc

SEQ ID NO: 1404847 - RNA, 19 nt, Artificial Sequence
  Description of Artificial Sequence: Synthetic oligonucleotide
auaggcuuauaggauaugu

SEQ ID NO: 1404848 - RNA, 19 nt, Artificial Sequence
  Description of Artificial Sequence: Synthetic oligonucleotide
cauacuugaacuggcuggc

SEQ ID NO: 1404849 - RNA, 19 nt, Artificial Sequence
  Description of Artificial Sequence: Synthetic oligonucleotide
aaaggagaugccaccaccu

SEQ ID NO: 1404850 - RNA, 19 nt, Artificial Sequence
  Description of Artificial Sequence: Synthetic oligonucleotide
gagguuucauccugaggcc

SEQ ID NO: 1404851 - RNA, 19 nt, Artificial Sequence
  Description of Artificial Sequence: Synthetic oligonucleotide
ccuuuguauucaaugaccc

SEQ ID NO: 1404852 - RNA, 19 nt, Artificial Sequence
  Description of Artificial Sequence: Synthetic oligonucleotide
cacaccaaggcauacuuga

SEQ ID NO: 1404853 - RNA, 19 nt, Artificial Sequence
  Description of Artificial Sequence: Synthetic oligonucleotide
gagaaugauggcaucugug

SEQ ID NO: 1404854 - RNA, 19 nt, Artificial Sequence
  Description of Artificial Sequence: Synthetic oligonucleotide
gacacuuuggcugggcccc

SEQ ID NO: 1404855 - RNA, 19 nt, Artificial Sequence
  Description of Artificial Sequence: Synthetic oligonucleotide
uguguugggaggaccugug

SEQ ID NO: 1404856 - RNA, 19 nt, Artificial Sequence
  Description of Artificial Sequence: Synthetic oligonucleotide
ucgccugacuucaugacau

SEQ ID NO: 1404857 - RNA, 19 nt, Artificial Sequence
  Description of Artificial Sequence: Synthetic oligonucleotide
caucaugacgacgacauca

SEQ ID NO: 1404858 - RNA, 19 nt, Artificial Sequence
  Description of Artificial Sequence: Synthetic oligonucleotide
cucggaagaguacuucggc

SEQ ID NO: 1404859 - RNA, 19 nt, Artificial Sequence
  Description of Artificial Sequence: Synthetic oligonucleotide
auacacauacaggcagggc

SEQ ID NO: 1404860 - RNA, 19 nt, Artificial Sequence
  Description of Artificial Sequence: Synthetic oligonucleotide
acggucuacuucuuccauc

SEQ ID NO: 1404861 - RNA, 19 nt, Artificial Sequence
  Description of Artificial Sequence: Synthetic oligonucleotide
accugugggagguuucauc

SEQ ID NO: 1404862 - RNA, 19 nt, Artificial Sequence
  Description of Artificial Sequence: Synthetic oligonucleotide
aucagugccacucgggcau

SEQ ID NO: 1404863 - RNA, 19 nt, Artificial Sequence
  Description of Artificial Sequence: Synthetic oligonucleotide
cauggugugagucaggccu

SEQ ID NO: 1404864 - RNA, 19 nt, Artificial Sequence
  Description of Artificial Sequence: Synthetic oligonucleotide
ucgagaucuggucaauuuu

SEQ ID NO: 1404865 - RNA, 19 nt, Artificial Sequence
  Description of Artificial Sequence: Synthetic oligonucleotide
cuuccaucgagaucugguc

SEQ ID NO: 1404866 - RNA, 19 nt, Artificial Sequence
  Description of Artificial Sequence: Synthetic oligonucleotide
aggccuacccucugcgggc

SEQ ID NO: 1404867 - RNA, 19 nt, Artificial Sequence
  Description of Artificial Sequence: Synthetic oligonucleotide
aagucuggucucuguccuc

SEQ ID NO: 1404868 - RNA, 19 nt, Artificial Sequence
  Description of Artificial Sequence: Synthetic oligonucleotide
cacugcuuacuggagaagc

SEQ ID NO: 1404869 - RNA, 19 nt, Artificial Sequence
  Description of Artificial Sequence: Synthetic oligonucleotide
caacagaggccccuuuccg

SEQ ID NO: 1404870 - RNA, 19 nt, Artificial Sequence
  Description of Artificial Sequence: Synthetic oligonucleotide
agacucaagaagguggacu

SEQ ID NO: 1404871 - RNA, 19 nt, Artificial Sequence
  Description of Artificial Sequence: Synthetic oligonucleotide
ugcuuacuggagaagcuua

SEQ ID NO: 1404872 - RNA, 19 nt, Artificial Sequence
  Description of Artificial Sequence: Synthetic oligonucleotide
uccaucgagaucuggucaa

SEQ ID NO: 1404873 - RNA, 19 nt, Artificial Sequence
  Description of Artificial Sequence: Synthetic oligonucleotide
aauaggcuuauaggauaug

SEQ ID NO: 1404874 - RNA, 19 nt, Artificial Sequence
  Description of Artificial Sequence: Synthetic oligonucleotide
acgacgacaucagcugugc

SEQ ID NO: 1404875 - RNA, 19 nt, Artificial Sequence
  Description of Artificial Sequence: Synthetic oligonucleotide
acgacaucagcugugcgug

SEQ ID NO: 1404876 - RNA, 19 nt, Artificial Sequence
  Description of Artificial Sequence: Synthetic oligonucleotide
ugcgggcuguacuuggugc

SEQ ID NO: 1404877 - RNA, 19 nt, Artificial Sequence
  Description of Artificial Sequence: Synthetic oligonucleotide
agcuuaugaaacagcugac

SEQ ID NO: 1404878 - RNA, 19 nt, Artificial Sequence
  Description of Artificial Sequence: Synthetic oligonucleotide
ucaugcaggaugagcugga

SEQ ID NO: 1404879 - RNA, 19 nt, Artificial Sequence
  Description of Artificial Sequence: Synthetic oligonucleotide
cugauuuggaugguuccag

SEQ ID NO: 1404880 - RNA, 19 nt, Artificial Sequence
  Description of Artificial Sequence: Synthetic oligonucleotide
uugaggcgaaugcccacag

SEQ ID NO: 1404881 - RNA, 19 nt, Artificial Sequence
  Description of Artificial Sequence: Synthetic oligonucleotide
caggccuacccucugcggg

SEQ ID NO: 1404882 - RNA, 19 nt, Artificial Sequence
  Description of Artificial Sequence: Synthetic oligonucleotide
acuuuuccgguuugugugu

SEQ ID NO: 1404883 - RNA, 19 nt, Artificial Sequence
  Description of Artificial Sequence: Synthetic oligonucleotide
ccugugggagguuucaucc

SEQ ID NO: 1404884 - RNA, 19 nt, Artificial Sequence
  Description of Artificial Sequence: Synthetic oligonucleotide
aucgccugacuucaugaca

SEQ ID NO: 1404885 - RNA, 19 nt, Artificial Sequence
  Description of Artificial Sequence: Synthetic oligonucleotide
ucaaguaagcaggcuggug

SEQ ID NO: 1404886 - RNA, 19 nt, Artificial Sequence
  Description of Artificial Sequence: Synthetic oligonucleotide
agccaaucagugccacucg

SEQ ID NO: 1404887 - RNA, 19 nt, Artificial Sequence
  Description of Artificial Sequence: Synthetic oligonucleotide
cucgccugucccaacacug

SEQ ID NO: 1404888 - RNA, 19 nt, Artificial Sequence
  Description of Artificial Sequence: Synthetic oligonucleotide
uuaugcuuguugaggcgaa

SEQ ID NO: 1404889 - RNA, 19 nt, Artificial Sequence
  Description of Artificial Sequence: Synthetic oligonucleotide
ucaugacgacgacaucagc

SEQ ID NO: 1404890 - RNA, 19 nt, Artificial Sequence
  Description of Artificial Sequence: Synthetic oligonucleotide
ugugcgugcuacagcaauc

SEQ ID NO: 1404891 - RNA, 19 nt, Artificial Sequence
  Description of Artificial Sequence: Synthetic oligonucleotide
aucaugacgacgacaucag

SEQ ID NO: 1404892 - RNA, 19 nt, Artificial Sequence
  Description of Artificial Sequence: Synthetic oligonucleotide
auacuugaacuggcuggcc

SEQ ID NO: 1404893 - RNA, 19 nt, Artificial Sequence
  Description of Artificial Sequence: Synthetic oligonucleotide
ugugaccguggaguuaaag

SEQ ID NO: 1404894 - RNA, 19 nt, Artificial Sequence
  Description of Artificial Sequence: Synthetic oligonucleotide
ucaggccuacccucugcgg

SEQ ID NO: 1404895 - RNA, 19 nt, Artificial Sequence
  Description of Artificial Sequence: Synthetic oligonucleotide
uucggcguugaagaucuug

SEQ ID NO: 1404896 - RNA, 19 nt, Artificial Sequence
  Description of Artificial Sequence: Synthetic oligonucleotide
gauggaugcgauggcacac

SEQ ID NO: 1404897 - RNA, 19 nt, Artificial Sequence
  Description of Artificial Sequence: Synthetic oligonucleotide
ugacgacgacaucagcugu

SEQ ID NO: 1404898 - RNA, 19 nt, Artificial Sequence
  Description of Artificial Sequence: Synthetic oligonucleotide
uucaucuggagagcagucu

SEQ ID NO: 1404899 - RNA, 19 nt, Artificial Sequence
  Description of Artificial Sequence: Synthetic oligonucleotide
ugacuucaugacaucgaau

SEQ ID NO: 1404900 - RNA, 19 nt, Artificial Sequence
  Description of Artificial Sequence: Synthetic oligonucleotide
caugacgacgacaucagcu

SEQ ID NO: 1404901 - RNA, 19 nt, Artificial Sequence
  Description of Artificial Sequence: Synthetic oligonucleotide
uauacacccgguugcccac

SEQ ID NO: 1404902 - RNA, 19 nt, Artificial Sequence
  Description of Artificial Sequence: Synthetic oligonucleotide
uccgguuugugugucccag

SEQ ID NO: 1404903 - RNA, 19 nt, Artificial Sequence
  Description of Artificial Sequence: Synthetic oligonucleotide
agccuaucacaauaggcuu

SEQ ID NO: 1404904 - RNA, 19 nt, Artificial Sequence
  Description of Artificial Sequence: Synthetic oligonucleotide
ggcguugaagaucuuguac

SEQ ID NO: 1404905 - RNA, 19 nt, Artificial Sequence
  Description of Artificial Sequence: Synthetic oligonucleotide
cacacguguucaacagagg

SEQ ID NO: 1404906 - RNA, 19 nt, Artificial Sequence
  Description of Artificial Sequence: Synthetic oligonucleotide
gacgacaucagcugugcgu

SEQ ID NO: 1404907 - RNA, 19 nt, Artificial Sequence
  Description of Artificial Sequence: Synthetic oligonucleotide
guacucaugcaggaugagc

SEQ ID NO: 1404908 - RNA, 19 nt, Artificial Sequence
  Description of Artificial Sequence: Synthetic oligonucleotide
gugaacucauaggaugcag

SEQ ID NO: 1404909 - RNA, 19 nt, Artificial Sequence
  Description of Artificial Sequence: Synthetic oligonucleotide
auggaugcgauggcacacg

SEQ ID NO: 1404910 - RNA, 19 nt, Artificial Sequence
  Description of Artificial Sequence: Synthetic oligonucleotide
ugccacucgggcaucgccu

SEQ ID NO: 1404911 - RNA, 19 nt, Artificial Sequence
  Description of Artificial Sequence: Synthetic oligonucleotide
guaugacuauuucuucaca

SEQ ID NO: 1404912 - RNA, 19 nt, Artificial Sequence
  Description of Artificial Sequence: Synthetic oligonucleotide
agucuucucggaagaguac

SEQ ID NO: 1404913 - RNA, 19 nt, Artificial Sequence
  Description of Artificial Sequence: Synthetic oligonucleotide
ggaguuaaaggagaugcca

SEQ ID NO: 1404914 - RNA, 19 nt, Artificial Sequence
  Description of Artificial Sequence: Synthetic oligonucleotide
caaugauuccaggaagguc

SEQ ID NO: 1404915 - RNA, 19 nt, Artificial Sequence
  Description of Artificial Sequence: Synthetic oligonucleotide
ggcgaaugcccacagacuc

SEQ ID NO: 1404916 - RNA, 19 nt, Artificial Sequence
  Description of Artificial Sequence: Synthetic oligonucleotide
gggaccucugaacaucucc

SEQ ID NO: 1404917 - RNA, 19 nt, Artificial Sequence
  Description of Artificial Sequence: Synthetic oligonucleotide
uguuggcaccuuuguauuc

SEQ ID NO: 1404918 - RNA, 19 nt, Artificial Sequence
  Description of Artificial Sequence: Synthetic oligonucleotide
agaaguaggcugauuugga

SEQ ID NO: 1404919 - RNA, 19 nt, Artificial Sequence
  Description of Artificial Sequence: Synthetic oligonucleotide
cuuacuggagaagcuuaug

SEQ ID NO: 1404920 - RNA, 19 nt, Artificial Sequence
  Description of Artificial Sequence: Synthetic oligonucleotide
uguugaggcgaaugcccac

SEQ ID NO: 1404921 - RNA, 19 nt, Artificial Sequence
  Description of Artificial Sequence: Synthetic oligonucleotide
guguccaaguccccaggag

SEQ ID NO: 1404922 - RNA, 19 nt, Artificial Sequence
  Description of Artificial Sequence: Synthetic oligonucleotide
ucugugaagucuggucucu

SEQ ID NO: 1404923 - RNA, 19 nt, Artificial Sequence
  Description of Artificial Sequence: Synthetic oligonucleotide
gggcauauacacccgguug

SEQ ID NO: 1404924 - RNA, 19 nt, Artificial Sequence
  Description of Artificial Sequence: Synthetic oligonucleotide
ggcauacuugaacuggcug

SEQ ID NO: 1404925 - RNA, 19 nt, Artificial Sequence
  Description of Artificial Sequence: Synthetic oligonucleotide
caucagacucaagaaggug

SEQ ID NO: 1404926 - RNA, 19 nt, Artificial Sequence
  Description of Artificial Sequence: Synthetic oligonucleotide
uccugggguauauacuuuu

SEQ ID NO: 1404927 - RNA, 19 nt, Artificial Sequence
  Description of Artificial Sequence: Synthetic oligonucleotide
accccagggaugcacguca

SEQ ID NO: 1404928 - RNA, 19 nt, Artificial Sequence
  Description of Artificial Sequence: Synthetic oligonucleotide
cacccgguugcccacaauc

SEQ ID NO: 1404929 - RNA, 19 nt, Artificial Sequence
  Description of Artificial Sequence: Synthetic oligonucleotide
acgagggacagcccugugu

SEQ ID NO: 1404930 - RNA, 19 nt, Artificial Sequence
  Description of Artificial Sequence: Synthetic oligonucleotide
ucgggcaucgccugacuuc

SEQ ID NO: 1404931 - RNA, 19 nt, Artificial Sequence
  Description of Artificial Sequence: Synthetic oligonucleotide
agaucuggucaauuuuguu

SEQ ID NO: 1404932 - RNA, 19 nt, Artificial Sequence
  Description of Artificial Sequence: Synthetic oligonucleotide
ggcugauuuggaugguucc

SEQ ID NO: 1404933 - RNA, 19 nt, Artificial Sequence
  Description of Artificial Sequence: Synthetic oligonucleotide
ucaugacaucgaauccuuc

SEQ ID NO: 1404934 - RNA, 19 nt, Artificial Sequence
  Description of Artificial Sequence: Synthetic oligonucleotide
gugagucaggccuacccuc

SEQ ID NO: 1404935 - RNA, 19 nt, Artificial Sequence
  Description of Artificial Sequence: Synthetic oligonucleotide
guuggcaccuuuguauuca

SEQ ID NO: 1404936 - RNA, 19 nt, Artificial Sequence
  Description of Artificial Sequence: Synthetic oligonucleotide
caucugugaagucuggucu

SEQ ID NO: 1404937 - RNA, 19 nt, Artificial Sequence
  Description of Artificial Sequence: Synthetic oligonucleotide
aucgaauccuucuccuuuu

SEQ ID NO: 1404938 - RNA, 19 nt, Artificial Sequence
  Description of Artificial Sequence: Synthetic oligonucleotide
acggccucucccuugugcu

SEQ ID NO: 1404939 - RNA, 19 nt, Artificial Sequence
  Description of Artificial Sequence: Synthetic oligonucleotide
augcacgucagggugguga

SEQ ID NO: 1404940 - RNA, 19 nt, Artificial Sequence
  Description of Artificial Sequence: Synthetic oligonucleotide
uggaugcgauggcacacgu

SEQ ID NO: 1404941 - RNA, 19 nt, Artificial Sequence
  Description of Artificial Sequence: Synthetic oligonucleotide
uacuucggcguugaagauc

SEQ ID NO: 1404942 - RNA, 19 nt, Artificial Sequence
  Description of Artificial Sequence: Synthetic oligonucleotide
gacucaagaagguggacuu

SEQ ID NO: 1404943 - RNA, 19 nt, Artificial Sequence
  Description of Artificial Sequence: Synthetic oligonucleotide
guauauacuuuuccgguuu

SEQ ID NO: 1404944 - RNA, 19 nt, Artificial Sequence
  Description of Artificial Sequence: Synthetic oligonucleotide
gacuuacccacagaaggaa

SEQ ID NO: 1404945 - RNA, 19 nt, Artificial Sequence
  Description of Artificial Sequence: Synthetic oligonucleotide
gccgcuaagugcuagagcu

SEQ ID NO: 1404946 - RNA, 19 nt, Artificial Sequence
  Description of Artificial Sequence: Synthetic oligonucleotide
ggacacuuuggcugggccc

SEQ ID NO: 1404947 - RNA, 19 nt, Artificial Sequence
  Description of Artificial Sequence: Synthetic oligonucleotide
acugcuuacuggagaagcu

SEQ ID NO: 1404948 - RNA, 19 nt, Artificial Sequence
  Description of Artificial Sequence: Synthetic oligonucleotide
uggugcugguaccccacac

SEQ ID NO: 1404949 - RNA, 19 nt, Artificial Sequence
  Description of Artificial Sequence: Synthetic oligonucleotide
ccaaucagugccacucggg

SEQ ID NO: 1404950 - RNA, 19 nt, Artificial Sequence
  Description of Artificial Sequence: Synthetic oligonucleotide
agucuggucucuguccucu

SEQ ID NO: 1404951 - RNA, 19 nt, Artificial Sequence
  Description of Artificial Sequence: Synthetic oligonucleotide
gaaguaggcugauuuggau

SEQ ID NO: 1404952 - RNA, 19 nt, Artificial Sequence
  Description of Artificial Sequence: Synthetic oligonucleotide
cagucuucucggaagagua

SEQ ID NO: 1404953 - RNA, 19 nt, Artificial Sequence
  Description of Artificial Sequence: Synthetic oligonucleotide
acugugucagugugaccgu

SEQ ID NO: 1404954 - RNA, 19 nt, Artificial Sequence
  Description of Artificial Sequence: Synthetic oligonucleotide
cacaauaggcuuauaggau

SEQ ID NO: 1404955 - RNA, 19 nt, Artificial Sequence
  Description of Artificial Sequence: Synthetic oligonucleotide
cuucaugacaucgaauccu

SEQ ID NO: 1404956 - RNA, 19 nt, Artificial Sequence
  Description of Artificial Sequence: Synthetic oligonucleotide
ugcacgucaggguggugaa

SEQ ID NO: 1404957 - RNA, 19 nt, Artificial Sequence
  Description of Artificial Sequence: Synthetic oligonucleotide
ggcggggcugcuuugggag

SEQ ID NO: 1404958 - RNA, 19 nt, Artificial Sequence
  Description of Artificial Sequence: Synthetic oligonucleotide
gccaaucagugccacucgg

SEQ ID NO: 1404959 - RNA, 19 nt, Artificial Sequence
  Description of Artificial Sequence: Synthetic oligonucleotide
ggaccucugaacaucuccc

SEQ ID NO: 1404960 - RNA, 19 nt, Artificial Sequence
  Description of Artificial Sequence: Synthetic oligonucleotide
uuuuagaaguaggcugauu

SEQ ID NO: 1404961 - RNA, 19 nt, Artificial Sequence
  Description of Artificial Sequence: Synthetic oligonucleotide
ugcgugcuacagcaaucac

SEQ ID NO: 1404962 - RNA, 19 nt, Artificial Sequence
  Description of Artificial Sequence: Synthetic oligonucleotide
cacggccucucccuugugc

SEQ ID NO: 1404963 - RNA, 19 nt, Artificial Sequence
  Description of Artificial Sequence: Synthetic oligonucleotide
caggcuggugguaugacua

SEQ ID NO: 1404964 - RNA, 19 nt, Artificial Sequence
  Description of Artificial Sequence: Synthetic oligonucleotide
ccucugaacaucucccuug

SEQ ID NO: 1404965 - RNA, 19 nt, Artificial Sequence
  Description of Artificial Sequence: Synthetic oligonucleotide
uacuuggugcugguacccc

SEQ ID NO: 1404966 - RNA, 19 nt, Artificial Sequence
  Description of Artificial Sequence: Synthetic oligonucleotide
gggagguuucauccugagg

SEQ ID NO: 1404967 - RNA, 19 nt, Artificial Sequence
  Description of Artificial Sequence: Synthetic oligonucleotide
agcgauggaugcgauggca

SEQ ID NO: 1404968 - RNA, 19 nt, Artificial Sequence
  Description of Artificial Sequence: Synthetic oligonucleotide
acaucgaauccuucuccuu

SEQ ID NO: 1404969 - RNA, 19 nt, Artificial Sequence
  Description of Artificial Sequence: Synthetic oligonucleotide
agcagggaccucugaacau

SEQ ID NO: 1404970 - RNA, 19 nt, Artificial Sequence
  Description of Artificial Sequence: Synthetic oligonucleotide
ucgaauccuucuccuuuua

SEQ ID NO: 1404971 - RNA, 19 nt, Artificial Sequence
  Description of Artificial Sequence: Synthetic oligonucleotide
gagcgauggaugcgauggc

SEQ ID NO: 1404972 - RNA, 19 nt, Artificial Sequence
  Description of Artificial Sequence: Synthetic oligonucleotide
cugacucaagagucccuuc

SEQ ID NO: 1404973 - RNA, 19 nt, Artificial Sequence
  Description of Artificial Sequence: Synthetic oligonucleotide
ucaugccgcagcugauaac

SEQ ID NO: 1404974 - RNA, 19 nt, Artificial Sequence
  Description of Artificial Sequence: Synthetic oligonucleotide
accucugaacaucucccuu

SEQ ID NO: 1404975 - RNA, 19 nt, Artificial Sequence
  Description of Artificial Sequence: Synthetic oligonucleotide
agugccacucgggcaucgc

SEQ ID NO: 1404976 - RNA, 19 nt, Artificial Sequence
  Description of Artificial Sequence: Synthetic oligonucleotide
gcguugaagaucuuguacu

SEQ ID NO: 1404977 - RNA, 19 nt, Artificial Sequence
  Description of Artificial Sequence: Synthetic oligonucleotide
uaacuacacuguugggcuu

SEQ ID NO: 1404978 - RNA, 19 nt, Artificial Sequence
  Description of Artificial Sequence: Synthetic oligonucleotide
caugccgcagcugauaacu

SEQ ID NO: 1404979 - RNA, 19 nt, Artificial Sequence
  Description of Artificial Sequence: Synthetic oligonucleotide
cccuagaaagccuaucaca

SEQ ID NO: 1404980 - RNA, 19 nt, Artificial Sequence
  Description of Artificial Sequence: Synthetic oligonucleotide
guugaggcgaaugcccaca

SEQ ID NO: 1404981 - RNA, 19 nt, Artificial Sequence
  Description of Artificial Sequence: Synthetic oligonucleotide
agcccacaugggcacagga

SEQ ID NO: 1404982 - RNA, 19 nt, Artificial Sequence
  Description of Artificial Sequence: Synthetic oligonucleotide
gcuagagcugcugucagga

SEQ ID NO: 1404983 - RNA, 19 nt, Artificial Sequence
  Description of Artificial Sequence: Synthetic oligonucleotide
gcgugcuacagcaaucacc

SEQ ID NO: 1404984 - RNA, 19 nt, Artificial Sequence
  Description of Artificial Sequence: Synthetic oligonucleotide
ugcugguaccccacaccaa

SEQ ID NO: 1404985 - RNA, 19 nt, Artificial Sequence
  Description of Artificial Sequence: Synthetic oligonucleotide
uuccgguuuguguguccca

SEQ ID NO: 1404986 - RNA, 19 nt, Artificial Sequence
  Description of Artificial Sequence: Synthetic oligonucleotide
gugccacucgggcaucgcc

SEQ ID NO: 1404987 - RNA, 19 nt, Artificial Sequence
  Description of Artificial Sequence: Synthetic oligonucleotide
acccucugcgggcuguacu

SEQ ID NO: 1404988 - RNA, 19 nt, Artificial Sequence
  Description of Artificial Sequence: Synthetic oligonucleotide
aggcuguagguucccuaga

SEQ ID NO: 1404989 - RNA, 19 nt, Artificial Sequence
  Description of Artificial Sequence: Synthetic oligonucleotide
gugcgugcuacagcaauca

SEQ ID NO: 1404990 - RNA, 19 nt, Artificial Sequence
  Description of Artificial Sequence: Synthetic oligonucleotide
cuuuuccgguuuguguguc

SEQ ID NO: 1404991 - RNA, 19 nt, Artificial Sequence
  Description of Artificial Sequence: Synthetic oligonucleotide
gcaucgccugacuucauga

SEQ ID NO: 1404992 - RNA, 19 nt, Artificial Sequence
  Description of Artificial Sequence: Synthetic oligonucleotide
augauuccaggaaggucca

SEQ ID NO: 1404993 - RNA, 19 nt, Artificial Sequence
  Description of Artificial Sequence: Synthetic oligonucleotide
gcauauacacccgguugcc

SEQ ID NO: 1404994 - RNA, 19 nt, Artificial Sequence
  Description of Artificial Sequence: Synthetic oligonucleotide
guucccuagaaagccuauc

SEQ ID NO: 1404995 - RNA, 19 nt, Artificial Sequence
  Description of Artificial Sequence: Synthetic oligonucleotide
gaccucugaacaucucccu

SEQ ID NO: 1404996 - RNA, 19 nt, Artificial Sequence
  Description of Artificial Sequence: Synthetic oligonucleotide
ggccagguacucccaaagc

SEQ ID NO: 1404997 - RNA, 19 nt, Artificial Sequence
  Description of Artificial Sequence: Synthetic oligonucleotide
ggcaucgccugacuucaug

SEQ ID NO: 1404998 - RNA, 19 nt, Artificial Sequence
  Description of Artificial Sequence: Synthetic oligonucleotide
gaggccgcuaagugcuaga

SEQ ID NO: 1404999 - RNA, 19 nt, Artificial Sequence
  Description of Artificial Sequence: Synthetic oligonucleotide
gucuucucggaagaguacu

SEQ ID NO: 1405000 - RNA, 19 nt, Artificial Sequence
  Description of Artificial Sequence: Synthetic oligonucleotide
cgugcuacagcaaucaccu

SEQ ID NO: 1405001 - RNA, 19 nt, Artificial Sequence
  Description of Artificial Sequence: Synthetic oligonucleotide
cuagaaagccuaucacaau

SEQ ID NO: 1405002 - RNA, 19 nt, Artificial Sequence
  Description of Artificial Sequence: Synthetic oligonucleotide
acccgguugcccacaauca

SEQ ID NO: 1405003 - RNA, 19 nt, Artificial Sequence
  Description of Artificial Sequence: Synthetic oligonucleotide
aggcgaaugcccacagacu

SEQ ID NO: 1405004 - RNA, 19 nt, Artificial Sequence
  Description of Artificial Sequence: Synthetic oligonucleotide
ggcuuauaggauauguccu

SEQ ID NO: 1405005 - RNA, 19 nt, Artificial Sequence
  Description of Artificial Sequence: Synthetic oligonucleotide
uguggguuauuagcuccuu

SEQ ID NO: 1405006 - RNA, 19 nt, Artificial Sequence
  Description of Artificial Sequence: Synthetic oligonucleotide
gguauauacuuuuccgguu

SEQ ID NO: 1405007 - RNA, 19 nt, Artificial Sequence
  Description of Artificial Sequence: Synthetic oligonucleotide
cagacucaagaagguggac

SEQ ID NO: 1405008 - RNA, 19 nt, Artificial Sequence
  Description of Artificial Sequence: Synthetic oligonucleotide
uuccgggcuagacggucua

SEQ ID NO: 1405009 - RNA, 19 nt, Artificial Sequence
  Description of Artificial Sequence: Synthetic oligonucleotide
gcugauuuggaugguucca

SEQ ID NO: 1405010 - RNA, 19 nt, Artificial Sequence
  Description of Artificial Sequence: Synthetic oligonucleotide
cuacuucuuccaucgagau

SEQ ID NO: 1405011 - RNA, 19 nt, Artificial Sequence
  Description of Artificial Sequence: Synthetic oligonucleotide
caucgaauccuucuccuuu

SEQ ID NO: 1405012 - RNA, 19 nt, Artificial Sequence
  Description of Artificial Sequence: Synthetic oligonucleotide
cugugucagugugaccgug

SEQ ID NO: 1405013 - RNA, 19 nt, Artificial Sequence
  Description of Artificial Sequence: Synthetic oligonucleotide
gggcuagacggucuacuuc

SEQ ID NO: 1405014 - RNA, 19 nt, Artificial Sequence
  Description of Artificial Sequence: Synthetic oligonucleotide
cgcuaagugcuagagcugc

SEQ ID NO: 1405015 - RNA, 19 nt, Artificial Sequence
  Description of Artificial Sequence: Synthetic oligonucleotide
ggccgcuaagugcuagagc

SEQ ID NO: 1405016 - RNA, 19 nt, Artificial Sequence
  Description of Artificial Sequence: Synthetic oligonucleotide
ugggaggaauguggguuau

SEQ ID NO: 1405017 - RNA, 19 nt, Artificial Sequence
  Description of Artificial Sequence: Synthetic oligonucleotide
ccugggguauauacuuuuc

SEQ ID NO: 1405018 - RNA, 19 nt, Artificial Sequence
  Description of Artificial Sequence: Synthetic oligonucleotide
acucgggcaucgccugacu

SEQ ID NO: 1405019 - RNA, 19 nt, Artificial Sequence
  Description of Artificial Sequence: Synthetic oligonucleotide
gagcacugugucaguguga

SEQ ID NO: 1405020 - RNA, 19 nt, Artificial Sequence
  Description of Artificial Sequence: Synthetic oligonucleotide
acucaagaagguggacuua

SEQ ID NO: 1405021 - RNA, 19 nt, Artificial Sequence
  Description of Artificial Sequence: Synthetic oligonucleotide
gcuuaugaaacagcugacu

SEQ ID NO: 1405022 - RNA, 19 nt, Artificial Sequence
  Description of Artificial Sequence: Synthetic oligonucleotide
cuacacuguugggcuuccg

SEQ ID NO: 1405023 - RNA, 19 nt, Artificial Sequence
  Description of Artificial Sequence: Synthetic oligonucleotide
ccugaggccgcuaagugcu

SEQ ID NO: 1405024 - RNA, 19 nt, Artificial Sequence
  Description of Artificial Sequence: Synthetic oligonucleotide
cacgucaggguggugaacu

SEQ ID NO: 1405025 - RNA, 19 nt, Artificial Sequence
  Description of Artificial Sequence: Synthetic oligonucleotide
guaagcaggcuggugguau

SEQ ID NO: 1405026 - RNA, 19 nt, Artificial Sequence
  Description of Artificial Sequence: Synthetic oligonucleotide
ccagugagcgauggaugcg

SEQ ID NO: 1405027 - RNA, 19 nt, Artificial Sequence
  Description of Artificial Sequence: Synthetic oligonucleotide
gcgaaugcccacagacucc

SEQ ID NO: 1405028 - RNA, 19 nt, Artificial Sequence
  Description of Artificial Sequence: Synthetic oligonucleotide
ccgcagcugauaacuacac

SEQ ID NO: 1405029 - RNA, 19 nt, Artificial Sequence
  Description of Artificial Sequence: Synthetic oligonucleotide
ugauuccaggaagguccaa

SEQ ID NO: 1405030 - RNA, 19 nt, Artificial Sequence
  Description of Artificial Sequence: Synthetic oligonucleotide
gaggccccuuuccggagaa

SEQ ID NO: 1405031 - RNA, 19 nt, Artificial Sequence
  Description of Artificial Sequence: Synthetic oligonucleotide
gcgauggaugcgauggcac

SEQ ID NO: 1405032 - RNA, 19 nt, Artificial Sequence
  Description of Artificial Sequence: Synthetic oligonucleotide
gccacucgggcaucgccug

SEQ ID NO: 1405033 - RNA, 19 nt, Artificial Sequence
  Description of Artificial Sequence: Synthetic oligonucleotide
cuucaugccgcagcugaua

SEQ ID NO: 1405034 - RNA, 19 nt, Artificial Sequence
  Description of Artificial Sequence: Synthetic oligonucleotide
gccgcagcugauaacuaca

SEQ ID NO: 1405035 - RNA, 19 nt, Artificial Sequence
  Description of Artificial Sequence: Synthetic oligonucleotide
auacacccgguugcccaca

SEQ ID NO: 1405036 - RNA, 19 nt, Artificial Sequence
  Description of Artificial Sequence: Synthetic oligonucleotide
agugagcgauggaugcgau

SEQ ID NO: 1405037 - RNA, 19 nt, Artificial Sequence
  Description of Artificial Sequence: Synthetic oligonucleotide
gcggggcugcuuugggagg

SEQ ID NO: 1405038 - RNA, 19 nt, Artificial Sequence
  Description of Artificial Sequence: Synthetic oligonucleotide
cugugcgugcuacagcaau

SEQ ID NO: 1405039 - RNA, 19 nt, Artificial Sequence
  Description of Artificial Sequence: Synthetic oligonucleotide
gaugcacgucaggguggug

SEQ ID NO: 1405040 - RNA, 19 nt, Artificial Sequence
  Description of Artificial Sequence: Synthetic oligonucleotide
auggugugagucaggccua

SEQ ID NO: 1405041 - RNA, 19 nt, Artificial Sequence
  Description of Artificial Sequence: Synthetic oligonucleotide
gucaaguaagcaggcuggu

SEQ ID NO: 1405042 - RNA, 19 nt, Artificial Sequence
  Description of Artificial Sequence: Synthetic oligonucleotide
ggaugcgauggcacacgug

SEQ ID NO: 1405043 - RNA, 19 nt, Artificial Sequence
  Description of Artificial Sequence: Synthetic oligonucleotide
gggaggcacuuuaggacac

SEQ ID NO: 1405044 - RNA, 19 nt, Artificial Sequence
  Description of Artificial Sequence: Synthetic oligonucleotide
aggcacuuuaggacacuuu

SEQ ID NO: 1405045 - RNA, 19 nt, Artificial Sequence
  Description of Artificial Sequence: Synthetic oligonucleotide
cacgagggacagcccugug

SEQ ID NO: 1405046 - RNA, 19 nt, Artificial Sequence
  Description of Artificial Sequence: Synthetic oligonucleotide
ccgcuaagugcuagagcug

SEQ ID NO: 1405047 - RNA, 19 nt, Artificial Sequence
  Description of Artificial Sequence: Synthetic oligonucleotide
uacccucugcgggcuguac

SEQ ID NO: 1405048 - RNA, 19 nt, Artificial Sequence
  Description of Artificial Sequence: Synthetic oligonucleotide
gguggugaacucauaggau

SEQ ID NO: 1405049 - RNA, 19 nt, Artificial Sequence
  Description of Artificial Sequence: Synthetic oligonucleotide
ggaagaguacuucggcguu

SEQ ID NO: 1405050 - RNA, 19 nt, Artificial Sequence
  Description of Artificial Sequence: Synthetic oligonucleotide
ggaccugugggagguuuca

SEQ ID NO: 1405051 - RNA, 19 nt, Artificial Sequence
  Description of Artificial Sequence: Synthetic oligonucleotide
guacuucggcguugaagau

SEQ ID NO: 1405052 - RNA, 19 nt, Artificial Sequence
  Description of Artificial Sequence: Synthetic oligonucleotide
cuuccgggcuagacggucu

SEQ ID NO: 1405053 - RNA, 19 nt, Artificial Sequence
  Description of Artificial Sequence: Synthetic oligonucleotide
cuugugcugcuccuucaau

SEQ ID NO: 1405054 - RNA, 19 nt, Artificial Sequence
  Description of Artificial Sequence: Synthetic oligonucleotide
acacccgguugcccacaau

SEQ ID NO: 1405055 - RNA, 19 nt, Artificial Sequence
  Description of Artificial Sequence: Synthetic oligonucleotide
acacuuuggcugggccccu

SEQ ID NO: 1405056 - RNA, 19 nt, Artificial Sequence
  Description of Artificial Sequence: Synthetic oligonucleotide
cugggccccuggcuuccac

SEQ ID NO: 1405057 - RNA, 19 nt, Artificial Sequence
  Description of Artificial Sequence: Synthetic oligonucleotide
cacuuuggcugggccccug

SEQ ID NO: 1405058 - RNA, 19 nt, Artificial Sequence
  Description of Artificial Sequence: Synthetic oligonucleotide
ggagucaaguaagcaggcu

SEQ ID NO: 1405059 - RNA, 19 nt, Artificial Sequence
  Description of Artificial Sequence: Synthetic oligonucleotide
augcgauggcacacguguu

SEQ ID NO: 1405060 - RNA, 19 nt, Artificial Sequence
  Description of Artificial Sequence: Synthetic oligonucleotide
cgauggaugcgauggcaca

SEQ ID NO: 1405061 - RNA, 19 nt, Artificial Sequence
  Description of Artificial Sequence: Synthetic oligonucleotide
cugcuuacuggagaagcuu

SEQ ID NO: 1405062 - RNA, 19 nt, Artificial Sequence
  Description of Artificial Sequence: Synthetic oligonucleotide
cgacgacaucagcugugcg

SEQ ID NO: 1405063 - RNA, 19 nt, Artificial Sequence
  Description of Artificial Sequence: Synthetic oligonucleotide
cagccucgccugucccaac

SEQ ID NO: 1405064 - RNA, 19 nt, Artificial Sequence
  Description of Artificial Sequence: Synthetic oligonucleotide
gccucgccugucccaacac

SEQ ID NO: 1405065 - RNA, 19 nt, Artificial Sequence
  Description of Artificial Sequence: Synthetic oligonucleotide
augccgcagcugauaacua

SEQ ID NO: 1405066 - RNA, 19 nt, Artificial Sequence
  Description of Artificial Sequence: Synthetic oligonucleotide
guaggcugauuuggauggu

SEQ ID NO: 1405067 - RNA, 19 nt, Artificial Sequence
  Description of Artificial Sequence: Synthetic oligonucleotide
gcgggcuguacuuggugcu

SEQ ID NO: 1405068 - RNA, 19 nt, Artificial Sequence
  Description of Artificial Sequence: Synthetic oligonucleotide
gucuggcugggaggaaugu

SEQ ID NO: 1405069 - RNA, 19 nt, Artificial Sequence
  Description of Artificial Sequence: Synthetic oligonucleotide
caucgagaucuggucaauu

SEQ ID NO: 1405070 - RNA, 19 nt, Artificial Sequence
  Description of Artificial Sequence: Synthetic oligonucleotide
ccucugcgggcuguacuug

SEQ ID NO: 1405071 - RNA, 19 nt, Artificial Sequence
  Description of Artificial Sequence: Synthetic oligonucleotide
cugaggccgcuaagugcua

SEQ ID NO: 1405072 - RNA, 19 nt, Artificial Sequence
  Description of Artificial Sequence: Synthetic oligonucleotide
cucgggcaucgccugacuu

SEQ ID NO: 1405073 - RNA, 19 nt, Artificial Sequence
  Description of Artificial Sequence: Synthetic oligonucleotide
gcuaagugcuagagcugcu

SEQ ID NO: 1405074 - RNA, 19 nt, Artificial Sequence
  Description of Artificial Sequence: Synthetic oligonucleotide
cgggcaucgccugacuuca

SEQ ID NO: 1405075 - RNA, 19 nt, Artificial Sequence
  Description of Artificial Sequence: Synthetic oligonucleotide
gcacgucaggguggugaac

SEQ ID NO: 1405076 - RNA, 19 nt, Artificial Sequence
  Description of Artificial Sequence: Synthetic oligonucleotide
gccuacccucugcgggcug

SEQ ID NO: 1405077 - RNA, 19 nt, Artificial Sequence
  Description of Artificial Sequence: Synthetic oligonucleotide
ggcuuccacgagggacagc

SEQ ID NO: 1405078 - RNA, 19 nt, Artificial Sequence
  Description of Artificial Sequence: Synthetic oligonucleotide
cuacccucugcgggcugua

SEQ ID NO: 1405079 - RNA, 19 nt, Artificial Sequence
  Description of Artificial Sequence: Synthetic oligonucleotide
cccucugcgggcuguacuu

SEQ ID NO: 1405080 - RNA, 19 nt, Artificial Sequence
  Description of Artificial Sequence: Synthetic oligonucleotide
ccucgccugucccaacacu

SEQ ID NO: 1405081 - RNA, 19 nt, Artificial Sequence
  Description of Artificial Sequence: Synthetic oligonucleotide
ccgggcuagacggucuacu

SEQ ID NO: 1405082 - RNA, 19 nt, Artificial Sequence
  Description of Artificial Sequence: Synthetic oligonucleotide
ggccuacccucugcgggcu

SEQ ID NO: 1405083 - RNA, 19 nt, Artificial Sequence
  Description of Artificial Sequence: Synthetic oligonucleotide
ccacgagggacagcccugu

SEQ ID NO: 1405084 - RNA, 19 nt, Artificial Sequence
  Description of Artificial Sequence: Synthetic oligonucleotide
gggaggaauguggguuauu

SEQ ID NO: 1405085 - RNA, 19 nt, Artificial Sequence
  Description of Artificial Sequence: Synthetic oligonucleotide
gggcaucgccugacuucau

SEQ ID NO: 1405086 - RNA, 19 nt, Artificial Sequence
  Description of Artificial Sequence: Synthetic oligonucleotide
ucaaauugaauacaaauca

SEQ ID NO: 1405087 - RNA, 19 nt, Artificial Sequence
  Description of Artificial Sequence: Synthetic oligonucleotide
aauauuagcaucuucauuu

SEQ ID NO: 1405088 - RNA, 19 nt, Artificial Sequence
  Description of Artificial Sequence: Synthetic oligonucleotide
aaaguguguaaacauaagg

SEQ ID NO: 1405089 - RNA, 19 nt, Artificial Sequence
  Description of Artificial Sequence: Synthetic oligonucleotide
aguguguaaacauaaggcc

SEQ ID NO: 1405090 - RNA, 19 nt, Artificial Sequence
  Description of Artificial Sequence: Synthetic oligonucleotide
aaguguguaaacauaaggc

SEQ ID NO: 1405091 - RNA, 19 nt, Artificial Sequence
  Description of Artificial Sequence: Synthetic oligonucleotide
uugacuauugugaugauug

SEQ ID NO: 1405092 - RNA, 19 nt, Artificial Sequence
  Description of Artificial Sequence: Synthetic oligonucleotide
gaauuaagcauauaugccc

SEQ ID NO: 1405093 - RNA, 19 nt, Artificial Sequence
  Description of Artificial Sequence: Synthetic oligonucleotide
guuaggauagcauauacag

SEQ ID NO: 1405094 - RNA, 19 nt, Artificial Sequence
  Description of Artificial Sequence: Synthetic oligonucleotide
uuaugguuaacuuucaugu

SEQ ID NO: 1405095 - RNA, 19 nt, Artificial Sequence
  Description of Artificial Sequence: Synthetic oligonucleotide
agauuauagacccucccgc

SEQ ID NO: 1405096 - RNA, 19 nt, Artificial Sequence
  Description of Artificial Sequence: Synthetic oligonucleotide
aaagcugucuuacucagug

SEQ ID NO: 1405097 - RNA, 19 nt, Artificial Sequence
  Description of Artificial Sequence: Synthetic oligonucleotide
uucaaauugaucacuaggu

SEQ ID NO: 1405098 - RNA, 19 nt, Artificial Sequence
  Description of Artificial Sequence: Synthetic oligonucleotide
aacgacaaugucuucuugg

SEQ ID NO: 1405099 - RNA, 19 nt, Artificial Sequence
  Description of Artificial Sequence: Synthetic oligonucleotide
ugauugacaaaauauuagc

SEQ ID NO: 1405100 - RNA, 19 nt, Artificial Sequence
  Description of Artificial Sequence: Synthetic oligonucleotide
aaaaccguuuauuucuauc

SEQ ID NO: 1405101 - RNA, 19 nt, Artificial Sequence
  Description of Artificial Sequence: Synthetic oligonucleotide
uuuguggccaccuauagac

SEQ ID NO: 1405102 - RNA, 19 nt, Artificial Sequence
  Description of Artificial Sequence: Synthetic oligonucleotide
uuuaugguuaacuuucaug

SEQ ID NO: 1405103 - RNA, 19 nt, Artificial Sequence
  Description of Artificial Sequence: Synthetic oligonucleotide
uuaagugucucaaagggaa

SEQ ID NO: 1405104 - RNA, 19 nt, Artificial Sequence
  Description of Artificial Sequence: Synthetic oligonucleotide
ucggcuaucuuccuguugg

SEQ ID NO: 1405105 - RNA, 19 nt, Artificial Sequence
  Description of Artificial Sequence: Synthetic oligonucleotide
gaucgcaugaucuggaacc

SEQ ID NO: 1405106 - RNA, 19 nt, Artificial Sequence
  Description of Artificial Sequence: Synthetic oligonucleotide
uuucuaucaaauugaauac

SEQ ID NO: 1405107 - RNA, 19 nt, Artificial Sequence
  Description of Artificial Sequence: Synthetic oligonucleotide
agcuaucucagcuagcuuc

SEQ ID NO: 1405108 - RNA, 19 nt, Artificial Sequence
  Description of Artificial Sequence: Synthetic oligonucleotide
ugagugaacgacaaugucu

SEQ ID NO: 1405109 - RNA, 19 nt, Artificial Sequence
  Description of Artificial Sequence: Synthetic oligonucleotide
uaaacuaguaaagaugcug

SEQ ID NO: 1405110 - RNA, 19 nt, Artificial Sequence
  Description of Artificial Sequence: Synthetic oligonucleotide
caauuaauacaaugaauag

SEQ ID NO: 1405111 - RNA, 19 nt, Artificial Sequence
  Description of Artificial Sequence: Synthetic oligonucleotide
ucuuacucagugcaggugc

SEQ ID NO: 1405112 - RNA, 19 nt, Artificial Sequence
  Description of Artificial Sequence: Synthetic oligonucleotide
acugaagaaaagcugaccu

SEQ ID NO: 1405113 - RNA, 19 nt, Artificial Sequence
  Description of Artificial Sequence: Synthetic oligonucleotide
uguagguacugcuuugccg

SEQ ID NO: 1405114 - RNA, 19 nt, Artificial Sequence
  Description of Artificial Sequence: Synthetic oligonucleotide
uacccaaccacauacagaa

SEQ ID NO: 1405115 - RNA, 19 nt, Artificial Sequence
  Description of Artificial Sequence: Synthetic oligonucleotide
uguucuaauguccucggga

SEQ ID NO: 1405116 - RNA, 19 nt, Artificial Sequence
  Description of Artificial Sequence: Synthetic oligonucleotide
uauuuuguuagucuccguc

SEQ ID NO: 1405117 - RNA, 19 nt, Artificial Sequence
  Description of Artificial Sequence: Synthetic oligonucleotide
ucagcuagcuucuaauuug

SEQ ID NO: 1405118 - RNA, 19 nt, Artificial Sequence
  Description of Artificial Sequence: Synthetic oligonucleotide
cauacggugcccuuaaccc

SEQ ID NO: 1405119 - RNA, 19 nt, Artificial Sequence
  Description of Artificial Sequence: Synthetic oligonucleotide
acuagauuuuccucauuac

SEQ ID NO: 1405120 - RNA, 19 nt, Artificial Sequence
  Description of Artificial Sequence: Synthetic oligonucleotide
uuuauugacuauugugaug

SEQ ID NO: 1405121 - RNA, 19 nt, Artificial Sequence
  Description of Artificial Sequence: Synthetic oligonucleotide
ugugcaguuugccacacca

SEQ ID NO: 1405122 - RNA, 19 nt, Artificial Sequence
  Description of Artificial Sequence: Synthetic oligonucleotide
uuuuguuagucuccguccc

SEQ ID NO: 1405123 - RNA, 19 nt, Artificial Sequence
  Description of Artificial Sequence: Synthetic oligonucleotide
agaacaccaacugucacac

SEQ ID NO: 1405124 - RNA, 19 nt, Artificial Sequence
  Description of Artificial Sequence: Synthetic oligonucleotide
aucacuaggucacagauua

SEQ ID NO: 1405125 - RNA, 19 nt, Artificial Sequence
  Description of Artificial Sequence: Synthetic oligonucleotide
uuauagacccucccgcuag

SEQ ID NO: 1405126 - RNA, 19 nt, Artificial Sequence
  Description of Artificial Sequence: Synthetic oligonucleotide
auaccaucuggcuuggauc

SEQ ID NO: 1405127 - RNA, 19 nt, Artificial Sequence
  Description of Artificial Sequence: Synthetic oligonucleotide
ugcccuuaacccaagucgg

SEQ ID NO: 1405128 - RNA, 19 nt, Artificial Sequence
  Description of Artificial Sequence: Synthetic oligonucleotide
ugagaaaaguguguaaaca

SEQ ID NO: 1405129 - RNA, 19 nt, Artificial Sequence
  Description of Artificial Sequence: Synthetic oligonucleotide
ugcaagcuaucucagcuag

SEQ ID NO: 1405130 - RNA, 19 nt, Artificial Sequence
  Description of Artificial Sequence: Synthetic oligonucleotide
aaacguaagccacuugccu

SEQ ID NO: 1405131 - RNA, 19 nt, Artificial Sequence
  Description of Artificial Sequence: Synthetic oligonucleotide
ugccgugucaccaacuugc

SEQ ID NO: 1405132 - RNA, 19 nt, Artificial Sequence
  Description of Artificial Sequence: Synthetic oligonucleotide
agauuacugauucuagucu

SEQ ID NO: 1405133 - RNA, 19 nt, Artificial Sequence
  Description of Artificial Sequence: Synthetic oligonucleotide
aauaguuaggauagcauau

SEQ ID NO: 1405134 - RNA, 19 nt, Artificial Sequence
  Description of Artificial Sequence: Synthetic oligonucleotide
aaauauuagcaucuucauu

SEQ ID NO: 1405135 - RNA, 19 nt, Artificial Sequence
  Description of Artificial Sequence: Synthetic oligonucleotide
cuagcuucuaauuuggcca

SEQ ID NO: 1405136 - RNA, 19 nt, Artificial Sequence
  Description of Artificial Sequence: Synthetic oligonucleotide
aaacgcaugauugagugaa

SEQ ID NO: 1405137 - RNA, 19 nt, Artificial Sequence
  Description of Artificial Sequence: Synthetic oligonucleotide
uggcucaccaguaauguca

SEQ ID NO: 1405138 - RNA, 19 nt, Artificial Sequence
  Description of Artificial Sequence: Synthetic oligonucleotide
ucuaauguccucgggaagc

SEQ ID NO: 1405139 - RNA, 19 nt, Artificial Sequence
  Description of Artificial Sequence: Synthetic oligonucleotide
cauauuuuguuagucuccg

SEQ ID NO: 1405140 - RNA, 19 nt, Artificial Sequence
  Description of Artificial Sequence: Synthetic oligonucleotide
auauuagcaucuucauuuc

SEQ ID NO: 1405141 - RNA, 19 nt, Artificial Sequence
  Description of Artificial Sequence: Synthetic oligonucleotide
caaauugaucacuagguca

SEQ ID NO: 1405142 - RNA, 19 nt, Artificial Sequence
  Description of Artificial Sequence: Synthetic oligonucleotide
cagauuauagacccucccg

SEQ ID NO: 1405143 - RNA, 19 nt, Artificial Sequence
  Description of Artificial Sequence: Synthetic oligonucleotide
auaugcccaaaucaagaag

SEQ ID NO: 1405144 - RNA, 19 nt, Artificial Sequence
  Description of Artificial Sequence: Synthetic oligonucleotide
ucugaguucccacaauggu

SEQ ID NO: 1405145 - RNA, 19 nt, Artificial Sequence
  Description of Artificial Sequence: Synthetic oligonucleotide
aagcugucuuacucagugc

SEQ ID NO: 1405146 - RNA, 19 nt, Artificial Sequence
  Description of Artificial Sequence: Synthetic oligonucleotide
ggaaacguaagccacuugc

SEQ ID NO: 1405147 - RNA, 19 nt, Artificial Sequence
  Description of Artificial Sequence: Synthetic oligonucleotide
aauaggugugaucuuguuu

SEQ ID NO: 1405148 - RNA, 19 nt, Artificial Sequence
  Description of Artificial Sequence: Synthetic oligonucleotide
uccucuagcauacggugcc

SEQ ID NO: 1405149 - RNA, 19 nt, Artificial Sequence
  Description of Artificial Sequence: Synthetic oligonucleotide
uucgugaauucuuucuacc

SEQ ID NO: 1405150 - RNA, 19 nt, Artificial Sequence
  Description of Artificial Sequence: Synthetic oligonucleotide
cagauuacugauucuaguc

SEQ ID NO: 1405151 - RNA, 19 nt, Artificial Sequence
  Description of Artificial Sequence: Synthetic oligonucleotide
ccaagaagcgccaaggucc

SEQ ID NO: 1405152 - RNA, 19 nt, Artificial Sequence
  Description of Artificial Sequence: Synthetic oligonucleotide
gauagcauauacagaacac

SEQ ID NO: 1405153 - RNA, 19 nt, Artificial Sequence
  Description of Artificial Sequence: Synthetic oligonucleotide
uugggaucgaauaggugug

SEQ ID NO: 1405154 - RNA, 19 nt, Artificial Sequence
  Description of Artificial Sequence: Synthetic oligonucleotide
uaguaaagaugcugcaagc

SEQ ID NO: 1405155 - RNA, 19 nt, Artificial Sequence
  Description of Artificial Sequence: Synthetic oligonucleotide
uagacugcaucuuuggaau

SEQ ID NO: 1405156 - RNA, 19 nt, Artificial Sequence
  Description of Artificial Sequence: Synthetic oligonucleotide
ucgugugaucgcaugaucu

SEQ ID NO: 1405157 - RNA, 19 nt, Artificial Sequence
  Description of Artificial Sequence: Synthetic oligonucleotide
uaagcauauaugcccaaau

SEQ ID NO: 1405158 - RNA, 19 nt, Artificial Sequence
  Description of Artificial Sequence: Synthetic oligonucleotide
uguggccaccuauagacug

SEQ ID NO: 1405159 - RNA, 19 nt, Artificial Sequence
  Description of Artificial Sequence: Synthetic oligonucleotide
uccaucgucggcucagacg

SEQ ID NO: 1405160 - RNA, 19 nt, Artificial Sequence
  Description of Artificial Sequence: Synthetic oligonucleotide
cagcacaggaguuuggaag

SEQ ID NO: 1405161 - RNA, 19 nt, Artificial Sequence
  Description of Artificial Sequence: Synthetic oligonucleotide
uuaaacuaguaaagaugcu

SEQ ID NO: 1405162 - RNA, 19 nt, Artificial Sequence
  Description of Artificial Sequence: Synthetic oligonucleotide
uccucgggaagccaucuag

SEQ ID NO: 1405163 - RNA, 19 nt, Artificial Sequence
  Description of Artificial Sequence: Synthetic oligonucleotide
ucccacaaugguaaagcug

SEQ ID NO: 1405164 - RNA, 19 nt, Artificial Sequence
  Description of Artificial Sequence: Synthetic oligonucleotide
augguuaacuuucauguuu

SEQ ID NO: 1405165 - RNA, 19 nt, Artificial Sequence
  Description of Artificial Sequence: Synthetic oligonucleotide
gcaauguacaucuagugca

SEQ ID NO: 1405166 - RNA, 19 nt, Artificial Sequence
  Description of Artificial Sequence: Synthetic oligonucleotide
agcugucuuacucagugca

SEQ ID NO: 1405167 - RNA, 19 nt, Artificial Sequence
  Description of Artificial Sequence: Synthetic oligonucleotide
cauacccaaccacauacag

SEQ ID NO: 1405168 - RNA, 19 nt, Artificial Sequence
  Description of Artificial Sequence: Synthetic oligonucleotide
gagcauuucuucuucguga

SEQ ID NO: 1405169 - RNA, 19 nt, Artificial Sequence
  Description of Artificial Sequence: Synthetic oligonucleotide
ucgaauaggugugaucuug

SEQ ID NO: 1405170 - RNA, 19 nt, Artificial Sequence
  Description of Artificial Sequence: Synthetic oligonucleotide
gacgaaacgcaugauugag

SEQ ID NO: 1405171 - RNA, 19 nt, Artificial Sequence
  Description of Artificial Sequence: Synthetic oligonucleotide
uucuaauguccucgggaag

SEQ ID NO: 1405172 - RNA, 19 nt, Artificial Sequence
  Description of Artificial Sequence: Synthetic oligonucleotide
ucuucgugaauucuuucua

SEQ ID NO: 1405173 - RNA, 19 nt, Artificial Sequence
  Description of Artificial Sequence: Synthetic oligonucleotide
uaagcagaaaaccguuuau

SEQ ID NO: 1405174 - RNA, 19 nt, Artificial Sequence
  Description of Artificial Sequence: Synthetic oligonucleotide
gaagggugaauccaucguc

SEQ ID NO: 1405175 - RNA, 19 nt, Artificial Sequence
  Description of Artificial Sequence: Synthetic oligonucleotide
cuuucuacccacuagauuu

SEQ ID NO: 1405176 - RNA, 19 nt, Artificial Sequence
  Description of Artificial Sequence: Synthetic oligonucleotide
ugugaucgcaugaucugga

SEQ ID NO: 1405177 - RNA, 19 nt, Artificial Sequence
  Description of Artificial Sequence: Synthetic oligonucleotide
gauuuuccucauuacuuca

SEQ ID NO: 1405178 - RNA, 19 nt, Artificial Sequence
  Description of Artificial Sequence: Synthetic oligonucleotide
auauaugcccaaaucaaga

SEQ ID NO: 1405179 - RNA, 19 nt, Artificial Sequence
  Description of Artificial Sequence: Synthetic oligonucleotide
auggcguuuauucuggcaa

SEQ ID NO: 1405180 - RNA, 19 nt, Artificial Sequence
  Description of Artificial Sequence: Synthetic oligonucleotide
cuugggaucgaauaggugu

SEQ ID NO: 1405181 - RNA, 19 nt, Artificial Sequence
  Description of Artificial Sequence: Synthetic oligonucleotide
uguacaucuagugcaagau

SEQ ID NO: 1405182 - RNA, 19 nt, Artificial Sequence
  Description of Artificial Sequence: Synthetic oligonucleotide
gaaacguaagccacuugcc

SEQ ID NO: 1405183 - RNA, 19 nt, Artificial Sequence
  Description of Artificial Sequence: Synthetic oligonucleotide
ucaccaacuugcgugcugg

SEQ ID NO: 1405184 - RNA, 19 nt, Artificial Sequence
  Description of Artificial Sequence: Synthetic oligonucleotide
gacaccauuagucguguga

SEQ ID NO: 1405185 - RNA, 19 nt, Artificial Sequence
  Description of Artificial Sequence: Synthetic oligonucleotide
aaccguuuauuucuaucaa

SEQ ID NO: 1405186 - RNA, 19 nt, Artificial Sequence
  Description of Artificial Sequence: Synthetic oligonucleotide
uuagucuccgucccagaga

SEQ ID NO: 1405187 - RNA, 19 nt, Artificial Sequence
  Description of Artificial Sequence: Synthetic oligonucleotide
cauccucuagcauacggug

SEQ ID NO: 1405188 - RNA, 19 nt, Artificial Sequence
  Description of Artificial Sequence: Synthetic oligonucleotide
ugaccuguuggcuccuggg

SEQ ID NO: 1405189 - RNA, 19 nt, Artificial Sequence
  Description of Artificial Sequence: Synthetic oligonucleotide
gugguugaaguccagauua

SEQ ID NO: 1405190 - RNA, 19 nt, Artificial Sequence
  Description of Artificial Sequence: Synthetic oligonucleotide
ucuacccacuagauuuucc

SEQ ID NO: 1405191 - RNA, 19 nt, Artificial Sequence
  Description of Artificial Sequence: Synthetic oligonucleotide
ucagacggucuuuaagugu

SEQ ID NO: 1405192 - RNA, 19 nt, Artificial Sequence
  Description of Artificial Sequence: Synthetic oligonucleotide
guuagucuccgucccagag

SEQ ID NO: 1405193 - RNA, 19 nt, Artificial Sequence
  Description of Artificial Sequence: Synthetic oligonucleotide
ugcgugcuggccuugaggu

SEQ ID NO: 1405194 - RNA, 19 nt, Artificial Sequence
  Description of Artificial Sequence: Synthetic oligonucleotide
uugagugaacgacaauguc

SEQ ID NO: 1405195 - RNA, 19 nt, Artificial Sequence
  Description of Artificial Sequence: Synthetic oligonucleotide
uuguagguacugcuuugcc

SEQ ID NO: 1405196 - RNA, 19 nt, Artificial Sequence
  Description of Artificial Sequence: Synthetic oligonucleotide
uugcgugcuggccuugagg

SEQ ID NO: 1405197 - RNA, 19 nt, Artificial Sequence
  Description of Artificial Sequence: Synthetic oligonucleotide
ccaucgucggcucagacgg

SEQ ID NO: 1405198 - RNA, 19 nt, Artificial Sequence
  Description of Artificial Sequence: Synthetic oligonucleotide
uuuguuagucuccguccca

SEQ ID NO: 1405199 - RNA, 19 nt, Artificial Sequence
  Description of Artificial Sequence: Synthetic oligonucleotide
ugaucgcaugaucuggaac

SEQ ID NO: 1405200 - RNA, 19 nt, Artificial Sequence
  Description of Artificial Sequence: Synthetic oligonucleotide
ugcuucuugggaucgaaua

SEQ ID NO: 1405201 - RNA, 19 nt, Artificial Sequence
  Description of Artificial Sequence: Synthetic oligonucleotide
gcuagcuucuaauuuggcc

SEQ ID NO: 1405202 - RNA, 19 nt, Artificial Sequence
  Description of Artificial Sequence: Synthetic oligonucleotide
cugucuuacucagugcagg

SEQ ID NO: 1405203 - RNA, 19 nt, Artificial Sequence
  Description of Artificial Sequence: Synthetic oligonucleotide
cucaguaugcuucuuggga

SEQ ID NO: 1405204 - RNA, 19 nt, Artificial Sequence
  Description of Artificial Sequence: Synthetic oligonucleotide
ggauagcauauacagaaca

SEQ ID NO: 1405205 - RNA, 19 nt, Artificial Sequence
  Description of Artificial Sequence: Synthetic oligonucleotide
uccgauggcaggcucagua

SEQ ID NO: 1405206 - RNA, 19 nt, Artificial Sequence
  Description of Artificial Sequence: Synthetic oligonucleotide
agggugaauccaucgucgg

SEQ ID NO: 1405207 - RNA, 19 nt, Artificial Sequence
  Description of Artificial Sequence: Synthetic oligonucleotide
ucuuucuacccacuagauu

SEQ ID NO: 1405208 - RNA, 19 nt, Artificial Sequence
  Description of Artificial Sequence: Synthetic oligonucleotide
ugacuauugugaugauuga

SEQ ID NO: 1405209 - RNA, 19 nt, Artificial Sequence
  Description of Artificial Sequence: Synthetic oligonucleotide
agagaacugguggacgcac

SEQ ID NO: 1405210 - RNA, 19 nt, Artificial Sequence
  Description of Artificial Sequence: Synthetic oligonucleotide
uucuuucuacccacuagau

SEQ ID NO: 1405211 - RNA, 19 nt, Artificial Sequence
  Description of Artificial Sequence: Synthetic oligonucleotide
gcauuuaugguuaacuuuc

SEQ ID NO: 1405212 - RNA, 19 nt, Artificial Sequence
  Description of Artificial Sequence: Synthetic oligonucleotide
uuguuagucuccgucccag

SEQ ID NO: 1405213 - RNA, 19 nt, Artificial Sequence
  Description of Artificial Sequence: Synthetic oligonucleotide
cucagacggucuuuaagug

SEQ ID NO: 1405214 - RNA, 19 nt, Artificial Sequence
  Description of Artificial Sequence: Synthetic oligonucleotide
ucuaguaggcagugcugug

SEQ ID NO: 1405215 - RNA, 19 nt, Artificial Sequence
  Description of Artificial Sequence: Synthetic oligonucleotide
ugucuuacucagugcaggu

SEQ ID NO: 1405216 - RNA, 19 nt, Artificial Sequence
  Description of Artificial Sequence: Synthetic oligonucleotide
uggcguuuauucuggcaag

SEQ ID NO: 1405217 - RNA, 19 nt, Artificial Sequence
  Description of Artificial Sequence: Synthetic oligonucleotide
auuuaugguuaacuuucau

SEQ ID NO: 1405218 - RNA, 19 nt, Artificial Sequence
  Description of Artificial Sequence: Synthetic oligonucleotide
ucuuccgauggcaggcuca

SEQ ID NO: 1405219 - RNA, 19 nt, Artificial Sequence
  Description of Artificial Sequence: Synthetic oligonucleotide
uacugacuucauaccaucu

SEQ ID NO: 1405220 - RNA, 19 nt, Artificial Sequence
  Description of Artificial Sequence: Synthetic oligonucleotide
uagucgugugaucgcauga

SEQ ID NO: 1405221 - RNA, 19 nt, Artificial Sequence
  Description of Artificial Sequence: Synthetic oligonucleotide
cucaaagggaauauucaaa

SEQ ID NO: 1405222 - RNA, 19 nt, Artificial Sequence
  Description of Artificial Sequence: Synthetic oligonucleotide
uuugccgugucaccaacuu

SEQ ID NO: 1405223 - RNA, 19 nt, Artificial Sequence
  Description of Artificial Sequence: Synthetic oligonucleotide
guagguacugcuuugccgu

SEQ ID NO: 1405224 - RNA, 19 nt, Artificial Sequence
  Description of Artificial Sequence: Synthetic oligonucleotide
uuacugauucuagucuucu

SEQ ID NO: 1405225 - RNA, 19 nt, Artificial Sequence
  Description of Artificial Sequence: Synthetic oligonucleotide
ggucacagauuacugauuc

SEQ ID NO: 1405226 - RNA, 19 nt, Artificial Sequence
  Description of Artificial Sequence: Synthetic oligonucleotide
uaugguuaacuuucauguu

SEQ ID NO: 1405227 - RNA, 19 nt, Artificial Sequence
  Description of Artificial Sequence: Synthetic oligonucleotide
aguuaggauagcauauaca

SEQ ID NO: 1405228 - RNA, 19 nt, Artificial Sequence
  Description of Artificial Sequence: Synthetic oligonucleotide
accguuuauuucuaucaaa

SEQ ID NO: 1405229 - RNA, 19 nt, Artificial Sequence
  Description of Artificial Sequence: Synthetic oligonucleotide
uuaagcauauaugcccaaa

SEQ ID NO: 1405230 - RNA, 19 nt, Artificial Sequence
  Description of Artificial Sequence: Synthetic oligonucleotide
auccucuagcauacggugc

SEQ ID NO: 1405231 - RNA, 19 nt, Artificial Sequence
  Description of Artificial Sequence: Synthetic oligonucleotide
uacggugcccuuaacccaa

SEQ ID NO: 1405232 - RNA, 19 nt, Artificial Sequence
  Description of Artificial Sequence: Synthetic oligonucleotide
gugugaucgcaugaucugg

SEQ ID NO: 1405233 - RNA, 19 nt, Artificial Sequence
  Description of Artificial Sequence: Synthetic oligonucleotide
aggauagcauauacagaac

SEQ ID NO: 1405234 - RNA, 19 nt, Artificial Sequence
  Description of Artificial Sequence: Synthetic oligonucleotide
ugcugugugcuccgggucu

SEQ ID NO: 1405235 - RNA, 19 nt, Artificial Sequence
  Description of Artificial Sequence: Synthetic oligonucleotide
gugcaagaugcuccaagcc

SEQ ID NO: 1405236 - RNA, 19 nt, Artificial Sequence
  Description of Artificial Sequence: Synthetic oligonucleotide
cagugcaggugcaauguac

SEQ ID NO: 1405237 - RNA, 19 nt, Artificial Sequence
  Description of Artificial Sequence: Synthetic oligonucleotide
aucuaguaggcagugcugu

SEQ ID NO: 1405238 - RNA, 19 nt, Artificial Sequence
  Description of Artificial Sequence: Synthetic oligonucleotide
gauggcguuuauucuggca

SEQ ID NO: 1405239 - RNA, 19 nt, Artificial Sequence
  Description of Artificial Sequence: Synthetic oligonucleotide
gaucacucaccagaaggac

SEQ ID NO: 1405240 - RNA, 19 nt, Artificial Sequence
  Description of Artificial Sequence: Synthetic oligonucleotide
cuaauuuggccagggcacc

SEQ ID NO: 1405241 - RNA, 19 nt, Artificial Sequence
  Description of Artificial Sequence: Synthetic oligonucleotide
auacggugcccuuaaccca

SEQ ID NO: 1405242 - RNA, 19 nt, Artificial Sequence
  Description of Artificial Sequence: Synthetic oligonucleotide
cuccugggaaacguaagcc

SEQ ID NO: 1405243 - RNA, 19 nt, Artificial Sequence
  Description of Artificial Sequence: Synthetic oligonucleotide
caucuaguaggcagugcug

SEQ ID NO: 1405244 - RNA, 19 nt, Artificial Sequence
  Description of Artificial Sequence: Synthetic oligonucleotide
aacgcaugauugagugaac

SEQ ID NO: 1405245 - RNA, 19 nt, Artificial Sequence
  Description of Artificial Sequence: Synthetic oligonucleotide
uaagugucucaaagggaau

SEQ ID NO: 1405246 - RNA, 19 nt, Artificial Sequence
  Description of Artificial Sequence: Synthetic oligonucleotide
gaacgacaaugucuucuug

SEQ ID NO: 1405247 - RNA, 19 nt, Artificial Sequence
  Description of Artificial Sequence: Synthetic oligonucleotide
aggagcauuucuucuucgu

SEQ ID NO: 1405248 - RNA, 19 nt, Artificial Sequence
  Description of Artificial Sequence: Synthetic oligonucleotide
guuugagaaaaguguguaa

SEQ ID NO: 1405249 - RNA, 19 nt, Artificial Sequence
  Description of Artificial Sequence: Synthetic oligonucleotide
ggcauccucuagcauacgg

SEQ ID NO: 1405250 - RNA, 19 nt, Artificial Sequence
  Description of Artificial Sequence: Synthetic oligonucleotide
auaagggauggcauuuaug

SEQ ID NO: 1405251 - RNA, 19 nt, Artificial Sequence
  Description of Artificial Sequence: Synthetic oligonucleotide
gaaacgcaugauugaguga

SEQ ID NO: 1405252 - RNA, 19 nt, Artificial Sequence
  Description of Artificial Sequence: Synthetic oligonucleotide
auauuuuguuagucuccgu

SEQ ID NO: 1405253 - RNA, 19 nt, Artificial Sequence
  Description of Artificial Sequence: Synthetic oligonucleotide
aauguccucgggaagccau

SEQ ID NO: 1405254 - RNA, 19 nt, Artificial Sequence
  Description of Artificial Sequence: Synthetic oligonucleotide
ucucagcuagcuucuaauu

SEQ ID NO: 1405255 - RNA, 19 nt, Artificial Sequence
  Description of Artificial Sequence: Synthetic oligonucleotide
caaccacauacagaaugcc

SEQ ID NO: 1405256 - RNA, 19 nt, Artificial Sequence
  Description of Artificial Sequence: Synthetic oligonucleotide
aaauaagggauggcauuua

SEQ ID NO: 1405257 - RNA, 19 nt, Artificial Sequence
  Description of Artificial Sequence: Synthetic oligonucleotide
gcauacggugcccuuaacc

SEQ ID NO: 1405258 - RNA, 19 nt, Artificial Sequence
  Description of Artificial Sequence: Synthetic oligonucleotide
uugccgugucaccaacuug

SEQ ID NO: 1405259 - RNA, 19 nt, Artificial Sequence
  Description of Artificial Sequence: Synthetic oligonucleotide
cacucagauacuuugaauu

SEQ ID NO: 1405260 - RNA, 19 nt, Artificial Sequence
  Description of Artificial Sequence: Synthetic oligonucleotide
acauaaggccauauuuugu

SEQ ID NO: 1405261 - RNA, 19 nt, Artificial Sequence
  Description of Artificial Sequence: Synthetic oligonucleotide
ggugugaucuuguuugaga

SEQ ID NO: 1405262 - RNA, 19 nt, Artificial Sequence
  Description of Artificial Sequence: Synthetic oligonucleotide
cauuuaugguuaacuuuca

SEQ ID NO: 1405263 - RNA, 19 nt, Artificial Sequence
  Description of Artificial Sequence: Synthetic oligonucleotide
uagcauacggugcccuuaa

SEQ ID NO: 1405264 - RNA, 19 nt, Artificial Sequence
  Description of Artificial Sequence: Synthetic oligonucleotide
cuguucuaauguccucggg

SEQ ID NO: 1405265 - RNA, 19 nt, Artificial Sequence
  Description of Artificial Sequence: Synthetic oligonucleotide
cuuuauugacuauugugau

SEQ ID NO: 1405266 - RNA, 19 nt, Artificial Sequence
  Description of Artificial Sequence: Synthetic oligonucleotide
acggucuuuaagugucuca

SEQ ID NO: 1405267 - RNA, 19 nt, Artificial Sequence
  Description of Artificial Sequence: Synthetic oligonucleotide
ucccgcaagaaguggccgc

SEQ ID NO: 1405268 - RNA, 19 nt, Artificial Sequence
  Description of Artificial Sequence: Synthetic oligonucleotide
gaaggacaacacugucagc

SEQ ID NO: 1405269 - RNA, 19 nt, Artificial Sequence
  Description of Artificial Sequence: Synthetic oligonucleotide
auaguuaggauagcauaua

SEQ ID NO: 1405270 - RNA, 19 nt, Artificial Sequence
  Description of Artificial Sequence: Synthetic oligonucleotide
cgaaacgcaugauugagug

SEQ ID NO: 1405271 - RNA, 19 nt, Artificial Sequence
  Description of Artificial Sequence: Synthetic oligonucleotide
augauugagugaacgacaa

SEQ ID NO: 1405272 - RNA, 19 nt, Artificial Sequence
  Description of Artificial Sequence: Synthetic oligonucleotide
gacccucccgcuagaaggg

SEQ ID NO: 1405273 - RNA, 19 nt, Artificial Sequence
  Description of Artificial Sequence: Synthetic oligonucleotide
ugauugagugaacgacaau

SEQ ID NO: 1405274 - RNA, 19 nt, Artificial Sequence
  Description of Artificial Sequence: Synthetic oligonucleotide
acucaccagaaggacaaca

SEQ ID NO: 1405275 - RNA, 19 nt, Artificial Sequence
  Description of Artificial Sequence: Synthetic oligonucleotide
ugcccaaaucaagaagaac

SEQ ID NO: 1405276 - RNA, 19 nt, Artificial Sequence
  Description of Artificial Sequence: Synthetic oligonucleotide
uguuagucuccgucccaga

SEQ ID NO: 1405277 - RNA, 19 nt, Artificial Sequence
  Description of Artificial Sequence: Synthetic oligonucleotide
uuguggccaccuauagacu

SEQ ID NO: 1405278 - RNA, 19 nt, Artificial Sequence
  Description of Artificial Sequence: Synthetic oligonucleotide
cugaguucccacaauggua

SEQ ID NO: 1405279 - RNA, 19 nt, Artificial Sequence
  Description of Artificial Sequence: Synthetic oligonucleotide
caauguacaucuagugcaa

SEQ ID NO: 1405280 - RNA, 19 nt, Artificial Sequence
  Description of Artificial Sequence: Synthetic oligonucleotide
auugacuauugugaugauu

SEQ ID NO: 1405281 - RNA, 19 nt, Artificial Sequence
  Description of Artificial Sequence: Synthetic oligonucleotide
ucgggugguccgaggauga

SEQ ID NO: 1405282 - RNA, 19 nt, Artificial Sequence
  Description of Artificial Sequence: Synthetic oligonucleotide
gcucaguaugcuucuuggg

SEQ ID NO: 1405283 - RNA, 19 nt, Artificial Sequence
  Description of Artificial Sequence: Synthetic oligonucleotide
uuugcccgacaaccucugc

SEQ ID NO: 1405284 - RNA, 19 nt, Artificial Sequence
  Description of Artificial Sequence: Synthetic oligonucleotide
augccacaccaagaagcgc

SEQ ID NO: 1405285 - RNA, 19 nt, Artificial Sequence
  Description of Artificial Sequence: Synthetic oligonucleotide
ggugguccgaggaugacug

SEQ ID NO: 1405286 - RNA, 19 nt, Artificial Sequence
  Description of Artificial Sequence: Synthetic oligonucleotide
cauaaggccauauuuuguu

SEQ ID NO: 1405287 - RNA, 19 nt, Artificial Sequence
  Description of Artificial Sequence: Synthetic oligonucleotide
uggcuccugggaaacguaa

SEQ ID NO: 1405288 - RNA, 19 nt, Artificial Sequence
  Description of Artificial Sequence: Synthetic oligonucleotide
cugaccuguuggcuccugg

SEQ ID NO: 1405289 - RNA, 19 nt, Artificial Sequence
  Description of Artificial Sequence: Synthetic oligonucleotide
aggagguggccucgcccgc

SEQ ID NO: 1405290 - RNA, 19 nt, Artificial Sequence
  Description of Artificial Sequence: Synthetic oligonucleotide
auacccaaccacauacaga

SEQ ID NO: 1405291 - RNA, 19 nt, Artificial Sequence
  Description of Artificial Sequence: Synthetic oligonucleotide
aucgucggcucagacgguc

SEQ ID NO: 1405292 - RNA, 19 nt, Artificial Sequence
  Description of Artificial Sequence: Synthetic oligonucleotide
aucaaccccaguacuugag

SEQ ID NO: 1405293 - RNA, 19 nt, Artificial Sequence
  Description of Artificial Sequence: Synthetic oligonucleotide
cuccgucccagagaacugg

SEQ ID NO: 1405294 - RNA, 19 nt, Artificial Sequence
  Description of Artificial Sequence: Synthetic oligonucleotide
cugggcauccucuagcaua

SEQ ID NO: 1405295 - RNA, 19 nt, Artificial Sequence
  Description of Artificial Sequence: Synthetic oligonucleotide
gcauauaugcccaaaucaa

SEQ ID NO: 1405296 - RNA, 19 nt, Artificial Sequence
  Description of Artificial Sequence: Synthetic oligonucleotide
uagguacugcuuugccgug

SEQ ID NO: 1405297 - RNA, 19 nt, Artificial Sequence
  Description of Artificial Sequence: Synthetic oligonucleotide
cuuuguggccaccuauaga

SEQ ID NO: 1405298 - RNA, 19 nt, Artificial Sequence
  Description of Artificial Sequence: Synthetic oligonucleotide
ucacuaggucacagauuac

SEQ ID NO: 1405299 - RNA, 19 nt, Artificial Sequence
  Description of Artificial Sequence: Synthetic oligonucleotide
ggcuuguucccuuuacuga

SEQ ID NO: 1405300 - RNA, 19 nt, Artificial Sequence
  Description of Artificial Sequence: Synthetic oligonucleotide
cucagauacuuugaauuaa

SEQ ID NO: 1405301 - RNA, 19 nt, Artificial Sequence
  Description of Artificial Sequence: Synthetic oligonucleotide
aggugugaucuuguuugag

SEQ ID NO: 1405302 - RNA, 19 nt, Artificial Sequence
  Description of Artificial Sequence: Synthetic oligonucleotide
cauuagucgugugaucgca

SEQ ID NO: 1405303 - RNA, 19 nt, Artificial Sequence
  Description of Artificial Sequence: Synthetic oligonucleotide
cacacucagauacuuugaa

SEQ ID NO: 1405304 - RNA, 19 nt, Artificial Sequence
  Description of Artificial Sequence: Synthetic oligonucleotide
uccgucccagagaacuggu

SEQ ID NO: 1405305 - RNA, 19 nt, Artificial Sequence
  Description of Artificial Sequence: Synthetic oligonucleotide
uauugacuauugugaugau

SEQ ID NO: 1405306 - RNA, 19 nt, Artificial Sequence
  Description of Artificial Sequence: Synthetic oligonucleotide
uggacuuuguggccaccua

SEQ ID NO: 1405307 - RNA, 19 nt, Artificial Sequence
  Description of Artificial Sequence: Synthetic oligonucleotide
cuuccgauggcaggcucag

SEQ ID NO: 1405308 - RNA, 19 nt, Artificial Sequence
  Description of Artificial Sequence: Synthetic oligonucleotide
uucuuccgauggcaggcuc

SEQ ID NO: 1405309 - RNA, 19 nt, Artificial Sequence
  Description of Artificial Sequence: Synthetic oligonucleotide
aucgcaugaucuggaacca

SEQ ID NO: 1405310 - RNA, 19 nt, Artificial Sequence
  Description of Artificial Sequence: Synthetic oligonucleotide
cccgcuuugcccgacaacc

SEQ ID NO: 1405311 - RNA, 19 nt, Artificial Sequence
  Description of Artificial Sequence: Synthetic oligonucleotide
ugggaaacguaagccacuu

SEQ ID NO: 1405312 - RNA, 19 nt, Artificial Sequence
  Description of Artificial Sequence: Synthetic oligonucleotide
acgaaacgcaugauugagu

SEQ ID NO: 1405313 - RNA, 19 nt, Artificial Sequence
  Description of Artificial Sequence: Synthetic oligonucleotide
ugggaucgaauagguguga

SEQ ID NO: 1405314 - RNA, 19 nt, Artificial Sequence
  Description of Artificial Sequence: Synthetic oligonucleotide
gucgugugaucgcaugauc

SEQ ID NO: 1405315 - RNA, 19 nt, Artificial Sequence
  Description of Artificial Sequence: Synthetic oligonucleotide
gccaccuauagacugcauc

SEQ ID NO: 1405316 - RNA, 19 nt, Artificial Sequence
  Description of Artificial Sequence: Synthetic oligonucleotide
ggaucacucaccagaagga

SEQ ID NO: 1405317 - RNA, 19 nt, Artificial Sequence
  Description of Artificial Sequence: Synthetic oligonucleotide
agucgugugaucgcaugau

SEQ ID NO: 1405318 - RNA, 19 nt, Artificial Sequence
  Description of Artificial Sequence: Synthetic oligonucleotide
gugaauccaucgucggcuc

SEQ ID NO: 1405319 - RNA, 19 nt, Artificial Sequence
  Description of Artificial Sequence: Synthetic oligonucleotide
ggacgaaacgcaugauuga

SEQ ID NO: 1405320 - RNA, 19 nt, Artificial Sequence
  Description of Artificial Sequence: Synthetic oligonucleotide
ggaucgaauaggugugauc

SEQ ID NO: 1405321 - RNA, 19 nt, Artificial Sequence
  Description of Artificial Sequence: Synthetic oligonucleotide
ugacaccauuagucgugug

SEQ ID NO: 1405322 - RNA, 19 nt, Artificial Sequence
  Description of Artificial Sequence: Synthetic oligonucleotide
cagugcugugugcuccggg

SEQ ID NO: 1405323 - RNA, 19 nt, Artificial Sequence
  Description of Artificial Sequence: Synthetic oligonucleotide
caucaaccccaguacuuga

SEQ ID NO: 1405324 - RNA, 19 nt, Artificial Sequence
  Description of Artificial Sequence: Synthetic oligonucleotide
gucgggugguccgaggaug

SEQ ID NO: 1405325 - RNA, 19 nt, Artificial Sequence
  Description of Artificial Sequence: Synthetic oligonucleotide
ucgucggcucagacggucu

SEQ ID NO: 1405326 - RNA, 19 nt, Artificial Sequence
  Description of Artificial Sequence: Synthetic oligonucleotide
uucuacccacuagauuuuc

SEQ ID NO: 1405327 - RNA, 19 nt, Artificial Sequence
  Description of Artificial Sequence: Synthetic oligonucleotide
agaaaaccguuuauuucua

SEQ ID NO: 1405328 - RNA, 19 nt, Artificial Sequence
  Description of Artificial Sequence: Synthetic oligonucleotide
cucccgcaagaaguggccg

SEQ ID NO: 1405329 - RNA, 19 nt, Artificial Sequence
  Description of Artificial Sequence: Synthetic oligonucleotide
gacuuuguggccaccuaua

SEQ ID NO: 1405330 - RNA, 19 nt, Artificial Sequence
  Description of Artificial Sequence: Synthetic oligonucleotide
gggugaauccaucgucggc

SEQ ID NO: 1405331 - RNA, 19 nt, Artificial Sequence
  Description of Artificial Sequence: Synthetic oligonucleotide
gaagcgccaagguccaggu

SEQ ID NO: 1405332 - RNA, 19 nt, Artificial Sequence
  Description of Artificial Sequence: Synthetic oligonucleotide
cuugcgugcuggccuugag

SEQ ID NO: 1405333 - RNA, 19 nt, Artificial Sequence
  Description of Artificial Sequence: Synthetic oligonucleotide
cauaccaucuggcuuggau

SEQ ID NO: 1405334 - RNA, 19 nt, Artificial Sequence
  Description of Artificial Sequence: Synthetic oligonucleotide
ggcaccaggacgaaacgca

SEQ ID NO: 1405335 - RNA, 19 nt, Artificial Sequence
  Description of Artificial Sequence: Synthetic oligonucleotide
cccgcuagaagggugaauc

SEQ ID NO: 1405336 - RNA, 19 nt, Artificial Sequence
  Description of Artificial Sequence: Synthetic oligonucleotide
gaauaggugugaucuuguu

SEQ ID NO: 1405337 - RNA, 19 nt, Artificial Sequence
  Description of Artificial Sequence: Synthetic oligonucleotide
auguccucgggaagccauc

SEQ ID NO: 1405338 - RNA, 19 nt, Artificial Sequence
  Description of Artificial Sequence: Synthetic oligonucleotide
cucagcuagcuucuaauuu

SEQ ID NO: 1405339 - RNA, 19 nt, Artificial Sequence
  Description of Artificial Sequence: Synthetic oligonucleotide
gcugucuuacucagugcag

SEQ ID NO: 1405340 - RNA, 19 nt, Artificial Sequence
  Description of Artificial Sequence: Synthetic oligonucleotide
guaggcagugcugugugcu

SEQ ID NO: 1405341 - RNA, 19 nt, Artificial Sequence
  Description of Artificial Sequence: Synthetic oligonucleotide
caccaacuugcgugcuggc

SEQ ID NO: 1405342 - RNA, 19 nt, Artificial Sequence
  Description of Artificial Sequence: Synthetic oligonucleotide
gugaucgcaugaucuggaa

SEQ ID NO: 1405343 - RNA, 19 nt, Artificial Sequence
  Description of Artificial Sequence: Synthetic oligonucleotide
gguccgaggaugacugcag

SEQ ID NO: 1405344 - RNA, 19 nt, Artificial Sequence
  Description of Artificial Sequence: Synthetic oligonucleotide
ugucaccaacuugcgugcu

SEQ ID NO: 1405345 - RNA, 19 nt, Artificial Sequence
  Description of Artificial Sequence: Synthetic oligonucleotide
aacuugcgugcuggccuug

SEQ ID NO: 1405346 - RNA, 19 nt, Artificial Sequence
  Description of Artificial Sequence: Synthetic oligonucleotide
ccgcuagaagggugaaucc

SEQ ID NO: 1405347 - RNA, 19 nt, Artificial Sequence
  Description of Artificial Sequence: Synthetic oligonucleotide
uccaggugauggcguuuau

SEQ ID NO: 1405348 - RNA, 19 nt, Artificial Sequence
  Description of Artificial Sequence: Synthetic oligonucleotide
gggaaacguaagccacuug

SEQ ID NO: 1405349 - RNA, 19 nt, Artificial Sequence
  Description of Artificial Sequence: Synthetic oligonucleotide
cuaguaggcagugcugugu

SEQ ID NO: 1405350 - RNA, 19 nt, Artificial Sequence
  Description of Artificial Sequence: Synthetic oligonucleotide
cacaaugguaaagcugucu

SEQ ID NO: 1405351 - RNA, 19 nt, Artificial Sequence
  Description of Artificial Sequence: Synthetic oligonucleotide
ccacauacagaaugccaca

SEQ ID NO: 1405352 - RNA, 19 nt, Artificial Sequence
  Description of Artificial Sequence: Synthetic oligonucleotide
ucgcaugaucuggaaccaa

SEQ ID NO: 1405353 - RNA, 19 nt, Artificial Sequence
  Description of Artificial Sequence: Synthetic oligonucleotide
gugguccgaggaugacugc

SEQ ID NO: 1405354 - RNA, 19 nt, Artificial Sequence
  Description of Artificial Sequence: Synthetic oligonucleotide
ggcuuggaucacucaccag

SEQ ID NO: 1405355 - RNA, 19 nt, Artificial Sequence
  Description of Artificial Sequence: Synthetic oligonucleotide
cuagcauacggugcccuua

SEQ ID NO: 1405356 - RNA, 19 nt, Artificial Sequence
  Description of Artificial Sequence: Synthetic oligonucleotide
gcaccccucggcuaucuuc

SEQ ID NO: 1405357 - RNA, 19 nt, Artificial Sequence
  Description of Artificial Sequence: Synthetic oligonucleotide
agacggucuuuaagugucu

SEQ ID NO: 1405358 - RNA, 19 nt, Artificial Sequence
  Description of Artificial Sequence: Synthetic oligonucleotide
gggcaccaggacgaaacgc

SEQ ID NO: 1405359 - RNA, 19 nt, Artificial Sequence
  Description of Artificial Sequence: Synthetic oligonucleotide
gcaagaaguggccgcugga

SEQ ID NO: 1405360 - RNA, 19 nt, Artificial Sequence
  Description of Artificial Sequence: Synthetic oligonucleotide
cagagaacugguggacgca

SEQ ID NO: 1405361 - RNA, 19 nt, Artificial Sequence
  Description of Artificial Sequence: Synthetic oligonucleotide
ggcguuuauucuggcaaga

SEQ ID NO: 1405362 - RNA, 19 nt, Artificial Sequence
  Description of Artificial Sequence: Synthetic oligonucleotide
acuugcgugcuggccuuga

SEQ ID NO: 1405363 - RNA, 19 nt, Artificial Sequence
  Description of Artificial Sequence: Synthetic oligonucleotide
guggacgcaccccucggcu

SEQ ID NO: 1405364 - RNA, 19 nt, Artificial Sequence
  Description of Artificial Sequence: Synthetic oligonucleotide
gcaagcuaucucagcuagc

SEQ ID NO: 1405365 - RNA, 19 nt, Artificial Sequence
  Description of Artificial Sequence: Synthetic oligonucleotide
ucgcccgcuuugcccgaca

SEQ ID NO: 1405366 - RNA, 19 nt, Artificial Sequence
  Description of Artificial Sequence: Synthetic oligonucleotide
ccaacuugcgugcuggccu

SEQ ID NO: 1405367 - RNA, 19 nt, Artificial Sequence
  Description of Artificial Sequence: Synthetic oligonucleotide
gcuaucucagcuagcuucu

SEQ ID NO: 1405368 - RNA, 19 nt, Artificial Sequence
  Description of Artificial Sequence: Synthetic oligonucleotide
ucccgcuagaagggugaau

SEQ ID NO: 1405369 - RNA, 19 nt, Artificial Sequence
  Description of Artificial Sequence: Synthetic oligonucleotide
gugcaguuugccacaccaa

SEQ ID NO: 1405370 - RNA, 19 nt, Artificial Sequence
  Description of Artificial Sequence: Synthetic oligonucleotide
gaacaccaacugucacacu

SEQ ID NO: 1405371 - RNA, 19 nt, Artificial Sequence
  Description of Artificial Sequence: Synthetic oligonucleotide
gcauccucuagcauacggu

SEQ ID NO: 1405372 - RNA, 19 nt, Artificial Sequence
  Description of Artificial Sequence: Synthetic oligonucleotide
cuggaaccaaaagaccuuu

SEQ ID NO: 1405373 - RNA, 19 nt, Artificial Sequence
  Description of Artificial Sequence: Synthetic oligonucleotide
uuccgauggcaggcucagu

SEQ ID NO: 1405374 - RNA, 19 nt, Artificial Sequence
  Description of Artificial Sequence: Synthetic oligonucleotide
acccucccgcuagaagggu

SEQ ID NO: 1405375 - RNA, 19 nt, Artificial Sequence
  Description of Artificial Sequence: Synthetic oligonucleotide
cucuagcauacggugcccu

SEQ ID NO: 1405376 - RNA, 19 nt, Artificial Sequence
  Description of Artificial Sequence: Synthetic oligonucleotide
cgcuuugcccgacaaccuc

SEQ ID NO: 1405377 - RNA, 19 nt, Artificial Sequence
  Description of Artificial Sequence: Synthetic oligonucleotide
acccaaccacauacagaau

SEQ ID NO: 1405378 - RNA, 19 nt, Artificial Sequence
  Description of Artificial Sequence: Synthetic oligonucleotide
acgcaccccucggcuaucu

SEQ ID NO: 1405379 - RNA, 19 nt, Artificial Sequence
  Description of Artificial Sequence: Synthetic oligonucleotide
gcuccgggucuccaguucu

SEQ ID NO: 1405380 - RNA, 19 nt, Artificial Sequence
  Description of Artificial Sequence: Synthetic oligonucleotide
gacgcaccccucggcuauc

SEQ ID NO: 1405381 - RNA, 19 nt, Artificial Sequence
  Description of Artificial Sequence: Synthetic oligonucleotide
cguuuauucuggcaagaau

SEQ ID NO: 1405382 - RNA, 19 nt, Artificial Sequence
  Description of Artificial Sequence: Synthetic oligonucleotide
gcccgcuuugcccgacaac

SEQ ID NO: 1405383 - RNA, 19 nt, Artificial Sequence
  Description of Artificial Sequence: Synthetic oligonucleotide
ccccucggcuaucuuccug

SEQ ID NO: 1405384 - RNA, 19 nt, Artificial Sequence
  Description of Artificial Sequence: Synthetic oligonucleotide
cucgcccgcuuugcccgac

SEQ ID NO: 1405385 - RNA, 19 nt, Artificial Sequence
  Description of Artificial Sequence: Synthetic oligonucleotide
gggugguccgaggaugacu

SEQ ID NO: 1405386 - RNA, 19 nt, Artificial Sequence
  Description of Artificial Sequence: Synthetic oligonucleotide
ccucgggaagccaucuagu

SEQ ID NO: 1405387 - RNA, 19 nt, Artificial Sequence
  Description of Artificial Sequence: Synthetic oligonucleotide
gggaucgaauaggugugau

SEQ ID NO: 1405388 - RNA, 19 nt, Artificial Sequence
  Description of Artificial Sequence: Synthetic oligonucleotide
cucccgcuagaagggugaa

SEQ ID NO: 1405389 - RNA, 19 nt, Artificial Sequence
  Description of Artificial Sequence: Synthetic oligonucleotide
caucgucggcucagacggu

SEQ ID NO: 1405390 - RNA, 19 nt, Artificial Sequence
  Description of Artificial Sequence: Synthetic oligonucleotide
gugcuggccuugagguucu

SEQ ID NO: 1405391 - RNA, 19 nt, Artificial Sequence
  Description of Artificial Sequence: Synthetic oligonucleotide
ccgcaagaaguggccgcug

SEQ ID NO: 1405392 - RNA, 19 nt, Artificial Sequence
  Description of Artificial Sequence: Synthetic oligonucleotide
cccaagucgggugguccga

SEQ ID NO: 1405393 - RNA, 19 nt, Artificial Sequence
  Description of Artificial Sequence: Synthetic oligonucleotide
ccgcuuugcccgacaaccu

SEQ ID NO: 1405394 - RNA, 19 nt, Artificial Sequence
  Description of Artificial Sequence: Synthetic oligonucleotide
cccgcaagaaguggccgcu

SEQ ID NO: 1405395 - RNA, 19 nt, Artificial Sequence
  Description of Artificial Sequence: Synthetic oligonucleotide
ccucggcuaucuuccuguu

SEQ ID NO: 1405396 - RNA, 19 nt, Artificial Sequence
  Description of Artificial Sequence: Synthetic oligonucleotide
cgcccgcuuugcccgacaa

SEQ ID NO: 1405397 - RNA, 19 nt, Artificial Sequence
  Description of Artificial Sequence: Synthetic oligonucleotide
cgucggcucagacggucuu

SEQ ID NO: 1405398 - RNA, 19 nt, Artificial Sequence
  Description of Artificial Sequence: Synthetic oligonucleotide
cgcaccccucggcuaucuu

SEQ ID NO: 1405399 - RNA, 19 nt, Artificial Sequence
  Description of Artificial Sequence: Synthetic oligonucleotide
uuauuguuaaccaagaaga

SEQ ID NO: 1405400 - RNA, 19 nt, Artificial Sequence
  Description of Artificial Sequence: Synthetic oligonucleotide
auuuaauuaaguuuugacg

SEQ ID NO: 1405401 - RNA, 19 nt, Artificial Sequence
  Description of Artificial Sequence: Synthetic oligonucleotide
gauauuuucaauugcccgg

SEQ ID NO: 1405402 - RNA, 19 nt, Artificial Sequence
  Description of Artificial Sequence: Synthetic oligonucleotide
aggagauugucauucaucc

SEQ ID NO: 1405403 - RNA, 19 nt, Artificial Sequence
  Description of Artificial Sequence: Synthetic oligonucleotide
aaucuuuccaaugcgauag

SEQ ID NO: 1405404 - RNA, 19 nt, Artificial Sequence
  Description of Artificial Sequence: Synthetic oligonucleotide
uauagugacgacuucagga

SEQ ID NO: 1405405 - RNA, 19 nt, Artificial Sequence
  Description of Artificial Sequence: Synthetic oligonucleotide
gacauagacagacaggaag

SEQ ID NO: 1405406 - RNA, 19 nt, Artificial Sequence
  Description of Artificial Sequence: Synthetic oligonucleotide
uccauggcuacaauaaccg

SEQ ID NO: 1405407 - RNA, 19 nt, Artificial Sequence
  Description of Artificial Sequence: Synthetic oligonucleotide
aggcuaaggacauagacag

SEQ ID NO: 1405408 - RNA, 19 nt, Artificial Sequence
  Description of Artificial Sequence: Synthetic oligonucleotide
aagauuuaauaguguuggc

SEQ ID NO: 1405409 - RNA, 19 nt, Artificial Sequence
  Description of Artificial Sequence: Synthetic oligonucleotide
auugccauuggguugugac

SEQ ID NO: 1405410 - RNA, 19 nt, Artificial Sequence
  Description of Artificial Sequence: Synthetic oligonucleotide
uuauugaucuuauuguuaa

SEQ ID NO: 1405411 - RNA, 19 nt, Artificial Sequence
  Description of Artificial Sequence: Synthetic oligonucleotide
uauuguuaaccaagaagag

SEQ ID NO: 1405412 - RNA, 19 nt, Artificial Sequence
  Description of Artificial Sequence: Synthetic oligonucleotide
auaaccgucaccaauucac

SEQ ID NO: 1405413 - RNA, 19 nt, Artificial Sequence
  Description of Artificial Sequence: Synthetic oligonucleotide
accucgauaccauuguggc

SEQ ID NO: 1405414 - RNA, 19 nt, Artificial Sequence
  Description of Artificial Sequence: Synthetic oligonucleotide
gaucuuauuguuaaccaag

SEQ ID NO: 1405415 - RNA, 19 nt, Artificial Sequence
  Description of Artificial Sequence: Synthetic oligonucleotide
auagugacgacuucaggag

SEQ ID NO: 1405416 - RNA, 19 nt, Artificial Sequence
  Description of Artificial Sequence: Synthetic oligonucleotide
auaucuaaaaucuccaauu

SEQ ID NO: 1405417 - RNA, 19 nt, Artificial Sequence
  Description of Artificial Sequence: Synthetic oligonucleotide
uucagauucaacccgccug

SEQ ID NO: 1405418 - RNA, 19 nt, Artificial Sequence
  Description of Artificial Sequence: Synthetic oligonucleotide
acgaauguggcaucgaucu

SEQ ID NO: 1405419 - RNA, 19 nt, Artificial Sequence
  Description of Artificial Sequence: Synthetic oligonucleotide
auagagauccaguucucgg

SEQ ID NO: 1405420 - RNA, 19 nt, Artificial Sequence
  Description of Artificial Sequence: Synthetic oligonucleotide
aacaaaugacuguaacaug

SEQ ID NO: 1405421 - RNA, 19 nt, Artificial Sequence
  Description of Artificial Sequence: Synthetic oligonucleotide
ucucaaugcauuuaauuaa

SEQ ID NO: 1405422 - RNA, 19 nt, Artificial Sequence
  Description of Artificial Sequence: Synthetic oligonucleotide
aauucuugcaguucuguua

SEQ ID NO: 1405423 - RNA, 19 nt, Artificial Sequence
  Description of Artificial Sequence: Synthetic oligonucleotide
acguaagguaccuauguuc

SEQ ID NO: 1405424 - RNA, 19 nt, Artificial Sequence
  Description of Artificial Sequence: Synthetic oligonucleotide
uauuauugccauuggguug

SEQ ID NO: 1405425 - RNA, 19 nt, Artificial Sequence
  Description of Artificial Sequence: Synthetic oligonucleotide
uuaauuaaguuuugacgga

SEQ ID NO: 1405426 - RNA, 19 nt, Artificial Sequence
  Description of Artificial Sequence: Synthetic oligonucleotide
ucgauauuuucaauugccc

SEQ ID NO: 1405427 - RNA, 19 nt, Artificial Sequence
  Description of Artificial Sequence: Synthetic oligonucleotide
uugaucuuauuguuaacca

SEQ ID NO: 1405428 - RNA, 19 nt, Artificial Sequence
  Description of Artificial Sequence: Synthetic oligonucleotide
ucuguuagauggcugauau

SEQ ID NO: 1405429 - RNA, 19 nt, Artificial Sequence
  Description of Artificial Sequence: Synthetic oligonucleotide
uugucaaucccuucaaugu

SEQ ID NO: 1405430 - RNA, 19 nt, Artificial Sequence
  Description of Artificial Sequence: Synthetic oligonucleotide
uaucuaaaaucuccaauuc

SEQ ID NO: 1405431 - RNA, 19 nt, Artificial Sequence
  Description of Artificial Sequence: Synthetic oligonucleotide
uguuagauggcugauauuu

SEQ ID NO: 1405432 - RNA, 19 nt, Artificial Sequence
  Description of Artificial Sequence: Synthetic oligonucleotide
augccuuuaacccagcacu

SEQ ID NO: 1405433 - RNA, 19 nt, Artificial Sequence
  Description of Artificial Sequence: Synthetic oligonucleotide
uuauuauugccauuggguu

SEQ ID NO: 1405434 - RNA, 19 nt, Artificial Sequence
  Description of Artificial Sequence: Synthetic oligonucleotide
cucaaugcauuuaauuaag

SEQ ID NO: 1405435 - RNA, 19 nt, Artificial Sequence
  Description of Artificial Sequence: Synthetic oligonucleotide
aauuaaguuuugacggagg

SEQ ID NO: 1405436 - RNA, 19 nt, Artificial Sequence
  Description of Artificial Sequence: Synthetic oligonucleotide
uccuauuugaugcaauguc

SEQ ID NO: 1405437 - RNA, 19 nt, Artificial Sequence
  Description of Artificial Sequence: Synthetic oligonucleotide
ugcaguugacguaagguac

SEQ ID NO: 1405438 - RNA, 19 nt, Artificial Sequence
  Description of Artificial Sequence: Synthetic oligonucleotide
cucaaucuuuguuagccgg

SEQ ID NO: 1405439 - RNA, 19 nt, Artificial Sequence
  Description of Artificial Sequence: Synthetic oligonucleotide
uaauuaaguuuugacggag

SEQ ID NO: 1405440 - RNA, 19 nt, Artificial Sequence
  Description of Artificial Sequence: Synthetic oligonucleotide
ugacuguugguauagugac

SEQ ID NO: 1405441 - RNA, 19 nt, Artificial Sequence
  Description of Artificial Sequence: Synthetic oligonucleotide
ugucagguugguaagugca

SEQ ID NO: 1405442 - RNA, 19 nt, Artificial Sequence
  Description of Artificial Sequence: Synthetic oligonucleotide
uuuccauauccacugccag

SEQ ID NO: 1405443 - RNA, 19 nt, Artificial Sequence
  Description of Artificial Sequence: Synthetic oligonucleotide
uacaauaaccgucaccaau

SEQ ID NO: 1405444 - RNA, 19 nt, Artificial Sequence
  Description of Artificial Sequence: Synthetic oligonucleotide
uugguuaacgugucgauau

SEQ ID NO: 1405445 - RNA, 19 nt, Artificial Sequence
  Description of Artificial Sequence: Synthetic oligonucleotide
ugacguaagguaccuaugu

SEQ ID NO: 1405446 - RNA, 19 nt, Artificial Sequence
  Description of Artificial Sequence: Synthetic oligonucleotide
aauguggcaucgaucugcc

SEQ ID NO: 1405447 - RNA, 19 nt, Artificial Sequence
  Description of Artificial Sequence: Synthetic oligonucleotide
gcgauagugauucagauca

SEQ ID NO: 1405448 - RNA, 19 nt, Artificial Sequence
  Description of Artificial Sequence: Synthetic oligonucleotide
agauuuaauaguguuggca

SEQ ID NO: 1405449 - RNA, 19 nt, Artificial Sequence
  Description of Artificial Sequence: Synthetic oligonucleotide
aucuaaaaucuccaauucu

SEQ ID NO: 1405450 - RNA, 19 nt, Artificial Sequence
  Description of Artificial Sequence: Synthetic oligonucleotide
aacgugucgauauuuucaa

SEQ ID NO: 1405451 - RNA, 19 nt, Artificial Sequence
  Description of Artificial Sequence: Synthetic oligonucleotide
ucaucaaggucacuccagc

SEQ ID NO: 1405452 - RNA, 19 nt, Artificial Sequence
  Description of Artificial Sequence: Synthetic oligonucleotide
gauaaccucgauaccauug

SEQ ID NO: 1405453 - RNA, 19 nt, Artificial Sequence
  Description of Artificial Sequence: Synthetic oligonucleotide
aguucuguuagauggcuga

SEQ ID NO: 1405454 - RNA, 19 nt, Artificial Sequence
  Description of Artificial Sequence: Synthetic oligonucleotide
aaccucgauaccauugugg

SEQ ID NO: 1405455 - RNA, 19 nt, Artificial Sequence
  Description of Artificial Sequence: Synthetic oligonucleotide
gaauguggcaucgaucugc

SEQ ID NO: 1405456 - RNA, 19 nt, Artificial Sequence
  Description of Artificial Sequence: Synthetic oligonucleotide
cucgauaccauuguggcug

SEQ ID NO: 1405457 - RNA, 19 nt, Artificial Sequence
  Description of Artificial Sequence: Synthetic oligonucleotide
ucaaucuuuccaaugcgau

SEQ ID NO: 1405458 - RNA, 19 nt, Artificial Sequence
  Description of Artificial Sequence: Synthetic oligonucleotide
ugccuuauuauugccauug

SEQ ID NO: 1405459 - RNA, 19 nt, Artificial Sequence
  Description of Artificial Sequence: Synthetic oligonucleotide
ucuccugcgacuguugcgg

SEQ ID NO: 1405460 - RNA, 19 nt, Artificial Sequence
  Description of Artificial Sequence: Synthetic oligonucleotide
cauggcuacaauaaccguc

SEQ ID NO: 1405461 - RNA, 19 nt, Artificial Sequence
  Description of Artificial Sequence: Synthetic oligonucleotide
uucucggagacucugcagu

SEQ ID NO: 1405462 - RNA, 19 nt, Artificial Sequence
  Description of Artificial Sequence: Synthetic oligonucleotide
aauaaccgucaccaauuca

SEQ ID NO: 1405463 - RNA, 19 nt, Artificial Sequence
  Description of Artificial Sequence: Synthetic oligonucleotide
caggaagaacaaaugacug

SEQ ID NO: 1405464 - RNA, 19 nt, Artificial Sequence
  Description of Artificial Sequence: Synthetic oligonucleotide
auaccauuguggcugaggu

SEQ ID NO: 1405465 - RNA, 19 nt, Artificial Sequence
  Description of Artificial Sequence: Synthetic oligonucleotide
uagugauucagaucaacau

SEQ ID NO: 1405466 - RNA, 19 nt, Artificial Sequence
  Description of Artificial Sequence: Synthetic oligonucleotide
cuuauuauugccauugggu

SEQ ID NO: 1405467 - RNA, 19 nt, Artificial Sequence
  Description of Artificial Sequence: Synthetic oligonucleotide
gguaagugcauccagguuc

SEQ ID NO: 1405468 - RNA, 19 nt, Artificial Sequence
  Description of Artificial Sequence: Synthetic oligonucleotide
uuuuauccuauuugaugca

SEQ ID NO: 1405469 - RNA, 19 nt, Artificial Sequence
  Description of Artificial Sequence: Synthetic oligonucleotide
gauuaucauagagauccag

SEQ ID NO: 1405470 - RNA, 19 nt, Artificial Sequence
  Description of Artificial Sequence: Synthetic oligonucleotide
aaucuuuguuagccgguug

SEQ ID NO: 1405471 - RNA, 19 nt, Artificial Sequence
  Description of Artificial Sequence: Synthetic oligonucleotide
uucaauugcccggaugcgg

SEQ ID NO: 1405472 - RNA, 19 nt, Artificial Sequence
  Description of Artificial Sequence: Synthetic oligonucleotide
aaggacauagacagacagg

SEQ ID NO: 1405473 - RNA, 19 nt, Artificial Sequence
  Description of Artificial Sequence: Synthetic oligonucleotide
aaugcgauagugauucaga

SEQ ID NO: 1405474 - RNA, 19 nt, Artificial Sequence
  Description of Artificial Sequence: Synthetic oligonucleotide
auuguuaaccaagaagagu

SEQ ID NO: 1405475 - RNA, 19 nt, Artificial Sequence
  Description of Artificial Sequence: Synthetic oligonucleotide
auaaccucgauaccauugu

SEQ ID NO: 1405476 - RNA, 19 nt, Artificial Sequence
  Description of Artificial Sequence: Synthetic oligonucleotide
uaauaguguuggcaucucc

SEQ ID NO: 1405477 - RNA, 19 nt, Artificial Sequence
  Description of Artificial Sequence: Synthetic oligonucleotide
ucuuauuguuaaccaagaa

SEQ ID NO: 1405478 - RNA, 19 nt, Artificial Sequence
  Description of Artificial Sequence: Synthetic oligonucleotide
acaggaagaacaaaugacu

SEQ ID NO: 1405479 - RNA, 19 nt, Artificial Sequence
  Description of Artificial Sequence: Synthetic oligonucleotide
gauaccauuguggcugagg

SEQ ID NO: 1405480 - RNA, 19 nt, Artificial Sequence
  Description of Artificial Sequence: Synthetic oligonucleotide
gauucaacccgccugucga

SEQ ID NO: 1405481 - RNA, 19 nt, Artificial Sequence
  Description of Artificial Sequence: Synthetic oligonucleotide
agauucaacccgccugucg

SEQ ID NO: 1405482 - RNA, 19 nt, Artificial Sequence
  Description of Artificial Sequence: Synthetic oligonucleotide
uagagauccaguucucgga

SEQ ID NO: 1405483 - RNA, 19 nt, Artificial Sequence
  Description of Artificial Sequence: Synthetic oligonucleotide
acuguugguauagugacga

SEQ ID NO: 1405484 - RNA, 19 nt, Artificial Sequence
  Description of Artificial Sequence: Synthetic oligonucleotide
auuuucaauugcccggaug

SEQ ID NO: 1405485 - RNA, 19 nt, Artificial Sequence
  Description of Artificial Sequence: Synthetic oligonucleotide
aggucugucacgaugccac

SEQ ID NO: 1405486 - RNA, 19 nt, Artificial Sequence
  Description of Artificial Sequence: Synthetic oligonucleotide
ucaauugcccggaugcggu

SEQ ID NO: 1405487 - RNA, 19 nt, Artificial Sequence
  Description of Artificial Sequence: Synthetic oligonucleotide
cacgaugccaccgaugugc

SEQ ID NO: 1405488 - RNA, 19 nt, Artificial Sequence
  Description of Artificial Sequence: Synthetic oligonucleotide
gcuacaauaaccgucacca

SEQ ID NO: 1405489 - RNA, 19 nt, Artificial Sequence
  Description of Artificial Sequence: Synthetic oligonucleotide
agguugaugguuuccauau

SEQ ID NO: 1405490 - RNA, 19 nt, Artificial Sequence
  Description of Artificial Sequence: Synthetic oligonucleotide
uucacgcagguucaccaag

SEQ ID NO: 1405491 - RNA, 19 nt, Artificial Sequence
  Description of Artificial Sequence: Synthetic oligonucleotide
uuaacgugucgauauuuuc

SEQ ID NO: 1405492 - RNA, 19 nt, Artificial Sequence
  Description of Artificial Sequence: Synthetic oligonucleotide
ccuauuugaugcaaugucc

SEQ ID NO: 1405493 - RNA, 19 nt, Artificial Sequence
  Description of Artificial Sequence: Synthetic oligonucleotide
ucggagacucugcaguucc

SEQ ID NO: 1405494 - RNA, 19 nt, Artificial Sequence
  Description of Artificial Sequence: Synthetic oligonucleotide
ucaaucuuuguuagccggu

SEQ ID NO: 1405495 - RNA, 19 nt, Artificial Sequence
  Description of Artificial Sequence: Synthetic oligonucleotide
gacccucaaucuuuguuag

SEQ ID NO: 1405496 - RNA, 19 nt, Artificial Sequence
  Description of Artificial Sequence: Synthetic oligonucleotide
uuaaguuuugacggaggca

SEQ ID NO: 1405497 - RNA, 19 nt, Artificial Sequence
  Description of Artificial Sequence: Synthetic oligonucleotide
auguugguagcacaugccu

SEQ ID NO: 1405498 - RNA, 19 nt, Artificial Sequence
  Description of Artificial Sequence: Synthetic oligonucleotide
uaaccgucaccaauucacc

SEQ ID NO: 1405499 - RNA, 19 nt, Artificial Sequence
  Description of Artificial Sequence: Synthetic oligonucleotide
aaugguguguggugucuca

SEQ ID NO: 1405500 - RNA, 19 nt, Artificial Sequence
  Description of Artificial Sequence: Synthetic oligonucleotide
gaggacucagaaccugacg

SEQ ID NO: 1405501 - RNA, 19 nt, Artificial Sequence
  Description of Artificial Sequence: Synthetic oligonucleotide
uacaguucacgcagguuca

SEQ ID NO: 1405502 - RNA, 19 nt, Artificial Sequence
  Description of Artificial Sequence: Synthetic oligonucleotide
acguggcaagauuuaauag

SEQ ID NO: 1405503 - RNA, 19 nt, Artificial Sequence
  Description of Artificial Sequence: Synthetic oligonucleotide
aguuuguuauuguucucca

SEQ ID NO: 1405504 - RNA, 19 nt, Artificial Sequence
  Description of Artificial Sequence: Synthetic oligonucleotide
agugccuuauuauugccau

SEQ ID NO: 1405505 - RNA, 19 nt, Artificial Sequence
  Description of Artificial Sequence: Synthetic oligonucleotide
caccaauucaccaggaaga

SEQ ID NO: 1405506 - RNA, 19 nt, Artificial Sequence
  Description of Artificial Sequence: Synthetic oligonucleotide
guauagugacgacuucagg

SEQ ID NO: 1405507 - RNA, 19 nt, Artificial Sequence
  Description of Artificial Sequence: Synthetic oligonucleotide
ugguauagugacgacuuca

SEQ ID NO: 1405508 - RNA, 19 nt, Artificial Sequence
  Description of Artificial Sequence: Synthetic oligonucleotide
uuucaauugcccggaugcg

SEQ ID NO: 1405509 - RNA, 19 nt, Artificial Sequence
  Description of Artificial Sequence: Synthetic oligonucleotide
uuccauauccacugccagc

SEQ ID NO: 1405510 - RNA, 19 nt, Artificial Sequence
  Description of Artificial Sequence: Synthetic oligonucleotide
agacucugcucacugaggu

SEQ ID NO: 1405511 - RNA, 19 nt, Artificial Sequence
  Description of Artificial Sequence: Synthetic oligonucleotide
aaccgucaccaauucacca

SEQ ID NO: 1405512 - RNA, 19 nt, Artificial Sequence
  Description of Artificial Sequence: Synthetic oligonucleotide
accaauucaccaggaagac

SEQ ID NO: 1405513 - RNA, 19 nt, Artificial Sequence
  Description of Artificial Sequence: Synthetic oligonucleotide
gauagugauucagaucaac

SEQ ID NO: 1405514 - RNA, 19 nt, Artificial Sequence
  Description of Artificial Sequence: Synthetic oligonucleotide
aaccugacgaauguggcau

SEQ ID NO: 1405515 - RNA, 19 nt, Artificial Sequence
  Description of Artificial Sequence: Synthetic oligonucleotide
ccuucaaucuuuccaaugc

SEQ ID NO: 1405516 - RNA, 19 nt, Artificial Sequence
  Description of Artificial Sequence: Synthetic oligonucleotide
ucuucagauucaacccgcc

SEQ ID NO: 1405517 - RNA, 19 nt, Artificial Sequence
  Description of Artificial Sequence: Synthetic oligonucleotide
ucugucacgaugccaccga

SEQ ID NO: 1405518 - RNA, 19 nt, Artificial Sequence
  Description of Artificial Sequence: Synthetic oligonucleotide
cagguugguaagugcaucc

SEQ ID NO: 1405519 - RNA, 19 nt, Artificial Sequence
  Description of Artificial Sequence: Synthetic oligonucleotide
uuugacggaggcagaguga

SEQ ID NO: 1405520 - RNA, 19 nt, Artificial Sequence
  Description of Artificial Sequence: Synthetic oligonucleotide
cauagagauccaguucucg

SEQ ID NO: 1405521 - RNA, 19 nt, Artificial Sequence
  Description of Artificial Sequence: Synthetic oligonucleotide
ugcgguuugaacccagcuc

SEQ ID NO: 1405522 - RNA, 19 nt, Artificial Sequence
  Description of Artificial Sequence: Synthetic oligonucleotide
gauguugguagcacaugcc

SEQ ID NO: 1405523 - RNA, 19 nt, Artificial Sequence
  Description of Artificial Sequence: Synthetic oligonucleotide
auagugauucagaucaaca

SEQ ID NO: 1405524 - RNA, 19 nt, Artificial Sequence
  Description of Artificial Sequence: Synthetic oligonucleotide
uuauccuauuugaugcaau

SEQ ID NO: 1405525 - RNA, 19 nt, Artificial Sequence
  Description of Artificial Sequence: Synthetic oligonucleotide
ugucaaucccuucaauguu

SEQ ID NO: 1405526 - RNA, 19 nt, Artificial Sequence
  Description of Artificial Sequence: Synthetic oligonucleotide
gcgguuugaacccagcucc

SEQ ID NO: 1405527 - RNA, 19 nt, Artificial Sequence
  Description of Artificial Sequence: Synthetic oligonucleotide
caugccuuuaacccagcac

SEQ ID NO: 1405528 - RNA, 19 nt, Artificial Sequence
  Description of Artificial Sequence: Synthetic oligonucleotide
agccgugucaguuugucaa

SEQ ID NO: 1405529 - RNA, 19 nt, Artificial Sequence
  Description of Artificial Sequence: Synthetic oligonucleotide
uauugaucuuauuguuaac

SEQ ID NO: 1405530 - RNA, 19 nt, Artificial Sequence
  Description of Artificial Sequence: Synthetic oligonucleotide
uccaaaugguguguggugu

SEQ ID NO: 1405531 - RNA, 19 nt, Artificial Sequence
  Description of Artificial Sequence: Synthetic oligonucleotide
ucacgcagguucaccaagc

SEQ ID NO: 1405532 - RNA, 19 nt, Artificial Sequence
  Description of Artificial Sequence: Synthetic oligonucleotide
acgacuucaggagcaauag

SEQ ID NO: 1405533 - RNA, 19 nt, Artificial Sequence
  Description of Artificial Sequence: Synthetic oligonucleotide
caggcuaaggacauagaca

SEQ ID NO: 1405534 - RNA, 19 nt, Artificial Sequence
  Description of Artificial Sequence: Synthetic oligonucleotide
uaaccucgauaccauugug

SEQ ID NO: 1405535 - RNA, 19 nt, Artificial Sequence
  Description of Artificial Sequence: Synthetic oligonucleotide
ucuuuccaaugcgauagug

SEQ ID NO: 1405536 - RNA, 19 nt, Artificial Sequence
  Description of Artificial Sequence: Synthetic oligonucleotide
ucgauaaccucgauaccau

SEQ ID NO: 1405537 - RNA, 19 nt, Artificial Sequence
  Description of Artificial Sequence: Synthetic oligonucleotide
gcuaaggacauagacagac

SEQ ID NO: 1405538 - RNA, 19 nt, Artificial Sequence
  Description of Artificial Sequence: Synthetic oligonucleotide
auucaacccgccugucgac

SEQ ID NO: 1405539 - RNA, 19 nt, Artificial Sequence
  Description of Artificial Sequence: Synthetic oligonucleotide
ugcgauagugauucagauc

SEQ ID NO: 1405540 - RNA, 19 nt, Artificial Sequence
  Description of Artificial Sequence: Synthetic oligonucleotide
agccgguugcucugcauac

SEQ ID NO: 1405541 - RNA, 19 nt, Artificial Sequence
  Description of Artificial Sequence: Synthetic oligonucleotide
cgauauuuucaauugcccg

SEQ ID NO: 1405542 - RNA, 19 nt, Artificial Sequence
  Description of Artificial Sequence: Synthetic oligonucleotide
auggcuacaauaaccguca

SEQ ID NO: 1405543 - RNA, 19 nt, Artificial Sequence
  Description of Artificial Sequence: Synthetic oligonucleotide
cucgauaaccucgauacca

SEQ ID NO: 1405544 - RNA, 19 nt, Artificial Sequence
  Description of Artificial Sequence: Synthetic oligonucleotide
uugacggaggcagagugac

SEQ ID NO: 1405545 - RNA, 19 nt, Artificial Sequence
  Description of Artificial Sequence: Synthetic oligonucleotide
acaauaaccgucaccaauu

SEQ ID NO: 1405546 - RNA, 19 nt, Artificial Sequence
  Description of Artificial Sequence: Synthetic oligonucleotide
cuucagacucugcucacug

SEQ ID NO: 1405547 - RNA, 19 nt, Artificial Sequence
  Description of Artificial Sequence: Synthetic oligonucleotide
caaugcgauagugauucag

SEQ ID NO: 1405548 - RNA, 19 nt, Artificial Sequence
  Description of Artificial Sequence: Synthetic oligonucleotide
gacuguugguauagugacg

SEQ ID NO: 1405549 - RNA, 19 nt, Artificial Sequence
  Description of Artificial Sequence: Synthetic oligonucleotide
ugucacgaugccaccgaug

SEQ ID NO: 1405550 - RNA, 19 nt, Artificial Sequence
  Description of Artificial Sequence: Synthetic oligonucleotide
acuguugcggcccgccguc

SEQ ID NO: 1405551 - RNA, 19 nt, Artificial Sequence
  Description of Artificial Sequence: Synthetic oligonucleotide
auguccaacauggugaguu

SEQ ID NO: 1405552 - RNA, 19 nt, Artificial Sequence
  Description of Artificial Sequence: Synthetic oligonucleotide
agauuaaaagaaauaucua

SEQ ID NO: 1405553 - RNA, 19 nt, Artificial Sequence
  Description of Artificial Sequence: Synthetic oligonucleotide
aagguaccuauguucucaa

SEQ ID NO: 1405554 - RNA, 19 nt, Artificial Sequence
  Description of Artificial Sequence: Synthetic oligonucleotide
agcaauagguagauuaaaa

SEQ ID NO: 1405555 - RNA, 19 nt, Artificial Sequence
  Description of Artificial Sequence: Synthetic oligonucleotide
ggugucucaggccagcuac

SEQ ID NO: 1405556 - RNA, 19 nt, Artificial Sequence
  Description of Artificial Sequence: Synthetic oligonucleotide
cuccagguugguuaacgug

SEQ ID NO: 1405557 - RNA, 19 nt, Artificial Sequence
  Description of Artificial Sequence: Synthetic oligonucleotide
augcgauagugauucagau

SEQ ID NO: 1405558 - RNA, 19 nt, Artificial Sequence
  Description of Artificial Sequence: Synthetic oligonucleotide
gguauagugacgacuucag

SEQ ID NO: 1405559 - RNA, 19 nt, Artificial Sequence
  Description of Artificial Sequence: Synthetic oligonucleotide
agccaggcuaaggacauag

SEQ ID NO: 1405560 - RNA, 19 nt, Artificial Sequence
  Description of Artificial Sequence: Synthetic oligonucleotide
ucugccgcacggaggguag

SEQ ID NO: 1405561 - RNA, 19 nt, Artificial Sequence
  Description of Artificial Sequence: Synthetic oligonucleotide
aagugcauccagguucuga

SEQ ID NO: 1405562 - RNA, 19 nt, Artificial Sequence
  Description of Artificial Sequence: Synthetic oligonucleotide
guugacguaagguaccuau

SEQ ID NO: 1405563 - RNA, 19 nt, Artificial Sequence
  Description of Artificial Sequence: Synthetic oligonucleotide
ucuuuguuagccgguugcu

SEQ ID NO: 1405564 - RNA, 19 nt, Artificial Sequence
  Description of Artificial Sequence: Synthetic oligonucleotide
ucaggagcaauagguagau

SEQ ID NO: 1405565 - RNA, 19 nt, Artificial Sequence
  Description of Artificial Sequence: Synthetic oligonucleotide
ugaguuuguuauuguucuc

SEQ ID NO: 1405566 - RNA, 19 nt, Artificial Sequence
  Description of Artificial Sequence: Synthetic oligonucleotide
caauaaccgucaccaauuc

SEQ ID NO: 1405567 - RNA, 19 nt, Artificial Sequence
  Description of Artificial Sequence: Synthetic oligonucleotide
gauugucauucauccagaa

SEQ ID NO: 1405568 - RNA, 19 nt, Artificial Sequence
  Description of Artificial Sequence: Synthetic oligonucleotide
uaccuauguucucaauuuu

SEQ ID NO: 1405569 - RNA, 19 nt, Artificial Sequence
  Description of Artificial Sequence: Synthetic oligonucleotide
cauuggguugugacuguug

SEQ ID NO: 1405570 - RNA, 19 nt, Artificial Sequence
  Description of Artificial Sequence: Synthetic oligonucleotide
gcaucgaucugccgcacgg

SEQ ID NO: 1405571 - RNA, 19 nt, Artificial Sequence
  Description of Artificial Sequence: Synthetic oligonucleotide
cuuccgccgguacuguggg

SEQ ID NO: 1405572 - RNA, 19 nt, Artificial Sequence
  Description of Artificial Sequence: Synthetic oligonucleotide
gucacgaugccaccgaugu

SEQ ID NO: 1405573 - RNA, 19 nt, Artificial Sequence
  Description of Artificial Sequence: Synthetic oligonucleotide
acucagaaccugacgaaug

SEQ ID NO: 1405574 - RNA, 19 nt, Artificial Sequence
  Description of Artificial Sequence: Synthetic oligonucleotide
cccucaaucuuuguuagcc

SEQ ID NO: 1405575 - RNA, 19 nt, Artificial Sequence
  Description of Artificial Sequence: Synthetic oligonucleotide
ucagguugguaagugcauc

SEQ ID NO: 1405576 - RNA, 19 nt, Artificial Sequence
  Description of Artificial Sequence: Synthetic oligonucleotide
augaccuuccgccgguacu

SEQ ID NO: 1405577 - RNA, 19 nt, Artificial Sequence
  Description of Artificial Sequence: Synthetic oligonucleotide
ugcucugcauacugaggac

SEQ ID NO: 1405578 - RNA, 19 nt, Artificial Sequence
  Description of Artificial Sequence: Synthetic oligonucleotide
gguagagccagcaugaccu

SEQ ID NO: 1405579 - RNA, 19 nt, Artificial Sequence
  Description of Artificial Sequence: Synthetic oligonucleotide
uugguauagugacgacuuc

SEQ ID NO: 1405580 - RNA, 19 nt, Artificial Sequence
  Description of Artificial Sequence: Synthetic oligonucleotide
ggaagaacaaaugacugua

SEQ ID NO: 1405581 - RNA, 19 nt, Artificial Sequence
  Description of Artificial Sequence: Synthetic oligonucleotide
aggcagagugacuucacuu

SEQ ID NO: 1405582 - RNA, 19 nt, Artificial Sequence
  Description of Artificial Sequence: Synthetic oligonucleotide
augcgguuugaacccagcu

SEQ ID NO: 1405583 - RNA, 19 nt, Artificial Sequence
  Description of Artificial Sequence: Synthetic oligonucleotide
gacgaauguggcaucgauc

SEQ ID NO: 1405584 - RNA, 19 nt, Artificial Sequence
  Description of Artificial Sequence: Synthetic oligonucleotide
guaccuauguucucaauuu

SEQ ID NO: 1405585 - RNA, 19 nt, Artificial Sequence
  Description of Artificial Sequence: Synthetic oligonucleotide
uauuuucaauugcccggau

SEQ ID NO: 1405586 - RNA, 19 nt, Artificial Sequence
  Description of Artificial Sequence: Synthetic oligonucleotide
uagccgguugcucugcaua

SEQ ID NO: 1405587 - RNA, 19 nt, Artificial Sequence
  Description of Artificial Sequence: Synthetic oligonucleotide
ucaacccgccugucgaccu

SEQ ID NO: 1405588 - RNA, 19 nt, Artificial Sequence
  Description of Artificial Sequence: Synthetic oligonucleotide
uucaacccgccugucgacc

SEQ ID NO: 1405589 - RNA, 19 nt, Artificial Sequence
  Description of Artificial Sequence: Synthetic oligonucleotide
ugguaagugcauccagguu

SEQ ID NO: 1405590 - RNA, 19 nt, Artificial Sequence
  Description of Artificial Sequence: Synthetic oligonucleotide
caguucuguuagauggcug

SEQ ID NO: 1405591 - RNA, 19 nt, Artificial Sequence
  Description of Artificial Sequence: Synthetic oligonucleotide
uuccaaugcgauagugauu

SEQ ID NO: 1405592 - RNA, 19 nt, Artificial Sequence
  Description of Artificial Sequence: Synthetic oligonucleotide
ugucucaggccagcuacca

SEQ ID NO: 1405593 - RNA, 19 nt, Artificial Sequence
  Description of Artificial Sequence: Synthetic oligonucleotide
ggcuacaauaaccgucacc

SEQ ID NO: 1405594 - RNA, 19 nt, Artificial Sequence
  Description of Artificial Sequence: Synthetic oligonucleotide
auugcccggaugcgguuug

SEQ ID NO: 1405595 - RNA, 19 nt, Artificial Sequence
  Description of Artificial Sequence: Synthetic oligonucleotide
gaugugccucuucccuucc

SEQ ID NO: 1405596 - RNA, 19 nt, Artificial Sequence
  Description of Artificial Sequence: Synthetic oligonucleotide
guaagguaccuauguucuc

SEQ ID NO: 1405597 - RNA, 19 nt, Artificial Sequence
  Description of Artificial Sequence: Synthetic oligonucleotide
ccucaaucuuuguuagccg

SEQ ID NO: 1405598 - RNA, 19 nt, Artificial Sequence
  Description of Artificial Sequence: Synthetic oligonucleotide
acgaugccaccgaugugcc

SEQ ID NO: 1405599 - RNA, 19 nt, Artificial Sequence
  Description of Artificial Sequence: Synthetic oligonucleotide
acggaggcagagugacuuc

SEQ ID NO: 1405600 - RNA, 19 nt, Artificial Sequence
  Description of Artificial Sequence: Synthetic oligonucleotide
gaugcgguuugaacccagc

SEQ ID NO: 1405601 - RNA, 19 nt, Artificial Sequence
  Description of Artificial Sequence: Synthetic oligonucleotide
gguucugaaguuuuguaau

SEQ ID NO: 1405602 - RNA, 19 nt, Artificial Sequence
  Description of Artificial Sequence: Synthetic oligonucleotide
acaguucacgcagguucac

SEQ ID NO: 1405603 - RNA, 19 nt, Artificial Sequence
  Description of Artificial Sequence: Synthetic oligonucleotide
ucgauaccauuguggcuga

SEQ ID NO: 1405604 - RNA, 19 nt, Artificial Sequence
  Description of Artificial Sequence: Synthetic oligonucleotide
gagagggaccaggugagga

SEQ ID NO: 1405605 - RNA, 19 nt, Artificial Sequence
  Description of Artificial Sequence: Synthetic oligonucleotide
uaaacucuccagguugguu

SEQ ID NO: 1405606 - RNA, 19 nt, Artificial Sequence
  Description of Artificial Sequence: Synthetic oligonucleotide
ucaccugauucuucagauu

SEQ ID NO: 1405607 - RNA, 19 nt, Artificial Sequence
  Description of Artificial Sequence: Synthetic oligonucleotide
uucuguuagauggcugaua

SEQ ID NO: 1405608 - RNA, 19 nt, Artificial Sequence
  Description of Artificial Sequence: Synthetic oligonucleotide
guugguauagugacgacuu

SEQ ID NO: 1405609 - RNA, 19 nt, Artificial Sequence
  Description of Artificial Sequence: Synthetic oligonucleotide
uguuagccgguugcucugc

SEQ ID NO: 1405610 - RNA, 19 nt, Artificial Sequence
  Description of Artificial Sequence: Synthetic oligonucleotide
caaucuuuccaaugcgaua

SEQ ID NO: 1405611 - RNA, 19 nt, Artificial Sequence
  Description of Artificial Sequence: Synthetic oligonucleotide
gauggcugauauuuucaau

SEQ ID NO: 1405612 - RNA, 19 nt, Artificial Sequence
  Description of Artificial Sequence: Synthetic oligonucleotide
uccugcgacuguugcggcc

SEQ ID NO: 1405613 - RNA, 19 nt, Artificial Sequence
  Description of Artificial Sequence: Synthetic oligonucleotide
uccgccgguacuguggguc

SEQ ID NO: 1405614 - RNA, 19 nt, Artificial Sequence
  Description of Artificial Sequence: Synthetic oligonucleotide
ugguuaacgugucgauauu

SEQ ID NO: 1405615 - RNA, 19 nt, Artificial Sequence
  Description of Artificial Sequence: Synthetic oligonucleotide
gacgacuucaggagcaaua

SEQ ID NO: 1405616 - RNA, 19 nt, Artificial Sequence
  Description of Artificial Sequence: Synthetic oligonucleotide
accuauguucucaauuuua

SEQ ID NO: 1405617 - RNA, 19 nt, Artificial Sequence
  Description of Artificial Sequence: Synthetic oligonucleotide
uguugcggcccgccgucgc

SEQ ID NO: 1405618 - RNA, 19 nt, Artificial Sequence
  Description of Artificial Sequence: Synthetic oligonucleotide
aauguccaacauggugagu

SEQ ID NO: 1405619 - RNA, 19 nt, Artificial Sequence
  Description of Artificial Sequence: Synthetic oligonucleotide
ccggaugcgguuugaaccc

SEQ ID NO: 1405620 - RNA, 19 nt, Artificial Sequence
  Description of Artificial Sequence: Synthetic oligonucleotide
ggguagagccagcaugacc

SEQ ID NO: 1405621 - RNA, 19 nt, Artificial Sequence
  Description of Artificial Sequence: Synthetic oligonucleotide
aauugcccggaugcgguuu

SEQ ID NO: 1405622 - RNA, 19 nt, Artificial Sequence
  Description of Artificial Sequence: Synthetic oligonucleotide
aggccagcuaccaccagug

SEQ ID NO: 1405623 - RNA, 19 nt, Artificial Sequence
  Description of Artificial Sequence: Synthetic oligonucleotide
ccuuccgccgguacugugg

SEQ ID NO: 1405624 - RNA, 19 nt, Artificial Sequence
  Description of Artificial Sequence: Synthetic oligonucleotide
agccuucaaucuuuccaau

SEQ ID NO: 1405625 - RNA, 19 nt, Artificial Sequence
  Description of Artificial Sequence: Synthetic oligonucleotide
gcaguugacguaagguacc

SEQ ID NO: 1405626 - RNA, 19 nt, Artificial Sequence
  Description of Artificial Sequence: Synthetic oligonucleotide
ccgucaccaauucaccagg

SEQ ID NO: 1405627 - RNA, 19 nt, Artificial Sequence
  Description of Artificial Sequence: Synthetic oligonucleotide
auguggcaucgaucugccg

SEQ ID NO: 1405628 - RNA, 19 nt, Artificial Sequence
  Description of Artificial Sequence: Synthetic oligonucleotide
gcagagugacuucacuuuc

SEQ ID NO: 1405629 - RNA, 19 nt, Artificial Sequence
  Description of Artificial Sequence: Synthetic oligonucleotide
ggcaagauuuaauaguguu

SEQ ID NO: 1405630 - RNA, 19 nt, Artificial Sequence
  Description of Artificial Sequence: Synthetic oligonucleotide
agaccacguggcaagauuu

SEQ ID NO: 1405631 - RNA, 19 nt, Artificial Sequence
  Description of Artificial Sequence: Synthetic oligonucleotide
caguucacgcagguucacc

SEQ ID NO: 1405632 - RNA, 19 nt, Artificial Sequence
  Description of Artificial Sequence: Synthetic oligonucleotide
uuagccgguugcucugcau

SEQ ID NO: 1405633 - RNA, 19 nt, Artificial Sequence
  Description of Artificial Sequence: Synthetic oligonucleotide
ccaccgaugugccucuucc

SEQ ID NO: 1405634 - RNA, 19 nt, Artificial Sequence
  Description of Artificial Sequence: Synthetic oligonucleotide
aucucgguccagguugaug

SEQ ID NO: 1405635 - RNA, 19 nt, Artificial Sequence
  Description of Artificial Sequence: Synthetic oligonucleotide
aaccguggcugggaagaga

SEQ ID NO: 1405636 - RNA, 19 nt, Artificial Sequence
  Description of Artificial Sequence: Synthetic oligonucleotide
uucagccgugucaguuugu

SEQ ID NO: 1405637 - RNA, 19 nt, Artificial Sequence
  Description of Artificial Sequence: Synthetic oligonucleotide
ugacggaggcagagugacu

SEQ ID NO: 1405638 - RNA, 19 nt, Artificial Sequence
  Description of Artificial Sequence: Synthetic oligonucleotide
guugguuaacgugucgaua

SEQ ID NO: 1405639 - RNA, 19 nt, Artificial Sequence
  Description of Artificial Sequence: Synthetic oligonucleotide
ccgcacggaggguagagcc

SEQ ID NO: 1405640 - RNA, 19 nt, Artificial Sequence
  Description of Artificial Sequence: Synthetic oligonucleotide
acgugucgauauuuucaau

SEQ ID NO: 1405641 - RNA, 19 nt, Artificial Sequence
  Description of Artificial Sequence: Synthetic oligonucleotide
gacguaagguaccuauguu

SEQ ID NO: 1405642 - RNA, 19 nt, Artificial Sequence
  Description of Artificial Sequence: Synthetic oligonucleotide
guuaaccaagaagaguuuu

SEQ ID NO: 1405643 - RNA, 19 nt, Artificial Sequence
  Description of Artificial Sequence: Synthetic oligonucleotide
cuacaauaaccgucaccaa

SEQ ID NO: 1405644 - RNA, 19 nt, Artificial Sequence
  Description of Artificial Sequence: Synthetic oligonucleotide
guucacgcagguucaccaa

SEQ ID NO: 1405645 - RNA, 19 nt, Artificial Sequence
  Description of Artificial Sequence: Synthetic oligonucleotide
caaggucacuccagcucuc

SEQ ID NO: 1405646 - RNA, 19 nt, Artificial Sequence
  Description of Artificial Sequence: Synthetic oligonucleotide
gcaucugcaguugacguaa

SEQ ID NO: 1405647 - RNA, 19 nt, Artificial Sequence
  Description of Artificial Sequence: Synthetic oligonucleotide
gacggaggcagagugacuu

SEQ ID NO: 1405648 - RNA, 19 nt, Artificial Sequence
  Description of Artificial Sequence: Synthetic oligonucleotide
ggcaucgaucugccgcacg

SEQ ID NO: 1405649 - RNA, 19 nt, Artificial Sequence
  Description of Artificial Sequence: Synthetic oligonucleotide
agguaccuauguucucaau

SEQ ID NO: 1405650 - RNA, 19 nt, Artificial Sequence
  Description of Artificial Sequence: Synthetic oligonucleotide
guuaacgugucgauauuuu

SEQ ID NO: 1405651 - RNA, 19 nt, Artificial Sequence
  Description of Artificial Sequence: Synthetic oligonucleotide
acggaggguagagccagca

SEQ ID NO: 1405652 - RNA, 19 nt, Artificial Sequence
  Description of Artificial Sequence: Synthetic oligonucleotide
augccaccgaugugccucu

SEQ ID NO: 1405653 - RNA, 19 nt, Artificial Sequence
  Description of Artificial Sequence: Synthetic oligonucleotide
gguugaugguuuccauauc

SEQ ID NO: 1405654 - RNA, 19 nt, Artificial Sequence
  Description of Artificial Sequence: Synthetic oligonucleotide
ccaauucaccaggaagacc

SEQ ID NO: 1405655 - RNA, 19 nt, Artificial Sequence
  Description of Artificial Sequence: Synthetic oligonucleotide
cuccugcgacuguugcggc

SEQ ID NO: 1405656 - RNA, 19 nt, Artificial Sequence
  Description of Artificial Sequence: Synthetic oligonucleotide
ccaaauggugugugguguc

SEQ ID NO: 1405657 - RNA, 19 nt, Artificial Sequence
  Description of Artificial Sequence: Synthetic oligonucleotide
gacuguugcggcccgccgu

SEQ ID NO: 1405658 - RNA, 19 nt, Artificial Sequence
  Description of Artificial Sequence: Synthetic oligonucleotide
gugucucaggccagcuacc

SEQ ID NO: 1405659 - RNA, 19 nt, Artificial Sequence
  Description of Artificial Sequence: Synthetic oligonucleotide
guuagccgguugcucugca

SEQ ID NO: 1405660 - RNA, 19 nt, Artificial Sequence
  Description of Artificial Sequence: Synthetic oligonucleotide
uuauugccauuggguugug

SEQ ID NO: 1405661 - RNA, 19 nt, Artificial Sequence
  Description of Artificial Sequence: Synthetic oligonucleotide
cguaagguaccuauguucu

SEQ ID NO: 1405662 - RNA, 19 nt, Artificial Sequence
  Description of Artificial Sequence: Synthetic oligonucleotide
caggaagaccacguggcaa

SEQ ID NO: 1405663 - RNA, 19 nt, Artificial Sequence
  Description of Artificial Sequence: Synthetic oligonucleotide
cuucagauucaacccgccu

SEQ ID NO: 1405664 - RNA, 19 nt, Artificial Sequence
  Description of Artificial Sequence: Synthetic oligonucleotide
uaagugcauccagguucug

SEQ ID NO: 1405665 - RNA, 19 nt, Artificial Sequence
  Description of Artificial Sequence: Synthetic oligonucleotide
cacggaggguagagccagc

SEQ ID NO: 1405666 - RNA, 19 nt, Artificial Sequence
  Description of Artificial Sequence: Synthetic oligonucleotide
ccugucgaccuccaucauc

SEQ ID NO: 1405667 - RNA, 19 nt, Artificial Sequence
  Description of Artificial Sequence: Synthetic oligonucleotide
ccucgauaaccucgauacc

SEQ ID NO: 1405668 - RNA, 19 nt, Artificial Sequence
  Description of Artificial Sequence: Synthetic oligonucleotide
ucgcgcuccgccgccauau

SEQ ID NO: 1405669 - RNA, 19 nt, Artificial Sequence
  Description of Artificial Sequence: Synthetic oligonucleotide
gucauucauccagaauucu

SEQ ID NO: 1405670 - RNA, 19 nt, Artificial Sequence
  Description of Artificial Sequence: Synthetic oligonucleotide
gaccacguggcaagauuua

SEQ ID NO: 1405671 - RNA, 19 nt, Artificial Sequence
  Description of Artificial Sequence: Synthetic oligonucleotide
ggaugcgguuugaacccag

SEQ ID NO: 1405672 - RNA, 19 nt, Artificial Sequence
  Description of Artificial Sequence: Synthetic oligonucleotide
guuuugacggaggcagagu

SEQ ID NO: 1405673 - RNA, 19 nt, Artificial Sequence
  Description of Artificial Sequence: Synthetic oligonucleotide
gacugucagguugguaagu

SEQ ID NO: 1405674 - RNA, 19 nt, Artificial Sequence
  Description of Artificial Sequence: Synthetic oligonucleotide
aguugacguaagguaccua

SEQ ID NO: 1405675 - RNA, 19 nt, Artificial Sequence
  Description of Artificial Sequence: Synthetic oligonucleotide
uugcggcccgccgucgcgc

SEQ ID NO: 1405676 - RNA, 19 nt, Artificial Sequence
  Description of Artificial Sequence: Synthetic oligonucleotide
ccuggcacccuugagcuca

SEQ ID NO: 1405677 - RNA, 19 nt, Artificial Sequence
  Description of Artificial Sequence: Synthetic oligonucleotide
gguugguuaacgugucgau

SEQ ID NO: 1405678 - RNA, 19 nt, Artificial Sequence
  Description of Artificial Sequence: Synthetic oligonucleotide
gcccggaugcgguuugaac

SEQ ID NO: 1405679 - RNA, 19 nt, Artificial Sequence
  Description of Artificial Sequence: Synthetic oligonucleotide
cuguugcggcccgccgucg

SEQ ID NO: 1405680 - RNA, 19 nt, Artificial Sequence
  Description of Artificial Sequence: Synthetic oligonucleotide
caucgaucugccgcacgga

SEQ ID NO: 1405681 - RNA, 19 nt, Artificial Sequence
  Description of Artificial Sequence: Synthetic oligonucleotide
ugcccggaugcgguuugaa

SEQ ID NO: 1405682 - RNA, 19 nt, Artificial Sequence
  Description of Artificial Sequence: Synthetic oligonucleotide
gaggagcaaggaggacuca

SEQ ID NO: 1405683 - RNA, 19 nt, Artificial Sequence
  Description of Artificial Sequence: Synthetic oligonucleotide
gguuaacgugucgauauuu

SEQ ID NO: 1405684 - RNA, 19 nt, Artificial Sequence
  Description of Artificial Sequence: Synthetic oligonucleotide
uuccgccgguacugugggu

SEQ ID NO: 1405685 - RNA, 19 nt, Artificial Sequence
  Description of Artificial Sequence: Synthetic oligonucleotide
ccgccugucgaccuccauc

SEQ ID NO: 1405686 - RNA, 19 nt, Artificial Sequence
  Description of Artificial Sequence: Synthetic oligonucleotide
gugacgacuucaggagcaa

SEQ ID NO: 1405687 - RNA, 19 nt, Artificial Sequence
  Description of Artificial Sequence: Synthetic oligonucleotide
gucagguugguaagugcau

SEQ ID NO: 1405688 - RNA, 19 nt, Artificial Sequence
  Description of Artificial Sequence: Synthetic oligonucleotide
cacgcagguucaccaagcu

SEQ ID NO: 1405689 - RNA, 19 nt, Artificial Sequence
  Description of Artificial Sequence: Synthetic oligonucleotide
gcgcuccgccgccauauug

SEQ ID NO: 1405690 - RNA, 19 nt, Artificial Sequence
  Description of Artificial Sequence: Synthetic oligonucleotide
ccagauguugguagcacau

SEQ ID NO: 1405691 - RNA, 19 nt, Artificial Sequence
  Description of Artificial Sequence: Synthetic oligonucleotide
uugcccggaugcgguuuga

SEQ ID NO: 1405692 - RNA, 19 nt, Artificial Sequence
  Description of Artificial Sequence: Synthetic oligonucleotide
guucuguuagauggcugau

SEQ ID NO: 1405693 - RNA, 19 nt, Artificial Sequence
  Description of Artificial Sequence: Synthetic oligonucleotide
caaucuuuguuagccgguu

SEQ ID NO: 1405694 - RNA, 19 nt, Artificial Sequence
  Description of Artificial Sequence: Synthetic oligonucleotide
gguugcgcuccagguacac

SEQ ID NO: 1405695 - RNA, 19 nt, Artificial Sequence
  Description of Artificial Sequence: Synthetic oligonucleotide
caguugacguaagguaccu

SEQ ID NO: 1405696 - RNA, 19 nt, Artificial Sequence
  Description of Artificial Sequence: Synthetic oligonucleotide
gcgacuguugcggcccgcc

SEQ ID NO: 1405697 - RNA, 19 nt, Artificial Sequence
  Description of Artificial Sequence: Synthetic oligonucleotide
ccgccgguacugugggucc

SEQ ID NO: 1405698 - RNA, 19 nt, Artificial Sequence
  Description of Artificial Sequence: Synthetic oligonucleotide
ccguggcugggaagagagg

SEQ ID NO: 1405699 - RNA, 19 nt, Artificial Sequence
  Description of Artificial Sequence: Synthetic oligonucleotide
ccgugucaguuugucaauc

SEQ ID NO: 1405700 - RNA, 19 nt, Artificial Sequence
  Description of Artificial Sequence: Synthetic oligonucleotide
cgaauguggcaucgaucug

SEQ ID NO: 1405701 - RNA, 19 nt, Artificial Sequence
  Description of Artificial Sequence: Synthetic oligonucleotide
ggcuaaggacauagacaga

SEQ ID NO: 1405702 - RNA, 19 nt, Artificial Sequence
  Description of Artificial Sequence: Synthetic oligonucleotide
cuguuagauggcugauauu

SEQ ID NO: 1405703 - RNA, 19 nt, Artificial Sequence
  Description of Artificial Sequence: Synthetic oligonucleotide
gccaccgaugugccucuuc

SEQ ID NO: 1405704 - RNA, 19 nt, Artificial Sequence
  Description of Artificial Sequence: Synthetic oligonucleotide
gccgcacggaggguagagc

SEQ ID NO: 1405705 - RNA, 19 nt, Artificial Sequence
  Description of Artificial Sequence: Synthetic oligonucleotide
cgacuguugcggcccgccg

SEQ ID NO: 1405706 - RNA, 19 nt, Artificial Sequence
  Description of Artificial Sequence: Synthetic oligonucleotide
cugucacgaugccaccgau

SEQ ID NO: 1405707 - RNA, 19 nt, Artificial Sequence
  Description of Artificial Sequence: Synthetic oligonucleotide
gaccuuccgccgguacugu

SEQ ID NO: 1405708 - RNA, 19 nt, Artificial Sequence
  Description of Artificial Sequence: Synthetic oligonucleotide
ccauggcuacaauaaccgu

SEQ ID NO: 1405709 - RNA, 19 nt, Artificial Sequence
  Description of Artificial Sequence: Synthetic oligonucleotide
ccucgauaccauuguggcu

SEQ ID NO: 1405710 - RNA, 19 nt, Artificial Sequence
  Description of Artificial Sequence: Synthetic oligonucleotide
cgucaccaauucaccagga

SEQ ID NO: 1405711 - RNA, 19 nt, Artificial Sequence
  Description of Artificial Sequence: Synthetic oligonucleotide
caauugcccggaugcgguu

SEQ ID NO: 1405712 - RNA, 19 nt, Artificial Sequence
  Description of Artificial Sequence: Synthetic oligonucleotide
cuccgccgccauauuggcu

SEQ ID NO: 1405713 - RNA, 19 nt, Artificial Sequence
  Description of Artificial Sequence: Synthetic oligonucleotide
ccacguggcaagauuuaau

SEQ ID NO: 1405714 - RNA, 19 nt, Artificial Sequence
  Description of Artificial Sequence: Synthetic oligonucleotide
gccgugucaguuugucaau

SEQ ID NO: 1405715 - RNA, 19 nt, Artificial Sequence
  Description of Artificial Sequence: Synthetic oligonucleotide
ccaggagauugucauucau

SEQ ID NO: 1405716 - RNA, 19 nt, Artificial Sequence
  Description of Artificial Sequence: Synthetic oligonucleotide
cgauagugauucagaucaa

SEQ ID NO: 1405717 - RNA, 19 nt, Artificial Sequence
  Description of Artificial Sequence: Synthetic oligonucleotide
cgguuugaacccagcucca

SEQ ID NO: 1405718 - RNA, 19 nt, Artificial Sequence
  Description of Artificial Sequence: Synthetic oligonucleotide
ggguugcgcuccagguaca

SEQ ID NO: 1405719 - RNA, 19 nt, Artificial Sequence
  Description of Artificial Sequence: Synthetic oligonucleotide
cugccgcacggaggguaga

SEQ ID NO: 1405720 - RNA, 19 nt, Artificial Sequence
  Description of Artificial Sequence: Synthetic oligonucleotide
ugccaccgaugugccucuu

SEQ ID NO: 1405721 - RNA, 19 nt, Artificial Sequence
  Description of Artificial Sequence: Synthetic oligonucleotide
ccgguacuguggguccuuc

SEQ ID NO: 1405722 - RNA, 19 nt, Artificial Sequence
  Description of Artificial Sequence: Synthetic oligonucleotide
ccuucagacucugcucacu

SEQ ID NO: 1405723 - RNA, 19 nt, Artificial Sequence
  Description of Artificial Sequence: Synthetic oligonucleotide
cgauaccauuguggcugag

SEQ ID NO: 1405724 - RNA, 19 nt, Artificial Sequence
  Description of Artificial Sequence: Synthetic oligonucleotide
ccaacauggugaguuuguu

SEQ ID NO: 1405725 - RNA, 19 nt, Artificial Sequence
  Description of Artificial Sequence: Synthetic oligonucleotide
ccgaugugccucuucccuu

SEQ ID NO: 1405726 - RNA, 19 nt, Artificial Sequence
  Description of Artificial Sequence: Synthetic oligonucleotide
cggcccgccgucgcgcucc

SEQ ID NO: 1405727 - RNA, 19 nt, Artificial Sequence
  Description of Artificial Sequence: Synthetic oligonucleotide
caggagcaauagguagauu

SEQ ID NO: 1405728 - RNA, 19 nt, Artificial Sequence
  Description of Artificial Sequence: Synthetic oligonucleotide
cgauaaccucgauaccauu

SEQ ID NO: 1405729 - RNA, 19 nt, Artificial Sequence
  Description of Artificial Sequence: Synthetic oligonucleotide
cggaugcgguuugaaccca

SEQ ID NO: 1405730 - RNA, 19 nt, Artificial Sequence
  Description of Artificial Sequence: Synthetic oligonucleotide
caucucgguccagguugau

SEQ ID NO: 1405731 - RNA, 19 nt, Artificial Sequence
  Description of Artificial Sequence: Synthetic oligonucleotide
cgccauauuggcugcucuu

SEQ ID NO: 1405732 - RNA, 19 nt, Artificial Sequence
  Description of Artificial Sequence: Synthetic oligonucleotide
ccauuggguugugacuguu

SEQ ID NO: 1405733 - RNA, 19 nt, Artificial Sequence
  Description of Artificial Sequence: Synthetic oligonucleotide
cgccgguacuguggguccu

SEQ ID NO: 1405734 - RNA, 19 nt, Artificial Sequence
  Description of Artificial Sequence: Synthetic oligonucleotide
cgucgcgcuccgccgccau

SEQ ID NO: 1405735 - RNA, 19 nt, Artificial Sequence
  Description of Artificial Sequence: Synthetic oligonucleotide
cgcgcuccgccgccauauu

SEQ ID NO: 1405736 - RNA, 19 nt, Artificial Sequence
  Description of Artificial Sequence: Synthetic oligonucleotide
auuagaaugaguuugcuac

SEQ ID NO: 1405737 - RNA, 19 nt, Artificial Sequence
  Description of Artificial Sequence: Synthetic oligonucleotide
aaauaggaggcuuuaauac

SEQ ID NO: 1405738 - RNA, 19 nt, Artificial Sequence
  Description of Artificial Sequence: Synthetic oligonucleotide
aaaugcacgagcuucggcc

SEQ ID NO: 1405739 - RNA, 19 nt, Artificial Sequence
  Description of Artificial Sequence: Synthetic oligonucleotide
uuuaauacaaaaggggagg

SEQ ID NO: 1405740 - RNA, 19 nt, Artificial Sequence
  Description of Artificial Sequence: Synthetic oligonucleotide
accgaugacacccagaagg

SEQ ID NO: 1405741 - RNA, 19 nt, Artificial Sequence
  Description of Artificial Sequence: Synthetic oligonucleotide
uugauaaaaccaaccaagg

SEQ ID NO: 1405742 - RNA, 19 nt, Artificial Sequence
  Description of Artificial Sequence: Synthetic oligonucleotide
uuugcuacggucaccagag

SEQ ID NO: 1405743 - RNA, 19 nt, Artificial Sequence
  Description of Artificial Sequence: Synthetic oligonucleotide
agugggaugaugcagacug

SEQ ID NO: 1405744 - RNA, 19 nt, Artificial Sequence
  Description of Artificial Sequence: Synthetic oligonucleotide
guugauaaaaccaaccaag

SEQ ID NO: 1405745 - RNA, 19 nt, Artificial Sequence
  Description of Artificial Sequence: Synthetic oligonucleotide
uuaaauaaggaugaguguc

SEQ ID NO: 1405746 - RNA, 19 nt, Artificial Sequence
  Description of Artificial Sequence: Synthetic oligonucleotide
aaaacucgaaugucagugg

SEQ ID NO: 1405747 - RNA, 19 nt, Artificial Sequence
  Description of Artificial Sequence: Synthetic oligonucleotide
aauaggaggcuuuaauaca

SEQ ID NO: 1405748 - RNA, 19 nt, Artificial Sequence
  Description of Artificial Sequence: Synthetic oligonucleotide
aaacucgaaugucaguggg

SEQ ID NO: 1405749 - RNA, 19 nt, Artificial Sequence
  Description of Artificial Sequence: Synthetic oligonucleotide
acaaagagggucaagcugc

SEQ ID NO: 1405750 - RNA, 19 nt, Artificial Sequence
  Description of Artificial Sequence: Synthetic oligonucleotide
aaaauaggaggcuuuaaua

SEQ ID NO: 1405751 - RNA, 19 nt, Artificial Sequence
  Description of Artificial Sequence: Synthetic oligonucleotide
ucugcuacguuccacaccu

SEQ ID NO: 1405752 - RNA, 19 nt, Artificial Sequence
  Description of Artificial Sequence: Synthetic oligonucleotide
ucuguauugaguagggcug

SEQ ID NO: 1405753 - RNA, 19 nt, Artificial Sequence
  Description of Artificial Sequence: Synthetic oligonucleotide
acaaccaagcaugugaugg

SEQ ID NO: 1405754 - RNA, 19 nt, Artificial Sequence
  Description of Artificial Sequence: Synthetic oligonucleotide
agcacguccuccuucaagc

SEQ ID NO: 1405755 - RNA, 19 nt, Artificial Sequence
  Description of Artificial Sequence: Synthetic oligonucleotide
cuuacgaguugccauagcg

SEQ ID NO: 1405756 - RNA, 19 nt, Artificial Sequence
  Description of Artificial Sequence: Synthetic oligonucleotide
uuacgaguugccauagcgg

SEQ ID NO: 1405757 - RNA, 19 nt, Artificial Sequence
  Description of Artificial Sequence: Synthetic oligonucleotide
ucuacacuccacuuaauga

SEQ ID NO: 1405758 - RNA, 19 nt, Artificial Sequence
  Description of Artificial Sequence: Synthetic oligonucleotide
uguugauaaaaccaaccaa

SEQ ID NO: 1405759 - RNA, 19 nt, Artificial Sequence
  Description of Artificial Sequence: Synthetic oligonucleotide
acuaagaaguccccggcac

SEQ ID NO: 1405760 - RNA, 19 nt, Artificial Sequence
  Description of Artificial Sequence: Synthetic oligonucleotide
cuuugauccuccaccaucg

SEQ ID NO: 1405761 - RNA, 19 nt, Artificial Sequence
  Description of Artificial Sequence: Synthetic oligonucleotide
auaaggaugagugucagga

SEQ ID NO: 1405762 - RNA, 19 nt, Artificial Sequence
  Description of Artificial Sequence: Synthetic oligonucleotide
uagaguuuagccaagcgua

SEQ ID NO: 1405763 - RNA, 19 nt, Artificial Sequence
  Description of Artificial Sequence: Synthetic oligonucleotide
auuaugggagccuguggcc

SEQ ID NO: 1405764 - RNA, 19 nt, Artificial Sequence
  Description of Artificial Sequence: Synthetic oligonucleotide
ugucacacagcacucucgg

SEQ ID NO: 1405765 - RNA, 19 nt, Artificial Sequence
  Description of Artificial Sequence: Synthetic oligonucleotide
ucagucucagaaucgcugg

SEQ ID NO: 1405766 - RNA, 19 nt, Artificial Sequence
  Description of Artificial Sequence: Synthetic oligonucleotide
cauuaugggagccuguggc

SEQ ID NO: 1405767 - RNA, 19 nt, Artificial Sequence
  Description of Artificial Sequence: Synthetic oligonucleotide
aagguguacaggugcuggc

SEQ ID NO: 1405768 - RNA, 19 nt, Artificial Sequence
  Description of Artificial Sequence: Synthetic oligonucleotide
aauuagaaugaguuugcua

SEQ ID NO: 1405769 - RNA, 19 nt, Artificial Sequence
  Description of Artificial Sequence: Synthetic oligonucleotide
uaaccugccucucugcucc

SEQ ID NO: 1405770 - RNA, 19 nt, Artificial Sequence
  Description of Artificial Sequence: Synthetic oligonucleotide
agcucucagucucagaauc

SEQ ID NO: 1405771 - RNA, 19 nt, Artificial Sequence
  Description of Artificial Sequence: Synthetic oligonucleotide
auaaaaccaaccaagggga

SEQ ID NO: 1405772 - RNA, 19 nt, Artificial Sequence
  Description of Artificial Sequence: Synthetic oligonucleotide
aagagugucuccacguacg

SEQ ID NO: 1405773 - RNA, 19 nt, Artificial Sequence
  Description of Artificial Sequence: Synthetic oligonucleotide
ucuguaaccugccucucug

SEQ ID NO: 1405774 - RNA, 19 nt, Artificial Sequence
  Description of Artificial Sequence: Synthetic oligonucleotide
ugaggcuguugauaaaacc

SEQ ID NO: 1405775 - RNA, 19 nt, Artificial Sequence
  Description of Artificial Sequence: Synthetic oligonucleotide
agugucuccacguacgagu

SEQ ID NO: 1405776 - RNA, 19 nt, Artificial Sequence
  Description of Artificial Sequence: Synthetic oligonucleotide
aucgcuggaaauuucuuca

SEQ ID NO: 1405777 - RNA, 19 nt, Artificial Sequence
  Description of Artificial Sequence: Synthetic oligonucleotide
ucgaaugucagugggagcu

SEQ ID NO: 1405778 - RNA, 19 nt, Artificial Sequence
  Description of Artificial Sequence: Synthetic oligonucleotide
uccgggaucuuccacacac

SEQ ID NO: 1405779 - RNA, 19 nt, Artificial Sequence
  Description of Artificial Sequence: Synthetic oligonucleotide
cucaaaugcacgagcuucg

SEQ ID NO: 1405780 - RNA, 19 nt, Artificial Sequence
  Description of Artificial Sequence: Synthetic oligonucleotide
agcacuuaaauaaggauga

SEQ ID NO: 1405781 - RNA, 19 nt, Artificial Sequence
  Description of Artificial Sequence: Synthetic oligonucleotide
ugaguuccgagccucuuug

SEQ ID NO: 1405782 - RNA, 19 nt, Artificial Sequence
  Description of Artificial Sequence: Synthetic oligonucleotide
uacgaguugccauagcggu

SEQ ID NO: 1405783 - RNA, 19 nt, Artificial Sequence
  Description of Artificial Sequence: Synthetic oligonucleotide
aagguacuugccaucagag

SEQ ID NO: 1405784 - RNA, 19 nt, Artificial Sequence
  Description of Artificial Sequence: Synthetic oligonucleotide
ugcuacggucaccagaggc

SEQ ID NO: 1405785 - RNA, 19 nt, Artificial Sequence
  Description of Artificial Sequence: Synthetic oligonucleotide
aaugcacgagcuucggccu

SEQ ID NO: 1405786 - RNA, 19 nt, Artificial Sequence
  Description of Artificial Sequence: Synthetic oligonucleotide
gucacaaagagggucaagc

SEQ ID NO: 1405787 - RNA, 19 nt, Artificial Sequence
  Description of Artificial Sequence: Synthetic oligonucleotide
gaagguguacaggugcugg

SEQ ID NO: 1405788 - RNA, 19 nt, Artificial Sequence
  Description of Artificial Sequence: Synthetic oligonucleotide
uagcccgugagccucacgc

SEQ ID NO: 1405789 - RNA, 19 nt, Artificial Sequence
  Description of Artificial Sequence: Synthetic oligonucleotide
agcacucucggcucagggc

SEQ ID NO: 1405790 - RNA, 19 nt, Artificial Sequence
  Description of Artificial Sequence: Synthetic oligonucleotide
gaaagcacuuaaauaagga

SEQ ID NO: 1405791 - RNA, 19 nt, Artificial Sequence
  Description of Artificial Sequence: Synthetic oligonucleotide
aguuuagccaagcguagcu

SEQ ID NO: 1405792 - RNA, 19 nt, Artificial Sequence
  Description of Artificial Sequence: Synthetic oligonucleotide
uuuagccaagcguagcuuc

SEQ ID NO: 1405793 - RNA, 19 nt, Artificial Sequence
  Description of Artificial Sequence: Synthetic oligonucleotide
uuugccaccgacuucugua

SEQ ID NO: 1405794 - RNA, 19 nt, Artificial Sequence
  Description of Artificial Sequence: Synthetic oligonucleotide
accgacuucuguaaccugc

SEQ ID NO: 1405795 - RNA, 19 nt, Artificial Sequence
  Description of Artificial Sequence: Synthetic oligonucleotide
aucgucugcacccgacacc

SEQ ID NO: 1405796 - RNA, 19 nt, Artificial Sequence
  Description of Artificial Sequence: Synthetic oligonucleotide
aaauuagaaugaguuugcu

SEQ ID NO: 1405797 - RNA, 19 nt, Artificial Sequence
  Description of Artificial Sequence: Synthetic oligonucleotide
cacaaagagggucaagcug

SEQ ID NO: 1405798 - RNA, 19 nt, Artificial Sequence
  Description of Artificial Sequence: Synthetic oligonucleotide
agaagacaagcugggauuc

SEQ ID NO: 1405799 - RNA, 19 nt, Artificial Sequence
  Description of Artificial Sequence: Synthetic oligonucleotide
uagaagacaagcugggauu

SEQ ID NO: 1405800 - RNA, 19 nt, Artificial Sequence
  Description of Artificial Sequence: Synthetic oligonucleotide
gaagagugucuccacguac

SEQ ID NO: 1405801 - RNA, 19 nt, Artificial Sequence
  Description of Artificial Sequence: Synthetic oligonucleotide
uguaaccugccucucugcu

SEQ ID NO: 1405802 - RNA, 19 nt, Artificial Sequence
  Description of Artificial Sequence: Synthetic oligonucleotide
ggagugacaaccaagcaug

SEQ ID NO: 1405803 - RNA, 19 nt, Artificial Sequence
  Description of Artificial Sequence: Synthetic oligonucleotide
uugaucagauggaugcagu

SEQ ID NO: 1405804 - RNA, 19 nt, Artificial Sequence
  Description of Artificial Sequence: Synthetic oligonucleotide
uccacuuaaugauggugca

SEQ ID NO: 1405805 - RNA, 19 nt, Artificial Sequence
  Description of Artificial Sequence: Synthetic oligonucleotide
gaagauggccaggucgucg

SEQ ID NO: 1405806 - RNA, 19 nt, Artificial Sequence
  Description of Artificial Sequence: Synthetic oligonucleotide
uggauuugccucugucccg

SEQ ID NO: 1405807 - RNA, 19 nt, Artificial Sequence
  Description of Artificial Sequence: Synthetic oligonucleotide
uggaugcagucaauggagc

SEQ ID NO: 1405808 - RNA, 19 nt, Artificial Sequence
  Description of Artificial Sequence: Synthetic oligonucleotide
cuuggagccaagcucucag

SEQ ID NO: 1405809 - RNA, 19 nt, Artificial Sequence
  Description of Artificial Sequence: Synthetic oligonucleotide
ugcagacugaguuccgagc

SEQ ID NO: 1405810 - RNA, 19 nt, Artificial Sequence
  Description of Artificial Sequence: Synthetic oligonucleotide
ggcgucccaaauuagaaug

SEQ ID NO: 1405811 - RNA, 19 nt, Artificial Sequence
  Description of Artificial Sequence: Synthetic oligonucleotide
ggaaagcacuuaaauaagg

SEQ ID NO: 1405812 - RNA, 19 nt, Artificial Sequence
  Description of Artificial Sequence: Synthetic oligonucleotide
ucugcacccgacaccaugu

SEQ ID NO: 1405813 - RNA, 19 nt, Artificial Sequence
  Description of Artificial Sequence: Synthetic oligonucleotide
gcugcuaccgaugacaccc

SEQ ID NO: 1405814 - RNA, 19 nt, Artificial Sequence
  Description of Artificial Sequence: Synthetic oligonucleotide
gccacguaaaacucgaaug

SEQ ID NO: 1405815 - RNA, 19 nt, Artificial Sequence
  Description of Artificial Sequence: Synthetic oligonucleotide
cucagggcauccaaugcag

SEQ ID NO: 1405816 - RNA, 19 nt, Artificial Sequence
  Description of Artificial Sequence: Synthetic oligonucleotide
ggaagugcuguagagcugg

SEQ ID NO: 1405817 - RNA, 19 nt, Artificial Sequence
  Description of Artificial Sequence: Synthetic oligonucleotide
uugaggcuguugauaaaac

SEQ ID NO: 1405818 - RNA, 19 nt, Artificial Sequence
  Description of Artificial Sequence: Synthetic oligonucleotide
accugauccuccucaaaug

SEQ ID NO: 1405819 - RNA, 19 nt, Artificial Sequence
  Description of Artificial Sequence: Synthetic oligonucleotide
ugaucagauggaugcaguc

SEQ ID NO: 1405820 - RNA, 19 nt, Artificial Sequence
  Description of Artificial Sequence: Synthetic oligonucleotide
cagggcauccaaugcagcc

SEQ ID NO: 1405821 - RNA, 19 nt, Artificial Sequence
  Description of Artificial Sequence: Synthetic oligonucleotide
cugccaaagccgcacacag

SEQ ID NO: 1405822 - RNA, 19 nt, Artificial Sequence
  Description of Artificial Sequence: Synthetic oligonucleotide
gucuguauugaguagggcu

SEQ ID NO: 1405823 - RNA, 19 nt, Artificial Sequence
  Description of Artificial Sequence: Synthetic oligonucleotide
ugaugcagacugaguuccg

SEQ ID NO: 1405824 - RNA, 19 nt, Artificial Sequence
  Description of Artificial Sequence: Synthetic oligonucleotide
ugggcgucccaaauuagaa

SEQ ID NO: 1405825 - RNA, 19 nt, Artificial Sequence
  Description of Artificial Sequence: Synthetic oligonucleotide
gcagagucgaccuuucgcc

SEQ ID NO: 1405826 - RNA, 19 nt, Artificial Sequence
  Description of Artificial Sequence: Synthetic oligonucleotide
cugcgcagugggaugaugc

SEQ ID NO: 1405827 - RNA, 19 nt, Artificial Sequence
  Description of Artificial Sequence: Synthetic oligonucleotide
aaguggccguuucuuggag

SEQ ID NO: 1405828 - RNA, 19 nt, Artificial Sequence
  Description of Artificial Sequence: Synthetic oligonucleotide
caaggucuguauugaguag

SEQ ID NO: 1405829 - RNA, 19 nt, Artificial Sequence
  Description of Artificial Sequence: Synthetic oligonucleotide
cacgcuggagggcaagugg

SEQ ID NO: 1405830 - RNA, 19 nt, Artificial Sequence
  Description of Artificial Sequence: Synthetic oligonucleotide
ucggccaagccuguguucc

SEQ ID NO: 1405831 - RNA, 19 nt, Artificial Sequence
  Description of Artificial Sequence: Synthetic oligonucleotide
ugggauuccuccgggaucu

SEQ ID NO: 1405832 - RNA, 19 nt, Artificial Sequence
  Description of Artificial Sequence: Synthetic oligonucleotide
ugucccgugaagguguaca

SEQ ID NO: 1405833 - RNA, 19 nt, Artificial Sequence
  Description of Artificial Sequence: Synthetic oligonucleotide
gucgucgggagugacaacc

SEQ ID NO: 1405834 - RNA, 19 nt, Artificial Sequence
  Description of Artificial Sequence: Synthetic oligonucleotide
agguagaguuuagccaagc

SEQ ID NO: 1405835 - RNA, 19 nt, Artificial Sequence
  Description of Artificial Sequence: Synthetic oligonucleotide
guuugcuacggucaccaga

SEQ ID NO: 1405836 - RNA, 19 nt, Artificial Sequence
  Description of Artificial Sequence: Synthetic oligonucleotide
ucgucugcacccgacacca

SEQ ID NO: 1405837 - RNA, 19 nt, Artificial Sequence
  Description of Artificial Sequence: Synthetic oligonucleotide
augcagacugaguuccgag

SEQ ID NO: 1405838 - RNA, 19 nt, Artificial Sequence
  Description of Artificial Sequence: Synthetic oligonucleotide
cuacguuccacaccuucac

SEQ ID NO: 1405839 - RNA, 19 nt, Artificial Sequence
  Description of Artificial Sequence: Synthetic oligonucleotide
gcaaguggccguuucuugg

SEQ ID NO: 1405840 - RNA, 19 nt, Artificial Sequence
  Description of Artificial Sequence: Synthetic oligonucleotide
agagcugguggccacguaa

SEQ ID NO: 1405841 - RNA, 19 nt, Artificial Sequence
  Description of Artificial Sequence: Synthetic oligonucleotide
aaagagggucaagcugccg

SEQ ID NO: 1405842 - RNA, 19 nt, Artificial Sequence
  Description of Artificial Sequence: Synthetic oligonucleotide
ggcucgagggaucacacgc

SEQ ID NO: 1405843 - RNA, 19 nt, Artificial Sequence
  Description of Artificial Sequence: Synthetic oligonucleotide
agcugguggguaccccucc

SEQ ID NO: 1405844 - RNA, 19 nt, Artificial Sequence
  Description of Artificial Sequence: Synthetic oligonucleotide
ugcacccgacaccaugugc

SEQ ID NO: 1405845 - RNA, 19 nt, Artificial Sequence
  Description of Artificial Sequence: Synthetic oligonucleotide
cuuaaauaaggaugagugu

SEQ ID NO: 1405846 - RNA, 19 nt, Artificial Sequence
  Description of Artificial Sequence: Synthetic oligonucleotide
aagcguagcuucuucucuu

SEQ ID NO: 1405847 - RNA, 19 nt, Artificial Sequence
  Description of Artificial Sequence: Synthetic oligonucleotide
acggucaccagaggcaagg

SEQ ID NO: 1405848 - RNA, 19 nt, Artificial Sequence
  Description of Artificial Sequence: Synthetic oligonucleotide
gacaaccaagcaugugaug

SEQ ID NO: 1405849 - RNA, 19 nt, Artificial Sequence
  Description of Artificial Sequence: Synthetic oligonucleotide
agaguuuagccaagcguag

SEQ ID NO: 1405850 - RNA, 19 nt, Artificial Sequence
  Description of Artificial Sequence: Synthetic oligonucleotide
uacgaguucucugcuacgu

SEQ ID NO: 1405851 - RNA, 19 nt, Artificial Sequence
  Description of Artificial Sequence: Synthetic oligonucleotide
gcagacugaguuccgagcc

SEQ ID NO: 1405852 - RNA, 19 nt, Artificial Sequence
  Description of Artificial Sequence: Synthetic oligonucleotide
caaagagggucaagcugcc

SEQ ID NO: 1405853 - RNA, 19 nt, Artificial Sequence
  Description of Artificial Sequence: Synthetic oligonucleotide
uuggcucgagggaucacac

SEQ ID NO: 1405854 - RNA, 19 nt, Artificial Sequence
  Description of Artificial Sequence: Synthetic oligonucleotide
ucagggcauccaaugcagc

SEQ ID NO: 1405855 - RNA, 19 nt, Artificial Sequence
  Description of Artificial Sequence: Synthetic oligonucleotide
agacugaguuccgagccuc

SEQ ID NO: 1405856 - RNA, 19 nt, Artificial Sequence
  Description of Artificial Sequence: Synthetic oligonucleotide
gaugacacccagaagggcu

SEQ ID NO: 1405857 - RNA, 19 nt, Artificial Sequence
  Description of Artificial Sequence: Synthetic oligonucleotide
caaaugcacgagcuucggc

SEQ ID NO: 1405858 - RNA, 19 nt, Artificial Sequence
  Description of Artificial Sequence: Synthetic oligonucleotide
ucgugggaagugcuguaga

SEQ ID NO: 1405859 - RNA, 19 nt, Artificial Sequence
  Description of Artificial Sequence: Synthetic oligonucleotide
guacgaguucucugcuacg

SEQ ID NO: 1405860 - RNA, 19 nt, Artificial Sequence
  Description of Artificial Sequence: Synthetic oligonucleotide
gaguuuagccaagcguagc

SEQ ID NO: 1405861 - RNA, 19 nt, Artificial Sequence
  Description of Artificial Sequence: Synthetic oligonucleotide
cguaaaacucgaaugucag

SEQ ID NO: 1405862 - RNA, 19 nt, Artificial Sequence
  Description of Artificial Sequence: Synthetic oligonucleotide
acgcuggagggcaaguggc

SEQ ID NO: 1405863 - RNA, 19 nt, Artificial Sequence
  Description of Artificial Sequence: Synthetic oligonucleotide
ugaguagggcugcuaccga

SEQ ID NO: 1405864 - RNA, 19 nt, Artificial Sequence
  Description of Artificial Sequence: Synthetic oligonucleotide
ucccgugaagguguacagg

SEQ ID NO: 1405865 - RNA, 19 nt, Artificial Sequence
  Description of Artificial Sequence: Synthetic oligonucleotide
agccaagcguagcuucuuc

SEQ ID NO: 1405866 - RNA, 19 nt, Artificial Sequence
  Description of Artificial Sequence: Synthetic oligonucleotide
aacucgaaugucaguggga

SEQ ID NO: 1405867 - RNA, 19 nt, Artificial Sequence
  Description of Artificial Sequence: Synthetic oligonucleotide
ugcgcagugggaugaugca

SEQ ID NO: 1405868 - RNA, 19 nt, Artificial Sequence
  Description of Artificial Sequence: Synthetic oligonucleotide
aguuccgagccucuuugau

SEQ ID NO: 1405869 - RNA, 19 nt, Artificial Sequence
  Description of Artificial Sequence: Synthetic oligonucleotide
cucucuacacuccacuuaa

SEQ ID NO: 1405870 - RNA, 19 nt, Artificial Sequence
  Description of Artificial Sequence: Synthetic oligonucleotide
acucucuacacuccacuua

SEQ ID NO: 1405871 - RNA, 19 nt, Artificial Sequence
  Description of Artificial Sequence: Synthetic oligonucleotide
guuccgagccucuuugauc

SEQ ID NO: 1405872 - RNA, 19 nt, Artificial Sequence
  Description of Artificial Sequence: Synthetic oligonucleotide
cuacacuccacuuaaugau

SEQ ID NO: 1405873 - RNA, 19 nt, Artificial Sequence
  Description of Artificial Sequence: Synthetic oligonucleotide
cacguaaaacucgaauguc

SEQ ID NO: 1405874 - RNA, 19 nt, Artificial Sequence
  Description of Artificial Sequence: Synthetic oligonucleotide
ggccagucccgacacagcg

SEQ ID NO: 1405875 - RNA, 19 nt, Artificial Sequence
  Description of Artificial Sequence: Synthetic oligonucleotide
cucugcuacguuccacacc

SEQ ID NO: 1405876 - RNA, 19 nt, Artificial Sequence
  Description of Artificial Sequence: Synthetic oligonucleotide
ucgagggaucacacgcagc

SEQ ID NO: 1405877 - RNA, 19 nt, Artificial Sequence
  Description of Artificial Sequence: Synthetic oligonucleotide
gagucgaccuuucgccgcc

SEQ ID NO: 1405878 - RNA, 19 nt, Artificial Sequence
  Description of Artificial Sequence: Synthetic oligonucleotide
cacgcacagucccaucccg

SEQ ID NO: 1405879 - RNA, 19 nt, Artificial Sequence
  Description of Artificial Sequence: Synthetic oligonucleotide
gagucugcgcagugggaug

SEQ ID NO: 1405880 - RNA, 19 nt, Artificial Sequence
  Description of Artificial Sequence: Synthetic oligonucleotide
cuguaaccugccucucugc

SEQ ID NO: 1405881 - RNA, 19 nt, Artificial Sequence
  Description of Artificial Sequence: Synthetic oligonucleotide
uggcucgagggaucacacg

SEQ ID NO: 1405882 - RNA, 19 nt, Artificial Sequence
  Description of Artificial Sequence: Synthetic oligonucleotide
ugcuaccgaugacacccag

SEQ ID NO: 1405883 - RNA, 19 nt, Artificial Sequence
  Description of Artificial Sequence: Synthetic oligonucleotide
uccagccacuaagaagucc

SEQ ID NO: 1405884 - RNA, 19 nt, Artificial Sequence
  Description of Artificial Sequence: Synthetic oligonucleotide
ggccacaaggucuguauug

SEQ ID NO: 1405885 - RNA, 19 nt, Artificial Sequence
  Description of Artificial Sequence: Synthetic oligonucleotide
ccacguacgaguucucugc

SEQ ID NO: 1405886 - RNA, 19 nt, Artificial Sequence
  Description of Artificial Sequence: Synthetic oligonucleotide
aucggccaagccuguguuc

SEQ ID NO: 1405887 - RNA, 19 nt, Artificial Sequence
  Description of Artificial Sequence: Synthetic oligonucleotide
uugccaccgacuucuguaa

SEQ ID NO: 1405888 - RNA, 19 nt, Artificial Sequence
  Description of Artificial Sequence: Synthetic oligonucleotide
ucgucgggagugacaacca

SEQ ID NO: 1405889 - RNA, 19 nt, Artificial Sequence
  Description of Artificial Sequence: Synthetic oligonucleotide
ugguggccacguaaaacuc

SEQ ID NO: 1405890 - RNA, 19 nt, Artificial Sequence
  Description of Artificial Sequence: Synthetic oligonucleotide
cauguagcccgugagccuc

SEQ ID NO: 1405891 - RNA, 19 nt, Artificial Sequence
  Description of Artificial Sequence: Synthetic oligonucleotide
ggauuugccucugucccgg

SEQ ID NO: 1405892 - RNA, 19 nt, Artificial Sequence
  Description of Artificial Sequence: Synthetic oligonucleotide
gucccgugaagguguacag

SEQ ID NO: 1405893 - RNA, 19 nt, Artificial Sequence
  Description of Artificial Sequence: Synthetic oligonucleotide
gcauuaugggagccugugg

SEQ ID NO: 1405894 - RNA, 19 nt, Artificial Sequence
  Description of Artificial Sequence: Synthetic oligonucleotide
gaucuccuuugccaccgac

SEQ ID NO: 1405895 - RNA, 19 nt, Artificial Sequence
  Description of Artificial Sequence: Synthetic oligonucleotide
uuugcccgcuuacgaguug

SEQ ID NO: 1405896 - RNA, 19 nt, Artificial Sequence
  Description of Artificial Sequence: Synthetic oligonucleotide
cuccggaaggccagucccg

SEQ ID NO: 1405897 - RNA, 19 nt, Artificial Sequence
  Description of Artificial Sequence: Synthetic oligonucleotide
guaaccugccucucugcuc

SEQ ID NO: 1405898 - RNA, 19 nt, Artificial Sequence
  Description of Artificial Sequence: Synthetic oligonucleotide
cagaaucgcuggaaauuuc

SEQ ID NO: 1405899 - RNA, 19 nt, Artificial Sequence
  Description of Artificial Sequence: Synthetic oligonucleotide
uugcuacggucaccagagg

SEQ ID NO: 1405900 - RNA, 19 nt, Artificial Sequence
  Description of Artificial Sequence: Synthetic oligonucleotide
gauuugccucugucccggg

SEQ ID NO: 1405901 - RNA, 19 nt, Artificial Sequence
  Description of Artificial Sequence: Synthetic oligonucleotide
gaccuuucgccgccgcuug

SEQ ID NO: 1405902 - RNA, 19 nt, Artificial Sequence
  Description of Artificial Sequence: Synthetic oligonucleotide
uucgccgccgcuugccggc

SEQ ID NO: 1405903 - RNA, 19 nt, Artificial Sequence
  Description of Artificial Sequence: Synthetic oligonucleotide
aguggccguuucuuggaga

SEQ ID NO: 1405904 - RNA, 19 nt, Artificial Sequence
  Description of Artificial Sequence: Synthetic oligonucleotide
uugcccgcuuacgaguugc

SEQ ID NO: 1405905 - RNA, 19 nt, Artificial Sequence
  Description of Artificial Sequence: Synthetic oligonucleotide
gaugcagacugaguuccga

SEQ ID NO: 1405906 - RNA, 19 nt, Artificial Sequence
  Description of Artificial Sequence: Synthetic oligonucleotide
gguggccacguaaaacucg

SEQ ID NO: 1405907 - RNA, 19 nt, Artificial Sequence
  Description of Artificial Sequence: Synthetic oligonucleotide
uguauugaguagggcugcu

SEQ ID NO: 1405908 - RNA, 19 nt, Artificial Sequence
  Description of Artificial Sequence: Synthetic oligonucleotide
gccucucugcuccagcacg

SEQ ID NO: 1405909 - RNA, 19 nt, Artificial Sequence
  Description of Artificial Sequence: Synthetic oligonucleotide
cuuucgccgccgcuugccg

SEQ ID NO: 1405910 - RNA, 19 nt, Artificial Sequence
  Description of Artificial Sequence: Synthetic oligonucleotide
caagcaugugauggagagc

SEQ ID NO: 1405911 - RNA, 19 nt, Artificial Sequence
  Description of Artificial Sequence: Synthetic oligonucleotide
ggaugucacaaagaggguc

SEQ ID NO: 1405912 - RNA, 19 nt, Artificial Sequence
  Description of Artificial Sequence: Synthetic oligonucleotide
uacggucaccagaggcaag

SEQ ID NO: 1405913 - RNA, 19 nt, Artificial Sequence
  Description of Artificial Sequence: Synthetic oligonucleotide
caggcauuaugggagccug

SEQ ID NO: 1405914 - RNA, 19 nt, Artificial Sequence
  Description of Artificial Sequence: Synthetic oligonucleotide
aguuugcuacggucaccag

SEQ ID NO: 1405915 - RNA, 19 nt, Artificial Sequence
  Description of Artificial Sequence: Synthetic oligonucleotide
agacaagcugggauuccuc

SEQ ID NO: 1405916 - RNA, 19 nt, Artificial Sequence
  Description of Artificial Sequence: Synthetic oligonucleotide
aggcuguugauaaaaccaa

SEQ ID NO: 1405917 - RNA, 19 nt, Artificial Sequence
  Description of Artificial Sequence: Synthetic oligonucleotide
ucgcuggaaauuucuucau

SEQ ID NO: 1405918 - RNA, 19 nt, Artificial Sequence
  Description of Artificial Sequence: Synthetic oligonucleotide
caaccaagcaugugaugga

SEQ ID NO: 1405919 - RNA, 19 nt, Artificial Sequence
  Description of Artificial Sequence: Synthetic oligonucleotide
acacgcagcuuccgcccac

SEQ ID NO: 1405920 - RNA, 19 nt, Artificial Sequence
  Description of Artificial Sequence: Synthetic oligonucleotide
caaggccacggagccaucg

SEQ ID NO: 1405921 - RNA, 19 nt, Artificial Sequence
  Description of Artificial Sequence: Synthetic oligonucleotide
agaggccccacaaggccac

SEQ ID NO: 1405922 - RNA, 19 nt, Artificial Sequence
  Description of Artificial Sequence: Synthetic oligonucleotide
augacacccagaagggcug

SEQ ID NO: 1405923 - RNA, 19 nt, Artificial Sequence
  Description of Artificial Sequence: Synthetic oligonucleotide
aggucgucgggagugacaa

SEQ ID NO: 1405924 - RNA, 19 nt, Artificial Sequence
  Description of Artificial Sequence: Synthetic oligonucleotide
caaguggccguuucuugga

SEQ ID NO: 1405925 - RNA, 19 nt, Artificial Sequence
  Description of Artificial Sequence: Synthetic oligonucleotide
agagcggucgugggaagug

SEQ ID NO: 1405926 - RNA, 19 nt, Artificial Sequence
  Description of Artificial Sequence: Synthetic oligonucleotide
ucccgggcagagucgaccu

SEQ ID NO: 1405927 - RNA, 19 nt, Artificial Sequence
  Description of Artificial Sequence: Synthetic oligonucleotide
gucgugggaagugcuguag

SEQ ID NO: 1405928 - RNA, 19 nt, Artificial Sequence
  Description of Artificial Sequence: Synthetic oligonucleotide
agguguacaggugcuggca

SEQ ID NO: 1405929 - RNA, 19 nt, Artificial Sequence
  Description of Artificial Sequence: Synthetic oligonucleotide
uccgcccacucucuacacu

SEQ ID NO: 1405930 - RNA, 19 nt, Artificial Sequence
  Description of Artificial Sequence: Synthetic oligonucleotide
gcacucucggcucagggca

SEQ ID NO: 1405931 - RNA, 19 nt, Artificial Sequence
  Description of Artificial Sequence: Synthetic oligonucleotide
ccucaaaugcacgagcuuc

SEQ ID NO: 1405932 - RNA, 19 nt, Artificial Sequence
  Description of Artificial Sequence: Synthetic oligonucleotide
acaggcauuaugggagccu

SEQ ID NO: 1405933 - RNA, 19 nt, Artificial Sequence
  Description of Artificial Sequence: Synthetic oligonucleotide
cacaaggucuguauugagu

SEQ ID NO: 1405934 - RNA, 19 nt, Artificial Sequence
  Description of Artificial Sequence: Synthetic oligonucleotide
ggugcagucuuuggcggcg

SEQ ID NO: 1405935 - RNA, 19 nt, Artificial Sequence
  Description of Artificial Sequence: Synthetic oligonucleotide
ucucuacacuccacuuaau

SEQ ID NO: 1405936 - RNA, 19 nt, Artificial Sequence
  Description of Artificial Sequence: Synthetic oligonucleotide
cacuaagaaguccccggca

SEQ ID NO: 1405937 - RNA, 19 nt, Artificial Sequence
  Description of Artificial Sequence: Synthetic oligonucleotide
ugucuccacguacgaguuc

SEQ ID NO: 1405938 - RNA, 19 nt, Artificial Sequence
  Description of Artificial Sequence: Synthetic oligonucleotide
ugccaccgacuucuguaac

SEQ ID NO: 1405939 - RNA, 19 nt, Artificial Sequence
  Description of Artificial Sequence: Synthetic oligonucleotide
cuuggcucgagggaucaca

SEQ ID NO: 1405940 - RNA, 19 nt, Artificial Sequence
  Description of Artificial Sequence: Synthetic oligonucleotide
gccaccgacuucuguaacc

SEQ ID NO: 1405941 - RNA, 19 nt, Artificial Sequence
  Description of Artificial Sequence: Synthetic oligonucleotide
cuuccgcccacucucuaca

SEQ ID NO: 1405942 - RNA, 19 nt, Artificial Sequence
  Description of Artificial Sequence: Synthetic oligonucleotide
agucugcgcagugggauga

SEQ ID NO: 1405943 - RNA, 19 nt, Artificial Sequence
  Description of Artificial Sequence: Synthetic oligonucleotide
uuccuccgggaucuuccac

SEQ ID NO: 1405944 - RNA, 19 nt, Artificial Sequence
  Description of Artificial Sequence: Synthetic oligonucleotide
uggccacaaggucuguauu

SEQ ID NO: 1405945 - RNA, 19 nt, Artificial Sequence
  Description of Artificial Sequence: Synthetic oligonucleotide
cacuuaaauaaggaugagu

SEQ ID NO: 1405946 - RNA, 19 nt, Artificial Sequence
  Description of Artificial Sequence: Synthetic oligonucleotide
cguacgaguucucugcuac

SEQ ID NO: 1405947 - RNA, 19 nt, Artificial Sequence
  Description of Artificial Sequence: Synthetic oligonucleotide
cucugggcgucccaaauua

SEQ ID NO: 1405948 - RNA, 19 nt, Artificial Sequence
  Description of Artificial Sequence: Synthetic oligonucleotide
ugcagucuuuggcggcgga

SEQ ID NO: 1405949 - RNA, 19 nt, Artificial Sequence
  Description of Artificial Sequence: Synthetic oligonucleotide
uccggaaggccagucccga

SEQ ID NO: 1405950 - RNA, 19 nt, Artificial Sequence
  Description of Artificial Sequence: Synthetic oligonucleotide
guggccacguaaaacucga

SEQ ID NO: 1405951 - RNA, 19 nt, Artificial Sequence
  Description of Artificial Sequence: Synthetic oligonucleotide
uggccguuucuuggagagg

SEQ ID NO: 1405952 - RNA, 19 nt, Artificial Sequence
  Description of Artificial Sequence: Synthetic oligonucleotide
agcgcccugccaccugauc

SEQ ID NO: 1405953 - RNA, 19 nt, Artificial Sequence
  Description of Artificial Sequence: Synthetic oligonucleotide
ugcccgcuuacgaguugcc

SEQ ID NO: 1405954 - RNA, 19 nt, Artificial Sequence
  Description of Artificial Sequence: Synthetic oligonucleotide
ccgacuucuguaaccugcc

SEQ ID NO: 1405955 - RNA, 19 nt, Artificial Sequence
  Description of Artificial Sequence: Synthetic oligonucleotide
aaagccgcacacaggcauu

SEQ ID NO: 1405956 - RNA, 19 nt, Artificial Sequence
  Description of Artificial Sequence: Synthetic oligonucleotide
uuucuuggagaggccccac

SEQ ID NO: 1405957 - RNA, 19 nt, Artificial Sequence
  Description of Artificial Sequence: Synthetic oligonucleotide
gaguuccgagccucuuuga

SEQ ID NO: 1405958 - RNA, 19 nt, Artificial Sequence
  Description of Artificial Sequence: Synthetic oligonucleotide
gggagugacaaccaagcau

SEQ ID NO: 1405959 - RNA, 19 nt, Artificial Sequence
  Description of Artificial Sequence: Synthetic oligonucleotide
cccgaagagugucuccacg

SEQ ID NO: 1405960 - RNA, 19 nt, Artificial Sequence
  Description of Artificial Sequence: Synthetic oligonucleotide
acgcacagucccaucccgg

SEQ ID NO: 1405961 - RNA, 19 nt, Artificial Sequence
  Description of Artificial Sequence: Synthetic oligonucleotide
caccgcaucggccccggac

SEQ ID NO: 1405962 - RNA, 19 nt, Artificial Sequence
  Description of Artificial Sequence: Synthetic oligonucleotide
ccaagcguagcuucuucuc

SEQ ID NO: 1405963 - RNA, 19 nt, Artificial Sequence
  Description of Artificial Sequence: Synthetic oligonucleotide
ccccacaaggccacggagc

SEQ ID NO: 1405964 - RNA, 19 nt, Artificial Sequence
  Description of Artificial Sequence: Synthetic oligonucleotide
caagcguagcuucuucucu

SEQ ID NO: 1405965 - RNA, 19 nt, Artificial Sequence
  Description of Artificial Sequence: Synthetic oligonucleotide
guucucugcuacguuccac

SEQ ID NO: 1405966 - RNA, 19 nt, Artificial Sequence
  Description of Artificial Sequence: Synthetic oligonucleotide
acagcacucucggcucagg

SEQ ID NO: 1405967 - RNA, 19 nt, Artificial Sequence
  Description of Artificial Sequence: Synthetic oligonucleotide
uuccgcccacucucuacac

SEQ ID NO: 1405968 - RNA, 19 nt, Artificial Sequence
  Description of Artificial Sequence: Synthetic oligonucleotide
acgaguugccauagcggug

SEQ ID NO: 1405969 - RNA, 19 nt, Artificial Sequence
  Description of Artificial Sequence: Synthetic oligonucleotide
gagcggucgugggaagugc

SEQ ID NO: 1405970 - RNA, 19 nt, Artificial Sequence
  Description of Artificial Sequence: Synthetic oligonucleotide
agcccgugagccucacgcu

SEQ ID NO: 1405971 - RNA, 19 nt, Artificial Sequence
  Description of Artificial Sequence: Synthetic oligonucleotide
gucccggugucccgugaag

SEQ ID NO: 1405972 - RNA, 19 nt, Artificial Sequence
  Description of Artificial Sequence: Synthetic oligonucleotide
caaagccgcacacaggcau

SEQ ID NO: 1405973 - RNA, 19 nt, Artificial Sequence
  Description of Artificial Sequence: Synthetic oligonucleotide
agcugguggccacguaaaa

SEQ ID NO: 1405974 - RNA, 19 nt, Artificial Sequence
  Description of Artificial Sequence: Synthetic oligonucleotide
cacggagccaucgucugca

SEQ ID NO: 1405975 - RNA, 19 nt, Artificial Sequence
  Description of Artificial Sequence: Synthetic oligonucleotide
cgaguucucugcuacguuc

SEQ ID NO: 1405976 - RNA, 19 nt, Artificial Sequence
  Description of Artificial Sequence: Synthetic oligonucleotide
gcugguggguaccccuccg

SEQ ID NO: 1405977 - RNA, 19 nt, Artificial Sequence
  Description of Artificial Sequence: Synthetic oligonucleotide
aagccgcacacaggcauua

SEQ ID NO: 1405978 - RNA, 19 nt, Artificial Sequence
  Description of Artificial Sequence: Synthetic oligonucleotide
acguacgaguucucugcua

SEQ ID NO: 1405979 - RNA, 19 nt, Artificial Sequence
  Description of Artificial Sequence: Synthetic oligonucleotide
cuaagaaguccccggcacu

SEQ ID NO: 1405980 - RNA, 19 nt, Artificial Sequence
  Description of Artificial Sequence: Synthetic oligonucleotide
ggaucacacgcagcuuccg

SEQ ID NO: 1405981 - RNA, 19 nt, Artificial Sequence
  Description of Artificial Sequence: Synthetic oligonucleotide
caccgacuucuguaaccug

SEQ ID NO: 1405982 - RNA, 19 nt, Artificial Sequence
  Description of Artificial Sequence: Synthetic oligonucleotide
cccgugagccucacgcugg

SEQ ID NO: 1405983 - RNA, 19 nt, Artificial Sequence
  Description of Artificial Sequence: Synthetic oligonucleotide
uggccacguaaaacucgaa

SEQ ID NO: 1405984 - RNA, 19 nt, Artificial Sequence
  Description of Artificial Sequence: Synthetic oligonucleotide
ccacaaggucuguauugag

SEQ ID NO: 1405985 - RNA, 19 nt, Artificial Sequence
  Description of Artificial Sequence: Synthetic oligonucleotide
ccacguaaaacucgaaugu

SEQ ID NO: 1405986 - RNA, 19 nt, Artificial Sequence
  Description of Artificial Sequence: Synthetic oligonucleotide
cuucuguaaccugccucuc

SEQ ID NO: 1405987 - RNA, 19 nt, Artificial Sequence
  Description of Artificial Sequence: Synthetic oligonucleotide
ccucuuugauccuccacca

SEQ ID NO: 1405988 - RNA, 19 nt, Artificial Sequence
  Description of Artificial Sequence: Synthetic oligonucleotide
gccgcacacaggcauuaug

SEQ ID NO: 1405989 - RNA, 19 nt, Artificial Sequence
  Description of Artificial Sequence: Synthetic oligonucleotide
gcuacguuccacaccuuca

SEQ ID NO: 1405990 - RNA, 19 nt, Artificial Sequence
  Description of Artificial Sequence: Synthetic oligonucleotide
cuacggucaccagaggcaa

SEQ ID NO: 1405991 - RNA, 19 nt, Artificial Sequence
  Description of Artificial Sequence: Synthetic oligonucleotide
guggccacaaggucuguau

SEQ ID NO: 1405992 - RNA, 19 nt, Artificial Sequence
  Description of Artificial Sequence: Synthetic oligonucleotide
gcuuacgaguugccauagc

SEQ ID NO: 1405993 - RNA, 19 nt, Artificial Sequence
  Description of Artificial Sequence: Synthetic oligonucleotide
cucucggcucagggcaucc

SEQ ID NO: 1405994 - RNA, 19 nt, Artificial Sequence
  Description of Artificial Sequence: Synthetic oligonucleotide
gucgaccuuucgccgccgc

SEQ ID NO: 1405995 - RNA, 19 nt, Artificial Sequence
  Description of Artificial Sequence: Synthetic oligonucleotide
cugccggaagcccucucca

SEQ ID NO: 1405996 - RNA, 19 nt, Artificial Sequence
  Description of Artificial Sequence: Synthetic oligonucleotide
gugcagucuuuggcggcgg

SEQ ID NO: 1405997 - RNA, 19 nt, Artificial Sequence
  Description of Artificial Sequence: Synthetic oligonucleotide
ccggaagcccucuccacac

SEQ ID NO: 1405998 - RNA, 19 nt, Artificial Sequence
  Description of Artificial Sequence: Synthetic oligonucleotide
agucgaccuuucgccgccg

SEQ ID NO: 1405999 - RNA, 19 nt, Artificial Sequence
  Description of Artificial Sequence: Synthetic oligonucleotide
uccgagccucuuugauccu

SEQ ID NO: 1406000 - RNA, 19 nt, Artificial Sequence
  Description of Artificial Sequence: Synthetic oligonucleotide
caggucgucgggagugaca

SEQ ID NO: 1406001 - RNA, 19 nt, Artificial Sequence
  Description of Artificial Sequence: Synthetic oligonucleotide
ucucggcucagggcaucca

SEQ ID NO: 1406002 - RNA, 19 nt, Artificial Sequence
  Description of Artificial Sequence: Synthetic oligonucleotide
cuccaccaucggccaagcc

SEQ ID NO: 1406003 - RNA, 19 nt, Artificial Sequence
  Description of Artificial Sequence: Synthetic oligonucleotide
acugaguuccgagccucuu

SEQ ID NO: 1406004 - RNA, 19 nt, Artificial Sequence
  Description of Artificial Sequence: Synthetic oligonucleotide
ggcugcuaccgaugacacc

SEQ ID NO: 1406005 - RNA, 19 nt, Artificial Sequence
  Description of Artificial Sequence: Synthetic oligonucleotide
gagcugguggguaccccuc

SEQ ID NO: 1406006 - RNA, 19 nt, Artificial Sequence
  Description of Artificial Sequence: Synthetic oligonucleotide
gcuuugcccgcuuacgagu

SEQ ID NO: 1406007 - RNA, 19 nt, Artificial Sequence
  Description of Artificial Sequence: Synthetic oligonucleotide
ccuccgggaucuuccacac

SEQ ID NO: 1406008 - RNA, 19 nt, Artificial Sequence
  Description of Artificial Sequence: Synthetic oligonucleotide
agcggucgugggaagugcu

SEQ ID NO: 1406009 - RNA, 19 nt, Artificial Sequence
  Description of Artificial Sequence: Synthetic oligonucleotide
guauugaguagggcugcua

SEQ ID NO: 1406010 - RNA, 19 nt, Artificial Sequence
  Description of Artificial Sequence: Synthetic oligonucleotide
cucggcucagggcauccaa

SEQ ID NO: 1406011 - RNA, 19 nt, Artificial Sequence
  Description of Artificial Sequence: Synthetic oligonucleotide
gcagucuuuggcggcggag

SEQ ID NO: 1406012 - RNA, 19 nt, Artificial Sequence
  Description of Artificial Sequence: Synthetic oligonucleotide
gccggaagcccucuccaca

SEQ ID NO: 1406013 - RNA, 19 nt, Artificial Sequence
  Description of Artificial Sequence: Synthetic oligonucleotide
augcacgagcuucggccuu

SEQ ID NO: 1406014 - RNA, 19 nt, Artificial Sequence
  Description of Artificial Sequence: Synthetic oligonucleotide
ccgugaagguguacaggug

SEQ ID NO: 1406015 - RNA, 19 nt, Artificial Sequence
  Description of Artificial Sequence: Synthetic oligonucleotide
ggccacguaaaacucgaau

SEQ ID NO: 1406016 - RNA, 19 nt, Artificial Sequence
  Description of Artificial Sequence: Synthetic oligonucleotide
cacaaggccacggagccau

SEQ ID NO: 1406017 - RNA, 19 nt, Artificial Sequence
  Description of Artificial Sequence: Synthetic oligonucleotide
cccgugaagguguacaggu

SEQ ID NO: 1406018 - RNA, 19 nt, Artificial Sequence
  Description of Artificial Sequence: Synthetic oligonucleotide
agggccuggaaagcacuua

SEQ ID NO: 1406019 - RNA, 19 nt, Artificial Sequence
  Description of Artificial Sequence: Synthetic oligonucleotide
cugcuaccgaugacaccca

SEQ ID NO: 1406020 - RNA, 19 nt, Artificial Sequence
  Description of Artificial Sequence: Synthetic oligonucleotide
gcaucggccccggacccgg

SEQ ID NO: 1406021 - RNA, 19 nt, Artificial Sequence
  Description of Artificial Sequence: Synthetic oligonucleotide
guuuagccaagcguagcuu

SEQ ID NO: 1406022 - RNA, 19 nt, Artificial Sequence
  Description of Artificial Sequence: Synthetic oligonucleotide
gugggaugaugcagacuga

SEQ ID NO: 1406023 - RNA, 19 nt, Artificial Sequence
  Description of Artificial Sequence: Synthetic oligonucleotide
cagacugaguuccgagccu

SEQ ID NO: 1406024 - RNA, 19 nt, Artificial Sequence
  Description of Artificial Sequence: Synthetic oligonucleotide
guccccggcacuggagaac

SEQ ID NO: 1406025 - RNA, 19 nt, Artificial Sequence
  Description of Artificial Sequence: Synthetic oligonucleotide
cuuugcccgcuuacgaguu

SEQ ID NO: 1406026 - RNA, 19 nt, Artificial Sequence
  Description of Artificial Sequence: Synthetic oligonucleotide
gggcugcuaccgaugacac

SEQ ID NO: 1406027 - RNA, 19 nt, Artificial Sequence
  Description of Artificial Sequence: Synthetic oligonucleotide
ccuuucgccgccgcuugcc

SEQ ID NO: 1406028 - RNA, 19 nt, Artificial Sequence
  Description of Artificial Sequence: Synthetic oligonucleotide
cacguacgaguucucugcu

SEQ ID NO: 1406029 - RNA, 19 nt, Artificial Sequence
  Description of Artificial Sequence: Synthetic oligonucleotide
agcccucuccacacugcca

SEQ ID NO: 1406030 - RNA, 19 nt, Artificial Sequence
  Description of Artificial Sequence: Synthetic oligonucleotide
gcuaccgaugacacccaga

SEQ ID NO: 1406031 - RNA, 19 nt, Artificial Sequence
  Description of Artificial Sequence: Synthetic oligonucleotide
gccaagcguagcuucuucu

SEQ ID NO: 1406032 - RNA, 19 nt, Artificial Sequence
  Description of Artificial Sequence: Synthetic oligonucleotide
cgagggaucacacgcagcu

SEQ ID NO: 1406033 - RNA, 19 nt, Artificial Sequence
  Description of Artificial Sequence: Synthetic oligonucleotide
ggagucugcgcagugggau

SEQ ID NO: 1406034 - RNA, 19 nt, Artificial Sequence
  Description of Artificial Sequence: Synthetic oligonucleotide
gcucgagggaucacacgca

SEQ ID NO: 1406035 - RNA, 19 nt, Artificial Sequence
  Description of Artificial Sequence: Synthetic oligonucleotide
cugaguuccgagccucuuu

SEQ ID NO: 1406036 - RNA, 19 nt, Artificial Sequence
  Description of Artificial Sequence: Synthetic oligonucleotide
ccgaagagugucuccacgu

SEQ ID NO: 1406037 - RNA, 19 nt, Artificial Sequence
  Description of Artificial Sequence: Synthetic oligonucleotide
ggucgugggaagugcugua

SEQ ID NO: 1406038 - RNA, 19 nt, Artificial Sequence
  Description of Artificial Sequence: Synthetic oligonucleotide
gccaucgucugcacccgac

SEQ ID NO: 1406039 - RNA, 19 nt, Artificial Sequence
  Description of Artificial Sequence: Synthetic oligonucleotide
ccggugucccgugaaggug

SEQ ID NO: 1406040 - RNA, 19 nt, Artificial Sequence
  Description of Artificial Sequence: Synthetic oligonucleotide
gggcgucccaaauuagaau

SEQ ID NO: 1406041 - RNA, 19 nt, Artificial Sequence
  Description of Artificial Sequence: Synthetic oligonucleotide
caucggccaagccuguguu

SEQ ID NO: 1406042 - RNA, 19 nt, Artificial Sequence
  Description of Artificial Sequence: Synthetic oligonucleotide
gcggucgugggaagugcug

SEQ ID NO: 1406043 - RNA, 19 nt, Artificial Sequence
  Description of Artificial Sequence: Synthetic oligonucleotide
ccaaagccgcacacaggca

SEQ ID NO: 1406044 - RNA, 19 nt, Artificial Sequence
  Description of Artificial Sequence: Synthetic oligonucleotide
ggucgucgggagugacaac

SEQ ID NO: 1406045 - RNA, 19 nt, Artificial Sequence
  Description of Artificial Sequence: Synthetic oligonucleotide
gugucuccacguacgaguu

SEQ ID NO: 1406046 - RNA, 19 nt, Artificial Sequence
  Description of Artificial Sequence: Synthetic oligonucleotide
cuccgggaucuuccacaca

SEQ ID NO: 1406047 - RNA, 19 nt, Artificial Sequence
  Description of Artificial Sequence: Synthetic oligonucleotide
cgcuuacgaguugccauag

SEQ ID NO: 1406048 - RNA, 19 nt, Artificial Sequence
  Description of Artificial Sequence: Synthetic oligonucleotide
ccgcaucggccccggaccc

SEQ ID NO: 1406049 - RNA, 19 nt, Artificial Sequence
  Description of Artificial Sequence: Synthetic oligonucleotide
ccacacacgcacaguccca

SEQ ID NO: 1406050 - RNA, 19 nt, Artificial Sequence
  Description of Artificial Sequence: Synthetic oligonucleotide
gugucccgugaagguguac

SEQ ID NO: 1406051 - RNA, 19 nt, Artificial Sequence
  Description of Artificial Sequence: Synthetic oligonucleotide
ggaucuccuuugccaccga

SEQ ID NO: 1406052 - RNA, 19 nt, Artificial Sequence
  Description of Artificial Sequence: Synthetic oligonucleotide
cccgcuuacgaguugccau

SEQ ID NO: 1406053 - RNA, 19 nt, Artificial Sequence
  Description of Artificial Sequence: Synthetic oligonucleotide
ccgcuugccggccaccgca

SEQ ID NO: 1406054 - RNA, 19 nt, Artificial Sequence
  Description of Artificial Sequence: Synthetic oligonucleotide
cgaaugucagugggagcug

SEQ ID NO: 1406055 - RNA, 19 nt, Artificial Sequence
  Description of Artificial Sequence: Synthetic oligonucleotide
ggccacggagccaucgucu

SEQ ID NO: 1406056 - RNA, 19 nt, Artificial Sequence
  Description of Artificial Sequence: Synthetic oligonucleotide
gggagucugcgcaguggga

SEQ ID NO: 1406057 - RNA, 19 nt, Artificial Sequence
  Description of Artificial Sequence: Synthetic oligonucleotide
gccaccgcaucggccccgg

SEQ ID NO: 1406058 - RNA, 19 nt, Artificial Sequence
  Description of Artificial Sequence: Synthetic oligonucleotide
ccaccgacuucuguaaccu

SEQ ID NO: 1406059 - RNA, 19 nt, Artificial Sequence
  Description of Artificial Sequence: Synthetic oligonucleotide
cgaagagugucuccacgua

SEQ ID NO: 1406060 - RNA, 19 nt, Artificial Sequence
  Description of Artificial Sequence: Synthetic oligonucleotide
gcccgcuuacgaguugcca

SEQ ID NO: 1406061 - RNA, 19 nt, Artificial Sequence
  Description of Artificial Sequence: Synthetic oligonucleotide
ccucauugaucagauggau

SEQ ID NO: 1406062 - RNA, 19 nt, Artificial Sequence
  Description of Artificial Sequence: Synthetic oligonucleotide
ccaucggccaagccugugu

SEQ ID NO: 1406063 - RNA, 19 nt, Artificial Sequence
  Description of Artificial Sequence: Synthetic oligonucleotide
cacucucggcucagggcau

SEQ ID NO: 1406064 - RNA, 19 nt, Artificial Sequence
  Description of Artificial Sequence: Synthetic oligonucleotide
cagagcggucgugggaagu

SEQ ID NO: 1406065 - RNA, 19 nt, Artificial Sequence
  Description of Artificial Sequence: Synthetic oligonucleotide
gcucugggcgucccaaauu

SEQ ID NO: 1406066 - RNA, 19 nt, Artificial Sequence
  Description of Artificial Sequence: Synthetic oligonucleotide
cccggugucccgugaaggu

SEQ ID NO: 1406067 - RNA, 19 nt, Artificial Sequence
  Description of Artificial Sequence: Synthetic oligonucleotide
gccgccgcuugccggccac

SEQ ID NO: 1406068 - RNA, 19 nt, Artificial Sequence
  Description of Artificial Sequence: Synthetic oligonucleotide
caccaucggccaagccugu

SEQ ID NO: 1406069 - RNA, 19 nt, Artificial Sequence
  Description of Artificial Sequence: Synthetic oligonucleotide
cacgcagcuuccgcccacu

SEQ ID NO: 1406070 - RNA, 19 nt, Artificial Sequence
  Description of Artificial Sequence: Synthetic oligonucleotide
gccagucccgacacagcgu

SEQ ID NO: 1406071 - RNA, 19 nt, Artificial Sequence
  Description of Artificial Sequence: Synthetic oligonucleotide
ccgugagccucacgcugga

SEQ ID NO: 1406072 - RNA, 19 nt, Artificial Sequence
  Description of Artificial Sequence: Synthetic oligonucleotide
cgugagccucacgcuggag

SEQ ID NO: 1406073 - RNA, 19 nt, Artificial Sequence
  Description of Artificial Sequence: Synthetic oligonucleotide
cugccccacuccagccacu

SEQ ID NO: 1406074 - RNA, 19 nt, Artificial Sequence
  Description of Artificial Sequence: Synthetic oligonucleotide
cgcaucggccccggacccg

SEQ ID NO: 1406075 - RNA, 19 nt, Artificial Sequence
  Description of Artificial Sequence: Synthetic oligonucleotide
ccgacaccaugugcuccuc

SEQ ID NO: 1406076 - RNA, 19 nt, Artificial Sequence
  Description of Artificial Sequence: Synthetic oligonucleotide
cagcgucccggugucccgu

SEQ ID NO: 1406077 - RNA, 19 nt, Artificial Sequence
  Description of Artificial Sequence: Synthetic oligonucleotide
gucugcgcagugggaugau

SEQ ID NO: 1406078 - RNA, 19 nt, Artificial Sequence
  Description of Artificial Sequence: Synthetic oligonucleotide
cugcuacguuccacaccuu

SEQ ID NO: 1406079 - RNA, 19 nt, Artificial Sequence
  Description of Artificial Sequence: Synthetic oligonucleotide
cgcagcuuccgcccacucu

SEQ ID NO: 1406080 - RNA, 19 nt, Artificial Sequence
  Description of Artificial Sequence: Synthetic oligonucleotide
cggucgugggaagugcugu

SEQ ID NO: 1406081 - RNA, 19 nt, Artificial Sequence
  Description of Artificial Sequence: Synthetic oligonucleotide
cgaccuuucgccgccgcuu

SEQ ID NO: 1406082 - RNA, 19 nt, Artificial Sequence
  Description of Artificial Sequence: Synthetic oligonucleotide
ccaccgcaucggccccgga

SEQ ID NO: 1406083 - RNA, 19 nt, Artificial Sequence
  Description of Artificial Sequence: Synthetic oligonucleotide
cgucugcacccgacaccau

SEQ ID NO: 1406084 - RNA, 19 nt, Artificial Sequence
  Description of Artificial Sequence: Synthetic oligonucleotide
aaggacaugccauugaugu

SEQ ID NO: 1406085 - RNA, 19 nt, Artificial Sequence
  Description of Artificial Sequence: Synthetic oligonucleotide
aauaugcagcacuucgugc

SEQ ID NO: 1406086 - RNA, 19 nt, Artificial Sequence
  Description of Artificial Sequence: Synthetic oligonucleotide
uguacuaaaucgaugacau

SEQ ID NO: 1406087 - RNA, 19 nt, Artificial Sequence
  Description of Artificial Sequence: Synthetic oligonucleotide
uauagaaccggacacccag

SEQ ID NO: 1406088 - RNA, 19 nt, Artificial Sequence
  Description of Artificial Sequence: Synthetic oligonucleotide
aacuucucagaauuuugcg

SEQ ID NO: 1406089 - RNA, 19 nt, Artificial Sequence
  Description of Artificial Sequence: Synthetic oligonucleotide
uggagaguggcaaugaaug

SEQ ID NO: 1406090 - RNA, 19 nt, Artificial Sequence
  Description of Artificial Sequence: Synthetic oligonucleotide
uguuuuguagcagaugggg

SEQ ID NO: 1406091 - RNA, 19 nt, Artificial Sequence
  Description of Artificial Sequence: Synthetic oligonucleotide
acuucucagaauuuugcgg

SEQ ID NO: 1406092 - RNA, 19 nt, Artificial Sequence
  Description of Artificial Sequence: Synthetic oligonucleotide
gaaccggacacccagugcg

SEQ ID NO: 1406093 - RNA, 19 nt, Artificial Sequence
  Description of Artificial Sequence: Synthetic oligonucleotide
cuucucagaauuuugcggc

SEQ ID NO: 1406094 - RNA, 19 nt, Artificial Sequence
  Description of Artificial Sequence: Synthetic oligonucleotide
agguagggaauucucagcg

SEQ ID NO: 1406095 - RNA, 19 nt, Artificial Sequence
  Description of Artificial Sequence: Synthetic oligonucleotide
uucgagagguuauagaagu

SEQ ID NO: 1406096 - RNA, 19 nt, Artificial Sequence
  Description of Artificial Sequence: Synthetic oligonucleotide
uuggucacgcauauguugc

SEQ ID NO: 1406097 - RNA, 19 nt, Artificial Sequence
  Description of Artificial Sequence: Synthetic oligonucleotide
uuugcgggccucuuggagg

SEQ ID NO: 1406098 - RNA, 19 nt, Artificial Sequence
  Description of Artificial Sequence: Synthetic oligonucleotide
caugucagaguccaucucc

SEQ ID NO: 1406099 - RNA, 19 nt, Artificial Sequence
  Description of Artificial Sequence: Synthetic oligonucleotide
agagccgccccucugcucc

SEQ ID NO: 1406100 - RNA, 19 nt, Artificial Sequence
  Description of Artificial Sequence: Synthetic oligonucleotide
guucagagugacuggaagg

SEQ ID NO: 1406101 - RNA, 19 nt, Artificial Sequence
  Description of Artificial Sequence: Synthetic oligonucleotide
cuuauagaaccggacaccc

SEQ ID NO: 1406102 - RNA, 19 nt, Artificial Sequence
  Description of Artificial Sequence: Synthetic oligonucleotide
gaucacaggaaucagggua

SEQ ID NO: 1406103 - RNA, 19 nt, Artificial Sequence
  Description of Artificial Sequence: Synthetic oligonucleotide
gagagguuauagaagucgg

SEQ ID NO: 1406104 - RNA, 19 nt, Artificial Sequence
  Description of Artificial Sequence: Synthetic oligonucleotide
agaguccaucuccaaagac

SEQ ID NO: 1406105 - RNA, 19 nt, Artificial Sequence
  Description of Artificial Sequence: Synthetic oligonucleotide
guuggucacgcauauguug

SEQ ID NO: 1406106 - RNA, 19 nt, Artificial Sequence
  Description of Artificial Sequence: Synthetic oligonucleotide
agugcgggcgugcaaggcc

SEQ ID NO: 1406107 - RNA, 19 nt, Artificial Sequence
  Description of Artificial Sequence: Synthetic oligonucleotide
uuuugcggcagagaaacac

SEQ ID NO: 1406108 - RNA, 19 nt, Artificial Sequence
  Description of Artificial Sequence: Synthetic oligonucleotide
uuccgguucagagugacug

SEQ ID NO: 1406109 - RNA, 19 nt, Artificial Sequence
  Description of Artificial Sequence: Synthetic oligonucleotide
agucgcgguucguacaggc

SEQ ID NO: 1406110 - RNA, 19 nt, Artificial Sequence
  Description of Artificial Sequence: Synthetic oligonucleotide
aggaaucaggguaggagcc

SEQ ID NO: 1406111 - RNA, 19 nt, Artificial Sequence
  Description of Artificial Sequence: Synthetic oligonucleotide
agaaccggacacccagugc

SEQ ID NO: 1406112 - RNA, 19 nt, Artificial Sequence
  Description of Artificial Sequence: Synthetic oligonucleotide
caauaugcagcacuucgug

SEQ ID NO: 1406113 - RNA, 19 nt, Artificial Sequence
  Description of Artificial Sequence: Synthetic oligonucleotide
auaguuuuguugaaguccu

SEQ ID NO: 1406114 - RNA, 19 nt, Artificial Sequence
  Description of Artificial Sequence: Synthetic oligonucleotide
ugacgugucgcccgcggcg

SEQ ID NO: 1406115 - RNA, 19 nt, Artificial Sequence
  Description of Artificial Sequence: Synthetic oligonucleotide
ugcgcagggccucucgucg

SEQ ID NO: 1406116 - RNA, 19 nt, Artificial Sequence
  Description of Artificial Sequence: Synthetic oligonucleotide
uccgaugacgugucgcccg

SEQ ID NO: 1406117 - RNA, 19 nt, Artificial Sequence
  Description of Artificial Sequence: Synthetic oligonucleotide
ugugugucggugccauacg

SEQ ID NO: 1406118 - RNA, 19 nt, Artificial Sequence
  Description of Artificial Sequence: Synthetic oligonucleotide
uggagguagggaauucuca

SEQ ID NO: 1406119 - RNA, 19 nt, Artificial Sequence
  Description of Artificial Sequence: Synthetic oligonucleotide
ugugucggugccauacgcc

SEQ ID NO: 1406120 - RNA, 19 nt, Artificial Sequence
  Description of Artificial Sequence: Synthetic oligonucleotide
agcacuucgugccacccag

SEQ ID NO: 1406121 - RNA, 19 nt, Artificial Sequence
  Description of Artificial Sequence: Synthetic oligonucleotide
gaagggcucucuuccagag

SEQ ID NO: 1406122 - RNA, 19 nt, Artificial Sequence
  Description of Artificial Sequence: Synthetic oligonucleotide
cagcuugcccgcuauagcc

SEQ ID NO: 1406123 - RNA, 19 nt, Artificial Sequence
  Description of Artificial Sequence: Synthetic oligonucleotide
agcuccugcgcuuauagaa

SEQ ID NO: 1406124 - RNA, 19 nt, Artificial Sequence
  Description of Artificial Sequence: Synthetic oligonucleotide
ucagaauuuugcggcagag

SEQ ID NO: 1406125 - RNA, 19 nt, Artificial Sequence
  Description of Artificial Sequence: Synthetic oligonucleotide
ucgcgguucguacaggcug

SEQ ID NO: 1406126 - RNA, 19 nt, Artificial Sequence
  Description of Artificial Sequence: Synthetic oligonucleotide
cuuccgaugacgugucgcc

SEQ ID NO: 1406127 - RNA, 19 nt, Artificial Sequence
  Description of Artificial Sequence: Synthetic oligonucleotide
aacgaaggggcugggcucg

SEQ ID NO: 1406128 - RNA, 19 nt, Artificial Sequence
  Description of Artificial Sequence: Synthetic oligonucleotide
aguuuuguugaaguccuug

SEQ ID NO: 1406129 - RNA, 19 nt, Artificial Sequence
  Description of Artificial Sequence: Synthetic oligonucleotide
uuauagaagucgguguccu

SEQ ID NO: 1406130 - RNA, 19 nt, Artificial Sequence
  Description of Artificial Sequence: Synthetic oligonucleotide
uucucagcggcuuguuucc

SEQ ID NO: 1406131 - RNA, 19 nt, Artificial Sequence
  Description of Artificial Sequence: Synthetic oligonucleotide
cauacgccaaccugguccc

SEQ ID NO: 1406132 - RNA, 19 nt, Artificial Sequence
  Description of Artificial Sequence: Synthetic oligonucleotide
uagaaccggacacccagug

SEQ ID NO: 1406133 - RNA, 19 nt, Artificial Sequence
  Description of Artificial Sequence: Synthetic oligonucleotide
cuguuuuguagcagauggg

SEQ ID NO: 1406134 - RNA, 19 nt, Artificial Sequence
  Description of Artificial Sequence: Synthetic oligonucleotide
ugcgcuuauagaaccggac

SEQ ID NO: 1406135 - RNA, 19 nt, Artificial Sequence
  Description of Artificial Sequence: Synthetic oligonucleotide
uuuagcagcccgagcuugc

SEQ ID NO: 1406136 - RNA, 19 nt, Artificial Sequence
  Description of Artificial Sequence: Synthetic oligonucleotide
ggcuguacuaaaucgauga

SEQ ID NO: 1406137 - RNA, 19 nt, Artificial Sequence
  Description of Artificial Sequence: Synthetic oligonucleotide
acauccuuuuccucgugug

SEQ ID NO: 1406138 - RNA, 19 nt, Artificial Sequence
  Description of Artificial Sequence: Synthetic oligonucleotide
uuauagaaccggacaccca

SEQ ID NO: 1406139 - RNA, 19 nt, Artificial Sequence
  Description of Artificial Sequence: Synthetic oligonucleotide
gaugacgugucgcccgcgg

SEQ ID NO: 1406140 - RNA, 19 nt, Artificial Sequence
  Description of Artificial Sequence: Synthetic oligonucleotide
guuauagaagucggugucc

SEQ ID NO: 1406141 - RNA, 19 nt, Artificial Sequence
  Description of Artificial Sequence: Synthetic oligonucleotide
ggagguagggaauucucag

SEQ ID NO: 1406142 - RNA, 19 nt, Artificial Sequence
  Description of Artificial Sequence: Synthetic oligonucleotide
uccugcgcuuauagaaccg

SEQ ID NO: 1406143 - RNA, 19 nt, Artificial Sequence
  Description of Artificial Sequence: Synthetic oligonucleotide
ucgugcacgcucuggaagc

SEQ ID NO: 1406144 - RNA, 19 nt, Artificial Sequence
  Description of Artificial Sequence: Synthetic oligonucleotide
ucgagggucuccucaaaga

SEQ ID NO: 1406145 - RNA, 19 nt, Artificial Sequence
  Description of Artificial Sequence: Synthetic oligonucleotide
acgcauauguugcugggga

SEQ ID NO: 1406146 - RNA, 19 nt, Artificial Sequence
  Description of Artificial Sequence: Synthetic oligonucleotide
uccugcacguugacggccg

SEQ ID NO: 1406147 - RNA, 19 nt, Artificial Sequence
  Description of Artificial Sequence: Synthetic oligonucleotide
acaggaugacauccuuuuc

SEQ ID NO: 1406148 - RNA, 19 nt, Artificial Sequence
  Description of Artificial Sequence: Synthetic oligonucleotide
uccgguucagagugacugg

SEQ ID NO: 1406149 - RNA, 19 nt, Artificial Sequence
  Description of Artificial Sequence: Synthetic oligonucleotide
aacaccucgggaucccgga

SEQ ID NO: 1406150 - RNA, 19 nt, Artificial Sequence
  Description of Artificial Sequence: Synthetic oligonucleotide
acaugucagaguccaucuc

SEQ ID NO: 1406151 - RNA, 19 nt, Artificial Sequence
  Description of Artificial Sequence: Synthetic oligonucleotide
cauauguugcuggggaagc

SEQ ID NO: 1406152 - RNA, 19 nt, Artificial Sequence
  Description of Artificial Sequence: Synthetic oligonucleotide
cccaauaugcagcacuucg

SEQ ID NO: 1406153 - RNA, 19 nt, Artificial Sequence
  Description of Artificial Sequence: Synthetic oligonucleotide
ccauacgccaaccuggucc

SEQ ID NO: 1406154 - RNA, 19 nt, Artificial Sequence
  Description of Artificial Sequence: Synthetic oligonucleotide
ucuuccguggagccgcggc

SEQ ID NO: 1406155 - RNA, 19 nt, Artificial Sequence
  Description of Artificial Sequence: Synthetic oligonucleotide
gagagcccuguuuuguagc

SEQ ID NO: 1406156 - RNA, 19 nt, Artificial Sequence
  Description of Artificial Sequence: Synthetic oligonucleotide
cuaaaucgaugacaucuuc

SEQ ID NO: 1406157 - RNA, 19 nt, Artificial Sequence
  Description of Artificial Sequence: Synthetic oligonucleotide
uauagccgggucuggccgg

SEQ ID NO: 1406158 - RNA, 19 nt, Artificial Sequence
  Description of Artificial Sequence: Synthetic oligonucleotide
gcgaacugcacugugaugc

SEQ ID NO: 1406159 - RNA, 19 nt, Artificial Sequence
  Description of Artificial Sequence: Synthetic oligonucleotide
guuuuguagcagauggggc

SEQ ID NO: 1406160 - RNA, 19 nt, Artificial Sequence
  Description of Artificial Sequence: Synthetic oligonucleotide
agaaacaccucgggauccc

SEQ ID NO: 1406161 - RNA, 19 nt, Artificial Sequence
  Description of Artificial Sequence: Synthetic oligonucleotide
ucgguguccuccauucccc

SEQ ID NO: 1406162 - RNA, 19 nt, Artificial Sequence
  Description of Artificial Sequence: Synthetic oligonucleotide
uucucagaauuuugcggca

SEQ ID NO: 1406163 - RNA, 19 nt, Artificial Sequence
  Description of Artificial Sequence: Synthetic oligonucleotide
cucucgucgugcuucuucc

SEQ ID NO: 1406164 - RNA, 19 nt, Artificial Sequence
  Description of Artificial Sequence: Synthetic oligonucleotide
gguuauagaagucgguguc

SEQ ID NO: 1406165 - RNA, 19 nt, Artificial Sequence
  Description of Artificial Sequence: Synthetic oligonucleotide
ucuuccgaugacgugucgc

SEQ ID NO: 1406166 - RNA, 19 nt, Artificial Sequence
  Description of Artificial Sequence: Synthetic oligonucleotide
cuccugcgcuuauagaacc

SEQ ID NO: 1406167 - RNA, 19 nt, Artificial Sequence
  Description of Artificial Sequence: Synthetic oligonucleotide
ucucagaauuuugcggcag

SEQ ID NO: 1406168 - RNA, 19 nt, Artificial Sequence
  Description of Artificial Sequence: Synthetic oligonucleotide
uggcuguacuaaaucgaug

SEQ ID NO: 1406169 - RNA, 19 nt, Artificial Sequence
  Description of Artificial Sequence: Synthetic oligonucleotide
agggucuccucaaagaaca

SEQ ID NO: 1406170 - RNA, 19 nt, Artificial Sequence
  Description of Artificial Sequence: Synthetic oligonucleotide
ggacaugccauugauguug

SEQ ID NO: 1406171 - RNA, 19 nt, Artificial Sequence
  Description of Artificial Sequence: Synthetic oligonucleotide
uggucggaagcccgcagcc

SEQ ID NO: 1406172 - RNA, 19 nt, Artificial Sequence
  Description of Artificial Sequence: Synthetic oligonucleotide
gagaaacaccucgggaucc

SEQ ID NO: 1406173 - RNA, 19 nt, Artificial Sequence
  Description of Artificial Sequence: Synthetic oligonucleotide
aauucucagcggcuuguuu

SEQ ID NO: 1406174 - RNA, 19 nt, Artificial Sequence
  Description of Artificial Sequence: Synthetic oligonucleotide
agucgguguccuccauucc

SEQ ID NO: 1406175 - RNA, 19 nt, Artificial Sequence
  Description of Artificial Sequence: Synthetic oligonucleotide
cagcuuggcgacaugucag

SEQ ID NO: 1406176 - RNA, 19 nt, Artificial Sequence
  Description of Artificial Sequence: Synthetic oligonucleotide
augacgugucgcccgcggc

SEQ ID NO: 1406177 - RNA, 19 nt, Artificial Sequence
  Description of Artificial Sequence: Synthetic oligonucleotide
gguucguacaggcugcggc

SEQ ID NO: 1406178 - RNA, 19 nt, Artificial Sequence
  Description of Artificial Sequence: Synthetic oligonucleotide
auauuccagggaaucgagg

SEQ ID NO: 1406179 - RNA, 19 nt, Artificial Sequence
  Description of Artificial Sequence: Synthetic oligonucleotide
auauguugcuggggaagcg

SEQ ID NO: 1406180 - RNA, 19 nt, Artificial Sequence
  Description of Artificial Sequence: Synthetic oligonucleotide
ucgugugugaggugcuuca

SEQ ID NO: 1406181 - RNA, 19 nt, Artificial Sequence
  Description of Artificial Sequence: Synthetic oligonucleotide
cauuucgagagguuauaga

SEQ ID NO: 1406182 - RNA, 19 nt, Artificial Sequence
  Description of Artificial Sequence: Synthetic oligonucleotide
guuugcgggccucuuggag

SEQ ID NO: 1406183 - RNA, 19 nt, Artificial Sequence
  Description of Artificial Sequence: Synthetic oligonucleotide
cuguacuaaaucgaugaca

SEQ ID NO: 1406184 - RNA, 19 nt, Artificial Sequence
  Description of Artificial Sequence: Synthetic oligonucleotide
ucgugcuucuuccguggag

SEQ ID NO: 1406185 - RNA, 19 nt, Artificial Sequence
  Description of Artificial Sequence: Synthetic oligonucleotide
uguggucggaagcccgcag

SEQ ID NO: 1406186 - RNA, 19 nt, Artificial Sequence
  Description of Artificial Sequence: Synthetic oligonucleotide
gguagggaauucucagcgg

SEQ ID NO: 1406187 - RNA, 19 nt, Artificial Sequence
  Description of Artificial Sequence: Synthetic oligonucleotide
accugguccccauuucgag

SEQ ID NO: 1406188 - RNA, 19 nt, Artificial Sequence
  Description of Artificial Sequence: Synthetic oligonucleotide
ggagauaguuuuguugaag

SEQ ID NO: 1406189 - RNA, 19 nt, Artificial Sequence
  Description of Artificial Sequence: Synthetic oligonucleotide
agagcccuguuuuguagca

SEQ ID NO: 1406190 - RNA, 19 nt, Artificial Sequence
  Description of Artificial Sequence: Synthetic oligonucleotide
gaagcgguggaucuugggu

SEQ ID NO: 1406191 - RNA, 19 nt, Artificial Sequence
  Description of Artificial Sequence: Synthetic oligonucleotide
gaacgaaggggcugggcuc

SEQ ID NO: 1406192 - RNA, 19 nt, Artificial Sequence
  Description of Artificial Sequence: Synthetic oligonucleotide
uugcgggccucuuggaggc

SEQ ID NO: 1406193 - RNA, 19 nt, Artificial Sequence
  Description of Artificial Sequence: Synthetic oligonucleotide
cauguggucggaagcccgc

SEQ ID NO: 1406194 - RNA, 19 nt, Artificial Sequence
  Description of Artificial Sequence: Synthetic oligonucleotide
acuucgugccacccagcuc

SEQ ID NO: 1406195 - RNA, 19 nt, Artificial Sequence
  Description of Artificial Sequence: Synthetic oligonucleotide
uguuggucacgcauauguu

SEQ ID NO: 1406196 - RNA, 19 nt, Artificial Sequence
  Description of Artificial Sequence: Synthetic oligonucleotide
ucgagagguuauagaaguc

SEQ ID NO: 1406197 - RNA, 19 nt, Artificial Sequence
  Description of Artificial Sequence: Synthetic oligonucleotide
ucgucgugcuucuuccgug

SEQ ID NO: 1406198 - RNA, 19 nt, Artificial Sequence
  Description of Artificial Sequence: Synthetic oligonucleotide
gaaacaccucgggaucccg

SEQ ID NO: 1406199 - RNA, 19 nt, Artificial Sequence
  Description of Artificial Sequence: Synthetic oligonucleotide
aagccauuggccagcggug

SEQ ID NO: 1406200 - RNA, 19 nt, Artificial Sequence
  Description of Artificial Sequence: Synthetic oligonucleotide
gugggaacgaaggggcugg

SEQ ID NO: 1406201 - RNA, 19 nt, Artificial Sequence
  Description of Artificial Sequence: Synthetic oligonucleotide
ucgaugacaucuuccgguu

SEQ ID NO: 1406202 - RNA, 19 nt, Artificial Sequence
  Description of Artificial Sequence: Synthetic oligonucleotide
ugacccucacaaguucucc

SEQ ID NO: 1406203 - RNA, 19 nt, Artificial Sequence
  Description of Artificial Sequence: Synthetic oligonucleotide
ugcguuugcgggccucuug

SEQ ID NO: 1406204 - RNA, 19 nt, Artificial Sequence
  Description of Artificial Sequence: Synthetic oligonucleotide
ucuuccgguucagagugac

SEQ ID NO: 1406205 - RNA, 19 nt, Artificial Sequence
  Description of Artificial Sequence: Synthetic oligonucleotide
cuuuagcagcccgagcuug

SEQ ID NO: 1406206 - RNA, 19 nt, Artificial Sequence
  Description of Artificial Sequence: Synthetic oligonucleotide
gaaucgagggucuccucaa

SEQ ID NO: 1406207 - RNA, 19 nt, Artificial Sequence
  Description of Artificial Sequence: Synthetic oligonucleotide
aguucuccuuuagcagccc

SEQ ID NO: 1406208 - RNA, 19 nt, Artificial Sequence
  Description of Artificial Sequence: Synthetic oligonucleotide
gugugucggugccauacgc

SEQ ID NO: 1406209 - RNA, 19 nt, Artificial Sequence
  Description of Artificial Sequence: Synthetic oligonucleotide
acggccgccuuggagauag

SEQ ID NO: 1406210 - RNA, 19 nt, Artificial Sequence
  Description of Artificial Sequence: Synthetic oligonucleotide
cugcaaggcucccagcuuc

SEQ ID NO: 1406211 - RNA, 19 nt, Artificial Sequence
  Description of Artificial Sequence: Synthetic oligonucleotide
gugucggugccauacgcca

SEQ ID NO: 1406212 - RNA, 19 nt, Artificial Sequence
  Description of Artificial Sequence: Synthetic oligonucleotide
ucgggaucccggagucugg

SEQ ID NO: 1406213 - RNA, 19 nt, Artificial Sequence
  Description of Artificial Sequence: Synthetic oligonucleotide
gcuuauagaaccggacacc

SEQ ID NO: 1406214 - RNA, 19 nt, Artificial Sequence
  Description of Artificial Sequence: Synthetic oligonucleotide
cgagagguuauagaagucg

SEQ ID NO: 1406215 - RNA, 19 nt, Artificial Sequence
  Description of Artificial Sequence: Synthetic oligonucleotide
acgcucuggaagccauugg

SEQ ID NO: 1406216 - RNA, 19 nt, Artificial Sequence
  Description of Artificial Sequence: Synthetic oligonucleotide
ccaccuaugacccucacaa

SEQ ID NO: 1406217 - RNA, 19 nt, Artificial Sequence
  Description of Artificial Sequence: Synthetic oligonucleotide
ggucuugcuggugggaacg

SEQ ID NO: 1406218 - RNA, 19 nt, Artificial Sequence
  Description of Artificial Sequence: Synthetic oligonucleotide
cuuccguggagccgcggcc

SEQ ID NO: 1406219 - RNA, 19 nt, Artificial Sequence
  Description of Artificial Sequence: Synthetic oligonucleotide
ggaaucgagggucuccuca

SEQ ID NO: 1406220 - RNA, 19 nt, Artificial Sequence
  Description of Artificial Sequence: Synthetic oligonucleotide
augacccucacaaguucuc

SEQ ID NO: 1406221 - RNA, 19 nt, Artificial Sequence
  Description of Artificial Sequence: Synthetic oligonucleotide
ggcaaugaaugccacuguc

SEQ ID NO: 1406222 - RNA, 19 nt, Artificial Sequence
  Description of Artificial Sequence: Synthetic oligonucleotide
agagguuauagaagucggu

SEQ ID NO: 1406223 - RNA, 19 nt, Artificial Sequence
  Description of Artificial Sequence: Synthetic oligonucleotide
gcgugcaaggccuacccag

SEQ ID NO: 1406224 - RNA, 19 nt, Artificial Sequence
  Description of Artificial Sequence: Synthetic oligonucleotide
acguugacggccgccuugg

SEQ ID NO: 1406225 - RNA, 19 nt, Artificial Sequence
  Description of Artificial Sequence: Synthetic oligonucleotide
gcguuugcgggccucuugg

SEQ ID NO: 1406226 - RNA, 19 nt, Artificial Sequence
  Description of Artificial Sequence: Synthetic oligonucleotide
gcuauagccgggucuggcc

SEQ ID NO: 1406227 - RNA, 19 nt, Artificial Sequence
  Description of Artificial Sequence: Synthetic oligonucleotide
guggucggaagcccgcagc

SEQ ID NO: 1406228 - RNA, 19 nt, Artificial Sequence
  Description of Artificial Sequence: Synthetic oligonucleotide
gaucccggagucuggugga

SEQ ID NO: 1406229 - RNA, 19 nt, Artificial Sequence
  Description of Artificial Sequence: Synthetic oligonucleotide
uccccauuucgagagguua

SEQ ID NO: 1406230 - RNA, 19 nt, Artificial Sequence
  Description of Artificial Sequence: Synthetic oligonucleotide
uggucacgcauauguugcu

SEQ ID NO: 1406231 - RNA, 19 nt, Artificial Sequence
  Description of Artificial Sequence: Synthetic oligonucleotide
cucgggaucccggagucug

SEQ ID NO: 1406232 - RNA, 19 nt, Artificial Sequence
  Description of Artificial Sequence: Synthetic oligonucleotide
uggccggaaagugaugguc

SEQ ID NO: 1406233 - RNA, 19 nt, Artificial Sequence
  Description of Artificial Sequence: Synthetic oligonucleotide
caccuaugacccucacaag

SEQ ID NO: 1406234 - RNA, 19 nt, Artificial Sequence
  Description of Artificial Sequence: Synthetic oligonucleotide
uuccgaugacgugucgccc

SEQ ID NO: 1406235 - RNA, 19 nt, Artificial Sequence
  Description of Artificial Sequence: Synthetic oligonucleotide
gugcaaggccuacccagcc

SEQ ID NO: 1406236 - RNA, 19 nt, Artificial Sequence
  Description of Artificial Sequence: Synthetic oligonucleotide
gcuugcccgcuauagccgg

SEQ ID NO: 1406237 - RNA, 19 nt, Artificial Sequence
  Description of Artificial Sequence: Synthetic oligonucleotide
gcuguacuaaaucgaugac

SEQ ID NO: 1406238 - RNA, 19 nt, Artificial Sequence
  Description of Artificial Sequence: Synthetic oligonucleotide
cacgcucuggaagccauug

SEQ ID NO: 1406239 - RNA, 19 nt, Artificial Sequence
  Description of Artificial Sequence: Synthetic oligonucleotide
agcgagccugugcguuugc

SEQ ID NO: 1406240 - RNA, 19 nt, Artificial Sequence
  Description of Artificial Sequence: Synthetic oligonucleotide
cuugcccgcuauagccggg

SEQ ID NO: 1406241 - RNA, 19 nt, Artificial Sequence
  Description of Artificial Sequence: Synthetic oligonucleotide
acccucacaaguucuccuu

SEQ ID NO: 1406242 - RNA, 19 nt, Artificial Sequence
  Description of Artificial Sequence: Synthetic oligonucleotide
cuucugccaccgcucuucc

SEQ ID NO: 1406243 - RNA, 19 nt, Artificial Sequence
  Description of Artificial Sequence: Synthetic oligonucleotide
cacguugacggccgccuug

SEQ ID NO: 1406244 - RNA, 19 nt, Artificial Sequence
  Description of Artificial Sequence: Synthetic oligonucleotide
uccucgugugugaggugcu

SEQ ID NO: 1406245 - RNA, 19 nt, Artificial Sequence
  Description of Artificial Sequence: Synthetic oligonucleotide
cgcuuauagaaccggacac

SEQ ID NO: 1406246 - RNA, 19 nt, Artificial Sequence
  Description of Artificial Sequence: Synthetic oligonucleotide
cugcuaacuucucagaauu

SEQ ID NO: 1406247 - RNA, 19 nt, Artificial Sequence
  Description of Artificial Sequence: Synthetic oligonucleotide
gcagucccaccuaugaccc

SEQ ID NO: 1406248 - RNA, 19 nt, Artificial Sequence
  Description of Artificial Sequence: Synthetic oligonucleotide
uguccagucgcgguucgua

SEQ ID NO: 1406249 - RNA, 19 nt, Artificial Sequence
  Description of Artificial Sequence: Synthetic oligonucleotide
caccgcucuuccgaugacg

SEQ ID NO: 1406250 - RNA, 19 nt, Artificial Sequence
  Description of Artificial Sequence: Synthetic oligonucleotide
cuucgauggggaggugggg

SEQ ID NO: 1406251 - RNA, 19 nt, Artificial Sequence
  Description of Artificial Sequence: Synthetic oligonucleotide
gacauccuuuuccucgugu

SEQ ID NO: 1406252 - RNA, 19 nt, Artificial Sequence
  Description of Artificial Sequence: Synthetic oligonucleotide
gcaaugaaugccacuguca

SEQ ID NO: 1406253 - RNA, 19 nt, Artificial Sequence
  Description of Artificial Sequence: Synthetic oligonucleotide
gcgcuuauagaaccggaca

SEQ ID NO: 1406254 - RNA, 19 nt, Artificial Sequence
  Description of Artificial Sequence: Synthetic oligonucleotide
ucaagucacugagccugca

SEQ ID NO: 1406255 - RNA, 19 nt, Artificial Sequence
  Description of Artificial Sequence: Synthetic oligonucleotide
ccauguggucggaagcccg

SEQ ID NO: 1406256 - RNA, 19 nt, Artificial Sequence
  Description of Artificial Sequence: Synthetic oligonucleotide
ggcgacaugucagagucca

SEQ ID NO: 1406257 - RNA, 19 nt, Artificial Sequence
  Description of Artificial Sequence: Synthetic oligonucleotide
ugugcguuugcgggccucu

SEQ ID NO: 1406258 - RNA, 19 nt, Artificial Sequence
  Description of Artificial Sequence: Synthetic oligonucleotide
aggagagcccuguuuugua

SEQ ID NO: 1406259 - RNA, 19 nt, Artificial Sequence
  Description of Artificial Sequence: Synthetic oligonucleotide
ggaacgaaggggcugggcu

SEQ ID NO: 1406260 - RNA, 19 nt, Artificial Sequence
  Description of Artificial Sequence: Synthetic oligonucleotide
guucguacaggcugcggcu

SEQ ID NO: 1406261 - RNA, 19 nt, Artificial Sequence
  Description of Artificial Sequence: Synthetic oligonucleotide
uuguagcagauggggcccc

SEQ ID NO: 1406262 - RNA, 19 nt, Artificial Sequence
  Description of Artificial Sequence: Synthetic oligonucleotide
guggagguagggaauucuc

SEQ ID NO: 1406263 - RNA, 19 nt, Artificial Sequence
  Description of Artificial Sequence: Synthetic oligonucleotide
agugaagcuucuggagcga

SEQ ID NO: 1406264 - RNA, 19 nt, Artificial Sequence
  Description of Artificial Sequence: Synthetic oligonucleotide
cuucuuccguggagccgcg

SEQ ID NO: 1406265 - RNA, 19 nt, Artificial Sequence
  Description of Artificial Sequence: Synthetic oligonucleotide
accgcucuuccgaugacgu

SEQ ID NO: 1406266 - RNA, 19 nt, Artificial Sequence
  Description of Artificial Sequence: Synthetic oligonucleotide
accggacacccagugcggg

SEQ ID NO: 1406267 - RNA, 19 nt, Artificial Sequence
  Description of Artificial Sequence: Synthetic oligonucleotide
uugcgcagggccucucguc

SEQ ID NO: 1406268 - RNA, 19 nt, Artificial Sequence
  Description of Artificial Sequence: Synthetic oligonucleotide
auagaaccggacacccagu

SEQ ID NO: 1406269 - RNA, 19 nt, Artificial Sequence
  Description of Artificial Sequence: Synthetic oligonucleotide
gacccucacaaguucuccu

SEQ ID NO: 1406270 - RNA, 19 nt, Artificial Sequence
  Description of Artificial Sequence: Synthetic oligonucleotide
ccauuucgagagguuauag

SEQ ID NO: 1406271 - RNA, 19 nt, Artificial Sequence
  Description of Artificial Sequence: Synthetic oligonucleotide
cugcggcuggcguucuggc

SEQ ID NO: 1406272 - RNA, 19 nt, Artificial Sequence
  Description of Artificial Sequence: Synthetic oligonucleotide
ccugcgcuuauagaaccgg

SEQ ID NO: 1406273 - RNA, 19 nt, Artificial Sequence
  Description of Artificial Sequence: Synthetic oligonucleotide
auacgccaaccuggucccc

SEQ ID NO: 1406274 - RNA, 19 nt, Artificial Sequence
  Description of Artificial Sequence: Synthetic oligonucleotide
cucgugugugaggugcuuc

SEQ ID NO: 1406275 - RNA, 19 nt, Artificial Sequence
  Description of Artificial Sequence: Synthetic oligonucleotide
aggccugcccuccuucgau

SEQ ID NO: 1406276 - RNA, 19 nt, Artificial Sequence
  Description of Artificial Sequence: Synthetic oligonucleotide
gagcgagccugugcguuug

SEQ ID NO: 1406277 - RNA, 19 nt, Artificial Sequence
  Description of Artificial Sequence: Synthetic oligonucleotide
uucgugccacccagcuccu

SEQ ID NO: 1406278 - RNA, 19 nt, Artificial Sequence
  Description of Artificial Sequence: Synthetic oligonucleotide
ugccaccgcucuuccgaug

SEQ ID NO: 1406279 - RNA, 19 nt, Artificial Sequence
  Description of Artificial Sequence: Synthetic oligonucleotide
ucucagcggcuuguuucca

SEQ ID NO: 1406280 - RNA, 19 nt, Artificial Sequence
  Description of Artificial Sequence: Synthetic oligonucleotide
cauccuuuuccucgugugu

SEQ ID NO: 1406281 - RNA, 19 nt, Artificial Sequence
  Description of Artificial Sequence: Synthetic oligonucleotide
agcggcuuguuuccaccuu

SEQ ID NO: 1406282 - RNA, 19 nt, Artificial Sequence
  Description of Artificial Sequence: Synthetic oligonucleotide
gccgggucuggccggaaag

SEQ ID NO: 1406283 - RNA, 19 nt, Artificial Sequence
  Description of Artificial Sequence: Synthetic oligonucleotide
uugcccgcuauagccgggu

SEQ ID NO: 1406284 - RNA, 19 nt, Artificial Sequence
  Description of Artificial Sequence: Synthetic oligonucleotide
gcuccugcgcuuauagaac

SEQ ID NO: 1406285 - RNA, 19 nt, Artificial Sequence
  Description of Artificial Sequence: Synthetic oligonucleotide
ucccaccuaugacccucac

SEQ ID NO: 1406286 - RNA, 19 nt, Artificial Sequence
  Description of Artificial Sequence: Synthetic oligonucleotide
auuuugcggcagagaaaca

SEQ ID NO: 1406287 - RNA, 19 nt, Artificial Sequence
  Description of Artificial Sequence: Synthetic oligonucleotide
gaagucgguguccuccauu

SEQ ID NO: 1406288 - RNA, 19 nt, Artificial Sequence
  Description of Artificial Sequence: Synthetic oligonucleotide
gucgcccgcggcgaugaag

SEQ ID NO: 1406289 - RNA, 19 nt, Artificial Sequence
  Description of Artificial Sequence: Synthetic oligonucleotide
gacgugucgcccgcggcga

SEQ ID NO: 1406290 - RNA, 19 nt, Artificial Sequence
  Description of Artificial Sequence: Synthetic oligonucleotide
cgucgugcuucuuccgugg

SEQ ID NO: 1406291 - RNA, 19 nt, Artificial Sequence
  Description of Artificial Sequence: Synthetic oligonucleotide
gcuccugcacguugacggc

SEQ ID NO: 1406292 - RNA, 19 nt, Artificial Sequence
  Description of Artificial Sequence: Synthetic oligonucleotide
gcuuggcgacaugucagag

SEQ ID NO: 1406293 - RNA, 19 nt, Artificial Sequence
  Description of Artificial Sequence: Synthetic oligonucleotide
ccuacccagccacuccagc

SEQ ID NO: 1406294 - RNA, 19 nt, Artificial Sequence
  Description of Artificial Sequence: Synthetic oligonucleotide
cccgcggcgaugaaggaca

SEQ ID NO: 1406295 - RNA, 19 nt, Artificial Sequence
  Description of Artificial Sequence: Synthetic oligonucleotide
ggcuucguuuccugcuaac

SEQ ID NO: 1406296 - RNA, 19 nt, Artificial Sequence
  Description of Artificial Sequence: Synthetic oligonucleotide
gucgugcuucuuccgugga

SEQ ID NO: 1406297 - RNA, 19 nt, Artificial Sequence
  Description of Artificial Sequence: Synthetic oligonucleotide
gacuguggagaguggcaau

SEQ ID NO: 1406298 - RNA, 19 nt, Artificial Sequence
  Description of Artificial Sequence: Synthetic oligonucleotide
gggucccauucugaggcag

SEQ ID NO: 1406299 - RNA, 19 nt, Artificial Sequence
  Description of Artificial Sequence: Synthetic oligonucleotide
cccagugcgggcgugcaag

SEQ ID NO: 1406300 - RNA, 19 nt, Artificial Sequence
  Description of Artificial Sequence: Synthetic oligonucleotide
cccgcuauagccgggucug

SEQ ID NO: 1406301 - RNA, 19 nt, Artificial Sequence
  Description of Artificial Sequence: Synthetic oligonucleotide
ccucucgucgugcuucuuc

SEQ ID NO: 1406302 - RNA, 19 nt, Artificial Sequence
  Description of Artificial Sequence: Synthetic oligonucleotide
cagucgcgguucguacagg

SEQ ID NO: 1406303 - RNA, 19 nt, Artificial Sequence
  Description of Artificial Sequence: Synthetic oligonucleotide
acgccaaccugguccccau

SEQ ID NO: 1406304 - RNA, 19 nt, Artificial Sequence
  Description of Artificial Sequence: Synthetic oligonucleotide
ccagugcgggcgugcaagg

SEQ ID NO: 1406305 - RNA, 19 nt, Artificial Sequence
  Description of Artificial Sequence: Synthetic oligonucleotide
ccaauaugcagcacuucgu

SEQ ID NO: 1406306 - RNA, 19 nt, Artificial Sequence
  Description of Artificial Sequence: Synthetic oligonucleotide
cucgucgugcuucuuccgu

SEQ ID NO: 1406307 - RNA, 19 nt, Artificial Sequence
  Description of Artificial Sequence: Synthetic oligonucleotide
auagccgggucuggccgga

SEQ ID NO: 1406308 - RNA, 19 nt, Artificial Sequence
  Description of Artificial Sequence: Synthetic oligonucleotide
ggcgcuguuggucacgcau

SEQ ID NO: 1406309 - RNA, 19 nt, Artificial Sequence
  Description of Artificial Sequence: Synthetic oligonucleotide
cagcacuucgugccaccca

SEQ ID NO: 1406310 - RNA, 19 nt, Artificial Sequence
  Description of Artificial Sequence: Synthetic oligonucleotide
ccaaccugguccccauuuc

SEQ ID NO: 1406311 - RNA, 19 nt, Artificial Sequence
  Description of Artificial Sequence: Synthetic oligonucleotide
cgcgguucguacaggcugc

SEQ ID NO: 1406312 - RNA, 19 nt, Artificial Sequence
  Description of Artificial Sequence: Synthetic oligonucleotide
ggaagcccgcagcccgggg

SEQ ID NO: 1406313 - RNA, 19 nt, Artificial Sequence
  Description of Artificial Sequence: Synthetic oligonucleotide
gggaucccggagucuggug

SEQ ID NO: 1406314 - RNA, 19 nt, Artificial Sequence
  Description of Artificial Sequence: Synthetic oligonucleotide
ggaucacaggaaucagggu

SEQ ID NO: 1406315 - RNA, 19 nt, Artificial Sequence
  Description of Artificial Sequence: Synthetic oligonucleotide
ggucggaagcccgcagccc

SEQ ID NO: 1406316 - RNA, 19 nt, Artificial Sequence
  Description of Artificial Sequence: Synthetic oligonucleotide
aguccuugccggcgcuguu

SEQ ID NO: 1406317 - RNA, 19 nt, Artificial Sequence
  Description of Artificial Sequence: Synthetic oligonucleotide
cccuguuuuguagcagaug

SEQ ID NO: 1406318 - RNA, 19 nt, Artificial Sequence
  Description of Artificial Sequence: Synthetic oligonucleotide
gcgagccugugcguuugcg

SEQ ID NO: 1406319 - RNA, 19 nt, Artificial Sequence
  Description of Artificial Sequence: Synthetic oligonucleotide
gggaacgaaggggcugggc

SEQ ID NO: 1406320 - RNA, 19 nt, Artificial Sequence
  Description of Artificial Sequence: Synthetic oligonucleotide
ccgaugacgugucgcccgc

SEQ ID NO: 1406321 - RNA, 19 nt, Artificial Sequence
  Description of Artificial Sequence: Synthetic oligonucleotide
gguggagguagggaauucu

SEQ ID NO: 1406322 - RNA, 19 nt, Artificial Sequence
  Description of Artificial Sequence: Synthetic oligonucleotide
gccggcgaacugcacugug

SEQ ID NO: 1406323 - RNA, 19 nt, Artificial Sequence
  Description of Artificial Sequence: Synthetic oligonucleotide
gcucggucugcacagcccu

SEQ ID NO: 1406324 - RNA, 19 nt, Artificial Sequence
  Description of Artificial Sequence: Synthetic oligonucleotide
ccggacacccagugcgggc

SEQ ID NO: 1406325 - RNA, 19 nt, Artificial Sequence
  Description of Artificial Sequence: Synthetic oligonucleotide
ccuaugacccucacaaguu

SEQ ID NO: 1406326 - RNA, 19 nt, Artificial Sequence
  Description of Artificial Sequence: Synthetic oligonucleotide
gcuucguuuccugcuaacu

SEQ ID NO: 1406327 - RNA, 19 nt, Artificial Sequence
  Description of Artificial Sequence: Synthetic oligonucleotide
gccgcggccggcgaacugc

SEQ ID NO: 1406328 - RNA, 19 nt, Artificial Sequence
  Description of Artificial Sequence: Synthetic oligonucleotide
gcgguggcugcucggucug

SEQ ID NO: 1406329 - RNA, 19 nt, Artificial Sequence
  Description of Artificial Sequence: Synthetic oligonucleotide
gcuguuggucacgcauaug

SEQ ID NO: 1406330 - RNA, 19 nt, Artificial Sequence
  Description of Artificial Sequence: Synthetic oligonucleotide
ggcgugcaaggccuaccca

SEQ ID NO: 1406331 - RNA, 19 nt, Artificial Sequence
  Description of Artificial Sequence: Synthetic oligonucleotide
gggaaucgagggucuccuc

SEQ ID NO: 1406332 - RNA, 19 nt, Artificial Sequence
  Description of Artificial Sequence: Synthetic oligonucleotide
acccagugcgggcgugcaa

SEQ ID NO: 1406333 - RNA, 19 nt, Artificial Sequence
  Description of Artificial Sequence: Synthetic oligonucleotide
cugugcguuugcgggccuc

SEQ ID NO: 1406334 - RNA, 19 nt, Artificial Sequence
  Description of Artificial Sequence: Synthetic oligonucleotide
ccggaaagugauggucuug

SEQ ID NO: 1406335 - RNA, 19 nt, Artificial Sequence
  Description of Artificial Sequence: Synthetic oligonucleotide
gcgguucguacaggcugcg

SEQ ID NO: 1406336 - RNA, 19 nt, Artificial Sequence
  Description of Artificial Sequence: Synthetic oligonucleotide
ggcgcguuccccgucccca

SEQ ID NO: 1406337 - RNA, 19 nt, Artificial Sequence
  Description of Artificial Sequence: Synthetic oligonucleotide
ggcuguccagucgcgguuc

SEQ ID NO: 1406338 - RNA, 19 nt, Artificial Sequence
  Description of Artificial Sequence: Synthetic oligonucleotide
ccggcgaacugcacuguga

SEQ ID NO: 1406339 - RNA, 19 nt, Artificial Sequence
  Description of Artificial Sequence: Synthetic oligonucleotide
ccgccuuggagauaguuuu

SEQ ID NO: 1406340 - RNA, 19 nt, Artificial Sequence
  Description of Artificial Sequence: Synthetic oligonucleotide
gugcgggcgugcaaggccu

SEQ ID NO: 1406341 - RNA, 19 nt, Artificial Sequence
  Description of Artificial Sequence: Synthetic oligonucleotide
guccccagagccgccccuc

SEQ ID NO: 1406342 - RNA, 19 nt, Artificial Sequence
  Description of Artificial Sequence: Synthetic oligonucleotide
gcgcguuccccguccccag

SEQ ID NO: 1406343 - RNA, 19 nt, Artificial Sequence
  Description of Artificial Sequence: Synthetic oligonucleotide
cggccggcgaacugcacug

SEQ ID NO: 1406344 - RNA, 19 nt, Artificial Sequence
  Description of Artificial Sequence: Synthetic oligonucleotide
gggcuucguuuccugcuaa

SEQ ID NO: 1406345 - RNA, 19 nt, Artificial Sequence
  Description of Artificial Sequence: Synthetic oligonucleotide
cccaccuaugacccucaca

SEQ ID NO: 1406346 - RNA, 19 nt, Artificial Sequence
  Description of Artificial Sequence: Synthetic oligonucleotide
cugcuacuugaggcacauc

SEQ ID NO: 1406347 - RNA, 19 nt, Artificial Sequence
  Description of Artificial Sequence: Synthetic oligonucleotide
gcuggcguucuggcgcgcc

SEQ ID NO: 1406348 - RNA, 19 nt, Artificial Sequence
  Description of Artificial Sequence: Synthetic oligonucleotide
gucgcgguucguacaggcu

SEQ ID NO: 1406349 - RNA, 19 nt, Artificial Sequence
  Description of Artificial Sequence: Synthetic oligonucleotide
gccauacgccaaccugguc

SEQ ID NO: 1406350 - RNA, 19 nt, Artificial Sequence
  Description of Artificial Sequence: Synthetic oligonucleotide
ccccugcuacuugaggcac

SEQ ID NO: 1406351 - RNA, 19 nt, Artificial Sequence
  Description of Artificial Sequence: Synthetic oligonucleotide
acgugucgcccgcggcgau

SEQ ID NO: 1406352 - RNA, 19 nt, Artificial Sequence
  Description of Artificial Sequence: Synthetic oligonucleotide
ccgcucuuccgaugacgug

SEQ ID NO: 1406353 - RNA, 19 nt, Artificial Sequence
  Description of Artificial Sequence: Synthetic oligonucleotide
gcacuucgugccacccagc

SEQ ID NO: 1406354 - RNA, 19 nt, Artificial Sequence
  Description of Artificial Sequence: Synthetic oligonucleotide
cgugcacgcucuggaagcc

SEQ ID NO: 1406355 - RNA, 19 nt, Artificial Sequence
  Description of Artificial Sequence: Synthetic oligonucleotide
gugaugccauguggucgga

SEQ ID NO: 1406356 - RNA, 19 nt, Artificial Sequence
  Description of Artificial Sequence: Synthetic oligonucleotide
ggauggggcugagacuucu

SEQ ID NO: 1406357 - RNA, 19 nt, Artificial Sequence
  Description of Artificial Sequence: Synthetic oligonucleotide
gcccgcggcgaugaaggac

SEQ ID NO: 1406358 - RNA, 19 nt, Artificial Sequence
  Description of Artificial Sequence: Synthetic oligonucleotide
gauggggcugagacuucuu

SEQ ID NO: 1406359 - RNA, 19 nt, Artificial Sequence
  Description of Artificial Sequence: Synthetic oligonucleotide
ccgcuccugcacguugacg

SEQ ID NO: 1406360 - RNA, 19 nt, Artificial Sequence
  Description of Artificial Sequence: Synthetic oligonucleotide
cacccagugcgggcgugca

SEQ ID NO: 1406361 - RNA, 19 nt, Artificial Sequence
  Description of Artificial Sequence: Synthetic oligonucleotide
ccggcgcuguuggucacgc

SEQ ID NO: 1406362 - RNA, 19 nt, Artificial Sequence
  Description of Artificial Sequence: Synthetic oligonucleotide
gcggccggcgaacugcacu

SEQ ID NO: 1406363 - RNA, 19 nt, Artificial Sequence
  Description of Artificial Sequence: Synthetic oligonucleotide
cguuccccguccccagagc

SEQ ID NO: 1406364 - RNA, 19 nt, Artificial Sequence
  Description of Artificial Sequence: Synthetic oligonucleotide
gcccgcuauagccgggucu

SEQ ID NO: 1406365 - RNA, 19 nt, Artificial Sequence
  Description of Artificial Sequence: Synthetic oligonucleotide
gggcgcguuccccgucccc

SEQ ID NO: 1406366 - RNA, 19 nt, Artificial Sequence
  Description of Artificial Sequence: Synthetic oligonucleotide
cgcauauguugcuggggaa

SEQ ID NO: 1406367 - RNA, 19 nt, Artificial Sequence
  Description of Artificial Sequence: Synthetic oligonucleotide
cuccuucgauggggaggug

SEQ ID NO: 1406368 - RNA, 19 nt, Artificial Sequence
  Description of Artificial Sequence: Synthetic oligonucleotide
cccauuucgagagguuaua

SEQ ID NO: 1406369 - RNA, 19 nt, Artificial Sequence
  Description of Artificial Sequence: Synthetic oligonucleotide
ccccauuucgagagguuau

SEQ ID NO: 1406370 - RNA, 19 nt, Artificial Sequence
  Description of Artificial Sequence: Synthetic oligonucleotide
ccagggaaucgagggucuc

SEQ ID NO: 1406371 - RNA, 19 nt, Artificial Sequence
  Description of Artificial Sequence: Synthetic oligonucleotide
gccggaaagugauggucuu

SEQ ID NO: 1406372 - RNA, 19 nt, Artificial Sequence
  Description of Artificial Sequence: Synthetic oligonucleotide
cugccaccgcucuuccgau

SEQ ID NO: 1406373 - RNA, 19 nt, Artificial Sequence
  Description of Artificial Sequence: Synthetic oligonucleotide
ccaccgcucuuccgaugac

SEQ ID NO: 1406374 - RNA, 19 nt, Artificial Sequence
  Description of Artificial Sequence: Synthetic oligonucleotide
ggagcgagccugugcguuu

SEQ ID NO: 1406375 - RNA, 19 nt, Artificial Sequence
  Description of Artificial Sequence: Synthetic oligonucleotide
cccggagucugguggaggu

SEQ ID NO: 1406376 - RNA, 19 nt, Artificial Sequence
  Description of Artificial Sequence: Synthetic oligonucleotide
cucaggaagcuggcuggau

SEQ ID NO: 1406377 - RNA, 19 nt, Artificial Sequence
  Description of Artificial Sequence: Synthetic oligonucleotide
gccgccuuggagauaguuu

SEQ ID NO: 1406378 - RNA, 19 nt, Artificial Sequence
  Description of Artificial Sequence: Synthetic oligonucleotide
ccguccccagagccgcccc

SEQ ID NO: 1406379 - RNA, 19 nt, Artificial Sequence
  Description of Artificial Sequence: Synthetic oligonucleotide
uagccgggucuggccggaa

SEQ ID NO: 1406380 - RNA, 19 nt, Artificial Sequence
  Description of Artificial Sequence: Synthetic oligonucleotide
cgguucguacaggcugcgg

SEQ ID NO: 1406381 - RNA, 19 nt, Artificial Sequence
  Description of Artificial Sequence: Synthetic oligonucleotide
gagccgccccucugcuccu

SEQ ID NO: 1406382 - RNA, 19 nt, Artificial Sequence
  Description of Artificial Sequence: Synthetic oligonucleotide
cguuugcgggccucuugga

SEQ ID NO: 1406383 - RNA, 19 nt, Artificial Sequence
  Description of Artificial Sequence: Synthetic oligonucleotide
cgaugacgugucgcccgcg

SEQ ID NO: 1406384 - RNA, 19 nt, Artificial Sequence
  Description of Artificial Sequence: Synthetic oligonucleotide
ccugggcgcguuccccguc

SEQ ID NO: 1406385 - RNA, 19 nt, Artificial Sequence
  Description of Artificial Sequence: Synthetic oligonucleotide
cgggcgugcaaggccuacc

SEQ ID NO: 1406386 - RNA, 19 nt, Artificial Sequence
  Description of Artificial Sequence: Synthetic oligonucleotide
gggagcgagccugugcguu

SEQ ID NO: 1406387 - RNA, 19 nt, Artificial Sequence
  Description of Artificial Sequence: Synthetic oligonucleotide
ggggagcgagccugugcgu

SEQ ID NO: 1406388 - RNA, 19 nt, Artificial Sequence
  Description of Artificial Sequence: Synthetic oligonucleotide
ccgccccucugcuccucug

SEQ ID NO: 1406389 - RNA, 19 nt, Artificial Sequence
  Description of Artificial Sequence: Synthetic oligonucleotide
gagccgcggccggcgaacu

SEQ ID NO: 1406390 - RNA, 19 nt, Artificial Sequence
  Description of Artificial Sequence: Synthetic oligonucleotide
gcccuguuuuguagcagau

SEQ ID NO: 1406391 - RNA, 19 nt, Artificial Sequence
  Description of Artificial Sequence: Synthetic oligonucleotide
cccucacaaguucuccuuu

SEQ ID NO: 1406392 - RNA, 19 nt, Artificial Sequence
  Description of Artificial Sequence: Synthetic oligonucleotide
cuguccagucgcgguucgu

SEQ ID NO: 1406393 - RNA, 19 nt, Artificial Sequence
  Description of Artificial Sequence: Synthetic oligonucleotide
ggcuggcguucuggcgcgc

SEQ ID NO: 1406394 - RNA, 19 nt, Artificial Sequence
  Description of Artificial Sequence: Synthetic oligonucleotide
cgugucgcccgcggcgaug

SEQ ID NO: 1406395 - RNA, 19 nt, Artificial Sequence
  Description of Artificial Sequence: Synthetic oligonucleotide
ggccgccuuggagauaguu

SEQ ID NO: 1406396 - RNA, 19 nt, Artificial Sequence
  Description of Artificial Sequence: Synthetic oligonucleotide
ggugccggcugggcugugu

SEQ ID NO: 1406397 - RNA, 19 nt, Artificial Sequence
  Description of Artificial Sequence: Synthetic oligonucleotide
ggcucgcugcgcagggccu

SEQ ID NO: 1406398 - RNA, 19 nt, Artificial Sequence
  Description of Artificial Sequence: Synthetic oligonucleotide
gcacguugacggccgccuu

SEQ ID NO: 1406399 - RNA, 19 nt, Artificial Sequence
  Description of Artificial Sequence: Synthetic oligonucleotide
ccgggucuggccggaaagu

SEQ ID NO: 1406400 - RNA, 19 nt, Artificial Sequence
  Description of Artificial Sequence: Synthetic oligonucleotide
ggccggcgaacugcacugu

SEQ ID NO: 1406401 - RNA, 19 nt, Artificial Sequence
  Description of Artificial Sequence: Synthetic oligonucleotide
ccggagucugguggaggua

SEQ ID NO: 1406402 - RNA, 19 nt, Artificial Sequence
  Description of Artificial Sequence: Synthetic oligonucleotide
cgcggccggcgaacugcac

SEQ ID NO: 1406403 - RNA, 19 nt, Artificial Sequence
  Description of Artificial Sequence: Synthetic oligonucleotide
cgcguuccccguccccaga

SEQ ID NO: 1406404 - RNA, 19 nt, Artificial Sequence
  Description of Artificial Sequence: Synthetic oligonucleotide
cccugggcgcguuccccgu

SEQ ID NO: 1406405 - RNA, 19 nt, Artificial Sequence
  Description of Artificial Sequence: Synthetic oligonucleotide
gcacgcucuggaagccauu

SEQ ID NO: 1406406 - RNA, 19 nt, Artificial Sequence
  Description of Artificial Sequence: Synthetic oligonucleotide
cgggaucccggagucuggu

SEQ ID NO: 1406407 - RNA, 19 nt, Artificial Sequence
  Description of Artificial Sequence: Synthetic oligonucleotide
ccucgugugugaggugcuu

SEQ ID NO: 1406408 - RNA, 19 nt, Artificial Sequence
  Description of Artificial Sequence: Synthetic oligonucleotide
cggcgcuguuggucacgca

SEQ ID NO: 1406409 - RNA, 19 nt, Artificial Sequence
  Description of Artificial Sequence: Synthetic oligonucleotide
ccgcggcgaugaaggacau

SEQ ID NO: 1406410 - RNA, 19 nt, Artificial Sequence
  Description of Artificial Sequence: Synthetic oligonucleotide
cggccgccuuggagauagu

SEQ ID NO: 1406411 - RNA, 19 nt, Artificial Sequence
  Description of Artificial Sequence: Synthetic oligonucleotide
aauaaaauggauuacugag

SEQ ID NO: 1406412 - RNA, 19 nt, Artificial Sequence
  Description of Artificial Sequence: Synthetic oligonucleotide
uguaaugauagucagaccc

SEQ ID NO: 1406413 - RNA, 19 nt, Artificial Sequence
  Description of Artificial Sequence: Synthetic oligonucleotide
uuaaaagggccuaaaaugg

SEQ ID NO: 1406414 - RNA, 19 nt, Artificial Sequence
  Description of Artificial Sequence: Synthetic oligonucleotide
ugugauaaaauucaagagc

SEQ ID NO: 1406415 - RNA, 19 nt, Artificial Sequence
  Description of Artificial Sequence: Synthetic oligonucleotide
auuaaaagggccuaaaaug

SEQ ID NO: 1406416 - RNA, 19 nt, Artificial Sequence
  Description of Artificial Sequence: Synthetic oligonucleotide
uauaauacaaccaaucuau

SEQ ID NO: 1406417 - RNA, 19 nt, Artificial Sequence
  Description of Artificial Sequence: Synthetic oligonucleotide
aaaugauuggaaugguggc

SEQ ID NO: 1406418 - RNA, 19 nt, Artificial Sequence
  Description of Artificial Sequence: Synthetic oligonucleotide
uauagauuuauaauguaug

SEQ ID NO: 1406419 - RNA, 19 nt, Artificial Sequence
  Description of Artificial Sequence: Synthetic oligonucleotide
uuucagacuaccaauuugg

SEQ ID NO: 1406420 - RNA, 19 nt, Artificial Sequence
  Description of Artificial Sequence: Synthetic oligonucleotide
uuagaaugaacuaguauag

SEQ ID NO: 1406421 - RNA, 19 nt, Artificial Sequence
  Description of Artificial Sequence: Synthetic oligonucleotide
uguacuuaaauucugaguu

SEQ ID NO: 1406422 - RNA, 19 nt, Artificial Sequence
  Description of Artificial Sequence: Synthetic oligonucleotide
agaauuuuaaaguucuuag

SEQ ID NO: 1406423 - RNA, 19 nt, Artificial Sequence
  Description of Artificial Sequence: Synthetic oligonucleotide
ugagguaagguaauuaaag

SEQ ID NO: 1406424 - RNA, 19 nt, Artificial Sequence
  Description of Artificial Sequence: Synthetic oligonucleotide
uuuauaauacaaccaaucu

SEQ ID NO: 1406425 - RNA, 19 nt, Artificial Sequence
  Description of Artificial Sequence: Synthetic oligonucleotide
uuuuauuagcaaaaugcag

SEQ ID NO: 1406426 - RNA, 19 nt, Artificial Sequence
  Description of Artificial Sequence: Synthetic oligonucleotide
auaugauucauccccaaac

SEQ ID NO: 1406427 - RNA, 19 nt, Artificial Sequence
  Description of Artificial Sequence: Synthetic oligonucleotide
cugguuaaagguaugaccg

SEQ ID NO: 1406428 - RNA, 19 nt, Artificial Sequence
  Description of Artificial Sequence: Synthetic oligonucleotide
aaaauggcccgguaaaccg

SEQ ID NO: 1406429 - RNA, 19 nt, Artificial Sequence
  Description of Artificial Sequence: Synthetic oligonucleotide
guuaaugucgagaugaagg

SEQ ID NO: 1406430 - RNA, 19 nt, Artificial Sequence
  Description of Artificial Sequence: Synthetic oligonucleotide
aauucaagagcauaccaca

SEQ ID NO: 1406431 - RNA, 19 nt, Artificial Sequence
  Description of Artificial Sequence: Synthetic oligonucleotide
aaaaucccgacugaucugc

SEQ ID NO: 1406432 - RNA, 19 nt, Artificial Sequence
  Description of Artificial Sequence: Synthetic oligonucleotide
aaaguuugauuccauugag

SEQ ID NO: 1406433 - RNA, 19 nt, Artificial Sequence
  Description of Artificial Sequence: Synthetic oligonucleotide
aaaauucaagagcauacca

SEQ ID NO: 1406434 - RNA, 19 nt, Artificial Sequence
  Description of Artificial Sequence: Synthetic oligonucleotide
aaaagggugagauaauuaa

SEQ ID NO: 1406435 - RNA, 19 nt, Artificial Sequence
  Description of Artificial Sequence: Synthetic oligonucleotide
aaugcagauagccauuuca

SEQ ID NO: 1406436 - RNA, 19 nt, Artificial Sequence
  Description of Artificial Sequence: Synthetic oligonucleotide
uucauuaccaagaaauuuc

SEQ ID NO: 1406437 - RNA, 19 nt, Artificial Sequence
  Description of Artificial Sequence: Synthetic oligonucleotide
uugugauaaaauucaagag

SEQ ID NO: 1406438 - RNA, 19 nt, Artificial Sequence
  Description of Artificial Sequence: Synthetic oligonucleotide
aagaauuuucaucaacacu

SEQ ID NO: 1406439 - RNA, 19 nt, Artificial Sequence
  Description of Artificial Sequence: Synthetic oligonucleotide
uaguauagauuuauaaugu

SEQ ID NO: 1406440 - RNA, 19 nt, Artificial Sequence
  Description of Artificial Sequence: Synthetic oligonucleotide
auaguagaaauccucucgg

SEQ ID NO: 1406441 - RNA, 19 nt, Artificial Sequence
  Description of Artificial Sequence: Synthetic oligonucleotide
ucuugcaacacaaaagggu

SEQ ID NO: 1406442 - RNA, 19 nt, Artificial Sequence
  Description of Artificial Sequence: Synthetic oligonucleotide
agaaaaucccgacugaucu

SEQ ID NO: 1406443 - RNA, 19 nt, Artificial Sequence
  Description of Artificial Sequence: Synthetic oligonucleotide
uuaaugucgagaugaaggc

SEQ ID NO: 1406444 - RNA, 19 nt, Artificial Sequence
  Description of Artificial Sequence: Synthetic oligonucleotide
aaacaaaucaacuguuuaa

SEQ ID NO: 1406445 - RNA, 19 nt, Artificial Sequence
  Description of Artificial Sequence: Synthetic oligonucleotide
uuauaauacaaccaaucua

SEQ ID NO: 1406446 - RNA, 19 nt, Artificial Sequence
  Description of Artificial Sequence: Synthetic oligonucleotide
uauaauguauguuugugau

SEQ ID NO: 1406447 - RNA, 19 nt, Artificial Sequence
  Description of Artificial Sequence: Synthetic oligonucleotide
cauaguagaaauccucucg

SEQ ID NO: 1406448 - RNA, 19 nt, Artificial Sequence
  Description of Artificial Sequence: Synthetic oligonucleotide
ugcuuuauaauacaaccaa

SEQ ID NO: 1406449 - RNA, 19 nt, Artificial Sequence
  Description of Artificial Sequence: Synthetic oligonucleotide
ucuaugagagugcugcuag

SEQ ID NO: 1406450 - RNA, 19 nt, Artificial Sequence
  Description of Artificial Sequence: Synthetic oligonucleotide
ugaucuaaacugaauuuug

SEQ ID NO: 1406451 - RNA, 19 nt, Artificial Sequence
  Description of Artificial Sequence: Synthetic oligonucleotide
cuuagaaugaacuaguaua

SEQ ID NO: 1406452 - RNA, 19 nt, Artificial Sequence
  Description of Artificial Sequence: Synthetic oligonucleotide
uaugauucauccccaaaca

SEQ ID NO: 1406453 - RNA, 19 nt, Artificial Sequence
  Description of Artificial Sequence: Synthetic oligonucleotide
uuagaaaauaugauucauc

SEQ ID NO: 1406454 - RNA, 19 nt, Artificial Sequence
  Description of Artificial Sequence: Synthetic oligonucleotide
aguucuuagaaugaacuag

SEQ ID NO: 1406455 - RNA, 19 nt, Artificial Sequence
  Description of Artificial Sequence: Synthetic oligonucleotide
uggauuacugagaaguucu

SEQ ID NO: 1406456 - RNA, 19 nt, Artificial Sequence
  Description of Artificial Sequence: Synthetic oligonucleotide
uauaaaauccuuccucuuc

SEQ ID NO: 1406457 - RNA, 19 nt, Artificial Sequence
  Description of Artificial Sequence: Synthetic oligonucleotide
uuuuacgcuguaaugacaa

SEQ ID NO: 1406458 - RNA, 19 nt, Artificial Sequence
  Description of Artificial Sequence: Synthetic oligonucleotide
uucaccuuuauuacuggcc

SEQ ID NO: 1406459 - RNA, 19 nt, Artificial Sequence
  Description of Artificial Sequence: Synthetic oligonucleotide
uuauuacuggcccagccug

SEQ ID NO: 1406460 - RNA, 19 nt, Artificial Sequence
  Description of Artificial Sequence: Synthetic oligonucleotide
aaauuguggggcuacucug

SEQ ID NO: 1406461 - RNA, 19 nt, Artificial Sequence
  Description of Artificial Sequence: Synthetic oligonucleotide
aguuugauuccauugagaa

SEQ ID NO: 1406462 - RNA, 19 nt, Artificial Sequence
  Description of Artificial Sequence: Synthetic oligonucleotide
auauggaacagacacuuca

SEQ ID NO: 1406463 - RNA, 19 nt, Artificial Sequence
  Description of Artificial Sequence: Synthetic oligonucleotide
uguuaucauagucauggcu

SEQ ID NO: 1406464 - RNA, 19 nt, Artificial Sequence
  Description of Artificial Sequence: Synthetic oligonucleotide
aagguaauuaaaguaacaa

SEQ ID NO: 1406465 - RNA, 19 nt, Artificial Sequence
  Description of Artificial Sequence: Synthetic oligonucleotide
cauguagauauuuaucuuc

SEQ ID NO: 1406466 - RNA, 19 nt, Artificial Sequence
  Description of Artificial Sequence: Synthetic oligonucleotide
uacuuaaauucugaguuag

SEQ ID NO: 1406467 - RNA, 19 nt, Artificial Sequence
  Description of Artificial Sequence: Synthetic oligonucleotide
uuuauuacuggcccagccu

SEQ ID NO: 1406468 - RNA, 19 nt, Artificial Sequence
  Description of Artificial Sequence: Synthetic oligonucleotide
uugcuuuauaauacaacca

SEQ ID NO: 1406469 - RNA, 19 nt, Artificial Sequence
  Description of Artificial Sequence: Synthetic oligonucleotide
uuaucauagucauggcucc

SEQ ID NO: 1406470 - RNA, 19 nt, Artificial Sequence
  Description of Artificial Sequence: Synthetic oligonucleotide
augauagucagacccauga

SEQ ID NO: 1406471 - RNA, 19 nt, Artificial Sequence
  Description of Artificial Sequence: Synthetic oligonucleotide
auuucagacuaccaauuug

SEQ ID NO: 1406472 - RNA, 19 nt, Artificial Sequence
  Description of Artificial Sequence: Synthetic oligonucleotide
cuuguuaaugucgagauga

SEQ ID NO: 1406473 - RNA, 19 nt, Artificial Sequence
  Description of Artificial Sequence: Synthetic oligonucleotide
uggcacaucuuuuauauaa

SEQ ID NO: 1406474 - RNA, 19 nt, Artificial Sequence
  Description of Artificial Sequence: Synthetic oligonucleotide
ugacuagucauacauuaaa

SEQ ID NO: 1406475 - RNA, 19 nt, Artificial Sequence
  Description of Artificial Sequence: Synthetic oligonucleotide
aaugucgagaugaaggcca

SEQ ID NO: 1406476 - RNA, 19 nt, Artificial Sequence
  Description of Artificial Sequence: Synthetic oligonucleotide
uagucauacauuaaauaua

SEQ ID NO: 1406477 - RNA, 19 nt, Artificial Sequence
  Description of Artificial Sequence: Synthetic oligonucleotide
caaauuucccaccauauga

SEQ ID NO: 1406478 - RNA, 19 nt, Artificial Sequence
  Description of Artificial Sequence: Synthetic oligonucleotide
ugauucauccccaaacaaa

SEQ ID NO: 1406479 - RNA, 19 nt, Artificial Sequence
  Description of Artificial Sequence: Synthetic oligonucleotide
gaugcuggggauaugacac

SEQ ID NO: 1406480 - RNA, 19 nt, Artificial Sequence
  Description of Artificial Sequence: Synthetic oligonucleotide
ucuuagaaugaacuaguau

SEQ ID NO: 1406481 - RNA, 19 nt, Artificial Sequence
  Description of Artificial Sequence: Synthetic oligonucleotide
uuaaagguaugaccgugug

SEQ ID NO: 1406482 - RNA, 19 nt, Artificial Sequence
  Description of Artificial Sequence: Synthetic oligonucleotide
ucuuuuacgcuguaaugac

SEQ ID NO: 1406483 - RNA, 19 nt, Artificial Sequence
  Description of Artificial Sequence: Synthetic oligonucleotide
aauuucccaccauaugaca

SEQ ID NO: 1406484 - RNA, 19 nt, Artificial Sequence
  Description of Artificial Sequence: Synthetic oligonucleotide
uacucuguacagauuuuag

SEQ ID NO: 1406485 - RNA, 19 nt, Artificial Sequence
  Description of Artificial Sequence: Synthetic oligonucleotide
uaaaccguguccuuggaau

SEQ ID NO: 1406486 - RNA, 19 nt, Artificial Sequence
  Description of Artificial Sequence: Synthetic oligonucleotide
agugacuagucauacauua

SEQ ID NO: 1406487 - RNA, 19 nt, Artificial Sequence
  Description of Artificial Sequence: Synthetic oligonucleotide
auuuugauaggccucccga

SEQ ID NO: 1406488 - RNA, 19 nt, Artificial Sequence
  Description of Artificial Sequence: Synthetic oligonucleotide
aauaugauucauccccaaa

SEQ ID NO: 1406489 - RNA, 19 nt, Artificial Sequence
  Description of Artificial Sequence: Synthetic oligonucleotide
uaaaauggcccgguaaacc

SEQ ID NO: 1406490 - RNA, 19 nt, Artificial Sequence
  Description of Artificial Sequence: Synthetic oligonucleotide
ugucuuuuacgcuguaaug

SEQ ID NO: 1406491 - RNA, 19 nt, Artificial Sequence
  Description of Artificial Sequence: Synthetic oligonucleotide
aauaucuccaaaacaacuu

SEQ ID NO: 1406492 - RNA, 19 nt, Artificial Sequence
  Description of Artificial Sequence: Synthetic oligonucleotide
ucgaagaggagcuccuccg

SEQ ID NO: 1406493 - RNA, 19 nt, Artificial Sequence
  Description of Artificial Sequence: Synthetic oligonucleotide
gagcauaccacagaauuug

SEQ ID NO: 1406494 - RNA, 19 nt, Artificial Sequence
  Description of Artificial Sequence: Synthetic oligonucleotide
agguaauuaaaguaacaaa

SEQ ID NO: 1406495 - RNA, 19 nt, Artificial Sequence
  Description of Artificial Sequence: Synthetic oligonucleotide
aagggccuaaaauggcccg

SEQ ID NO: 1406496 - RNA, 19 nt, Artificial Sequence
  Description of Artificial Sequence: Synthetic oligonucleotide
ugcuugaaauucacaaaug

SEQ ID NO: 1406497 - RNA, 19 nt, Artificial Sequence
  Description of Artificial Sequence: Synthetic oligonucleotide
gacaaugcaucuuggcgcc

SEQ ID NO: 1406498 - RNA, 19 nt, Artificial Sequence
  Description of Artificial Sequence: Synthetic oligonucleotide
auuacugagaaguucuauu

SEQ ID NO: 1406499 - RNA, 19 nt, Artificial Sequence
  Description of Artificial Sequence: Synthetic oligonucleotide
ggggauaugacacacuggc

SEQ ID NO: 1406500 - RNA, 19 nt, Artificial Sequence
  Description of Artificial Sequence: Synthetic oligonucleotide
uucaagagcauaccacaga

SEQ ID NO: 1406501 - RNA, 19 nt, Artificial Sequence
  Description of Artificial Sequence: Synthetic oligonucleotide
uuggaaugcuuguuaaugu

SEQ ID NO: 1406502 - RNA, 19 nt, Artificial Sequence
  Description of Artificial Sequence: Synthetic oligonucleotide
aaccguguccuuggaaugc

SEQ ID NO: 1406503 - RNA, 19 nt, Artificial Sequence
  Description of Artificial Sequence: Synthetic oligonucleotide
uccuccgucaccuucgucu

SEQ ID NO: 1406504 - RNA, 19 nt, Artificial Sequence
  Description of Artificial Sequence: Synthetic oligonucleotide
aaauguggagccacaguuc

SEQ ID NO: 1406505 - RNA, 19 nt, Artificial Sequence
  Description of Artificial Sequence: Synthetic oligonucleotide
cuuuauuacuggcccagcc

SEQ ID NO: 1406506 - RNA, 19 nt, Artificial Sequence
  Description of Artificial Sequence: Synthetic oligonucleotide
aaugguggcacaucuuuua

SEQ ID NO: 1406507 - RNA, 19 nt, Artificial Sequence
  Description of Artificial Sequence: Synthetic oligonucleotide
agguaagguaauuaaagua

SEQ ID NO: 1406508 - RNA, 19 nt, Artificial Sequence
  Description of Artificial Sequence: Synthetic oligonucleotide
uuuccaacaugaugcuggg

SEQ ID NO: 1406509 - RNA, 19 nt, Artificial Sequence
  Description of Artificial Sequence: Synthetic oligonucleotide
aaaccguguccuuggaaug

SEQ ID NO: 1406510 - RNA, 19 nt, Artificial Sequence
  Description of Artificial Sequence: Synthetic oligonucleotide
ucagaaacccugagguaag

SEQ ID NO: 1406511 - RNA, 19 nt, Artificial Sequence
  Description of Artificial Sequence: Synthetic oligonucleotide
agaguagcgcugcucacgg

SEQ ID NO: 1406512 - RNA, 19 nt, Artificial Sequence
  Description of Artificial Sequence: Synthetic oligonucleotide
uucauagcuguuaggagau

SEQ ID NO: 1406513 - RNA, 19 nt, Artificial Sequence
  Description of Artificial Sequence: Synthetic oligonucleotide
uguuaauaaaauggauuac

SEQ ID NO: 1406514 - RNA, 19 nt, Artificial Sequence
  Description of Artificial Sequence: Synthetic oligonucleotide
aagggugagauaauuaaaa

SEQ ID NO: 1406515 - RNA, 19 nt, Artificial Sequence
  Description of Artificial Sequence: Synthetic oligonucleotide
uuacgcuguaaugacaaug

SEQ ID NO: 1406516 - RNA, 19 nt, Artificial Sequence
  Description of Artificial Sequence: Synthetic oligonucleotide
ugcuuguuaaugucgagau

SEQ ID NO: 1406517 - RNA, 19 nt, Artificial Sequence
  Description of Artificial Sequence: Synthetic oligonucleotide
uauuacuggcccagccugg

SEQ ID NO: 1406518 - RNA, 19 nt, Artificial Sequence
  Description of Artificial Sequence: Synthetic oligonucleotide
ugcggagaaccaaauuucc

SEQ ID NO: 1406519 - RNA, 19 nt, Artificial Sequence
  Description of Artificial Sequence: Synthetic oligonucleotide
ugauaggccucccgaaaag

SEQ ID NO: 1406520 - RNA, 19 nt, Artificial Sequence
  Description of Artificial Sequence: Synthetic oligonucleotide
aaguucuuagaaugaacua

SEQ ID NO: 1406521 - RNA, 19 nt, Artificial Sequence
  Description of Artificial Sequence: Synthetic oligonucleotide
uuugauaggccucccgaaa

SEQ ID NO: 1406522 - RNA, 19 nt, Artificial Sequence
  Description of Artificial Sequence: Synthetic oligonucleotide
uagcuguuaggagaugugg

SEQ ID NO: 1406523 - RNA, 19 nt, Artificial Sequence
  Description of Artificial Sequence: Synthetic oligonucleotide
uaugagagugcugcuaggc

SEQ ID NO: 1406524 - RNA, 19 nt, Artificial Sequence
  Description of Artificial Sequence: Synthetic oligonucleotide
ugaugcuggggauaugaca

SEQ ID NO: 1406525 - RNA, 19 nt, Artificial Sequence
  Description of Artificial Sequence: Synthetic oligonucleotide
auggauuacugagaaguuc

SEQ ID NO: 1406526 - RNA, 19 nt, Artificial Sequence
  Description of Artificial Sequence: Synthetic oligonucleotide
guagugucuaucugcuagg

SEQ ID NO: 1406527 - RNA, 19 nt, Artificial Sequence
  Description of Artificial Sequence: Synthetic oligonucleotide
uuuccuagcugaaaugauu

SEQ ID NO: 1406528 - RNA, 19 nt, Artificial Sequence
  Description of Artificial Sequence: Synthetic oligonucleotide
uguuaaugucgagaugaag

SEQ ID NO: 1406529 - RNA, 19 nt, Artificial Sequence
  Description of Artificial Sequence: Synthetic oligonucleotide
uccuagcugaaaugauugg

SEQ ID NO: 1406530 - RNA, 19 nt, Artificial Sequence
  Description of Artificial Sequence: Synthetic oligonucleotide
cuagucauacauuaaauau

SEQ ID NO: 1406531 - RNA, 19 nt, Artificial Sequence
  Description of Artificial Sequence: Synthetic oligonucleotide
agugcugcuaggcuuaaaa

SEQ ID NO: 1406532 - RNA, 19 nt, Artificial Sequence
  Description of Artificial Sequence: Synthetic oligonucleotide
gaaaaucccgacugaucug

SEQ ID NO: 1406533 - RNA, 19 nt, Artificial Sequence
  Description of Artificial Sequence: Synthetic oligonucleotide
accauaugacaucugccug

SEQ ID NO: 1406534 - RNA, 19 nt, Artificial Sequence
  Description of Artificial Sequence: Synthetic oligonucleotide
ugcagauagccauuucaga

SEQ ID NO: 1406535 - RNA, 19 nt, Artificial Sequence
  Description of Artificial Sequence: Synthetic oligonucleotide
ugauggagaaaaucccgac

SEQ ID NO: 1406536 - RNA, 19 nt, Artificial Sequence
  Description of Artificial Sequence: Synthetic oligonucleotide
ucugccugaaaacacuguu

SEQ ID NO: 1406537 - RNA, 19 nt, Artificial Sequence
  Description of Artificial Sequence: Synthetic oligonucleotide
ucuaucugcuagguagggg

SEQ ID NO: 1406538 - RNA, 19 nt, Artificial Sequence
  Description of Artificial Sequence: Synthetic oligonucleotide
aacuguuaauaaaauggau

SEQ ID NO: 1406539 - RNA, 19 nt, Artificial Sequence
  Description of Artificial Sequence: Synthetic oligonucleotide
uguagauauuuaucuuccu

SEQ ID NO: 1406540 - RNA, 19 nt, Artificial Sequence
  Description of Artificial Sequence: Synthetic oligonucleotide
uucagacuaccaauuugga

SEQ ID NO: 1406541 - RNA, 19 nt, Artificial Sequence
  Description of Artificial Sequence: Synthetic oligonucleotide
uuuugauaggccucccgaa

SEQ ID NO: 1406542 - RNA, 19 nt, Artificial Sequence
  Description of Artificial Sequence: Synthetic oligonucleotide
gcagauagccauuucagac

SEQ ID NO: 1406543 - RNA, 19 nt, Artificial Sequence
  Description of Artificial Sequence: Synthetic oligonucleotide
ugauaaaauucaagagcau

SEQ ID NO: 1406544 - RNA, 19 nt, Artificial Sequence
  Description of Artificial Sequence: Synthetic oligonucleotide
uuuggauguuuucuacuau

SEQ ID NO: 1406545 - RNA, 19 nt, Artificial Sequence
  Description of Artificial Sequence: Synthetic oligonucleotide
guuuucuacuauauacacc

SEQ ID NO: 1406546 - RNA, 19 nt, Artificial Sequence
  Description of Artificial Sequence: Synthetic oligonucleotide
ugauggagucauguuaccc

SEQ ID NO: 1406547 - RNA, 19 nt, Artificial Sequence
  Description of Artificial Sequence: Synthetic oligonucleotide
gucuuuuacgcuguaauga

SEQ ID NO: 1406548 - RNA, 19 nt, Artificial Sequence
  Description of Artificial Sequence: Synthetic oligonucleotide
ucagacuaccaauuuggau

SEQ ID NO: 1406549 - RNA, 19 nt, Artificial Sequence
  Description of Artificial Sequence: Synthetic oligonucleotide
uaaugucgagaugaaggcc

SEQ ID NO: 1406550 - RNA, 19 nt, Artificial Sequence
  Description of Artificial Sequence: Synthetic oligonucleotide
gguaagguaauuaaaguaa

SEQ ID NO: 1406551 - RNA, 19 nt, Artificial Sequence
  Description of Artificial Sequence: Synthetic oligonucleotide
gguggaacagcucgaagag

SEQ ID NO: 1406552 - RNA, 19 nt, Artificial Sequence
  Description of Artificial Sequence: Synthetic oligonucleotide
auggaacagacacuucaug

SEQ ID NO: 1406553 - RNA, 19 nt, Artificial Sequence
  Description of Artificial Sequence: Synthetic oligonucleotide
agacacuucaugcuugaaa

SEQ ID NO: 1406554 - RNA, 19 nt, Artificial Sequence
  Description of Artificial Sequence: Synthetic oligonucleotide
ucccgaaaaguuugauucc

SEQ ID NO: 1406555 - RNA, 19 nt, Artificial Sequence
  Description of Artificial Sequence: Synthetic oligonucleotide
uuacccacagcccuuucau

SEQ ID NO: 1406556 - RNA, 19 nt, Artificial Sequence
  Description of Artificial Sequence: Synthetic oligonucleotide
aacaugaugcuggggauau

SEQ ID NO: 1406557 - RNA, 19 nt, Artificial Sequence
  Description of Artificial Sequence: Synthetic oligonucleotide
aaagggugagauaauuaaa

SEQ ID NO: 1406558 - RNA, 19 nt, Artificial Sequence
  Description of Artificial Sequence: Synthetic oligonucleotide
augcggagaaccaaauuuc

SEQ ID NO: 1406559 - RNA, 19 nt, Artificial Sequence
  Description of Artificial Sequence: Synthetic oligonucleotide
agggugagauaauuaaaau

SEQ ID NO: 1406560 - RNA, 19 nt, Artificial Sequence
  Description of Artificial Sequence: Synthetic oligonucleotide
acauguagauauuuaucuu

SEQ ID NO: 1406561 - RNA, 19 nt, Artificial Sequence
  Description of Artificial Sequence: Synthetic oligonucleotide
uguaaugacaaugcaucuu

SEQ ID NO: 1406562 - RNA, 19 nt, Artificial Sequence
  Description of Artificial Sequence: Synthetic oligonucleotide
ugagagugcugcuaggcuu

SEQ ID NO: 1406563 - RNA, 19 nt, Artificial Sequence
  Description of Artificial Sequence: Synthetic oligonucleotide
uucuuagaaugaacuagua

SEQ ID NO: 1406564 - RNA, 19 nt, Artificial Sequence
  Description of Artificial Sequence: Synthetic oligonucleotide
uagaaugaacuaguauaga

SEQ ID NO: 1406565 - RNA, 19 nt, Artificial Sequence
  Description of Artificial Sequence: Synthetic oligonucleotide
uaucugcuagguaggggug

SEQ ID NO: 1406566 - RNA, 19 nt, Artificial Sequence
  Description of Artificial Sequence: Synthetic oligonucleotide
auucacaaaugcaaacugu

SEQ ID NO: 1406567 - RNA, 19 nt, Artificial Sequence
  Description of Artificial Sequence: Synthetic oligonucleotide
caugaucagaguagcgcug

SEQ ID NO: 1406568 - RNA, 19 nt, Artificial Sequence
  Description of Artificial Sequence: Synthetic oligonucleotide
uagcugaaaugauuggaau

SEQ ID NO: 1406569 - RNA, 19 nt, Artificial Sequence
  Description of Artificial Sequence: Synthetic oligonucleotide
auguauguuugugauaaaa

SEQ ID NO: 1406570 - RNA, 19 nt, Artificial Sequence
  Description of Artificial Sequence: Synthetic oligonucleotide
gacaucugccugaaaacac

SEQ ID NO: 1406571 - RNA, 19 nt, Artificial Sequence
  Description of Artificial Sequence: Synthetic oligonucleotide
auucaagagcauaccacag

SEQ ID NO: 1406572 - RNA, 19 nt, Artificial Sequence
  Description of Artificial Sequence: Synthetic oligonucleotide
accuuuauuacuggcccag

SEQ ID NO: 1406573 - RNA, 19 nt, Artificial Sequence
  Description of Artificial Sequence: Synthetic oligonucleotide
auaauguauguuugugaua

SEQ ID NO: 1406574 - RNA, 19 nt, Artificial Sequence
  Description of Artificial Sequence: Synthetic oligonucleotide
gcuguuaggagauguggag

SEQ ID NO: 1406575 - RNA, 19 nt, Artificial Sequence
  Description of Artificial Sequence: Synthetic oligonucleotide
acgaacagagugcggucgg

SEQ ID NO: 1406576 - RNA, 19 nt, Artificial Sequence
  Description of Artificial Sequence: Synthetic oligonucleotide
aaugauagucagacccaug

SEQ ID NO: 1406577 - RNA, 19 nt, Artificial Sequence
  Description of Artificial Sequence: Synthetic oligonucleotide
uccuuggaaugcuuguuaa

SEQ ID NO: 1406578 - RNA, 19 nt, Artificial Sequence
  Description of Artificial Sequence: Synthetic oligonucleotide
cuaugagagugcugcuagg

SEQ ID NO: 1406579 - RNA, 19 nt, Artificial Sequence
  Description of Artificial Sequence: Synthetic oligonucleotide
ugguuaaagguaugaccgu

SEQ ID NO: 1406580 - RNA, 19 nt, Artificial Sequence
  Description of Artificial Sequence: Synthetic oligonucleotide
uuguuaaugucgagaugaa

SEQ ID NO: 1406581 - RNA, 19 nt, Artificial Sequence
  Description of Artificial Sequence: Synthetic oligonucleotide
uuuggggauuuucaccuuu

SEQ ID NO: 1406582 - RNA, 19 nt, Artificial Sequence
  Description of Artificial Sequence: Synthetic oligonucleotide
gaucugcaugcggagaacc

SEQ ID NO: 1406583 - RNA, 19 nt, Artificial Sequence
  Description of Artificial Sequence: Synthetic oligonucleotide
cgugugguugaacugaugg

SEQ ID NO: 1406584 - RNA, 19 nt, Artificial Sequence
  Description of Artificial Sequence: Synthetic oligonucleotide
gagaggcgugacuacuucc

SEQ ID NO: 1406585 - RNA, 19 nt, Artificial Sequence
  Description of Artificial Sequence: Synthetic oligonucleotide
caucugccugaaaacacug

SEQ ID NO: 1406586 - RNA, 19 nt, Artificial Sequence
  Description of Artificial Sequence: Synthetic oligonucleotide
aauguauguuugugauaaa

SEQ ID NO: 1406587 - RNA, 19 nt, Artificial Sequence
  Description of Artificial Sequence: Synthetic oligonucleotide
cuguaaugauagucagacc

SEQ ID NO: 1406588 - RNA, 19 nt, Artificial Sequence
  Description of Artificial Sequence: Synthetic oligonucleotide
gaagagaaggaccgcugga

SEQ ID NO: 1406589 - RNA, 19 nt, Artificial Sequence
  Description of Artificial Sequence: Synthetic oligonucleotide
auuccauugagaagauuca

SEQ ID NO: 1406590 - RNA, 19 nt, Artificial Sequence
  Description of Artificial Sequence: Synthetic oligonucleotide
agguaugaccgugugguug

SEQ ID NO: 1406591 - RNA, 19 nt, Artificial Sequence
  Description of Artificial Sequence: Synthetic oligonucleotide
ugagaggcgugacuacuuc

SEQ ID NO: 1406592 - RNA, 19 nt, Artificial Sequence
  Description of Artificial Sequence: Synthetic oligonucleotide
cugccugaaaacacuguuc

SEQ ID NO: 1406593 - RNA, 19 nt, Artificial Sequence
  Description of Artificial Sequence: Synthetic oligonucleotide
cuaucugcuagguaggggu

SEQ ID NO: 1406594 - RNA, 19 nt, Artificial Sequence
  Description of Artificial Sequence: Synthetic oligonucleotide
aauggauuacugagaaguu

SEQ ID NO: 1406595 - RNA, 19 nt, Artificial Sequence
  Description of Artificial Sequence: Synthetic oligonucleotide
gagaaaaucccgacugauc

SEQ ID NO: 1406596 - RNA, 19 nt, Artificial Sequence
  Description of Artificial Sequence: Synthetic oligonucleotide
guaaugauagucagaccca

SEQ ID NO: 1406597 - RNA, 19 nt, Artificial Sequence
  Description of Artificial Sequence: Synthetic oligonucleotide
ugaccgugugguugaacug

SEQ ID NO: 1406598 - RNA, 19 nt, Artificial Sequence
  Description of Artificial Sequence: Synthetic oligonucleotide
aaugcaucuuggcgccacu

SEQ ID NO: 1406599 - RNA, 19 nt, Artificial Sequence
  Description of Artificial Sequence: Synthetic oligonucleotide
ggauaugacacacuggcgu

SEQ ID NO: 1406600 - RNA, 19 nt, Artificial Sequence
  Description of Artificial Sequence: Synthetic oligonucleotide
caguucucuaugagagugc

SEQ ID NO: 1406601 - RNA, 19 nt, Artificial Sequence
  Description of Artificial Sequence: Synthetic oligonucleotide
accuucgucuccagguugc

SEQ ID NO: 1406602 - RNA, 19 nt, Artificial Sequence
  Description of Artificial Sequence: Synthetic oligonucleotide
cuguuaucauagucauggc

SEQ ID NO: 1406603 - RNA, 19 nt, Artificial Sequence
  Description of Artificial Sequence: Synthetic oligonucleotide
cacgaacagagugcggucg

SEQ ID NO: 1406604 - RNA, 19 nt, Artificial Sequence
  Description of Artificial Sequence: Synthetic oligonucleotide
aauggcccgguaaaccgug

SEQ ID NO: 1406605 - RNA, 19 nt, Artificial Sequence
  Description of Artificial Sequence: Synthetic oligonucleotide
uuucuacuauauacaccaa

SEQ ID NO: 1406606 - RNA, 19 nt, Artificial Sequence
  Description of Artificial Sequence: Synthetic oligonucleotide
cuuuuacgcuguaaugaca

SEQ ID NO: 1406607 - RNA, 19 nt, Artificial Sequence
  Description of Artificial Sequence: Synthetic oligonucleotide
acaaaagggugagauaauu

SEQ ID NO: 1406608 - RNA, 19 nt, Artificial Sequence
  Description of Artificial Sequence: Synthetic oligonucleotide
aaucccgacugaucugcau

SEQ ID NO: 1406609 - RNA, 19 nt, Artificial Sequence
  Description of Artificial Sequence: Synthetic oligonucleotide
gguuaaagguaugaccgug

SEQ ID NO: 1406610 - RNA, 19 nt, Artificial Sequence
  Description of Artificial Sequence: Synthetic oligonucleotide
uaggccucccgaaaaguuu

SEQ ID NO: 1406611 - RNA, 19 nt, Artificial Sequence
  Description of Artificial Sequence: Synthetic oligonucleotide
ugcuugccgcugauaaucu

SEQ ID NO: 1406612 - RNA, 19 nt, Artificial Sequence
  Description of Artificial Sequence: Synthetic oligonucleotide
aaauggcccgguaaaccgu

SEQ ID NO: 1406613 - RNA, 19 nt, Artificial Sequence
  Description of Artificial Sequence: Synthetic oligonucleotide
cugagguaagguaauuaaa

SEQ ID NO: 1406614 - RNA, 19 nt, Artificial Sequence
  Description of Artificial Sequence: Synthetic oligonucleotide
ucugugcugauggagucau

SEQ ID NO: 1406615 - RNA, 19 nt, Artificial Sequence
  Description of Artificial Sequence: Synthetic oligonucleotide
uuccauugagaagauucau

SEQ ID NO: 1406616 - RNA, 19 nt, Artificial Sequence
  Description of Artificial Sequence: Synthetic oligonucleotide
cauauggaacagacacuuc

SEQ ID NO: 1406617 - RNA, 19 nt, Artificial Sequence
  Description of Artificial Sequence: Synthetic oligonucleotide
ugcaugcggagaaccaaau

SEQ ID NO: 1406618 - RNA, 19 nt, Artificial Sequence
  Description of Artificial Sequence: Synthetic oligonucleotide
cugaguuagaaaauaugau

SEQ ID NO: 1406619 - RNA, 19 nt, Artificial Sequence
  Description of Artificial Sequence: Synthetic oligonucleotide
caugcggagaaccaaauuu

SEQ ID NO: 1406620 - RNA, 19 nt, Artificial Sequence
  Description of Artificial Sequence: Synthetic oligonucleotide
gaagacugguuaaagguau

SEQ ID NO: 1406621 - RNA, 19 nt, Artificial Sequence
  Description of Artificial Sequence: Synthetic oligonucleotide
gucuaucugcuagguaggg

SEQ ID NO: 1406622 - RNA, 19 nt, Artificial Sequence
  Description of Artificial Sequence: Synthetic oligonucleotide
caccauaugacaucugccu

SEQ ID NO: 1406623 - RNA, 19 nt, Artificial Sequence
  Description of Artificial Sequence: Synthetic oligonucleotide
augaugcuggggauaugac

SEQ ID NO: 1406624 - RNA, 19 nt, Artificial Sequence
  Description of Artificial Sequence: Synthetic oligonucleotide
uuuacgcuguaaugacaau

SEQ ID NO: 1406625 - RNA, 19 nt, Artificial Sequence
  Description of Artificial Sequence: Synthetic oligonucleotide
gguaugaccgugugguuga

SEQ ID NO: 1406626 - RNA, 19 nt, Artificial Sequence
  Description of Artificial Sequence: Synthetic oligonucleotide
aggcgugacuacuuccuga

SEQ ID NO: 1406627 - RNA, 19 nt, Artificial Sequence
  Description of Artificial Sequence: Synthetic oligonucleotide
agcuguuaggagaugugga

SEQ ID NO: 1406628 - RNA, 19 nt, Artificial Sequence
  Description of Artificial Sequence: Synthetic oligonucleotide
ucugucuuuuacgcuguaa

SEQ ID NO: 1406629 - RNA, 19 nt, Artificial Sequence
  Description of Artificial Sequence: Synthetic oligonucleotide
gaggcgugacuacuuccug

SEQ ID NO: 1406630 - RNA, 19 nt, Artificial Sequence
  Description of Artificial Sequence: Synthetic oligonucleotide
aucuuccugagugacuagu

SEQ ID NO: 1406631 - RNA, 19 nt, Artificial Sequence
  Description of Artificial Sequence: Synthetic oligonucleotide
uagugucuaucugcuaggu

SEQ ID NO: 1406632 - RNA, 19 nt, Artificial Sequence
  Description of Artificial Sequence: Synthetic oligonucleotide
gaccgcuggaccaucugug

SEQ ID NO: 1406633 - RNA, 19 nt, Artificial Sequence
  Description of Artificial Sequence: Synthetic oligonucleotide
agggccuaaaauggcccgg

SEQ ID NO: 1406634 - RNA, 19 nt, Artificial Sequence
  Description of Artificial Sequence: Synthetic oligonucleotide
ggaacagacacuucaugcu

SEQ ID NO: 1406635 - RNA, 19 nt, Artificial Sequence
  Description of Artificial Sequence: Synthetic oligonucleotide
ccuuucauagcuguuagga

SEQ ID NO: 1406636 - RNA, 19 nt, Artificial Sequence
  Description of Artificial Sequence: Synthetic oligonucleotide
cuuccugaucuaaacugaa

SEQ ID NO: 1406637 - RNA, 19 nt, Artificial Sequence
  Description of Artificial Sequence: Synthetic oligonucleotide
accucuacuacugucccuu

SEQ ID NO: 1406638 - RNA, 19 nt, Artificial Sequence
  Description of Artificial Sequence: Synthetic oligonucleotide
cuuaaauuuccaacaugau

SEQ ID NO: 1406639 - RNA, 19 nt, Artificial Sequence
  Description of Artificial Sequence: Synthetic oligonucleotide
acacuucaugcuugaaauu

SEQ ID NO: 1406640 - RNA, 19 nt, Artificial Sequence
  Description of Artificial Sequence: Synthetic oligonucleotide
agagcauaccacagaauuu

SEQ ID NO: 1406641 - RNA, 19 nt, Artificial Sequence
  Description of Artificial Sequence: Synthetic oligonucleotide
acugaucugcaugcggaga

SEQ ID NO: 1406642 - RNA, 19 nt, Artificial Sequence
  Description of Artificial Sequence: Synthetic oligonucleotide
uccugagaggcgugacuac

SEQ ID NO: 1406643 - RNA, 19 nt, Artificial Sequence
  Description of Artificial Sequence: Synthetic oligonucleotide
cuagguaggggugagaauu

SEQ ID NO: 1406644 - RNA, 19 nt, Artificial Sequence
  Description of Artificial Sequence: Synthetic oligonucleotide
caaaacaaaucaacuguuu

SEQ ID NO: 1406645 - RNA, 19 nt, Artificial Sequence
  Description of Artificial Sequence: Synthetic oligonucleotide
cagacccaugaucagagua

SEQ ID NO: 1406646 - RNA, 19 nt, Artificial Sequence
  Description of Artificial Sequence: Synthetic oligonucleotide
aggccucccgaaaaguuug

SEQ ID NO: 1406647 - RNA, 19 nt, Artificial Sequence
  Description of Artificial Sequence: Synthetic oligonucleotide
guggggcuacucuguacag

SEQ ID NO: 1406648 - RNA, 19 nt, Artificial Sequence
  Description of Artificial Sequence: Synthetic oligonucleotide
guaaaccguguccuuggaa

SEQ ID NO: 1406649 - RNA, 19 nt, Artificial Sequence
  Description of Artificial Sequence: Synthetic oligonucleotide
gcuuguuaaugucgagaug

SEQ ID NO: 1406650 - RNA, 19 nt, Artificial Sequence
  Description of Artificial Sequence: Synthetic oligonucleotide
gauuacugagaaguucuau

SEQ ID NO: 1406651 - RNA, 19 nt, Artificial Sequence
  Description of Artificial Sequence: Synthetic oligonucleotide
caccuucgucuccagguug

SEQ ID NO: 1406652 - RNA, 19 nt, Artificial Sequence
  Description of Artificial Sequence: Synthetic oligonucleotide
guaggggugagaauucugu

SEQ ID NO: 1406653 - RNA, 19 nt, Artificial Sequence
  Description of Artificial Sequence: Synthetic oligonucleotide
acccaugaucagaguagcg

SEQ ID NO: 1406654 - RNA, 19 nt, Artificial Sequence
  Description of Artificial Sequence: Synthetic oligonucleotide
gagcuggaagacugguuaa

SEQ ID NO: 1406655 - RNA, 19 nt, Artificial Sequence
  Description of Artificial Sequence: Synthetic oligonucleotide
cuguaaugacaaugcaucu

SEQ ID NO: 1406656 - RNA, 19 nt, Artificial Sequence
  Description of Artificial Sequence: Synthetic oligonucleotide
guuaaagguaugaccgugu

SEQ ID NO: 1406657 - RNA, 19 nt, Artificial Sequence
  Description of Artificial Sequence: Synthetic oligonucleotide
ccugagguaagguaauuaa

SEQ ID NO: 1406658 - RNA, 19 nt, Artificial Sequence
  Description of Artificial Sequence: Synthetic oligonucleotide
gcugcucacggcuguagug

SEQ ID NO: 1406659 - RNA, 19 nt, Artificial Sequence
  Description of Artificial Sequence: Synthetic oligonucleotide
aucugcuagguagggguga

SEQ ID NO: 1406660 - RNA, 19 nt, Artificial Sequence
  Description of Artificial Sequence: Synthetic oligonucleotide
gagaagauucauggcauau

SEQ ID NO: 1406661 - RNA, 19 nt, Artificial Sequence
  Description of Artificial Sequence: Synthetic oligonucleotide
aaaucccgacugaucugca

SEQ ID NO: 1406662 - RNA, 19 nt, Artificial Sequence
  Description of Artificial Sequence: Synthetic oligonucleotide
cuucgucuccagguugccc

SEQ ID NO: 1406663 - RNA, 19 nt, Artificial Sequence
  Description of Artificial Sequence: Synthetic oligonucleotide
ccauaugacaucugccuga

SEQ ID NO: 1406664 - RNA, 19 nt, Artificial Sequence
  Description of Artificial Sequence: Synthetic oligonucleotide
cacuggcguccugagaggc

SEQ ID NO: 1406665 - RNA, 19 nt, Artificial Sequence
  Description of Artificial Sequence: Synthetic oligonucleotide
uaugaccgugugguugaac

SEQ ID NO: 1406666 - RNA, 19 nt, Artificial Sequence
  Description of Artificial Sequence: Synthetic oligonucleotide
cauagcuguuaggagaugu

SEQ ID NO: 1406667 - RNA, 19 nt, Artificial Sequence
  Description of Artificial Sequence: Synthetic oligonucleotide
agcauaccacagaauuugu

SEQ ID NO: 1406668 - RNA, 19 nt, Artificial Sequence
  Description of Artificial Sequence: Synthetic oligonucleotide
gauagccauuucagacuac

SEQ ID NO: 1406669 - RNA, 19 nt, Artificial Sequence
  Description of Artificial Sequence: Synthetic oligonucleotide
aggaccgcuggaccaucug

SEQ ID NO: 1406670 - RNA, 19 nt, Artificial Sequence
  Description of Artificial Sequence: Synthetic oligonucleotide
ggcccgguaaaccgugucc

SEQ ID NO: 1406671 - RNA, 19 nt, Artificial Sequence
  Description of Artificial Sequence: Synthetic oligonucleotide
ucccaccauaugacaucug

SEQ ID NO: 1406672 - RNA, 19 nt, Artificial Sequence
  Description of Artificial Sequence: Synthetic oligonucleotide
auaggccucccgaaaaguu

SEQ ID NO: 1406673 - RNA, 19 nt, Artificial Sequence
  Description of Artificial Sequence: Synthetic oligonucleotide
caccuuuauuacuggccca

SEQ ID NO: 1406674 - RNA, 19 nt, Artificial Sequence
  Description of Artificial Sequence: Synthetic oligonucleotide
uggcccgguaaaccguguc

SEQ ID NO: 1406675 - RNA, 19 nt, Artificial Sequence
  Description of Artificial Sequence: Synthetic oligonucleotide
ggcuacucuguacagauuu

SEQ ID NO: 1406676 - RNA, 19 nt, Artificial Sequence
  Description of Artificial Sequence: Synthetic oligonucleotide
cauaugacaucugccugaa

SEQ ID NO: 1406677 - RNA, 19 nt, Artificial Sequence
  Description of Artificial Sequence: Synthetic oligonucleotide
ccgacugaucugcaugcgg

SEQ ID NO: 1406678 - RNA, 19 nt, Artificial Sequence
  Description of Artificial Sequence: Synthetic oligonucleotide
gugacuagucauacauuaa

SEQ ID NO: 1406679 - RNA, 19 nt, Artificial Sequence
  Description of Artificial Sequence: Synthetic oligonucleotide
cugcaugcggagaaccaaa

SEQ ID NO: 1406680 - RNA, 19 nt, Artificial Sequence
  Description of Artificial Sequence: Synthetic oligonucleotide
ccaauuuggauguuuucua

SEQ ID NO: 1406681 - RNA, 19 nt, Artificial Sequence
  Description of Artificial Sequence: Synthetic oligonucleotide
augaacuaguauagauuua

SEQ ID NO: 1406682 - RNA, 19 nt, Artificial Sequence
  Description of Artificial Sequence: Synthetic oligonucleotide
gcggagaaccaaauuuccc

SEQ ID NO: 1406683 - RNA, 19 nt, Artificial Sequence
  Description of Artificial Sequence: Synthetic oligonucleotide
gccuaaaauggcccgguaa

SEQ ID NO: 1406684 - RNA, 19 nt, Artificial Sequence
  Description of Artificial Sequence: Synthetic oligonucleotide
uucugucuuuuacgcugua

SEQ ID NO: 1406685 - RNA, 19 nt, Artificial Sequence
  Description of Artificial Sequence: Synthetic oligonucleotide
uguggagguagggcuuaaa

SEQ ID NO: 1406686 - RNA, 19 nt, Artificial Sequence
  Description of Artificial Sequence: Synthetic oligonucleotide
ccuagcugaaaugauugga

SEQ ID NO: 1406687 - RNA, 19 nt, Artificial Sequence
  Description of Artificial Sequence: Synthetic oligonucleotide
agauguggagguagggcuu

SEQ ID NO: 1406688 - RNA, 19 nt, Artificial Sequence
  Description of Artificial Sequence: Synthetic oligonucleotide
cccuuucauagcuguuagg

SEQ ID NO: 1406689 - RNA, 19 nt, Artificial Sequence
  Description of Artificial Sequence: Synthetic oligonucleotide
cacggcuguagugucuauc

SEQ ID NO: 1406690 - RNA, 19 nt, Artificial Sequence
  Description of Artificial Sequence: Synthetic oligonucleotide
augacacacuggcguccug

SEQ ID NO: 1406691 - RNA, 19 nt, Artificial Sequence
  Description of Artificial Sequence: Synthetic oligonucleotide
cucuaugagagugcugcua

SEQ ID NO: 1406692 - RNA, 19 nt, Artificial Sequence
  Description of Artificial Sequence: Synthetic oligonucleotide
gugagauaauuaaaauauu

SEQ ID NO: 1406693 - RNA, 19 nt, Artificial Sequence
  Description of Artificial Sequence: Synthetic oligonucleotide
gguaaaccguguccuugga

SEQ ID NO: 1406694 - RNA, 19 nt, Artificial Sequence
  Description of Artificial Sequence: Synthetic oligonucleotide
ggggcuacucuguacagau

SEQ ID NO: 1406695 - RNA, 19 nt, Artificial Sequence
  Description of Artificial Sequence: Synthetic oligonucleotide
cuacuacugucccuucugu

SEQ ID NO: 1406696 - RNA, 19 nt, Artificial Sequence
  Description of Artificial Sequence: Synthetic oligonucleotide
accaaucuauacaguucau

SEQ ID NO: 1406697 - RNA, 19 nt, Artificial Sequence
  Description of Artificial Sequence: Synthetic oligonucleotide
ccaugaucagaguagcgcu

SEQ ID NO: 1406698 - RNA, 19 nt, Artificial Sequence
  Description of Artificial Sequence: Synthetic oligonucleotide
ggggugagaauucugucuu

SEQ ID NO: 1406699 - RNA, 19 nt, Artificial Sequence
  Description of Artificial Sequence: Synthetic oligonucleotide
acaugaugcuggggauaug

SEQ ID NO: 1406700 - RNA, 19 nt, Artificial Sequence
  Description of Artificial Sequence: Synthetic oligonucleotide
guggcacaucuuuuauaua

SEQ ID NO: 1406701 - RNA, 19 nt, Artificial Sequence
  Description of Artificial Sequence: Synthetic oligonucleotide
gcuuuauaauacaaccaau

SEQ ID NO: 1406702 - RNA, 19 nt, Artificial Sequence
  Description of Artificial Sequence: Synthetic oligonucleotide
ccuuuauuacuggcccagc

SEQ ID NO: 1406703 - RNA, 19 nt, Artificial Sequence
  Description of Artificial Sequence: Synthetic oligonucleotide
cacaaaagggugagauaau

SEQ ID NO: 1406704 - RNA, 19 nt, Artificial Sequence
  Description of Artificial Sequence: Synthetic oligonucleotide
cucuacuacugucccuucu

SEQ ID NO: 1406705 - RNA, 19 nt, Artificial Sequence
  Description of Artificial Sequence: Synthetic oligonucleotide
augucgagaugaaggccau

SEQ ID NO: 1406706 - RNA, 19 nt, Artificial Sequence
  Description of Artificial Sequence: Synthetic oligonucleotide
cccgaaaaguuugauucca

SEQ ID NO: 1406707 - RNA, 19 nt, Artificial Sequence
  Description of Artificial Sequence: Synthetic oligonucleotide
acaaugcaucuuggcgcca

SEQ ID NO: 1406708 - RNA, 19 nt, Artificial Sequence
  Description of Artificial Sequence: Synthetic oligonucleotide
gggcuuaaauuuccaacau

SEQ ID NO: 1406709 - RNA, 19 nt, Artificial Sequence
  Description of Artificial Sequence: Synthetic oligonucleotide
ccgguaaaccguguccuug

SEQ ID NO: 1406710 - RNA, 19 nt, Artificial Sequence
  Description of Artificial Sequence: Synthetic oligonucleotide
ccacagaauuuguacuuaa

SEQ ID NO: 1406711 - RNA, 19 nt, Artificial Sequence
  Description of Artificial Sequence: Synthetic oligonucleotide
ucacggcuguagugucuau

SEQ ID NO: 1406712 - RNA, 19 nt, Artificial Sequence
  Description of Artificial Sequence: Synthetic oligonucleotide
gagugacuagucauacauu

SEQ ID NO: 1406713 - RNA, 19 nt, Artificial Sequence
  Description of Artificial Sequence: Synthetic oligonucleotide
ccacgaacagagugcgguc

SEQ ID NO: 1406714 - RNA, 19 nt, Artificial Sequence
  Description of Artificial Sequence: Synthetic oligonucleotide
ccuccgucaccuucgucuc

SEQ ID NO: 1406715 - RNA, 19 nt, Artificial Sequence
  Description of Artificial Sequence: Synthetic oligonucleotide
ugucgagaugaaggccauu

SEQ ID NO: 1406716 - RNA, 19 nt, Artificial Sequence
  Description of Artificial Sequence: Synthetic oligonucleotide
cuguagugucuaucugcua

SEQ ID NO: 1406717 - RNA, 19 nt, Artificial Sequence
  Description of Artificial Sequence: Synthetic oligonucleotide
ggcgugacuacuuccugau

SEQ ID NO: 1406718 - RNA, 19 nt, Artificial Sequence
  Description of Artificial Sequence: Synthetic oligonucleotide
gcauaccacagaauuugua

SEQ ID NO: 1406719 - RNA, 19 nt, Artificial Sequence
  Description of Artificial Sequence: Synthetic oligonucleotide
cugagaggcgugacuacuu

SEQ ID NO: 1406720 - RNA, 19 nt, Artificial Sequence
  Description of Artificial Sequence: Synthetic oligonucleotide
ggaccgcuggaccaucugu

SEQ ID NO: 1406721 - RNA, 19 nt, Artificial Sequence
  Description of Artificial Sequence: Synthetic oligonucleotide
acccugagguaagguaauu

SEQ ID NO: 1406722 - RNA, 19 nt, Artificial Sequence
  Description of Artificial Sequence: Synthetic oligonucleotide
cccgacugaucugcaugcg

SEQ ID NO: 1406723 - RNA, 19 nt, Artificial Sequence
  Description of Artificial Sequence: Synthetic oligonucleotide
ccgugugguugaacugaug

SEQ ID NO: 1406724 - RNA, 19 nt, Artificial Sequence
  Description of Artificial Sequence: Synthetic oligonucleotide
gcgugacuacuuccugauc

SEQ ID NO: 1406725 - RNA, 19 nt, Artificial Sequence
  Description of Artificial Sequence: Synthetic oligonucleotide
cgcuguaaugacaaugcau

SEQ ID NO: 1406726 - RNA, 19 nt, Artificial Sequence
  Description of Artificial Sequence: Synthetic oligonucleotide
gagugcugcuaggcuuaaa

SEQ ID NO: 1406727 - RNA, 19 nt, Artificial Sequence
  Description of Artificial Sequence: Synthetic oligonucleotide
ccaacaugaugcuggggau

SEQ ID NO: 1406728 - RNA, 19 nt, Artificial Sequence
  Description of Artificial Sequence: Synthetic oligonucleotide
guaugaccgugugguugaa

SEQ ID NO: 1406729 - RNA, 19 nt, Artificial Sequence
  Description of Artificial Sequence: Synthetic oligonucleotide
ggccuaaaauggcccggua

SEQ ID NO: 1406730 - RNA, 19 nt, Artificial Sequence
  Description of Artificial Sequence: Synthetic oligonucleotide
cugcuagguaggggugaga

SEQ ID NO: 1406731 - RNA, 19 nt, Artificial Sequence
  Description of Artificial Sequence: Synthetic oligonucleotide
ggcguccugagaggcguga

SEQ ID NO: 1406732 - RNA, 19 nt, Artificial Sequence
  Description of Artificial Sequence: Synthetic oligonucleotide
gcaugcggagaaccaaauu

SEQ ID NO: 1406733 - RNA, 19 nt, Artificial Sequence
  Description of Artificial Sequence: Synthetic oligonucleotide
cccugagguaagguaauua

SEQ ID NO: 1406734 - RNA, 19 nt, Artificial Sequence
  Description of Artificial Sequence: Synthetic oligonucleotide
ccgaaaaguuugauuccau

SEQ ID NO: 1406735 - RNA, 19 nt, Artificial Sequence
  Description of Artificial Sequence: Synthetic oligonucleotide
gggccuaaaauggcccggu

SEQ ID NO: 1406736 - RNA, 19 nt, Artificial Sequence
  Description of Artificial Sequence: Synthetic oligonucleotide
gcguccugagaggcgugac

SEQ ID NO: 1406737 - RNA, 19 nt, Artificial Sequence
  Description of Artificial Sequence: Synthetic oligonucleotide
gcuugccgcugauaaucuu

SEQ ID NO: 1406738 - RNA, 19 nt, Artificial Sequence
  Description of Artificial Sequence: Synthetic oligonucleotide
gcucacggcuguagugucu

SEQ ID NO: 1406739 - RNA, 19 nt, Artificial Sequence
  Description of Artificial Sequence: Synthetic oligonucleotide
gggcuacucuguacagauu

SEQ ID NO: 1406740 - RNA, 19 nt, Artificial Sequence
  Description of Artificial Sequence: Synthetic oligonucleotide
cgcugcucacggcuguagu

SEQ ID NO: 1406741 - RNA, 19 nt, Artificial Sequence
  Description of Artificial Sequence: Synthetic oligonucleotide
aacaaguccaauuuacgcc

SEQ ID NO: 1406742 - RNA, 19 nt, Artificial Sequence
  Description of Artificial Sequence: Synthetic oligonucleotide
aaacaaguccaauuuacgc

SEQ ID NO: 1406743 - RNA, 19 nt, Artificial Sequence
  Description of Artificial Sequence: Synthetic oligonucleotide
aagauugggcaucacaagc

SEQ ID NO: 1406744 - RNA, 19 nt, Artificial Sequence
  Description of Artificial Sequence: Synthetic oligonucleotide
caugauauuggccuuaugg

SEQ ID NO: 1406745 - RNA, 19 nt, Artificial Sequence
  Description of Artificial Sequence: Synthetic oligonucleotide
uggaucuuuccaaugaugg

SEQ ID NO: 1406746 - RNA, 19 nt, Artificial Sequence
  Description of Artificial Sequence: Synthetic oligonucleotide
aggaaaggcacccucaacc

SEQ ID NO: 1406747 - RNA, 19 nt, Artificial Sequence
  Description of Artificial Sequence: Synthetic oligonucleotide
aucauaggaagcuaauucg

SEQ ID NO: 1406748 - RNA, 19 nt, Artificial Sequence
  Description of Artificial Sequence: Synthetic oligonucleotide
uguaagacuuaugacaggg

SEQ ID NO: 1406749 - RNA, 19 nt, Artificial Sequence
  Description of Artificial Sequence: Synthetic oligonucleotide
auugucucaaauuugauuu

SEQ ID NO: 1406750 - RNA, 19 nt, Artificial Sequence
  Description of Artificial Sequence: Synthetic oligonucleotide
gauuaccaggucuagauug

SEQ ID NO: 1406751 - RNA, 19 nt, Artificial Sequence
  Description of Artificial Sequence: Synthetic oligonucleotide
gaugaaaucaguuguugug

SEQ ID NO: 1406752 - RNA, 19 nt, Artificial Sequence
  Description of Artificial Sequence: Synthetic oligonucleotide
auuaucuaugaucauuguc

SEQ ID NO: 1406753 - RNA, 19 nt, Artificial Sequence
  Description of Artificial Sequence: Synthetic oligonucleotide
uaaagauugggcaucacaa

SEQ ID NO: 1406754 - RNA, 19 nt, Artificial Sequence
  Description of Artificial Sequence: Synthetic oligonucleotide
uaucauaggaagcuaauuc

SEQ ID NO: 1406755 - RNA, 19 nt, Artificial Sequence
  Description of Artificial Sequence: Synthetic oligonucleotide
guuaugacgagucauguac

SEQ ID NO: 1406756 - RNA, 19 nt, Artificial Sequence
  Description of Artificial Sequence: Synthetic oligonucleotide
uaagacuuaugacagggca

SEQ ID NO: 1406757 - RNA, 19 nt, Artificial Sequence
  Description of Artificial Sequence: Synthetic oligonucleotide
auaauguucccauaaagau

SEQ ID NO: 1406758 - RNA, 19 nt, Artificial Sequence
  Description of Artificial Sequence: Synthetic oligonucleotide
ugguauucaagauugagau

SEQ ID NO: 1406759 - RNA, 19 nt, Artificial Sequence
  Description of Artificial Sequence: Synthetic oligonucleotide
aaagauugggcaucacaag

SEQ ID NO: 1406760 - RNA, 19 nt, Artificial Sequence
  Description of Artificial Sequence: Synthetic oligonucleotide
caauuuacgccucagcugc

SEQ ID NO: 1406761 - RNA, 19 nt, Artificial Sequence
  Description of Artificial Sequence: Synthetic oligonucleotide
uucagcaacuuccucacag

SEQ ID NO: 1406762 - RNA, 19 nt, Artificial Sequence
  Description of Artificial Sequence: Synthetic oligonucleotide
augaaaucaguuguugugc

SEQ ID NO: 1406763 - RNA, 19 nt, Artificial Sequence
  Description of Artificial Sequence: Synthetic oligonucleotide
ucucgaaugauuaccaggu

SEQ ID NO: 1406764 - RNA, 19 nt, Artificial Sequence
  Description of Artificial Sequence: Synthetic oligonucleotide
ugaucauugucucaaauuu

SEQ ID NO: 1406765 - RNA, 19 nt, Artificial Sequence
  Description of Artificial Sequence: Synthetic oligonucleotide
uucucgaaugauuaccagg

SEQ ID NO: 1406766 - RNA, 19 nt, Artificial Sequence
  Description of Artificial Sequence: Synthetic oligonucleotide
uccaauuuacgccucagcu

SEQ ID NO: 1406767 - RNA, 19 nt, Artificial Sequence
  Description of Artificial Sequence: Synthetic oligonucleotide
acuguuagauguuuucuuc

SEQ ID NO: 1406768 - RNA, 19 nt, Artificial Sequence
  Description of Artificial Sequence: Synthetic oligonucleotide
cauaucugagguucgaacc

SEQ ID NO: 1406769 - RNA, 19 nt, Artificial Sequence
  Description of Artificial Sequence: Synthetic oligonucleotide
uuggcuauauuucugccca

SEQ ID NO: 1406770 - RNA, 19 nt, Artificial Sequence
  Description of Artificial Sequence: Synthetic oligonucleotide
uuagauguuuucuuccuug

SEQ ID NO: 1406771 - RNA, 19 nt, Artificial Sequence
  Description of Artificial Sequence: Synthetic oligonucleotide
gagucauguacccaggaag

SEQ ID NO: 1406772 - RNA, 19 nt, Artificial Sequence
  Description of Artificial Sequence: Synthetic oligonucleotide
ucauaggaagcuaauucgc

SEQ ID NO: 1406773 - RNA, 19 nt, Artificial Sequence
  Description of Artificial Sequence: Synthetic oligonucleotide
aauuagggucuacuguuag

SEQ ID NO: 1406774 - RNA, 19 nt, Artificial Sequence
  Description of Artificial Sequence: Synthetic oligonucleotide
uuauuggauauuuuacaug

SEQ ID NO: 1406775 - RNA, 19 nt, Artificial Sequence
  Description of Artificial Sequence: Synthetic oligonucleotide
uuugguggcauagucaaag

SEQ ID NO: 1406776 - RNA, 19 nt, Artificial Sequence
  Description of Artificial Sequence: Synthetic oligonucleotide
agcugcauaucauaggaag

SEQ ID NO: 1406777 - RNA, 19 nt, Artificial Sequence
  Description of Artificial Sequence: Synthetic oligonucleotide
ugaagggauguguagguag

SEQ ID NO: 1406778 - RNA, 19 nt, Artificial Sequence
  Description of Artificial Sequence: Synthetic oligonucleotide
uagauuguuaugacgaguc

SEQ ID NO: 1406779 - RNA, 19 nt, Artificial Sequence
  Description of Artificial Sequence: Synthetic oligonucleotide
ucgaaugauuaccaggucu

SEQ ID NO: 1406780 - RNA, 19 nt, Artificial Sequence
  Description of Artificial Sequence: Synthetic oligonucleotide
ugauauuggccuuauggac

SEQ ID NO: 1406781 - RNA, 19 nt, Artificial Sequence
  Description of Artificial Sequence: Synthetic oligonucleotide
caaacaaguccaauuuacg

SEQ ID NO: 1406782 - RNA, 19 nt, Artificial Sequence
  Description of Artificial Sequence: Synthetic oligonucleotide
guuccagagagcuauauuc

SEQ ID NO: 1406783 - RNA, 19 nt, Artificial Sequence
  Description of Artificial Sequence: Synthetic oligonucleotide
ucaaaggcaaacuuugcaa

SEQ ID NO: 1406784 - RNA, 19 nt, Artificial Sequence
  Description of Artificial Sequence: Synthetic oligonucleotide
agacuuaugacagggcagc

SEQ ID NO: 1406785 - RNA, 19 nt, Artificial Sequence
  Description of Artificial Sequence: Synthetic oligonucleotide
acaaguggcauaaccaccc

SEQ ID NO: 1406786 - RNA, 19 nt, Artificial Sequence
  Description of Artificial Sequence: Synthetic oligonucleotide
ugcgucugcaaucauguug

SEQ ID NO: 1406787 - RNA, 19 nt, Artificial Sequence
  Description of Artificial Sequence: Synthetic oligonucleotide
auaaccuagccucugccag

SEQ ID NO: 1406788 - RNA, 19 nt, Artificial Sequence
  Description of Artificial Sequence: Synthetic oligonucleotide
ucaguuguugugcuguagc

SEQ ID NO: 1406789 - RNA, 19 nt, Artificial Sequence
  Description of Artificial Sequence: Synthetic oligonucleotide
uguucucgaaugauuacca

SEQ ID NO: 1406790 - RNA, 19 nt, Artificial Sequence
  Description of Artificial Sequence: Synthetic oligonucleotide
auaaagauugggcaucaca

SEQ ID NO: 1406791 - RNA, 19 nt, Artificial Sequence
  Description of Artificial Sequence: Synthetic oligonucleotide
uauauuccccuucugucug

SEQ ID NO: 1406792 - RNA, 19 nt, Artificial Sequence
  Description of Artificial Sequence: Synthetic oligonucleotide
gauguuuucuuccuugguc

SEQ ID NO: 1406793 - RNA, 19 nt, Artificial Sequence
  Description of Artificial Sequence: Synthetic oligonucleotide
gacuggaugaaaucaguug

SEQ ID NO: 1406794 - RNA, 19 nt, Artificial Sequence
  Description of Artificial Sequence: Synthetic oligonucleotide
acaaguccaauuuacgccu

SEQ ID NO: 1406795 - RNA, 19 nt, Artificial Sequence
  Description of Artificial Sequence: Synthetic oligonucleotide
ucgagugacaaucuucaga

SEQ ID NO: 1406796 - RNA, 19 nt, Artificial Sequence
  Description of Artificial Sequence: Synthetic oligonucleotide
agggucuacuguuagaugu

SEQ ID NO: 1406797 - RNA, 19 nt, Artificial Sequence
  Description of Artificial Sequence: Synthetic oligonucleotide
agcacugcaagaacaaccc

SEQ ID NO: 1406798 - RNA, 19 nt, Artificial Sequence
  Description of Artificial Sequence: Synthetic oligonucleotide
aauuaucuaugaucauugu

SEQ ID NO: 1406799 - RNA, 19 nt, Artificial Sequence
  Description of Artificial Sequence: Synthetic oligonucleotide
uaauucgcccuuauacucc

SEQ ID NO: 1406800 - RNA, 19 nt, Artificial Sequence
  Description of Artificial Sequence: Synthetic oligonucleotide
ugacgagucauguacccag

SEQ ID NO: 1406801 - RNA, 19 nt, Artificial Sequence
  Description of Artificial Sequence: Synthetic oligonucleotide
ugggguauggaucuuucca

SEQ ID NO: 1406802 - RNA, 19 nt, Artificial Sequence
  Description of Artificial Sequence: Synthetic oligonucleotide
cauaggaagcuaauucgcc

SEQ ID NO: 1406803 - RNA, 19 nt, Artificial Sequence
  Description of Artificial Sequence: Synthetic oligonucleotide
ucuagauuguuaugacgag

SEQ ID NO: 1406804 - RNA, 19 nt, Artificial Sequence
  Description of Artificial Sequence: Synthetic oligonucleotide
auauucugcaccucgcuca

SEQ ID NO: 1406805 - RNA, 19 nt, Artificial Sequence
  Description of Artificial Sequence: Synthetic oligonucleotide
uuaugacgagucauguacc

SEQ ID NO: 1406806 - RNA, 19 nt, Artificial Sequence
  Description of Artificial Sequence: Synthetic oligonucleotide
ucucccggcaacaugguca

SEQ ID NO: 1406807 - RNA, 19 nt, Artificial Sequence
  Description of Artificial Sequence: Synthetic oligonucleotide
acccuauaccaccagcccc

SEQ ID NO: 1406808 - RNA, 19 nt, Artificial Sequence
  Description of Artificial Sequence: Synthetic oligonucleotide
uguuggagugguauucaag

SEQ ID NO: 1406809 - RNA, 19 nt, Artificial Sequence
  Description of Artificial Sequence: Synthetic oligonucleotide
guuguugugcuguagccgc

SEQ ID NO: 1406810 - RNA, 19 nt, Artificial Sequence
  Description of Artificial Sequence: Synthetic oligonucleotide
cuaauucgcccuuauacuc

SEQ ID NO: 1406811 - RNA, 19 nt, Artificial Sequence
  Description of Artificial Sequence: Synthetic oligonucleotide
ucaauaauguucccauaaa

SEQ ID NO: 1406812 - RNA, 19 nt, Artificial Sequence
  Description of Artificial Sequence: Synthetic oligonucleotide
auauuggccuuauggacag

SEQ ID NO: 1406813 - RNA, 19 nt, Artificial Sequence
  Description of Artificial Sequence: Synthetic oligonucleotide
ucuacuguuagauguuuuc

SEQ ID NO: 1406814 - RNA, 19 nt, Artificial Sequence
  Description of Artificial Sequence: Synthetic oligonucleotide
guacaguucagcaacuucc

SEQ ID NO: 1406815 - RNA, 19 nt, Artificial Sequence
  Description of Artificial Sequence: Synthetic oligonucleotide
uaugacgagucauguaccc

SEQ ID NO: 1406816 - RNA, 19 nt, Artificial Sequence
  Description of Artificial Sequence: Synthetic oligonucleotide
cuugguucgagugacaauc

SEQ ID NO: 1406817 - RNA, 19 nt, Artificial Sequence
  Description of Artificial Sequence: Synthetic oligonucleotide
aauaacagcuucagugaag

SEQ ID NO: 1406818 - RNA, 19 nt, Artificial Sequence
  Description of Artificial Sequence: Synthetic oligonucleotide
agcaauuagggucuacugu

SEQ ID NO: 1406819 - RNA, 19 nt, Artificial Sequence
  Description of Artificial Sequence: Synthetic oligonucleotide
cuguuagauguuuucuucc

SEQ ID NO: 1406820 - RNA, 19 nt, Artificial Sequence
  Description of Artificial Sequence: Synthetic oligonucleotide
uguuagauguuuucuuccu

SEQ ID NO: 1406821 - RNA, 19 nt, Artificial Sequence
  Description of Artificial Sequence: Synthetic oligonucleotide
uccauuguacugaagggau

SEQ ID NO: 1406822 - RNA, 19 nt, Artificial Sequence
  Description of Artificial Sequence: Synthetic oligonucleotide
aggauaaccuagccucugc

SEQ ID NO: 1406823 - RNA, 19 nt, Artificial Sequence
  Description of Artificial Sequence: Synthetic oligonucleotide
uguuggaagcugacaacag

SEQ ID NO: 1406824 - RNA, 19 nt, Artificial Sequence
  Description of Artificial Sequence: Synthetic oligonucleotide
uguacugaagggaugugua

SEQ ID NO: 1406825 - RNA, 19 nt, Artificial Sequence
  Description of Artificial Sequence: Synthetic oligonucleotide
aggucuagauuguuaugac

SEQ ID NO: 1406826 - RNA, 19 nt, Artificial Sequence
  Description of Artificial Sequence: Synthetic oligonucleotide
auaucugagguucgaaccu

SEQ ID NO: 1406827 - RNA, 19 nt, Artificial Sequence
  Description of Artificial Sequence: Synthetic oligonucleotide
aagacuuaugacagggcag

SEQ ID NO: 1406828 - RNA, 19 nt, Artificial Sequence
  Description of Artificial Sequence: Synthetic oligonucleotide
gauauuggccuuauggaca

SEQ ID NO: 1406829 - RNA, 19 nt, Artificial Sequence
  Description of Artificial Sequence: Synthetic oligonucleotide
cagcacugcaagaacaacc

SEQ ID NO: 1406830 - RNA, 19 nt, Artificial Sequence
  Description of Artificial Sequence: Synthetic oligonucleotide
agaacaacccauccccaag

SEQ ID NO: 1406831 - RNA, 19 nt, Artificial Sequence
  Description of Artificial Sequence: Synthetic oligonucleotide
caacccauccccaaguuuc

SEQ ID NO: 1406832 - RNA, 19 nt, Artificial Sequence
  Description of Artificial Sequence: Synthetic oligonucleotide
agagcuauauuccccuucu

SEQ ID NO: 1406833 - RNA, 19 nt, Artificial Sequence
  Description of Artificial Sequence: Synthetic oligonucleotide
agugguauucaagauugag

SEQ ID NO: 1406834 - RNA, 19 nt, Artificial Sequence
  Description of Artificial Sequence: Synthetic oligonucleotide
gauuggcuauauuucugcc

SEQ ID NO: 1406835 - RNA, 19 nt, Artificial Sequence
  Description of Artificial Sequence: Synthetic oligonucleotide
ucggagaccucuccaagcc

SEQ ID NO: 1406836 - RNA, 19 nt, Artificial Sequence
  Description of Artificial Sequence: Synthetic oligonucleotide
agugaagucaugacaagug

SEQ ID NO: 1406837 - RNA, 19 nt, Artificial Sequence
  Description of Artificial Sequence: Synthetic oligonucleotide
uaucuaugaucauugucuc

SEQ ID NO: 1406838 - RNA, 19 nt, Artificial Sequence
  Description of Artificial Sequence: Synthetic oligonucleotide
ugugaagcggcgugagccg

SEQ ID NO: 1406839 - RNA, 19 nt, Artificial Sequence
  Description of Artificial Sequence: Synthetic oligonucleotide
caugucucgaguccguacc

SEQ ID NO: 1406840 - RNA, 19 nt, Artificial Sequence
  Description of Artificial Sequence: Synthetic oligonucleotide
auugucaauaauguuccca

SEQ ID NO: 1406841 - RNA, 19 nt, Artificial Sequence
  Description of Artificial Sequence: Synthetic oligonucleotide
gucaauaauguucccauaa

SEQ ID NO: 1406842 - RNA, 19 nt, Artificial Sequence
  Description of Artificial Sequence: Synthetic oligonucleotide
aguuguugugcuguagccg

SEQ ID NO: 1406843 - RNA, 19 nt, Artificial Sequence
  Description of Artificial Sequence: Synthetic oligonucleotide
ugucucaaauuugauuuug

SEQ ID NO: 1406844 - RNA, 19 nt, Artificial Sequence
  Description of Artificial Sequence: Synthetic oligonucleotide
uggcaaacaaguccaauuu

SEQ ID NO: 1406845 - RNA, 19 nt, Artificial Sequence
  Description of Artificial Sequence: Synthetic oligonucleotide
auuguuaugacgagucaug

SEQ ID NO: 1406846 - RNA, 19 nt, Artificial Sequence
  Description of Artificial Sequence: Synthetic oligonucleotide
aaugauuaccaggucuaga

SEQ ID NO: 1406847 - RNA, 19 nt, Artificial Sequence
  Description of Artificial Sequence: Synthetic oligonucleotide
ggcauaaccacccauaucu

SEQ ID NO: 1406848 - RNA, 19 nt, Artificial Sequence
  Description of Artificial Sequence: Synthetic oligonucleotide
cuuccuugguccauuguac

SEQ ID NO: 1406849 - RNA, 19 nt, Artificial Sequence
  Description of Artificial Sequence: Synthetic oligonucleotide
uaggaagcuaauucgcccu

SEQ ID NO: 1406850 - RNA, 19 nt, Artificial Sequence
  Description of Artificial Sequence: Synthetic oligonucleotide
uccccaaguuucaugauau

SEQ ID NO: 1406851 - RNA, 19 nt, Artificial Sequence
  Description of Artificial Sequence: Synthetic oligonucleotide
uacccuauaccaccagccc

SEQ ID NO: 1406852 - RNA, 19 nt, Artificial Sequence
  Description of Artificial Sequence: Synthetic oligonucleotide
uggaugaaaucaguuguug

SEQ ID NO: 1406853 - RNA, 19 nt, Artificial Sequence
  Description of Artificial Sequence: Synthetic oligonucleotide
uuauacuccauugggguau

SEQ ID NO: 1406854 - RNA, 19 nt, Artificial Sequence
  Description of Artificial Sequence: Synthetic oligonucleotide
cugugaagcggcgugagcc

SEQ ID NO: 1406855 - RNA, 19 nt, Artificial Sequence
  Description of Artificial Sequence: Synthetic oligonucleotide
ggauauuuuacaugugcac

SEQ ID NO: 1406856 - RNA, 19 nt, Artificial Sequence
  Description of Artificial Sequence: Synthetic oligonucleotide
auacucugcacuguagcuc

SEQ ID NO: 1406857 - RNA, 19 nt, Artificial Sequence
  Description of Artificial Sequence: Synthetic oligonucleotide
ggucuagauuguuaugacg

SEQ ID NO: 1406858 - RNA, 19 nt, Artificial Sequence
  Description of Artificial Sequence: Synthetic oligonucleotide
cuguucucgaaugauuacc

SEQ ID NO: 1406859 - RNA, 19 nt, Artificial Sequence
  Description of Artificial Sequence: Synthetic oligonucleotide
ucauguacccaggaaguga

SEQ ID NO: 1406860 - RNA, 19 nt, Artificial Sequence
  Description of Artificial Sequence: Synthetic oligonucleotide
uggccuuauggacagcugu

SEQ ID NO: 1406861 - RNA, 19 nt, Artificial Sequence
  Description of Artificial Sequence: Synthetic oligonucleotide
gucaaaggcaaacuuugca

SEQ ID NO: 1406862 - RNA, 19 nt, Artificial Sequence
  Description of Artificial Sequence: Synthetic oligonucleotide
uaugacagggcagcaauaa

SEQ ID NO: 1406863 - RNA, 19 nt, Artificial Sequence
  Description of Artificial Sequence: Synthetic oligonucleotide
uucacugcgucugcaauca

SEQ ID NO: 1406864 - RNA, 19 nt, Artificial Sequence
  Description of Artificial Sequence: Synthetic oligonucleotide
uggauccagucccaaacac

SEQ ID NO: 1406865 - RNA, 19 nt, Artificial Sequence
  Description of Artificial Sequence: Synthetic oligonucleotide
gauguucggagaccucucc

SEQ ID NO: 1406866 - RNA, 19 nt, Artificial Sequence
  Description of Artificial Sequence: Synthetic oligonucleotide
agucaaaggcaaacuuugc

SEQ ID NO: 1406867 - RNA, 19 nt, Artificial Sequence
  Description of Artificial Sequence: Synthetic oligonucleotide
accaggucuagauuguuau

SEQ ID NO: 1406868 - RNA, 19 nt, Artificial Sequence
  Description of Artificial Sequence: Synthetic oligonucleotide
uugugcagguacccuauac

SEQ ID NO: 1406869 - RNA, 19 nt, Artificial Sequence
  Description of Artificial Sequence: Synthetic oligonucleotide
ggauuggcuauauuucugc

SEQ ID NO: 1406870 - RNA, 19 nt, Artificial Sequence
  Description of Artificial Sequence: Synthetic oligonucleotide
caacauggucacaggaaag

SEQ ID NO: 1406871 - RNA, 19 nt, Artificial Sequence
  Description of Artificial Sequence: Synthetic oligonucleotide
uuccgagcggcgaccaccg

SEQ ID NO: 1406872 - RNA, 19 nt, Artificial Sequence
  Description of Artificial Sequence: Synthetic oligonucleotide
ucgcccuuauacuccauug

SEQ ID NO: 1406873 - RNA, 19 nt, Artificial Sequence
  Description of Artificial Sequence: Synthetic oligonucleotide
cugcaaucauguuggagug

SEQ ID NO: 1406874 - RNA, 19 nt, Artificial Sequence
  Description of Artificial Sequence: Synthetic oligonucleotide
gagacuugguucgagugac

SEQ ID NO: 1406875 - RNA, 19 nt, Artificial Sequence
  Description of Artificial Sequence: Synthetic oligonucleotide
agggagugagggcucuagc

SEQ ID NO: 1406876 - RNA, 19 nt, Artificial Sequence
  Description of Artificial Sequence: Synthetic oligonucleotide
caaaugggugccgagcacc

SEQ ID NO: 1406877 - RNA, 19 nt, Artificial Sequence
  Description of Artificial Sequence: Synthetic oligonucleotide
agauugagaugccgaagca

SEQ ID NO: 1406878 - RNA, 19 nt, Artificial Sequence
  Description of Artificial Sequence: Synthetic oligonucleotide
uuguuaugacgagucaugu

SEQ ID NO: 1406879 - RNA, 19 nt, Artificial Sequence
  Description of Artificial Sequence: Synthetic oligonucleotide
agauuguuaugacgaguca

SEQ ID NO: 1406880 - RNA, 19 nt, Artificial Sequence
  Description of Artificial Sequence: Synthetic oligonucleotide
gaagccauauucugcaccu

SEQ ID NO: 1406881 - RNA, 19 nt, Artificial Sequence
  Description of Artificial Sequence: Synthetic oligonucleotide
guacccuauaccaccagcc

SEQ ID NO: 1406882 - RNA, 19 nt, Artificial Sequence
  Description of Artificial Sequence: Synthetic oligonucleotide
ucucgaguccguaccuugc

SEQ ID NO: 1406883 - RNA, 19 nt, Artificial Sequence
  Description of Artificial Sequence: Synthetic oligonucleotide
ugcagcaauuaucuaugau

SEQ ID NO: 1406884 - RNA, 19 nt, Artificial Sequence
  Description of Artificial Sequence: Synthetic oligonucleotide
ugcacauuguaagacuuau

SEQ ID NO: 1406885 - RNA, 19 nt, Artificial Sequence
  Description of Artificial Sequence: Synthetic oligonucleotide
cugcaccucgcucaggcgg

SEQ ID NO: 1406886 - RNA, 19 nt, Artificial Sequence
  Description of Artificial Sequence: Synthetic oligonucleotide
gcaauaacagcuucaguga

SEQ ID NO: 1406887 - RNA, 19 nt, Artificial Sequence
  Description of Artificial Sequence: Synthetic oligonucleotide
guucgagugacaaucuuca

SEQ ID NO: 1406888 - RNA, 19 nt, Artificial Sequence
  Description of Artificial Sequence: Synthetic oligonucleotide
ucuucacugcgucugcaau

SEQ ID NO: 1406889 - RNA, 19 nt, Artificial Sequence
  Description of Artificial Sequence: Synthetic oligonucleotide
agauguuuucuuccuuggu

SEQ ID NO: 1406890 - RNA, 19 nt, Artificial Sequence
  Description of Artificial Sequence: Synthetic oligonucleotide
acugcgucugcaaucaugu

SEQ ID NO: 1406891 - RNA, 19 nt, Artificial Sequence
  Description of Artificial Sequence: Synthetic oligonucleotide
guucucgaaugauuaccag

SEQ ID NO: 1406892 - RNA, 19 nt, Artificial Sequence
  Description of Artificial Sequence: Synthetic oligonucleotide
gcgucugcaaucauguugg

SEQ ID NO: 1406893 - RNA, 19 nt, Artificial Sequence
  Description of Artificial Sequence: Synthetic oligonucleotide
gugcagguacccuauacca

SEQ ID NO: 1406894 - RNA, 19 nt, Artificial Sequence
  Description of Artificial Sequence: Synthetic oligonucleotide
uguuaugacgagucaugua

SEQ ID NO: 1406895 - RNA, 19 nt, Artificial Sequence
  Description of Artificial Sequence: Synthetic oligonucleotide
cugcaagaacaacccaucc

SEQ ID NO: 1406896 - RNA, 19 nt, Artificial Sequence
  Description of Artificial Sequence: Synthetic oligonucleotide
gcccuuauacuccauuggg

SEQ ID NO: 1406897 - RNA, 19 nt, Artificial Sequence
  Description of Artificial Sequence: Synthetic oligonucleotide
auagucaaaggcaaacuuu

SEQ ID NO: 1406898 - RNA, 19 nt, Artificial Sequence
  Description of Artificial Sequence: Synthetic oligonucleotide
agucauguacccaggaagu

SEQ ID NO: 1406899 - RNA, 19 nt, Artificial Sequence
  Description of Artificial Sequence: Synthetic oligonucleotide
gagagcuauauuccccuuc

SEQ ID NO: 1406900 - RNA, 19 nt, Artificial Sequence
  Description of Artificial Sequence: Synthetic oligonucleotide
gugguauucaagauugaga

SEQ ID NO: 1406901 - RNA, 19 nt, Artificial Sequence
  Description of Artificial Sequence: Synthetic oligonucleotide
uugguucgagugacaaucu

SEQ ID NO: 1406902 - RNA, 19 nt, Artificial Sequence
  Description of Artificial Sequence: Synthetic oligonucleotide
gccaacuuuaaucaccuuc

SEQ ID NO: 1406903 - RNA, 19 nt, Artificial Sequence
  Description of Artificial Sequence: Synthetic oligonucleotide
aucuaugaucauugucuca

SEQ ID NO: 1406904 - RNA, 19 nt, Artificial Sequence
  Description of Artificial Sequence: Synthetic oligonucleotide
cauaaccacccauaucuga

SEQ ID NO: 1406905 - RNA, 19 nt, Artificial Sequence
  Description of Artificial Sequence: Synthetic oligonucleotide
ugauuaccaggucuagauu

SEQ ID NO: 1406906 - RNA, 19 nt, Artificial Sequence
  Description of Artificial Sequence: Synthetic oligonucleotide
ggagugagggcucuagccc

SEQ ID NO: 1406907 - RNA, 19 nt, Artificial Sequence
  Description of Artificial Sequence: Synthetic oligonucleotide
ugugaccuugcuccgcccu

SEQ ID NO: 1406908 - RNA, 19 nt, Artificial Sequence
  Description of Artificial Sequence: Synthetic oligonucleotide
agcaugguccuuuggaguu

SEQ ID NO: 1406909 - RNA, 19 nt, Artificial Sequence
  Description of Artificial Sequence: Synthetic oligonucleotide
cuucacugcgucugcaauc

SEQ ID NO: 1406910 - RNA, 19 nt, Artificial Sequence
  Description of Artificial Sequence: Synthetic oligonucleotide
gcaaacaaguccaauuuac

SEQ ID NO: 1406911 - RNA, 19 nt, Artificial Sequence
  Description of Artificial Sequence: Synthetic oligonucleotide
caggucuagauuguuauga

SEQ ID NO: 1406912 - RNA, 19 nt, Artificial Sequence
  Description of Artificial Sequence: Synthetic oligonucleotide
uuacgccucagcugcauau

SEQ ID NO: 1406913 - RNA, 19 nt, Artificial Sequence
  Description of Artificial Sequence: Synthetic oligonucleotide
gguauggaucuuuccaaug

SEQ ID NO: 1406914 - RNA, 19 nt, Artificial Sequence
  Description of Artificial Sequence: Synthetic oligonucleotide
ucugugaagcggcgugagc

SEQ ID NO: 1406915 - RNA, 19 nt, Artificial Sequence
  Description of Artificial Sequence: Synthetic oligonucleotide
uagggucuacuguuagaug

SEQ ID NO: 1406916 - RNA, 19 nt, Artificial Sequence
  Description of Artificial Sequence: Synthetic oligonucleotide
guucggagaccucuccaag

SEQ ID NO: 1406917 - RNA, 19 nt, Artificial Sequence
  Description of Artificial Sequence: Synthetic oligonucleotide
aagucaugacaaguggcau

SEQ ID NO: 1406918 - RNA, 19 nt, Artificial Sequence
  Description of Artificial Sequence: Synthetic oligonucleotide
uaaccuagccucugccaga

SEQ ID NO: 1406919 - RNA, 19 nt, Artificial Sequence
  Description of Artificial Sequence: Synthetic oligonucleotide
ucccaaacacccaccuugu

SEQ ID NO: 1406920 - RNA, 19 nt, Artificial Sequence
  Description of Artificial Sequence: Synthetic oligonucleotide
gguauucaagauugagaug

SEQ ID NO: 1406921 - RNA, 19 nt, Artificial Sequence
  Description of Artificial Sequence: Synthetic oligonucleotide
ucugcaccucgcucaggcg

SEQ ID NO: 1406922 - RNA, 19 nt, Artificial Sequence
  Description of Artificial Sequence: Synthetic oligonucleotide
cagcggacauugcucagcg

SEQ ID NO: 1406923 - RNA, 19 nt, Artificial Sequence
  Description of Artificial Sequence: Synthetic oligonucleotide
uuaugacagggcagcaaua

SEQ ID NO: 1406924 - RNA, 19 nt, Artificial Sequence
  Description of Artificial Sequence: Synthetic oligonucleotide
agucaugacaaguggcaua

SEQ ID NO: 1406925 - RNA, 19 nt, Artificial Sequence
  Description of Artificial Sequence: Synthetic oligonucleotide
guccaauuuacgccucagc

SEQ ID NO: 1406926 - RNA, 19 nt, Artificial Sequence
  Description of Artificial Sequence: Synthetic oligonucleotide
ccaauuuacgccucagcug

SEQ ID NO: 1406927 - RNA, 19 nt, Artificial Sequence
  Description of Artificial Sequence: Synthetic oligonucleotide
auaucauaggaagcuaauu

SEQ ID NO: 1406928 - RNA, 19 nt, Artificial Sequence
  Description of Artificial Sequence: Synthetic oligonucleotide
guaagacuuaugacagggc

SEQ ID NO: 1406929 - RNA, 19 nt, Artificial Sequence
  Description of Artificial Sequence: Synthetic oligonucleotide
gggagugagggcucuagcc

SEQ ID NO: 1406930 - RNA, 19 nt, Artificial Sequence
  Description of Artificial Sequence: Synthetic oligonucleotide
aaucaguuguugugcugua

SEQ ID NO: 1406931 - RNA, 19 nt, Artificial Sequence
  Description of Artificial Sequence: Synthetic oligonucleotide
cccuuauacuccauugggg

SEQ ID NO: 1406932 - RNA, 19 nt, Artificial Sequence
  Description of Artificial Sequence: Synthetic oligonucleotide
ccuugaauuccacugggac

SEQ ID NO: 1406933 - RNA, 19 nt, Artificial Sequence
  Description of Artificial Sequence: Synthetic oligonucleotide
cacugcgucugcaaucaug

SEQ ID NO: 1406934 - RNA, 19 nt, Artificial Sequence
  Description of Artificial Sequence: Synthetic oligonucleotide
gacgagucauguacccagg

SEQ ID NO: 1406935 - RNA, 19 nt, Artificial Sequence
  Description of Artificial Sequence: Synthetic oligonucleotide
auggccgugggauuggcua

SEQ ID NO: 1406936 - RNA, 19 nt, Artificial Sequence
  Description of Artificial Sequence: Synthetic oligonucleotide
acagcaugcaugagcuccg

SEQ ID NO: 1406937 - RNA, 19 nt, Artificial Sequence
  Description of Artificial Sequence: Synthetic oligonucleotide
aucauguuggagugguauu

SEQ ID NO: 1406938 - RNA, 19 nt, Artificial Sequence
  Description of Artificial Sequence: Synthetic oligonucleotide
ugggcaaaugggugccgag

SEQ ID NO: 1406939 - RNA, 19 nt, Artificial Sequence
  Description of Artificial Sequence: Synthetic oligonucleotide
agccagcggacauugcuca

SEQ ID NO: 1406940 - RNA, 19 nt, Artificial Sequence
  Description of Artificial Sequence: Synthetic oligonucleotide
gucaugacaaguggcauaa

SEQ ID NO: 1406941 - RNA, 19 nt, Artificial Sequence
  Description of Artificial Sequence: Synthetic oligonucleotide
auguucggagaccucucca

SEQ ID NO: 1406942 - RNA, 19 nt, Artificial Sequence
  Description of Artificial Sequence: Synthetic oligonucleotide
guccauuguacugaaggga

SEQ ID NO: 1406943 - RNA, 19 nt, Artificial Sequence
  Description of Artificial Sequence: Synthetic oligonucleotide
auccccaaguuucaugaua

SEQ ID NO: 1406944 - RNA, 19 nt, Artificial Sequence
  Description of Artificial Sequence: Synthetic oligonucleotide
gguacccuauaccaccagc

SEQ ID NO: 1406945 - RNA, 19 nt, Artificial Sequence
  Description of Artificial Sequence: Synthetic oligonucleotide
gucucgaguccguaccuug

SEQ ID NO: 1406946 - RNA, 19 nt, Artificial Sequence
  Description of Artificial Sequence: Synthetic oligonucleotide
acugccugggcaaaugggu

SEQ ID NO: 1406947 - RNA, 19 nt, Artificial Sequence
  Description of Artificial Sequence: Synthetic oligonucleotide
aagcuaauucgcccuuaua

SEQ ID NO: 1406948 - RNA, 19 nt, Artificial Sequence
  Description of Artificial Sequence: Synthetic oligonucleotide
ugcauaucauaggaagcua

SEQ ID NO: 1406949 - RNA, 19 nt, Artificial Sequence
  Description of Artificial Sequence: Synthetic oligonucleotide
aucaguuguugugcuguag

SEQ ID NO: 1406950 - RNA, 19 nt, Artificial Sequence
  Description of Artificial Sequence: Synthetic oligonucleotide
ccauaucugagguucgaac

SEQ ID NO: 1406951 - RNA, 19 nt, Artificial Sequence
  Description of Artificial Sequence: Synthetic oligonucleotide
caauaacagcuucagugaa

SEQ ID NO: 1406952 - RNA, 19 nt, Artificial Sequence
  Description of Artificial Sequence: Synthetic oligonucleotide
ccgucucccggcaacaugg

SEQ ID NO: 1406953 - RNA, 19 nt, Artificial Sequence
  Description of Artificial Sequence: Synthetic oligonucleotide
cacccauaucugagguucg

SEQ ID NO: 1406954 - RNA, 19 nt, Artificial Sequence
  Description of Artificial Sequence: Synthetic oligonucleotide
ucuuuccaaugauggcaac

SEQ ID NO: 1406955 - RNA, 19 nt, Artificial Sequence
  Description of Artificial Sequence: Synthetic oligonucleotide
augggugccgagcacccgu

SEQ ID NO: 1406956 - RNA, 19 nt, Artificial Sequence
  Description of Artificial Sequence: Synthetic oligonucleotide
cuuauacuccauuggggua

SEQ ID NO: 1406957 - RNA, 19 nt, Artificial Sequence
  Description of Artificial Sequence: Synthetic oligonucleotide
agguagcaugguccuuugg

SEQ ID NO: 1406958 - RNA, 19 nt, Artificial Sequence
  Description of Artificial Sequence: Synthetic oligonucleotide
uucgcccuuauacuccauu

SEQ ID NO: 1406959 - RNA, 19 nt, Artificial Sequence
  Description of Artificial Sequence: Synthetic oligonucleotide
uuuacgccucagcugcaua

SEQ ID NO: 1406960 - RNA, 19 nt, Artificial Sequence
  Description of Artificial Sequence: Synthetic oligonucleotide
cuuaugacagggcagcaau

SEQ ID NO: 1406961 - RNA, 19 nt, Artificial Sequence
  Description of Artificial Sequence: Synthetic oligonucleotide
gagggagugagggcucuag

SEQ ID NO: 1406962 - RNA, 19 nt, Artificial Sequence
  Description of Artificial Sequence: Synthetic oligonucleotide
acgagucauguacccagga

SEQ ID NO: 1406963 - RNA, 19 nt, Artificial Sequence
  Description of Artificial Sequence: Synthetic oligonucleotide
caccgcucgggucagccag

SEQ ID NO: 1406964 - RNA, 19 nt, Artificial Sequence
  Description of Artificial Sequence: Synthetic oligonucleotide
gcugcauaucauaggaagc

SEQ ID NO: 1406965 - RNA, 19 nt, Artificial Sequence
  Description of Artificial Sequence: Synthetic oligonucleotide
augcagcaauuaucuauga

SEQ ID NO: 1406966 - RNA, 19 nt, Artificial Sequence
  Description of Artificial Sequence: Synthetic oligonucleotide
gcacaucaaacugguaagg

SEQ ID NO: 1406967 - RNA, 19 nt, Artificial Sequence
  Description of Artificial Sequence: Synthetic oligonucleotide
aucuuuccaaugauggcaa

SEQ ID NO: 1406968 - RNA, 19 nt, Artificial Sequence
  Description of Artificial Sequence: Synthetic oligonucleotide
augucucgaguccguaccu

SEQ ID NO: 1406969 - RNA, 19 nt, Artificial Sequence
  Description of Artificial Sequence: Synthetic oligonucleotide
uucaugauauuggccuuau

SEQ ID NO: 1406970 - RNA, 19 nt, Artificial Sequence
  Description of Artificial Sequence: Synthetic oligonucleotide
cucccggcaacauggucac

SEQ ID NO: 1406971 - RNA, 19 nt, Artificial Sequence
  Description of Artificial Sequence: Synthetic oligonucleotide
acuugguucgagugacaau

SEQ ID NO: 1406972 - RNA, 19 nt, Artificial Sequence
  Description of Artificial Sequence: Synthetic oligonucleotide
guucgaaccuguaggaaaa

SEQ ID NO: 1406973 - RNA, 19 nt, Artificial Sequence
  Description of Artificial Sequence: Synthetic oligonucleotide
ucugagguucgaaccugua

SEQ ID NO: 1406974 - RNA, 19 nt, Artificial Sequence
  Description of Artificial Sequence: Synthetic oligonucleotide
gacuugguucgagugacaa

SEQ ID NO: 1406975 - RNA, 19 nt, Artificial Sequence
  Description of Artificial Sequence: Synthetic oligonucleotide
ggcaaaugggugccgagca

SEQ ID NO: 1406976 - RNA, 19 nt, Artificial Sequence
  Description of Artificial Sequence: Synthetic oligonucleotide
cucgaaugauuaccagguc

SEQ ID NO: 1406977 - RNA, 19 nt, Artificial Sequence
  Description of Artificial Sequence: Synthetic oligonucleotide
auguuggagugguauucaa

SEQ ID NO: 1406978 - RNA, 19 nt, Artificial Sequence
  Description of Artificial Sequence: Synthetic oligonucleotide
accuugugcagguacccua

SEQ ID NO: 1406979 - RNA, 19 nt, Artificial Sequence
  Description of Artificial Sequence: Synthetic oligonucleotide
gcuaauucgcccuuauacu

SEQ ID NO: 1406980 - RNA, 19 nt, Artificial Sequence
  Description of Artificial Sequence: Synthetic oligonucleotide
cauacucugcacuguagcu

SEQ ID NO: 1406981 - RNA, 19 nt, Artificial Sequence
  Description of Artificial Sequence: Synthetic oligonucleotide
ugguucgagugacaaucuu

SEQ ID NO: 1406982 - RNA, 19 nt, Artificial Sequence
  Description of Artificial Sequence: Synthetic oligonucleotide
ugccugggucugugaagcg

SEQ ID NO: 1406983 - RNA, 19 nt, Artificial Sequence
  Description of Artificial Sequence: Synthetic oligonucleotide
ggauccagucccaaacacc

SEQ ID NO: 1406984 - RNA, 19 nt, Artificial Sequence
  Description of Artificial Sequence: Synthetic oligonucleotide
ugcuguagccgcccauguc

SEQ ID NO: 1406985 - RNA, 19 nt, Artificial Sequence
  Description of Artificial Sequence: Synthetic oligonucleotide
agguacccuauaccaccag

SEQ ID NO: 1406986 - RNA, 19 nt, Artificial Sequence
  Description of Artificial Sequence: Synthetic oligonucleotide
caaguccaauuuacgccuc

SEQ ID NO: 1406987 - RNA, 19 nt, Artificial Sequence
  Description of Artificial Sequence: Synthetic oligonucleotide
aacccauccccaaguuuca

SEQ ID NO: 1406988 - RNA, 19 nt, Artificial Sequence
  Description of Artificial Sequence: Synthetic oligonucleotide
aauuuacgccucagcugca

SEQ ID NO: 1406989 - RNA, 19 nt, Artificial Sequence
  Description of Artificial Sequence: Synthetic oligonucleotide
cucgcucaggcggugcucc

SEQ ID NO: 1406990 - RNA, 19 nt, Artificial Sequence
  Description of Artificial Sequence: Synthetic oligonucleotide
cugcauaucauaggaagcu

SEQ ID NO: 1406991 - RNA, 19 nt, Artificial Sequence
  Description of Artificial Sequence: Synthetic oligonucleotide
cauaucauaggaagcuaau

SEQ ID NO: 1406992 - RNA, 19 nt, Artificial Sequence
  Description of Artificial Sequence: Synthetic oligonucleotide
cucgggucagccagcggac

SEQ ID NO: 1406993 - RNA, 19 nt, Artificial Sequence
  Description of Artificial Sequence: Synthetic oligonucleotide
ccaacuuuaaucaccuucu

SEQ ID NO: 1406994 - RNA, 19 nt, Artificial Sequence
  Description of Artificial Sequence: Synthetic oligonucleotide
cuguaccagcugcaugcag

SEQ ID NO: 1406995 - RNA, 19 nt, Artificial Sequence
  Description of Artificial Sequence: Synthetic oligonucleotide
cagagagcuauauuccccu

SEQ ID NO: 1406996 - RNA, 19 nt, Artificial Sequence
  Description of Artificial Sequence: Synthetic oligonucleotide
caauuagggucuacuguua

SEQ ID NO: 1406997 - RNA, 19 nt, Artificial Sequence
  Description of Artificial Sequence: Synthetic oligonucleotide
caagccccgggguuccgag

SEQ ID NO: 1406998 - RNA, 19 nt, Artificial Sequence
  Description of Artificial Sequence: Synthetic oligonucleotide
uggcuauauuucugcccac

SEQ ID NO: 1406999 - RNA, 19 nt, Artificial Sequence
  Description of Artificial Sequence: Synthetic oligonucleotide
gaagcuaauucgcccuuau

SEQ ID NO: 1407000 - RNA, 19 nt, Artificial Sequence
  Description of Artificial Sequence: Synthetic oligonucleotide
gcaauuagggucuacuguu

SEQ ID NO: 1407001 - RNA, 19 nt, Artificial Sequence
  Description of Artificial Sequence: Synthetic oligonucleotide
caggauaaccuagccucug

SEQ ID NO: 1407002 - RNA, 19 nt, Artificial Sequence
  Description of Artificial Sequence: Synthetic oligonucleotide
ccacccauaucugagguuc

SEQ ID NO: 1407003 - RNA, 19 nt, Artificial Sequence
  Description of Artificial Sequence: Synthetic oligonucleotide
uccuguggucuggauccag

SEQ ID NO: 1407004 - RNA, 19 nt, Artificial Sequence
  Description of Artificial Sequence: Synthetic oligonucleotide
agagagcuauauuccccuu

SEQ ID NO: 1407005 - RNA, 19 nt, Artificial Sequence
  Description of Artificial Sequence: Synthetic oligonucleotide
cuagauuguuaugacgagu

SEQ ID NO: 1407006 - RNA, 19 nt, Artificial Sequence
  Description of Artificial Sequence: Synthetic oligonucleotide
auggaacucagcagcugcu

SEQ ID NO: 1407007 - RNA, 19 nt, Artificial Sequence
  Description of Artificial Sequence: Synthetic oligonucleotide
ccuuauacuccauuggggu

SEQ ID NO: 1407008 - RNA, 19 nt, Artificial Sequence
  Description of Artificial Sequence: Synthetic oligonucleotide
uagccgcccaugucucgag

SEQ ID NO: 1407009 - RNA, 19 nt, Artificial Sequence
  Description of Artificial Sequence: Synthetic oligonucleotide
caugagcuccggccccacg

SEQ ID NO: 1407010 - RNA, 19 nt, Artificial Sequence
  Description of Artificial Sequence: Synthetic oligonucleotide
gacuuaugacagggcagca

SEQ ID NO: 1407011 - RNA, 19 nt, Artificial Sequence
  Description of Artificial Sequence: Synthetic oligonucleotide
uacgccucagcugcauauc

SEQ ID NO: 1407012 - RNA, 19 nt, Artificial Sequence
  Description of Artificial Sequence: Synthetic oligonucleotide
ggaaaggcacccucaaccu

SEQ ID NO: 1407013 - RNA, 19 nt, Artificial Sequence
  Description of Artificial Sequence: Synthetic oligonucleotide
gccagauugucaauaaugu

SEQ ID NO: 1407014 - RNA, 19 nt, Artificial Sequence
  Description of Artificial Sequence: Synthetic oligonucleotide
cacgccgucucccggcaac

SEQ ID NO: 1407015 - RNA, 19 nt, Artificial Sequence
  Description of Artificial Sequence: Synthetic oligonucleotide
gcggacauugcucagcgcu

SEQ ID NO: 1407016 - RNA, 19 nt, Artificial Sequence
  Description of Artificial Sequence: Synthetic oligonucleotide
auguucccauaaagauugg

SEQ ID NO: 1407017 - RNA, 19 nt, Artificial Sequence
  Description of Artificial Sequence: Synthetic oligonucleotide
ggacauugcucagcgcugc

SEQ ID NO: 1407018 - RNA, 19 nt, Artificial Sequence
  Description of Artificial Sequence: Synthetic oligonucleotide
gugccgagcacccgucuca

SEQ ID NO: 1407019 - RNA, 19 nt, Artificial Sequence
  Description of Artificial Sequence: Synthetic oligonucleotide
gcauaucauaggaagcuaa

SEQ ID NO: 1407020 - RNA, 19 nt, Artificial Sequence
  Description of Artificial Sequence: Synthetic oligonucleotide
cccggcaacauggucacag

SEQ ID NO: 1407021 - RNA, 19 nt, Artificial Sequence
  Description of Artificial Sequence: Synthetic oligonucleotide
accucgcucaggcggugcu

SEQ ID NO: 1407022 - RNA, 19 nt, Artificial Sequence
  Description of Artificial Sequence: Synthetic oligonucleotide
ggccuuauggacagcugug

SEQ ID NO: 1407023 - RNA, 19 nt, Artificial Sequence
  Description of Artificial Sequence: Synthetic oligonucleotide
ggcaacauggucacaggaa

SEQ ID NO: 1407024 - RNA, 19 nt, Artificial Sequence
  Description of Artificial Sequence: Synthetic oligonucleotide
ugggucugugaagcggcgu

SEQ ID NO: 1407025 - RNA, 19 nt, Artificial Sequence
  Description of Artificial Sequence: Synthetic oligonucleotide
gcaauuaucuaugaucauu

SEQ ID NO: 1407026 - RNA, 19 nt, Artificial Sequence
  Description of Artificial Sequence: Synthetic oligonucleotide
ucaugacaaguggcauaac

SEQ ID NO: 1407027 - RNA, 19 nt, Artificial Sequence
  Description of Artificial Sequence: Synthetic oligonucleotide
cagccgauguucggagacc

SEQ ID NO: 1407028 - RNA, 19 nt, Artificial Sequence
  Description of Artificial Sequence: Synthetic oligonucleotide
ggcggugcuccuugaauuc

SEQ ID NO: 1407029 - RNA, 19 nt, Artificial Sequence
  Description of Artificial Sequence: Synthetic oligonucleotide
cauuggcaaacaaguccaa

SEQ ID NO: 1407030 - RNA, 19 nt, Artificial Sequence
  Description of Artificial Sequence: Synthetic oligonucleotide
cgcccuuauacuccauugg

SEQ ID NO: 1407031 - RNA, 19 nt, Artificial Sequence
  Description of Artificial Sequence: Synthetic oligonucleotide
gcaaaugggugccgagcac

SEQ ID NO: 1407032 - RNA, 19 nt, Artificial Sequence
  Description of Artificial Sequence: Synthetic oligonucleotide
uauuggccuuauggacagc

SEQ ID NO: 1407033 - RNA, 19 nt, Artificial Sequence
  Description of Artificial Sequence: Synthetic oligonucleotide
caaguggcauaaccaccca

SEQ ID NO: 1407034 - RNA, 19 nt, Artificial Sequence
  Description of Artificial Sequence: Synthetic oligonucleotide
ugucucgaguccguaccuu

SEQ ID NO: 1407035 - RNA, 19 nt, Artificial Sequence
  Description of Artificial Sequence: Synthetic oligonucleotide
gcauaaccacccauaucug

SEQ ID NO: 1407036 - RNA, 19 nt, Artificial Sequence
  Description of Artificial Sequence: Synthetic oligonucleotide
guagccgcccaugucucga

SEQ ID NO: 1407037 - RNA, 19 nt, Artificial Sequence
  Description of Artificial Sequence: Synthetic oligonucleotide
cagcugcauaucauaggaa

SEQ ID NO: 1407038 - RNA, 19 nt, Artificial Sequence
  Description of Artificial Sequence: Synthetic oligonucleotide
gcucaggcggugcuccuug

SEQ ID NO: 1407039 - RNA, 19 nt, Artificial Sequence
  Description of Artificial Sequence: Synthetic oligonucleotide
ucgggucagccagcggaca

SEQ ID NO: 1407040 - RNA, 19 nt, Artificial Sequence
  Description of Artificial Sequence: Synthetic oligonucleotide
gucucccggcaacaugguc

SEQ ID NO: 1407041 - RNA, 19 nt, Artificial Sequence
  Description of Artificial Sequence: Synthetic oligonucleotide
uccggccccacgccgucuc

SEQ ID NO: 1407042 - RNA, 19 nt, Artificial Sequence
  Description of Artificial Sequence: Synthetic oligonucleotide
ccggcaacauggucacagg

SEQ ID NO: 1407043 - RNA, 19 nt, Artificial Sequence
  Description of Artificial Sequence: Synthetic oligonucleotide
ucacugcgucugcaaucau

SEQ ID NO: 1407044 - RNA, 19 nt, Artificial Sequence
  Description of Artificial Sequence: Synthetic oligonucleotide
gcucucaccagggaccaca

SEQ ID NO: 1407045 - RNA, 19 nt, Artificial Sequence
  Description of Artificial Sequence: Synthetic oligonucleotide
ccagcggacauugcucagc

SEQ ID NO: 1407046 - RNA, 19 nt, Artificial Sequence
  Description of Artificial Sequence: Synthetic oligonucleotide
ccgcccaugucucgagucc

SEQ ID NO: 1407047 - RNA, 19 nt, Artificial Sequence
  Description of Artificial Sequence: Synthetic oligonucleotide
ggugccgagcacccgucuc

SEQ ID NO: 1407048 - RNA, 19 nt, Artificial Sequence
  Description of Artificial Sequence: Synthetic oligonucleotide
agcucucaccagggaccac

SEQ ID NO: 1407049 - RNA, 19 nt, Artificial Sequence
  Description of Artificial Sequence: Synthetic oligonucleotide
cuuuggaguuggagggagu

SEQ ID NO: 1407050 - RNA, 19 nt, Artificial Sequence
  Description of Artificial Sequence: Synthetic oligonucleotide
gcacugcaagaacaaccca

SEQ ID NO: 1407051 - RNA, 19 nt, Artificial Sequence
  Description of Artificial Sequence: Synthetic oligonucleotide
ggugcuccuugaauuccac

SEQ ID NO: 1407052 - RNA, 19 nt, Artificial Sequence
  Description of Artificial Sequence: Synthetic oligonucleotide
cgugggauuggcuauauuu

SEQ ID NO: 1407053 - RNA, 19 nt, Artificial Sequence
  Description of Artificial Sequence: Synthetic oligonucleotide
gccgucucccggcaacaug

SEQ ID NO: 1407054 - RNA, 19 nt, Artificial Sequence
  Description of Artificial Sequence: Synthetic oligonucleotide
gcggugcuccuugaauucc

SEQ ID NO: 1407055 - RNA, 19 nt, Artificial Sequence
  Description of Artificial Sequence: Synthetic oligonucleotide
cggacauugcucagcgcug

SEQ ID NO: 1407056 - RNA, 19 nt, Artificial Sequence
  Description of Artificial Sequence: Synthetic oligonucleotide
ccgagcacccgucucaaaa

SEQ ID NO: 1407057 - RNA, 19 nt, Artificial Sequence
  Description of Artificial Sequence: Synthetic oligonucleotide
gccgcccaugucucgaguc

SEQ ID NO: 1407058 - RNA, 19 nt, Artificial Sequence
  Description of Artificial Sequence: Synthetic oligonucleotide
cuugugcagguacccuaua

SEQ ID NO: 1407059 - RNA, 19 nt, Artificial Sequence
  Description of Artificial Sequence: Synthetic oligonucleotide
cccaggaagugacuucaca

SEQ ID NO: 1407060 - RNA, 19 nt, Artificial Sequence
  Description of Artificial Sequence: Synthetic oligonucleotide
auccuguggucuggaucca

SEQ ID NO: 1407061 - RNA, 19 nt, Artificial Sequence
  Description of Artificial Sequence: Synthetic oligonucleotide
ccgcagccgauguucggag

SEQ ID NO: 1407062 - RNA, 19 nt, Artificial Sequence
  Description of Artificial Sequence: Synthetic oligonucleotide
ggcuauauuucugcccacu

SEQ ID NO: 1407063 - RNA, 19 nt, Artificial Sequence
  Description of Artificial Sequence: Synthetic oligonucleotide
cugucuguucucgaaugau

SEQ ID NO: 1407064 - RNA, 19 nt, Artificial Sequence
  Description of Artificial Sequence: Synthetic oligonucleotide
cguaccuugccaacuuuaa

SEQ ID NO: 1407065 - RNA, 19 nt, Artificial Sequence
  Description of Artificial Sequence: Synthetic oligonucleotide
cgauguucggagaccucuc

SEQ ID NO: 1407066 - RNA, 19 nt, Artificial Sequence
  Description of Artificial Sequence: Synthetic oligonucleotide
gcggcgugagccgcagccg

SEQ ID NO: 1407067 - RNA, 19 nt, Artificial Sequence
  Description of Artificial Sequence: Synthetic oligonucleotide
gggguuccgagcggcgacc

SEQ ID NO: 1407068 - RNA, 19 nt, Artificial Sequence
  Description of Artificial Sequence: Synthetic oligonucleotide
ggaagcuaauucgcccuua

SEQ ID NO: 1407069 - RNA, 19 nt, Artificial Sequence
  Description of Artificial Sequence: Synthetic oligonucleotide
caggcggugcuccuugaau

SEQ ID NO: 1407070 - RNA, 19 nt, Artificial Sequence
  Description of Artificial Sequence: Synthetic oligonucleotide
gccgcagccgauguucgga

SEQ ID NO: 1407071 - RNA, 19 nt, Artificial Sequence
  Description of Artificial Sequence: Synthetic oligonucleotide
ggcgaccaccgcucggguc

SEQ ID NO: 1407072 - RNA, 19 nt, Artificial Sequence
  Description of Artificial Sequence: Synthetic oligonucleotide
cagccagauugucaauaau

SEQ ID NO: 1407073 - RNA, 19 nt, Artificial Sequence
  Description of Artificial Sequence: Synthetic oligonucleotide
cccacugccugggcaaaug

SEQ ID NO: 1407074 - RNA, 19 nt, Artificial Sequence
  Description of Artificial Sequence: Synthetic oligonucleotide
ccccacgccgucucccggc

SEQ ID NO: 1407075 - RNA, 19 nt, Artificial Sequence
  Description of Artificial Sequence: Synthetic oligonucleotide
gguuccgagcggcgaccac

SEQ ID NO: 1407076 - RNA, 19 nt, Artificial Sequence
  Description of Artificial Sequence: Synthetic oligonucleotide
ccugggcaaaugggugccg

SEQ ID NO: 1407077 - RNA, 19 nt, Artificial Sequence
  Description of Artificial Sequence: Synthetic oligonucleotide
cgagucauguacccaggaa

SEQ ID NO: 1407078 - RNA, 19 nt, Artificial Sequence
  Description of Artificial Sequence: Synthetic oligonucleotide
gcgugagccgcagccgaug

SEQ ID NO: 1407079 - RNA, 19 nt, Artificial Sequence
  Description of Artificial Sequence: Synthetic oligonucleotide
cccgggguuccgagcggcg

SEQ ID NO: 1407080 - RNA, 19 nt, Artificial Sequence
  Description of Artificial Sequence: Synthetic oligonucleotide
ccgauguucggagaccucu

SEQ ID NO: 1407081 - RNA, 19 nt, Artificial Sequence
  Description of Artificial Sequence: Synthetic oligonucleotide
ggucuacuguuagauguuu

SEQ ID NO: 1407082 - RNA, 19 nt, Artificial Sequence
  Description of Artificial Sequence: Synthetic oligonucleotide
gcauggccgugggauuggc

SEQ ID NO: 1407083 - RNA, 19 nt, Artificial Sequence
  Description of Artificial Sequence: Synthetic oligonucleotide
ccuugugcagguacccuau

SEQ ID NO: 1407084 - RNA, 19 nt, Artificial Sequence
  Description of Artificial Sequence: Synthetic oligonucleotide
ccgcucgggucagccagcg

SEQ ID NO: 1407085 - RNA, 19 nt, Artificial Sequence
  Description of Artificial Sequence: Synthetic oligonucleotide
ggguuccgagcggcgacca

SEQ ID NO: 1407086 - RNA, 19 nt, Artificial Sequence
  Description of Artificial Sequence: Synthetic oligonucleotide
gggucuacuguuagauguu

SEQ ID NO: 1407087 - RNA, 19 nt, Artificial Sequence
  Description of Artificial Sequence: Synthetic oligonucleotide
cgggguuccgagcggcgac

SEQ ID NO: 1407088 - RNA, 19 nt, Artificial Sequence
  Description of Artificial Sequence: Synthetic oligonucleotide
cugcgucugcaaucauguu

SEQ ID NO: 1407089 - RNA, 19 nt, Artificial Sequence
  Description of Artificial Sequence: Synthetic oligonucleotide
ccucgcucaggcggugcuc

SEQ ID NO: 1407090 - RNA, 19 nt, Artificial Sequence
  Description of Artificial Sequence: Synthetic oligonucleotide
ccgagcggcgaccaccgcu

SEQ ID NO: 1407091 - RNA, 19 nt, Artificial Sequence
  Description of Artificial Sequence: Synthetic oligonucleotide
ggccgugggauuggcuaua

SEQ ID NO: 1407092 - RNA, 19 nt, Artificial Sequence
  Description of Artificial Sequence: Synthetic oligonucleotide
cccacgccgucucccggca

SEQ ID NO: 1407093 - RNA, 19 nt, Artificial Sequence
  Description of Artificial Sequence: Synthetic oligonucleotide
cgcucgggucagccagcgg

SEQ ID NO: 1407094 - RNA, 19 nt, Artificial Sequence
  Description of Artificial Sequence: Synthetic oligonucleotide
gccgagcacccgucucaaa

SEQ ID NO: 1407095 - RNA, 19 nt, Artificial Sequence
  Description of Artificial Sequence: Synthetic oligonucleotide
cgcagccgauguucggaga

SEQ ID NO: 1407096 - RNA, 19 nt, Artificial Sequence
  Description of Artificial Sequence: Synthetic oligonucleotide
cggcgugagccgcagccga

SEQ ID NO: 1407097 - RNA, 19 nt, Artificial Sequence
  Description of Artificial Sequence: Synthetic oligonucleotide
ccgggguuccgagcggcga

SEQ ID NO: 1407098 - RNA, 19 nt, Artificial Sequence
  Description of Artificial Sequence: Synthetic oligonucleotide
ccaagccccgggguuccga

SEQ ID NO: 1407099 - RNA, 19 nt, Artificial Sequence
  Description of Artificial Sequence: Synthetic oligonucleotide
cccaugucucgaguccgua

SEQ ID NO: 1407100 - RNA, 19 nt, Artificial Sequence
  Description of Artificial Sequence: Synthetic oligonucleotide
cgugagccgcagccgaugu

SEQ ID NO: 1407101 - RNA, 19 nt, Artificial Sequence
  Description of Artificial Sequence: Synthetic oligonucleotide
gccgugggauuggcuauau

SEQ ID NO: 1407102 - RNA, 19 nt, Artificial Sequence
  Description of Artificial Sequence: Synthetic oligonucleotide
ggcgugagccgcagccgau

SEQ ID NO: 1407103 - RNA, 19 nt, Artificial Sequence
  Description of Artificial Sequence: Synthetic oligonucleotide
cgucucccggcaacauggu

SEQ ID NO: 1407104 - RNA, 19 nt, Artificial Sequence
  Description of Artificial Sequence: Synthetic oligonucleotide
cgggucagccagcggacau

SEQ ID NO: 1407105 - RNA, 19 nt, Artificial Sequence
  Description of Artificial Sequence: Synthetic oligonucleotide
ccacgccgucucccggcaa

SEQ ID NO: 1407106 - RNA, 19 nt, Artificial Sequence
  Description of Artificial Sequence: Synthetic oligonucleotide
ccgugggauuggcuauauu

SEQ ID NO: 1407107 - RNA, 19 nt, Artificial Sequence
  Description of Artificial Sequence: Synthetic oligonucleotide
ccauugggguauggaucuu

SEQ ID NO: 1407108 - RNA, 19 nt, Artificial Sequence
  Description of Artificial Sequence: Synthetic oligonucleotide
cggcgaccaccgcucgggu

SEQ ID NO: 1407109 - RNA, 19 nt, Artificial Sequence
  Description of Artificial Sequence: Synthetic oligonucleotide
aaugguucgaauuugaucc

SEQ ID NO: 1407110 - RNA, 19 nt, Artificial Sequence
  Description of Artificial Sequence: Synthetic oligonucleotide
ucaaacaaguccaagaugg

SEQ ID NO: 1407111 - RNA, 19 nt, Artificial Sequence
  Description of Artificial Sequence: Synthetic oligonucleotide
caaacauaaacuuauagcc

SEQ ID NO: 1407112 - RNA, 19 nt, Artificial Sequence
  Description of Artificial Sequence: Synthetic oligonucleotide
uaguagaucacaaacauag

SEQ ID NO: 1407113 - RNA, 19 nt, Artificial Sequence
  Description of Artificial Sequence: Synthetic oligonucleotide
aaggguacaugacuuaggc

SEQ ID NO: 1407114 - RNA, 19 nt, Artificial Sequence
  Description of Artificial Sequence: Synthetic oligonucleotide
uaaaaguguaauacgauca

SEQ ID NO: 1407115 - RNA, 19 nt, Artificial Sequence
  Description of Artificial Sequence: Synthetic oligonucleotide
uucaugaacaaguugaugu

SEQ ID NO: 1407116 - RNA, 19 nt, Artificial Sequence
  Description of Artificial Sequence: Synthetic oligonucleotide
aauaguagaucacaaacau

SEQ ID NO: 1407117 - RNA, 19 nt, Artificial Sequence
  Description of Artificial Sequence: Synthetic oligonucleotide
aaaggcgggauauaagagg

SEQ ID NO: 1407118 - RNA, 19 nt, Artificial Sequence
  Description of Artificial Sequence: Synthetic oligonucleotide
aauaacacguucugaaucu

SEQ ID NO: 1407119 - RNA, 19 nt, Artificial Sequence
  Description of Artificial Sequence: Synthetic oligonucleotide
ugaguauuaagacauuucu

SEQ ID NO: 1407120 - RNA, 19 nt, Artificial Sequence
  Description of Artificial Sequence: Synthetic oligonucleotide
aaaaguguaauacgaucag

SEQ ID NO: 1407121 - RNA, 19 nt, Artificial Sequence
  Description of Artificial Sequence: Synthetic oligonucleotide
aaauauguaguuuguguca

SEQ ID NO: 1407122 - RNA, 19 nt, Artificial Sequence
  Description of Artificial Sequence: Synthetic oligonucleotide
acuuauagccuucaugaac

SEQ ID NO: 1407123 - RNA, 19 nt, Artificial Sequence
  Description of Artificial Sequence: Synthetic oligonucleotide
auaaauauguaguuugugu

SEQ ID NO: 1407124 - RNA, 19 nt, Artificial Sequence
  Description of Artificial Sequence: Synthetic oligonucleotide
uguaguuugugucaggaac

SEQ ID NO: 1407125 - RNA, 19 nt, Artificial Sequence
  Description of Artificial Sequence: Synthetic oligonucleotide
acuuugguacaauaucucc

SEQ ID NO: 1407126 - RNA, 19 nt, Artificial Sequence
  Description of Artificial Sequence: Synthetic oligonucleotide
ucuuguauugacaucuuug

SEQ ID NO: 1407127 - RNA, 19 nt, Artificial Sequence
  Description of Artificial Sequence: Synthetic oligonucleotide
aguguaauacgaucaggcc

SEQ ID NO: 1407128 - RNA, 19 nt, Artificial Sequence
  Description of Artificial Sequence: Synthetic oligonucleotide
uaagacauuucucaagucu

SEQ ID NO: 1407129 - RNA, 19 nt, Artificial Sequence
  Description of Artificial Sequence: Synthetic oligonucleotide
uacuuguccagaucgagcg

SEQ ID NO: 1407130 - RNA, 19 nt, Artificial Sequence
  Description of Artificial Sequence: Synthetic oligonucleotide
aaugugaguauuaagacau

SEQ ID NO: 1407131 - RNA, 19 nt, Artificial Sequence
  Description of Artificial Sequence: Synthetic oligonucleotide
aguaguuaggagcagacca

SEQ ID NO: 1407132 - RNA, 19 nt, Artificial Sequence
  Description of Artificial Sequence: Synthetic oligonucleotide
aguguuuugauaucaggag

SEQ ID NO: 1407133 - RNA, 19 nt, Artificial Sequence
  Description of Artificial Sequence: Synthetic oligonucleotide
caaacauagucacacagcc

SEQ ID NO: 1407134 - RNA, 19 nt, Artificial Sequence
  Description of Artificial Sequence: Synthetic oligonucleotide
ucuuaggcagaacaagccg

SEQ ID NO: 1407135 - RNA, 19 nt, Artificial Sequence
  Description of Artificial Sequence: Synthetic oligonucleotide
uuugguacaauaucuccag

SEQ ID NO: 1407136 - RNA, 19 nt, Artificial Sequence
  Description of Artificial Sequence: Synthetic oligonucleotide
uuugugaggaauuuccuga

SEQ ID NO: 1407137 - RNA, 19 nt, Artificial Sequence
  Description of Artificial Sequence: Synthetic oligonucleotide
acgaucaggccauuuagcc

SEQ ID NO: 1407138 - RNA, 19 nt, Artificial Sequence
  Description of Artificial Sequence: Synthetic oligonucleotide
uuaaaaguguaauacgauc

SEQ ID NO: 1407139 - RNA, 19 nt, Artificial Sequence
  Description of Artificial Sequence: Synthetic oligonucleotide
agugucuacaucuucagga

SEQ ID NO: 1407140 - RNA, 19 nt, Artificial Sequence
  Description of Artificial Sequence: Synthetic oligonucleotide
ucuauuaaagcugcuacug

SEQ ID NO: 1407141 - RNA, 19 nt, Artificial Sequence
  Description of Artificial Sequence: Synthetic oligonucleotide
aagcgauguuuccacaucg

SEQ ID NO: 1407142 - RNA, 19 nt, Artificial Sequence
  Description of Artificial Sequence: Synthetic oligonucleotide
aauauguaguuugugucag

SEQ ID NO: 1407143 - RNA, 19 nt, Artificial Sequence
  Description of Artificial Sequence: Synthetic oligonucleotide
uuuagugcaagaagauaag

SEQ ID NO: 1407144 - RNA, 19 nt, Artificial Sequence
  Description of Artificial Sequence: Synthetic oligonucleotide
uguaauacgaucaggccau

SEQ ID NO: 1407145 - RNA, 19 nt, Artificial Sequence
  Description of Artificial Sequence: Synthetic oligonucleotide
gcugaaauuucuuaaaccc

SEQ ID NO: 1407146 - RNA, 19 nt, Artificial Sequence
  Description of Artificial Sequence: Synthetic oligonucleotide
aaaaucacccauaaauaug

SEQ ID NO: 1407147 - RNA, 19 nt, Artificial Sequence
  Description of Artificial Sequence: Synthetic oligonucleotide
ugcucaucuauuaaagcug

SEQ ID NO: 1407148 - RNA, 19 nt, Artificial Sequence
  Description of Artificial Sequence: Synthetic oligonucleotide
uuuuaaguuguugauguga

SEQ ID NO: 1407149 - RNA, 19 nt, Artificial Sequence
  Description of Artificial Sequence: Synthetic oligonucleotide
uguuuugauaucaggagau

SEQ ID NO: 1407150 - RNA, 19 nt, Artificial Sequence
  Description of Artificial Sequence: Synthetic oligonucleotide
ugcaagaagauaagugaag

SEQ ID NO: 1407151 - RNA, 19 nt, Artificial Sequence
  Description of Artificial Sequence: Synthetic oligonucleotide
guauugacaucuuugaaga

SEQ ID NO: 1407152 - RNA, 19 nt, Artificial Sequence
  Description of Artificial Sequence: Synthetic oligonucleotide
uuuaaguuguugaugugaa

SEQ ID NO: 1407153 - RNA, 19 nt, Artificial Sequence
  Description of Artificial Sequence: Synthetic oligonucleotide
uccauauuugguuuggcac

SEQ ID NO: 1407154 - RNA, 19 nt, Artificial Sequence
  Description of Artificial Sequence: Synthetic oligonucleotide
aggaaaugcguccuguuuc

SEQ ID NO: 1407155 - RNA, 19 nt, Artificial Sequence
  Description of Artificial Sequence: Synthetic oligonucleotide
aaaguguaauacgaucagg

SEQ ID NO: 1407156 - RNA, 19 nt, Artificial Sequence
  Description of Artificial Sequence: Synthetic oligonucleotide
aaauacggcgucgugguuc

SEQ ID NO: 1407157 - RNA, 19 nt, Artificial Sequence
  Description of Artificial Sequence: Synthetic oligonucleotide
uaagccgccaugaacacac

SEQ ID NO: 1407158 - RNA, 19 nt, Artificial Sequence
  Description of Artificial Sequence: Synthetic oligonucleotide
uuaggcagaacaagccgcg

SEQ ID NO: 1407159 - RNA, 19 nt, Artificial Sequence
  Description of Artificial Sequence: Synthetic oligonucleotide
uggcugauauaaaugagga

SEQ ID NO: 1407160 - RNA, 19 nt, Artificial Sequence
  Description of Artificial Sequence: Synthetic oligonucleotide
uuuggcacucaucauaaaa

SEQ ID NO: 1407161 - RNA, 19 nt, Artificial Sequence
  Description of Artificial Sequence: Synthetic oligonucleotide
aacauugcuauggacacca

SEQ ID NO: 1407162 - RNA, 19 nt, Artificial Sequence
  Description of Artificial Sequence: Synthetic oligonucleotide
gaacacacaaaauuugcuc

SEQ ID NO: 1407163 - RNA, 19 nt, Artificial Sequence
  Description of Artificial Sequence: Synthetic oligonucleotide
cuuuagugcaagaagauaa

SEQ ID NO: 1407164 - RNA, 19 nt, Artificial Sequence
  Description of Artificial Sequence: Synthetic oligonucleotide
aaggcgggauauaagaggg

SEQ ID NO: 1407165 - RNA, 19 nt, Artificial Sequence
  Description of Artificial Sequence: Synthetic oligonucleotide
uaagugaaggucuccaaac

SEQ ID NO: 1407166 - RNA, 19 nt, Artificial Sequence
  Description of Artificial Sequence: Synthetic oligonucleotide
caugacuuaggcauugcag

SEQ ID NO: 1407167 - RNA, 19 nt, Artificial Sequence
  Description of Artificial Sequence: Synthetic oligonucleotide
ugaacauucgacucuucca

SEQ ID NO: 1407168 - RNA, 19 nt, Artificial Sequence
  Description of Artificial Sequence: Synthetic oligonucleotide
cuuaggcagaacaagccgc

SEQ ID NO: 1407169 - RNA, 19 nt, Artificial Sequence
  Description of Artificial Sequence: Synthetic oligonucleotide
caaacuauaguaaccucug

SEQ ID NO: 1407170 - RNA, 19 nt, Artificial Sequence
  Description of Artificial Sequence: Synthetic oligonucleotide
uccugauuucguucaaugg

SEQ ID NO: 1407171 - RNA, 19 nt, Artificial Sequence
  Description of Artificial Sequence: Synthetic oligonucleotide
aagauaagugaaggucucc

SEQ ID NO: 1407172 - RNA, 19 nt, Artificial Sequence
  Description of Artificial Sequence: Synthetic oligonucleotide
ucuacucucaugauuuccu

SEQ ID NO: 1407173 - RNA, 19 nt, Artificial Sequence
  Description of Artificial Sequence: Synthetic oligonucleotide
agcaaugugaguauuaaga

SEQ ID NO: 1407174 - RNA, 19 nt, Artificial Sequence
  Description of Artificial Sequence: Synthetic oligonucleotide
aauacgaucaggccauuua

SEQ ID NO: 1407175 - RNA, 19 nt, Artificial Sequence
  Description of Artificial Sequence: Synthetic oligonucleotide
gacaccauaacaaacaaua

SEQ ID NO: 1407176 - RNA, 19 nt, Artificial Sequence
  Description of Artificial Sequence: Synthetic oligonucleotide
aaguauauuguagagggua

SEQ ID NO: 1407177 - RNA, 19 nt, Artificial Sequence
  Description of Artificial Sequence: Synthetic oligonucleotide
ucaugaacaaguugaugug

SEQ ID NO: 1407178 - RNA, 19 nt, Artificial Sequence
  Description of Artificial Sequence: Synthetic oligonucleotide
auggaagcgauguuuccac

SEQ ID NO: 1407179 - RNA, 19 nt, Artificial Sequence
  Description of Artificial Sequence: Synthetic oligonucleotide
aaggucuccaaacuauagu

SEQ ID NO: 1407180 - RNA, 19 nt, Artificial Sequence
  Description of Artificial Sequence: Synthetic oligonucleotide
aggaauaacacguucugaa

SEQ ID NO: 1407181 - RNA, 19 nt, Artificial Sequence
  Description of Artificial Sequence: Synthetic oligonucleotide
aaauuugcucaucuauuaa

SEQ ID NO: 1407182 - RNA, 19 nt, Artificial Sequence
  Description of Artificial Sequence: Synthetic oligonucleotide
aacaaguccaagaugggga

SEQ ID NO: 1407183 - RNA, 19 nt, Artificial Sequence
  Description of Artificial Sequence: Synthetic oligonucleotide
uuaaacccuaccaaacaaa

SEQ ID NO: 1407184 - RNA, 19 nt, Artificial Sequence
  Description of Artificial Sequence: Synthetic oligonucleotide
auacgaucaggccauuuag

SEQ ID NO: 1407185 - RNA, 19 nt, Artificial Sequence
  Description of Artificial Sequence: Synthetic oligonucleotide
gaugggaugagugacaaaa

SEQ ID NO: 1407186 - RNA, 19 nt, Artificial Sequence
  Description of Artificial Sequence: Synthetic oligonucleotide
aaugcguccuguuucccca

SEQ ID NO: 1407187 - RNA, 19 nt, Artificial Sequence
  Description of Artificial Sequence: Synthetic oligonucleotide
aguauauuguagaggguac

SEQ ID NO: 1407188 - RNA, 19 nt, Artificial Sequence
  Description of Artificial Sequence: Synthetic oligonucleotide
agauaagccgccaugaaca

SEQ ID NO: 1407189 - RNA, 19 nt, Artificial Sequence
  Description of Artificial Sequence: Synthetic oligonucleotide
aaguuguugaugugaacaa

SEQ ID NO: 1407190 - RNA, 19 nt, Artificial Sequence
  Description of Artificial Sequence: Synthetic oligonucleotide
aucuuaggcagaacaagcc

SEQ ID NO: 1407191 - RNA, 19 nt, Artificial Sequence
  Description of Artificial Sequence: Synthetic oligonucleotide
uguaauugucaauuggcuu

SEQ ID NO: 1407192 - RNA, 19 nt, Artificial Sequence
  Description of Artificial Sequence: Synthetic oligonucleotide
agaagauaagugaaggucu

SEQ ID NO: 1407193 - RNA, 19 nt, Artificial Sequence
  Description of Artificial Sequence: Synthetic oligonucleotide
cuuguauugacaucuuuga

SEQ ID NO: 1407194 - RNA, 19 nt, Artificial Sequence
  Description of Artificial Sequence: Synthetic oligonucleotide
ucauccaguaaggacagug

SEQ ID NO: 1407195 - RNA, 19 nt, Artificial Sequence
  Description of Artificial Sequence: Synthetic oligonucleotide
uuuugauaucaggagauaa

SEQ ID NO: 1407196 - RNA, 19 nt, Artificial Sequence
  Description of Artificial Sequence: Synthetic oligonucleotide
ccucaaaggaaauacggcg

SEQ ID NO: 1407197 - RNA, 19 nt, Artificial Sequence
  Description of Artificial Sequence: Synthetic oligonucleotide
guguaauacgaucaggcca

SEQ ID NO: 1407198 - RNA, 19 nt, Artificial Sequence
  Description of Artificial Sequence: Synthetic oligonucleotide
ucgacucuuccaauaguag

SEQ ID NO: 1407199 - RNA, 19 nt, Artificial Sequence
  Description of Artificial Sequence: Synthetic oligonucleotide
aaacauagucacacagccg

SEQ ID NO: 1407200 - RNA, 19 nt, Artificial Sequence
  Description of Artificial Sequence: Synthetic oligonucleotide
aaguuuacagcugggacaa

SEQ ID NO: 1407201 - RNA, 19 nt, Artificial Sequence
  Description of Artificial Sequence: Synthetic oligonucleotide
gagauaagccgccaugaac

SEQ ID NO: 1407202 - RNA, 19 nt, Artificial Sequence
  Description of Artificial Sequence: Synthetic oligonucleotide
aggaaauacggcgucgugg

SEQ ID NO: 1407203 - RNA, 19 nt, Artificial Sequence
  Description of Artificial Sequence: Synthetic oligonucleotide
auugcuauggacaccauaa

SEQ ID NO: 1407204 - RNA, 19 nt, Artificial Sequence
  Description of Artificial Sequence: Synthetic oligonucleotide
caucgauagcaguaguuag

SEQ ID NO: 1407205 - RNA, 19 nt, Artificial Sequence
  Description of Artificial Sequence: Synthetic oligonucleotide
aaaugaggaggauuuccau

SEQ ID NO: 1407206 - RNA, 19 nt, Artificial Sequence
  Description of Artificial Sequence: Synthetic oligonucleotide
aucuauuaaagcugcuacu

SEQ ID NO: 1407207 - RNA, 19 nt, Artificial Sequence
  Description of Artificial Sequence: Synthetic oligonucleotide
uaggcauugcaguccaucc

SEQ ID NO: 1407208 - RNA, 19 nt, Artificial Sequence
  Description of Artificial Sequence: Synthetic oligonucleotide
gaacauucgacucuuccaa

SEQ ID NO: 1407209 - RNA, 19 nt, Artificial Sequence
  Description of Artificial Sequence: Synthetic oligonucleotide
aauacggcgucgugguucu

SEQ ID NO: 1407210 - RNA, 19 nt, Artificial Sequence
  Description of Artificial Sequence: Synthetic oligonucleotide
uucgacucuuccaauagua

SEQ ID NO: 1407211 - RNA, 19 nt, Artificial Sequence
  Description of Artificial Sequence: Synthetic oligonucleotide
uuauacccuuuuaaaacau

SEQ ID NO: 1407212 - RNA, 19 nt, Artificial Sequence
  Description of Artificial Sequence: Synthetic oligonucleotide
uuugugucaggaaccuggc

SEQ ID NO: 1407213 - RNA, 19 nt, Artificial Sequence
  Description of Artificial Sequence: Synthetic oligonucleotide
uacgaucaggccauuuagc

SEQ ID NO: 1407214 - RNA, 19 nt, Artificial Sequence
  Description of Artificial Sequence: Synthetic oligonucleotide
ggccauuuagccuuuagug

SEQ ID NO: 1407215 - RNA, 19 nt, Artificial Sequence
  Description of Artificial Sequence: Synthetic oligonucleotide
cacguucugaaucuggaac

SEQ ID NO: 1407216 - RNA, 19 nt, Artificial Sequence
  Description of Artificial Sequence: Synthetic oligonucleotide
auaagugaaggucuccaaa

SEQ ID NO: 1407217 - RNA, 19 nt, Artificial Sequence
  Description of Artificial Sequence: Synthetic oligonucleotide
cuuugguacaauaucucca

SEQ ID NO: 1407218 - RNA, 19 nt, Artificial Sequence
  Description of Artificial Sequence: Synthetic oligonucleotide
cauucgacucuuccaauag

SEQ ID NO: 1407219 - RNA, 19 nt, Artificial Sequence
  Description of Artificial Sequence: Synthetic oligonucleotide
gaaaggcgggauauaagag

SEQ ID NO: 1407220 - RNA, 19 nt, Artificial Sequence
  Description of Artificial Sequence: Synthetic oligonucleotide
auagucacacagccgcuuc

SEQ ID NO: 1407221 - RNA, 19 nt, Artificial Sequence
  Description of Artificial Sequence: Synthetic oligonucleotide
cuguuacugguguugacac

SEQ ID NO: 1407222 - RNA, 19 nt, Artificial Sequence
  Description of Artificial Sequence: Synthetic oligonucleotide
aaaggaaauacggcgucgu

SEQ ID NO: 1407223 - RNA, 19 nt, Artificial Sequence
  Description of Artificial Sequence: Synthetic oligonucleotide
gucuccaaacuauaguaac

SEQ ID NO: 1407224 - RNA, 19 nt, Artificial Sequence
  Description of Artificial Sequence: Synthetic oligonucleotide
guucgaauuugauccagug

SEQ ID NO: 1407225 - RNA, 19 nt, Artificial Sequence
  Description of Artificial Sequence: Synthetic oligonucleotide
acguucugaaucuggaacu

SEQ ID NO: 1407226 - RNA, 19 nt, Artificial Sequence
  Description of Artificial Sequence: Synthetic oligonucleotide
guaguuugugucaggaacc

SEQ ID NO: 1407227 - RNA, 19 nt, Artificial Sequence
  Description of Artificial Sequence: Synthetic oligonucleotide
uauauuguagaggguacaa

SEQ ID NO: 1407228 - RNA, 19 nt, Artificial Sequence
  Description of Artificial Sequence: Synthetic oligonucleotide
gaagguacuugcacugccg

SEQ ID NO: 1407229 - RNA, 19 nt, Artificial Sequence
  Description of Artificial Sequence: Synthetic oligonucleotide
aucgauagcaguaguuagg

SEQ ID NO: 1407230 - RNA, 19 nt, Artificial Sequence
  Description of Artificial Sequence: Synthetic oligonucleotide
uuagccuuuagugcaagaa

SEQ ID NO: 1407231 - RNA, 19 nt, Artificial Sequence
  Description of Artificial Sequence: Synthetic oligonucleotide
aacuuauagccuucaugaa

SEQ ID NO: 1407232 - RNA, 19 nt, Artificial Sequence
  Description of Artificial Sequence: Synthetic oligonucleotide
caaugugaguauuaagaca

SEQ ID NO: 1407233 - RNA, 19 nt, Artificial Sequence
  Description of Artificial Sequence: Synthetic oligonucleotide
acagaagccuggcugauau

SEQ ID NO: 1407234 - RNA, 19 nt, Artificial Sequence
  Description of Artificial Sequence: Synthetic oligonucleotide
uuccacaucgauagcagua

SEQ ID NO: 1407235 - RNA, 19 nt, Artificial Sequence
  Description of Artificial Sequence: Synthetic oligonucleotide
caaggguacaugacuuagg

SEQ ID NO: 1407236 - RNA, 19 nt, Artificial Sequence
  Description of Artificial Sequence: Synthetic oligonucleotide
aaggaaauacggcgucgug

SEQ ID NO: 1407237 - RNA, 19 nt, Artificial Sequence
  Description of Artificial Sequence: Synthetic oligonucleotide
aguaaggacagugaaguuu

SEQ ID NO: 1407238 - RNA, 19 nt, Artificial Sequence
  Description of Artificial Sequence: Synthetic oligonucleotide
ugcuacugugagcauguca

SEQ ID NO: 1407239 - RNA, 19 nt, Artificial Sequence
  Description of Artificial Sequence: Synthetic oligonucleotide
ucgagcggcgccaucuuag

SEQ ID NO: 1407240 - RNA, 19 nt, Artificial Sequence
  Description of Artificial Sequence: Synthetic oligonucleotide
gaguauuaagacauuucuc

SEQ ID NO: 1407241 - RNA, 19 nt, Artificial Sequence
  Description of Artificial Sequence: Synthetic oligonucleotide
augauggaagcgauguuuc

SEQ ID NO: 1407242 - RNA, 19 nt, Artificial Sequence
  Description of Artificial Sequence: Synthetic oligonucleotide
auauuguagaggguacaag

SEQ ID NO: 1407243 - RNA, 19 nt, Artificial Sequence
  Description of Artificial Sequence: Synthetic oligonucleotide
gcaaugugaguauuaagac

SEQ ID NO: 1407244 - RNA, 19 nt, Artificial Sequence
  Description of Artificial Sequence: Synthetic oligonucleotide
caucaaaucaucauccagu

SEQ ID NO: 1407245 - RNA, 19 nt, Artificial Sequence
  Description of Artificial Sequence: Synthetic oligonucleotide
gccauuuagccuuuagugc

SEQ ID NO: 1407246 - RNA, 19 nt, Artificial Sequence
  Description of Artificial Sequence: Synthetic oligonucleotide
ucgggaagguacuugcacu

SEQ ID NO: 1407247 - RNA, 19 nt, Artificial Sequence
  Description of Artificial Sequence: Synthetic oligonucleotide
ugugaguauuaagacauuu

SEQ ID NO: 1407248 - RNA, 19 nt, Artificial Sequence
  Description of Artificial Sequence: Synthetic oligonucleotide
cacaaagaucauagaacug

SEQ ID NO: 1407249 - RNA, 19 nt, Artificial Sequence
  Description of Artificial Sequence: Synthetic oligonucleotide
agauaagugaaggucucca

SEQ ID NO: 1407250 - RNA, 19 nt, Artificial Sequence
  Description of Artificial Sequence: Synthetic oligonucleotide
gacugauugcccaaguguc

SEQ ID NO: 1407251 - RNA, 19 nt, Artificial Sequence
  Description of Artificial Sequence: Synthetic oligonucleotide
acuuaggcauugcagucca

SEQ ID NO: 1407252 - RNA, 19 nt, Artificial Sequence
  Description of Artificial Sequence: Synthetic oligonucleotide
guaauugucaauuggcuuu

SEQ ID NO: 1407253 - RNA, 19 nt, Artificial Sequence
  Description of Artificial Sequence: Synthetic oligonucleotide
aacauucgacucuuccaau

SEQ ID NO: 1407254 - RNA, 19 nt, Artificial Sequence
  Description of Artificial Sequence: Synthetic oligonucleotide
cuuaaacccuaccaaacaa

SEQ ID NO: 1407255 - RNA, 19 nt, Artificial Sequence
  Description of Artificial Sequence: Synthetic oligonucleotide
gauaagccgccaugaacac

SEQ ID NO: 1407256 - RNA, 19 nt, Artificial Sequence
  Description of Artificial Sequence: Synthetic oligonucleotide
ucaaaucaucauccaguaa

SEQ ID NO: 1407257 - RNA, 19 nt, Artificial Sequence
  Description of Artificial Sequence: Synthetic oligonucleotide
gacuuaggcauugcagucc

SEQ ID NO: 1407258 - RNA, 19 nt, Artificial Sequence
  Description of Artificial Sequence: Synthetic oligonucleotide
ccauguaauugucaauugg

SEQ ID NO: 1407259 - RNA, 19 nt, Artificial Sequence
  Description of Artificial Sequence: Synthetic oligonucleotide
gaagauaagugaaggucuc

SEQ ID NO: 1407260 - RNA, 19 nt, Artificial Sequence
  Description of Artificial Sequence: Synthetic oligonucleotide
aaacucauuugugacuuuu

SEQ ID NO: 1407261 - RNA, 19 nt, Artificial Sequence
  Description of Artificial Sequence: Synthetic oligonucleotide
gaagaccaugauggaagcg

SEQ ID NO: 1407262 - RNA, 19 nt, Artificial Sequence
  Description of Artificial Sequence: Synthetic oligonucleotide
aguucacaaagaucauaga

SEQ ID NO: 1407263 - RNA, 19 nt, Artificial Sequence
  Description of Artificial Sequence: Synthetic oligonucleotide
aaaguauauuguagagggu

SEQ ID NO: 1407264 - RNA, 19 nt, Artificial Sequence
  Description of Artificial Sequence: Synthetic oligonucleotide
agccuuuagugcaagaaga

SEQ ID NO: 1407265 - RNA, 19 nt, Artificial Sequence
  Description of Artificial Sequence: Synthetic oligonucleotide
gaagcgauguuuccacauc

SEQ ID NO: 1407266 - RNA, 19 nt, Artificial Sequence
  Description of Artificial Sequence: Synthetic oligonucleotide
gauaagugaaggucuccaa

SEQ ID NO: 1407267 - RNA, 19 nt, Artificial Sequence
  Description of Artificial Sequence: Synthetic oligonucleotide
aggccauuuagccuuuagu

SEQ ID NO: 1407268 - RNA, 19 nt, Artificial Sequence
  Description of Artificial Sequence: Synthetic oligonucleotide
ugggacaaggguacaugac

SEQ ID NO: 1407269 - RNA, 19 nt, Artificial Sequence
  Description of Artificial Sequence: Synthetic oligonucleotide
uugcuauggacaccauaac

SEQ ID NO: 1407270 - RNA, 19 nt, Artificial Sequence
  Description of Artificial Sequence: Synthetic oligonucleotide
uuuccacaucgauagcagu

SEQ ID NO: 1407271 - RNA, 19 nt, Artificial Sequence
  Description of Artificial Sequence: Synthetic oligonucleotide
auguuuccacaucgauagc

SEQ ID NO: 1407272 - RNA, 19 nt, Artificial Sequence
  Description of Artificial Sequence: Synthetic oligonucleotide
aaggacagugaaguuuaca

SEQ ID NO: 1407273 - RNA, 19 nt, Artificial Sequence
  Description of Artificial Sequence: Synthetic oligonucleotide
agcggcgccaucuuaggca

SEQ ID NO: 1407274 - RNA, 19 nt, Artificial Sequence
  Description of Artificial Sequence: Synthetic oligonucleotide
uccaaacuauaguaaccuc

SEQ ID NO: 1407275 - RNA, 19 nt, Artificial Sequence
  Description of Artificial Sequence: Synthetic oligonucleotide
uauuugguuuggcacucau

SEQ ID NO: 1407276 - RNA, 19 nt, Artificial Sequence
  Description of Artificial Sequence: Synthetic oligonucleotide
ggacagugaaguuuacagc

SEQ ID NO: 1407277 - RNA, 19 nt, Artificial Sequence
  Description of Artificial Sequence: Synthetic oligonucleotide
auaaacuuauagccuucau

SEQ ID NO: 1407278 - RNA, 19 nt, Artificial Sequence
  Description of Artificial Sequence: Synthetic oligonucleotide
uuucguucaaugguucgaa

SEQ ID NO: 1407279 - RNA, 19 nt, Artificial Sequence
  Description of Artificial Sequence: Synthetic oligonucleotide
auuucguucaaugguucga

SEQ ID NO: 1407280 - RNA, 19 nt, Artificial Sequence
  Description of Artificial Sequence: Synthetic oligonucleotide
auucgacucuuccaauagu

SEQ ID NO: 1407281 - RNA, 19 nt, Artificial Sequence
  Description of Artificial Sequence: Synthetic oligonucleotide
uuuccccagaacagcaaau

SEQ ID NO: 1407282 - RNA, 19 nt, Artificial Sequence
  Description of Artificial Sequence: Synthetic oligonucleotide
uucaggucguucucgggaa

SEQ ID NO: 1407283 - RNA, 19 nt, Artificial Sequence
  Description of Artificial Sequence: Synthetic oligonucleotide
gaucaggccauuuagccuu

SEQ ID NO: 1407284 - RNA, 19 nt, Artificial Sequence
  Description of Artificial Sequence: Synthetic oligonucleotide
cucgggaagguacuugcac

SEQ ID NO: 1407285 - RNA, 19 nt, Artificial Sequence
  Description of Artificial Sequence: Synthetic oligonucleotide
acaucgauagcaguaguua

SEQ ID NO: 1407286 - RNA, 19 nt, Artificial Sequence
  Description of Artificial Sequence: Synthetic oligonucleotide
aguuaggagcagaccacac

SEQ ID NO: 1407287 - RNA, 19 nt, Artificial Sequence
  Description of Artificial Sequence: Synthetic oligonucleotide
uaguuaggagcagaccaca

SEQ ID NO: 1407288 - RNA, 19 nt, Artificial Sequence
  Description of Artificial Sequence: Synthetic oligonucleotide
gugaguauuaagacauuuc

SEQ ID NO: 1407289 - RNA, 19 nt, Artificial Sequence
  Description of Artificial Sequence: Synthetic oligonucleotide
ugguucgaauuugauccag

SEQ ID NO: 1407290 - RNA, 19 nt, Artificial Sequence
  Description of Artificial Sequence: Synthetic oligonucleotide
uacggcgucgugguucugg

SEQ ID NO: 1407291 - RNA, 19 nt, Artificial Sequence
  Description of Artificial Sequence: Synthetic oligonucleotide
guaaggacagugaaguuua

SEQ ID NO: 1407292 - RNA, 19 nt, Artificial Sequence
  Description of Artificial Sequence: Synthetic oligonucleotide
auuugguuuggcacucauc

SEQ ID NO: 1407293 - RNA, 19 nt, Artificial Sequence
  Description of Artificial Sequence: Synthetic oligonucleotide
cuauggacaccauaacaaa

SEQ ID NO: 1407294 - RNA, 19 nt, Artificial Sequence
  Description of Artificial Sequence: Synthetic oligonucleotide
cauauuugguuuggcacuc

SEQ ID NO: 1407295 - RNA, 19 nt, Artificial Sequence
  Description of Artificial Sequence: Synthetic oligonucleotide
acauucgacucuuccaaua

SEQ ID NO: 1407296 - RNA, 19 nt, Artificial Sequence
  Description of Artificial Sequence: Synthetic oligonucleotide
guaguuaggagcagaccac

SEQ ID NO: 1407297 - RNA, 19 nt, Artificial Sequence
  Description of Artificial Sequence: Synthetic oligonucleotide
caggagauaagccgccaug

SEQ ID NO: 1407298 - RNA, 19 nt, Artificial Sequence
  Description of Artificial Sequence: Synthetic oligonucleotide
ucaggagauaagccgccau

SEQ ID NO: 1407299 - RNA, 19 nt, Artificial Sequence
  Description of Artificial Sequence: Synthetic oligonucleotide
ccaguguuuugauaucagg

SEQ ID NO: 1407300 - RNA, 19 nt, Artificial Sequence
  Description of Artificial Sequence: Synthetic oligonucleotide
gaacaagccgcggcggcgg

SEQ ID NO: 1407301 - RNA, 19 nt, Artificial Sequence
  Description of Artificial Sequence: Synthetic oligonucleotide
ggcgucgugguucugggag

SEQ ID NO: 1407302 - RNA, 19 nt, Artificial Sequence
  Description of Artificial Sequence: Synthetic oligonucleotide
uguuuccccagaacagcaa

SEQ ID NO: 1407303 - RNA, 19 nt, Artificial Sequence
  Description of Artificial Sequence: Synthetic oligonucleotide
cugaaauuucuuaaacccu

SEQ ID NO: 1407304 - RNA, 19 nt, Artificial Sequence
  Description of Artificial Sequence: Synthetic oligonucleotide
cacuggcugaacauucgac

SEQ ID NO: 1407305 - RNA, 19 nt, Artificial Sequence
  Description of Artificial Sequence: Synthetic oligonucleotide
gaacaaguugaugugcucu

SEQ ID NO: 1407306 - RNA, 19 nt, Artificial Sequence
  Description of Artificial Sequence: Synthetic oligonucleotide
uuauagccuucaugaacaa

SEQ ID NO: 1407307 - RNA, 19 nt, Artificial Sequence
  Description of Artificial Sequence: Synthetic oligonucleotide
ccauuuagccuuuagugca

SEQ ID NO: 1407308 - RNA, 19 nt, Artificial Sequence
  Description of Artificial Sequence: Synthetic oligonucleotide
cauccaguaaggacaguga

SEQ ID NO: 1407309 - RNA, 19 nt, Artificial Sequence
  Description of Artificial Sequence: Synthetic oligonucleotide
gguacuugcacugccgcgc

SEQ ID NO: 1407310 - RNA, 19 nt, Artificial Sequence
  Description of Artificial Sequence: Synthetic oligonucleotide
gucguucucgggaagguac

SEQ ID NO: 1407311 - RNA, 19 nt, Artificial Sequence
  Description of Artificial Sequence: Synthetic oligonucleotide
cuauaguaaccucugucua

SEQ ID NO: 1407312 - RNA, 19 nt, Artificial Sequence
  Description of Artificial Sequence: Synthetic oligonucleotide
gcuauggacaccauaacaa

SEQ ID NO: 1407313 - RNA, 19 nt, Artificial Sequence
  Description of Artificial Sequence: Synthetic oligonucleotide
auaacacguucugaaucug

SEQ ID NO: 1407314 - RNA, 19 nt, Artificial Sequence
  Description of Artificial Sequence: Synthetic oligonucleotide
guauauuguagaggguaca

SEQ ID NO: 1407315 - RNA, 19 nt, Artificial Sequence
  Description of Artificial Sequence: Synthetic oligonucleotide
uaacuuugguucucuugua

SEQ ID NO: 1407316 - RNA, 19 nt, Artificial Sequence
  Description of Artificial Sequence: Synthetic oligonucleotide
gcuacugugagcaugucaa

SEQ ID NO: 1407317 - RNA, 19 nt, Artificial Sequence
  Description of Artificial Sequence: Synthetic oligonucleotide
uugauccaguguuuugaua

SEQ ID NO: 1407318 - RNA, 19 nt, Artificial Sequence
  Description of Artificial Sequence: Synthetic oligonucleotide
auguaguuugugucaggaa

SEQ ID NO: 1407319 - RNA, 19 nt, Artificial Sequence
  Description of Artificial Sequence: Synthetic oligonucleotide
auugcccaagugucuacau

SEQ ID NO: 1407320 - RNA, 19 nt, Artificial Sequence
  Description of Artificial Sequence: Synthetic oligonucleotide
caguaguuaggagcagacc

SEQ ID NO: 1407321 - RNA, 19 nt, Artificial Sequence
  Description of Artificial Sequence: Synthetic oligonucleotide
aggaggauuuccauguaau

SEQ ID NO: 1407322 - RNA, 19 nt, Artificial Sequence
  Description of Artificial Sequence: Synthetic oligonucleotide
gccuggcugauauaaauga

SEQ ID NO: 1407323 - RNA, 19 nt, Artificial Sequence
  Description of Artificial Sequence: Synthetic oligonucleotide
cagaacaagccgcggcggc

SEQ ID NO: 1407324 - RNA, 19 nt, Artificial Sequence
  Description of Artificial Sequence: Synthetic oligonucleotide
aguagaucacaaacauagu

SEQ ID NO: 1407325 - RNA, 19 nt, Artificial Sequence
  Description of Artificial Sequence: Synthetic oligonucleotide
ugggacugauugcccaagu

SEQ ID NO: 1407326 - RNA, 19 nt, Artificial Sequence
  Description of Artificial Sequence: Synthetic oligonucleotide
ugucuacucucaugauuuc

SEQ ID NO: 1407327 - RNA, 19 nt, Artificial Sequence
  Description of Artificial Sequence: Synthetic oligonucleotide
caaguugaugugcucugca

SEQ ID NO: 1407328 - RNA, 19 nt, Artificial Sequence
  Description of Artificial Sequence: Synthetic oligonucleotide
guccagaucgagcggcgcc

SEQ ID NO: 1407329 - RNA, 19 nt, Artificial Sequence
  Description of Artificial Sequence: Synthetic oligonucleotide
acugauugcccaagugucu

SEQ ID NO: 1407330 - RNA, 19 nt, Artificial Sequence
  Description of Artificial Sequence: Synthetic oligonucleotide
uccagaucgagcggcgcca

SEQ ID NO: 1407331 - RNA, 19 nt, Artificial Sequence
  Description of Artificial Sequence: Synthetic oligonucleotide
gaaaugcguccuguuuccc

SEQ ID NO: 1407332 - RNA, 19 nt, Artificial Sequence
  Description of Artificial Sequence: Synthetic oligonucleotide
uucguucaaugguucgaau

SEQ ID NO: 1407333 - RNA, 19 nt, Artificial Sequence
  Description of Artificial Sequence: Synthetic oligonucleotide
ucucuuguauugacaucuu

SEQ ID NO: 1407334 - RNA, 19 nt, Artificial Sequence
  Description of Artificial Sequence: Synthetic oligonucleotide
gauugcccaagugucuaca

SEQ ID NO: 1407335 - RNA, 19 nt, Artificial Sequence
  Description of Artificial Sequence: Synthetic oligonucleotide
agccuggcugauauaaaug

SEQ ID NO: 1407336 - RNA, 19 nt, Artificial Sequence
  Description of Artificial Sequence: Synthetic oligonucleotide
ggaaauacggcgucguggu

SEQ ID NO: 1407337 - RNA, 19 nt, Artificial Sequence
  Description of Artificial Sequence: Synthetic oligonucleotide
augagugacaaaacugaua

SEQ ID NO: 1407338 - RNA, 19 nt, Artificial Sequence
  Description of Artificial Sequence: Synthetic oligonucleotide
auaguagaucacaaacaua

SEQ ID NO: 1407339 - RNA, 19 nt, Artificial Sequence
  Description of Artificial Sequence: Synthetic oligonucleotide
caggucguucucgggaagg

SEQ ID NO: 1407340 - RNA, 19 nt, Artificial Sequence
  Description of Artificial Sequence: Synthetic oligonucleotide
ugaggaggauuuccaugua

SEQ ID NO: 1407341 - RNA, 19 nt, Artificial Sequence
  Description of Artificial Sequence: Synthetic oligonucleotide
cuauuaaagcugcuacugu

SEQ ID NO: 1407342 - RNA, 19 nt, Artificial Sequence
  Description of Artificial Sequence: Synthetic oligonucleotide
caccaggucacaaaaugcu

SEQ ID NO: 1407343 - RNA, 19 nt, Artificial Sequence
  Description of Artificial Sequence: Synthetic oligonucleotide
acaauaucuccaggcauua

SEQ ID NO: 1407344 - RNA, 19 nt, Artificial Sequence
  Description of Artificial Sequence: Synthetic oligonucleotide
uggaacugcccggaauaac

SEQ ID NO: 1407345 - RNA, 19 nt, Artificial Sequence
  Description of Artificial Sequence: Synthetic oligonucleotide
ugccgcgcgaucuccacau

SEQ ID NO: 1407346 - RNA, 19 nt, Artificial Sequence
  Description of Artificial Sequence: Synthetic oligonucleotide
cugauuucguucaaugguu

SEQ ID NO: 1407347 - RNA, 19 nt, Artificial Sequence
  Description of Artificial Sequence: Synthetic oligonucleotide
ccaaacuauaguaaccucu

SEQ ID NO: 1407348 - RNA, 19 nt, Artificial Sequence
  Description of Artificial Sequence: Synthetic oligonucleotide
ggacugauugcccaagugu

SEQ ID NO: 1407349 - RNA, 19 nt, Artificial Sequence
  Description of Artificial Sequence: Synthetic oligonucleotide
aggcgggauauaagagggc

SEQ ID NO: 1407350 - RNA, 19 nt, Artificial Sequence
  Description of Artificial Sequence: Synthetic oligonucleotide
gaccaugauggaagcgaug

SEQ ID NO: 1407351 - RNA, 19 nt, Artificial Sequence
  Description of Artificial Sequence: Synthetic oligonucleotide
gcgaucuccacauacuugu

SEQ ID NO: 1407352 - RNA, 19 nt, Artificial Sequence
  Description of Artificial Sequence: Synthetic oligonucleotide
guacaagaaaggcgggaua

SEQ ID NO: 1407353 - RNA, 19 nt, Artificial Sequence
  Description of Artificial Sequence: Synthetic oligonucleotide
agcaaauaagcaagagcua

SEQ ID NO: 1407354 - RNA, 19 nt, Artificial Sequence
  Description of Artificial Sequence: Synthetic oligonucleotide
cuggacaacuuugcugcug

SEQ ID NO: 1407355 - RNA, 19 nt, Artificial Sequence
  Description of Artificial Sequence: Synthetic oligonucleotide
ggcaagaggcagcauuuca

SEQ ID NO: 1407356 - RNA, 19 nt, Artificial Sequence
  Description of Artificial Sequence: Synthetic oligonucleotide
uaauacgaucaggccauuu

SEQ ID NO: 1407357 - RNA, 19 nt, Artificial Sequence
  Description of Artificial Sequence: Synthetic oligonucleotide
aaucacccauaaauaugua

SEQ ID NO: 1407358 - RNA, 19 nt, Artificial Sequence
  Description of Artificial Sequence: Synthetic oligonucleotide
aacagaagccuggcugaua

SEQ ID NO: 1407359 - RNA, 19 nt, Artificial Sequence
  Description of Artificial Sequence: Synthetic oligonucleotide
ggcgggauauaagagggca

SEQ ID NO: 1407360 - RNA, 19 nt, Artificial Sequence
  Description of Artificial Sequence: Synthetic oligonucleotide
caugauggaagcgauguuu

SEQ ID NO: 1407361 - RNA, 19 nt, Artificial Sequence
  Description of Artificial Sequence: Synthetic oligonucleotide
auauuugguuuggcacuca

SEQ ID NO: 1407362 - RNA, 19 nt, Artificial Sequence
  Description of Artificial Sequence: Synthetic oligonucleotide
agcgauguuuccacaucga

SEQ ID NO: 1407363 - RNA, 19 nt, Artificial Sequence
  Description of Artificial Sequence: Synthetic oligonucleotide
aucaggagauaagccgcca

SEQ ID NO: 1407364 - RNA, 19 nt, Artificial Sequence
  Description of Artificial Sequence: Synthetic oligonucleotide
agccgccaugaacacacaa

SEQ ID NO: 1407365 - RNA, 19 nt, Artificial Sequence
  Description of Artificial Sequence: Synthetic oligonucleotide
acuugcacugccgcgcgau

SEQ ID NO: 1407366 - RNA, 19 nt, Artificial Sequence
  Description of Artificial Sequence: Synthetic oligonucleotide
gcagaacaagccgcggcgg

SEQ ID NO: 1407367 - RNA, 19 nt, Artificial Sequence
  Description of Artificial Sequence: Synthetic oligonucleotide
gaagccuggcugauauaaa

SEQ ID NO: 1407368 - RNA, 19 nt, Artificial Sequence
  Description of Artificial Sequence: Synthetic oligonucleotide
auccugcccacuggacaac

SEQ ID NO: 1407369 - RNA, 19 nt, Artificial Sequence
  Description of Artificial Sequence: Synthetic oligonucleotide
uccauacaccuguguuauc

SEQ ID NO: 1407370 - RNA, 19 nt, Artificial Sequence
  Description of Artificial Sequence: Synthetic oligonucleotide
gcgucgugguucugggagg

SEQ ID NO: 1407371 - RNA, 19 nt, Artificial Sequence
  Description of Artificial Sequence: Synthetic oligonucleotide
aggucguucucgggaaggu

SEQ ID NO: 1407372 - RNA, 19 nt, Artificial Sequence
  Description of Artificial Sequence: Synthetic oligonucleotide
aagcugcuacugugagcau

SEQ ID NO: 1407373 - RNA, 19 nt, Artificial Sequence
  Description of Artificial Sequence: Synthetic oligonucleotide
guuuggcacucaucauaaa

SEQ ID NO: 1407374 - RNA, 19 nt, Artificial Sequence
  Description of Artificial Sequence: Synthetic oligonucleotide
ccgccaugaacacacaaaa

SEQ ID NO: 1407375 - RNA, 19 nt, Artificial Sequence
  Description of Artificial Sequence: Synthetic oligonucleotide
aucgagcggcgccaucuua

SEQ ID NO: 1407376 - RNA, 19 nt, Artificial Sequence
  Description of Artificial Sequence: Synthetic oligonucleotide
cucucaugauuuccucuua

SEQ ID NO: 1407377 - RNA, 19 nt, Artificial Sequence
  Description of Artificial Sequence: Synthetic oligonucleotide
ggaggauuuccauguaauu

SEQ ID NO: 1407378 - RNA, 19 nt, Artificial Sequence
  Description of Artificial Sequence: Synthetic oligonucleotide
cgcgaucuccacauacuug

SEQ ID NO: 1407379 - RNA, 19 nt, Artificial Sequence
  Description of Artificial Sequence: Synthetic oligonucleotide
augugaguauuaagacauu

SEQ ID NO: 1407380 - RNA, 19 nt, Artificial Sequence
  Description of Artificial Sequence: Synthetic oligonucleotide
gaacugcccggaauaacuu

SEQ ID NO: 1407381 - RNA, 19 nt, Artificial Sequence
  Description of Artificial Sequence: Synthetic oligonucleotide
cucuuguauugacaucuuu

SEQ ID NO: 1407382 - RNA, 19 nt, Artificial Sequence
  Description of Artificial Sequence: Synthetic oligonucleotide
ccgcgcgaucuccacauac

SEQ ID NO: 1407383 - RNA, 19 nt, Artificial Sequence
  Description of Artificial Sequence: Synthetic oligonucleotide
caccuguguuaucugucua

SEQ ID NO: 1407384 - RNA, 19 nt, Artificial Sequence
  Description of Artificial Sequence: Synthetic oligonucleotide
gccgccaugaacacacaaa

SEQ ID NO: 1407385 - RNA, 19 nt, Artificial Sequence
  Description of Artificial Sequence: Synthetic oligonucleotide
gaaauacggcgucgugguu

SEQ ID NO: 1407386 - RNA, 19 nt, Artificial Sequence
  Description of Artificial Sequence: Synthetic oligonucleotide
ggccagugggauggcaaug

SEQ ID NO: 1407387 - RNA, 19 nt, Artificial Sequence
  Description of Artificial Sequence: Synthetic oligonucleotide
aagccgccaugaacacaca

SEQ ID NO: 1407388 - RNA, 19 nt, Artificial Sequence
  Description of Artificial Sequence: Synthetic oligonucleotide
ccuuuagugcaagaagaua

SEQ ID NO: 1407389 - RNA, 19 nt, Artificial Sequence
  Description of Artificial Sequence: Synthetic oligonucleotide
gguucgaauuugauccagu

SEQ ID NO: 1407390 - RNA, 19 nt, Artificial Sequence
  Description of Artificial Sequence: Synthetic oligonucleotide
ggcgccaucuuaggcagaa

SEQ ID NO: 1407391 - RNA, 19 nt, Artificial Sequence
  Description of Artificial Sequence: Synthetic oligonucleotide
gcgauguuuccacaucgau

SEQ ID NO: 1407392 - RNA, 19 nt, Artificial Sequence
  Description of Artificial Sequence: Synthetic oligonucleotide
cguccuguuuccccagaac

SEQ ID NO: 1407393 - RNA, 19 nt, Artificial Sequence
  Description of Artificial Sequence: Synthetic oligonucleotide
cacugccgcgcgaucucca

SEQ ID NO: 1407394 - RNA, 19 nt, Artificial Sequence
  Description of Artificial Sequence: Synthetic oligonucleotide
ucaggccauuuagccuuua

SEQ ID NO: 1407395 - RNA, 19 nt, Artificial Sequence
  Description of Artificial Sequence: Synthetic oligonucleotide
gaucgagcggcgccaucuu

SEQ ID NO: 1407396 - RNA, 19 nt, Artificial Sequence
  Description of Artificial Sequence: Synthetic oligonucleotide
cugccgcgcgaucuccaca

SEQ ID NO: 1407397 - RNA, 19 nt, Artificial Sequence
  Description of Artificial Sequence: Synthetic oligonucleotide
gccuuuagugcaagaagau

SEQ ID NO: 1407398 - RNA, 19 nt, Artificial Sequence
  Description of Artificial Sequence: Synthetic oligonucleotide
cagaagccuggcugauaua

SEQ ID NO: 1407399 - RNA, 19 nt, Artificial Sequence
  Description of Artificial Sequence: Synthetic oligonucleotide
ggacaccauaacaaacaau

SEQ ID NO: 1407400 - RNA, 19 nt, Artificial Sequence
  Description of Artificial Sequence: Synthetic oligonucleotide
aucaggccauuuagccuuu

SEQ ID NO: 1407401 - RNA, 19 nt, Artificial Sequence
  Description of Artificial Sequence: Synthetic oligonucleotide
gcgggauauaagagggcaa

SEQ ID NO: 1407402 - RNA, 19 nt, Artificial Sequence
  Description of Artificial Sequence: Synthetic oligonucleotide
cgggauauaagagggcaaa

SEQ ID NO: 1407403 - RNA, 19 nt, Artificial Sequence
  Description of Artificial Sequence: Synthetic oligonucleotide
gcguccuguuuccccagaa

SEQ ID NO: 1407404 - RNA, 19 nt, Artificial Sequence
  Description of Artificial Sequence: Synthetic oligonucleotide
gcugaacauucgacucuuc

SEQ ID NO: 1407405 - RNA, 19 nt, Artificial Sequence
  Description of Artificial Sequence: Synthetic oligonucleotide
cuuaggcauugcaguccau

SEQ ID NO: 1407406 - RNA, 19 nt, Artificial Sequence
  Description of Artificial Sequence: Synthetic oligonucleotide
gcgcgaucuccacauacuu

SEQ ID NO: 1407407 - RNA, 19 nt, Artificial Sequence
  Description of Artificial Sequence: Synthetic oligonucleotide
gcggcggcggcggcggcgg

SEQ ID NO: 1407408 - RNA, 19 nt, Artificial Sequence
  Description of Artificial Sequence: Synthetic oligonucleotide
auacggcgucgugguucug

SEQ ID NO: 1407409 - RNA, 19 nt, Artificial Sequence
  Description of Artificial Sequence: Synthetic oligonucleotide
ggcggcggcggcggcggcg

SEQ ID NO: 1407410 - RNA, 19 nt, Artificial Sequence
  Description of Artificial Sequence: Synthetic oligonucleotide
guaauacgaucaggccauu

SEQ ID NO: 1407411 - RNA, 19 nt, Artificial Sequence
  Description of Artificial Sequence: Synthetic oligonucleotide
cgcgcgaucuccacauacu

SEQ ID NO: 1407412 - RNA, 19 nt, Artificial Sequence
  Description of Artificial Sequence: Synthetic oligonucleotide
gccgcgcgaucuccacaua

SEQ ID NO: 1407413 - RNA, 19 nt, Artificial Sequence
  Description of Artificial Sequence: Synthetic oligonucleotide
cgcggcggcggcggcggcg

SEQ ID NO: 1407414 - RNA, 19 nt, Artificial Sequence
  Description of Artificial Sequence: Synthetic oligonucleotide
cggcgucgugguucuggga

SEQ ID NO: 1407415 - RNA, 19 nt, Artificial Sequence
  Description of Artificial Sequence: Synthetic oligonucleotide
cggcgccaucuuaggcaga

SEQ ID NO: 1407416 - RNA, 19 nt, Artificial Sequence
  Description of Artificial Sequence: Synthetic oligonucleotide
ccgcggcggcggcggcggc

SEQ ID NO: 1407417 - RNA, 19 nt, Artificial Sequence
  Description of Artificial Sequence: Synthetic oligonucleotide
cggcggcggcggcggcggc

SEQ ID NO: 1407418 - RNA, 19 nt, Artificial Sequence
  Description of Artificial Sequence: Synthetic oligonucleotide
aagugaggccaucagaugc

SEQ ID NO: 1407419 - RNA, 19 nt, Artificial Sequence
  Description of Artificial Sequence: Synthetic oligonucleotide
ugugagucgacccacaaug

SEQ ID NO: 1407420 - RNA, 19 nt, Artificial Sequence
  Description of Artificial Sequence: Synthetic oligonucleotide
aaaucacuucggcacaagc

SEQ ID NO: 1407421 - RNA, 19 nt, Artificial Sequence
  Description of Artificial Sequence: Synthetic oligonucleotide
aggacaagcaucuucacag

SEQ ID NO: 1407422 - RNA, 19 nt, Artificial Sequence
  Description of Artificial Sequence: Synthetic oligonucleotide
cauacaucuggucagggcg

SEQ ID NO: 1407423 - RNA, 19 nt, Artificial Sequence
  Description of Artificial Sequence: Synthetic oligonucleotide
guuauaauaagugaggcca

SEQ ID NO: 1407424 - RNA, 19 nt, Artificial Sequence
  Description of Artificial Sequence: Synthetic oligonucleotide
guuaccuccagguauuugg

SEQ ID NO: 1407425 - RNA, 19 nt, Artificial Sequence
  Description of Artificial Sequence: Synthetic oligonucleotide
aucaucuaaagccacacga

SEQ ID NO: 1407426 - RNA, 19 nt, Artificial Sequence
  Description of Artificial Sequence: Synthetic oligonucleotide
uauagcagcgguuauaaua

SEQ ID NO: 1407427 - RNA, 19 nt, Artificial Sequence
  Description of Artificial Sequence: Synthetic oligonucleotide
aucacuucggcacaagcuc

SEQ ID NO: 1407428 - RNA, 19 nt, Artificial Sequence
  Description of Artificial Sequence: Synthetic oligonucleotide
ucaucuaaagccacacgag

SEQ ID NO: 1407429 - RNA, 19 nt, Artificial Sequence
  Description of Artificial Sequence: Synthetic oligonucleotide
auggcaaaaucacuucggc

SEQ ID NO: 1407430 - RNA, 19 nt, Artificial Sequence
  Description of Artificial Sequence: Synthetic oligonucleotide
uacaggacaagcaucuuca

SEQ ID NO: 1407431 - RNA, 19 nt, Artificial Sequence
  Description of Artificial Sequence: Synthetic oligonucleotide
cuugcaggguacaacaugc

SEQ ID NO: 1407432 - RNA, 19 nt, Artificial Sequence
  Description of Artificial Sequence: Synthetic oligonucleotide
uguccugaguauuugcccg

SEQ ID NO: 1407433 - RNA, 19 nt, Artificial Sequence
  Description of Artificial Sequence: Synthetic oligonucleotide
aggucaugcagcuaccucg

SEQ ID NO: 1407434 - RNA, 19 nt, Artificial Sequence
  Description of Artificial Sequence: Synthetic oligonucleotide
uggacggccgcuaacauca

SEQ ID NO: 1407435 - RNA, 19 nt, Artificial Sequence
  Description of Artificial Sequence: Synthetic oligonucleotide
gaacauagcuguugcaucc

SEQ ID NO: 1407436 - RNA, 19 nt, Artificial Sequence
  Description of Artificial Sequence: Synthetic oligonucleotide
agccccaucacauucgagg

SEQ ID NO: 1407437 - RNA, 19 nt, Artificial Sequence
  Description of Artificial Sequence: Synthetic oligonucleotide
agguauacaggccugcauc

SEQ ID NO: 1407438 - RNA, 19 nt, Artificial Sequence
  Description of Artificial Sequence: Synthetic oligonucleotide
uaauaagugaggccaucag

SEQ ID NO: 1407439 - RNA, 19 nt, Artificial Sequence
  Description of Artificial Sequence: Synthetic oligonucleotide
acccaugaugaccaguggc

SEQ ID NO: 1407440 - RNA, 19 nt, Artificial Sequence
  Description of Artificial Sequence: Synthetic oligonucleotide
cacguugccauacaucugg

SEQ ID NO: 1407441 - RNA, 19 nt, Artificial Sequence
  Description of Artificial Sequence: Synthetic oligonucleotide
acuggaagccuucacagga

SEQ ID NO: 1407442 - RNA, 19 nt, Artificial Sequence
  Description of Artificial Sequence: Synthetic oligonucleotide
aguuauugcuauugccuuc

SEQ ID NO: 1407443 - RNA, 19 nt, Artificial Sequence
  Description of Artificial Sequence: Synthetic oligonucleotide
acuggcagcacgaacauag

SEQ ID NO: 1407444 - RNA, 19 nt, Artificial Sequence
  Description of Artificial Sequence: Synthetic oligonucleotide
aaguuauugcuauugccuu

SEQ ID NO: 1407445 - RNA, 19 nt, Artificial Sequence
  Description of Artificial Sequence: Synthetic oligonucleotide
cuaacaucacaguggagac

SEQ ID NO: 1407446 - RNA, 19 nt, Artificial Sequence
  Description of Artificial Sequence: Synthetic oligonucleotide
agcgguuauaauaagugag

SEQ ID NO: 1407447 - RNA, 19 nt, Artificial Sequence
  Description of Artificial Sequence: Synthetic oligonucleotide
caucuaaagccacacgagc

SEQ ID NO: 1407448 - RNA, 19 nt, Artificial Sequence
  Description of Artificial Sequence: Synthetic oligonucleotide
ucucagaugcugcacaguc

SEQ ID NO: 1407449 - RNA, 19 nt, Artificial Sequence
  Description of Artificial Sequence: Synthetic oligonucleotide
ugcaggguacaacaugcag

SEQ ID NO: 1407450 - RNA, 19 nt, Artificial Sequence
  Description of Artificial Sequence: Synthetic oligonucleotide
cauuguagagcacuagcug

SEQ ID NO: 1407451 - RNA, 19 nt, Artificial Sequence
  Description of Artificial Sequence: Synthetic oligonucleotide
cuggcaggggcccugaacg

SEQ ID NO: 1407452 - RNA, 19 nt, Artificial Sequence
  Description of Artificial Sequence: Synthetic oligonucleotide
uccaguaccucugugaguc

SEQ ID NO: 1407453 - RNA, 19 nt, Artificial Sequence
  Description of Artificial Sequence: Synthetic oligonucleotide
aaaggacaugaugagggug

SEQ ID NO: 1407454 - RNA, 19 nt, Artificial Sequence
  Description of Artificial Sequence: Synthetic oligonucleotide
agguucuuccgcuggacgg

SEQ ID NO: 1407455 - RNA, 19 nt, Artificial Sequence
  Description of Artificial Sequence: Synthetic oligonucleotide
acgaaccucacccaugaug

SEQ ID NO: 1407456 - RNA, 19 nt, Artificial Sequence
  Description of Artificial Sequence: Synthetic oligonucleotide
ugagucgacccacaauggc

SEQ ID NO: 1407457 - RNA, 19 nt, Artificial Sequence
  Description of Artificial Sequence: Synthetic oligonucleotide
gaagcgggcugccacacag

SEQ ID NO: 1407458 - RNA, 19 nt, Artificial Sequence
  Description of Artificial Sequence: Synthetic oligonucleotide
uacaacaugcagguggagc

SEQ ID NO: 1407459 - RNA, 19 nt, Artificial Sequence
  Description of Artificial Sequence: Synthetic oligonucleotide
ucacgaaccucacccauga

SEQ ID NO: 1407460 - RNA, 19 nt, Artificial Sequence
  Description of Artificial Sequence: Synthetic oligonucleotide
uggccaacugagaaugugc

SEQ ID NO: 1407461 - RNA, 19 nt, Artificial Sequence
  Description of Artificial Sequence: Synthetic oligonucleotide
uguggugaggggcuguugu

SEQ ID NO: 1407462 - RNA, 19 nt, Artificial Sequence
  Description of Artificial Sequence: Synthetic oligonucleotide
uuauaauaagugaggccau

SEQ ID NO: 1407463 - RNA, 19 nt, Artificial Sequence
  Description of Artificial Sequence: Synthetic oligonucleotide
ucaugcagcuaccucgcug

SEQ ID NO: 1407464 - RNA, 19 nt, Artificial Sequence
  Description of Artificial Sequence: Synthetic oligonucleotide
ucgagcaguggucucaggu

SEQ ID NO: 1407465 - RNA, 19 nt, Artificial Sequence
  Description of Artificial Sequence: Synthetic oligonucleotide
agcgccaaaggacaugaug

SEQ ID NO: 1407466 - RNA, 19 nt, Artificial Sequence
  Description of Artificial Sequence: Synthetic oligonucleotide
cauucgagggcugggaagg

SEQ ID NO: 1407467 - RNA, 19 nt, Artificial Sequence
  Description of Artificial Sequence: Synthetic oligonucleotide
ucucgcagcggucacggca

SEQ ID NO: 1407468 - RNA, 19 nt, Artificial Sequence
  Description of Artificial Sequence: Synthetic oligonucleotide
uaggucucaaagccccggg

SEQ ID NO: 1407469 - RNA, 19 nt, Artificial Sequence
  Description of Artificial Sequence: Synthetic oligonucleotide
acauacauuggugcagcac

SEQ ID NO: 1407470 - RNA, 19 nt, Artificial Sequence
  Description of Artificial Sequence: Synthetic oligonucleotide
caugaucagguucuuccgc

SEQ ID NO: 1407471 - RNA, 19 nt, Artificial Sequence
  Description of Artificial Sequence: Synthetic oligonucleotide
uguuccccgacauguacug

SEQ ID NO: 1407472 - RNA, 19 nt, Artificial Sequence
  Description of Artificial Sequence: Synthetic oligonucleotide
cacaccuucacgaaccuca

SEQ ID NO: 1407473 - RNA, 19 nt, Artificial Sequence
  Description of Artificial Sequence: Synthetic oligonucleotide
uaagugaggccaucagaug

SEQ ID NO: 1407474 - RNA, 19 nt, Artificial Sequence
  Description of Artificial Sequence: Synthetic oligonucleotide
auaauaagugaggccauca

SEQ ID NO: 1407475 - RNA, 19 nt, Artificial Sequence
  Description of Artificial Sequence: Synthetic oligonucleotide
cuucacagccacuguauac

SEQ ID NO: 1407476 - RNA, 19 nt, Artificial Sequence
  Description of Artificial Sequence: Synthetic oligonucleotide
uucacgaaccucacccaug

SEQ ID NO: 1407477 - RNA, 19 nt, Artificial Sequence
  Description of Artificial Sequence: Synthetic oligonucleotide
aaugccacccgcagccucg

SEQ ID NO: 1407478 - RNA, 19 nt, Artificial Sequence
  Description of Artificial Sequence: Synthetic oligonucleotide
aguauuugcccgcugcaaa

SEQ ID NO: 1407479 - RNA, 19 nt, Artificial Sequence
  Description of Artificial Sequence: Synthetic oligonucleotide
augaucagguucuuccgcu

SEQ ID NO: 1407480 - RNA, 19 nt, Artificial Sequence
  Description of Artificial Sequence: Synthetic oligonucleotide
uguacugccuguggugagg

SEQ ID NO: 1407481 - RNA, 19 nt, Artificial Sequence
  Description of Artificial Sequence: Synthetic oligonucleotide
cccgcugcaaaacagagag

SEQ ID NO: 1407482 - RNA, 19 nt, Artificial Sequence
  Description of Artificial Sequence: Synthetic oligonucleotide
caucaucuaaagccacacg

SEQ ID NO: 1407483 - RNA, 19 nt, Artificial Sequence
  Description of Artificial Sequence: Synthetic oligonucleotide
uggugugcgugguacagga

SEQ ID NO: 1407484 - RNA, 19 nt, Artificial Sequence
  Description of Artificial Sequence: Synthetic oligonucleotide
agggcgcaugaucagguuc

SEQ ID NO: 1407485 - RNA, 19 nt, Artificial Sequence
  Description of Artificial Sequence: Synthetic oligonucleotide
ugacucgcuucucacuggc

SEQ ID NO: 1407486 - RNA, 19 nt, Artificial Sequence
  Description of Artificial Sequence: Synthetic oligonucleotide
cacuagcugcccaauacug

SEQ ID NO: 1407487 - RNA, 19 nt, Artificial Sequence
  Description of Artificial Sequence: Synthetic oligonucleotide
ugugcgugguacaggacaa

SEQ ID NO: 1407488 - RNA, 19 nt, Artificial Sequence
  Description of Artificial Sequence: Synthetic oligonucleotide
aucuaaagccacacgagca

SEQ ID NO: 1407489 - RNA, 19 nt, Artificial Sequence
  Description of Artificial Sequence: Synthetic oligonucleotide
caacugagaaugugcuugc

SEQ ID NO: 1407490 - RNA, 19 nt, Artificial Sequence
  Description of Artificial Sequence: Synthetic oligonucleotide
augaccaguggcccaucac

SEQ ID NO: 1407491 - RNA, 19 nt, Artificial Sequence
  Description of Artificial Sequence: Synthetic oligonucleotide
uauaauaagugaggccauc

SEQ ID NO: 1407492 - RNA, 19 nt, Artificial Sequence
  Description of Artificial Sequence: Synthetic oligonucleotide
ucagggcgcaugaucaggu

SEQ ID NO: 1407493 - RNA, 19 nt, Artificial Sequence
  Description of Artificial Sequence: Synthetic oligonucleotide
agcacgaacauagcuguug

SEQ ID NO: 1407494 - RNA, 19 nt, Artificial Sequence
  Description of Artificial Sequence: Synthetic oligonucleotide
uggcagcacgaacauagcu

SEQ ID NO: 1407495 - RNA, 19 nt, Artificial Sequence
  Description of Artificial Sequence: Synthetic oligonucleotide
aucagaugcacaagugaag

SEQ ID NO: 1407496 - RNA, 19 nt, Artificial Sequence
  Description of Artificial Sequence: Synthetic oligonucleotide
uccaacauggccacaccuu

SEQ ID NO: 1407497 - RNA, 19 nt, Artificial Sequence
  Description of Artificial Sequence: Synthetic oligonucleotide
gccacuguauacaaagggg

SEQ ID NO: 1407498 - RNA, 19 nt, Artificial Sequence
  Description of Artificial Sequence: Synthetic oligonucleotide
cugaacggcagguagugca

SEQ ID NO: 1407499 - RNA, 19 nt, Artificial Sequence
  Description of Artificial Sequence: Synthetic oligonucleotide
cauacauuggugcagcacu

SEQ ID NO: 1407500 - RNA, 19 nt, Artificial Sequence
  Description of Artificial Sequence: Synthetic oligonucleotide
guuauugcuauugccuuca

SEQ ID NO: 1407501 - RNA, 19 nt, Artificial Sequence
  Description of Artificial Sequence: Synthetic oligonucleotide
acuugaggcccaucuuguc

SEQ ID NO: 1407502 - RNA, 19 nt, Artificial Sequence
  Description of Artificial Sequence: Synthetic oligonucleotide
gucaaagcgccaaaggaca

SEQ ID NO: 1407503 - RNA, 19 nt, Artificial Sequence
  Description of Artificial Sequence: Synthetic oligonucleotide
gcgguuauaauaagugagg

SEQ ID NO: 1407504 - RNA, 19 nt, Artificial Sequence
  Description of Artificial Sequence: Synthetic oligonucleotide
acgaacauagcuguugcau

SEQ ID NO: 1407505 - RNA, 19 nt, Artificial Sequence
  Description of Artificial Sequence: Synthetic oligonucleotide
caugccacucaauguuacc

SEQ ID NO: 1407506 - RNA, 19 nt, Artificial Sequence
  Description of Artificial Sequence: Synthetic oligonucleotide
caauacuggugacaaccac

SEQ ID NO: 1407507 - RNA, 19 nt, Artificial Sequence
  Description of Artificial Sequence: Synthetic oligonucleotide
acaagugaagcuggguucu

SEQ ID NO: 1407508 - RNA, 19 nt, Artificial Sequence
  Description of Artificial Sequence: Synthetic oligonucleotide
ugcgugguacaggacaagc

SEQ ID NO: 1407509 - RNA, 19 nt, Artificial Sequence
  Description of Artificial Sequence: Synthetic oligonucleotide
acacgagcaaugccacccg

SEQ ID NO: 1407510 - RNA, 19 nt, Artificial Sequence
  Description of Artificial Sequence: Synthetic oligonucleotide
cauagcuguugcauccaac

SEQ ID NO: 1407511 - RNA, 19 nt, Artificial Sequence
  Description of Artificial Sequence: Synthetic oligonucleotide
caggccugcaucauccaac

SEQ ID NO: 1407512 - RNA, 19 nt, Artificial Sequence
  Description of Artificial Sequence: Synthetic oligonucleotide
auacaaagggguggcacug

SEQ ID NO: 1407513 - RNA, 19 nt, Artificial Sequence
  Description of Artificial Sequence: Synthetic oligonucleotide
gccgcuaacaucacagugg

SEQ ID NO: 1407514 - RNA, 19 nt, Artificial Sequence
  Description of Artificial Sequence: Synthetic oligonucleotide
agcuaccucgcuguggguc

SEQ ID NO: 1407515 - RNA, 19 nt, Artificial Sequence
  Description of Artificial Sequence: Synthetic oligonucleotide
uggcuguuccccgacaugu

SEQ ID NO: 1407516 - RNA, 19 nt, Artificial Sequence
  Description of Artificial Sequence: Synthetic oligonucleotide
ucucacuggcagcacgaac

SEQ ID NO: 1407517 - RNA, 19 nt, Artificial Sequence
  Description of Artificial Sequence: Synthetic oligonucleotide
cauauagcagcgguuauaa

SEQ ID NO: 1407518 - RNA, 19 nt, Artificial Sequence
  Description of Artificial Sequence: Synthetic oligonucleotide
gcagcgguuauaauaagug

SEQ ID NO: 1407519 - RNA, 19 nt, Artificial Sequence
  Description of Artificial Sequence: Synthetic oligonucleotide
augccacucaauguuaccu

SEQ ID NO: 1407520 - RNA, 19 nt, Artificial Sequence
  Description of Artificial Sequence: Synthetic oligonucleotide
ccaacugagaaugugcuug

SEQ ID NO: 1407521 - RNA, 19 nt, Artificial Sequence
  Description of Artificial Sequence: Synthetic oligonucleotide
uguagagcacuagcugccc

SEQ ID NO: 1407522 - RNA, 19 nt, Artificial Sequence
  Description of Artificial Sequence: Synthetic oligonucleotide
acggccgcuaacaucacag

SEQ ID NO: 1407523 - RNA, 19 nt, Artificial Sequence
  Description of Artificial Sequence: Synthetic oligonucleotide
ugccacucaauguuaccuc

SEQ ID NO: 1407524 - RNA, 19 nt, Artificial Sequence
  Description of Artificial Sequence: Synthetic oligonucleotide
gagucgacccacaauggca

SEQ ID NO: 1407525 - RNA, 19 nt, Artificial Sequence
  Description of Artificial Sequence: Synthetic oligonucleotide
ggucaaagcgccaaaggac

SEQ ID NO: 1407526 - RNA, 19 nt, Artificial Sequence
  Description of Artificial Sequence: Synthetic oligonucleotide
agccacacgagcaaugcca

SEQ ID NO: 1407527 - RNA, 19 nt, Artificial Sequence
  Description of Artificial Sequence: Synthetic oligonucleotide
uccauauagcagcgguuau

SEQ ID NO: 1407528 - RNA, 19 nt, Artificial Sequence
  Description of Artificial Sequence: Synthetic oligonucleotide
uguauacaaagggguggca

SEQ ID NO: 1407529 - RNA, 19 nt, Artificial Sequence
  Description of Artificial Sequence: Synthetic oligonucleotide
uugcaggguacaacaugca

SEQ ID NO: 1407530 - RNA, 19 nt, Artificial Sequence
  Description of Artificial Sequence: Synthetic oligonucleotide
uccaugccacucaauguua

SEQ ID NO: 1407531 - RNA, 19 nt, Artificial Sequence
  Description of Artificial Sequence: Synthetic oligonucleotide
ggggaagucagcccguagc

SEQ ID NO: 1407532 - RNA, 19 nt, Artificial Sequence
  Description of Artificial Sequence: Synthetic oligonucleotide
aaugugcuugcaggguaca

SEQ ID NO: 1407533 - RNA, 19 nt, Artificial Sequence
  Description of Artificial Sequence: Synthetic oligonucleotide
gccccaucacauucgaggg

SEQ ID NO: 1407534 - RNA, 19 nt, Artificial Sequence
  Description of Artificial Sequence: Synthetic oligonucleotide
gugagucgacccacaaugg

SEQ ID NO: 1407535 - RNA, 19 nt, Artificial Sequence
  Description of Artificial Sequence: Synthetic oligonucleotide
ucuuucucgcagcggucac

SEQ ID NO: 1407536 - RNA, 19 nt, Artificial Sequence
  Description of Artificial Sequence: Synthetic oligonucleotide
ugugggucaaagcgccaaa

SEQ ID NO: 1407537 - RNA, 19 nt, Artificial Sequence
  Description of Artificial Sequence: Synthetic oligonucleotide
guauuugcccgcugcaaaa

SEQ ID NO: 1407538 - RNA, 19 nt, Artificial Sequence
  Description of Artificial Sequence: Synthetic oligonucleotide
ccuguccugaguauuugcc

SEQ ID NO: 1407539 - RNA, 19 nt, Artificial Sequence
  Description of Artificial Sequence: Synthetic oligonucleotide
caaagggguggcacuguug

SEQ ID NO: 1407540 - RNA, 19 nt, Artificial Sequence
  Description of Artificial Sequence: Synthetic oligonucleotide
uagcagcgguuauaauaag

SEQ ID NO: 1407541 - RNA, 19 nt, Artificial Sequence
  Description of Artificial Sequence: Synthetic oligonucleotide
auguacugccuguggugag

SEQ ID NO: 1407542 - RNA, 19 nt, Artificial Sequence
  Description of Artificial Sequence: Synthetic oligonucleotide
uccgaacacaggccugugu

SEQ ID NO: 1407543 - RNA, 19 nt, Artificial Sequence
  Description of Artificial Sequence: Synthetic oligonucleotide
agggccacgggcacaggcc

SEQ ID NO: 1407544 - RNA, 19 nt, Artificial Sequence
  Description of Artificial Sequence: Synthetic oligonucleotide
uuauugcuauugccuucac

SEQ ID NO: 1407545 - RNA, 19 nt, Artificial Sequence
  Description of Artificial Sequence: Synthetic oligonucleotide
cagcgguuauaauaaguga

SEQ ID NO: 1407546 - RNA, 19 nt, Artificial Sequence
  Description of Artificial Sequence: Synthetic oligonucleotide
caauguuaccuccagguau

SEQ ID NO: 1407547 - RNA, 19 nt, Artificial Sequence
  Description of Artificial Sequence: Synthetic oligonucleotide
ucgggcuccuccaguaccu

SEQ ID NO: 1407548 - RNA, 19 nt, Artificial Sequence
  Description of Artificial Sequence: Synthetic oligonucleotide
ggcagcggcaaacuggcug

SEQ ID NO: 1407549 - RNA, 19 nt, Artificial Sequence
  Description of Artificial Sequence: Synthetic oligonucleotide
agcagcgguuauaauaagu

SEQ ID NO: 1407550 - RNA, 19 nt, Artificial Sequence
  Description of Artificial Sequence: Synthetic oligonucleotide
gucagggcgcaugaucagg

SEQ ID NO: 1407551 - RNA, 19 nt, Artificial Sequence
  Description of Artificial Sequence: Synthetic oligonucleotide
caggguacaacaugcaggu

SEQ ID NO: 1407552 - RNA, 19 nt, Artificial Sequence
  Description of Artificial Sequence: Synthetic oligonucleotide
uucuuccgcuggacggccg

SEQ ID NO: 1407553 - RNA, 19 nt, Artificial Sequence
  Description of Artificial Sequence: Synthetic oligonucleotide
ugcacaagugaagcugggu

SEQ ID NO: 1407554 - RNA, 19 nt, Artificial Sequence
  Description of Artificial Sequence: Synthetic oligonucleotide
gcuugcaggguacaacaug

SEQ ID NO: 1407555 - RNA, 19 nt, Artificial Sequence
  Description of Artificial Sequence: Synthetic oligonucleotide
guccugaguauuugcccgc

SEQ ID NO: 1407556 - RNA, 19 nt, Artificial Sequence
  Description of Artificial Sequence: Synthetic oligonucleotide
ucucaaaguuauugcuauu

SEQ ID NO: 1407557 - RNA, 19 nt, Artificial Sequence
  Description of Artificial Sequence: Synthetic oligonucleotide
cuuucucgcagcggucacg

SEQ ID NO: 1407558 - RNA, 19 nt, Artificial Sequence
  Description of Artificial Sequence: Synthetic oligonucleotide
gcagcggcaaacuggcugc

SEQ ID NO: 1407559 - RNA, 19 nt, Artificial Sequence
  Description of Artificial Sequence: Synthetic oligonucleotide
uggcaugggagcagcccca

SEQ ID NO: 1407560 - RNA, 19 nt, Artificial Sequence
  Description of Artificial Sequence: Synthetic oligonucleotide
cauguacugccugugguga

SEQ ID NO: 1407561 - RNA, 19 nt, Artificial Sequence
  Description of Artificial Sequence: Synthetic oligonucleotide
uggccacaccuucacgaac

SEQ ID NO: 1407562 - RNA, 19 nt, Artificial Sequence
  Description of Artificial Sequence: Synthetic oligonucleotide
caugcagcuaccucgcugu

SEQ ID NO: 1407563 - RNA, 19 nt, Artificial Sequence
  Description of Artificial Sequence: Synthetic oligonucleotide
gguauuuggugcccaagaa

SEQ ID NO: 1407564 - RNA, 19 nt, Artificial Sequence
  Description of Artificial Sequence: Synthetic oligonucleotide
uggucgagcaguggucuca

SEQ ID NO: 1407565 - RNA, 19 nt, Artificial Sequence
  Description of Artificial Sequence: Synthetic oligonucleotide
cuggcagcacgaacauagc

SEQ ID NO: 1407566 - RNA, 19 nt, Artificial Sequence
  Description of Artificial Sequence: Synthetic oligonucleotide
ggccgcuaacaucacagug

SEQ ID NO: 1407567 - RNA, 19 nt, Artificial Sequence
  Description of Artificial Sequence: Synthetic oligonucleotide
ccuccaguaccucugugag

SEQ ID NO: 1407568 - RNA, 19 nt, Artificial Sequence
  Description of Artificial Sequence: Synthetic oligonucleotide
guggccaacugagaaugug

SEQ ID NO: 1407569 - RNA, 19 nt, Artificial Sequence
  Description of Artificial Sequence: Synthetic oligonucleotide
ugcccgucccagaugucac

SEQ ID NO: 1407570 - RNA, 19 nt, Artificial Sequence
  Description of Artificial Sequence: Synthetic oligonucleotide
gguucuuucucgcagcggu

SEQ ID NO: 1407571 - RNA, 19 nt, Artificial Sequence
  Description of Artificial Sequence: Synthetic oligonucleotide
agucagcccguagcaggcc

SEQ ID NO: 1407572 - RNA, 19 nt, Artificial Sequence
  Description of Artificial Sequence: Synthetic oligonucleotide
cagcauugcgugcagugca

SEQ ID NO: 1407573 - RNA, 19 nt, Artificial Sequence
  Description of Artificial Sequence: Synthetic oligonucleotide
guuguacagggcagguggc

SEQ ID NO: 1407574 - RNA, 19 nt, Artificial Sequence
  Description of Artificial Sequence: Synthetic oligonucleotide
gaccaguggcccaucacca

SEQ ID NO: 1407575 - RNA, 19 nt, Artificial Sequence
  Description of Artificial Sequence: Synthetic oligonucleotide
gaaccucacccaugaugac

SEQ ID NO: 1407576 - RNA, 19 nt, Artificial Sequence
  Description of Artificial Sequence: Synthetic oligonucleotide
ggguggccaacugagaaug

SEQ ID NO: 1407577 - RNA, 19 nt, Artificial Sequence
  Description of Artificial Sequence: Synthetic oligonucleotide
agucgacccacaauggcaa

SEQ ID NO: 1407578 - RNA, 19 nt, Artificial Sequence
  Description of Artificial Sequence: Synthetic oligonucleotide
auauagcagcgguuauaau

SEQ ID NO: 1407579 - RNA, 19 nt, Artificial Sequence
  Description of Artificial Sequence: Synthetic oligonucleotide
ccgaacacaggccugugug

SEQ ID NO: 1407580 - RNA, 19 nt, Artificial Sequence
  Description of Artificial Sequence: Synthetic oligonucleotide
agcggcaaacuggcugccc

SEQ ID NO: 1407581 - RNA, 19 nt, Artificial Sequence
  Description of Artificial Sequence: Synthetic oligonucleotide
gugguacaggacaagcauc

SEQ ID NO: 1407582 - RNA, 19 nt, Artificial Sequence
  Description of Artificial Sequence: Synthetic oligonucleotide
cuggguggccaacugagaa

SEQ ID NO: 1407583 - RNA, 19 nt, Artificial Sequence
  Description of Artificial Sequence: Synthetic oligonucleotide
ggcccugaacggcagguag

SEQ ID NO: 1407584 - RNA, 19 nt, Artificial Sequence
  Description of Artificial Sequence: Synthetic oligonucleotide
guaggcccagcgugguucc

SEQ ID NO: 1407585 - RNA, 19 nt, Artificial Sequence
  Description of Artificial Sequence: Synthetic oligonucleotide
caggguuggucgagcagug

SEQ ID NO: 1407586 - RNA, 19 nt, Artificial Sequence
  Description of Artificial Sequence: Synthetic oligonucleotide
aggugcgacaggguggugu

SEQ ID NO: 1407587 - RNA, 19 nt, Artificial Sequence
  Description of Artificial Sequence: Synthetic oligonucleotide
ucgacccacaauggcaaaa

SEQ ID NO: 1407588 - RNA, 19 nt, Artificial Sequence
  Description of Artificial Sequence: Synthetic oligonucleotide
acaaagggguggcacuguu

SEQ ID NO: 1407589 - RNA, 19 nt, Artificial Sequence
  Description of Artificial Sequence: Synthetic oligonucleotide
agcauugcgugcagugcag

SEQ ID NO: 1407590 - RNA, 19 nt, Artificial Sequence
  Description of Artificial Sequence: Synthetic oligonucleotide
cacaggaggcugcugucuc

SEQ ID NO: 1407591 - RNA, 19 nt, Artificial Sequence
  Description of Artificial Sequence: Synthetic oligonucleotide
cacgagcaaugccacccgc

SEQ ID NO: 1407592 - RNA, 19 nt, Artificial Sequence
  Description of Artificial Sequence: Synthetic oligonucleotide
guagagcacuagcugccca

SEQ ID NO: 1407593 - RNA, 19 nt, Artificial Sequence
  Description of Artificial Sequence: Synthetic oligonucleotide
gguggugugcgugguacag

SEQ ID NO: 1407594 - RNA, 19 nt, Artificial Sequence
  Description of Artificial Sequence: Synthetic oligonucleotide
uccugaguauuugcccgcu

SEQ ID NO: 1407595 - RNA, 19 nt, Artificial Sequence
  Description of Artificial Sequence: Synthetic oligonucleotide
auugcgugcagugcaggua

SEQ ID NO: 1407596 - RNA, 19 nt, Artificial Sequence
  Description of Artificial Sequence: Synthetic oligonucleotide
ggcucucaaaguuauugcu

SEQ ID NO: 1407597 - RNA, 19 nt, Artificial Sequence
  Description of Artificial Sequence: Synthetic oligonucleotide
cuggcuguuccccgacaug

SEQ ID NO: 1407598 - RNA, 19 nt, Artificial Sequence
  Description of Artificial Sequence: Synthetic oligonucleotide
gguucccagcccuggcagg

SEQ ID NO: 1407599 - RNA, 19 nt, Artificial Sequence
  Description of Artificial Sequence: Synthetic oligonucleotide
cgaacauagcuguugcauc

SEQ ID NO: 1407600 - RNA, 19 nt, Artificial Sequence
  Description of Artificial Sequence: Synthetic oligonucleotide
uuggucgagcaguggucuc

SEQ ID NO: 1407601 - RNA, 19 nt, Artificial Sequence
  Description of Artificial Sequence: Synthetic oligonucleotide
auacauuggugcagcacuu

SEQ ID NO: 1407602 - RNA, 19 nt, Artificial Sequence
  Description of Artificial Sequence: Synthetic oligonucleotide
gguggcaugggagcagccc

SEQ ID NO: 1407603 - RNA, 19 nt, Artificial Sequence
  Description of Artificial Sequence: Synthetic oligonucleotide
cacgaacauagcuguugca

SEQ ID NO: 1407604 - RNA, 19 nt, Artificial Sequence
  Description of Artificial Sequence: Synthetic oligonucleotide
uccgcuggacggccgcuaa

SEQ ID NO: 1407605 - RNA, 19 nt, Artificial Sequence
  Description of Artificial Sequence: Synthetic oligonucleotide
guacaacaugcagguggag

SEQ ID NO: 1407606 - RNA, 19 nt, Artificial Sequence
  Description of Artificial Sequence: Synthetic oligonucleotide
gcccaagaacuugaggccc

SEQ ID NO: 1407607 - RNA, 19 nt, Artificial Sequence
  Description of Artificial Sequence: Synthetic oligonucleotide
cccacauacauuggugcag

SEQ ID NO: 1407608 - RNA, 19 nt, Artificial Sequence
  Description of Artificial Sequence: Synthetic oligonucleotide
ggucagggcgcaugaucag

SEQ ID NO: 1407609 - RNA, 19 nt, Artificial Sequence
  Description of Artificial Sequence: Synthetic oligonucleotide
gucgagcaguggucucagg

SEQ ID NO: 1407610 - RNA, 19 nt, Artificial Sequence
  Description of Artificial Sequence: Synthetic oligonucleotide
caaaaucacuucggcacaa

SEQ ID NO: 1407611 - RNA, 19 nt, Artificial Sequence
  Description of Artificial Sequence: Synthetic oligonucleotide
cagaugcugcacaguccug

SEQ ID NO: 1407612 - RNA, 19 nt, Artificial Sequence
  Description of Artificial Sequence: Synthetic oligonucleotide
guuggucgagcaguggucu

SEQ ID NO: 1407613 - RNA, 19 nt, Artificial Sequence
  Description of Artificial Sequence: Synthetic oligonucleotide
gacggccgcuaacaucaca

SEQ ID NO: 1407614 - RNA, 19 nt, Artificial Sequence
  Description of Artificial Sequence: Synthetic oligonucleotide
uggcugcccgucccagaug

SEQ ID NO: 1407615 - RNA, 19 nt, Artificial Sequence
  Description of Artificial Sequence: Synthetic oligonucleotide
gcagcggucacggcagcgg

SEQ ID NO: 1407616 - RNA, 19 nt, Artificial Sequence
  Description of Artificial Sequence: Synthetic oligonucleotide
agagcacuagcugcccaau

SEQ ID NO: 1407617 - RNA, 19 nt, Artificial Sequence
  Description of Artificial Sequence: Synthetic oligonucleotide
cccuggugcacucacgcuc

SEQ ID NO: 1407618 - RNA, 19 nt, Artificial Sequence
  Description of Artificial Sequence: Synthetic oligonucleotide
cccuguccugaguauuugc

SEQ ID NO: 1407619 - RNA, 19 nt, Artificial Sequence
  Description of Artificial Sequence: Synthetic oligonucleotide
guuccccgacauguacugc

SEQ ID NO: 1407620 - RNA, 19 nt, Artificial Sequence
  Description of Artificial Sequence: Synthetic oligonucleotide
caguaccucugugagucga

SEQ ID NO: 1407621 - RNA, 19 nt, Artificial Sequence
  Description of Artificial Sequence: Synthetic oligonucleotide
gguuggucgagcagugguc

SEQ ID NO: 1407622 - RNA, 19 nt, Artificial Sequence
  Description of Artificial Sequence: Synthetic oligonucleotide
cugcccgucccagauguca

SEQ ID NO: 1407623 - RNA, 19 nt, Artificial Sequence
  Description of Artificial Sequence: Synthetic oligonucleotide
gcauugcgugcagugcagg

SEQ ID NO: 1407624 - RNA, 19 nt, Artificial Sequence
  Description of Artificial Sequence: Synthetic oligonucleotide
cugcccaauacuggugaca

SEQ ID NO: 1407625 - RNA, 19 nt, Artificial Sequence
  Description of Artificial Sequence: Synthetic oligonucleotide
cauugcgugcagugcaggu

SEQ ID NO: 1407626 - RNA, 19 nt, Artificial Sequence
  Description of Artificial Sequence: Synthetic oligonucleotide
acuucggcacaagcucaga

SEQ ID NO: 1407627 - RNA, 19 nt, Artificial Sequence
  Description of Artificial Sequence: Synthetic oligonucleotide
gguagugcacaggcauccc

SEQ ID NO: 1407628 - RNA, 19 nt, Artificial Sequence
  Description of Artificial Sequence: Synthetic oligonucleotide
ugccacccgcagccucggg

SEQ ID NO: 1407629 - RNA, 19 nt, Artificial Sequence
  Description of Artificial Sequence: Synthetic oligonucleotide
gcacaagugaagcuggguu

SEQ ID NO: 1407630 - RNA, 19 nt, Artificial Sequence
  Description of Artificial Sequence: Synthetic oligonucleotide
ccgcuaacaucacagugga

SEQ ID NO: 1407631 - RNA, 19 nt, Artificial Sequence
  Description of Artificial Sequence: Synthetic oligonucleotide
gugcgugguacaggacaag

SEQ ID NO: 1407632 - RNA, 19 nt, Artificial Sequence
  Description of Artificial Sequence: Synthetic oligonucleotide
ggucgagcaguggucucag

SEQ ID NO: 1407633 - RNA, 19 nt, Artificial Sequence
  Description of Artificial Sequence: Synthetic oligonucleotide
caagaacuugaggcccauc

SEQ ID NO: 1407634 - RNA, 19 nt, Artificial Sequence
  Description of Artificial Sequence: Synthetic oligonucleotide
gcguccacccacagguggg

SEQ ID NO: 1407635 - RNA, 19 nt, Artificial Sequence
  Description of Artificial Sequence: Synthetic oligonucleotide
augugcuugcaggguacaa

SEQ ID NO: 1407636 - RNA, 19 nt, Artificial Sequence
  Description of Artificial Sequence: Synthetic oligonucleotide
acucacgcucacaggugcu

SEQ ID NO: 1407637 - RNA, 19 nt, Artificial Sequence
  Description of Artificial Sequence: Synthetic oligonucleotide
cuugaggcggcaggugcga

SEQ ID NO: 1407638 - RNA, 19 nt, Artificial Sequence
  Description of Artificial Sequence: Synthetic oligonucleotide
ggguuggucgagcaguggu

SEQ ID NO: 1407639 - RNA, 19 nt, Artificial Sequence
  Description of Artificial Sequence: Synthetic oligonucleotide
gugugucaggcuggcacuc

SEQ ID NO: 1407640 - RNA, 19 nt, Artificial Sequence
  Description of Artificial Sequence: Synthetic oligonucleotide
cugugggucaaagcgccaa

SEQ ID NO: 1407641 - RNA, 19 nt, Artificial Sequence
  Description of Artificial Sequence: Synthetic oligonucleotide
cucccggcucucaaaguua

SEQ ID NO: 1407642 - RNA, 19 nt, Artificial Sequence
  Description of Artificial Sequence: Synthetic oligonucleotide
gcacaggcauccccagggc

SEQ ID NO: 1407643 - RNA, 19 nt, Artificial Sequence
  Description of Artificial Sequence: Synthetic oligonucleotide
cacaagcucagagccagcu

SEQ ID NO: 1407644 - RNA, 19 nt, Artificial Sequence
  Description of Artificial Sequence: Synthetic oligonucleotide
augccacccgcagccucgg

SEQ ID NO: 1407645 - RNA, 19 nt, Artificial Sequence
  Description of Artificial Sequence: Synthetic oligonucleotide
ccuggugcacucacgcuca

SEQ ID NO: 1407646 - RNA, 19 nt, Artificial Sequence
  Description of Artificial Sequence: Synthetic oligonucleotide
ccccaucacauucgagggc

SEQ ID NO: 1407647 - RNA, 19 nt, Artificial Sequence
  Description of Artificial Sequence: Synthetic oligonucleotide
gacucgcuucucacuggca

SEQ ID NO: 1407648 - RNA, 19 nt, Artificial Sequence
  Description of Artificial Sequence: Synthetic oligonucleotide
ccaguaccucugugagucg

SEQ ID NO: 1407649 - RNA, 19 nt, Artificial Sequence
  Description of Artificial Sequence: Synthetic oligonucleotide
cacaggugcucugggcguc

SEQ ID NO: 1407650 - RNA, 19 nt, Artificial Sequence
  Description of Artificial Sequence: Synthetic oligonucleotide
acguugccauacaucuggu

SEQ ID NO: 1407651 - RNA, 19 nt, Artificial Sequence
  Description of Artificial Sequence: Synthetic oligonucleotide
cccugaacggcagguagug

SEQ ID NO: 1407652 - RNA, 19 nt, Artificial Sequence
  Description of Artificial Sequence: Synthetic oligonucleotide
caugccucauaggucucaa

SEQ ID NO: 1407653 - RNA, 19 nt, Artificial Sequence
  Description of Artificial Sequence: Synthetic oligonucleotide
ccacguugccauacaucug

SEQ ID NO: 1407654 - RNA, 19 nt, Artificial Sequence
  Description of Artificial Sequence: Synthetic oligonucleotide
ccgcugcaaaacagagagg

SEQ ID NO: 1407655 - RNA, 19 nt, Artificial Sequence
  Description of Artificial Sequence: Synthetic oligonucleotide
gggguccgaacacaggccu

SEQ ID NO: 1407656 - RNA, 19 nt, Artificial Sequence
  Description of Artificial Sequence: Synthetic oligonucleotide
ggcugcccgucccagaugu

SEQ ID NO: 1407657 - RNA, 19 nt, Artificial Sequence
  Description of Artificial Sequence: Synthetic oligonucleotide
auguuaccuccagguauuu

SEQ ID NO: 1407658 - RNA, 19 nt, Artificial Sequence
  Description of Artificial Sequence: Synthetic oligonucleotide
gcgugguacaggacaagca

SEQ ID NO: 1407659 - RNA, 19 nt, Artificial Sequence
  Description of Artificial Sequence: Synthetic oligonucleotide
cuggugcacucacgcucac

SEQ ID NO: 1407660 - RNA, 19 nt, Artificial Sequence
  Description of Artificial Sequence: Synthetic oligonucleotide
gagcugguuggggcacaug

SEQ ID NO: 1407661 - RNA, 19 nt, Artificial Sequence
  Description of Artificial Sequence: Synthetic oligonucleotide
guccgaacacaggccugug

SEQ ID NO: 1407662 - RNA, 19 nt, Artificial Sequence
  Description of Artificial Sequence: Synthetic oligonucleotide
gucgacccacaauggcaaa

SEQ ID NO: 1407663 - RNA, 19 nt, Artificial Sequence
  Description of Artificial Sequence: Synthetic oligonucleotide
ccgacauguacugccugug

SEQ ID NO: 1407664 - RNA, 19 nt, Artificial Sequence
  Description of Artificial Sequence: Synthetic oligonucleotide
ggccaacugagaaugugcu

SEQ ID NO: 1407665 - RNA, 19 nt, Artificial Sequence
  Description of Artificial Sequence: Synthetic oligonucleotide
ggggaagcgggcugccaca

SEQ ID NO: 1407666 - RNA, 19 nt, Artificial Sequence
  Description of Artificial Sequence: Synthetic oligonucleotide
cagcggcaaacuggcugcc

SEQ ID NO: 1407667 - RNA, 19 nt, Artificial Sequence
  Description of Artificial Sequence: Synthetic oligonucleotide
agcccguagcaggccagca

SEQ ID NO: 1407668 - RNA, 19 nt, Artificial Sequence
  Description of Artificial Sequence: Synthetic oligonucleotide
aagcgccaaaggacaugau

SEQ ID NO: 1407669 - RNA, 19 nt, Artificial Sequence
  Description of Artificial Sequence: Synthetic oligonucleotide
cccgucccagaugucacag

SEQ ID NO: 1407670 - RNA, 19 nt, Artificial Sequence
  Description of Artificial Sequence: Synthetic oligonucleotide
gcgugguucccagcccugg

SEQ ID NO: 1407671 - RNA, 19 nt, Artificial Sequence
  Description of Artificial Sequence: Synthetic oligonucleotide
ggcaugggagcagccccag

SEQ ID NO: 1407672 - RNA, 19 nt, Artificial Sequence
  Description of Artificial Sequence: Synthetic oligonucleotide
agcggucacggcagcggca

SEQ ID NO: 1407673 - RNA, 19 nt, Artificial Sequence
  Description of Artificial Sequence: Synthetic oligonucleotide
gcccaucuugucaucuuuc

SEQ ID NO: 1407674 - RNA, 19 nt, Artificial Sequence
  Description of Artificial Sequence: Synthetic oligonucleotide
cagagccagcuugcucuug

SEQ ID NO: 1407675 - RNA, 19 nt, Artificial Sequence
  Description of Artificial Sequence: Synthetic oligonucleotide
cugugagucgacccacaau

SEQ ID NO: 1407676 - RNA, 19 nt, Artificial Sequence
  Description of Artificial Sequence: Synthetic oligonucleotide
gcgugcagugcagguauac

SEQ ID NO: 1407677 - RNA, 19 nt, Artificial Sequence
  Description of Artificial Sequence: Synthetic oligonucleotide
uuccgcuggacggccgcua

SEQ ID NO: 1407678 - RNA, 19 nt, Artificial Sequence
  Description of Artificial Sequence: Synthetic oligonucleotide
gugcgacaggguggugugc

SEQ ID NO: 1407679 - RNA, 19 nt, Artificial Sequence
  Description of Artificial Sequence: Synthetic oligonucleotide
gggcgcaugaucagguucu

SEQ ID NO: 1407680 - RNA, 19 nt, Artificial Sequence
  Description of Artificial Sequence: Synthetic oligonucleotide
cguugccauacaucugguc

SEQ ID NO: 1407681 - RNA, 19 nt, Artificial Sequence
  Description of Artificial Sequence: Synthetic oligonucleotide
ggguccgaacacaggccug

SEQ ID NO: 1407682 - RNA, 19 nt, Artificial Sequence
  Description of Artificial Sequence: Synthetic oligonucleotide
ccauauagcagcgguuaua

SEQ ID NO: 1407683 - RNA, 19 nt, Artificial Sequence
  Description of Artificial Sequence: Synthetic oligonucleotide
ggugugcgugguacaggac

SEQ ID NO: 1407684 - RNA, 19 nt, Artificial Sequence
  Description of Artificial Sequence: Synthetic oligonucleotide
ggaagcgggcugccacaca

SEQ ID NO: 1407685 - RNA, 19 nt, Artificial Sequence
  Description of Artificial Sequence: Synthetic oligonucleotide
uaccucgcugugggucaaa

SEQ ID NO: 1407686 - RNA, 19 nt, Artificial Sequence
  Description of Artificial Sequence: Synthetic oligonucleotide
gcccuguugugggcacugg

SEQ ID NO: 1407687 - RNA, 19 nt, Artificial Sequence
  Description of Artificial Sequence: Synthetic oligonucleotide
gucccuguccugaguauuu

SEQ ID NO: 1407688 - RNA, 19 nt, Artificial Sequence
  Description of Artificial Sequence: Synthetic oligonucleotide
cccuguugugggcacugga

SEQ ID NO: 1407689 - RNA, 19 nt, Artificial Sequence
  Description of Artificial Sequence: Synthetic oligonucleotide
gcuggguggccaacugaga

SEQ ID NO: 1407690 - RNA, 19 nt, Artificial Sequence
  Description of Artificial Sequence: Synthetic oligonucleotide
gcacaagcucagagccagc

SEQ ID NO: 1407691 - RNA, 19 nt, Artificial Sequence
  Description of Artificial Sequence: Synthetic oligonucleotide
gggccacgggcacaggccu

SEQ ID NO: 1407692 - RNA, 19 nt, Artificial Sequence
  Description of Artificial Sequence: Synthetic oligonucleotide
gcccgucccagaugucaca

SEQ ID NO: 1407693 - RNA, 19 nt, Artificial Sequence
  Description of Artificial Sequence: Synthetic oligonucleotide
cccgacauguacugccugu

SEQ ID NO: 1407694 - RNA, 19 nt, Artificial Sequence
  Description of Artificial Sequence: Synthetic oligonucleotide
gcgcaugaucagguucuuc

SEQ ID NO: 1407695 - RNA, 19 nt, Artificial Sequence
  Description of Artificial Sequence: Synthetic oligonucleotide
cuaccucgcugugggucaa

SEQ ID NO: 1407696 - RNA, 19 nt, Artificial Sequence
  Description of Artificial Sequence: Synthetic oligonucleotide
cgugcagugcagguauaca

SEQ ID NO: 1407697 - RNA, 19 nt, Artificial Sequence
  Description of Artificial Sequence: Synthetic oligonucleotide
gcugugggucaaagcgcca

SEQ ID NO: 1407698 - RNA, 19 nt, Artificial Sequence
  Description of Artificial Sequence: Synthetic oligonucleotide
gcuggacggccgcuaacau

SEQ ID NO: 1407699 - RNA, 19 nt, Artificial Sequence
  Description of Artificial Sequence: Synthetic oligonucleotide
gagcccuguugugggcacu

SEQ ID NO: 1407700 - RNA, 19 nt, Artificial Sequence
  Description of Artificial Sequence: Synthetic oligonucleotide
cgcuggacggccgcuaaca

SEQ ID NO: 1407701 - RNA, 19 nt, Artificial Sequence
  Description of Artificial Sequence: Synthetic oligonucleotide
gguggccaacugagaaugu

SEQ ID NO: 1407702 - RNA, 19 nt, Artificial Sequence
  Description of Artificial Sequence: Synthetic oligonucleotide
cagggcgcaugaucagguu

SEQ ID NO: 1407703 - RNA, 19 nt, Artificial Sequence
  Description of Artificial Sequence: Synthetic oligonucleotide
cagcacgaacauagcuguu

SEQ ID NO: 1407704 - RNA, 19 nt, Artificial Sequence
  Description of Artificial Sequence: Synthetic oligonucleotide
ccgcuggacggccgcuaac

SEQ ID NO: 1407705 - RNA, 19 nt, Artificial Sequence
  Description of Artificial Sequence: Synthetic oligonucleotide
cacgaaccucacccaugau

SEQ ID NO: 1407706 - RNA, 19 nt, Artificial Sequence
  Description of Artificial Sequence: Synthetic oligonucleotide
ggacggccgcuaacaucac

SEQ ID NO: 1407707 - RNA, 19 nt, Artificial Sequence
  Description of Artificial Sequence: Synthetic oligonucleotide
cuuccgcuggacggccgcu

SEQ ID NO: 1407708 - RNA, 19 nt, Artificial Sequence
  Description of Artificial Sequence: Synthetic oligonucleotide
cagcuaccucgcugugggu

SEQ ID NO: 1407709 - RNA, 19 nt, Artificial Sequence
  Description of Artificial Sequence: Synthetic oligonucleotide
cuguaggcccagcgugguu

SEQ ID NO: 1407710 - RNA, 19 nt, Artificial Sequence
  Description of Artificial Sequence: Synthetic oligonucleotide
gcugcccgucccagauguc

SEQ ID NO: 1407711 - RNA, 19 nt, Artificial Sequence
  Description of Artificial Sequence: Synthetic oligonucleotide
ggcgcaugaucagguucuu

SEQ ID NO: 1407712 - RNA, 19 nt, Artificial Sequence
  Description of Artificial Sequence: Synthetic oligonucleotide
cggccgcuaacaucacagu

SEQ ID NO: 1407713 - RNA, 19 nt, Artificial Sequence
  Description of Artificial Sequence: Synthetic oligonucleotide
cggcagcggcaaacuggcu

SEQ ID NO: 1407714 - RNA, 19 nt, Artificial Sequence
  Description of Artificial Sequence: Synthetic oligonucleotide
aauauuuugccauggaagc

SEQ ID NO: 1407715 - RNA, 19 nt, Artificial Sequence
  Description of Artificial Sequence: Synthetic oligonucleotide
aaaucugcaauuaacagcc

SEQ ID NO: 1407716 - RNA, 19 nt, Artificial Sequence
  Description of Artificial Sequence: Synthetic oligonucleotide
auugcuauggcaccgaugc

SEQ ID NO: 1407717 - RNA, 19 nt, Artificial Sequence
  Description of Artificial Sequence: Synthetic oligonucleotide
aaaggcuaauaccaugggc

SEQ ID NO: 1407718 - RNA, 19 nt, Artificial Sequence
  Description of Artificial Sequence: Synthetic oligonucleotide
aacaugaacucacaggcag

SEQ ID NO: 1407719 - RNA, 19 nt, Artificial Sequence
  Description of Artificial Sequence: Synthetic oligonucleotide
uaaugugcaauauagggca

SEQ ID NO: 1407720 - RNA, 19 nt, Artificial Sequence
  Description of Artificial Sequence: Synthetic oligonucleotide
uuagcuguauguaauagga

SEQ ID NO: 1407721 - RNA, 19 nt, Artificial Sequence
  Description of Artificial Sequence: Synthetic oligonucleotide
uuugaaaucggguacuccc

SEQ ID NO: 1407722 - RNA, 19 nt, Artificial Sequence
  Description of Artificial Sequence: Synthetic oligonucleotide
caauauuuugccauggaag

SEQ ID NO: 1407723 - RNA, 19 nt, Artificial Sequence
  Description of Artificial Sequence: Synthetic oligonucleotide
auaaugugcaauauagggc

SEQ ID NO: 1407724 - RNA, 19 nt, Artificial Sequence
  Description of Artificial Sequence: Synthetic oligonucleotide
uuagugaugaacaccuugc

SEQ ID NO: 1407725 - RNA, 19 nt, Artificial Sequence
  Description of Artificial Sequence: Synthetic oligonucleotide
caaucguacaucuucaaag

SEQ ID NO: 1407726 - RNA, 19 nt, Artificial Sequence
  Description of Artificial Sequence: Synthetic oligonucleotide
aaaaugucguguucugagg

SEQ ID NO: 1407727 - RNA, 19 nt, Artificial Sequence
  Description of Artificial Sequence: Synthetic oligonucleotide
caagucuccgccaauaccg

SEQ ID NO: 1407728 - RNA, 19 nt, Artificial Sequence
  Description of Artificial Sequence: Synthetic oligonucleotide
uauuucguugguaccaccg

SEQ ID NO: 1407729 - RNA, 19 nt, Artificial Sequence
  Description of Artificial Sequence: Synthetic oligonucleotide
ugcaauauagggcaugaca

SEQ ID NO: 1407730 - RNA, 19 nt, Artificial Sequence
  Description of Artificial Sequence: Synthetic oligonucleotide
acagucguaagcuacacug

SEQ ID NO: 1407731 - RNA, 19 nt, Artificial Sequence
  Description of Artificial Sequence: Synthetic oligonucleotide
aauaccgccauguuucucu

SEQ ID NO: 1407732 - RNA, 19 nt, Artificial Sequence
  Description of Artificial Sequence: Synthetic oligonucleotide
uuguaagucacuuccagca

SEQ ID NO: 1407733 - RNA, 19 nt, Artificial Sequence
  Description of Artificial Sequence: Synthetic oligonucleotide
aaucguacaucuucaaaga

SEQ ID NO: 1407734 - RNA, 19 nt, Artificial Sequence
  Description of Artificial Sequence: Synthetic oligonucleotide
aaagauucuccugauuccg

SEQ ID NO: 1407735 - RNA, 19 nt, Artificial Sequence
  Description of Artificial Sequence: Synthetic oligonucleotide
ucuugcaugagguaguaga

SEQ ID NO: 1407736 - RNA, 19 nt, Artificial Sequence
  Description of Artificial Sequence: Synthetic oligonucleotide
aaugagaacaccgggcggg

SEQ ID NO: 1407737 - RNA, 19 nt, Artificial Sequence
  Description of Artificial Sequence: Synthetic oligonucleotide
uagaguugaauucagguua

SEQ ID NO: 1407738 - RNA, 19 nt, Artificial Sequence
  Description of Artificial Sequence: Synthetic oligonucleotide
cauuuuaucccaaguagag

SEQ ID NO: 1407739 - RNA, 19 nt, Artificial Sequence
  Description of Artificial Sequence: Synthetic oligonucleotide
aaaaggcuaauaccauggg

SEQ ID NO: 1407740 - RNA, 19 nt, Artificial Sequence
  Description of Artificial Sequence: Synthetic oligonucleotide
uuuuaucccaaguagaguu

SEQ ID NO: 1407741 - RNA, 19 nt, Artificial Sequence
  Description of Artificial Sequence: Synthetic oligonucleotide
aauaccaugggcaggcgac

SEQ ID NO: 1407742 - RNA, 19 nt, Artificial Sequence
  Description of Artificial Sequence: Synthetic oligonucleotide
uccgauaucaguuaauuuu

SEQ ID NO: 1407743 - RNA, 19 nt, Artificial Sequence
  Description of Artificial Sequence: Synthetic oligonucleotide
cucauuauuucguugguac

SEQ ID NO: 1407744 - RNA, 19 nt, Artificial Sequence
  Description of Artificial Sequence: Synthetic oligonucleotide
uuuuguguagcuuccggcc

SEQ ID NO: 1407745 - RNA, 19 nt, Artificial Sequence
  Description of Artificial Sequence: Synthetic oligonucleotide
aaggcuaauaccaugggca

SEQ ID NO: 1407746 - RNA, 19 nt, Artificial Sequence
  Description of Artificial Sequence: Synthetic oligonucleotide
ucugaggaaaagauucucc

SEQ ID NO: 1407747 - RNA, 19 nt, Artificial Sequence
  Description of Artificial Sequence: Synthetic oligonucleotide
aacuuuagacucuuugggu

SEQ ID NO: 1407748 - RNA, 19 nt, Artificial Sequence
  Description of Artificial Sequence: Synthetic oligonucleotide
aacaagucuccgccaauac

SEQ ID NO: 1407749 - RNA, 19 nt, Artificial Sequence
  Description of Artificial Sequence: Synthetic oligonucleotide
auuagugaugaacaccuug

SEQ ID NO: 1407750 - RNA, 19 nt, Artificial Sequence
  Description of Artificial Sequence: Synthetic oligonucleotide
aacccuagcguccacauaa

SEQ ID NO: 1407751 - RNA, 19 nt, Artificial Sequence
  Description of Artificial Sequence: Synthetic oligonucleotide
uuaacauaguuccugguuu

SEQ ID NO: 1407752 - RNA, 19 nt, Artificial Sequence
  Description of Artificial Sequence: Synthetic oligonucleotide
uccguugagaauccaauca

SEQ ID NO: 1407753 - RNA, 19 nt, Artificial Sequence
  Description of Artificial Sequence: Synthetic oligonucleotide
gauuggcugaacccuagcg

SEQ ID NO: 1407754 - RNA, 19 nt, Artificial Sequence
  Description of Artificial Sequence: Synthetic oligonucleotide
uccaaucacucccagaccu

SEQ ID NO: 1407755 - RNA, 19 nt, Artificial Sequence
  Description of Artificial Sequence: Synthetic oligonucleotide
uuaaccagccauuagugau

SEQ ID NO: 1407756 - RNA, 19 nt, Artificial Sequence
  Description of Artificial Sequence: Synthetic oligonucleotide
acuacgaucacaaggucac

SEQ ID NO: 1407757 - RNA, 19 nt, Artificial Sequence
  Description of Artificial Sequence: Synthetic oligonucleotide
augugugcaacuguuuucc

SEQ ID NO: 1407758 - RNA, 19 nt, Artificial Sequence
  Description of Artificial Sequence: Synthetic oligonucleotide
ugcuuaacauaguuccugg

SEQ ID NO: 1407759 - RNA, 19 nt, Artificial Sequence
  Description of Artificial Sequence: Synthetic oligonucleotide
uccggaaugagaacaccgg

SEQ ID NO: 1407760 - RNA, 19 nt, Artificial Sequence
  Description of Artificial Sequence: Synthetic oligonucleotide
augucuagcugucacugac

SEQ ID NO: 1407761 - RNA, 19 nt, Artificial Sequence
  Description of Artificial Sequence: Synthetic oligonucleotide
ggcaacuacgaucacaagg

SEQ ID NO: 1407762 - RNA, 19 nt, Artificial Sequence
  Description of Artificial Sequence: Synthetic oligonucleotide
uaggauugcaggacguagg

SEQ ID NO: 1407763 - RNA, 19 nt, Artificial Sequence
  Description of Artificial Sequence: Synthetic oligonucleotide
agaauaguucugcuguguc

SEQ ID NO: 1407764 - RNA, 19 nt, Artificial Sequence
  Description of Artificial Sequence: Synthetic oligonucleotide
cuccuuguaagucacuucc

SEQ ID NO: 1407765 - RNA, 19 nt, Artificial Sequence
  Description of Artificial Sequence: Synthetic oligonucleotide
aguuugaguaugcuugcuc

SEQ ID NO: 1407766 - RNA, 19 nt, Artificial Sequence
  Description of Artificial Sequence: Synthetic oligonucleotide
cucguuacacauauguuug

SEQ ID NO: 1407767 - RNA, 19 nt, Artificial Sequence
  Description of Artificial Sequence: Synthetic oligonucleotide
accguagauuggcugaacc

SEQ ID NO: 1407768 - RNA, 19 nt, Artificial Sequence
  Description of Artificial Sequence: Synthetic oligonucleotide
aaauugccaaaucugcaau

SEQ ID NO: 1407769 - RNA, 19 nt, Artificial Sequence
  Description of Artificial Sequence: Synthetic oligonucleotide
uccacaaaagcucucguua

SEQ ID NO: 1407770 - RNA, 19 nt, Artificial Sequence
  Description of Artificial Sequence: Synthetic oligonucleotide
uuuaucccaaguagaguug

SEQ ID NO: 1407771 - RNA, 19 nt, Artificial Sequence
  Description of Artificial Sequence: Synthetic oligonucleotide
ggaaugagaacaccgggcg

SEQ ID NO: 1407772 - RNA, 19 nt, Artificial Sequence
  Description of Artificial Sequence: Synthetic oligonucleotide
caagcgugcagccauggcg

SEQ ID NO: 1407773 - RNA, 19 nt, Artificial Sequence
  Description of Artificial Sequence: Synthetic oligonucleotide
uucguugguaccaccguag

SEQ ID NO: 1407774 - RNA, 19 nt, Artificial Sequence
  Description of Artificial Sequence: Synthetic oligonucleotide
uuuguguagcuuccggccc

SEQ ID NO: 1407775 - RNA, 19 nt, Artificial Sequence
  Description of Artificial Sequence: Synthetic oligonucleotide
ucauuauuucguugguacc

SEQ ID NO: 1407776 - RNA, 19 nt, Artificial Sequence
  Description of Artificial Sequence: Synthetic oligonucleotide
gaccuuuuggcauuuguuc

SEQ ID NO: 1407777 - RNA, 19 nt, Artificial Sequence
  Description of Artificial Sequence: Synthetic oligonucleotide
aacucacaggcagaaauug

SEQ ID NO: 1407778 - RNA, 19 nt, Artificial Sequence
  Description of Artificial Sequence: Synthetic oligonucleotide
ucguacaucuucaaagaau

SEQ ID NO: 1407779 - RNA, 19 nt, Artificial Sequence
  Description of Artificial Sequence: Synthetic oligonucleotide
ugugccauaaugugcaaua

SEQ ID NO: 1407780 - RNA, 19 nt, Artificial Sequence
  Description of Artificial Sequence: Synthetic oligonucleotide
auuauuucguugguaccac

SEQ ID NO: 1407781 - RNA, 19 nt, Artificial Sequence
  Description of Artificial Sequence: Synthetic oligonucleotide
ugcaccgucuguaugugug

SEQ ID NO: 1407782 - RNA, 19 nt, Artificial Sequence
  Description of Artificial Sequence: Synthetic oligonucleotide
ugucuagcugucacugacg

SEQ ID NO: 1407783 - RNA, 19 nt, Artificial Sequence
  Description of Artificial Sequence: Synthetic oligonucleotide
aguuguacacagucguaag

SEQ ID NO: 1407784 - RNA, 19 nt, Artificial Sequence
  Description of Artificial Sequence: Synthetic oligonucleotide
uuucccguguuaaucuuug

SEQ ID NO: 1407785 - RNA, 19 nt, Artificial Sequence
  Description of Artificial Sequence: Synthetic oligonucleotide
uaaccagccauuagugaug

SEQ ID NO: 1407786 - RNA, 19 nt, Artificial Sequence
  Description of Artificial Sequence: Synthetic oligonucleotide
uuguacacagucguaagcu

SEQ ID NO: 1407787 - RNA, 19 nt, Artificial Sequence
  Description of Artificial Sequence: Synthetic oligonucleotide
cauuuuguguagcuuccgg

SEQ ID NO: 1407788 - RNA, 19 nt, Artificial Sequence
  Description of Artificial Sequence: Synthetic oligonucleotide
auucugcuaguuuaugcug

SEQ ID NO: 1407789 - RNA, 19 nt, Artificial Sequence
  Description of Artificial Sequence: Synthetic oligonucleotide
gaaugagaacaccgggcgg

SEQ ID NO: 1407790 - RNA, 19 nt, Artificial Sequence
  Description of Artificial Sequence: Synthetic oligonucleotide
uuggugacggcaacuacga

SEQ ID NO: 1407791 - RNA, 19 nt, Artificial Sequence
  Description of Artificial Sequence: Synthetic oligonucleotide
guaagucacuuccagcacc

SEQ ID NO: 1407792 - RNA, 19 nt, Artificial Sequence
  Description of Artificial Sequence: Synthetic oligonucleotide
uacggaaccacuucuuccu

SEQ ID NO: 1407793 - RNA, 19 nt, Artificial Sequence
  Description of Artificial Sequence: Synthetic oligonucleotide
uugaaaucggguacuccca

SEQ ID NO: 1407794 - RNA, 19 nt, Artificial Sequence
  Description of Artificial Sequence: Synthetic oligonucleotide
auuggcugaacccuagcgu

SEQ ID NO: 1407795 - RNA, 19 nt, Artificial Sequence
  Description of Artificial Sequence: Synthetic oligonucleotide
gcuaguuuaugcugcaccg

SEQ ID NO: 1407796 - RNA, 19 nt, Artificial Sequence
  Description of Artificial Sequence: Synthetic oligonucleotide
cuccggaaugagaacaccg

SEQ ID NO: 1407797 - RNA, 19 nt, Artificial Sequence
  Description of Artificial Sequence: Synthetic oligonucleotide
uaauucagaugcccaauau

SEQ ID NO: 1407798 - RNA, 19 nt, Artificial Sequence
  Description of Artificial Sequence: Synthetic oligonucleotide
acuuuagacucuuuggguu

SEQ ID NO: 1407799 - RNA, 19 nt, Artificial Sequence
  Description of Artificial Sequence: Synthetic oligonucleotide
ucuacucacuucuccagcu

SEQ ID NO: 1407800 - RNA, 19 nt, Artificial Sequence
  Description of Artificial Sequence: Synthetic oligonucleotide
uugcuuaacauaguuccug

SEQ ID NO: 1407801 - RNA, 19 nt, Artificial Sequence
  Description of Artificial Sequence: Synthetic oligonucleotide
ucagguuagcuguauguaa

SEQ ID NO: 1407802 - RNA, 19 nt, Artificial Sequence
  Description of Artificial Sequence: Synthetic oligonucleotide
uucgugcaacugcagacag

SEQ ID NO: 1407803 - RNA, 19 nt, Artificial Sequence
  Description of Artificial Sequence: Synthetic oligonucleotide
uaguuuaugcugcaccguc

SEQ ID NO: 1407804 - RNA, 19 nt, Artificial Sequence
  Description of Artificial Sequence: Synthetic oligonucleotide
uguaagucacuuccagcac

SEQ ID NO: 1407805 - RNA, 19 nt, Artificial Sequence
  Description of Artificial Sequence: Synthetic oligonucleotide
ugugggagcucuugcauga

SEQ ID NO: 1407806 - RNA, 19 nt, Artificial Sequence
  Description of Artificial Sequence: Synthetic oligonucleotide
aucggguacucccacaugu

SEQ ID NO: 1407807 - RNA, 19 nt, Artificial Sequence
  Description of Artificial Sequence: Synthetic oligonucleotide
aacuacgaucacaagguca

SEQ ID NO: 1407808 - RNA, 19 nt, Artificial Sequence
  Description of Artificial Sequence: Synthetic oligonucleotide
ucacuuaaccagccauuag

SEQ ID NO: 1407809 - RNA, 19 nt, Artificial Sequence
  Description of Artificial Sequence: Synthetic oligonucleotide
ucacugacgaucugucuug

SEQ ID NO: 1407810 - RNA, 19 nt, Artificial Sequence
  Description of Artificial Sequence: Synthetic oligonucleotide
uuuguucugacuccuugua

SEQ ID NO: 1407811 - RNA, 19 nt, Artificial Sequence
  Description of Artificial Sequence: Synthetic oligonucleotide
uacacagucguaagcuaca

SEQ ID NO: 1407812 - RNA, 19 nt, Artificial Sequence
  Description of Artificial Sequence: Synthetic oligonucleotide
caaagaauaguucugcugu

SEQ ID NO: 1407813 - RNA, 19 nt, Artificial Sequence
  Description of Artificial Sequence: Synthetic oligonucleotide
ucguaagcuacacuguuuu

SEQ ID NO: 1407814 - RNA, 19 nt, Artificial Sequence
  Description of Artificial Sequence: Synthetic oligonucleotide
cuuuagacucuuuggguuc

SEQ ID NO: 1407815 - RNA, 19 nt, Artificial Sequence
  Description of Artificial Sequence: Synthetic oligonucleotide
cuugcgaucagcucucuca

SEQ ID NO: 1407816 - RNA, 19 nt, Artificial Sequence
  Description of Artificial Sequence: Synthetic oligonucleotide
cacauaagcuuuugaaauc

SEQ ID NO: 1407817 - RNA, 19 nt, Artificial Sequence
  Description of Artificial Sequence: Synthetic oligonucleotide
aagaauaguucugcugugu

SEQ ID NO: 1407818 - RNA, 19 nt, Artificial Sequence
  Description of Artificial Sequence: Synthetic oligonucleotide
agauuggcugaacccuagc

SEQ ID NO: 1407819 - RNA, 19 nt, Artificial Sequence
  Description of Artificial Sequence: Synthetic oligonucleotide
auaggauugcaggacguag

SEQ ID NO: 1407820 - RNA, 19 nt, Artificial Sequence
  Description of Artificial Sequence: Synthetic oligonucleotide
ugugcaauauagggcauga

SEQ ID NO: 1407821 - RNA, 19 nt, Artificial Sequence
  Description of Artificial Sequence: Synthetic oligonucleotide
ucccaaguagaguugaauu

SEQ ID NO: 1407822 - RNA, 19 nt, Artificial Sequence
  Description of Artificial Sequence: Synthetic oligonucleotide
uguauguaauaggauugca

SEQ ID NO: 1407823 - RNA, 19 nt, Artificial Sequence
  Description of Artificial Sequence: Synthetic oligonucleotide
ugaaaucggguacucccac

SEQ ID NO: 1407824 - RNA, 19 nt, Artificial Sequence
  Description of Artificial Sequence: Synthetic oligonucleotide
uuauucucuucuccaagua

SEQ ID NO: 1407825 - RNA, 19 nt, Artificial Sequence
  Description of Artificial Sequence: Synthetic oligonucleotide
aaacuuccuuacacuuucc

SEQ ID NO: 1407826 - RNA, 19 nt, Artificial Sequence
  Description of Artificial Sequence: Synthetic oligonucleotide
aggcuaauaccaugggcag

SEQ ID NO: 1407827 - RNA, 19 nt, Artificial Sequence
  Description of Artificial Sequence: Synthetic oligonucleotide
uaauaccaugggcaggcga

SEQ ID NO: 1407828 - RNA, 19 nt, Artificial Sequence
  Description of Artificial Sequence: Synthetic oligonucleotide
uuuugaaaucggguacucc

SEQ ID NO: 1407829 - RNA, 19 nt, Artificial Sequence
  Description of Artificial Sequence: Synthetic oligonucleotide
uccugauuccgauaucagu

SEQ ID NO: 1407830 - RNA, 19 nt, Artificial Sequence
  Description of Artificial Sequence: Synthetic oligonucleotide
acuuaaccagccauuagug

SEQ ID NO: 1407831 - RNA, 19 nt, Artificial Sequence
  Description of Artificial Sequence: Synthetic oligonucleotide
agaugucuagcugucacug

SEQ ID NO: 1407832 - RNA, 19 nt, Artificial Sequence
  Description of Artificial Sequence: Synthetic oligonucleotide
guuuaugcugcaccgucug

SEQ ID NO: 1407833 - RNA, 19 nt, Artificial Sequence
  Description of Artificial Sequence: Synthetic oligonucleotide
ugcuauggcaccgaugcac

SEQ ID NO: 1407834 - RNA, 19 nt, Artificial Sequence
  Description of Artificial Sequence: Synthetic oligonucleotide
augcccaauauuuugccau

SEQ ID NO: 1407835 - RNA, 19 nt, Artificial Sequence
  Description of Artificial Sequence: Synthetic oligonucleotide
uguuuucccaaaagcuuuc

SEQ ID NO: 1407836 - RNA, 19 nt, Artificial Sequence
  Description of Artificial Sequence: Synthetic oligonucleotide
uuaucccaaguagaguuga

SEQ ID NO: 1407837 - RNA, 19 nt, Artificial Sequence
  Description of Artificial Sequence: Synthetic oligonucleotide
acucacaggcagaaauugc

SEQ ID NO: 1407838 - RNA, 19 nt, Artificial Sequence
  Description of Artificial Sequence: Synthetic oligonucleotide
acuuucccggaaaaugucg

SEQ ID NO: 1407839 - RNA, 19 nt, Artificial Sequence
  Description of Artificial Sequence: Synthetic oligonucleotide
ugauuccgauaucaguuaa

SEQ ID NO: 1407840 - RNA, 19 nt, Artificial Sequence
  Description of Artificial Sequence: Synthetic oligonucleotide
aagucuccgccaauaccgc

SEQ ID NO: 1407841 - RNA, 19 nt, Artificial Sequence
  Description of Artificial Sequence: Synthetic oligonucleotide
cuguauguaauaggauugc

SEQ ID NO: 1407842 - RNA, 19 nt, Artificial Sequence
  Description of Artificial Sequence: Synthetic oligonucleotide
uuauuucguugguaccacc

SEQ ID NO: 1407843 - RNA, 19 nt, Artificial Sequence
  Description of Artificial Sequence: Synthetic oligonucleotide
auguugacgccaagcaggc

SEQ ID NO: 1407844 - RNA, 19 nt, Artificial Sequence
  Description of Artificial Sequence: Synthetic oligonucleotide
cauuauuucguugguacca

SEQ ID NO: 1407845 - RNA, 19 nt, Artificial Sequence
  Description of Artificial Sequence: Synthetic oligonucleotide
gugacggcaacuacgauca

SEQ ID NO: 1407846 - RNA, 19 nt, Artificial Sequence
  Description of Artificial Sequence: Synthetic oligonucleotide
ugcgauguugacgccaagc

SEQ ID NO: 1407847 - RNA, 19 nt, Artificial Sequence
  Description of Artificial Sequence: Synthetic oligonucleotide
auuucguugguaccaccgu

SEQ ID NO: 1407848 - RNA, 19 nt, Artificial Sequence
  Description of Artificial Sequence: Synthetic oligonucleotide
agacucuuuggguucaaau

SEQ ID NO: 1407849 - RNA, 19 nt, Artificial Sequence
  Description of Artificial Sequence: Synthetic oligonucleotide
augguacggaaccacuucu

SEQ ID NO: 1407850 - RNA, 19 nt, Artificial Sequence
  Description of Artificial Sequence: Synthetic oligonucleotide
ugacgaucugucuugcgau

SEQ ID NO: 1407851 - RNA, 19 nt, Artificial Sequence
  Description of Artificial Sequence: Synthetic oligonucleotide
accaccguagauuggcuga

SEQ ID NO: 1407852 - RNA, 19 nt, Artificial Sequence
  Description of Artificial Sequence: Synthetic oligonucleotide
aaucggguacucccacaug

SEQ ID NO: 1407853 - RNA, 19 nt, Artificial Sequence
  Description of Artificial Sequence: Synthetic oligonucleotide
uuucccggaaaaugucgug

SEQ ID NO: 1407854 - RNA, 19 nt, Artificial Sequence
  Description of Artificial Sequence: Synthetic oligonucleotide
uuucguugguaccaccgua

SEQ ID NO: 1407855 - RNA, 19 nt, Artificial Sequence
  Description of Artificial Sequence: Synthetic oligonucleotide
agaguugaauucagguuag

SEQ ID NO: 1407856 - RNA, 19 nt, Artificial Sequence
  Description of Artificial Sequence: Synthetic oligonucleotide
acguaggcagaugucuagc

SEQ ID NO: 1407857 - RNA, 19 nt, Artificial Sequence
  Description of Artificial Sequence: Synthetic oligonucleotide
ucccguguuaaucuuugua

SEQ ID NO: 1407858 - RNA, 19 nt, Artificial Sequence
  Description of Artificial Sequence: Synthetic oligonucleotide
ugcccaauauuuugccaug

SEQ ID NO: 1407859 - RNA, 19 nt, Artificial Sequence
  Description of Artificial Sequence: Synthetic oligonucleotide
gcuaauaccaugggcaggc

SEQ ID NO: 1407860 - RNA, 19 nt, Artificial Sequence
  Description of Artificial Sequence: Synthetic oligonucleotide
uguacacagucguaagcua

SEQ ID NO: 1407861 - RNA, 19 nt, Artificial Sequence
  Description of Artificial Sequence: Synthetic oligonucleotide
caugguacggaaccacuuc

SEQ ID NO: 1407862 - RNA, 19 nt, Artificial Sequence
  Description of Artificial Sequence: Synthetic oligonucleotide
auauuuugccauggaagcu

SEQ ID NO: 1407863 - RNA, 19 nt, Artificial Sequence
  Description of Artificial Sequence: Synthetic oligonucleotide
ugucguguucugaggaaaa

SEQ ID NO: 1407864 - RNA, 19 nt, Artificial Sequence
  Description of Artificial Sequence: Synthetic oligonucleotide
cacuagcuggcaaucguac

SEQ ID NO: 1407865 - RNA, 19 nt, Artificial Sequence
  Description of Artificial Sequence: Synthetic oligonucleotide
uguccacaaaagcucucgu

SEQ ID NO: 1407866 - RNA, 19 nt, Artificial Sequence
  Description of Artificial Sequence: Synthetic oligonucleotide
ggugacggcaacuacgauc

SEQ ID NO: 1407867 - RNA, 19 nt, Artificial Sequence
  Description of Artificial Sequence: Synthetic oligonucleotide
auuccgauaucaguuaauu

SEQ ID NO: 1407868 - RNA, 19 nt, Artificial Sequence
  Description of Artificial Sequence: Synthetic oligonucleotide
gagcggaggagcaagcgug

SEQ ID NO: 1407869 - RNA, 19 nt, Artificial Sequence
  Description of Artificial Sequence: Synthetic oligonucleotide
acuagcuggcaaucguaca

SEQ ID NO: 1407870 - RNA, 19 nt, Artificial Sequence
  Description of Artificial Sequence: Synthetic oligonucleotide
ccgaaugaagacugaaacc

SEQ ID NO: 1407871 - RNA, 19 nt, Artificial Sequence
  Description of Artificial Sequence: Synthetic oligonucleotide
uuagcagaagggguuucca

SEQ ID NO: 1407872 - RNA, 19 nt, Artificial Sequence
  Description of Artificial Sequence: Synthetic oligonucleotide
auaccaugggcaggcgacc

SEQ ID NO: 1407873 - RNA, 19 nt, Artificial Sequence
  Description of Artificial Sequence: Synthetic oligonucleotide
agucguaagcuacacuguu

SEQ ID NO: 1407874 - RNA, 19 nt, Artificial Sequence
  Description of Artificial Sequence: Synthetic oligonucleotide
gguaccaccguagauuggc

SEQ ID NO: 1407875 - RNA, 19 nt, Artificial Sequence
  Description of Artificial Sequence: Synthetic oligonucleotide
uucagguuagcuguaugua

SEQ ID NO: 1407876 - RNA, 19 nt, Artificial Sequence
  Description of Artificial Sequence: Synthetic oligonucleotide
aauaggauugcaggacgua

SEQ ID NO: 1407877 - RNA, 19 nt, Artificial Sequence
  Description of Artificial Sequence: Synthetic oligonucleotide
uaccaccguagauuggcug

SEQ ID NO: 1407878 - RNA, 19 nt, Artificial Sequence
  Description of Artificial Sequence: Synthetic oligonucleotide
aaccagccauuagugauga

SEQ ID NO: 1407879 - RNA, 19 nt, Artificial Sequence
  Description of Artificial Sequence: Synthetic oligonucleotide
ugaacccuagcguccacau

SEQ ID NO: 1407880 - RNA, 19 nt, Artificial Sequence
  Description of Artificial Sequence: Synthetic oligonucleotide
uucccggaaaaugucgugu

SEQ ID NO: 1407881 - RNA, 19 nt, Artificial Sequence
  Description of Artificial Sequence: Synthetic oligonucleotide
caggcgaccgagcuucacg

SEQ ID NO: 1407882 - RNA, 19 nt, Artificial Sequence
  Description of Artificial Sequence: Synthetic oligonucleotide
guacacagucguaagcuac

SEQ ID NO: 1407883 - RNA, 19 nt, Artificial Sequence
  Description of Artificial Sequence: Synthetic oligonucleotide
ucguuacacauauguuugu

SEQ ID NO: 1407884 - RNA, 19 nt, Artificial Sequence
  Description of Artificial Sequence: Synthetic oligonucleotide
uugcgaucagcucucucau

SEQ ID NO: 1407885 - RNA, 19 nt, Artificial Sequence
  Description of Artificial Sequence: Synthetic oligonucleotide
gaguuguacacagucguaa

SEQ ID NO: 1407886 - RNA, 19 nt, Artificial Sequence
  Description of Artificial Sequence: Synthetic oligonucleotide
uacucacuucuccagcuuu

SEQ ID NO: 1407887 - RNA, 19 nt, Artificial Sequence
  Description of Artificial Sequence: Synthetic oligonucleotide
acacagucguaagcuacac

SEQ ID NO: 1407888 - RNA, 19 nt, Artificial Sequence
  Description of Artificial Sequence: Synthetic oligonucleotide
cuugcaugagguaguagaa

SEQ ID NO: 1407889 - RNA, 19 nt, Artificial Sequence
  Description of Artificial Sequence: Synthetic oligonucleotide
uccuccggaaugagaacac

SEQ ID NO: 1407890 - RNA, 19 nt, Artificial Sequence
  Description of Artificial Sequence: Synthetic oligonucleotide
gcaauauagggcaugacaa

SEQ ID NO: 1407891 - RNA, 19 nt, Artificial Sequence
  Description of Artificial Sequence: Synthetic oligonucleotide
uuccgauaucaguuaauuu

SEQ ID NO: 1407892 - RNA, 19 nt, Artificial Sequence
  Description of Artificial Sequence: Synthetic oligonucleotide
cuccugauuccgauaucag

SEQ ID NO: 1407893 - RNA, 19 nt, Artificial Sequence
  Description of Artificial Sequence: Synthetic oligonucleotide
gaaaucggguacucccaca

SEQ ID NO: 1407894 - RNA, 19 nt, Artificial Sequence
  Description of Artificial Sequence: Synthetic oligonucleotide
cuuccggcccuugauaaac

SEQ ID NO: 1407895 - RNA, 19 nt, Artificial Sequence
  Description of Artificial Sequence: Synthetic oligonucleotide
guaauucagaugcccaaua

SEQ ID NO: 1407896 - RNA, 19 nt, Artificial Sequence
  Description of Artificial Sequence: Synthetic oligonucleotide
gaugucuagcugucacuga

SEQ ID NO: 1407897 - RNA, 19 nt, Artificial Sequence
  Description of Artificial Sequence: Synthetic oligonucleotide
uugcuuccguugagaaucc

SEQ ID NO: 1407898 - RNA, 19 nt, Artificial Sequence
  Description of Artificial Sequence: Synthetic oligonucleotide
ucucauuauuucguuggua

SEQ ID NO: 1407899 - RNA, 19 nt, Artificial Sequence
  Description of Artificial Sequence: Synthetic oligonucleotide
acggcaacuacgaucacaa

SEQ ID NO: 1407900 - RNA, 19 nt, Artificial Sequence
  Description of Artificial Sequence: Synthetic oligonucleotide
cccaaguagaguugaauuc

SEQ ID NO: 1407901 - RNA, 19 nt, Artificial Sequence
  Description of Artificial Sequence: Synthetic oligonucleotide
accgaugcacuugccugcc

SEQ ID NO: 1407902 - RNA, 19 nt, Artificial Sequence
  Description of Artificial Sequence: Synthetic oligonucleotide
aggcgaccgagcuucacga

SEQ ID NO: 1407903 - RNA, 19 nt, Artificial Sequence
  Description of Artificial Sequence: Synthetic oligonucleotide
ccaaguagggcacuagcug

SEQ ID NO: 1407904 - RNA, 19 nt, Artificial Sequence
  Description of Artificial Sequence: Synthetic oligonucleotide
gacgaucugucuugcgauc

SEQ ID NO: 1407905 - RNA, 19 nt, Artificial Sequence
  Description of Artificial Sequence: Synthetic oligonucleotide
cugcaauuaacagccuuuc

SEQ ID NO: 1407906 - RNA, 19 nt, Artificial Sequence
  Description of Artificial Sequence: Synthetic oligonucleotide
cuuuugaaaucggguacuc

SEQ ID NO: 1407907 - RNA, 19 nt, Artificial Sequence
  Description of Artificial Sequence: Synthetic oligonucleotide
gagcuucacgauuggugac

SEQ ID NO: 1407908 - RNA, 19 nt, Artificial Sequence
  Description of Artificial Sequence: Synthetic oligonucleotide
uaucccaaguagaguugaa

SEQ ID NO: 1407909 - RNA, 19 nt, Artificial Sequence
  Description of Artificial Sequence: Synthetic oligonucleotide
cugucuugcgaucagcucu

SEQ ID NO: 1407910 - RNA, 19 nt, Artificial Sequence
  Description of Artificial Sequence: Synthetic oligonucleotide
ccaaguaacugcuguugag

SEQ ID NO: 1407911 - RNA, 19 nt, Artificial Sequence
  Description of Artificial Sequence: Synthetic oligonucleotide
ucauugcuauggcaccgau

SEQ ID NO: 1407912 - RNA, 19 nt, Artificial Sequence
  Description of Artificial Sequence: Synthetic oligonucleotide
aguuuaugcugcaccgucu

SEQ ID NO: 1407913 - RNA, 19 nt, Artificial Sequence
  Description of Artificial Sequence: Synthetic oligonucleotide
cuagcguccacauaagcuu

SEQ ID NO: 1407914 - RNA, 19 nt, Artificial Sequence
  Description of Artificial Sequence: Synthetic oligonucleotide
cccauuuuguguagcuucc

SEQ ID NO: 1407915 - RNA, 19 nt, Artificial Sequence
  Description of Artificial Sequence: Synthetic oligonucleotide
ucuuucccguguuaaucuu

SEQ ID NO: 1407916 - RNA, 19 nt, Artificial Sequence
  Description of Artificial Sequence: Synthetic oligonucleotide
gaccgagcuucacgauugg

SEQ ID NO: 1407917 - RNA, 19 nt, Artificial Sequence
  Description of Artificial Sequence: Synthetic oligonucleotide
ccguagauuggcugaaccc

SEQ ID NO: 1407918 - RNA, 19 nt, Artificial Sequence
  Description of Artificial Sequence: Synthetic oligonucleotide
auaccgccauguuucucug

SEQ ID NO: 1407919 - RNA, 19 nt, Artificial Sequence
  Description of Artificial Sequence: Synthetic oligonucleotide
cugaaaccagggccugugc

SEQ ID NO: 1407920 - RNA, 19 nt, Artificial Sequence
  Description of Artificial Sequence: Synthetic oligonucleotide
agggcacuagcuggcaauc

SEQ ID NO: 1407921 - RNA, 19 nt, Artificial Sequence
  Description of Artificial Sequence: Synthetic oligonucleotide
ucuccuccggaaugagaac

SEQ ID NO: 1407922 - RNA, 19 nt, Artificial Sequence
  Description of Artificial Sequence: Synthetic oligonucleotide
gcaacuacgaucacaaggu

SEQ ID NO: 1407923 - RNA, 19 nt, Artificial Sequence
  Description of Artificial Sequence: Synthetic oligonucleotide
acgaucugucuugcgauca

SEQ ID NO: 1407924 - RNA, 19 nt, Artificial Sequence
  Description of Artificial Sequence: Synthetic oligonucleotide
ccgagcuucacgauuggug

SEQ ID NO: 1407925 - RNA, 19 nt, Artificial Sequence
  Description of Artificial Sequence: Synthetic oligonucleotide
cucgggacgcgcaggggag

SEQ ID NO: 1407926 - RNA, 19 nt, Artificial Sequence
  Description of Artificial Sequence: Synthetic oligonucleotide
ucuugcgaucagcucucuc

SEQ ID NO: 1407927 - RNA, 19 nt, Artificial Sequence
  Description of Artificial Sequence: Synthetic oligonucleotide
caacuacgaucacaagguc

SEQ ID NO: 1407928 - RNA, 19 nt, Artificial Sequence
  Description of Artificial Sequence: Synthetic oligonucleotide
cuaauaccaugggcaggcg

SEQ ID NO: 1407929 - RNA, 19 nt, Artificial Sequence
  Description of Artificial Sequence: Synthetic oligonucleotide
guugguaccaccguagauu

SEQ ID NO: 1407930 - RNA, 19 nt, Artificial Sequence
  Description of Artificial Sequence: Synthetic oligonucleotide
guacucccacauguaaccc

SEQ ID NO: 1407931 - RNA, 19 nt, Artificial Sequence
  Description of Artificial Sequence: Synthetic oligonucleotide
gaacaagucuccgccaaua

SEQ ID NO: 1407932 - RNA, 19 nt, Artificial Sequence
  Description of Artificial Sequence: Synthetic oligonucleotide
gcgauguugacgccaagca

SEQ ID NO: 1407933 - RNA, 19 nt, Artificial Sequence
  Description of Artificial Sequence: Synthetic oligonucleotide
gaguugaauucagguuagc

SEQ ID NO: 1407934 - RNA, 19 nt, Artificial Sequence
  Description of Artificial Sequence: Synthetic oligonucleotide
cugauuccgauaucaguua

SEQ ID NO: 1407935 - RNA, 19 nt, Artificial Sequence
  Description of Artificial Sequence: Synthetic oligonucleotide
ccguugagaauccaaucac

SEQ ID NO: 1407936 - RNA, 19 nt, Artificial Sequence
  Description of Artificial Sequence: Synthetic oligonucleotide
caugaacucacaggcagaa

SEQ ID NO: 1407937 - RNA, 19 nt, Artificial Sequence
  Description of Artificial Sequence: Synthetic oligonucleotide
ucuagcugucacugacgau

SEQ ID NO: 1407938 - RNA, 19 nt, Artificial Sequence
  Description of Artificial Sequence: Synthetic oligonucleotide
cacgauuggugacggcaac

SEQ ID NO: 1407939 - RNA, 19 nt, Artificial Sequence
  Description of Artificial Sequence: Synthetic oligonucleotide
uugacgccaagcaggccuu

SEQ ID NO: 1407940 - RNA, 19 nt, Artificial Sequence
  Description of Artificial Sequence: Synthetic oligonucleotide
augucguguucugaggaaa

SEQ ID NO: 1407941 - RNA, 19 nt, Artificial Sequence
  Description of Artificial Sequence: Synthetic oligonucleotide
cuucgugcaacugcagaca

SEQ ID NO: 1407942 - RNA, 19 nt, Artificial Sequence
  Description of Artificial Sequence: Synthetic oligonucleotide
acgauuggugacggcaacu

SEQ ID NO: 1407943 - RNA, 19 nt, Artificial Sequence
  Description of Artificial Sequence: Synthetic oligonucleotide
gucacuuaaccagccauua

SEQ ID NO: 1407944 - RNA, 19 nt, Artificial Sequence
  Description of Artificial Sequence: Synthetic oligonucleotide
ggcuaauaccaugggcagg

SEQ ID NO: 1407945 - RNA, 19 nt, Artificial Sequence
  Description of Artificial Sequence: Synthetic oligonucleotide
cuucacgauuggugacggc

SEQ ID NO: 1407946 - RNA, 19 nt, Artificial Sequence
  Description of Artificial Sequence: Synthetic oligonucleotide
uucccguguuaaucuuugu

SEQ ID NO: 1407947 - RNA, 19 nt, Artificial Sequence
  Description of Artificial Sequence: Synthetic oligonucleotide
cucccacaauucucuacuc

SEQ ID NO: 1407948 - RNA, 19 nt, Artificial Sequence
  Description of Artificial Sequence: Synthetic oligonucleotide
cuuucccggaaaaugucgu

SEQ ID NO: 1407949 - RNA, 19 nt, Artificial Sequence
  Description of Artificial Sequence: Synthetic oligonucleotide
cccguguuaaucuuuguaa

SEQ ID NO: 1407950 - RNA, 19 nt, Artificial Sequence
  Description of Artificial Sequence: Synthetic oligonucleotide
ucccagaccuuuuggcauu

SEQ ID NO: 1407951 - RNA, 19 nt, Artificial Sequence
  Description of Artificial Sequence: Synthetic oligonucleotide
gcuucacgauuggugacgg

SEQ ID NO: 1407952 - RNA, 19 nt, Artificial Sequence
  Description of Artificial Sequence: Synthetic oligonucleotide
acgccaagcaggccuugcu

SEQ ID NO: 1407953 - RNA, 19 nt, Artificial Sequence
  Description of Artificial Sequence: Synthetic oligonucleotide
uaccgccauguuucucugc

SEQ ID NO: 1407954 - RNA, 19 nt, Artificial Sequence
  Description of Artificial Sequence: Synthetic oligonucleotide
gcaaucguacaucuucaaa

SEQ ID NO: 1407955 - RNA, 19 nt, Artificial Sequence
  Description of Artificial Sequence: Synthetic oligonucleotide
cagguuagcuguauguaau

SEQ ID NO: 1407956 - RNA, 19 nt, Artificial Sequence
  Description of Artificial Sequence: Synthetic oligonucleotide
gcccaauauuuugccaugg

SEQ ID NO: 1407957 - RNA, 19 nt, Artificial Sequence
  Description of Artificial Sequence: Synthetic oligonucleotide
ggaaaaugucguguucuga

SEQ ID NO: 1407958 - RNA, 19 nt, Artificial Sequence
  Description of Artificial Sequence: Synthetic oligonucleotide
auaaacccuuucauuccau

SEQ ID NO: 1407959 - RNA, 19 nt, Artificial Sequence
  Description of Artificial Sequence: Synthetic oligonucleotide
uguugacgccaagcaggcc

SEQ ID NO: 1407960 - RNA, 19 nt, Artificial Sequence
  Description of Artificial Sequence: Synthetic oligonucleotide
gacgccaagcaggccuugc

SEQ ID NO: 1407961 - RNA, 19 nt, Artificial Sequence
  Description of Artificial Sequence: Synthetic oligonucleotide
guagauuggcugaacccua

SEQ ID NO: 1407962 - RNA, 19 nt, Artificial Sequence
  Description of Artificial Sequence: Synthetic oligonucleotide
cacugacgaucugucuugc

SEQ ID NO: 1407963 - RNA, 19 nt, Artificial Sequence
  Description of Artificial Sequence: Synthetic oligonucleotide
cucuugcaugagguaguag

SEQ ID NO: 1407964 - RNA, 19 nt, Artificial Sequence
  Description of Artificial Sequence: Synthetic oligonucleotide
cgagcuucacgauugguga

SEQ ID NO: 1407965 - RNA, 19 nt, Artificial Sequence
  Description of Artificial Sequence: Synthetic oligonucleotide
ggcaugacaauauccgaau

SEQ ID NO: 1407966 - RNA, 19 nt, Artificial Sequence
  Description of Artificial Sequence: Synthetic oligonucleotide
ucccuguaauaagcauaca

SEQ ID NO: 1407967 - RNA, 19 nt, Artificial Sequence
  Description of Artificial Sequence: Synthetic oligonucleotide
aggagcaagcgugcagcca

SEQ ID NO: 1407968 - RNA, 19 nt, Artificial Sequence
  Description of Artificial Sequence: Synthetic oligonucleotide
gauuccgauaucaguuaau

SEQ ID NO: 1407969 - RNA, 19 nt, Artificial Sequence
  Description of Artificial Sequence: Synthetic oligonucleotide
cgaccgagcuucacgauug

SEQ ID NO: 1407970 - RNA, 19 nt, Artificial Sequence
  Description of Artificial Sequence: Synthetic oligonucleotide
uggugacggcaacuacgau

SEQ ID NO: 1407971 - RNA, 19 nt, Artificial Sequence
  Description of Artificial Sequence: Synthetic oligonucleotide
ugcgaucagcucucucauu

SEQ ID NO: 1407972 - RNA, 19 nt, Artificial Sequence
  Description of Artificial Sequence: Synthetic oligonucleotide
ccuagcguccacauaagcu

SEQ ID NO: 1407973 - RNA, 19 nt, Artificial Sequence
  Description of Artificial Sequence: Synthetic oligonucleotide
ugggcaggcgaccgagcuu

SEQ ID NO: 1407974 - RNA, 19 nt, Artificial Sequence
  Description of Artificial Sequence: Synthetic oligonucleotide
gaauucagguuagcuguau

SEQ ID NO: 1407975 - RNA, 19 nt, Artificial Sequence
  Description of Artificial Sequence: Synthetic oligonucleotide
cagucguaagcuacacugu

SEQ ID NO: 1407976 - RNA, 19 nt, Artificial Sequence
  Description of Artificial Sequence: Synthetic oligonucleotide
acccuagcguccacauaag

SEQ ID NO: 1407977 - RNA, 19 nt, Artificial Sequence
  Description of Artificial Sequence: Synthetic oligonucleotide
gaacccuagcguccacaua

SEQ ID NO: 1407978 - RNA, 19 nt, Artificial Sequence
  Description of Artificial Sequence: Synthetic oligonucleotide
gggcacuagcuggcaaucg

SEQ ID NO: 1407979 - RNA, 19 nt, Artificial Sequence
  Description of Artificial Sequence: Synthetic oligonucleotide
ggcaaucguacaucuucaa

SEQ ID NO: 1407980 - RNA, 19 nt, Artificial Sequence
  Description of Artificial Sequence: Synthetic oligonucleotide
ugacggcaacuacgaucac

SEQ ID NO: 1407981 - RNA, 19 nt, Artificial Sequence
  Description of Artificial Sequence: Synthetic oligonucleotide
accgagcuucacgauuggu

SEQ ID NO: 1407982 - RNA, 19 nt, Artificial Sequence
  Description of Artificial Sequence: Synthetic oligonucleotide
cggaaaaugucguguucug

SEQ ID NO: 1407983 - RNA, 19 nt, Artificial Sequence
  Description of Artificial Sequence: Synthetic oligonucleotide
cuaguuuaugcugcaccgu

SEQ ID NO: 1407984 - RNA, 19 nt, Artificial Sequence
  Description of Artificial Sequence: Synthetic oligonucleotide
cugaacccuagcguccaca

SEQ ID NO: 1407985 - RNA, 19 nt, Artificial Sequence
  Description of Artificial Sequence: Synthetic oligonucleotide
cccuagcguccacauaagc

SEQ ID NO: 1407986 - RNA, 19 nt, Artificial Sequence
  Description of Artificial Sequence: Synthetic oligonucleotide
gcucgggacgcgcagggga

SEQ ID NO: 1407987 - RNA, 19 nt, Artificial Sequence
  Description of Artificial Sequence: Synthetic oligonucleotide
ggcacuagcuggcaaucgu

SEQ ID NO: 1407988 - RNA, 19 nt, Artificial Sequence
  Description of Artificial Sequence: Synthetic oligonucleotide
ucgggacgcgcaggggagc

SEQ ID NO: 1407989 - RNA, 19 nt, Artificial Sequence
  Description of Artificial Sequence: Synthetic oligonucleotide
ugacgccaagcaggccuug

SEQ ID NO: 1407990 - RNA, 19 nt, Artificial Sequence
  Description of Artificial Sequence: Synthetic oligonucleotide
cuuucccguguuaaucuuu

SEQ ID NO: 1407991 - RNA, 19 nt, Artificial Sequence
  Description of Artificial Sequence: Synthetic oligonucleotide
ccugugcaguuugaguaug

SEQ ID NO: 1407992 - RNA, 19 nt, Artificial Sequence
  Description of Artificial Sequence: Synthetic oligonucleotide
ggagcggaggagcaagcgu

SEQ ID NO: 1407993 - RNA, 19 nt, Artificial Sequence
  Description of Artificial Sequence: Synthetic oligonucleotide
ccuuacacuuucccggaaa

SEQ ID NO: 1407994 - RNA, 19 nt, Artificial Sequence
  Description of Artificial Sequence: Synthetic oligonucleotide
gacgcgcaggggagcggag

SEQ ID NO: 1407995 - RNA, 19 nt, Artificial Sequence
  Description of Artificial Sequence: Synthetic oligonucleotide
ccuccggaaugagaacacc

SEQ ID NO: 1407996 - RNA, 19 nt, Artificial Sequence
  Description of Artificial Sequence: Synthetic oligonucleotide
cacagucguaagcuacacu

SEQ ID NO: 1407997 - RNA, 19 nt, Artificial Sequence
  Description of Artificial Sequence: Synthetic oligonucleotide
agcucucguuacacauaug

SEQ ID NO: 1407998 - RNA, 19 nt, Artificial Sequence
  Description of Artificial Sequence: Synthetic oligonucleotide
ggcggggcgcggcacggag

SEQ ID NO: 1407999 - RNA, 19 nt, Artificial Sequence
  Description of Artificial Sequence: Synthetic oligonucleotide
gucguaagcuacacuguuu

SEQ ID NO: 1408000 - RNA, 19 nt, Artificial Sequence
  Description of Artificial Sequence: Synthetic oligonucleotide
ggaguuguacacagucgua

SEQ ID NO: 1408001 - RNA, 19 nt, Artificial Sequence
  Description of Artificial Sequence: Synthetic oligonucleotide
gugccauaaugugcaauau

SEQ ID NO: 1408002 - RNA, 19 nt, Artificial Sequence
  Description of Artificial Sequence: Synthetic oligonucleotide
agcguccacauaagcuuuu

SEQ ID NO: 1408003 - RNA, 19 nt, Artificial Sequence
  Description of Artificial Sequence: Synthetic oligonucleotide
cauuagugaugaacaccuu

SEQ ID NO: 1408004 - RNA, 19 nt, Artificial Sequence
  Description of Artificial Sequence: Synthetic oligonucleotide
ccguguuaaucuuuguaau

SEQ ID NO: 1408005 - RNA, 19 nt, Artificial Sequence
  Description of Artificial Sequence: Synthetic oligonucleotide
gcuauggcaccgaugcacu

SEQ ID NO: 1408006 - RNA, 19 nt, Artificial Sequence
  Description of Artificial Sequence: Synthetic oligonucleotide
cguagauuggcugaacccu

SEQ ID NO: 1408007 - RNA, 19 nt, Artificial Sequence
  Description of Artificial Sequence: Synthetic oligonucleotide
gcgugcuucuccuccggaa

SEQ ID NO: 1408008 - RNA, 19 nt, Artificial Sequence
  Description of Artificial Sequence: Synthetic oligonucleotide
ccggaaaaugucguguucu

SEQ ID NO: 1408009 - RNA, 19 nt, Artificial Sequence
  Description of Artificial Sequence: Synthetic oligonucleotide
cuacucacuucuccagcuu

SEQ ID NO: 1408010 - RNA, 19 nt, Artificial Sequence
  Description of Artificial Sequence: Synthetic oligonucleotide
guaccaccguagauuggcu

SEQ ID NO: 1408011 - RNA, 19 nt, Artificial Sequence
  Description of Artificial Sequence: Synthetic oligonucleotide
caguuugaguaugcuugcu

SEQ ID NO: 1408012 - RNA, 19 nt, Artificial Sequence
  Description of Artificial Sequence: Synthetic oligonucleotide
gcuuccggcccuugauaaa

SEQ ID NO: 1408013 - RNA, 19 nt, Artificial Sequence
  Description of Artificial Sequence: Synthetic oligonucleotide
ccgaugcacuugccugccg

SEQ ID NO: 1408014 - RNA, 19 nt, Artificial Sequence
  Description of Artificial Sequence: Synthetic oligonucleotide
gccugugcaguuugaguau

SEQ ID NO: 1408015 - RNA, 19 nt, Artificial Sequence
  Description of Artificial Sequence: Synthetic oligonucleotide
gcugaacccuagcguccac

SEQ ID NO: 1408016 - RNA, 19 nt, Artificial Sequence
  Description of Artificial Sequence: Synthetic oligonucleotide
ggacgcgcaggggagcgga

SEQ ID NO: 1408017 - RNA, 19 nt, Artificial Sequence
  Description of Artificial Sequence: Synthetic oligonucleotide
cuacgaucacaaggucacu

SEQ ID NO: 1408018 - RNA, 19 nt, Artificial Sequence
  Description of Artificial Sequence: Synthetic oligonucleotide
gcgaccgagcuucacgauu

SEQ ID NO: 1408019 - RNA, 19 nt, Artificial Sequence
  Description of Artificial Sequence: Synthetic oligonucleotide
agcgggcgcucgggacgcg

SEQ ID NO: 1408020 - RNA, 19 nt, Artificial Sequence
  Description of Artificial Sequence: Synthetic oligonucleotide
cgauuggugacggcaacua

SEQ ID NO: 1408021 - RNA, 19 nt, Artificial Sequence
  Description of Artificial Sequence: Synthetic oligonucleotide
cgggacgcgcaggggagcg

SEQ ID NO: 1408022 - RNA, 19 nt, Artificial Sequence
  Description of Artificial Sequence: Synthetic oligonucleotide
gcggaggagcaagcgugca

SEQ ID NO: 1408023 - RNA, 19 nt, Artificial Sequence
  Description of Artificial Sequence: Synthetic oligonucleotide
ccggcccuugauaaacccu

SEQ ID NO: 1408024 - RNA, 19 nt, Artificial Sequence
  Description of Artificial Sequence: Synthetic oligonucleotide
ccaccguagauuggcugaa

SEQ ID NO: 1408025 - RNA, 19 nt, Artificial Sequence
  Description of Artificial Sequence: Synthetic oligonucleotide
cgucuguaugugugcaacu

SEQ ID NO: 1408026 - RNA, 19 nt, Artificial Sequence
  Description of Artificial Sequence: Synthetic oligonucleotide
gucuugcgaucagcucucu

SEQ ID NO: 1408027 - RNA, 19 nt, Artificial Sequence
  Description of Artificial Sequence: Synthetic oligonucleotide
ggcgaccgagcuucacgau

SEQ ID NO: 1408028 - RNA, 19 nt, Artificial Sequence
  Description of Artificial Sequence: Synthetic oligonucleotide
gcgugcagccauggcggga

SEQ ID NO: 1408029 - RNA, 19 nt, Artificial Sequence
  Description of Artificial Sequence: Synthetic oligonucleotide
cggcggggcgcggcacgga

SEQ ID NO: 1408030 - RNA, 19 nt, Artificial Sequence
  Description of Artificial Sequence: Synthetic oligonucleotide
uguagaaggaauuagacug

SEQ ID NO: 1408031 - RNA, 19 nt, Artificial Sequence
  Description of Artificial Sequence: Synthetic oligonucleotide
gaaauuaagugccagggcc

SEQ ID NO: 1408032 - RNA, 19 nt, Artificial Sequence
  Description of Artificial Sequence: Synthetic oligonucleotide
agcuuuugcacucaguacc

SEQ ID NO: 1408033 - RNA, 19 nt, Artificial Sequence
  Description of Artificial Sequence: Synthetic oligonucleotide
uucagacuaagaaagaagc

SEQ ID NO: 1408034 - RNA, 19 nt, Artificial Sequence
  Description of Artificial Sequence: Synthetic oligonucleotide
aaagaagcccauccgaggg

SEQ ID NO: 1408035 - RNA, 19 nt, Artificial Sequence
  Description of Artificial Sequence: Synthetic oligonucleotide
gaaggcacaaaucugccgg

SEQ ID NO: 1408036 - RNA, 19 nt, Artificial Sequence
  Description of Artificial Sequence: Synthetic oligonucleotide
ugguagguaaccaaaagca

SEQ ID NO: 1408037 - RNA, 19 nt, Artificial Sequence
  Description of Artificial Sequence: Synthetic oligonucleotide
ucuugaguguagcauaggg

SEQ ID NO: 1408038 - RNA, 19 nt, Artificial Sequence
  Description of Artificial Sequence: Synthetic oligonucleotide
uaagaaagaagcccauccg

SEQ ID NO: 1408039 - RNA, 19 nt, Artificial Sequence
  Description of Artificial Sequence: Synthetic oligonucleotide
caauucaccgaguacaucc

SEQ ID NO: 1408040 - RNA, 19 nt, Artificial Sequence
  Description of Artificial Sequence: Synthetic oligonucleotide
aaaggaaaccacaauaucu

SEQ ID NO: 1408041 - RNA, 19 nt, Artificial Sequence
  Description of Artificial Sequence: Synthetic oligonucleotide
aguuagccaguuucgaugc

SEQ ID NO: 1408042 - RNA, 19 nt, Artificial Sequence
  Description of Artificial Sequence: Synthetic oligonucleotide
aggaguuguagucaauacc

SEQ ID NO: 1408043 - RNA, 19 nt, Artificial Sequence
  Description of Artificial Sequence: Synthetic oligonucleotide
aaggaauguauuuacuggu

SEQ ID NO: 1408044 - RNA, 19 nt, Artificial Sequence
  Description of Artificial Sequence: Synthetic oligonucleotide
uugaguguagcauaggggu

SEQ ID NO: 1408045 - RNA, 19 nt, Artificial Sequence
  Description of Artificial Sequence: Synthetic oligonucleotide
uuugcacucaguaccacag

SEQ ID NO: 1408046 - RNA, 19 nt, Artificial Sequence
  Description of Artificial Sequence: Synthetic oligonucleotide
uuccgaccgacacagaagg

SEQ ID NO: 1408047 - RNA, 19 nt, Artificial Sequence
  Description of Artificial Sequence: Synthetic oligonucleotide
auugcaagggaacuguuug

SEQ ID NO: 1408048 - RNA, 19 nt, Artificial Sequence
  Description of Artificial Sequence: Synthetic oligonucleotide
gaucucaccgagcuggugg

SEQ ID NO: 1408049 - RNA, 19 nt, Artificial Sequence
  Description of Artificial Sequence: Synthetic oligonucleotide
uguauuuacuggugaagag

SEQ ID NO: 1408050 - RNA, 19 nt, Artificial Sequence
  Description of Artificial Sequence: Synthetic oligonucleotide
ucagacuaagaaagaagcc

SEQ ID NO: 1408051 - RNA, 19 nt, Artificial Sequence
  Description of Artificial Sequence: Synthetic oligonucleotide
cuugaguguagcauagggg

SEQ ID NO: 1408052 - RNA, 19 nt, Artificial Sequence
  Description of Artificial Sequence: Synthetic oligonucleotide
uuuaccauggcugcuuccg

SEQ ID NO: 1408053 - RNA, 19 nt, Artificial Sequence
  Description of Artificial Sequence: Synthetic oligonucleotide
ugaaauuaagugccagggc

SEQ ID NO: 1408054 - RNA, 19 nt, Artificial Sequence
  Description of Artificial Sequence: Synthetic oligonucleotide
ucucauagcuucuacuuca

SEQ ID NO: 1408055 - RNA, 19 nt, Artificial Sequence
  Description of Artificial Sequence: Synthetic oligonucleotide
gaaagaagcccauccgagg

SEQ ID NO: 1408056 - RNA, 19 nt, Artificial Sequence
  Description of Artificial Sequence: Synthetic oligonucleotide
agcuaaacccuccugguag

SEQ ID NO: 1408057 - RNA, 19 nt, Artificial Sequence
  Description of Artificial Sequence: Synthetic oligonucleotide
acuggucuagcucagggag

SEQ ID NO: 1408058 - RNA, 19 nt, Artificial Sequence
  Description of Artificial Sequence: Synthetic oligonucleotide
ugcuuuugcaacaaaggaa

SEQ ID NO: 1408059 - RNA, 19 nt, Artificial Sequence
  Description of Artificial Sequence: Synthetic oligonucleotide
guauuuacuggugaagagg

SEQ ID NO: 1408060 - RNA, 19 nt, Artificial Sequence
  Description of Artificial Sequence: Synthetic oligonucleotide
cuuuacaggaccugccugg

SEQ ID NO: 1408061 - RNA, 19 nt, Artificial Sequence
  Description of Artificial Sequence: Synthetic oligonucleotide
ucaaaugccucguacacau

SEQ ID NO: 1408062 - RNA, 19 nt, Artificial Sequence
  Description of Artificial Sequence: Synthetic oligonucleotide
ggaauuagacuguuguugg

SEQ ID NO: 1408063 - RNA, 19 nt, Artificial Sequence
  Description of Artificial Sequence: Synthetic oligonucleotide
aaccacaauaucuugcuuu

SEQ ID NO: 1408064 - RNA, 19 nt, Artificial Sequence
  Description of Artificial Sequence: Synthetic oligonucleotide
uggaucgcuaugcuggagg

SEQ ID NO: 1408065 - RNA, 19 nt, Artificial Sequence
  Description of Artificial Sequence: Synthetic oligonucleotide
ugaggauuugcaguuagcc

SEQ ID NO: 1408066 - RNA, 19 nt, Artificial Sequence
  Description of Artificial Sequence: Synthetic oligonucleotide
aaggcacaaaucugccggc

SEQ ID NO: 1408067 - RNA, 19 nt, Artificial Sequence
  Description of Artificial Sequence: Synthetic oligonucleotide
aggaauuagacuguuguug

SEQ ID NO: 1408068 - RNA, 19 nt, Artificial Sequence
  Description of Artificial Sequence: Synthetic oligonucleotide
gagggguagauucugcucc

SEQ ID NO: 1408069 - RNA, 19 nt, Artificial Sequence
  Description of Artificial Sequence: Synthetic oligonucleotide
acugcaauucaccgaguac

SEQ ID NO: 1408070 - RNA, 19 nt, Artificial Sequence
  Description of Artificial Sequence: Synthetic oligonucleotide
gaauuagacuguuguuggg

SEQ ID NO: 1408071 - RNA, 19 nt, Artificial Sequence
  Description of Artificial Sequence: Synthetic oligonucleotide
aacgcaggacugucagucc

SEQ ID NO: 1408072 - RNA, 19 nt, Artificial Sequence
  Description of Artificial Sequence: Synthetic oligonucleotide
gaaggaauuagacuguugu

SEQ ID NO: 1408073 - RNA, 19 nt, Artificial Sequence
  Description of Artificial Sequence: Synthetic oligonucleotide
aaugccucguacacauugc

SEQ ID NO: 1408074 - RNA, 19 nt, Artificial Sequence
  Description of Artificial Sequence: Synthetic oligonucleotide
caauaccaaacucuguccc

SEQ ID NO: 1408075 - RNA, 19 nt, Artificial Sequence
  Description of Artificial Sequence: Synthetic oligonucleotide
guuguagucaauaccaaac

SEQ ID NO: 1408076 - RNA, 19 nt, Artificial Sequence
  Description of Artificial Sequence: Synthetic oligonucleotide
agugguagguaaccaaaag

SEQ ID NO: 1408077 - RNA, 19 nt, Artificial Sequence
  Description of Artificial Sequence: Synthetic oligonucleotide
ugacguacaggguauggug

SEQ ID NO: 1408078 - RNA, 19 nt, Artificial Sequence
  Description of Artificial Sequence: Synthetic oligonucleotide
gggagauuggcucucauag

SEQ ID NO: 1408079 - RNA, 19 nt, Artificial Sequence
  Description of Artificial Sequence: Synthetic oligonucleotide
uccuucaaagaagaguugc

SEQ ID NO: 1408080 - RNA, 19 nt, Artificial Sequence
  Description of Artificial Sequence: Synthetic oligonucleotide
cuuggcuagcucaggaucc

SEQ ID NO: 1408081 - RNA, 19 nt, Artificial Sequence
  Description of Artificial Sequence: Synthetic oligonucleotide
uguagcauagggguaaggu

SEQ ID NO: 1408082 - RNA, 19 nt, Artificial Sequence
  Description of Artificial Sequence: Synthetic oligonucleotide
ugugcuucauggaaagcac

SEQ ID NO: 1408083 - RNA, 19 nt, Artificial Sequence
  Description of Artificial Sequence: Synthetic oligonucleotide
ucuuuacaggaccugccug

SEQ ID NO: 1408084 - RNA, 19 nt, Artificial Sequence
  Description of Artificial Sequence: Synthetic oligonucleotide
agaaggcacaaaucugccg

SEQ ID NO: 1408085 - RNA, 19 nt, Artificial Sequence
  Description of Artificial Sequence: Synthetic oligonucleotide
uaugcuggaggaucccagg

SEQ ID NO: 1408086 - RNA, 19 nt, Artificial Sequence
  Description of Artificial Sequence: Synthetic oligonucleotide
auuagacuguuguugggca

SEQ ID NO: 1408087 - RNA, 19 nt, Artificial Sequence
  Description of Artificial Sequence: Synthetic oligonucleotide
uagguaaccaaaagcaguu

SEQ ID NO: 1408088 - RNA, 19 nt, Artificial Sequence
  Description of Artificial Sequence: Synthetic oligonucleotide
aaaccuguaaggugcuggu

SEQ ID NO: 1408089 - RNA, 19 nt, Artificial Sequence
  Description of Artificial Sequence: Synthetic oligonucleotide
aagaagaguugcuuggcua

SEQ ID NO: 1408090 - RNA, 19 nt, Artificial Sequence
  Description of Artificial Sequence: Synthetic oligonucleotide
uggggcacaauccucuggc

SEQ ID NO: 1408091 - RNA, 19 nt, Artificial Sequence
  Description of Artificial Sequence: Synthetic oligonucleotide
acaggaccugccuggaucg

SEQ ID NO: 1408092 - RNA, 19 nt, Artificial Sequence
  Description of Artificial Sequence: Synthetic oligonucleotide
aaauuaagugccagggcca

SEQ ID NO: 1408093 - RNA, 19 nt, Artificial Sequence
  Description of Artificial Sequence: Synthetic oligonucleotide
uuugcaacaaaggaaugua

SEQ ID NO: 1408094 - RNA, 19 nt, Artificial Sequence
  Description of Artificial Sequence: Synthetic oligonucleotide
aucgcuaugcuggaggauc

SEQ ID NO: 1408095 - RNA, 19 nt, Artificial Sequence
  Description of Artificial Sequence: Synthetic oligonucleotide
caguuagccaguuucgaug

SEQ ID NO: 1408096 - RNA, 19 nt, Artificial Sequence
  Description of Artificial Sequence: Synthetic oligonucleotide
ugaacggcguuccaacgca

SEQ ID NO: 1408097 - RNA, 19 nt, Artificial Sequence
  Description of Artificial Sequence: Synthetic oligonucleotide
uuuugcacucaguaccaca

SEQ ID NO: 1408098 - RNA, 19 nt, Artificial Sequence
  Description of Artificial Sequence: Synthetic oligonucleotide
ugagaagcggaucucuguc

SEQ ID NO: 1408099 - RNA, 19 nt, Artificial Sequence
  Description of Artificial Sequence: Synthetic oligonucleotide
aaggaaaccacaauaucuu

SEQ ID NO: 1408100 - RNA, 19 nt, Artificial Sequence
  Description of Artificial Sequence: Synthetic oligonucleotide
ucaggagccucuuccagug

SEQ ID NO: 1408101 - RNA, 19 nt, Artificial Sequence
  Description of Artificial Sequence: Synthetic oligonucleotide
gguagauucugcuccaccc

SEQ ID NO: 1408102 - RNA, 19 nt, Artificial Sequence
  Description of Artificial Sequence: Synthetic oligonucleotide
aaggaauuagacuguuguu

SEQ ID NO: 1408103 - RNA, 19 nt, Artificial Sequence
  Description of Artificial Sequence: Synthetic oligonucleotide
agaaagaagcccauccgag

SEQ ID NO: 1408104 - RNA, 19 nt, Artificial Sequence
  Description of Artificial Sequence: Synthetic oligonucleotide
gcagguuucaucuggacac

SEQ ID NO: 1408105 - RNA, 19 nt, Artificial Sequence
  Description of Artificial Sequence: Synthetic oligonucleotide
gacggaugagcagagacac

SEQ ID NO: 1408106 - RNA, 19 nt, Artificial Sequence
  Description of Artificial Sequence: Synthetic oligonucleotide
guagcuuuugcacucagua

SEQ ID NO: 1408107 - RNA, 19 nt, Artificial Sequence
  Description of Artificial Sequence: Synthetic oligonucleotide
uggugugcuucauggaaag

SEQ ID NO: 1408108 - RNA, 19 nt, Artificial Sequence
  Description of Artificial Sequence: Synthetic oligonucleotide
ucuucggaagccacgcaga

SEQ ID NO: 1408109 - RNA, 19 nt, Artificial Sequence
  Description of Artificial Sequence: Synthetic oligonucleotide
acuaagaaagaagcccauc

SEQ ID NO: 1408110 - RNA, 19 nt, Artificial Sequence
  Description of Artificial Sequence: Synthetic oligonucleotide
aacugcaauucaccgagua

SEQ ID NO: 1408111 - RNA, 19 nt, Artificial Sequence
  Description of Artificial Sequence: Synthetic oligonucleotide
gaggauuugcaguuagcca

SEQ ID NO: 1408112 - RNA, 19 nt, Artificial Sequence
  Description of Artificial Sequence: Synthetic oligonucleotide
caggguauggugcuuuacc

SEQ ID NO: 1408113 - RNA, 19 nt, Artificial Sequence
  Description of Artificial Sequence: Synthetic oligonucleotide
aguuguagucaauaccaaa

SEQ ID NO: 1408114 - RNA, 19 nt, Artificial Sequence
  Description of Artificial Sequence: Synthetic oligonucleotide
agagggauccugcuccauc

SEQ ID NO: 1408115 - RNA, 19 nt, Artificial Sequence
  Description of Artificial Sequence: Synthetic oligonucleotide
aggaaaccacaauaucuug

SEQ ID NO: 1408116 - RNA, 19 nt, Artificial Sequence
  Description of Artificial Sequence: Synthetic oligonucleotide
gaugaggcugacguacagg

SEQ ID NO: 1408117 - RNA, 19 nt, Artificial Sequence
  Description of Artificial Sequence: Synthetic oligonucleotide
gaaagcacaggcaacacgu

SEQ ID NO: 1408118 - RNA, 19 nt, Artificial Sequence
  Description of Artificial Sequence: Synthetic oligonucleotide
guagcauagggguaagguc

SEQ ID NO: 1408119 - RNA, 19 nt, Artificial Sequence
  Description of Artificial Sequence: Synthetic oligonucleotide
ggaguuguagucaauacca

SEQ ID NO: 1408120 - RNA, 19 nt, Artificial Sequence
  Description of Artificial Sequence: Synthetic oligonucleotide
gucucgagggcauagcuca

SEQ ID NO: 1408121 - RNA, 19 nt, Artificial Sequence
  Description of Artificial Sequence: Synthetic oligonucleotide
uuacuggugaagagggauc

SEQ ID NO: 1408122 - RNA, 19 nt, Artificial Sequence
  Description of Artificial Sequence: Synthetic oligonucleotide
uugaggauuugcaguuagc

SEQ ID NO: 1408123 - RNA, 19 nt, Artificial Sequence
  Description of Artificial Sequence: Synthetic oligonucleotide
gguauggugcuuuaccaug

SEQ ID NO: 1408124 - RNA, 19 nt, Artificial Sequence
  Description of Artificial Sequence: Synthetic oligonucleotide
agaguugcuuggcuagcuc

SEQ ID NO: 1408125 - RNA, 19 nt, Artificial Sequence
  Description of Artificial Sequence: Synthetic oligonucleotide
uuggugugcuucauggaaa

SEQ ID NO: 1408126 - RNA, 19 nt, Artificial Sequence
  Description of Artificial Sequence: Synthetic oligonucleotide
gagugagauccauuucuug

SEQ ID NO: 1408127 - RNA, 19 nt, Artificial Sequence
  Description of Artificial Sequence: Synthetic oligonucleotide
ucccagcggaacuucuucg

SEQ ID NO: 1408128 - RNA, 19 nt, Artificial Sequence
  Description of Artificial Sequence: Synthetic oligonucleotide
gacguacaggguauggugc

SEQ ID NO: 1408129 - RNA, 19 nt, Artificial Sequence
  Description of Artificial Sequence: Synthetic oligonucleotide
aggaagacggaugagcaga

SEQ ID NO: 1408130 - RNA, 19 nt, Artificial Sequence
  Description of Artificial Sequence: Synthetic oligonucleotide
cuuccgaccgacacagaag

SEQ ID NO: 1408131 - RNA, 19 nt, Artificial Sequence
  Description of Artificial Sequence: Synthetic oligonucleotide
acuucuucgucaggugggc

SEQ ID NO: 1408132 - RNA, 19 nt, Artificial Sequence
  Description of Artificial Sequence: Synthetic oligonucleotide
gagccggcaacucugagaa

SEQ ID NO: 1408133 - RNA, 19 nt, Artificial Sequence
  Description of Artificial Sequence: Synthetic oligonucleotide
cuaugcuggaggaucccag

SEQ ID NO: 1408134 - RNA, 19 nt, Artificial Sequence
  Description of Artificial Sequence: Synthetic oligonucleotide
uugucuucggaagccacgc

SEQ ID NO: 1408135 - RNA, 19 nt, Artificial Sequence
  Description of Artificial Sequence: Synthetic oligonucleotide
ugagccggcaacucugaga

SEQ ID NO: 1408136 - RNA, 19 nt, Artificial Sequence
  Description of Artificial Sequence: Synthetic oligonucleotide
ggugcuuuaccauggcugc

SEQ ID NO: 1408137 - RNA, 19 nt, Artificial Sequence
  Description of Artificial Sequence: Synthetic oligonucleotide
ucguacacauugcccagca

SEQ ID NO: 1408138 - RNA, 19 nt, Artificial Sequence
  Description of Artificial Sequence: Synthetic oligonucleotide
gaacaucugagccggcaac

SEQ ID NO: 1408139 - RNA, 19 nt, Artificial Sequence
  Description of Artificial Sequence: Synthetic oligonucleotide
gguaaggucccagaaacug

SEQ ID NO: 1408140 - RNA, 19 nt, Artificial Sequence
  Description of Artificial Sequence: Synthetic oligonucleotide
cugaacggcguuccaacgc

SEQ ID NO: 1408141 - RNA, 19 nt, Artificial Sequence
  Description of Artificial Sequence: Synthetic oligonucleotide
auggaaagcacaggcaaca

SEQ ID NO: 1408142 - RNA, 19 nt, Artificial Sequence
  Description of Artificial Sequence: Synthetic oligonucleotide
caggcuaaaggaaaccaca

SEQ ID NO: 1408143 - RNA, 19 nt, Artificial Sequence
  Description of Artificial Sequence: Synthetic oligonucleotide
caggaguuguagucaauac

SEQ ID NO: 1408144 - RNA, 19 nt, Artificial Sequence
  Description of Artificial Sequence: Synthetic oligonucleotide
ugcaagggaacuguuugcu

SEQ ID NO: 1408145 - RNA, 19 nt, Artificial Sequence
  Description of Artificial Sequence: Synthetic oligonucleotide
uccugaacggcguuccaac

SEQ ID NO: 1408146 - RNA, 19 nt, Artificial Sequence
  Description of Artificial Sequence: Synthetic oligonucleotide
guagucaauaccaaacucu

SEQ ID NO: 1408147 - RNA, 19 nt, Artificial Sequence
  Description of Artificial Sequence: Synthetic oligonucleotide
agcauagggguaagguccc

SEQ ID NO: 1408148 - RNA, 19 nt, Artificial Sequence
  Description of Artificial Sequence: Synthetic oligonucleotide
uguggcaccugcugggaac

SEQ ID NO: 1408149 - RNA, 19 nt, Artificial Sequence
  Description of Artificial Sequence: Synthetic oligonucleotide
aauucaccgaguacauccu

SEQ ID NO: 1408150 - RNA, 19 nt, Artificial Sequence
  Description of Artificial Sequence: Synthetic oligonucleotide
ucgcuaugcuggaggaucc

SEQ ID NO: 1408151 - RNA, 19 nt, Artificial Sequence
  Description of Artificial Sequence: Synthetic oligonucleotide
gguagguaaccaaaagcag

SEQ ID NO: 1408152 - RNA, 19 nt, Artificial Sequence
  Description of Artificial Sequence: Synthetic oligonucleotide
uagggguaaggucccagaa

SEQ ID NO: 1408153 - RNA, 19 nt, Artificial Sequence
  Description of Artificial Sequence: Synthetic oligonucleotide
ugaguguagcauaggggua

SEQ ID NO: 1408154 - RNA, 19 nt, Artificial Sequence
  Description of Artificial Sequence: Synthetic oligonucleotide
caaaucugccggcucucgg

SEQ ID NO: 1408155 - RNA, 19 nt, Artificial Sequence
  Description of Artificial Sequence: Synthetic oligonucleotide
uucuugaguguagcauagg

SEQ ID NO: 1408156 - RNA, 19 nt, Artificial Sequence
  Description of Artificial Sequence: Synthetic oligonucleotide
auagggguaaggucccaga

SEQ ID NO: 1408157 - RNA, 19 nt, Artificial Sequence
  Description of Artificial Sequence: Synthetic oligonucleotide
acagucucgagggcauagc

SEQ ID NO: 1408158 - RNA, 19 nt, Artificial Sequence
  Description of Artificial Sequence: Synthetic oligonucleotide
auaccaaacucuguccccu

SEQ ID NO: 1408159 - RNA, 19 nt, Artificial Sequence
  Description of Artificial Sequence: Synthetic oligonucleotide
cugcuuccgaccgacacag

SEQ ID NO: 1408160 - RNA, 19 nt, Artificial Sequence
  Description of Artificial Sequence: Synthetic oligonucleotide
uagccaugugggaaggguc

SEQ ID NO: 1408161 - RNA, 19 nt, Artificial Sequence
  Description of Artificial Sequence: Synthetic oligonucleotide
ucuucgucaggugggcuug

SEQ ID NO: 1408162 - RNA, 19 nt, Artificial Sequence
  Description of Artificial Sequence: Synthetic oligonucleotide
aacggcguuccaacgcagg

SEQ ID NO: 1408163 - RNA, 19 nt, Artificial Sequence
  Description of Artificial Sequence: Synthetic oligonucleotide
caggcaacacgucugagaa

SEQ ID NO: 1408164 - RNA, 19 nt, Artificial Sequence
  Description of Artificial Sequence: Synthetic oligonucleotide
uacauccuggggauugcaa

SEQ ID NO: 1408165 - RNA, 19 nt, Artificial Sequence
  Description of Artificial Sequence: Synthetic oligonucleotide
uuuacaggaccugccugga

SEQ ID NO: 1408166 - RNA, 19 nt, Artificial Sequence
  Description of Artificial Sequence: Synthetic oligonucleotide
ucugagccggcaacucuga

SEQ ID NO: 1408167 - RNA, 19 nt, Artificial Sequence
  Description of Artificial Sequence: Synthetic oligonucleotide
ugguagcuuuugcacucag

SEQ ID NO: 1408168 - RNA, 19 nt, Artificial Sequence
  Description of Artificial Sequence: Synthetic oligonucleotide
uugcugagcacagucucga

SEQ ID NO: 1408169 - RNA, 19 nt, Artificial Sequence
  Description of Artificial Sequence: Synthetic oligonucleotide
guagguaaccaaaagcagu

SEQ ID NO: 1408170 - RNA, 19 nt, Artificial Sequence
  Description of Artificial Sequence: Synthetic oligonucleotide
agcaauacugcaggcagaa

SEQ ID NO: 1408171 - RNA, 19 nt, Artificial Sequence
  Description of Artificial Sequence: Synthetic oligonucleotide
aggaagcacacaaaggcaa

SEQ ID NO: 1408172 - RNA, 19 nt, Artificial Sequence
  Description of Artificial Sequence: Synthetic oligonucleotide
gauccauuucuugagugua

SEQ ID NO: 1408173 - RNA, 19 nt, Artificial Sequence
  Description of Artificial Sequence: Synthetic oligonucleotide
uucuucgucaggugggcuu

SEQ ID NO: 1408174 - RNA, 19 nt, Artificial Sequence
  Description of Artificial Sequence: Synthetic oligonucleotide
ccgagcuaaacccuccugg

SEQ ID NO: 1408175 - RNA, 19 nt, Artificial Sequence
  Description of Artificial Sequence: Synthetic oligonucleotide
gggcuuggaacuuuuccgc

SEQ ID NO: 1408176 - RNA, 19 nt, Artificial Sequence
  Description of Artificial Sequence: Synthetic oligonucleotide
gugcucaaaugccucguac

SEQ ID NO: 1408177 - RNA, 19 nt, Artificial Sequence
  Description of Artificial Sequence: Synthetic oligonucleotide
agggaacuguuugcugagc

SEQ ID NO: 1408178 - RNA, 19 nt, Artificial Sequence
  Description of Artificial Sequence: Synthetic oligonucleotide
agggcauagcucaagucca

SEQ ID NO: 1408179 - RNA, 19 nt, Artificial Sequence
  Description of Artificial Sequence: Synthetic oligonucleotide
ugccuggaucgcuaugcug

SEQ ID NO: 1408180 - RNA, 19 nt, Artificial Sequence
  Description of Artificial Sequence: Synthetic oligonucleotide
aucucaccgagcugguggu

SEQ ID NO: 1408181 - RNA, 19 nt, Artificial Sequence
  Description of Artificial Sequence: Synthetic oligonucleotide
gagacaccgggcaguagcc

SEQ ID NO: 1408182 - RNA, 19 nt, Artificial Sequence
  Description of Artificial Sequence: Synthetic oligonucleotide
agaaggaauuagacuguug

SEQ ID NO: 1408183 - RNA, 19 nt, Artificial Sequence
  Description of Artificial Sequence: Synthetic oligonucleotide
ggagauuggcucucauagc

SEQ ID NO: 1408184 - RNA, 19 nt, Artificial Sequence
  Description of Artificial Sequence: Synthetic oligonucleotide
uccccgcugcuucagacua

SEQ ID NO: 1408185 - RNA, 19 nt, Artificial Sequence
  Description of Artificial Sequence: Synthetic oligonucleotide
cuagcucaggauccaucug

SEQ ID NO: 1408186 - RNA, 19 nt, Artificial Sequence
  Description of Artificial Sequence: Synthetic oligonucleotide
aguaccacagagggguaga

SEQ ID NO: 1408187 - RNA, 19 nt, Artificial Sequence
  Description of Artificial Sequence: Synthetic oligonucleotide
caccgaguacauccugggg

SEQ ID NO: 1408188 - RNA, 19 nt, Artificial Sequence
  Description of Artificial Sequence: Synthetic oligonucleotide
auuaagugccagggccagg

SEQ ID NO: 1408189 - RNA, 19 nt, Artificial Sequence
  Description of Artificial Sequence: Synthetic oligonucleotide
agcucaaguccaugcugug

SEQ ID NO: 1408190 - RNA, 19 nt, Artificial Sequence
  Description of Artificial Sequence: Synthetic oligonucleotide
gaaaaccuguaaggugcug

SEQ ID NO: 1408191 - RNA, 19 nt, Artificial Sequence
  Description of Artificial Sequence: Synthetic oligonucleotide
uggcucucauagcuucuac

SEQ ID NO: 1408192 - RNA, 19 nt, Artificial Sequence
  Description of Artificial Sequence: Synthetic oligonucleotide
cauagggguaaggucccag

SEQ ID NO: 1408193 - RNA, 19 nt, Artificial Sequence
  Description of Artificial Sequence: Synthetic oligonucleotide
gccucguacacauugccca

SEQ ID NO: 1408194 - RNA, 19 nt, Artificial Sequence
  Description of Artificial Sequence: Synthetic oligonucleotide
gaagagggauccugcucca

SEQ ID NO: 1408195 - RNA, 19 nt, Artificial Sequence
  Description of Artificial Sequence: Synthetic oligonucleotide
uagaaggaauuagacuguu

SEQ ID NO: 1408196 - RNA, 19 nt, Artificial Sequence
  Description of Artificial Sequence: Synthetic oligonucleotide
agggguagauucugcucca

SEQ ID NO: 1408197 - RNA, 19 nt, Artificial Sequence
  Description of Artificial Sequence: Synthetic oligonucleotide
aggcaacacgucugagaag

SEQ ID NO: 1408198 - RNA, 19 nt, Artificial Sequence
  Description of Artificial Sequence: Synthetic oligonucleotide
acggcguuccaacgcagga

SEQ ID NO: 1408199 - RNA, 19 nt, Artificial Sequence
  Description of Artificial Sequence: Synthetic oligonucleotide
aguguagcauagggguaag

SEQ ID NO: 1408200 - RNA, 19 nt, Artificial Sequence
  Description of Artificial Sequence: Synthetic oligonucleotide
ucaccgagcuggugguaca

SEQ ID NO: 1408201 - RNA, 19 nt, Artificial Sequence
  Description of Artificial Sequence: Synthetic oligonucleotide
agggagauuggcucucaua

SEQ ID NO: 1408202 - RNA, 19 nt, Artificial Sequence
  Description of Artificial Sequence: Synthetic oligonucleotide
gcuaaacccuccugguagc

SEQ ID NO: 1408203 - RNA, 19 nt, Artificial Sequence
  Description of Artificial Sequence: Synthetic oligonucleotide
ccaggcuaaaggaaaccac

SEQ ID NO: 1408204 - RNA, 19 nt, Artificial Sequence
  Description of Artificial Sequence: Synthetic oligonucleotide
gcuuggcuagcucaggauc

SEQ ID NO: 1408205 - RNA, 19 nt, Artificial Sequence
  Description of Artificial Sequence: Synthetic oligonucleotide
guagauucugcuccacccu

SEQ ID NO: 1408206 - RNA, 19 nt, Artificial Sequence
  Description of Artificial Sequence: Synthetic oligonucleotide
uuccugaacggcguuccaa

SEQ ID NO: 1408207 - RNA, 19 nt, Artificial Sequence
  Description of Artificial Sequence: Synthetic oligonucleotide
cucaccgagcuggugguac

SEQ ID NO: 1408208 - RNA, 19 nt, Artificial Sequence
  Description of Artificial Sequence: Synthetic oligonucleotide
acggaugagcagagacacc

SEQ ID NO: 1408209 - RNA, 19 nt, Artificial Sequence
  Description of Artificial Sequence: Synthetic oligonucleotide
cuggagcuggagacaaguc

SEQ ID NO: 1408210 - RNA, 19 nt, Artificial Sequence
  Description of Artificial Sequence: Synthetic oligonucleotide
uuacaggaccugccuggau

SEQ ID NO: 1408211 - RNA, 19 nt, Artificial Sequence
  Description of Artificial Sequence: Synthetic oligonucleotide
auuugcaguuagccaguuu

SEQ ID NO: 1408212 - RNA, 19 nt, Artificial Sequence
  Description of Artificial Sequence: Synthetic oligonucleotide
gucccagcggaacuucuuc

SEQ ID NO: 1408213 - RNA, 19 nt, Artificial Sequence
  Description of Artificial Sequence: Synthetic oligonucleotide
cauagcucaaguccaugcu

SEQ ID NO: 1408214 - RNA, 19 nt, Artificial Sequence
  Description of Artificial Sequence: Synthetic oligonucleotide
accgacacagaagguucag

SEQ ID NO: 1408215 - RNA, 19 nt, Artificial Sequence
  Description of Artificial Sequence: Synthetic oligonucleotide
gaagcggaucucuguccca

SEQ ID NO: 1408216 - RNA, 19 nt, Artificial Sequence
  Description of Artificial Sequence: Synthetic oligonucleotide
gaguuguagucaauaccaa

SEQ ID NO: 1408217 - RNA, 19 nt, Artificial Sequence
  Description of Artificial Sequence: Synthetic oligonucleotide
cuuuugcacucaguaccac

SEQ ID NO: 1408218 - RNA, 19 nt, Artificial Sequence
  Description of Artificial Sequence: Synthetic oligonucleotide
caguaccacagagggguag

SEQ ID NO: 1408219 - RNA, 19 nt, Artificial Sequence
  Description of Artificial Sequence: Synthetic oligonucleotide
uccgaccgacacagaaggu

SEQ ID NO: 1408220 - RNA, 19 nt, Artificial Sequence
  Description of Artificial Sequence: Synthetic oligonucleotide
ccugaacggcguuccaacg

SEQ ID NO: 1408221 - RNA, 19 nt, Artificial Sequence
  Description of Artificial Sequence: Synthetic oligonucleotide
ucaguaccacagaggggua

SEQ ID NO: 1408222 - RNA, 19 nt, Artificial Sequence
  Description of Artificial Sequence: Synthetic oligonucleotide
gcugacguacaggguaugg

SEQ ID NO: 1408223 - RNA, 19 nt, Artificial Sequence
  Description of Artificial Sequence: Synthetic oligonucleotide
guguagcauagggguaagg

SEQ ID NO: 1408224 - RNA, 19 nt, Artificial Sequence
  Description of Artificial Sequence: Synthetic oligonucleotide
gaacggcguuccaacgcag

SEQ ID NO: 1408225 - RNA, 19 nt, Artificial Sequence
  Description of Artificial Sequence: Synthetic oligonucleotide
aaacugcaauucaccgagu

SEQ ID NO: 1408226 - RNA, 19 nt, Artificial Sequence
  Description of Artificial Sequence: Synthetic oligonucleotide
caacacgucugagaaggca

SEQ ID NO: 1408227 - RNA, 19 nt, Artificial Sequence
  Description of Artificial Sequence: Synthetic oligonucleotide
cucgagggcauagcucaag

SEQ ID NO: 1408228 - RNA, 19 nt, Artificial Sequence
  Description of Artificial Sequence: Synthetic oligonucleotide
agccgagcuaaacccuccu

SEQ ID NO: 1408229 - RNA, 19 nt, Artificial Sequence
  Description of Artificial Sequence: Synthetic oligonucleotide
ucagggagauuggcucuca

SEQ ID NO: 1408230 - RNA, 19 nt, Artificial Sequence
  Description of Artificial Sequence: Synthetic oligonucleotide
aagucccagcggaacuucu

SEQ ID NO: 1408231 - RNA, 19 nt, Artificial Sequence
  Description of Artificial Sequence: Synthetic oligonucleotide
cucguuguagaaggaauua

SEQ ID NO: 1408232 - RNA, 19 nt, Artificial Sequence
  Description of Artificial Sequence: Synthetic oligonucleotide
ggcugcuuccgaccgacac

SEQ ID NO: 1408233 - RNA, 19 nt, Artificial Sequence
  Description of Artificial Sequence: Synthetic oligonucleotide
ucucgagggcauagcucaa

SEQ ID NO: 1408234 - RNA, 19 nt, Artificial Sequence
  Description of Artificial Sequence: Synthetic oligonucleotide
gcuagcucaggauccaucu

SEQ ID NO: 1408235 - RNA, 19 nt, Artificial Sequence
  Description of Artificial Sequence: Synthetic oligonucleotide
ggaucgcuaugcuggagga

SEQ ID NO: 1408236 - RNA, 19 nt, Artificial Sequence
  Description of Artificial Sequence: Synthetic oligonucleotide
auacugcaggcagaagaaa

SEQ ID NO: 1408237 - RNA, 19 nt, Artificial Sequence
  Description of Artificial Sequence: Synthetic oligonucleotide
cacccuguccuuggugugc

SEQ ID NO: 1408238 - RNA, 19 nt, Artificial Sequence
  Description of Artificial Sequence: Synthetic oligonucleotide
gcuuccgaccgacacagaa

SEQ ID NO: 1408239 - RNA, 19 nt, Artificial Sequence
  Description of Artificial Sequence: Synthetic oligonucleotide
ggggauugcaagggaacug

SEQ ID NO: 1408240 - RNA, 19 nt, Artificial Sequence
  Description of Artificial Sequence: Synthetic oligonucleotide
ugucccagcccugggcuuc

SEQ ID NO: 1408241 - RNA, 19 nt, Artificial Sequence
  Description of Artificial Sequence: Synthetic oligonucleotide
gaagacggaugagcagaga

SEQ ID NO: 1408242 - RNA, 19 nt, Artificial Sequence
  Description of Artificial Sequence: Synthetic oligonucleotide
guagccaugugggaagggu

SEQ ID NO: 1408243 - RNA, 19 nt, Artificial Sequence
  Description of Artificial Sequence: Synthetic oligonucleotide
aggcacaaaucugccggcu

SEQ ID NO: 1408244 - RNA, 19 nt, Artificial Sequence
  Description of Artificial Sequence: Synthetic oligonucleotide
cuccacccuguccuuggug

SEQ ID NO: 1408245 - RNA, 19 nt, Artificial Sequence
  Description of Artificial Sequence: Synthetic oligonucleotide
ggacugucaguccccgcug

SEQ ID NO: 1408246 - RNA, 19 nt, Artificial Sequence
  Description of Artificial Sequence: Synthetic oligonucleotide
ggcacaaaucugccggcuc

SEQ ID NO: 1408247 - RNA, 19 nt, Artificial Sequence
  Description of Artificial Sequence: Synthetic oligonucleotide
gcuuuugcacucaguacca

SEQ ID NO: 1408248 - RNA, 19 nt, Artificial Sequence
  Description of Artificial Sequence: Synthetic oligonucleotide
gacaccgggcaguagccau

SEQ ID NO: 1408249 - RNA, 19 nt, Artificial Sequence
  Description of Artificial Sequence: Synthetic oligonucleotide
aagagggauccugcuccau

SEQ ID NO: 1408250 - RNA, 19 nt, Artificial Sequence
  Description of Artificial Sequence: Synthetic oligonucleotide
agauuggcucucauagcuu

SEQ ID NO: 1408251 - RNA, 19 nt, Artificial Sequence
  Description of Artificial Sequence: Synthetic oligonucleotide
gcugcuuccgaccgacaca

SEQ ID NO: 1408252 - RNA, 19 nt, Artificial Sequence
  Description of Artificial Sequence: Synthetic oligonucleotide
cuuggaacuuuuccgcuuu

SEQ ID NO: 1408253 - RNA, 19 nt, Artificial Sequence
  Description of Artificial Sequence: Synthetic oligonucleotide
cagcccugggcuucaucuc

SEQ ID NO: 1408254 - RNA, 19 nt, Artificial Sequence
  Description of Artificial Sequence: Synthetic oligonucleotide
cgaccgacacagaagguuc

SEQ ID NO: 1408255 - RNA, 19 nt, Artificial Sequence
  Description of Artificial Sequence: Synthetic oligonucleotide
gcaggacugucaguccccg

SEQ ID NO: 1408256 - RNA, 19 nt, Artificial Sequence
  Description of Artificial Sequence: Synthetic oligonucleotide
caccgagcuggugguacag

SEQ ID NO: 1408257 - RNA, 19 nt, Artificial Sequence
  Description of Artificial Sequence: Synthetic oligonucleotide
ggugaagagggauccugcu

SEQ ID NO: 1408258 - RNA, 19 nt, Artificial Sequence
  Description of Artificial Sequence: Synthetic oligonucleotide
ugccaggagggaucaucuu

SEQ ID NO: 1408259 - RNA, 19 nt, Artificial Sequence
  Description of Artificial Sequence: Synthetic oligonucleotide
ggcauagcucaaguccaug

SEQ ID NO: 1408260 - RNA, 19 nt, Artificial Sequence
  Description of Artificial Sequence: Synthetic oligonucleotide
agacaccgggcaguagcca

SEQ ID NO: 1408261 - RNA, 19 nt, Artificial Sequence
  Description of Artificial Sequence: Synthetic oligonucleotide
gggccagugguagguaacc

SEQ ID NO: 1408262 - RNA, 19 nt, Artificial Sequence
  Description of Artificial Sequence: Synthetic oligonucleotide
agccggcaacucugagaag

SEQ ID NO: 1408263 - RNA, 19 nt, Artificial Sequence
  Description of Artificial Sequence: Synthetic oligonucleotide
agcccauccgagggcccac

SEQ ID NO: 1408264 - RNA, 19 nt, Artificial Sequence
  Description of Artificial Sequence: Synthetic oligonucleotide
gcacaaaucugccggcucu

SEQ ID NO: 1408265 - RNA, 19 nt, Artificial Sequence
  Description of Artificial Sequence: Synthetic oligonucleotide
aggcugacguacaggguau

SEQ ID NO: 1408266 - RNA, 19 nt, Artificial Sequence
  Description of Artificial Sequence: Synthetic oligonucleotide
ugcuuccgaccgacacaga

SEQ ID NO: 1408267 - RNA, 19 nt, Artificial Sequence
  Description of Artificial Sequence: Synthetic oligonucleotide
gccgagcuaaacccuccug

SEQ ID NO: 1408268 - RNA, 19 nt, Artificial Sequence
  Description of Artificial Sequence: Synthetic oligonucleotide
gggauugcaagggaacugu

SEQ ID NO: 1408269 - RNA, 19 nt, Artificial Sequence
  Description of Artificial Sequence: Synthetic oligonucleotide
cagucucgagggcauagcu

SEQ ID NO: 1408270 - RNA, 19 nt, Artificial Sequence
  Description of Artificial Sequence: Synthetic oligonucleotide
ggcuaaaggaaaccacaau

SEQ ID NO: 1408271 - RNA, 19 nt, Artificial Sequence
  Description of Artificial Sequence: Synthetic oligonucleotide
gggcagguuucaucuggac

SEQ ID NO: 1408272 - RNA, 19 nt, Artificial Sequence
  Description of Artificial Sequence: Synthetic oligonucleotide
cugacguacaggguauggu

SEQ ID NO: 1408273 - RNA, 19 nt, Artificial Sequence
  Description of Artificial Sequence: Synthetic oligonucleotide
gcuggagacaagucuacuu

SEQ ID NO: 1408274 - RNA, 19 nt, Artificial Sequence
  Description of Artificial Sequence: Synthetic oligonucleotide
gcuaugcuggaggauccca

SEQ ID NO: 1408275 - RNA, 19 nt, Artificial Sequence
  Description of Artificial Sequence: Synthetic oligonucleotide
ggcuuggaacuuuuccgcu

SEQ ID NO: 1408276 - RNA, 19 nt, Artificial Sequence
  Description of Artificial Sequence: Synthetic oligonucleotide
ggguauggugcuuuaccau

SEQ ID NO: 1408277 - RNA, 19 nt, Artificial Sequence
  Description of Artificial Sequence: Synthetic oligonucleotide
agggcccaccucccuggga

SEQ ID NO: 1408278 - RNA, 19 nt, Artificial Sequence
  Description of Artificial Sequence: Synthetic oligonucleotide
agucccagcggaacuucuu

SEQ ID NO: 1408279 - RNA, 19 nt, Artificial Sequence
  Description of Artificial Sequence: Synthetic oligonucleotide
gcaauucaccgaguacauc

SEQ ID NO: 1408280 - RNA, 19 nt, Artificial Sequence
  Description of Artificial Sequence: Synthetic oligonucleotide
ccgagcuggugguacagga

SEQ ID NO: 1408281 - RNA, 19 nt, Artificial Sequence
  Description of Artificial Sequence: Synthetic oligonucleotide
ggcuagcucaggauccauc

SEQ ID NO: 1408282 - RNA, 19 nt, Artificial Sequence
  Description of Artificial Sequence: Synthetic oligonucleotide
caggaccugccuggaucgc

SEQ ID NO: 1408283 - RNA, 19 nt, Artificial Sequence
  Description of Artificial Sequence: Synthetic oligonucleotide
gcagccgagcuaaacccuc

SEQ ID NO: 1408284 - RNA, 19 nt, Artificial Sequence
  Description of Artificial Sequence: Synthetic oligonucleotide
cgcaggacugucagucccc

SEQ ID NO: 1408285 - RNA, 19 nt, Artificial Sequence
  Description of Artificial Sequence: Synthetic oligonucleotide
ucucaccgagcugguggua

SEQ ID NO: 1408286 - RNA, 19 nt, Artificial Sequence
  Description of Artificial Sequence: Synthetic oligonucleotide
ccacaauaucuugcuuuug

SEQ ID NO: 1408287 - RNA, 19 nt, Artificial Sequence
  Description of Artificial Sequence: Synthetic oligonucleotide
gcacaauccucuggcucug

SEQ ID NO: 1408288 - RNA, 19 nt, Artificial Sequence
  Description of Artificial Sequence: Synthetic oligonucleotide
gcaacacgucugagaaggc

SEQ ID NO: 1408289 - RNA, 19 nt, Artificial Sequence
  Description of Artificial Sequence: Synthetic oligonucleotide
gauuugcaguuagccaguu

SEQ ID NO: 1408290 - RNA, 19 nt, Artificial Sequence
  Description of Artificial Sequence: Synthetic oligonucleotide
gaucgcuaugcuggaggau

SEQ ID NO: 1408291 - RNA, 19 nt, Artificial Sequence
  Description of Artificial Sequence: Synthetic oligonucleotide
guacaggguauggugcuuu

SEQ ID NO: 1408292 - RNA, 19 nt, Artificial Sequence
  Description of Artificial Sequence: Synthetic oligonucleotide
gguguggcaccugcuggga

SEQ ID NO: 1408293 - RNA, 19 nt, Artificial Sequence
  Description of Artificial Sequence: Synthetic oligonucleotide
cuggugagugagauccauu

SEQ ID NO: 1408294 - RNA, 19 nt, Artificial Sequence
  Description of Artificial Sequence: Synthetic oligonucleotide
gguagcuuuugcacucagu

SEQ ID NO: 1408295 - RNA, 19 nt, Artificial Sequence
  Description of Artificial Sequence: Synthetic oligonucleotide
ggccagugguagguaacca

SEQ ID NO: 1408296 - RNA, 19 nt, Artificial Sequence
  Description of Artificial Sequence: Synthetic oligonucleotide
gcuuggaacuuuuccgcuu

SEQ ID NO: 1408297 - RNA, 19 nt, Artificial Sequence
  Description of Artificial Sequence: Synthetic oligonucleotide
ggcugacguacaggguaug

SEQ ID NO: 1408298 - RNA, 19 nt, Artificial Sequence
  Description of Artificial Sequence: Synthetic oligonucleotide
gcguuccaacgcaggacug

SEQ ID NO: 1408299 - RNA, 19 nt, Artificial Sequence
  Description of Artificial Sequence: Synthetic oligonucleotide
cagguuucaucuggacacu

SEQ ID NO: 1408300 - RNA, 19 nt, Artificial Sequence
  Description of Artificial Sequence: Synthetic oligonucleotide
gaccugccuggaucgcuau

SEQ ID NO: 1408301 - RNA, 19 nt, Artificial Sequence
  Description of Artificial Sequence: Synthetic oligonucleotide
ccgagggcccaccucccug

SEQ ID NO: 1408302 - RNA, 19 nt, Artificial Sequence
  Description of Artificial Sequence: Synthetic oligonucleotide
gggcccaccucccugggau

SEQ ID NO: 1408303 - RNA, 19 nt, Artificial Sequence
  Description of Artificial Sequence: Synthetic oligonucleotide
cuucuucgucaggugggcu

SEQ ID NO: 1408304 - RNA, 19 nt, Artificial Sequence
  Description of Artificial Sequence: Synthetic oligonucleotide
cgagcuaaacccuccuggu

SEQ ID NO: 1408305 - RNA, 19 nt, Artificial Sequence
  Description of Artificial Sequence: Synthetic oligonucleotide
ggguaaggucccagaaacu

SEQ ID NO: 1408306 - RNA, 19 nt, Artificial Sequence
  Description of Artificial Sequence: Synthetic oligonucleotide
ccggaacuugggccccacc

SEQ ID NO: 1408307 - RNA, 19 nt, Artificial Sequence
  Description of Artificial Sequence: Synthetic oligonucleotide
cucaggcagccgagcuaaa

SEQ ID NO: 1408308 - RNA, 19 nt, Artificial Sequence
  Description of Artificial Sequence: Synthetic oligonucleotide
ggcagccgagcuaaacccu

SEQ ID NO: 1408309 - RNA, 19 nt, Artificial Sequence
  Description of Artificial Sequence: Synthetic oligonucleotide
cccagcggaacuucuucgu

SEQ ID NO: 1408310 - RNA, 19 nt, Artificial Sequence
  Description of Artificial Sequence: Synthetic oligonucleotide
caccgggcaguagccaugu

SEQ ID NO: 1408311 - RNA, 19 nt, Artificial Sequence
  Description of Artificial Sequence: Synthetic oligonucleotide
cgcuaugcuggaggauccc

SEQ ID NO: 1408312 - RNA, 19 nt, Artificial Sequence
  Description of Artificial Sequence: Synthetic oligonucleotide
gcauagggguaagguccca

SEQ ID NO: 1408313 - RNA, 19 nt, Artificial Sequence
  Description of Artificial Sequence: Synthetic oligonucleotide
cagggagauuggcucucau

SEQ ID NO: 1408314 - RNA, 19 nt, Artificial Sequence
  Description of Artificial Sequence: Synthetic oligonucleotide
ccgaccgacacagaagguu

SEQ ID NO: 1408315 - RNA, 19 nt, Artificial Sequence
  Description of Artificial Sequence: Synthetic oligonucleotide
ccaacgcaggacugucagu

SEQ ID NO: 1408316 - RNA, 19 nt, Artificial Sequence
  Description of Artificial Sequence: Synthetic oligonucleotide
cguuccaacgcaggacugu

SEQ ID NO: 1408317 - RNA, 19 nt, Artificial Sequence
  Description of Artificial Sequence: Synthetic oligonucleotide
uuuauaggaaacuaaaggg

SEQ ID NO: 1408318 - RNA, 19 nt, Artificial Sequence
  Description of Artificial Sequence: Synthetic oligonucleotide
auuuauaggaaacuaaagg

SEQ ID NO: 1408319 - RNA, 19 nt, Artificial Sequence
  Description of Artificial Sequence: Synthetic oligonucleotide
agaauagagugccaaaucc

SEQ ID NO: 1408320 - RNA, 19 nt, Artificial Sequence
  Description of Artificial Sequence: Synthetic oligonucleotide
aaagagaggagagucaggc

SEQ ID NO: 1408321 - RNA, 19 nt, Artificial Sequence
  Description of Artificial Sequence: Synthetic oligonucleotide
auaucucagauucugacgg

SEQ ID NO: 1408322 - RNA, 19 nt, Artificial Sequence
  Description of Artificial Sequence: Synthetic oligonucleotide
agugcauuuacacagaagu

SEQ ID NO: 1408323 - RNA, 19 nt, Artificial Sequence
  Description of Artificial Sequence: Synthetic oligonucleotide
gauuugauaagcuucacca

SEQ ID NO: 1408324 - RNA, 19 nt, Artificial Sequence
  Description of Artificial Sequence: Synthetic oligonucleotide
agucugugaagcuugaugg

SEQ ID NO: 1408325 - RNA, 19 nt, Artificial Sequence
  Description of Artificial Sequence: Synthetic oligonucleotide
uaaguuauuuacaauggca

SEQ ID NO: 1408326 - RNA, 19 nt, Artificial Sequence
  Description of Artificial Sequence: Synthetic oligonucleotide
uuauaggaaacuaaaggga

SEQ ID NO: 1408327 - RNA, 19 nt, Artificial Sequence
  Description of Artificial Sequence: Synthetic oligonucleotide
ugugccagagaauagagug

SEQ ID NO: 1408328 - RNA, 19 nt, Artificial Sequence
  Description of Artificial Sequence: Synthetic oligonucleotide
cuauuggucaccauggugc

SEQ ID NO: 1408329 - RNA, 19 nt, Artificial Sequence
  Description of Artificial Sequence: Synthetic oligonucleotide
gauaucucagauucugacg

SEQ ID NO: 1408330 - RNA, 19 nt, Artificial Sequence
  Description of Artificial Sequence: Synthetic oligonucleotide
agauuugauaagcuucacc

SEQ ID NO: 1408331 - RNA, 19 nt, Artificial Sequence
  Description of Artificial Sequence: Synthetic oligonucleotide
agauaucucagauucugac

SEQ ID NO: 1408332 - RNA, 19 nt, Artificial Sequence
  Description of Artificial Sequence: Synthetic oligonucleotide
aagauuauacccacauccc

SEQ ID NO: 1408333 - RNA, 19 nt, Artificial Sequence
  Description of Artificial Sequence: Synthetic oligonucleotide
cuucagauaucucagauuc

SEQ ID NO: 1408334 - RNA, 19 nt, Artificial Sequence
  Description of Artificial Sequence: Synthetic oligonucleotide
gguguugucaccuacagug

SEQ ID NO: 1408335 - RNA, 19 nt, Artificial Sequence
  Description of Artificial Sequence: Synthetic oligonucleotide
ugagcuauuggucaccaug

SEQ ID NO: 1408336 - RNA, 19 nt, Artificial Sequence
  Description of Artificial Sequence: Synthetic oligonucleotide
agugugaccaggcagcagg

SEQ ID NO: 1408337 - RNA, 19 nt, Artificial Sequence
  Description of Artificial Sequence: Synthetic oligonucleotide
aaggcuaaguuauuuacaa

SEQ ID NO: 1408338 - RNA, 19 nt, Artificial Sequence
  Description of Artificial Sequence: Synthetic oligonucleotide
aauagagugccaaauccuc

SEQ ID NO: 1408339 - RNA, 19 nt, Artificial Sequence
  Description of Artificial Sequence: Synthetic oligonucleotide
caauagacauauuuauagg

SEQ ID NO: 1408340 - RNA, 19 nt, Artificial Sequence
  Description of Artificial Sequence: Synthetic oligonucleotide
aguguuggaguccagaggu

SEQ ID NO: 1408341 - RNA, 19 nt, Artificial Sequence
  Description of Artificial Sequence: Synthetic oligonucleotide
auuugauaagcuucaccac

SEQ ID NO: 1408342 - RNA, 19 nt, Artificial Sequence
  Description of Artificial Sequence: Synthetic oligonucleotide
augguaagcugcucgaugg

SEQ ID NO: 1408343 - RNA, 19 nt, Artificial Sequence
  Description of Artificial Sequence: Synthetic oligonucleotide
cuugaugguaagcugcucg

SEQ ID NO: 1408344 - RNA, 19 nt, Artificial Sequence
  Description of Artificial Sequence: Synthetic oligonucleotide
aacaguuccccguagccug

SEQ ID NO: 1408345 - RNA, 19 nt, Artificial Sequence
  Description of Artificial Sequence: Synthetic oligonucleotide
gguauggaagauuauaccc

SEQ ID NO: 1408346 - RNA, 19 nt, Artificial Sequence
  Description of Artificial Sequence: Synthetic oligonucleotide
ugcaacauaagcaccagau

SEQ ID NO: 1408347 - RNA, 19 nt, Artificial Sequence
  Description of Artificial Sequence: Synthetic oligonucleotide
uguaauguguuguggaggu

SEQ ID NO: 1408348 - RNA, 19 nt, Artificial Sequence
  Description of Artificial Sequence: Synthetic oligonucleotide
uuaacucuggguauuccug

SEQ ID NO: 1408349 - RNA, 19 nt, Artificial Sequence
  Description of Artificial Sequence: Synthetic oligonucleotide
accagcacaauucgguccc

SEQ ID NO: 1408350 - RNA, 19 nt, Artificial Sequence
  Description of Artificial Sequence: Synthetic oligonucleotide
agcaccagauuugauaagc

SEQ ID NO: 1408351 - RNA, 19 nt, Artificial Sequence
  Description of Artificial Sequence: Synthetic oligonucleotide
uauacccacaucccugagg

SEQ ID NO: 1408352 - RNA, 19 nt, Artificial Sequence
  Description of Artificial Sequence: Synthetic oligonucleotide
cuccugaggauuuugagug

SEQ ID NO: 1408353 - RNA, 19 nt, Artificial Sequence
  Description of Artificial Sequence: Synthetic oligonucleotide
ggcuaaguuauuuacaaug

SEQ ID NO: 1408354 - RNA, 19 nt, Artificial Sequence
  Description of Artificial Sequence: Synthetic oligonucleotide
ugaacuuucaggguccugc

SEQ ID NO: 1408355 - RNA, 19 nt, Artificial Sequence
  Description of Artificial Sequence: Synthetic oligonucleotide
gaugacucuccuccaaggg

SEQ ID NO: 1408356 - RNA, 19 nt, Artificial Sequence
  Description of Artificial Sequence: Synthetic oligonucleotide
aaguuauuuacaauggcaa

SEQ ID NO: 1408357 - RNA, 19 nt, Artificial Sequence
  Description of Artificial Sequence: Synthetic oligonucleotide
uuuugaguggcauugcuuu

SEQ ID NO: 1408358 - RNA, 19 nt, Artificial Sequence
  Description of Artificial Sequence: Synthetic oligonucleotide
aaaacugcccacaggagug

SEQ ID NO: 1408359 - RNA, 19 nt, Artificial Sequence
  Description of Artificial Sequence: Synthetic oligonucleotide
uagacauauuuauaggaaa

SEQ ID NO: 1408360 - RNA, 19 nt, Artificial Sequence
  Description of Artificial Sequence: Synthetic oligonucleotide
uuuggguccuguaaugugu

SEQ ID NO: 1408361 - RNA, 19 nt, Artificial Sequence
  Description of Artificial Sequence: Synthetic oligonucleotide
uauggaagauuauacccac

SEQ ID NO: 1408362 - RNA, 19 nt, Artificial Sequence
  Description of Artificial Sequence: Synthetic oligonucleotide
uggaagauuauacccacau

SEQ ID NO: 1408363 - RNA, 19 nt, Artificial Sequence
  Description of Artificial Sequence: Synthetic oligonucleotide
cuccugacuauuuugggag

SEQ ID NO: 1408364 - RNA, 19 nt, Artificial Sequence
  Description of Artificial Sequence: Synthetic oligonucleotide
uuucacaccggcuuucaug

SEQ ID NO: 1408365 - RNA, 19 nt, Artificial Sequence
  Description of Artificial Sequence: Synthetic oligonucleotide
ugaggcagggcucucagcu

SEQ ID NO: 1408366 - RNA, 19 nt, Artificial Sequence
  Description of Artificial Sequence: Synthetic oligonucleotide
uaagugcaacauaagcacc

SEQ ID NO: 1408367 - RNA, 19 nt, Artificial Sequence
  Description of Artificial Sequence: Synthetic oligonucleotide
auacccacaucccugagga

SEQ ID NO: 1408368 - RNA, 19 nt, Artificial Sequence
  Description of Artificial Sequence: Synthetic oligonucleotide
uguccugaugccuccaucc

SEQ ID NO: 1408369 - RNA, 19 nt, Artificial Sequence
  Description of Artificial Sequence: Synthetic oligonucleotide
ugagucuucacagugugac

SEQ ID NO: 1408370 - RNA, 19 nt, Artificial Sequence
  Description of Artificial Sequence: Synthetic oligonucleotide
agggguggagaagugaugc

SEQ ID NO: 1408371 - RNA, 19 nt, Artificial Sequence
  Description of Artificial Sequence: Synthetic oligonucleotide
gagugguuccaccagauga

SEQ ID NO: 1408372 - RNA, 19 nt, Artificial Sequence
  Description of Artificial Sequence: Synthetic oligonucleotide
uggucuguccaucuggcug

SEQ ID NO: 1408373 - RNA, 19 nt, Artificial Sequence
  Description of Artificial Sequence: Synthetic oligonucleotide
cuugagucugugaagcuug

SEQ ID NO: 1408374 - RNA, 19 nt, Artificial Sequence
  Description of Artificial Sequence: Synthetic oligonucleotide
gagcuauuggucaccaugg

SEQ ID NO: 1408375 - RNA, 19 nt, Artificial Sequence
  Description of Artificial Sequence: Synthetic oligonucleotide
ugaaaacugcccacaggag

SEQ ID NO: 1408376 - RNA, 19 nt, Artificial Sequence
  Description of Artificial Sequence: Synthetic oligonucleotide
accagggaggcucuguugg

SEQ ID NO: 1408377 - RNA, 19 nt, Artificial Sequence
  Description of Artificial Sequence: Synthetic oligonucleotide
guauuccugccagagaugg

SEQ ID NO: 1408378 - RNA, 19 nt, Artificial Sequence
  Description of Artificial Sequence: Synthetic oligonucleotide
gaagcuugaugguaagcug

SEQ ID NO: 1408379 - RNA, 19 nt, Artificial Sequence
  Description of Artificial Sequence: Synthetic oligonucleotide
gauggggucugcuggagcc

SEQ ID NO: 1408380 - RNA, 19 nt, Artificial Sequence
  Description of Artificial Sequence: Synthetic oligonucleotide
agaugacucuccuccaagg

SEQ ID NO: 1408381 - RNA, 19 nt, Artificial Sequence
  Description of Artificial Sequence: Synthetic oligonucleotide
ucgaugguauggaagauua

SEQ ID NO: 1408382 - RNA, 19 nt, Artificial Sequence
  Description of Artificial Sequence: Synthetic oligonucleotide
auauuuauaggaaacuaaa

SEQ ID NO: 1408383 - RNA, 19 nt, Artificial Sequence
  Description of Artificial Sequence: Synthetic oligonucleotide
uuagcggugucccgguagg

SEQ ID NO: 1408384 - RNA, 19 nt, Artificial Sequence
  Description of Artificial Sequence: Synthetic oligonucleotide
cuguuggccauguagggag

SEQ ID NO: 1408385 - RNA, 19 nt, Artificial Sequence
  Description of Artificial Sequence: Synthetic oligonucleotide
gaugguaagcugcucgaug

SEQ ID NO: 1408386 - RNA, 19 nt, Artificial Sequence
  Description of Artificial Sequence: Synthetic oligonucleotide
agggcaggaucccugcucc

SEQ ID NO: 1408387 - RNA, 19 nt, Artificial Sequence
  Description of Artificial Sequence: Synthetic oligonucleotide
aucccugaggaccagggag

SEQ ID NO: 1408388 - RNA, 19 nt, Artificial Sequence
  Description of Artificial Sequence: Synthetic oligonucleotide
agauuauacccacaucccu

SEQ ID NO: 1408389 - RNA, 19 nt, Artificial Sequence
  Description of Artificial Sequence: Synthetic oligonucleotide
ggaaacuaaagggaaagag

SEQ ID NO: 1408390 - RNA, 19 nt, Artificial Sequence
  Description of Artificial Sequence: Synthetic oligonucleotide
auuauacccacaucccuga

SEQ ID NO: 1408391 - RNA, 19 nt, Artificial Sequence
  Description of Artificial Sequence: Synthetic oligonucleotide
auagagugccaaauccucc

SEQ ID NO: 1408392 - RNA, 19 nt, Artificial Sequence
  Description of Artificial Sequence: Synthetic oligonucleotide
uccuguaauguguugugga

SEQ ID NO: 1408393 - RNA, 19 nt, Artificial Sequence
  Description of Artificial Sequence: Synthetic oligonucleotide
gaguggucuguccaucugg

SEQ ID NO: 1408394 - RNA, 19 nt, Artificial Sequence
  Description of Artificial Sequence: Synthetic oligonucleotide
acuugagaagcucucugug

SEQ ID NO: 1408395 - RNA, 19 nt, Artificial Sequence
  Description of Artificial Sequence: Synthetic oligonucleotide
aaagugcauuuacacagaa

SEQ ID NO: 1408396 - RNA, 19 nt, Artificial Sequence
  Description of Artificial Sequence: Synthetic oligonucleotide
ugucggagccuucagggca

SEQ ID NO: 1408397 - RNA, 19 nt, Artificial Sequence
  Description of Artificial Sequence: Synthetic oligonucleotide
gcuaaguuauuuacaaugg

SEQ ID NO: 1408398 - RNA, 19 nt, Artificial Sequence
  Description of Artificial Sequence: Synthetic oligonucleotide
gagaauagagugccaaauc

SEQ ID NO: 1408399 - RNA, 19 nt, Artificial Sequence
  Description of Artificial Sequence: Synthetic oligonucleotide
aggagagucaggcacccag

SEQ ID NO: 1408400 - RNA, 19 nt, Artificial Sequence
  Description of Artificial Sequence: Synthetic oligonucleotide
aguuauuuacaauggcaaa

SEQ ID NO: 1408401 - RNA, 19 nt, Artificial Sequence
  Description of Artificial Sequence: Synthetic oligonucleotide
aggcagggcucucagcucc

SEQ ID NO: 1408402 - RNA, 19 nt, Artificial Sequence
  Description of Artificial Sequence: Synthetic oligonucleotide
aucagcaaguccuuccaug

SEQ ID NO: 1408403 - RNA, 19 nt, Artificial Sequence
  Description of Artificial Sequence: Synthetic oligonucleotide
uggguguugucaccuacag

SEQ ID NO: 1408404 - RNA, 19 nt, Artificial Sequence
  Description of Artificial Sequence: Synthetic oligonucleotide
ucucagauucugacggcag

SEQ ID NO: 1408405 - RNA, 19 nt, Artificial Sequence
  Description of Artificial Sequence: Synthetic oligonucleotide
ugaugauccggucacccuc

SEQ ID NO: 1408406 - RNA, 19 nt, Artificial Sequence
  Description of Artificial Sequence: Synthetic oligonucleotide
uguuggaguccagaggucc

SEQ ID NO: 1408407 - RNA, 19 nt, Artificial Sequence
  Description of Artificial Sequence: Synthetic oligonucleotide
ggugucggagccuucaggg

SEQ ID NO: 1408408 - RNA, 19 nt, Artificial Sequence
  Description of Artificial Sequence: Synthetic oligonucleotide
gauccggucacccucuuuc

SEQ ID NO: 1408409 - RNA, 19 nt, Artificial Sequence
  Description of Artificial Sequence: Synthetic oligonucleotide
aagugcaacauaagcacca

SEQ ID NO: 1408410 - RNA, 19 nt, Artificial Sequence
  Description of Artificial Sequence: Synthetic oligonucleotide
uacuccugaggauuuugag

SEQ ID NO: 1408411 - RNA, 19 nt, Artificial Sequence
  Description of Artificial Sequence: Synthetic oligonucleotide
agagagaguggucugucca

SEQ ID NO: 1408412 - RNA, 19 nt, Artificial Sequence
  Description of Artificial Sequence: Synthetic oligonucleotide
aauucgguccccacuaacu

SEQ ID NO: 1408413 - RNA, 19 nt, Artificial Sequence
  Description of Artificial Sequence: Synthetic oligonucleotide
cuaaagggaaagagaggag

SEQ ID NO: 1408414 - RNA, 19 nt, Artificial Sequence
  Description of Artificial Sequence: Synthetic oligonucleotide
uguccuugagucugugaag

SEQ ID NO: 1408415 - RNA, 19 nt, Artificial Sequence
  Description of Artificial Sequence: Synthetic oligonucleotide
ggaaucaugggguuaacuc

SEQ ID NO: 1408416 - RNA, 19 nt, Artificial Sequence
  Description of Artificial Sequence: Synthetic oligonucleotide
agugguuccaccagaugac

SEQ ID NO: 1408417 - RNA, 19 nt, Artificial Sequence
  Description of Artificial Sequence: Synthetic oligonucleotide
agggacuuagcgguguccc

SEQ ID NO: 1408418 - RNA, 19 nt, Artificial Sequence
  Description of Artificial Sequence: Synthetic oligonucleotide
cugcuccugacuauuuugg

SEQ ID NO: 1408419 - RNA, 19 nt, Artificial Sequence
  Description of Artificial Sequence: Synthetic oligonucleotide
uccaggugugagcuauugg

SEQ ID NO: 1408420 - RNA, 19 nt, Artificial Sequence
  Description of Artificial Sequence: Synthetic oligonucleotide
ugugugaaaacugcccaca

SEQ ID NO: 1408421 - RNA, 19 nt, Artificial Sequence
  Description of Artificial Sequence: Synthetic oligonucleotide
ugcuccugacuauuuuggg

SEQ ID NO: 1408422 - RNA, 19 nt, Artificial Sequence
  Description of Artificial Sequence: Synthetic oligonucleotide
cuguaauguguuguggagg

SEQ ID NO: 1408423 - RNA, 19 nt, Artificial Sequence
  Description of Artificial Sequence: Synthetic oligonucleotide
cuuucauggcugcaccucc

SEQ ID NO: 1408424 - RNA, 19 nt, Artificial Sequence
  Description of Artificial Sequence: Synthetic oligonucleotide
aggugugagcuauugguca

SEQ ID NO: 1408425 - RNA, 19 nt, Artificial Sequence
  Description of Artificial Sequence: Synthetic oligonucleotide
agucuucacagugugacca

SEQ ID NO: 1408426 - RNA, 19 nt, Artificial Sequence
  Description of Artificial Sequence: Synthetic oligonucleotide
auagacauauuuauaggaa

SEQ ID NO: 1408427 - RNA, 19 nt, Artificial Sequence
  Description of Artificial Sequence: Synthetic oligonucleotide
uucacagugugaccaggca

SEQ ID NO: 1408428 - RNA, 19 nt, Artificial Sequence
  Description of Artificial Sequence: Synthetic oligonucleotide
aaacaguuccccguagccu

SEQ ID NO: 1408429 - RNA, 19 nt, Artificial Sequence
  Description of Artificial Sequence: Synthetic oligonucleotide
guggcacugucuuccaugg

SEQ ID NO: 1408430 - RNA, 19 nt, Artificial Sequence
  Description of Artificial Sequence: Synthetic oligonucleotide
auucugacggcaggugugc

SEQ ID NO: 1408431 - RNA, 19 nt, Artificial Sequence
  Description of Artificial Sequence: Synthetic oligonucleotide
ggguaagugcaacauaagc

SEQ ID NO: 1408432 - RNA, 19 nt, Artificial Sequence
  Description of Artificial Sequence: Synthetic oligonucleotide
ucaugggguuaacucuggg

SEQ ID NO: 1408433 - RNA, 19 nt, Artificial Sequence
  Description of Artificial Sequence: Synthetic oligonucleotide
gaaaacugcccacaggagu

SEQ ID NO: 1408434 - RNA, 19 nt, Artificial Sequence
  Description of Artificial Sequence: Synthetic oligonucleotide
agauggggucugcuggagc

SEQ ID NO: 1408435 - RNA, 19 nt, Artificial Sequence
  Description of Artificial Sequence: Synthetic oligonucleotide
gaggguaagugcaacauaa

SEQ ID NO: 1408436 - RNA, 19 nt, Artificial Sequence
  Description of Artificial Sequence: Synthetic oligonucleotide
gaugguauggaagauuaua

SEQ ID NO: 1408437 - RNA, 19 nt, Artificial Sequence
  Description of Artificial Sequence: Synthetic oligonucleotide
agcacaauucgguccccac

SEQ ID NO: 1408438 - RNA, 19 nt, Artificial Sequence
  Description of Artificial Sequence: Synthetic oligonucleotide
ucgguccccacuaacugug

SEQ ID NO: 1408439 - RNA, 19 nt, Artificial Sequence
  Description of Artificial Sequence: Synthetic oligonucleotide
ugcugaugacagaaggggu

SEQ ID NO: 1408440 - RNA, 19 nt, Artificial Sequence
  Description of Artificial Sequence: Synthetic oligonucleotide
ugucccgguaggcucagug

SEQ ID NO: 1408441 - RNA, 19 nt, Artificial Sequence
  Description of Artificial Sequence: Synthetic oligonucleotide
uugucaccuacagugggag

SEQ ID NO: 1408442 - RNA, 19 nt, Artificial Sequence
  Description of Artificial Sequence: Synthetic oligonucleotide
cucagauucugacggcagg

SEQ ID NO: 1408443 - RNA, 19 nt, Artificial Sequence
  Description of Artificial Sequence: Synthetic oligonucleotide
uguguuguggagguggcaa

SEQ ID NO: 1408444 - RNA, 19 nt, Artificial Sequence
  Description of Artificial Sequence: Synthetic oligonucleotide
ugccucugugugaaaacug

SEQ ID NO: 1408445 - RNA, 19 nt, Artificial Sequence
  Description of Artificial Sequence: Synthetic oligonucleotide
gauucugacggcaggugug

SEQ ID NO: 1408446 - RNA, 19 nt, Artificial Sequence
  Description of Artificial Sequence: Synthetic oligonucleotide
agagguuuggguccuguaa

SEQ ID NO: 1408447 - RNA, 19 nt, Artificial Sequence
  Description of Artificial Sequence: Synthetic oligonucleotide
gcugugagggacuuagcgg

SEQ ID NO: 1408448 - RNA, 19 nt, Artificial Sequence
  Description of Artificial Sequence: Synthetic oligonucleotide
auaagcuucaccaccucca

SEQ ID NO: 1408449 - RNA, 19 nt, Artificial Sequence
  Description of Artificial Sequence: Synthetic oligonucleotide
acuaacugugaagccaaag

SEQ ID NO: 1408450 - RNA, 19 nt, Artificial Sequence
  Description of Artificial Sequence: Synthetic oligonucleotide
guuuggguccuguaaugug

SEQ ID NO: 1408451 - RNA, 19 nt, Artificial Sequence
  Description of Artificial Sequence: Synthetic oligonucleotide
uuuacacagaagucuccuc

SEQ ID NO: 1408452 - RNA, 19 nt, Artificial Sequence
  Description of Artificial Sequence: Synthetic oligonucleotide
uucagauaucucagauucu

SEQ ID NO: 1408453 - RNA, 19 nt, Artificial Sequence
  Description of Artificial Sequence: Synthetic oligonucleotide
aagugcauuuacacagaag

SEQ ID NO: 1408454 - RNA, 19 nt, Artificial Sequence
  Description of Artificial Sequence: Synthetic oligonucleotide
acaggagugguuccaccag

SEQ ID NO: 1408455 - RNA, 19 nt, Artificial Sequence
  Description of Artificial Sequence: Synthetic oligonucleotide
ucugugagccagcuccaug

SEQ ID NO: 1408456 - RNA, 19 nt, Artificial Sequence
  Description of Artificial Sequence: Synthetic oligonucleotide
gacugcaccagcacaauuc

SEQ ID NO: 1408457 - RNA, 19 nt, Artificial Sequence
  Description of Artificial Sequence: Synthetic oligonucleotide
ugaugccuccauccagggg

SEQ ID NO: 1408458 - RNA, 19 nt, Artificial Sequence
  Description of Artificial Sequence: Synthetic oligonucleotide
uguuggccauguagggagg

SEQ ID NO: 1408459 - RNA, 19 nt, Artificial Sequence
  Description of Artificial Sequence: Synthetic oligonucleotide
gaucaggugccgcaaguuc

SEQ ID NO: 1408460 - RNA, 19 nt, Artificial Sequence
  Description of Artificial Sequence: Synthetic oligonucleotide
cuuagcggugucccgguag

SEQ ID NO: 1408461 - RNA, 19 nt, Artificial Sequence
  Description of Artificial Sequence: Synthetic oligonucleotide
guccuugagucugugaagc

SEQ ID NO: 1408462 - RNA, 19 nt, Artificial Sequence
  Description of Artificial Sequence: Synthetic oligonucleotide
uuauacccacaucccugag

SEQ ID NO: 1408463 - RNA, 19 nt, Artificial Sequence
  Description of Artificial Sequence: Synthetic oligonucleotide
uagagggccugugagggcc

SEQ ID NO: 1408464 - RNA, 19 nt, Artificial Sequence
  Description of Artificial Sequence: Synthetic oligonucleotide
ggagaugagcccaggaggg

SEQ ID NO: 1408465 - RNA, 19 nt, Artificial Sequence
  Description of Artificial Sequence: Synthetic oligonucleotide
gagucaggcacccagcugu

SEQ ID NO: 1408466 - RNA, 19 nt, Artificial Sequence
  Description of Artificial Sequence: Synthetic oligonucleotide
ucugugaagcuugauggua

SEQ ID NO: 1408467 - RNA, 19 nt, Artificial Sequence
  Description of Artificial Sequence: Synthetic oligonucleotide
agguuuggguccuguaaug

SEQ ID NO: 1408468 - RNA, 19 nt, Artificial Sequence
  Description of Artificial Sequence: Synthetic oligonucleotide
uuggucaccauggugccgu

SEQ ID NO: 1408469 - RNA, 19 nt, Artificial Sequence
  Description of Artificial Sequence: Synthetic oligonucleotide
acaccgauggaggaaggag

SEQ ID NO: 1408470 - RNA, 19 nt, Artificial Sequence
  Description of Artificial Sequence: Synthetic oligonucleotide
ugggagcuugcccugggga

SEQ ID NO: 1408471 - RNA, 19 nt, Artificial Sequence
  Description of Artificial Sequence: Synthetic oligonucleotide
auguagggaggcugugggg

SEQ ID NO: 1408472 - RNA, 19 nt, Artificial Sequence
  Description of Artificial Sequence: Synthetic oligonucleotide
cugugugaaaacugcccac

SEQ ID NO: 1408473 - RNA, 19 nt, Artificial Sequence
  Description of Artificial Sequence: Synthetic oligonucleotide
cagaugacucuccuccaag

SEQ ID NO: 1408474 - RNA, 19 nt, Artificial Sequence
  Description of Artificial Sequence: Synthetic oligonucleotide
cuggguauuccugccagag

SEQ ID NO: 1408475 - RNA, 19 nt, Artificial Sequence
  Description of Artificial Sequence: Synthetic oligonucleotide
ugaggauuuugaguggcau

SEQ ID NO: 1408476 - RNA, 19 nt, Artificial Sequence
  Description of Artificial Sequence: Synthetic oligonucleotide
ugaccaggcagcaggccac

SEQ ID NO: 1408477 - RNA, 19 nt, Artificial Sequence
  Description of Artificial Sequence: Synthetic oligonucleotide
caggccuaggaagaagggg

SEQ ID NO: 1408478 - RNA, 19 nt, Artificial Sequence
  Description of Artificial Sequence: Synthetic oligonucleotide
ugugagcuauuggucacca

SEQ ID NO: 1408479 - RNA, 19 nt, Artificial Sequence
  Description of Artificial Sequence: Synthetic oligonucleotide
ucugacggcaggugugcca

SEQ ID NO: 1408480 - RNA, 19 nt, Artificial Sequence
  Description of Artificial Sequence: Synthetic oligonucleotide
gauuuugaguggcauugcu

SEQ ID NO: 1408481 - RNA, 19 nt, Artificial Sequence
  Description of Artificial Sequence: Synthetic oligonucleotide
gaauagagugccaaauccu

SEQ ID NO: 1408482 - RNA, 19 nt, Artificial Sequence
  Description of Artificial Sequence: Synthetic oligonucleotide
agugcaacauaagcaccag

SEQ ID NO: 1408483 - RNA, 19 nt, Artificial Sequence
  Description of Artificial Sequence: Synthetic oligonucleotide
ggugaugcagcugugucug

SEQ ID NO: 1408484 - RNA, 19 nt, Artificial Sequence
  Description of Artificial Sequence: Synthetic oligonucleotide
uggguauuccugccagaga

SEQ ID NO: 1408485 - RNA, 19 nt, Artificial Sequence
  Description of Artificial Sequence: Synthetic oligonucleotide
ugggugugaggucauccuc

SEQ ID NO: 1408486 - RNA, 19 nt, Artificial Sequence
  Description of Artificial Sequence: Synthetic oligonucleotide
aaagccaugcugguccuuu

SEQ ID NO: 1408487 - RNA, 19 nt, Artificial Sequence
  Description of Artificial Sequence: Synthetic oligonucleotide
ccguucacuuugaugaucc

SEQ ID NO: 1408488 - RNA, 19 nt, Artificial Sequence
  Description of Artificial Sequence: Synthetic oligonucleotide
gcuauuggucaccauggug

SEQ ID NO: 1408489 - RNA, 19 nt, Artificial Sequence
  Description of Artificial Sequence: Synthetic oligonucleotide
guuaacucuggguauuccu

SEQ ID NO: 1408490 - RNA, 19 nt, Artificial Sequence
  Description of Artificial Sequence: Synthetic oligonucleotide
uggaaucaugggguuaacu

SEQ ID NO: 1408491 - RNA, 19 nt, Artificial Sequence
  Description of Artificial Sequence: Synthetic oligonucleotide
ccuguaauguguuguggag

SEQ ID NO: 1408492 - RNA, 19 nt, Artificial Sequence
  Description of Artificial Sequence: Synthetic oligonucleotide
agugggagcuugcccuggg

SEQ ID NO: 1408493 - RNA, 19 nt, Artificial Sequence
  Description of Artificial Sequence: Synthetic oligonucleotide
gagaagugaugcugaugac

SEQ ID NO: 1408494 - RNA, 19 nt, Artificial Sequence
  Description of Artificial Sequence: Synthetic oligonucleotide
cuggugaugcagcuguguc

SEQ ID NO: 1408495 - RNA, 19 nt, Artificial Sequence
  Description of Artificial Sequence: Synthetic oligonucleotide
accauggugccguucacuu

SEQ ID NO: 1408496 - RNA, 19 nt, Artificial Sequence
  Description of Artificial Sequence: Synthetic oligonucleotide
ugguuccaccagaugacuc

SEQ ID NO: 1408497 - RNA, 19 nt, Artificial Sequence
  Description of Artificial Sequence: Synthetic oligonucleotide
ugguaagcugcucgauggu

SEQ ID NO: 1408498 - RNA, 19 nt, Artificial Sequence
  Description of Artificial Sequence: Synthetic oligonucleotide
cauacuccugaggauuuug

SEQ ID NO: 1408499 - RNA, 19 nt, Artificial Sequence
  Description of Artificial Sequence: Synthetic oligonucleotide
uccugacuauuuugggagu

SEQ ID NO: 1408500 - RNA, 19 nt, Artificial Sequence
  Description of Artificial Sequence: Synthetic oligonucleotide
ucccgguaggcucaguguu

SEQ ID NO: 1408501 - RNA, 19 nt, Artificial Sequence
  Description of Artificial Sequence: Synthetic oligonucleotide
ggugccguucacuuugaug

SEQ ID NO: 1408502 - RNA, 19 nt, Artificial Sequence
  Description of Artificial Sequence: Synthetic oligonucleotide
uccaugaguagagggccug

SEQ ID NO: 1408503 - RNA, 19 nt, Artificial Sequence
  Description of Artificial Sequence: Synthetic oligonucleotide
aucaggugccgcaaguucu

SEQ ID NO: 1408504 - RNA, 19 nt, Artificial Sequence
  Description of Artificial Sequence: Synthetic oligonucleotide
caauucgguccccacuaac

SEQ ID NO: 1408505 - RNA, 19 nt, Artificial Sequence
  Description of Artificial Sequence: Synthetic oligonucleotide
gacuugagaagcucucugu

SEQ ID NO: 1408506 - RNA, 19 nt, Artificial Sequence
  Description of Artificial Sequence: Synthetic oligonucleotide
aggugugccagagaauaga

SEQ ID NO: 1408507 - RNA, 19 nt, Artificial Sequence
  Description of Artificial Sequence: Synthetic oligonucleotide
aggaaacuaaagggaaaga

SEQ ID NO: 1408508 - RNA, 19 nt, Artificial Sequence
  Description of Artificial Sequence: Synthetic oligonucleotide
gguaggcucaguguuggag

SEQ ID NO: 1408509 - RNA, 19 nt, Artificial Sequence
  Description of Artificial Sequence: Synthetic oligonucleotide
agggacuugagaagcucuc

SEQ ID NO: 1408510 - RNA, 19 nt, Artificial Sequence
  Description of Artificial Sequence: Synthetic oligonucleotide
ucuuucacaccggcuuuca

SEQ ID NO: 1408511 - RNA, 19 nt, Artificial Sequence
  Description of Artificial Sequence: Synthetic oligonucleotide
ucuggguauuccugccaga

SEQ ID NO: 1408512 - RNA, 19 nt, Artificial Sequence
  Description of Artificial Sequence: Synthetic oligonucleotide
caaguccuuccaugaguag

SEQ ID NO: 1408513 - RNA, 19 nt, Artificial Sequence
  Description of Artificial Sequence: Synthetic oligonucleotide
agcuauuggucaccauggu

SEQ ID NO: 1408514 - RNA, 19 nt, Artificial Sequence
  Description of Artificial Sequence: Synthetic oligonucleotide
uggccauguagggaggcug

SEQ ID NO: 1408515 - RNA, 19 nt, Artificial Sequence
  Description of Artificial Sequence: Synthetic oligonucleotide
gguccuguaauguguugug

SEQ ID NO: 1408516 - RNA, 19 nt, Artificial Sequence
  Description of Artificial Sequence: Synthetic oligonucleotide
uuugaacuuucaggguccu

SEQ ID NO: 1408517 - RNA, 19 nt, Artificial Sequence
  Description of Artificial Sequence: Synthetic oligonucleotide
aggcuaaguuauuuacaau

SEQ ID NO: 1408518 - RNA, 19 nt, Artificial Sequence
  Description of Artificial Sequence: Synthetic oligonucleotide
cugugaagcuugaugguaa

SEQ ID NO: 1408519 - RNA, 19 nt, Artificial Sequence
  Description of Artificial Sequence: Synthetic oligonucleotide
cugugagggacuuagcggu

SEQ ID NO: 1408520 - RNA, 19 nt, Artificial Sequence
  Description of Artificial Sequence: Synthetic oligonucleotide
cugcaccagcacaauucgg

SEQ ID NO: 1408521 - RNA, 19 nt, Artificial Sequence
  Description of Artificial Sequence: Synthetic oligonucleotide
gaccagggaggcucuguug

SEQ ID NO: 1408522 - RNA, 19 nt, Artificial Sequence
  Description of Artificial Sequence: Synthetic oligonucleotide
uggcacugucuuccauggg

SEQ ID NO: 1408523 - RNA, 19 nt, Artificial Sequence
  Description of Artificial Sequence: Synthetic oligonucleotide
agcugucacaggccuagga

SEQ ID NO: 1408524 - RNA, 19 nt, Artificial Sequence
  Description of Artificial Sequence: Synthetic oligonucleotide
cugacggcaggugugccag

SEQ ID NO: 1408525 - RNA, 19 nt, Artificial Sequence
  Description of Artificial Sequence: Synthetic oligonucleotide
acucuggguauuccugcca

SEQ ID NO: 1408526 - RNA, 19 nt, Artificial Sequence
  Description of Artificial Sequence: Synthetic oligonucleotide
uuggguccuguaauguguu

SEQ ID NO: 1408527 - RNA, 19 nt, Artificial Sequence
  Description of Artificial Sequence: Synthetic oligonucleotide
cacaggagugguuccacca

SEQ ID NO: 1408528 - RNA, 19 nt, Artificial Sequence
  Description of Artificial Sequence: Synthetic oligonucleotide
ccagauuugauaagcuuca

SEQ ID NO: 1408529 - RNA, 19 nt, Artificial Sequence
  Description of Artificial Sequence: Synthetic oligonucleotide
ggugugccagagaauagag

SEQ ID NO: 1408530 - RNA, 19 nt, Artificial Sequence
  Description of Artificial Sequence: Synthetic oligonucleotide
ugugcuccgccuuccacuu

SEQ ID NO: 1408531 - RNA, 19 nt, Artificial Sequence
  Description of Artificial Sequence: Synthetic oligonucleotide
uccccguagccugugcucc

SEQ ID NO: 1408532 - RNA, 19 nt, Artificial Sequence
  Description of Artificial Sequence: Synthetic oligonucleotide
caggugugccagagaauag

SEQ ID NO: 1408533 - RNA, 19 nt, Artificial Sequence
  Description of Artificial Sequence: Synthetic oligonucleotide
ggacuuagcggugucccgg

SEQ ID NO: 1408534 - RNA, 19 nt, Artificial Sequence
  Description of Artificial Sequence: Synthetic oligonucleotide
auuggucaccauggugccg

SEQ ID NO: 1408535 - RNA, 19 nt, Artificial Sequence
  Description of Artificial Sequence: Synthetic oligonucleotide
auuuugaguggcauugcuu

SEQ ID NO: 1408536 - RNA, 19 nt, Artificial Sequence
  Description of Artificial Sequence: Synthetic oligonucleotide
cacaauucgguccccacua

SEQ ID NO: 1408537 - RNA, 19 nt, Artificial Sequence
  Description of Artificial Sequence: Synthetic oligonucleotide
ggaagauuauacccacauc

SEQ ID NO: 1408538 - RNA, 19 nt, Artificial Sequence
  Description of Artificial Sequence: Synthetic oligonucleotide
guaggcucaguguuggagu

SEQ ID NO: 1408539 - RNA, 19 nt, Artificial Sequence
  Description of Artificial Sequence: Synthetic oligonucleotide
cuuugaugauccggucacc

SEQ ID NO: 1408540 - RNA, 19 nt, Artificial Sequence
  Description of Artificial Sequence: Synthetic oligonucleotide
ggugugaggucauccucag

SEQ ID NO: 1408541 - RNA, 19 nt, Artificial Sequence
  Description of Artificial Sequence: Synthetic oligonucleotide
gacggcaggugugccagag

SEQ ID NO: 1408542 - RNA, 19 nt, Artificial Sequence
  Description of Artificial Sequence: Synthetic oligonucleotide
aggguaagugcaacauaag

SEQ ID NO: 1408543 - RNA, 19 nt, Artificial Sequence
  Description of Artificial Sequence: Synthetic oligonucleotide
agucagaggccagggcuuc

SEQ ID NO: 1408544 - RNA, 19 nt, Artificial Sequence
  Description of Artificial Sequence: Synthetic oligonucleotide
ugaggaccagggaggcucu

SEQ ID NO: 1408545 - RNA, 19 nt, Artificial Sequence
  Description of Artificial Sequence: Synthetic oligonucleotide
ggugugagcuauuggucac

SEQ ID NO: 1408546 - RNA, 19 nt, Artificial Sequence
  Description of Artificial Sequence: Synthetic oligonucleotide
ugccgcaaguucuccacau

SEQ ID NO: 1408547 - RNA, 19 nt, Artificial Sequence
  Description of Artificial Sequence: Synthetic oligonucleotide
uggguccuguaauguguug

SEQ ID NO: 1408548 - RNA, 19 nt, Artificial Sequence
  Description of Artificial Sequence: Synthetic oligonucleotide
ugagggacuuagcgguguc

SEQ ID NO: 1408549 - RNA, 19 nt, Artificial Sequence
  Description of Artificial Sequence: Synthetic oligonucleotide
agguccugcuggcaugcug

SEQ ID NO: 1408550 - RNA, 19 nt, Artificial Sequence
  Description of Artificial Sequence: Synthetic oligonucleotide
gugucggagccuucagggc

SEQ ID NO: 1408551 - RNA, 19 nt, Artificial Sequence
  Description of Artificial Sequence: Synthetic oligonucleotide
gagcuugcccuggggaucc

SEQ ID NO: 1408552 - RNA, 19 nt, Artificial Sequence
  Description of Artificial Sequence: Synthetic oligonucleotide
cacccucuuucacaccggc

SEQ ID NO: 1408553 - RNA, 19 nt, Artificial Sequence
  Description of Artificial Sequence: Synthetic oligonucleotide
auacuccugaggauuuuga

SEQ ID NO: 1408554 - RNA, 19 nt, Artificial Sequence
  Description of Artificial Sequence: Synthetic oligonucleotide
caugaguagagggccugug

SEQ ID NO: 1408555 - RNA, 19 nt, Artificial Sequence
  Description of Artificial Sequence: Synthetic oligonucleotide
agagacaccgauggaggaa

SEQ ID NO: 1408556 - RNA, 19 nt, Artificial Sequence
  Description of Artificial Sequence: Synthetic oligonucleotide
caagggacuugagaagcuc

SEQ ID NO: 1408557 - RNA, 19 nt, Artificial Sequence
  Description of Artificial Sequence: Synthetic oligonucleotide
acaauucgguccccacuaa

SEQ ID NO: 1408558 - RNA, 19 nt, Artificial Sequence
  Description of Artificial Sequence: Synthetic oligonucleotide
gagggacuuagcggugucc

SEQ ID NO: 1408559 - RNA, 19 nt, Artificial Sequence
  Description of Artificial Sequence: Synthetic oligonucleotide
gucaccuacagugggagcu

SEQ ID NO: 1408560 - RNA, 19 nt, Artificial Sequence
  Description of Artificial Sequence: Synthetic oligonucleotide
gcuccugacuauuuuggga

SEQ ID NO: 1408561 - RNA, 19 nt, Artificial Sequence
  Description of Artificial Sequence: Synthetic oligonucleotide
cagauucugacggcaggug

SEQ ID NO: 1408562 - RNA, 19 nt, Artificial Sequence
  Description of Artificial Sequence: Synthetic oligonucleotide
ggguauuccugccagagau

SEQ ID NO: 1408563 - RNA, 19 nt, Artificial Sequence
  Description of Artificial Sequence: Synthetic oligonucleotide
guagagggccugugagggc

SEQ ID NO: 1408564 - RNA, 19 nt, Artificial Sequence
  Description of Artificial Sequence: Synthetic oligonucleotide
gccucugugugaaaacugc

SEQ ID NO: 1408565 - RNA, 19 nt, Artificial Sequence
  Description of Artificial Sequence: Synthetic oligonucleotide
gugggagcuugcccugggg

SEQ ID NO: 1408566 - RNA, 19 nt, Artificial Sequence
  Description of Artificial Sequence: Synthetic oligonucleotide
cagauuugauaagcuucac

SEQ ID NO: 1408567 - RNA, 19 nt, Artificial Sequence
  Description of Artificial Sequence: Synthetic oligonucleotide
uugaacuuucaggguccug

SEQ ID NO: 1408568 - RNA, 19 nt, Artificial Sequence
  Description of Artificial Sequence: Synthetic oligonucleotide
gggugucggagccuucagg

SEQ ID NO: 1408569 - RNA, 19 nt, Artificial Sequence
  Description of Artificial Sequence: Synthetic oligonucleotide
uccugccagagaugggguc

SEQ ID NO: 1408570 - RNA, 19 nt, Artificial Sequence
  Description of Artificial Sequence: Synthetic oligonucleotide
ggucccuuguccugaugcc

SEQ ID NO: 1408571 - RNA, 19 nt, Artificial Sequence
  Description of Artificial Sequence: Synthetic oligonucleotide
cuggguguugucaccuaca

SEQ ID NO: 1408572 - RNA, 19 nt, Artificial Sequence
  Description of Artificial Sequence: Synthetic oligonucleotide
guuggccauguagggaggc

SEQ ID NO: 1408573 - RNA, 19 nt, Artificial Sequence
  Description of Artificial Sequence: Synthetic oligonucleotide
gggacuuagcggugucccg

SEQ ID NO: 1408574 - RNA, 19 nt, Artificial Sequence
  Description of Artificial Sequence: Synthetic oligonucleotide
caugggguuaacucugggu

SEQ ID NO: 1408575 - RNA, 19 nt, Artificial Sequence
  Description of Artificial Sequence: Synthetic oligonucleotide
guaauguguuguggaggug

SEQ ID NO: 1408576 - RNA, 19 nt, Artificial Sequence
  Description of Artificial Sequence: Synthetic oligonucleotide
accgauggaggaaggagau

SEQ ID NO: 1408577 - RNA, 19 nt, Artificial Sequence
  Description of Artificial Sequence: Synthetic oligonucleotide
cugaggauuuugaguggca

SEQ ID NO: 1408578 - RNA, 19 nt, Artificial Sequence
  Description of Artificial Sequence: Synthetic oligonucleotide
agccugugcuccgccuucc

SEQ ID NO: 1408579 - RNA, 19 nt, Artificial Sequence
  Description of Artificial Sequence: Synthetic oligonucleotide
ccugaggauuuugaguggc

SEQ ID NO: 1408580 - RNA, 19 nt, Artificial Sequence
  Description of Artificial Sequence: Synthetic oligonucleotide
guccuuccaugaguagagg

SEQ ID NO: 1408581 - RNA, 19 nt, Artificial Sequence
  Description of Artificial Sequence: Synthetic oligonucleotide
aggaucccugcuccugacu

SEQ ID NO: 1408582 - RNA, 19 nt, Artificial Sequence
  Description of Artificial Sequence: Synthetic oligonucleotide
agcugcucgaugguaugga

SEQ ID NO: 1408583 - RNA, 19 nt, Artificial Sequence
  Description of Artificial Sequence: Synthetic oligonucleotide
agacugcaccagcacaauu

SEQ ID NO: 1408584 - RNA, 19 nt, Artificial Sequence
  Description of Artificial Sequence: Synthetic oligonucleotide
gaugagcccaggaggguaa

SEQ ID NO: 1408585 - RNA, 19 nt, Artificial Sequence
  Description of Artificial Sequence: Synthetic oligonucleotide
agaugagcccaggagggua

SEQ ID NO: 1408586 - RNA, 19 nt, Artificial Sequence
  Description of Artificial Sequence: Synthetic oligonucleotide
gacaccgauggaggaagga

SEQ ID NO: 1408587 - RNA, 19 nt, Artificial Sequence
  Description of Artificial Sequence: Synthetic oligonucleotide
gguggaaucaugggguuaa

SEQ ID NO: 1408588 - RNA, 19 nt, Artificial Sequence
  Description of Artificial Sequence: Synthetic oligonucleotide
cuccaggugugagcuauug

SEQ ID NO: 1408589 - RNA, 19 nt, Artificial Sequence
  Description of Artificial Sequence: Synthetic oligonucleotide
cucaguguuggaguccaga

SEQ ID NO: 1408590 - RNA, 19 nt, Artificial Sequence
  Description of Artificial Sequence: Synthetic oligonucleotide
aggugccgcaaguucucca

SEQ ID NO: 1408591 - RNA, 19 nt, Artificial Sequence
  Description of Artificial Sequence: Synthetic oligonucleotide
gaggcagggcucucagcuc

SEQ ID NO: 1408592 - RNA, 19 nt, Artificial Sequence
  Description of Artificial Sequence: Synthetic oligonucleotide
ggauuuugaguggcauugc

SEQ ID NO: 1408593 - RNA, 19 nt, Artificial Sequence
  Description of Artificial Sequence: Synthetic oligonucleotide
cauguccuugagucuguga

SEQ ID NO: 1408594 - RNA, 19 nt, Artificial Sequence
  Description of Artificial Sequence: Synthetic oligonucleotide
auggaagauuauacccaca

SEQ ID NO: 1408595 - RNA, 19 nt, Artificial Sequence
  Description of Artificial Sequence: Synthetic oligonucleotide
gaggauuuugaguggcauu

SEQ ID NO: 1408596 - RNA, 19 nt, Artificial Sequence
  Description of Artificial Sequence: Synthetic oligonucleotide
ggagugguuccaccagaug

SEQ ID NO: 1408597 - RNA, 19 nt, Artificial Sequence
  Description of Artificial Sequence: Synthetic oligonucleotide
gaagucuccuccucagguu

SEQ ID NO: 1408598 - RNA, 19 nt, Artificial Sequence
  Description of Artificial Sequence: Synthetic oligonucleotide
agcggugucccgguaggcu

SEQ ID NO: 1408599 - RNA, 19 nt, Artificial Sequence
  Description of Artificial Sequence: Synthetic oligonucleotide
gagagaguggucuguccau

SEQ ID NO: 1408600 - RNA, 19 nt, Artificial Sequence
  Description of Artificial Sequence: Synthetic oligonucleotide
cugagucuucacaguguga

SEQ ID NO: 1408601 - RNA, 19 nt, Artificial Sequence
  Description of Artificial Sequence: Synthetic oligonucleotide
gaugacagaaggggugggu

SEQ ID NO: 1408602 - RNA, 19 nt, Artificial Sequence
  Description of Artificial Sequence: Synthetic oligonucleotide
agacaccgauggaggaagg

SEQ ID NO: 1408603 - RNA, 19 nt, Artificial Sequence
  Description of Artificial Sequence: Synthetic oligonucleotide
caggagugguuccaccaga

SEQ ID NO: 1408604 - RNA, 19 nt, Artificial Sequence
  Description of Artificial Sequence: Synthetic oligonucleotide
gaugauccggucacccucu

SEQ ID NO: 1408605 - RNA, 19 nt, Artificial Sequence
  Description of Artificial Sequence: Synthetic oligonucleotide
ugagucugugaagcuugau

SEQ ID NO: 1408606 - RNA, 19 nt, Artificial Sequence
  Description of Artificial Sequence: Synthetic oligonucleotide
ugauccggucacccucuuu

SEQ ID NO: 1408607 - RNA, 19 nt, Artificial Sequence
  Description of Artificial Sequence: Synthetic oligonucleotide
gguggcaaggguggaggag

SEQ ID NO: 1408608 - RNA, 19 nt, Artificial Sequence
  Description of Artificial Sequence: Synthetic oligonucleotide
ggucugcuggagcccagag

SEQ ID NO: 1408609 - RNA, 19 nt, Artificial Sequence
  Description of Artificial Sequence: Synthetic oligonucleotide
ugguggaaucaugggguua

SEQ ID NO: 1408610 - RNA, 19 nt, Artificial Sequence
  Description of Artificial Sequence: Synthetic oligonucleotide
ggagagucaggcacccagc

SEQ ID NO: 1408611 - RNA, 19 nt, Artificial Sequence
  Description of Artificial Sequence: Synthetic oligonucleotide
guaagcugcucgaugguau

SEQ ID NO: 1408612 - RNA, 19 nt, Artificial Sequence
  Description of Artificial Sequence: Synthetic oligonucleotide
aggagugguuccaccagau

SEQ ID NO: 1408613 - RNA, 19 nt, Artificial Sequence
  Description of Artificial Sequence: Synthetic oligonucleotide
ucaccuacagugggagcuu

SEQ ID NO: 1408614 - RNA, 19 nt, Artificial Sequence
  Description of Artificial Sequence: Synthetic oligonucleotide
ccauguagggaggcugugg

SEQ ID NO: 1408615 - RNA, 19 nt, Artificial Sequence
  Description of Artificial Sequence: Synthetic oligonucleotide
ggccuaggaagaaggggag

SEQ ID NO: 1408616 - RNA, 19 nt, Artificial Sequence
  Description of Artificial Sequence: Synthetic oligonucleotide
caccggcuuucauggcugc

SEQ ID NO: 1408617 - RNA, 19 nt, Artificial Sequence
  Description of Artificial Sequence: Synthetic oligonucleotide
cuaugguccuggugaugca

SEQ ID NO: 1408618 - RNA, 19 nt, Artificial Sequence
  Description of Artificial Sequence: Synthetic oligonucleotide
gugggugugaggucauccu

SEQ ID NO: 1408619 - RNA, 19 nt, Artificial Sequence
  Description of Artificial Sequence: Synthetic oligonucleotide
gccuaggaagaaggggagg

SEQ ID NO: 1408620 - RNA, 19 nt, Artificial Sequence
  Description of Artificial Sequence: Synthetic oligonucleotide
gacuuagcggugucccggu

SEQ ID NO: 1408621 - RNA, 19 nt, Artificial Sequence
  Description of Artificial Sequence: Synthetic oligonucleotide
gcuuucauggcugcaccuc

SEQ ID NO: 1408622 - RNA, 19 nt, Artificial Sequence
  Description of Artificial Sequence: Synthetic oligonucleotide
cccacuaacugugaagcca

SEQ ID NO: 1408623 - RNA, 19 nt, Artificial Sequence
  Description of Artificial Sequence: Synthetic oligonucleotide
ccacuaacugugaagccaa

SEQ ID NO: 1408624 - RNA, 19 nt, Artificial Sequence
  Description of Artificial Sequence: Synthetic oligonucleotide
ggguccugcagagguuugg

SEQ ID NO: 1408625 - RNA, 19 nt, Artificial Sequence
  Description of Artificial Sequence: Synthetic oligonucleotide
ggaggguaagugcaacaua

SEQ ID NO: 1408626 - RNA, 19 nt, Artificial Sequence
  Description of Artificial Sequence: Synthetic oligonucleotide
ucggagccuucagggcagg

SEQ ID NO: 1408627 - RNA, 19 nt, Artificial Sequence
  Description of Artificial Sequence: Synthetic oligonucleotide
caucccugaggaccaggga

SEQ ID NO: 1408628 - RNA, 19 nt, Artificial Sequence
  Description of Artificial Sequence: Synthetic oligonucleotide
acggcaggugugccagaga

SEQ ID NO: 1408629 - RNA, 19 nt, Artificial Sequence
  Description of Artificial Sequence: Synthetic oligonucleotide
gcaaguccuuccaugagua

SEQ ID NO: 1408630 - RNA, 19 nt, Artificial Sequence
  Description of Artificial Sequence: Synthetic oligonucleotide
ccgguaggcucaguguugg

SEQ ID NO: 1408631 - RNA, 19 nt, Artificial Sequence
  Description of Artificial Sequence: Synthetic oligonucleotide
cugccagagauggggucug

SEQ ID NO: 1408632 - RNA, 19 nt, Artificial Sequence
  Description of Artificial Sequence: Synthetic oligonucleotide
ccugacuauuuugggaguc

SEQ ID NO: 1408633 - RNA, 19 nt, Artificial Sequence
  Description of Artificial Sequence: Synthetic oligonucleotide
uagcggugucccgguaggc

SEQ ID NO: 1408634 - RNA, 19 nt, Artificial Sequence
  Description of Artificial Sequence: Synthetic oligonucleotide
caccagauuugauaagcuu

SEQ ID NO: 1408635 - RNA, 19 nt, Artificial Sequence
  Description of Artificial Sequence: Synthetic oligonucleotide
caggugccgcaaguucucc

SEQ ID NO: 1408636 - RNA, 19 nt, Artificial Sequence
  Description of Artificial Sequence: Synthetic oligonucleotide
caccuacagugggagcuug

SEQ ID NO: 1408637 - RNA, 19 nt, Artificial Sequence
  Description of Artificial Sequence: Synthetic oligonucleotide
ccccacuaacugugaagcc

SEQ ID NO: 1408638 - RNA, 19 nt, Artificial Sequence
  Description of Artificial Sequence: Synthetic oligonucleotide
cagugugaccaggcagcag

SEQ ID NO: 1408639 - RNA, 19 nt, Artificial Sequence
  Description of Artificial Sequence: Synthetic oligonucleotide
gugccgcaaguucuccaca

SEQ ID NO: 1408640 - RNA, 19 nt, Artificial Sequence
  Description of Artificial Sequence: Synthetic oligonucleotide
gaucccugcuccugacuau

SEQ ID NO: 1408641 - RNA, 19 nt, Artificial Sequence
  Description of Artificial Sequence: Synthetic oligonucleotide
caccaccuccaggugugag

SEQ ID NO: 1408642 - RNA, 19 nt, Artificial Sequence
  Description of Artificial Sequence: Synthetic oligonucleotide
cagggcgcacagacugcac

SEQ ID NO: 1408643 - RNA, 19 nt, Artificial Sequence
  Description of Artificial Sequence: Synthetic oligonucleotide
ugacggcaggugugccaga

SEQ ID NO: 1408644 - RNA, 19 nt, Artificial Sequence
  Description of Artificial Sequence: Synthetic oligonucleotide
acuuagcggugucccggua

SEQ ID NO: 1408645 - RNA, 19 nt, Artificial Sequence
  Description of Artificial Sequence: Synthetic oligonucleotide
ggggugucggagccuucag

SEQ ID NO: 1408646 - RNA, 19 nt, Artificial Sequence
  Description of Artificial Sequence: Synthetic oligonucleotide
gcggugucccgguaggcuc

SEQ ID NO: 1408647 - RNA, 19 nt, Artificial Sequence
  Description of Artificial Sequence: Synthetic oligonucleotide
gucccgguaggcucagugu

SEQ ID NO: 1408648 - RNA, 19 nt, Artificial Sequence
  Description of Artificial Sequence: Synthetic oligonucleotide
guguuggaguccagagguc

SEQ ID NO: 1408649 - RNA, 19 nt, Artificial Sequence
  Description of Artificial Sequence: Synthetic oligonucleotide
ggagcuugcccuggggauc

SEQ ID NO: 1408650 - RNA, 19 nt, Artificial Sequence
  Description of Artificial Sequence: Synthetic oligonucleotide
cccgguaggcucaguguug

SEQ ID NO: 1408651 - RNA, 19 nt, Artificial Sequence
  Description of Artificial Sequence: Synthetic oligonucleotide
acccucuuucacaccggcu

SEQ ID NO: 1408652 - RNA, 19 nt, Artificial Sequence
  Description of Artificial Sequence: Synthetic oligonucleotide
guggaaucaugggguuaac

SEQ ID NO: 1408653 - RNA, 19 nt, Artificial Sequence
  Description of Artificial Sequence: Synthetic oligonucleotide
cguucacuuugaugauccg

SEQ ID NO: 1408654 - RNA, 19 nt, Artificial Sequence
  Description of Artificial Sequence: Synthetic oligonucleotide
gguuuggguccuguaaugu

SEQ ID NO: 1408655 - RNA, 19 nt, Artificial Sequence
  Description of Artificial Sequence: Synthetic oligonucleotide
cacuaacugugaagccaaa

SEQ ID NO: 1408656 - RNA, 19 nt, Artificial Sequence
  Description of Artificial Sequence: Synthetic oligonucleotide
cagagguuuggguccugua

SEQ ID NO: 1408657 - RNA, 19 nt, Artificial Sequence
  Description of Artificial Sequence: Synthetic oligonucleotide
ggguuaacucuggguauuc

SEQ ID NO: 1408658 - RNA, 19 nt, Artificial Sequence
  Description of Artificial Sequence: Synthetic oligonucleotide
cugcuggagcccagagaca

SEQ ID NO: 1408659 - RNA, 19 nt, Artificial Sequence
  Description of Artificial Sequence: Synthetic oligonucleotide
gcacaauucgguccccacu

SEQ ID NO: 1408660 - RNA, 19 nt, Artificial Sequence
  Description of Artificial Sequence: Synthetic oligonucleotide
gcugcucgaugguauggaa

SEQ ID NO: 1408661 - RNA, 19 nt, Artificial Sequence
  Description of Artificial Sequence: Synthetic oligonucleotide
ccggcuuucauggcugcac

SEQ ID NO: 1408662 - RNA, 19 nt, Artificial Sequence
  Description of Artificial Sequence: Synthetic oligonucleotide
ggguccuguaauguguugu

SEQ ID NO: 1408663 - RNA, 19 nt, Artificial Sequence
  Description of Artificial Sequence: Synthetic oligonucleotide
ccggucacccucuuucaca

SEQ ID NO: 1408664 - RNA, 19 nt, Artificial Sequence
  Description of Artificial Sequence: Synthetic oligonucleotide
gagucagaggccagggcuu

SEQ ID NO: 1408665 - RNA, 19 nt, Artificial Sequence
  Description of Artificial Sequence: Synthetic oligonucleotide
guggagaagugaugcugau

SEQ ID NO: 1408666 - RNA, 19 nt, Artificial Sequence
  Description of Artificial Sequence: Synthetic oligonucleotide
accggcuuucauggcugca

SEQ ID NO: 1408667 - RNA, 19 nt, Artificial Sequence
  Description of Artificial Sequence: Synthetic oligonucleotide
cagcugucacaggccuagg

SEQ ID NO: 1408668 - RNA, 19 nt, Artificial Sequence
  Description of Artificial Sequence: Synthetic oligonucleotide
gugugccagagaauagagu

SEQ ID NO: 1408669 - RNA, 19 nt, Artificial Sequence
  Description of Artificial Sequence: Synthetic oligonucleotide
gugguuccaccagaugacu

SEQ ID NO: 1408670 - RNA, 19 nt, Artificial Sequence
  Description of Artificial Sequence: Synthetic oligonucleotide
gucccuuguccugaugccu

SEQ ID NO: 1408671 - RNA, 19 nt, Artificial Sequence
  Description of Artificial Sequence: Synthetic oligonucleotide
augauccggucacccucuu

SEQ ID NO: 1408672 - RNA, 19 nt, Artificial Sequence
  Description of Artificial Sequence: Synthetic oligonucleotide
guagccugugcuccgccuu

SEQ ID NO: 1408673 - RNA, 19 nt, Artificial Sequence
  Description of Artificial Sequence: Synthetic oligonucleotide
cggcuuucauggcugcacc

SEQ ID NO: 1408674 - RNA, 19 nt, Artificial Sequence
  Description of Artificial Sequence: Synthetic oligonucleotide
gccgcaaguucuccacauc

SEQ ID NO: 1408675 - RNA, 19 nt, Artificial Sequence
  Description of Artificial Sequence: Synthetic oligonucleotide
ccgcaaguucuccacaucu

SEQ ID NO: 1408676 - RNA, 19 nt, Artificial Sequence
  Description of Artificial Sequence: Synthetic oligonucleotide
caucagcaaguccuuccau

SEQ ID NO: 1408677 - RNA, 19 nt, Artificial Sequence
  Description of Artificial Sequence: Synthetic oligonucleotide
agagggccugugagggcca

SEQ ID NO: 1408678 - RNA, 19 nt, Artificial Sequence
  Description of Artificial Sequence: Synthetic oligonucleotide
ccagaugacucuccuccaa

SEQ ID NO: 1408679 - RNA, 19 nt, Artificial Sequence
  Description of Artificial Sequence: Synthetic oligonucleotide
caguuccccguagccugug

SEQ ID NO: 1408680 - RNA, 19 nt, Artificial Sequence
  Description of Artificial Sequence: Synthetic oligonucleotide
gccuucagggcaggauccc

SEQ ID NO: 1408681 - RNA, 19 nt, Artificial Sequence
  Description of Artificial Sequence: Synthetic oligonucleotide
gccauguagggaggcugug

SEQ ID NO: 1408682 - RNA, 19 nt, Artificial Sequence
  Description of Artificial Sequence: Synthetic oligonucleotide
ccgccuuccacuucagaua

SEQ ID NO: 1408683 - RNA, 19 nt, Artificial Sequence
  Description of Artificial Sequence: Synthetic oligonucleotide
gcaccagauuugauaagcu

SEQ ID NO: 1408684 - RNA, 19 nt, Artificial Sequence
  Description of Artificial Sequence: Synthetic oligonucleotide
gggacuugagaagcucucu

SEQ ID NO: 1408685 - RNA, 19 nt, Artificial Sequence
  Description of Artificial Sequence: Synthetic oligonucleotide
cccucuuucacaccggcuu

SEQ ID NO: 1408686 - RNA, 19 nt, Artificial Sequence
  Description of Artificial Sequence: Synthetic oligonucleotide
caccauggugccguucacu

SEQ ID NO: 1408687 - RNA, 19 nt, Artificial Sequence
  Description of Artificial Sequence: Synthetic oligonucleotide
gcuggcaugcugacauaaa

SEQ ID NO: 1408688 - RNA, 19 nt, Artificial Sequence
  Description of Artificial Sequence: Synthetic oligonucleotide
gugagcuauuggucaccau

SEQ ID NO: 1408689 - RNA, 19 nt, Artificial Sequence
  Description of Artificial Sequence: Synthetic oligonucleotide
ccgauggaggaaggagaug

SEQ ID NO: 1408690 - RNA, 19 nt, Artificial Sequence
  Description of Artificial Sequence: Synthetic oligonucleotide
cagaaggacagggucccuu

SEQ ID NO: 1408691 - RNA, 19 nt, Artificial Sequence
  Description of Artificial Sequence: Synthetic oligonucleotide
cugcuggcaugcugacaua

SEQ ID NO: 1408692 - RNA, 19 nt, Artificial Sequence
  Description of Artificial Sequence: Synthetic oligonucleotide
gccugagucuucacagugu

SEQ ID NO: 1408693 - RNA, 19 nt, Artificial Sequence
  Description of Artificial Sequence: Synthetic oligonucleotide
gcccagagacaccgaugga

SEQ ID NO: 1408694 - RNA, 19 nt, Artificial Sequence
  Description of Artificial Sequence: Synthetic oligonucleotide
ggccauguagggaggcugu

SEQ ID NO: 1408695 - RNA, 19 nt, Artificial Sequence
  Description of Artificial Sequence: Synthetic oligonucleotide
gggguuaacucuggguauu

SEQ ID NO: 1408696 - RNA, 19 nt, Artificial Sequence
  Description of Artificial Sequence: Synthetic oligonucleotide
ggaucaggugccgcaaguu

SEQ ID NO: 1408697 - RNA, 19 nt, Artificial Sequence
  Description of Artificial Sequence: Synthetic oligonucleotide
ccagggcgcacagacugca

SEQ ID NO: 1408698 - RNA, 19 nt, Artificial Sequence
  Description of Artificial Sequence: Synthetic oligonucleotide
cugcaccuccagggcgcac

SEQ ID NO: 1408699 - RNA, 19 nt, Artificial Sequence
  Description of Artificial Sequence: Synthetic oligonucleotide
gccugugcuccgccuucca

SEQ ID NO: 1408700 - RNA, 19 nt, Artificial Sequence
  Description of Artificial Sequence: Synthetic oligonucleotide
gcucgaugguauggaagau

SEQ ID NO: 1408701 - RNA, 19 nt, Artificial Sequence
  Description of Artificial Sequence: Synthetic oligonucleotide
cggugucccgguaggcuca

SEQ ID NO: 1408702 - RNA, 19 nt, Artificial Sequence
  Description of Artificial Sequence: Synthetic oligonucleotide
gggugggugugaggucauc

SEQ ID NO: 1408703 - RNA, 19 nt, Artificial Sequence
  Description of Artificial Sequence: Synthetic oligonucleotide
cgcaaguucuccacaucuu

SEQ ID NO: 1408704 - RNA, 19 nt, Artificial Sequence
  Description of Artificial Sequence: Synthetic oligonucleotide
caaagccaugcugguccuu

SEQ ID NO: 1408705 - RNA, 19 nt, Artificial Sequence
  Description of Artificial Sequence: Synthetic oligonucleotide
gcauacuccugaggauuuu

SEQ ID NO: 1408706 - RNA, 19 nt, Artificial Sequence
  Description of Artificial Sequence: Synthetic oligonucleotide
cgaugguauggaagauuau

SEQ ID NO: 1408707 - RNA, 19 nt, Artificial Sequence
  Description of Artificial Sequence: Synthetic oligonucleotide
ccauggugccguucacuuu

SEQ ID NO: 1408708 - RNA, 19 nt, Artificial Sequence
  Description of Artificial Sequence: Synthetic oligonucleotide
cgguaggcucaguguugga

SEQ ID NO: 1408709 - RNA, 19 nt, Artificial Sequence
  Description of Artificial Sequence: Synthetic oligonucleotide
ccugaggaccagggaggcu

SEQ ID NO: 1408710 - RNA, 19 nt, Artificial Sequence
  Description of Artificial Sequence: Synthetic oligonucleotide
aaaagaaagccagcggucc

SEQ ID NO: 1408711 - RNA, 19 nt, Artificial Sequence
  Description of Artificial Sequence: Synthetic oligonucleotide
agacuagugaucuucuccc

SEQ ID NO: 1408712 - RNA, 19 nt, Artificial Sequence
  Description of Artificial Sequence: Synthetic oligonucleotide
uauagaagcaaagagugug

SEQ ID NO: 1408713 - RNA, 19 nt, Artificial Sequence
  Description of Artificial Sequence: Synthetic oligonucleotide
ugugcauaggucauugcgg

SEQ ID NO: 1408714 - RNA, 19 nt, Artificial Sequence
  Description of Artificial Sequence: Synthetic oligonucleotide
aaaguugaauccugggguc

SEQ ID NO: 1408715 - RNA, 19 nt, Artificial Sequence
  Description of Artificial Sequence: Synthetic oligonucleotide
aagaguguggacccuguac

SEQ ID NO: 1408716 - RNA, 19 nt, Artificial Sequence
  Description of Artificial Sequence: Synthetic oligonucleotide
ugugcauucaggaucuugc

SEQ ID NO: 1408717 - RNA, 19 nt, Artificial Sequence
  Description of Artificial Sequence: Synthetic oligonucleotide
aggacccaaagacaaagcc

SEQ ID NO: 1408718 - RNA, 19 nt, Artificial Sequence
  Description of Artificial Sequence: Synthetic oligonucleotide
ucgaugauguccuugaggu

SEQ ID NO: 1408719 - RNA, 19 nt, Artificial Sequence
  Description of Artificial Sequence: Synthetic oligonucleotide
agcuguguuacucagguug

SEQ ID NO: 1408720 - RNA, 19 nt, Artificial Sequence
  Description of Artificial Sequence: Synthetic oligonucleotide
augagaaccccguggagcc

SEQ ID NO: 1408721 - RNA, 19 nt, Artificial Sequence
  Description of Artificial Sequence: Synthetic oligonucleotide
agagggagagcacuguagc

SEQ ID NO: 1408722 - RNA, 19 nt, Artificial Sequence
  Description of Artificial Sequence: Synthetic oligonucleotide
cucagguugagcuuugggg

SEQ ID NO: 1408723 - RNA, 19 nt, Artificial Sequence
  Description of Artificial Sequence: Synthetic oligonucleotide
ugaaugagaaccccgugga

SEQ ID NO: 1408724 - RNA, 19 nt, Artificial Sequence
  Description of Artificial Sequence: Synthetic oligonucleotide
ugugcaucgauguucucag

SEQ ID NO: 1408725 - RNA, 19 nt, Artificial Sequence
  Description of Artificial Sequence: Synthetic oligonucleotide
uucugaucuagcuucaccu

SEQ ID NO: 1408726 - RNA, 19 nt, Artificial Sequence
  Description of Artificial Sequence: Synthetic oligonucleotide
guaguggucaccaucgugg

SEQ ID NO: 1408727 - RNA, 19 nt, Artificial Sequence
  Description of Artificial Sequence: Synthetic oligonucleotide
ugcaucgauguucucagcc

SEQ ID NO: 1408728 - RNA, 19 nt, Artificial Sequence
  Description of Artificial Sequence: Synthetic oligonucleotide
auaggaugaaguccaguuc

SEQ ID NO: 1408729 - RNA, 19 nt, Artificial Sequence
  Description of Artificial Sequence: Synthetic oligonucleotide
ucagguugagcuuuggggu

SEQ ID NO: 1408730 - RNA, 19 nt, Artificial Sequence
  Description of Artificial Sequence: Synthetic oligonucleotide
aagccagcgguccuguaac

SEQ ID NO: 1408731 - RNA, 19 nt, Artificial Sequence
  Description of Artificial Sequence: Synthetic oligonucleotide
gugaaugagaaccccgugg

SEQ ID NO: 1408732 - RNA, 19 nt, Artificial Sequence
  Description of Artificial Sequence: Synthetic oligonucleotide
uccuguaacccaaggagcc

SEQ ID NO: 1408733 - RNA, 19 nt, Artificial Sequence
  Description of Artificial Sequence: Synthetic oligonucleotide
uucucaaucagugugcggu

SEQ ID NO: 1408734 - RNA, 19 nt, Artificial Sequence
  Description of Artificial Sequence: Synthetic oligonucleotide
cugagcuacccacagagcc

SEQ ID NO: 1408735 - RNA, 19 nt, Artificial Sequence
  Description of Artificial Sequence: Synthetic oligonucleotide
uccaaaguugaauccuggg

SEQ ID NO: 1408736 - RNA, 19 nt, Artificial Sequence
  Description of Artificial Sequence: Synthetic oligonucleotide
auucacgcaggacuagucg

SEQ ID NO: 1408737 - RNA, 19 nt, Artificial Sequence
  Description of Artificial Sequence: Synthetic oligonucleotide
uuccaaaguugaauccugg

SEQ ID NO: 1408738 - RNA, 19 nt, Artificial Sequence
  Description of Artificial Sequence: Synthetic oligonucleotide
aaggcaaugcgcaggcugc

SEQ ID NO: 1408739 - RNA, 19 nt, Artificial Sequence
  Description of Artificial Sequence: Synthetic oligonucleotide
acuagucgaaggcaaugcg

SEQ ID NO: 1408740 - RNA, 19 nt, Artificial Sequence
  Description of Artificial Sequence: Synthetic oligonucleotide
gaaggcaaugcgcaggcug

SEQ ID NO: 1408741 - RNA, 19 nt, Artificial Sequence
  Description of Artificial Sequence: Synthetic oligonucleotide
uugugauaggaugaagucc

SEQ ID NO: 1408742 - RNA, 19 nt, Artificial Sequence
  Description of Artificial Sequence: Synthetic oligonucleotide
gcuauagaagcaaagagug

SEQ ID NO: 1408743 - RNA, 19 nt, Artificial Sequence
  Description of Artificial Sequence: Synthetic oligonucleotide
cagacuagugaucuucucc

SEQ ID NO: 1408744 - RNA, 19 nt, Artificial Sequence
  Description of Artificial Sequence: Synthetic oligonucleotide
cacuggaugaggcaggagc

SEQ ID NO: 1408745 - RNA, 19 nt, Artificial Sequence
  Description of Artificial Sequence: Synthetic oligonucleotide
gguccuguaacccaaggag

SEQ ID NO: 1408746 - RNA, 19 nt, Artificial Sequence
  Description of Artificial Sequence: Synthetic oligonucleotide
gagucccaaaauuaauccc

SEQ ID NO: 1408747 - RNA, 19 nt, Artificial Sequence
  Description of Artificial Sequence: Synthetic oligonucleotide
agaguguggacccuguacu

SEQ ID NO: 1408748 - RNA, 19 nt, Artificial Sequence
  Description of Artificial Sequence: Synthetic oligonucleotide
cucgucggcaugcugaagg

SEQ ID NO: 1408749 - RNA, 19 nt, Artificial Sequence
  Description of Artificial Sequence: Synthetic oligonucleotide
ugagacggcaguugguaag

SEQ ID NO: 1408750 - RNA, 19 nt, Artificial Sequence
  Description of Artificial Sequence: Synthetic oligonucleotide
gaauccuggggucugugug

SEQ ID NO: 1408751 - RNA, 19 nt, Artificial Sequence
  Description of Artificial Sequence: Synthetic oligonucleotide
cucgaugauguccuugagg

SEQ ID NO: 1408752 - RNA, 19 nt, Artificial Sequence
  Description of Artificial Sequence: Synthetic oligonucleotide
ugaucuagcuucaccuucu

SEQ ID NO: 1408753 - RNA, 19 nt, Artificial Sequence
  Description of Artificial Sequence: Synthetic oligonucleotide
cuucucacgcuccucgucg

SEQ ID NO: 1408754 - RNA, 19 nt, Artificial Sequence
  Description of Artificial Sequence: Synthetic oligonucleotide
ggagucccaaaauuaaucc

SEQ ID NO: 1408755 - RNA, 19 nt, Artificial Sequence
  Description of Artificial Sequence: Synthetic oligonucleotide
agaggacccaaagacaaag

SEQ ID NO: 1408756 - RNA, 19 nt, Artificial Sequence
  Description of Artificial Sequence: Synthetic oligonucleotide
agggccgccagccauguuc

SEQ ID NO: 1408757 - RNA, 19 nt, Artificial Sequence
  Description of Artificial Sequence: Synthetic oligonucleotide
uguggaagucccagcugcg

SEQ ID NO: 1408758 - RNA, 19 nt, Artificial Sequence
  Description of Artificial Sequence: Synthetic oligonucleotide
aaagccagcgguccuguaa

SEQ ID NO: 1408759 - RNA, 19 nt, Artificial Sequence
  Description of Artificial Sequence: Synthetic oligonucleotide
cuggugaaugagaaccccg

SEQ ID NO: 1408760 - RNA, 19 nt, Artificial Sequence
  Description of Artificial Sequence: Synthetic oligonucleotide
uguugaagccagaggcucc

SEQ ID NO: 1408761 - RNA, 19 nt, Artificial Sequence
  Description of Artificial Sequence: Synthetic oligonucleotide
ugagcuacccacagagcca

SEQ ID NO: 1408762 - RNA, 19 nt, Artificial Sequence
  Description of Artificial Sequence: Synthetic oligonucleotide
uucacgcaggacuagucga

SEQ ID NO: 1408763 - RNA, 19 nt, Artificial Sequence
  Description of Artificial Sequence: Synthetic oligonucleotide
uggugagugagaagaggcc

SEQ ID NO: 1408764 - RNA, 19 nt, Artificial Sequence
  Description of Artificial Sequence: Synthetic oligonucleotide
acugaagggaauccaugug

SEQ ID NO: 1408765 - RNA, 19 nt, Artificial Sequence
  Description of Artificial Sequence: Synthetic oligonucleotide
aagggagagccagacagug

SEQ ID NO: 1408766 - RNA, 19 nt, Artificial Sequence
  Description of Artificial Sequence: Synthetic oligonucleotide
ucacggugcagacuaguga

SEQ ID NO: 1408767 - RNA, 19 nt, Artificial Sequence
  Description of Artificial Sequence: Synthetic oligonucleotide
auguugaagccagaggcuc

SEQ ID NO: 1408768 - RNA, 19 nt, Artificial Sequence
  Description of Artificial Sequence: Synthetic oligonucleotide
cagggcagagcucuggucc

SEQ ID NO: 1408769 - RNA, 19 nt, Artificial Sequence
  Description of Artificial Sequence: Synthetic oligonucleotide
uggugaaugagaaccccgu

SEQ ID NO: 1408770 - RNA, 19 nt, Artificial Sequence
  Description of Artificial Sequence: Synthetic oligonucleotide
cuccacuuguugaucaggc

SEQ ID NO: 1408771 - RNA, 19 nt, Artificial Sequence
  Description of Artificial Sequence: Synthetic oligonucleotide
gucauugcgggaccugugg

SEQ ID NO: 1408772 - RNA, 19 nt, Artificial Sequence
  Description of Artificial Sequence: Synthetic oligonucleotide
aagguagauggugccacuc

SEQ ID NO: 1408773 - RNA, 19 nt, Artificial Sequence
  Description of Artificial Sequence: Synthetic oligonucleotide
ucaaucagugugcgguccc

SEQ ID NO: 1408774 - RNA, 19 nt, Artificial Sequence
  Description of Artificial Sequence: Synthetic oligonucleotide
ugcucgaugauguccuuga

SEQ ID NO: 1408775 - RNA, 19 nt, Artificial Sequence
  Description of Artificial Sequence: Synthetic oligonucleotide
guagcacuggaugaggcag

SEQ ID NO: 1408776 - RNA, 19 nt, Artificial Sequence
  Description of Artificial Sequence: Synthetic oligonucleotide
ccaaaguugaauccugggg

SEQ ID NO: 1408777 - RNA, 19 nt, Artificial Sequence
  Description of Artificial Sequence: Synthetic oligonucleotide
ugaagguagauggugccac

SEQ ID NO: 1408778 - RNA, 19 nt, Artificial Sequence
  Description of Artificial Sequence: Synthetic oligonucleotide
uguguuacucagguugagc

SEQ ID NO: 1408779 - RNA, 19 nt, Artificial Sequence
  Description of Artificial Sequence: Synthetic oligonucleotide
gauaggaugaaguccaguu

SEQ ID NO: 1408780 - RNA, 19 nt, Artificial Sequence
  Description of Artificial Sequence: Synthetic oligonucleotide
gacuagucgaaggcaaugc

SEQ ID NO: 1408781 - RNA, 19 nt, Artificial Sequence
  Description of Artificial Sequence: Synthetic oligonucleotide
acuagugaucuucucccca

SEQ ID NO: 1408782 - RNA, 19 nt, Artificial Sequence
  Description of Artificial Sequence: Synthetic oligonucleotide
gaaugagaaccccguggag

SEQ ID NO: 1408783 - RNA, 19 nt, Artificial Sequence
  Description of Artificial Sequence: Synthetic oligonucleotide
caaccacccaaaagaaagc

SEQ ID NO: 1408784 - RNA, 19 nt, Artificial Sequence
  Description of Artificial Sequence: Synthetic oligonucleotide
aucguggcuggagugaagg

SEQ ID NO: 1408785 - RNA, 19 nt, Artificial Sequence
  Description of Artificial Sequence: Synthetic oligonucleotide
aggcauugaccuguguggc

SEQ ID NO: 1408786 - RNA, 19 nt, Artificial Sequence
  Description of Artificial Sequence: Synthetic oligonucleotide
uguauugccacuggugaau

SEQ ID NO: 1408787 - RNA, 19 nt, Artificial Sequence
  Description of Artificial Sequence: Synthetic oligonucleotide
uauucacgcaggacuaguc

SEQ ID NO: 1408788 - RNA, 19 nt, Artificial Sequence
  Description of Artificial Sequence: Synthetic oligonucleotide
aagcccagagugccagcac

SEQ ID NO: 1408789 - RNA, 19 nt, Artificial Sequence
  Description of Artificial Sequence: Synthetic oligonucleotide
caucgauguucucagccag

SEQ ID NO: 1408790 - RNA, 19 nt, Artificial Sequence
  Description of Artificial Sequence: Synthetic oligonucleotide
ugcagacuagugaucuucu

SEQ ID NO: 1408791 - RNA, 19 nt, Artificial Sequence
  Description of Artificial Sequence: Synthetic oligonucleotide
aacccaaggagccccuccu

SEQ ID NO: 1408792 - RNA, 19 nt, Artificial Sequence
  Description of Artificial Sequence: Synthetic oligonucleotide
caaaguugaauccuggggu

SEQ ID NO: 1408793 - RNA, 19 nt, Artificial Sequence
  Description of Artificial Sequence: Synthetic oligonucleotide
uccuauucacgcaggacua

SEQ ID NO: 1408794 - RNA, 19 nt, Artificial Sequence
  Description of Artificial Sequence: Synthetic oligonucleotide
uucaggcucaaagcaaagc

SEQ ID NO: 1408795 - RNA, 19 nt, Artificial Sequence
  Description of Artificial Sequence: Synthetic oligonucleotide
gagacggcaguugguaagg

SEQ ID NO: 1408796 - RNA, 19 nt, Artificial Sequence
  Description of Artificial Sequence: Synthetic oligonucleotide
gucggcaugcugaagguag

SEQ ID NO: 1408797 - RNA, 19 nt, Artificial Sequence
  Description of Artificial Sequence: Synthetic oligonucleotide
gacccuguacugguggugg

SEQ ID NO: 1408798 - RNA, 19 nt, Artificial Sequence
  Description of Artificial Sequence: Synthetic oligonucleotide
agagugccagcacuaggag

SEQ ID NO: 1408799 - RNA, 19 nt, Artificial Sequence
  Description of Artificial Sequence: Synthetic oligonucleotide
aagaaagccagcgguccug

SEQ ID NO: 1408800 - RNA, 19 nt, Artificial Sequence
  Description of Artificial Sequence: Synthetic oligonucleotide
uacggcggcccucacagac

SEQ ID NO: 1408801 - RNA, 19 nt, Artificial Sequence
  Description of Artificial Sequence: Synthetic oligonucleotide
gacuagugaucuucucccc

SEQ ID NO: 1408802 - RNA, 19 nt, Artificial Sequence
  Description of Artificial Sequence: Synthetic oligonucleotide
uagaagcaaagagugugga

SEQ ID NO: 1408803 - RNA, 19 nt, Artificial Sequence
  Description of Artificial Sequence: Synthetic oligonucleotide
gagagggagagcacuguag

SEQ ID NO: 1408804 - RNA, 19 nt, Artificial Sequence
  Description of Artificial Sequence: Synthetic oligonucleotide
ccacuggugaaugagaacc

SEQ ID NO: 1408805 - RNA, 19 nt, Artificial Sequence
  Description of Artificial Sequence: Synthetic oligonucleotide
gaagggguagucguugcug

SEQ ID NO: 1408806 - RNA, 19 nt, Artificial Sequence
  Description of Artificial Sequence: Synthetic oligonucleotide
caaugggcucagcaggucc

SEQ ID NO: 1408807 - RNA, 19 nt, Artificial Sequence
  Description of Artificial Sequence: Synthetic oligonucleotide
uguuggcuguagcuggugu

SEQ ID NO: 1408808 - RNA, 19 nt, Artificial Sequence
  Description of Artificial Sequence: Synthetic oligonucleotide
accuguggaagucccagcu

SEQ ID NO: 1408809 - RNA, 19 nt, Artificial Sequence
  Description of Artificial Sequence: Synthetic oligonucleotide
ccacccaaaagaaagccag

SEQ ID NO: 1408810 - RNA, 19 nt, Artificial Sequence
  Description of Artificial Sequence: Synthetic oligonucleotide
aaccccguggagccuguag

SEQ ID NO: 1408811 - RNA, 19 nt, Artificial Sequence
  Description of Artificial Sequence: Synthetic oligonucleotide
cugaucuagcuucaccuuc

SEQ ID NO: 1408812 - RNA, 19 nt, Artificial Sequence
  Description of Artificial Sequence: Synthetic oligonucleotide
ucaccaucguggcuggagu

SEQ ID NO: 1408813 - RNA, 19 nt, Artificial Sequence
  Description of Artificial Sequence: Synthetic oligonucleotide
cacuggugaaugagaaccc

SEQ ID NO: 1408814 - RNA, 19 nt, Artificial Sequence
  Description of Artificial Sequence: Synthetic oligonucleotide
guagaggacccaaagacaa

SEQ ID NO: 1408815 - RNA, 19 nt, Artificial Sequence
  Description of Artificial Sequence: Synthetic oligonucleotide
aggugccaggagcugcucc

SEQ ID NO: 1408816 - RNA, 19 nt, Artificial Sequence
  Description of Artificial Sequence: Synthetic oligonucleotide
agggguagucguugcuggc

SEQ ID NO: 1408817 - RNA, 19 nt, Artificial Sequence
  Description of Artificial Sequence: Synthetic oligonucleotide
cuugagcugugcaucgaug

SEQ ID NO: 1408818 - RNA, 19 nt, Artificial Sequence
  Description of Artificial Sequence: Synthetic oligonucleotide
aaguugaauccuggggucu

SEQ ID NO: 1408819 - RNA, 19 nt, Artificial Sequence
  Description of Artificial Sequence: Synthetic oligonucleotide
cagagugccagcacuagga

SEQ ID NO: 1408820 - RNA, 19 nt, Artificial Sequence
  Description of Artificial Sequence: Synthetic oligonucleotide
uucucacgcuccucgucgg

SEQ ID NO: 1408821 - RNA, 19 nt, Artificial Sequence
  Description of Artificial Sequence: Synthetic oligonucleotide
auugcgggaccuguggaag

SEQ ID NO: 1408822 - RNA, 19 nt, Artificial Sequence
  Description of Artificial Sequence: Synthetic oligonucleotide
guagccgcaguugucacug

SEQ ID NO: 1408823 - RNA, 19 nt, Artificial Sequence
  Description of Artificial Sequence: Synthetic oligonucleotide
cauaggucauugcgggacc

SEQ ID NO: 1408824 - RNA, 19 nt, Artificial Sequence
  Description of Artificial Sequence: Synthetic oligonucleotide
uggaggucccagcacuuga

SEQ ID NO: 1408825 - RNA, 19 nt, Artificial Sequence
  Description of Artificial Sequence: Synthetic oligonucleotide
acuaggaguagccgcaguu

SEQ ID NO: 1408826 - RNA, 19 nt, Artificial Sequence
  Description of Artificial Sequence: Synthetic oligonucleotide
guguuacucagguugagcu

SEQ ID NO: 1408827 - RNA, 19 nt, Artificial Sequence
  Description of Artificial Sequence: Synthetic oligonucleotide
acggcaguugguaagggug

SEQ ID NO: 1408828 - RNA, 19 nt, Artificial Sequence
  Description of Artificial Sequence: Synthetic oligonucleotide
agcagcuacacugcuggag

SEQ ID NO: 1408829 - RNA, 19 nt, Artificial Sequence
  Description of Artificial Sequence: Synthetic oligonucleotide
ucugaucuagcuucaccuu

SEQ ID NO: 1408830 - RNA, 19 nt, Artificial Sequence
  Description of Artificial Sequence: Synthetic oligonucleotide
uccuucuguugugauagga

SEQ ID NO: 1408831 - RNA, 19 nt, Artificial Sequence
  Description of Artificial Sequence: Synthetic oligonucleotide
uguuacucagguugagcuu

SEQ ID NO: 1408832 - RNA, 19 nt, Artificial Sequence
  Description of Artificial Sequence: Synthetic oligonucleotide
caaggagccccuccuauuc

SEQ ID NO: 1408833 - RNA, 19 nt, Artificial Sequence
  Description of Artificial Sequence: Synthetic oligonucleotide
uuacucagguugagcuuug

SEQ ID NO: 1408834 - RNA, 19 nt, Artificial Sequence
  Description of Artificial Sequence: Synthetic oligonucleotide
cacccaaaagaaagccagc

SEQ ID NO: 1408835 - RNA, 19 nt, Artificial Sequence
  Description of Artificial Sequence: Synthetic oligonucleotide
ccaauguugaagccagagg

SEQ ID NO: 1408836 - RNA, 19 nt, Artificial Sequence
  Description of Artificial Sequence: Synthetic oligonucleotide
cuguaacccaaggagcccc

SEQ ID NO: 1408837 - RNA, 19 nt, Artificial Sequence
  Description of Artificial Sequence: Synthetic oligonucleotide
aguaguggaggugccagga

SEQ ID NO: 1408838 - RNA, 19 nt, Artificial Sequence
  Description of Artificial Sequence: Synthetic oligonucleotide
ugugcggucccaggcauug

SEQ ID NO: 1408839 - RNA, 19 nt, Artificial Sequence
  Description of Artificial Sequence: Synthetic oligonucleotide
ugcuaguaguggaggugcc

SEQ ID NO: 1408840 - RNA, 19 nt, Artificial Sequence
  Description of Artificial Sequence: Synthetic oligonucleotide
ucacgcaggacuagucgaa

SEQ ID NO: 1408841 - RNA, 19 nt, Artificial Sequence
  Description of Artificial Sequence: Synthetic oligonucleotide
cucacggugcagacuagug

SEQ ID NO: 1408842 - RNA, 19 nt, Artificial Sequence
  Description of Artificial Sequence: Synthetic oligonucleotide
guccuguaacccaaggagc

SEQ ID NO: 1408843 - RNA, 19 nt, Artificial Sequence
  Description of Artificial Sequence: Synthetic oligonucleotide
agguagauggugccacucu

SEQ ID NO: 1408844 - RNA, 19 nt, Artificial Sequence
  Description of Artificial Sequence: Synthetic oligonucleotide
gcagcuacacugcuggagc

SEQ ID NO: 1408845 - RNA, 19 nt, Artificial Sequence
  Description of Artificial Sequence: Synthetic oligonucleotide
guugcuggcugggagggag

SEQ ID NO: 1408846 - RNA, 19 nt, Artificial Sequence
  Description of Artificial Sequence: Synthetic oligonucleotide
cauguucaggugcucgaug

SEQ ID NO: 1408847 - RNA, 19 nt, Artificial Sequence
  Description of Artificial Sequence: Synthetic oligonucleotide
ggugcuauagaagcaaaga

SEQ ID NO: 1408848 - RNA, 19 nt, Artificial Sequence
  Description of Artificial Sequence: Synthetic oligonucleotide
ucguggcuggagugaaggg

SEQ ID NO: 1408849 - RNA, 19 nt, Artificial Sequence
  Description of Artificial Sequence: Synthetic oligonucleotide
ggagugaagggagagccag

SEQ ID NO: 1408850 - RNA, 19 nt, Artificial Sequence
  Description of Artificial Sequence: Synthetic oligonucleotide
agccauguucaggugcucg

SEQ ID NO: 1408851 - RNA, 19 nt, Artificial Sequence
  Description of Artificial Sequence: Synthetic oligonucleotide
gaauccaugugugcauuca

SEQ ID NO: 1408852 - RNA, 19 nt, Artificial Sequence
  Description of Artificial Sequence: Synthetic oligonucleotide
uggagugaagggagagcca

SEQ ID NO: 1408853 - RNA, 19 nt, Artificial Sequence
  Description of Artificial Sequence: Synthetic oligonucleotide
agugggucacugguguccg

SEQ ID NO: 1408854 - RNA, 19 nt, Artificial Sequence
  Description of Artificial Sequence: Synthetic oligonucleotide
cagguugagcuuuggggug

SEQ ID NO: 1408855 - RNA, 19 nt, Artificial Sequence
  Description of Artificial Sequence: Synthetic oligonucleotide
ugauaggaugaaguccagu

SEQ ID NO: 1408856 - RNA, 19 nt, Artificial Sequence
  Description of Artificial Sequence: Synthetic oligonucleotide
ccguggagccuguagaugg

SEQ ID NO: 1408857 - RNA, 19 nt, Artificial Sequence
  Description of Artificial Sequence: Synthetic oligonucleotide
aaagaguguggacccugua

SEQ ID NO: 1408858 - RNA, 19 nt, Artificial Sequence
  Description of Artificial Sequence: Synthetic oligonucleotide
uauugccacuggugaauga

SEQ ID NO: 1408859 - RNA, 19 nt, Artificial Sequence
  Description of Artificial Sequence: Synthetic oligonucleotide
ugcgcuugagcugugcauc

SEQ ID NO: 1408860 - RNA, 19 nt, Artificial Sequence
  Description of Artificial Sequence: Synthetic oligonucleotide
guggugcuaguaguggagg

SEQ ID NO: 1408861 - RNA, 19 nt, Artificial Sequence
  Description of Artificial Sequence: Synthetic oligonucleotide
ggauguauugccacuggug

SEQ ID NO: 1408862 - RNA, 19 nt, Artificial Sequence
  Description of Artificial Sequence: Synthetic oligonucleotide
caguugguaagggugcuac

SEQ ID NO: 1408863 - RNA, 19 nt, Artificial Sequence
  Description of Artificial Sequence: Synthetic oligonucleotide
cucaaucagugugcggucc

SEQ ID NO: 1408864 - RNA, 19 nt, Artificial Sequence
  Description of Artificial Sequence: Synthetic oligonucleotide
cuuuggggugcugaucccc

SEQ ID NO: 1408865 - RNA, 19 nt, Artificial Sequence
  Description of Artificial Sequence: Synthetic oligonucleotide
cuccuauucacgcaggacu

SEQ ID NO: 1408866 - RNA, 19 nt, Artificial Sequence
  Description of Artificial Sequence: Synthetic oligonucleotide
cacuguagcacuggaugag

SEQ ID NO: 1408867 - RNA, 19 nt, Artificial Sequence
  Description of Artificial Sequence: Synthetic oligonucleotide
gaagucccagcugcggugc

SEQ ID NO: 1408868 - RNA, 19 nt, Artificial Sequence
  Description of Artificial Sequence: Synthetic oligonucleotide
agccagcgguccuguaacc

SEQ ID NO: 1408869 - RNA, 19 nt, Artificial Sequence
  Description of Artificial Sequence: Synthetic oligonucleotide
guaagggugcuacugccaa

SEQ ID NO: 1408870 - RNA, 19 nt, Artificial Sequence
  Description of Artificial Sequence: Synthetic oligonucleotide
ugcauaggucauugcggga

SEQ ID NO: 1408871 - RNA, 19 nt, Artificial Sequence
  Description of Artificial Sequence: Synthetic oligonucleotide
agggaauccaugugugcau

SEQ ID NO: 1408872 - RNA, 19 nt, Artificial Sequence
  Description of Artificial Sequence: Synthetic oligonucleotide
guaguggaggugccaggag

SEQ ID NO: 1408873 - RNA, 19 nt, Artificial Sequence
  Description of Artificial Sequence: Synthetic oligonucleotide
gcuacugccaaggccaaag

SEQ ID NO: 1408874 - RNA, 19 nt, Artificial Sequence
  Description of Artificial Sequence: Synthetic oligonucleotide
ugagcugugcaucgauguu

SEQ ID NO: 1408875 - RNA, 19 nt, Artificial Sequence
  Description of Artificial Sequence: Synthetic oligonucleotide
agcccagagugccagcacu

SEQ ID NO: 1408876 - RNA, 19 nt, Artificial Sequence
  Description of Artificial Sequence: Synthetic oligonucleotide
uagaggacccaaagacaaa

SEQ ID NO: 1408877 - RNA, 19 nt, Artificial Sequence
  Description of Artificial Sequence: Synthetic oligonucleotide
agcacuaggaguagccgca

SEQ ID NO: 1408878 - RNA, 19 nt, Artificial Sequence
  Description of Artificial Sequence: Synthetic oligonucleotide
cccaaaagaaagccagcgg

SEQ ID NO: 1408879 - RNA, 19 nt, Artificial Sequence
  Description of Artificial Sequence: Synthetic oligonucleotide
cuacugccaaggccaaagc

SEQ ID NO: 1408880 - RNA, 19 nt, Artificial Sequence
  Description of Artificial Sequence: Synthetic oligonucleotide
aguugaauccuggggucug

SEQ ID NO: 1408881 - RNA, 19 nt, Artificial Sequence
  Description of Artificial Sequence: Synthetic oligonucleotide
aguagccgcaguugucacu

SEQ ID NO: 1408882 - RNA, 19 nt, Artificial Sequence
  Description of Artificial Sequence: Synthetic oligonucleotide
aguagcagcuacacugcug

SEQ ID NO: 1408883 - RNA, 19 nt, Artificial Sequence
  Description of Artificial Sequence: Synthetic oligonucleotide
ucggcaugcugaagguaga

SEQ ID NO: 1408884 - RNA, 19 nt, Artificial Sequence
  Description of Artificial Sequence: Synthetic oligonucleotide
guagucguugcuggcuggg

SEQ ID NO: 1408885 - RNA, 19 nt, Artificial Sequence
  Description of Artificial Sequence: Synthetic oligonucleotide
gucaccaucguggcuggag

SEQ ID NO: 1408886 - RNA, 19 nt, Artificial Sequence
  Description of Artificial Sequence: Synthetic oligonucleotide
aguugguaagggugcuacu

SEQ ID NO: 1408887 - RNA, 19 nt, Artificial Sequence
  Description of Artificial Sequence: Synthetic oligonucleotide
gagggagucccaaaauuaa

SEQ ID NO: 1408888 - RNA, 19 nt, Artificial Sequence
  Description of Artificial Sequence: Synthetic oligonucleotide
uccugcuccuuacggcggc

SEQ ID NO: 1408889 - RNA, 19 nt, Artificial Sequence
  Description of Artificial Sequence: Synthetic oligonucleotide
aguggaggugccaggagcu

SEQ ID NO: 1408890 - RNA, 19 nt, Artificial Sequence
  Description of Artificial Sequence: Synthetic oligonucleotide
ugagugagaagaggccagu

SEQ ID NO: 1408891 - RNA, 19 nt, Artificial Sequence
  Description of Artificial Sequence: Synthetic oligonucleotide
agggagagccagacagugc

SEQ ID NO: 1408892 - RNA, 19 nt, Artificial Sequence
  Description of Artificial Sequence: Synthetic oligonucleotide
ggugaaugagaaccccgug

SEQ ID NO: 1408893 - RNA, 19 nt, Artificial Sequence
  Description of Artificial Sequence: Synthetic oligonucleotide
cuccucgucggcaugcuga

SEQ ID NO: 1408894 - RNA, 19 nt, Artificial Sequence
  Description of Artificial Sequence: Synthetic oligonucleotide
guauugccacuggugaaug

SEQ ID NO: 1408895 - RNA, 19 nt, Artificial Sequence
  Description of Artificial Sequence: Synthetic oligonucleotide
agugugcggucccaggcau

SEQ ID NO: 1408896 - RNA, 19 nt, Artificial Sequence
  Description of Artificial Sequence: Synthetic oligonucleotide
gugcagacuagugaucuuc

SEQ ID NO: 1408897 - RNA, 19 nt, Artificial Sequence
  Description of Artificial Sequence: Synthetic oligonucleotide
guggaagucccagcugcgg

SEQ ID NO: 1408898 - RNA, 19 nt, Artificial Sequence
  Description of Artificial Sequence: Synthetic oligonucleotide
ugcggugcuagagccaggu

SEQ ID NO: 1408899 - RNA, 19 nt, Artificial Sequence
  Description of Artificial Sequence: Synthetic oligonucleotide
ccaggcauugaccugugug

SEQ ID NO: 1408900 - RNA, 19 nt, Artificial Sequence
  Description of Artificial Sequence: Synthetic oligonucleotide
uacucagguugagcuuugg

SEQ ID NO: 1408901 - RNA, 19 nt, Artificial Sequence
  Description of Artificial Sequence: Synthetic oligonucleotide
ucgucggcaugcugaaggu

SEQ ID NO: 1408902 - RNA, 19 nt, Artificial Sequence
  Description of Artificial Sequence: Synthetic oligonucleotide
agccuguagauggagcaga

SEQ ID NO: 1408903 - RNA, 19 nt, Artificial Sequence
  Description of Artificial Sequence: Synthetic oligonucleotide
uugaauccuggggucugug

SEQ ID NO: 1408904 - RNA, 19 nt, Artificial Sequence
  Description of Artificial Sequence: Synthetic oligonucleotide
ucccaguagcagcuacacu

SEQ ID NO: 1408905 - RNA, 19 nt, Artificial Sequence
  Description of Artificial Sequence: Synthetic oligonucleotide
gugcauucaggaucuugca

SEQ ID NO: 1408906 - RNA, 19 nt, Artificial Sequence
  Description of Artificial Sequence: Synthetic oligonucleotide
gguagucguugcuggcugg

SEQ ID NO: 1408907 - RNA, 19 nt, Artificial Sequence
  Description of Artificial Sequence: Synthetic oligonucleotide
gggagucccaaaauuaauc

SEQ ID NO: 1408908 - RNA, 19 nt, Artificial Sequence
  Description of Artificial Sequence: Synthetic oligonucleotide
acagacacggcuggccucu

SEQ ID NO: 1408909 - RNA, 19 nt, Artificial Sequence
  Description of Artificial Sequence: Synthetic oligonucleotide
aggugcucgaugauguccu

SEQ ID NO: 1408910 - RNA, 19 nt, Artificial Sequence
  Description of Artificial Sequence: Synthetic oligonucleotide
ggugagugagaagaggcca

SEQ ID NO: 1408911 - RNA, 19 nt, Artificial Sequence
  Description of Artificial Sequence: Synthetic oligonucleotide
gaguagccgcaguugucac

SEQ ID NO: 1408912 - RNA, 19 nt, Artificial Sequence
  Description of Artificial Sequence: Synthetic oligonucleotide
caggacuagucgaaggcaa

SEQ ID NO: 1408913 - RNA, 19 nt, Artificial Sequence
  Description of Artificial Sequence: Synthetic oligonucleotide
gguguggcagcuguguuac

SEQ ID NO: 1408914 - RNA, 19 nt, Artificial Sequence
  Description of Artificial Sequence: Synthetic oligonucleotide
ggggagucccaguagcagc

SEQ ID NO: 1408915 - RNA, 19 nt, Artificial Sequence
  Description of Artificial Sequence: Synthetic oligonucleotide
ggaagugccgcuccugauc

SEQ ID NO: 1408916 - RNA, 19 nt, Artificial Sequence
  Description of Artificial Sequence: Synthetic oligonucleotide
gcauaggucauugcgggac

SEQ ID NO: 1408917 - RNA, 19 nt, Artificial Sequence
  Description of Artificial Sequence: Synthetic oligonucleotide
uggacccuguacugguggu

SEQ ID NO: 1408918 - RNA, 19 nt, Artificial Sequence
  Description of Artificial Sequence: Synthetic oligonucleotide
cuauagaagcaaagagugu

SEQ ID NO: 1408919 - RNA, 19 nt, Artificial Sequence
  Description of Artificial Sequence: Synthetic oligonucleotide
caguagaagggguagucgu

SEQ ID NO: 1408920 - RNA, 19 nt, Artificial Sequence
  Description of Artificial Sequence: Synthetic oligonucleotide
gggugcuacugccaaggcc

SEQ ID NO: 1408921 - RNA, 19 nt, Artificial Sequence
  Description of Artificial Sequence: Synthetic oligonucleotide
acgcuccucgucggcaugc

SEQ ID NO: 1408922 - RNA, 19 nt, Artificial Sequence
  Description of Artificial Sequence: Synthetic oligonucleotide
caccaucguggcuggagug

SEQ ID NO: 1408923 - RNA, 19 nt, Artificial Sequence
  Description of Artificial Sequence: Synthetic oligonucleotide
uugcgggaccuguggaagu

SEQ ID NO: 1408924 - RNA, 19 nt, Artificial Sequence
  Description of Artificial Sequence: Synthetic oligonucleotide
gugcuagagccagguaggg

SEQ ID NO: 1408925 - RNA, 19 nt, Artificial Sequence
  Description of Artificial Sequence: Synthetic oligonucleotide
cacccacugaagggaaucc

SEQ ID NO: 1408926 - RNA, 19 nt, Artificial Sequence
  Description of Artificial Sequence: Synthetic oligonucleotide
ugcuccuuacggcggcccu

SEQ ID NO: 1408927 - RNA, 19 nt, Artificial Sequence
  Description of Artificial Sequence: Synthetic oligonucleotide
uccucgucggcaugcugaa

SEQ ID NO: 1408928 - RNA, 19 nt, Artificial Sequence
  Description of Artificial Sequence: Synthetic oligonucleotide
cggugcuagagccagguag

SEQ ID NO: 1408929 - RNA, 19 nt, Artificial Sequence
  Description of Artificial Sequence: Synthetic oligonucleotide
accaucguggcuggaguga

SEQ ID NO: 1408930 - RNA, 19 nt, Artificial Sequence
  Description of Artificial Sequence: Synthetic oligonucleotide
caccucacggugcagacua

SEQ ID NO: 1408931 - RNA, 19 nt, Artificial Sequence
  Description of Artificial Sequence: Synthetic oligonucleotide
gaagcagguguuguuccaa

SEQ ID NO: 1408932 - RNA, 19 nt, Artificial Sequence
  Description of Artificial Sequence: Synthetic oligonucleotide
uggcuggagugaagggaga

SEQ ID NO: 1408933 - RNA, 19 nt, Artificial Sequence
  Description of Artificial Sequence: Synthetic oligonucleotide
agacggcaguugguaaggg

SEQ ID NO: 1408934 - RNA, 19 nt, Artificial Sequence
  Description of Artificial Sequence: Synthetic oligonucleotide
aggucauugcgggaccugu

SEQ ID NO: 1408935 - RNA, 19 nt, Artificial Sequence
  Description of Artificial Sequence: Synthetic oligonucleotide
agaaagccagcgguccugu

SEQ ID NO: 1408936 - RNA, 19 nt, Artificial Sequence
  Description of Artificial Sequence: Synthetic oligonucleotide
ggcauugaccuguguggcc

SEQ ID NO: 1408937 - RNA, 19 nt, Artificial Sequence
  Description of Artificial Sequence: Synthetic oligonucleotide
ccaguagaagggguagucg

SEQ ID NO: 1408938 - RNA, 19 nt, Artificial Sequence
  Description of Artificial Sequence: Synthetic oligonucleotide
auaggucauugcgggaccu

SEQ ID NO: 1408939 - RNA, 19 nt, Artificial Sequence
  Description of Artificial Sequence: Synthetic oligonucleotide
agcuccuucuguugugaua

SEQ ID NO: 1408940 - RNA, 19 nt, Artificial Sequence
  Description of Artificial Sequence: Synthetic oligonucleotide
caaugcgcaggcugcgcuc

SEQ ID NO: 1408941 - RNA, 19 nt, Artificial Sequence
  Description of Artificial Sequence: Synthetic oligonucleotide
cuguguuacucagguugag

SEQ ID NO: 1408942 - RNA, 19 nt, Artificial Sequence
  Description of Artificial Sequence: Synthetic oligonucleotide
ggacuagucgaaggcaaug

SEQ ID NO: 1408943 - RNA, 19 nt, Artificial Sequence
  Description of Artificial Sequence: Synthetic oligonucleotide
agcacuugagacggcaguu

SEQ ID NO: 1408944 - RNA, 19 nt, Artificial Sequence
  Description of Artificial Sequence: Synthetic oligonucleotide
guggaggcgggugguagag

SEQ ID NO: 1408945 - RNA, 19 nt, Artificial Sequence
  Description of Artificial Sequence: Synthetic oligonucleotide
guuacucagguugagcuuu

SEQ ID NO: 1408946 - RNA, 19 nt, Artificial Sequence
  Description of Artificial Sequence: Synthetic oligonucleotide
ggccuugaggcugaagccc

SEQ ID NO: 1408947 - RNA, 19 nt, Artificial Sequence
  Description of Artificial Sequence: Synthetic oligonucleotide
agguccugugccaugcgcu

SEQ ID NO: 1408948 - RNA, 19 nt, Artificial Sequence
  Description of Artificial Sequence: Synthetic oligonucleotide
cauugcgggaccuguggaa

SEQ ID NO: 1408949 - RNA, 19 nt, Artificial Sequence
  Description of Artificial Sequence: Synthetic oligonucleotide
ggguagucguugcuggcug

SEQ ID NO: 1408950 - RNA, 19 nt, Artificial Sequence
  Description of Artificial Sequence: Synthetic oligonucleotide
cacggugcagacuagugau

SEQ ID NO: 1408951 - RNA, 19 nt, Artificial Sequence
  Description of Artificial Sequence: Synthetic oligonucleotide
caucguggcuggagugaag

SEQ ID NO: 1408952 - RNA, 19 nt, Artificial Sequence
  Description of Artificial Sequence: Synthetic oligonucleotide
caugcgcuugagcugugca

SEQ ID NO: 1408953 - RNA, 19 nt, Artificial Sequence
  Description of Artificial Sequence: Synthetic oligonucleotide
gugauaggaugaaguccag

SEQ ID NO: 1408954 - RNA, 19 nt, Artificial Sequence
  Description of Artificial Sequence: Synthetic oligonucleotide
cacgcaggacuagucgaag

SEQ ID NO: 1408955 - RNA, 19 nt, Artificial Sequence
  Description of Artificial Sequence: Synthetic oligonucleotide
ucacgcuccucgucggcau

SEQ ID NO: 1408956 - RNA, 19 nt, Artificial Sequence
  Description of Artificial Sequence: Synthetic oligonucleotide
guggagccuguagauggag

SEQ ID NO: 1408957 - RNA, 19 nt, Artificial Sequence
  Description of Artificial Sequence: Synthetic oligonucleotide
aggcaaugcgcaggcugcg

SEQ ID NO: 1408958 - RNA, 19 nt, Artificial Sequence
  Description of Artificial Sequence: Synthetic oligonucleotide
acggugcagacuagugauc

SEQ ID NO: 1408959 - RNA, 19 nt, Artificial Sequence
  Description of Artificial Sequence: Synthetic oligonucleotide
gcgcuugagcugugcaucg

SEQ ID NO: 1408960 - RNA, 19 nt, Artificial Sequence
  Description of Artificial Sequence: Synthetic oligonucleotide
uagccgcaguugucacugg

SEQ ID NO: 1408961 - RNA, 19 nt, Artificial Sequence
  Description of Artificial Sequence: Synthetic oligonucleotide
aggaagugccgcuccugau

SEQ ID NO: 1408962 - RNA, 19 nt, Artificial Sequence
  Description of Artificial Sequence: Synthetic oligonucleotide
agggagucccaaaauuaau

SEQ ID NO: 1408963 - RNA, 19 nt, Artificial Sequence
  Description of Artificial Sequence: Synthetic oligonucleotide
gcugcggugcuagagccag

SEQ ID NO: 1408964 - RNA, 19 nt, Artificial Sequence
  Description of Artificial Sequence: Synthetic oligonucleotide
ccgcaguugucacuggagc

SEQ ID NO: 1408965 - RNA, 19 nt, Artificial Sequence
  Description of Artificial Sequence: Synthetic oligonucleotide
gccccuccuauucacgcag

SEQ ID NO: 1408966 - RNA, 19 nt, Artificial Sequence
  Description of Artificial Sequence: Synthetic oligonucleotide
ccaguguuggcuguagcug

SEQ ID NO: 1408967 - RNA, 19 nt, Artificial Sequence
  Description of Artificial Sequence: Synthetic oligonucleotide
ggaauccaugugugcauuc

SEQ ID NO: 1408968 - RNA, 19 nt, Artificial Sequence
  Description of Artificial Sequence: Synthetic oligonucleotide
cauucaggaucuugcagau

SEQ ID NO: 1408969 - RNA, 19 nt, Artificial Sequence
  Description of Artificial Sequence: Synthetic oligonucleotide
gugaagggagagccagaca

SEQ ID NO: 1408970 - RNA, 19 nt, Artificial Sequence
  Description of Artificial Sequence: Synthetic oligonucleotide
gacggcaguugguaagggu

SEQ ID NO: 1408971 - RNA, 19 nt, Artificial Sequence
  Description of Artificial Sequence: Synthetic oligonucleotide
uagucguugcuggcuggga

SEQ ID NO: 1408972 - RNA, 19 nt, Artificial Sequence
  Description of Artificial Sequence: Synthetic oligonucleotide
ggagggagucccaaaauua

SEQ ID NO: 1408973 - RNA, 19 nt, Artificial Sequence
  Description of Artificial Sequence: Synthetic oligonucleotide
uagcagcuacacugcugga

SEQ ID NO: 1408974 - RNA, 19 nt, Artificial Sequence
  Description of Artificial Sequence: Synthetic oligonucleotide
gcuuuccagcugugcauag

SEQ ID NO: 1408975 - RNA, 19 nt, Artificial Sequence
  Description of Artificial Sequence: Synthetic oligonucleotide
gugcaucgauguucucagc

SEQ ID NO: 1408976 - RNA, 19 nt, Artificial Sequence
  Description of Artificial Sequence: Synthetic oligonucleotide
gaggccaguagaaggggua

SEQ ID NO: 1408977 - RNA, 19 nt, Artificial Sequence
  Description of Artificial Sequence: Synthetic oligonucleotide
guuccuccagaagcaggug

SEQ ID NO: 1408978 - RNA, 19 nt, Artificial Sequence
  Description of Artificial Sequence: Synthetic oligonucleotide
aguuccugauccagccgcu

SEQ ID NO: 1408979 - RNA, 19 nt, Artificial Sequence
  Description of Artificial Sequence: Synthetic oligonucleotide
caggugcuauagaagcaaa

SEQ ID NO: 1408980 - RNA, 19 nt, Artificial Sequence
  Description of Artificial Sequence: Synthetic oligonucleotide
ggugccacucugcuccuuc

SEQ ID NO: 1408981 - RNA, 19 nt, Artificial Sequence
  Description of Artificial Sequence: Synthetic oligonucleotide
gcgguccuguaacccaagg

SEQ ID NO: 1408982 - RNA, 19 nt, Artificial Sequence
  Description of Artificial Sequence: Synthetic oligonucleotide
ugagaaccccguggagccu

SEQ ID NO: 1408983 - RNA, 19 nt, Artificial Sequence
  Description of Artificial Sequence: Synthetic oligonucleotide
gcugugcauaggucauugc

SEQ ID NO: 1408984 - RNA, 19 nt, Artificial Sequence
  Description of Artificial Sequence: Synthetic oligonucleotide
ggagccccuccuauucacg

SEQ ID NO: 1408985 - RNA, 19 nt, Artificial Sequence
  Description of Artificial Sequence: Synthetic oligonucleotide
gguaagggugcuacugcca

SEQ ID NO: 1408986 - RNA, 19 nt, Artificial Sequence
  Description of Artificial Sequence: Synthetic oligonucleotide
gagugaagggagagccaga

SEQ ID NO: 1408987 - RNA, 19 nt, Artificial Sequence
  Description of Artificial Sequence: Synthetic oligonucleotide
gagccagguaggggagucc

SEQ ID NO: 1408988 - RNA, 19 nt, Artificial Sequence
  Description of Artificial Sequence: Synthetic oligonucleotide
caaagaguguggacccugu

SEQ ID NO: 1408989 - RNA, 19 nt, Artificial Sequence
  Description of Artificial Sequence: Synthetic oligonucleotide
aggacuagucgaaggcaau

SEQ ID NO: 1408990 - RNA, 19 nt, Artificial Sequence
  Description of Artificial Sequence: Synthetic oligonucleotide
gaagggagagccagacagu

SEQ ID NO: 1408991 - RNA, 19 nt, Artificial Sequence
  Description of Artificial Sequence: Synthetic oligonucleotide
gcuguguuacucagguuga

SEQ ID NO: 1408992 - RNA, 19 nt, Artificial Sequence
  Description of Artificial Sequence: Synthetic oligonucleotide
gaggcgggugguagaggug

SEQ ID NO: 1408993 - RNA, 19 nt, Artificial Sequence
  Description of Artificial Sequence: Synthetic oligonucleotide
gcagacuagugaucuucuc

SEQ ID NO: 1408994 - RNA, 19 nt, Artificial Sequence
  Description of Artificial Sequence: Synthetic oligonucleotide
ccuguaacccaaggagccc

SEQ ID NO: 1408995 - RNA, 19 nt, Artificial Sequence
  Description of Artificial Sequence: Synthetic oligonucleotide
cagccgcuucugaucuagc

SEQ ID NO: 1408996 - RNA, 19 nt, Artificial Sequence
  Description of Artificial Sequence: Synthetic oligonucleotide
ucccgcuguaguggucacc

SEQ ID NO: 1408997 - RNA, 19 nt, Artificial Sequence
  Description of Artificial Sequence: Synthetic oligonucleotide
gcaggacuagucgaaggca

SEQ ID NO: 1408998 - RNA, 19 nt, Artificial Sequence
  Description of Artificial Sequence: Synthetic oligonucleotide
gccaguagaagggguaguc

SEQ ID NO: 1408999 - RNA, 19 nt, Artificial Sequence
  Description of Artificial Sequence: Synthetic oligonucleotide
ggaggcgggugguagaggu

SEQ ID NO: 1409000 - RNA, 19 nt, Artificial Sequence
  Description of Artificial Sequence: Synthetic oligonucleotide
gccgccagccauguucagg

SEQ ID NO: 1409001 - RNA, 19 nt, Artificial Sequence
  Description of Artificial Sequence: Synthetic oligonucleotide
gccaguguuggcuguagcu

SEQ ID NO: 1409002 - RNA, 19 nt, Artificial Sequence
  Description of Artificial Sequence: Synthetic oligonucleotide
cugcggugcuagagccagg

SEQ ID NO: 1409003 - RNA, 19 nt, Artificial Sequence
  Description of Artificial Sequence: Synthetic oligonucleotide
ccuauucacgcaggacuag

SEQ ID NO: 1409004 - RNA, 19 nt, Artificial Sequence
  Description of Artificial Sequence: Synthetic oligonucleotide
cuauucacgcaggacuagu

SEQ ID NO: 1409005 - RNA, 19 nt, Artificial Sequence
  Description of Artificial Sequence: Synthetic oligonucleotide
ggucauugcgggaccugug

SEQ ID NO: 1409006 - RNA, 19 nt, Artificial Sequence
  Description of Artificial Sequence: Synthetic oligonucleotide
caaucagugugcgguccca

SEQ ID NO: 1409007 - RNA, 19 nt, Artificial Sequence
  Description of Artificial Sequence: Synthetic oligonucleotide
aggcugggauguauugcca

SEQ ID NO: 1409008 - RNA, 19 nt, Artificial Sequence
  Description of Artificial Sequence: Synthetic oligonucleotide
gccagcgguccuguaaccc

SEQ ID NO: 1409009 - RNA, 19 nt, Artificial Sequence
  Description of Artificial Sequence: Synthetic oligonucleotide
ugcucccgcuguagugguc

SEQ ID NO: 1409010 - RNA, 19 nt, Artificial Sequence
  Description of Artificial Sequence: Synthetic oligonucleotide
agcgguccuguaacccaag

SEQ ID NO: 1409011 - RNA, 19 nt, Artificial Sequence
  Description of Artificial Sequence: Synthetic oligonucleotide
acccaaggagccccuccua

SEQ ID NO: 1409012 - RNA, 19 nt, Artificial Sequence
  Description of Artificial Sequence: Synthetic oligonucleotide
cagcgguccuguaacccaa

SEQ ID NO: 1409013 - RNA, 19 nt, Artificial Sequence
  Description of Artificial Sequence: Synthetic oligonucleotide
gcugagcuacccacagagc

SEQ ID NO: 1409014 - RNA, 19 nt, Artificial Sequence
  Description of Artificial Sequence: Synthetic oligonucleotide
gcccucacagacacggcug

SEQ ID NO: 1409015 - RNA, 19 nt, Artificial Sequence
  Description of Artificial Sequence: Synthetic oligonucleotide
ggacccuguacugguggug

SEQ ID NO: 1409016 - RNA, 19 nt, Artificial Sequence
  Description of Artificial Sequence: Synthetic oligonucleotide
gugggucacugguguccgc

SEQ ID NO: 1409017 - RNA, 19 nt, Artificial Sequence
  Description of Artificial Sequence: Synthetic oligonucleotide
gcuaguaguggaggugcca

SEQ ID NO: 1409018 - RNA, 19 nt, Artificial Sequence
  Description of Artificial Sequence: Synthetic oligonucleotide
ccuccuauucacgcaggac

SEQ ID NO: 1409019 - RNA, 19 nt, Artificial Sequence
  Description of Artificial Sequence: Synthetic oligonucleotide
gggauguauugccacuggu

SEQ ID NO: 1409020 - RNA, 19 nt, Artificial Sequence
  Description of Artificial Sequence: Synthetic oligonucleotide
gugggcgcagcagcagcug

SEQ ID NO: 1409021 - RNA, 19 nt, Artificial Sequence
  Description of Artificial Sequence: Synthetic oligonucleotide
guaacccaaggagccccuc

SEQ ID NO: 1409022 - RNA, 19 nt, Artificial Sequence
  Description of Artificial Sequence: Synthetic oligonucleotide
ccagcgguccuguaaccca

SEQ ID NO: 1409023 - RNA, 19 nt, Artificial Sequence
  Description of Artificial Sequence: Synthetic oligonucleotide
gcugggauguauugccacu

SEQ ID NO: 1409024 - RNA, 19 nt, Artificial Sequence
  Description of Artificial Sequence: Synthetic oligonucleotide
gugugguuggggccugugu

SEQ ID NO: 1409025 - RNA, 19 nt, Artificial Sequence
  Description of Artificial Sequence: Synthetic oligonucleotide
ggagagccagacagugcug

SEQ ID NO: 1409026 - RNA, 19 nt, Artificial Sequence
  Description of Artificial Sequence: Synthetic oligonucleotide
uccuuacggcggcccucac

SEQ ID NO: 1409027 - RNA, 19 nt, Artificial Sequence
  Description of Artificial Sequence: Synthetic oligonucleotide
ggcaaugcgcaggcugcgc

SEQ ID NO: 1409028 - RNA, 19 nt, Artificial Sequence
  Description of Artificial Sequence: Synthetic oligonucleotide
gcucccgcuguagugguca

SEQ ID NO: 1409029 - RNA, 19 nt, Artificial Sequence
  Description of Artificial Sequence: Synthetic oligonucleotide
guugagcuuuggggugcug

SEQ ID NO: 1409030 - RNA, 19 nt, Artificial Sequence
  Description of Artificial Sequence: Synthetic oligonucleotide
gcacuaggaguagccgcag

SEQ ID NO: 1409031 - RNA, 19 nt, Artificial Sequence
  Description of Artificial Sequence: Synthetic oligonucleotide
agcugcggugcuagagcca

SEQ ID NO: 1409032 - RNA, 19 nt, Artificial Sequence
  Description of Artificial Sequence: Synthetic oligonucleotide
ggcccucacagacacggcu

SEQ ID NO: 1409033 - RNA, 19 nt, Artificial Sequence
  Description of Artificial Sequence: Synthetic oligonucleotide
ccacccacugaagggaauc

SEQ ID NO: 1409034 - RNA, 19 nt, Artificial Sequence
  Description of Artificial Sequence: Synthetic oligonucleotide
ccccuccuauucacgcagg

SEQ ID NO: 1409035 - RNA, 19 nt, Artificial Sequence
  Description of Artificial Sequence: Synthetic oligonucleotide
guugaauccuggggucugu

SEQ ID NO: 1409036 - RNA, 19 nt, Artificial Sequence
  Description of Artificial Sequence: Synthetic oligonucleotide
accucacggugcagacuag

SEQ ID NO: 1409037 - RNA, 19 nt, Artificial Sequence
  Description of Artificial Sequence: Synthetic oligonucleotide
cccgcuguaguggucacca

SEQ ID NO: 1409038 - RNA, 19 nt, Artificial Sequence
  Description of Artificial Sequence: Synthetic oligonucleotide
cuccagaagcagguguugu

SEQ ID NO: 1409039 - RNA, 19 nt, Artificial Sequence
  Description of Artificial Sequence: Synthetic oligonucleotide
acggcggcccucacagaca

SEQ ID NO: 1409040 - RNA, 19 nt, Artificial Sequence
  Description of Artificial Sequence: Synthetic oligonucleotide
gcaaugcgcaggcugcgcu

SEQ ID NO: 1409041 - RNA, 19 nt, Artificial Sequence
  Description of Artificial Sequence: Synthetic oligonucleotide
gcggucccaggcauugacc

SEQ ID NO: 1409042 - RNA, 19 nt, Artificial Sequence
  Description of Artificial Sequence: Synthetic oligonucleotide
agccaauguugaagccaga

SEQ ID NO: 1409043 - RNA, 19 nt, Artificial Sequence
  Description of Artificial Sequence: Synthetic oligonucleotide
ggcaggagcaggugcuaua

SEQ ID NO: 1409044 - RNA, 19 nt, Artificial Sequence
  Description of Artificial Sequence: Synthetic oligonucleotide
caguagcagcuacacugcu

SEQ ID NO: 1409045 - RNA, 19 nt, Artificial Sequence
  Description of Artificial Sequence: Synthetic oligonucleotide
agaaccccguggagccugu

SEQ ID NO: 1409046 - RNA, 19 nt, Artificial Sequence
  Description of Artificial Sequence: Synthetic oligonucleotide
gcugggagggagucccaaa

SEQ ID NO: 1409047 - RNA, 19 nt, Artificial Sequence
  Description of Artificial Sequence: Synthetic oligonucleotide
agucccagcugcggugcua

SEQ ID NO: 1409048 - RNA, 19 nt, Artificial Sequence
  Description of Artificial Sequence: Synthetic oligonucleotide
gcgggaccuguggaagucc

SEQ ID NO: 1409049 - RNA, 19 nt, Artificial Sequence
  Description of Artificial Sequence: Synthetic oligonucleotide
ccgccagccauguucaggu

SEQ ID NO: 1409050 - RNA, 19 nt, Artificial Sequence
  Description of Artificial Sequence: Synthetic oligonucleotide
cccguggagccuguagaug

SEQ ID NO: 1409051 - RNA, 19 nt, Artificial Sequence
  Description of Artificial Sequence: Synthetic oligonucleotide
cacuaggaguagccgcagu

SEQ ID NO: 1409052 - RNA, 19 nt, Artificial Sequence
  Description of Artificial Sequence: Synthetic oligonucleotide
gggccgccagccauguuca

SEQ ID NO: 1409053 - RNA, 19 nt, Artificial Sequence
  Description of Artificial Sequence: Synthetic oligonucleotide
gggguagucguugcuggcu

SEQ ID NO: 1409054 - RNA, 19 nt, Artificial Sequence
  Description of Artificial Sequence: Synthetic oligonucleotide
ccaugcgcuugagcugugc

SEQ ID NO: 1409055 - RNA, 19 nt, Artificial Sequence
  Description of Artificial Sequence: Synthetic oligonucleotide
cgguccuguaacccaagga

SEQ ID NO: 1409056 - RNA, 19 nt, Artificial Sequence
  Description of Artificial Sequence: Synthetic oligonucleotide
cccuccuauucacgcagga

SEQ ID NO: 1409057 - RNA, 19 nt, Artificial Sequence
  Description of Artificial Sequence: Synthetic oligonucleotide
ccuuacggcggcccucaca

SEQ ID NO: 1409058 - RNA, 19 nt, Artificial Sequence
  Description of Artificial Sequence: Synthetic oligonucleotide
cugcucccgcuguaguggu

SEQ ID NO: 1409059 - RNA, 19 nt, Artificial Sequence
  Description of Artificial Sequence: Synthetic oligonucleotide
gcuccuuacggcggcccuc

SEQ ID NO: 1409060 - RNA, 19 nt, Artificial Sequence
  Description of Artificial Sequence: Synthetic oligonucleotide
ggcaguugguaagggugcu

SEQ ID NO: 1409061 - RNA, 19 nt, Artificial Sequence
  Description of Artificial Sequence: Synthetic oligonucleotide
ggccgccagccauguucag

SEQ ID NO: 1409062 - RNA, 19 nt, Artificial Sequence
  Description of Artificial Sequence: Synthetic oligonucleotide
ggugcagacuagugaucuu

SEQ ID NO: 1409063 - RNA, 19 nt, Artificial Sequence
  Description of Artificial Sequence: Synthetic oligonucleotide
gcaguugguaagggugcua

SEQ ID NO: 1409064 - RNA, 19 nt, Artificial Sequence
  Description of Artificial Sequence: Synthetic oligonucleotide
cccuguacuggugguggca

SEQ ID NO: 1409065 - RNA, 19 nt, Artificial Sequence
  Description of Artificial Sequence: Synthetic oligonucleotide
ccaucguggcuggagugaa

SEQ ID NO: 1409066 - RNA, 19 nt, Artificial Sequence
  Description of Artificial Sequence: Synthetic oligonucleotide
guuccugauccagccgcuu

SEQ ID NO: 1409067 - RNA, 19 nt, Artificial Sequence
  Description of Artificial Sequence: Synthetic oligonucleotide
ggcugggagggagucccaa

SEQ ID NO: 1409068 - RNA, 19 nt, Artificial Sequence
  Description of Artificial Sequence: Synthetic oligonucleotide
ccccauucucaaucagugu

SEQ ID NO: 1409069 - RNA, 19 nt, Artificial Sequence
  Description of Artificial Sequence: Synthetic oligonucleotide
ccucgucggcaugcugaag

SEQ ID NO: 1409070 - RNA, 19 nt, Artificial Sequence
  Description of Artificial Sequence: Synthetic oligonucleotide
gaaccccguggagccugua

SEQ ID NO: 1409071 - RNA, 19 nt, Artificial Sequence
  Description of Artificial Sequence: Synthetic oligonucleotide
ccaaggagccccuccuauu

SEQ ID NO: 1409072 - RNA, 19 nt, Artificial Sequence
  Description of Artificial Sequence: Synthetic oligonucleotide
cggcccucacagacacggc

SEQ ID NO: 1409073 - RNA, 19 nt, Artificial Sequence
  Description of Artificial Sequence: Synthetic oligonucleotide
gcggugcuagagccaggua

SEQ ID NO: 1409074 - RNA, 19 nt, Artificial Sequence
  Description of Artificial Sequence: Synthetic oligonucleotide
gccaugcgcuugagcugug

SEQ ID NO: 1409075 - RNA, 19 nt, Artificial Sequence
  Description of Artificial Sequence: Synthetic oligonucleotide
ccccguggagccuguagau

SEQ ID NO: 1409076 - RNA, 19 nt, Artificial Sequence
  Description of Artificial Sequence: Synthetic oligonucleotide
ggucaccaucguggcugga

SEQ ID NO: 1409077 - RNA, 19 nt, Artificial Sequence
  Description of Artificial Sequence: Synthetic oligonucleotide
ccucacggugcagacuagu

SEQ ID NO: 1409078 - RNA, 19 nt, Artificial Sequence
  Description of Artificial Sequence: Synthetic oligonucleotide
gugugcggucccaggcauu

SEQ ID NO: 1409079 - RNA, 19 nt, Artificial Sequence
  Description of Artificial Sequence: Synthetic oligonucleotide
gcagggccgccagccaugu

SEQ ID NO: 1409080 - RNA, 19 nt, Artificial Sequence
  Description of Artificial Sequence: Synthetic oligonucleotide
cgcuugagcugugcaucga

SEQ ID NO: 1409081 - RNA, 19 nt, Artificial Sequence
  Description of Artificial Sequence: Synthetic oligonucleotide
cgucggcaugcugaaggua

SEQ ID NO: 1409082 - RNA, 19 nt, Artificial Sequence
  Description of Artificial Sequence: Synthetic oligonucleotide
cccaggcauugaccugugu

SEQ ID NO: 1409083 - RNA, 19 nt, Artificial Sequence
  Description of Artificial Sequence: Synthetic oligonucleotide
cggcaugcugaagguagau

SEQ ID NO: 1409084 - RNA, 19 nt, Artificial Sequence
  Description of Artificial Sequence: Synthetic oligonucleotide
ccgcuguaguggucaccau

SEQ ID NO: 1409085 - RNA, 19 nt, Artificial Sequence
  Description of Artificial Sequence: Synthetic oligonucleotide
cagggccgccagccauguu

SEQ ID NO: 1409086 - RNA, 19 nt, Artificial Sequence
  Description of Artificial Sequence: Synthetic oligonucleotide
gaugccaucacucagcucg

SEQ ID NO: 1409087 - RNA, 19 nt, Artificial Sequence
  Description of Artificial Sequence: Synthetic oligonucleotide
agaaaauugcuccaugcuc

SEQ ID NO: 1409088 - RNA, 19 nt, Artificial Sequence
  Description of Artificial Sequence: Synthetic oligonucleotide
guaaauggugggcagaggg

SEQ ID NO: 1409089 - RNA, 19 nt, Artificial Sequence
  Description of Artificial Sequence: Synthetic oligonucleotide
auugccugcaaccagcauc

SEQ ID NO: 1409090 - RNA, 19 nt, Artificial Sequence
  Description of Artificial Sequence: Synthetic oligonucleotide
gaagauacaguuguggagc

SEQ ID NO: 1409091 - RNA, 19 nt, Artificial Sequence
  Description of Artificial Sequence: Synthetic oligonucleotide
uuagaugccuggaagacgu

SEQ ID NO: 1409092 - RNA, 19 nt, Artificial Sequence
  Description of Artificial Sequence: Synthetic oligonucleotide
uugccugcaaccagcaucg

SEQ ID NO: 1409093 - RNA, 19 nt, Artificial Sequence
  Description of Artificial Sequence: Synthetic oligonucleotide
uggcguuuguaaauggugg

SEQ ID NO: 1409094 - RNA, 19 nt, Artificial Sequence
  Description of Artificial Sequence: Synthetic oligonucleotide
aauggcggacuccaccagc

SEQ ID NO: 1409095 - RNA, 19 nt, Artificial Sequence
  Description of Artificial Sequence: Synthetic oligonucleotide
ucaauaauauucuccacua

SEQ ID NO: 1409096 - RNA, 19 nt, Artificial Sequence
  Description of Artificial Sequence: Synthetic oligonucleotide
gucauuggcacacuugcgg

SEQ ID NO: 1409097 - RNA, 19 nt, Artificial Sequence
  Description of Artificial Sequence: Synthetic oligonucleotide
uaaacuuuaggcugucugu

SEQ ID NO: 1409098 - RNA, 19 nt, Artificial Sequence
  Description of Artificial Sequence: Synthetic oligonucleotide
uucgacauugccccgaccu

SEQ ID NO: 1409099 - RNA, 19 nt, Artificial Sequence
  Description of Artificial Sequence: Synthetic oligonucleotide
gaaagggugauguuuccug

SEQ ID NO: 1409100 - RNA, 19 nt, Artificial Sequence
  Description of Artificial Sequence: Synthetic oligonucleotide
uuaacaguugcuucugccu

SEQ ID NO: 1409101 - RNA, 19 nt, Artificial Sequence
  Description of Artificial Sequence: Synthetic oligonucleotide
aggcaauagauguuaaucu

SEQ ID NO: 1409102 - RNA, 19 nt, Artificial Sequence
  Description of Artificial Sequence: Synthetic oligonucleotide
ucaauggucuggcacaccu

SEQ ID NO: 1409103 - RNA, 19 nt, Artificial Sequence
  Description of Artificial Sequence: Synthetic oligonucleotide
aucuucgugcuccucacac

SEQ ID NO: 1409104 - RNA, 19 nt, Artificial Sequence
  Description of Artificial Sequence: Synthetic oligonucleotide
ucuagugccugccuuggcc

SEQ ID NO: 1409105 - RNA, 19 nt, Artificial Sequence
  Description of Artificial Sequence: Synthetic oligonucleotide
uuggcguuuguaaauggug

SEQ ID NO: 1409106 - RNA, 19 nt, Artificial Sequence
  Description of Artificial Sequence: Synthetic oligonucleotide
aggacaaccucaugccugc

SEQ ID NO: 1409107 - RNA, 19 nt, Artificial Sequence
  Description of Artificial Sequence: Synthetic oligonucleotide
uuuuggcguuuguaaaugg

SEQ ID NO: 1409108 - RNA, 19 nt, Artificial Sequence
  Description of Artificial Sequence: Synthetic oligonucleotide
caugaggugcuguucagcc

SEQ ID NO: 1409109 - RNA, 19 nt, Artificial Sequence
  Description of Artificial Sequence: Synthetic oligonucleotide
gauacaguuguggagcccc

SEQ ID NO: 1409110 - RNA, 19 nt, Artificial Sequence
  Description of Artificial Sequence: Synthetic oligonucleotide
aaacuuuaggcugucugug

SEQ ID NO: 1409111 - RNA, 19 nt, Artificial Sequence
  Description of Artificial Sequence: Synthetic oligonucleotide
caaacuugucccuuuuagc

SEQ ID NO: 1409112 - RNA, 19 nt, Artificial Sequence
  Description of Artificial Sequence: Synthetic oligonucleotide
auaauauucuccacuagca

SEQ ID NO: 1409113 - RNA, 19 nt, Artificial Sequence
  Description of Artificial Sequence: Synthetic oligonucleotide
agcggcuugaaacccacgg

SEQ ID NO: 1409114 - RNA, 19 nt, Artificial Sequence
  Description of Artificial Sequence: Synthetic oligonucleotide
ucagcucgcucuuuuggcg

SEQ ID NO: 1409115 - RNA, 19 nt, Artificial Sequence
  Description of Artificial Sequence: Synthetic oligonucleotide
aaagggugauguuuccugu

SEQ ID NO: 1409116 - RNA, 19 nt, Artificial Sequence
  Description of Artificial Sequence: Synthetic oligonucleotide
cuaacggccccucucaccc

SEQ ID NO: 1409117 - RNA, 19 nt, Artificial Sequence
  Description of Artificial Sequence: Synthetic oligonucleotide
uguugugugcauccccuag

SEQ ID NO: 1409118 - RNA, 19 nt, Artificial Sequence
  Description of Artificial Sequence: Synthetic oligonucleotide
ugaauggcggacuccacca

SEQ ID NO: 1409119 - RNA, 19 nt, Artificial Sequence
  Description of Artificial Sequence: Synthetic oligonucleotide
ucugcgugaucacugcuug

SEQ ID NO: 1409120 - RNA, 19 nt, Artificial Sequence
  Description of Artificial Sequence: Synthetic oligonucleotide
cacguucacagaaaauugc

SEQ ID NO: 1409121 - RNA, 19 nt, Artificial Sequence
  Description of Artificial Sequence: Synthetic oligonucleotide
aggguuagaugccuggaag

SEQ ID NO: 1409122 - RNA, 19 nt, Artificial Sequence
  Description of Artificial Sequence: Synthetic oligonucleotide
uuuggcguuuguaaauggu

SEQ ID NO: 1409123 - RNA, 19 nt, Artificial Sequence
  Description of Artificial Sequence: Synthetic oligonucleotide
uccacguucacagaaaauu

SEQ ID NO: 1409124 - RNA, 19 nt, Artificial Sequence
  Description of Artificial Sequence: Synthetic oligonucleotide
gugugcauccccuagcagc

SEQ ID NO: 1409125 - RNA, 19 nt, Artificial Sequence
  Description of Artificial Sequence: Synthetic oligonucleotide
aaacccacggugaaguuca

SEQ ID NO: 1409126 - RNA, 19 nt, Artificial Sequence
  Description of Artificial Sequence: Synthetic oligonucleotide
cagcuuagaggaaaccucc

SEQ ID NO: 1409127 - RNA, 19 nt, Artificial Sequence
  Description of Artificial Sequence: Synthetic oligonucleotide
cuuggagaacaucuccagg

SEQ ID NO: 1409128 - RNA, 19 nt, Artificial Sequence
  Description of Artificial Sequence: Synthetic oligonucleotide
gaugguccgcagcauuucg

SEQ ID NO: 1409129 - RNA, 19 nt, Artificial Sequence
  Description of Artificial Sequence: Synthetic oligonucleotide
cucgcacucugaaucaggg

SEQ ID NO: 1409130 - RNA, 19 nt, Artificial Sequence
  Description of Artificial Sequence: Synthetic oligonucleotide
uuccagacgcuucugucug

SEQ ID NO: 1409131 - RNA, 19 nt, Artificial Sequence
  Description of Artificial Sequence: Synthetic oligonucleotide
caggcaauagauguuaauc

SEQ ID NO: 1409132 - RNA, 19 nt, Artificial Sequence
  Description of Artificial Sequence: Synthetic oligonucleotide
uggauucuuaggaucccug

SEQ ID NO: 1409133 - RNA, 19 nt, Artificial Sequence
  Description of Artificial Sequence: Synthetic oligonucleotide
gaaaauugcuccaugcucu

SEQ ID NO: 1409134 - RNA, 19 nt, Artificial Sequence
  Description of Artificial Sequence: Synthetic oligonucleotide
aagaccuugcagagagagc

SEQ ID NO: 1409135 - RNA, 19 nt, Artificial Sequence
  Description of Artificial Sequence: Synthetic oligonucleotide
uccguacugacggaugagg

SEQ ID NO: 1409136 - RNA, 19 nt, Artificial Sequence
  Description of Artificial Sequence: Synthetic oligonucleotide
gauugaauggcggacucca

SEQ ID NO: 1409137 - RNA, 19 nt, Artificial Sequence
  Description of Artificial Sequence: Synthetic oligonucleotide
uuuguaaauggugggcaga

SEQ ID NO: 1409138 - RNA, 19 nt, Artificial Sequence
  Description of Artificial Sequence: Synthetic oligonucleotide
guacugacggaugaggccc

SEQ ID NO: 1409139 - RNA, 19 nt, Artificial Sequence
  Description of Artificial Sequence: Synthetic oligonucleotide
ucuccguacugacggauga

SEQ ID NO: 1409140 - RNA, 19 nt, Artificial Sequence
  Description of Artificial Sequence: Synthetic oligonucleotide
acggaugaggccccgcacg

SEQ ID NO: 1409141 - RNA, 19 nt, Artificial Sequence
  Description of Artificial Sequence: Synthetic oligonucleotide
cuccauggauugaauggcg

SEQ ID NO: 1409142 - RNA, 19 nt, Artificial Sequence
  Description of Artificial Sequence: Synthetic oligonucleotide
ugggcagcggaaacgaccu

SEQ ID NO: 1409143 - RNA, 19 nt, Artificial Sequence
  Description of Artificial Sequence: Synthetic oligonucleotide
augccuugccucccguugc

SEQ ID NO: 1409144 - RNA, 19 nt, Artificial Sequence
  Description of Artificial Sequence: Synthetic oligonucleotide
cuagugccugccuuggccc

SEQ ID NO: 1409145 - RNA, 19 nt, Artificial Sequence
  Description of Artificial Sequence: Synthetic oligonucleotide
cugaagauacaguugugga

SEQ ID NO: 1409146 - RNA, 19 nt, Artificial Sequence
  Description of Artificial Sequence: Synthetic oligonucleotide
agcggaaacgaccuccuga

SEQ ID NO: 1409147 - RNA, 19 nt, Artificial Sequence
  Description of Artificial Sequence: Synthetic oligonucleotide
uugaaagggugauguuucc

SEQ ID NO: 1409148 - RNA, 19 nt, Artificial Sequence
  Description of Artificial Sequence: Synthetic oligonucleotide
ccuagcagcggcuugaaac

SEQ ID NO: 1409149 - RNA, 19 nt, Artificial Sequence
  Description of Artificial Sequence: Synthetic oligonucleotide
uguaaauggugggcagagg

SEQ ID NO: 1409150 - RNA, 19 nt, Artificial Sequence
  Description of Artificial Sequence: Synthetic oligonucleotide
ugugcacacuucuuguaaa

SEQ ID NO: 1409151 - RNA, 19 nt, Artificial Sequence
  Description of Artificial Sequence: Synthetic oligonucleotide
ucuaacggccccucucacc

SEQ ID NO: 1409152 - RNA, 19 nt, Artificial Sequence
  Description of Artificial Sequence: Synthetic oligonucleotide
cccacggugaaguucaucc

SEQ ID NO: 1409153 - RNA, 19 nt, Artificial Sequence
  Description of Artificial Sequence: Synthetic oligonucleotide
caggacaaccucaugccug

SEQ ID NO: 1409154 - RNA, 19 nt, Artificial Sequence
  Description of Artificial Sequence: Synthetic oligonucleotide
aguacggcgcacaaggucu

SEQ ID NO: 1409155 - RNA, 19 nt, Artificial Sequence
  Description of Artificial Sequence: Synthetic oligonucleotide
cucagcucgcucuuuuggc

SEQ ID NO: 1409156 - RNA, 19 nt, Artificial Sequence
  Description of Artificial Sequence: Synthetic oligonucleotide
cuuuuggcguuuguaaaug

SEQ ID NO: 1409157 - RNA, 19 nt, Artificial Sequence
  Description of Artificial Sequence: Synthetic oligonucleotide
ugcgugaucacugcuugca

SEQ ID NO: 1409158 - RNA, 19 nt, Artificial Sequence
  Description of Artificial Sequence: Synthetic oligonucleotide
agcaucgcgaugccaucac

SEQ ID NO: 1409159 - RNA, 19 nt, Artificial Sequence
  Description of Artificial Sequence: Synthetic oligonucleotide
uguucagccuuggagugca

SEQ ID NO: 1409160 - RNA, 19 nt, Artificial Sequence
  Description of Artificial Sequence: Synthetic oligonucleotide
ggaaacgaccuccugaaga

SEQ ID NO: 1409161 - RNA, 19 nt, Artificial Sequence
  Description of Artificial Sequence: Synthetic oligonucleotide
cuuggagugcaguggccgg

SEQ ID NO: 1409162 - RNA, 19 nt, Artificial Sequence
  Description of Artificial Sequence: Synthetic oligonucleotide
ccaccuucgacauugcccc

SEQ ID NO: 1409163 - RNA, 19 nt, Artificial Sequence
  Description of Artificial Sequence: Synthetic oligonucleotide
agacgcuucugucugcacu

SEQ ID NO: 1409164 - RNA, 19 nt, Artificial Sequence
  Description of Artificial Sequence: Synthetic oligonucleotide
gacgcuucugucugcacuc

SEQ ID NO: 1409165 - RNA, 19 nt, Artificial Sequence
  Description of Artificial Sequence: Synthetic oligonucleotide
augccgguccaggacaacc

SEQ ID NO: 1409166 - RNA, 19 nt, Artificial Sequence
  Description of Artificial Sequence: Synthetic oligonucleotide
uccaaguggucuccguacu

SEQ ID NO: 1409167 - RNA, 19 nt, Artificial Sequence
  Description of Artificial Sequence: Synthetic oligonucleotide
aucgcgaugccaucacuca

SEQ ID NO: 1409168 - RNA, 19 nt, Artificial Sequence
  Description of Artificial Sequence: Synthetic oligonucleotide
cuccaaguggucuccguac

SEQ ID NO: 1409169 - RNA, 19 nt, Artificial Sequence
  Description of Artificial Sequence: Synthetic oligonucleotide
ucgcgaugccaucacucag

SEQ ID NO: 1409170 - RNA, 19 nt, Artificial Sequence
  Description of Artificial Sequence: Synthetic oligonucleotide
cagguuccgcugaaggccg

SEQ ID NO: 1409171 - RNA, 19 nt, Artificial Sequence
  Description of Artificial Sequence: Synthetic oligonucleotide
caauagauguuaaucuucu

SEQ ID NO: 1409172 - RNA, 19 nt, Artificial Sequence
  Description of Artificial Sequence: Synthetic oligonucleotide
ucaggcaauagauguuaau

SEQ ID NO: 1409173 - RNA, 19 nt, Artificial Sequence
  Description of Artificial Sequence: Synthetic oligonucleotide
caucgcgaugccaucacuc

SEQ ID NO: 1409174 - RNA, 19 nt, Artificial Sequence
  Description of Artificial Sequence: Synthetic oligonucleotide
guagaccccaugccggucc

SEQ ID NO: 1409175 - RNA, 19 nt, Artificial Sequence
  Description of Artificial Sequence: Synthetic oligonucleotide
ucuucgugcuccucacaca

SEQ ID NO: 1409176 - RNA, 19 nt, Artificial Sequence
  Description of Artificial Sequence: Synthetic oligonucleotide
gaaacccacggugaaguuc

SEQ ID NO: 1409177 - RNA, 19 nt, Artificial Sequence
  Description of Artificial Sequence: Synthetic oligonucleotide
caugccuugccucccguug

SEQ ID NO: 1409178 - RNA, 19 nt, Artificial Sequence
  Description of Artificial Sequence: Synthetic oligonucleotide
uguggauucuuaggauccc

SEQ ID NO: 1409179 - RNA, 19 nt, Artificial Sequence
  Description of Artificial Sequence: Synthetic oligonucleotide
gacgucauuggcacacuug

SEQ ID NO: 1409180 - RNA, 19 nt, Artificial Sequence
  Description of Artificial Sequence: Synthetic oligonucleotide
aucccuuggcgcucuagug

SEQ ID NO: 1409181 - RNA, 19 nt, Artificial Sequence
  Description of Artificial Sequence: Synthetic oligonucleotide
acguucacagaaaauugcu

SEQ ID NO: 1409182 - RNA, 19 nt, Artificial Sequence
  Description of Artificial Sequence: Synthetic oligonucleotide
cuugccucccguugcgggc

SEQ ID NO: 1409183 - RNA, 19 nt, Artificial Sequence
  Description of Artificial Sequence: Synthetic oligonucleotide
aacggccccucucacccug

SEQ ID NO: 1409184 - RNA, 19 nt, Artificial Sequence
  Description of Artificial Sequence: Synthetic oligonucleotide
gaauggcggacuccaccag

SEQ ID NO: 1409185 - RNA, 19 nt, Artificial Sequence
  Description of Artificial Sequence: Synthetic oligonucleotide
ucacugcuugcacacgguc

SEQ ID NO: 1409186 - RNA, 19 nt, Artificial Sequence
  Description of Artificial Sequence: Synthetic oligonucleotide
uuguggagccccgggauug

SEQ ID NO: 1409187 - RNA, 19 nt, Artificial Sequence
  Description of Artificial Sequence: Synthetic oligonucleotide
gugcacacuucuuguaaac

SEQ ID NO: 1409188 - RNA, 19 nt, Artificial Sequence
  Description of Artificial Sequence: Synthetic oligonucleotide
ucgaugguccgcagcauuu

SEQ ID NO: 1409189 - RNA, 19 nt, Artificial Sequence
  Description of Artificial Sequence: Synthetic oligonucleotide
uguuguccucaauggucug

SEQ ID NO: 1409190 - RNA, 19 nt, Artificial Sequence
  Description of Artificial Sequence: Synthetic oligonucleotide
ugcuccacguucacagaaa

SEQ ID NO: 1409191 - RNA, 19 nt, Artificial Sequence
  Description of Artificial Sequence: Synthetic oligonucleotide
ucaugccugcaagaugggc

SEQ ID NO: 1409192 - RNA, 19 nt, Artificial Sequence
  Description of Artificial Sequence: Synthetic oligonucleotide
ggccguagaccccaugccg

SEQ ID NO: 1409193 - RNA, 19 nt, Artificial Sequence
  Description of Artificial Sequence: Synthetic oligonucleotide
gcgcacaaggucucgaacc

SEQ ID NO: 1409194 - RNA, 19 nt, Artificial Sequence
  Description of Artificial Sequence: Synthetic oligonucleotide
ucggccacgugcuccacgu

SEQ ID NO: 1409195 - RNA, 19 nt, Artificial Sequence
  Description of Artificial Sequence: Synthetic oligonucleotide
ucugcacucccuguucaga

SEQ ID NO: 1409196 - RNA, 19 nt, Artificial Sequence
  Description of Artificial Sequence: Synthetic oligonucleotide
uccauguugugugcauccc

SEQ ID NO: 1409197 - RNA, 19 nt, Artificial Sequence
  Description of Artificial Sequence: Synthetic oligonucleotide
gauucuuaggaucccugau

SEQ ID NO: 1409198 - RNA, 19 nt, Artificial Sequence
  Description of Artificial Sequence: Synthetic oligonucleotide
gcaauagauguuaaucuuc

SEQ ID NO: 1409199 - RNA, 19 nt, Artificial Sequence
  Description of Artificial Sequence: Synthetic oligonucleotide
cugccugcggcuguugucc

SEQ ID NO: 1409200 - RNA, 19 nt, Artificial Sequence
  Description of Artificial Sequence: Synthetic oligonucleotide
auugaauggcggacuccac

SEQ ID NO: 1409201 - RNA, 19 nt, Artificial Sequence
  Description of Artificial Sequence: Synthetic oligonucleotide
uacugacggaugaggcccc

SEQ ID NO: 1409202 - RNA, 19 nt, Artificial Sequence
  Description of Artificial Sequence: Synthetic oligonucleotide
ccacguucacagaaaauug

SEQ ID NO: 1409203 - RNA, 19 nt, Artificial Sequence
  Description of Artificial Sequence: Synthetic oligonucleotide
ugggcaccgaagaccuugc

SEQ ID NO: 1409204 - RNA, 19 nt, Artificial Sequence
  Description of Artificial Sequence: Synthetic oligonucleotide
caguacggcgcacaagguc

SEQ ID NO: 1409205 - RNA, 19 nt, Artificial Sequence
  Description of Artificial Sequence: Synthetic oligonucleotide
gaggguuagaugccuggaa

SEQ ID NO: 1409206 - RNA, 19 nt, Artificial Sequence
  Description of Artificial Sequence: Synthetic oligonucleotide
guggucucugagccggucc

SEQ ID NO: 1409207 - RNA, 19 nt, Artificial Sequence
  Description of Artificial Sequence: Synthetic oligonucleotide
agggugauguuuccuguuu

SEQ ID NO: 1409208 - RNA, 19 nt, Artificial Sequence
  Description of Artificial Sequence: Synthetic oligonucleotide
uuccgcugaaggccguaga

SEQ ID NO: 1409209 - RNA, 19 nt, Artificial Sequence
  Description of Artificial Sequence: Synthetic oligonucleotide
gcucuuuuggcguuuguaa

SEQ ID NO: 1409210 - RNA, 19 nt, Artificial Sequence
  Description of Artificial Sequence: Synthetic oligonucleotide
ucagcaugccuugccuccc

SEQ ID NO: 1409211 - RNA, 19 nt, Artificial Sequence
  Description of Artificial Sequence: Synthetic oligonucleotide
ggauucuuaggaucccuga

SEQ ID NO: 1409212 - RNA, 19 nt, Artificial Sequence
  Description of Artificial Sequence: Synthetic oligonucleotide
ugcauugcucucguccccu

SEQ ID NO: 1409213 - RNA, 19 nt, Artificial Sequence
  Description of Artificial Sequence: Synthetic oligonucleotide
aguccuugugggcaccgaa

SEQ ID NO: 1409214 - RNA, 19 nt, Artificial Sequence
  Description of Artificial Sequence: Synthetic oligonucleotide
cuucucucgcugccugugc

SEQ ID NO: 1409215 - RNA, 19 nt, Artificial Sequence
  Description of Artificial Sequence: Synthetic oligonucleotide
cacugcuugcacacgguca

SEQ ID NO: 1409216 - RNA, 19 nt, Artificial Sequence
  Description of Artificial Sequence: Synthetic oligonucleotide
cuggaagucgaugguccgc

SEQ ID NO: 1409217 - RNA, 19 nt, Artificial Sequence
  Description of Artificial Sequence: Synthetic oligonucleotide
gcuggaagucgaugguccg

SEQ ID NO: 1409218 - RNA, 19 nt, Artificial Sequence
  Description of Artificial Sequence: Synthetic oligonucleotide
ggguuagaugccuggaaga

SEQ ID NO: 1409219 - RNA, 19 nt, Artificial Sequence
  Description of Artificial Sequence: Synthetic oligonucleotide
gacaaccucaugccugcaa

SEQ ID NO: 1409220 - RNA, 19 nt, Artificial Sequence
  Description of Artificial Sequence: Synthetic oligonucleotide
ucgcacucugaaucagggu

SEQ ID NO: 1409221 - RNA, 19 nt, Artificial Sequence
  Description of Artificial Sequence: Synthetic oligonucleotide
ucgacauugccccgaccuu

SEQ ID NO: 1409222 - RNA, 19 nt, Artificial Sequence
  Description of Artificial Sequence: Synthetic oligonucleotide
cauuggcacacuugcggca

SEQ ID NO: 1409223 - RNA, 19 nt, Artificial Sequence
  Description of Artificial Sequence: Synthetic oligonucleotide
agaggguuagaugccugga

SEQ ID NO: 1409224 - RNA, 19 nt, Artificial Sequence
  Description of Artificial Sequence: Synthetic oligonucleotide
cugcauugcucucgucccc

SEQ ID NO: 1409225 - RNA, 19 nt, Artificial Sequence
  Description of Artificial Sequence: Synthetic oligonucleotide
uccagacgcuucugucugc

SEQ ID NO: 1409226 - RNA, 19 nt, Artificial Sequence
  Description of Artificial Sequence: Synthetic oligonucleotide
acgcuucugucugcacucc

SEQ ID NO: 1409227 - RNA, 19 nt, Artificial Sequence
  Description of Artificial Sequence: Synthetic oligonucleotide
ucucgaaccucugguuuaa

SEQ ID NO: 1409228 - RNA, 19 nt, Artificial Sequence
  Description of Artificial Sequence: Synthetic oligonucleotide
ucccguugcgggcucgcac

SEQ ID NO: 1409229 - RNA, 19 nt, Artificial Sequence
  Description of Artificial Sequence: Synthetic oligonucleotide
augccaucacucagcucgc

SEQ ID NO: 1409230 - RNA, 19 nt, Artificial Sequence
  Description of Artificial Sequence: Synthetic oligonucleotide
auacaguuguggagccccg

SEQ ID NO: 1409231 - RNA, 19 nt, Artificial Sequence
  Description of Artificial Sequence: Synthetic oligonucleotide
uccuccaguacggcgcaca

SEQ ID NO: 1409232 - RNA, 19 nt, Artificial Sequence
  Description of Artificial Sequence: Synthetic oligonucleotide
uccccuagcagcggcuuga

SEQ ID NO: 1409233 - RNA, 19 nt, Artificial Sequence
  Description of Artificial Sequence: Synthetic oligonucleotide
aagacgucauuggcacacu

SEQ ID NO: 1409234 - RNA, 19 nt, Artificial Sequence
  Description of Artificial Sequence: Synthetic oligonucleotide
ugcgggcucgcacucugaa

SEQ ID NO: 1409235 - RNA, 19 nt, Artificial Sequence
  Description of Artificial Sequence: Synthetic oligonucleotide
ugcuggagguagagagcca

SEQ ID NO: 1409236 - RNA, 19 nt, Artificial Sequence
  Description of Artificial Sequence: Synthetic oligonucleotide
ucuuaggaucccugaucuu

SEQ ID NO: 1409237 - RNA, 19 nt, Artificial Sequence
  Description of Artificial Sequence: Synthetic oligonucleotide
ccguacugacggaugaggc

SEQ ID NO: 1409238 - RNA, 19 nt, Artificial Sequence
  Description of Artificial Sequence: Synthetic oligonucleotide
cugcgugaucacugcuugc

SEQ ID NO: 1409239 - RNA, 19 nt, Artificial Sequence
  Description of Artificial Sequence: Synthetic oligonucleotide
ccuuggagugcaguggccg

SEQ ID NO: 1409240 - RNA, 19 nt, Artificial Sequence
  Description of Artificial Sequence: Synthetic oligonucleotide
cuguucagccuuggagugc

SEQ ID NO: 1409241 - RNA, 19 nt, Artificial Sequence
  Description of Artificial Sequence: Synthetic oligonucleotide
uggcccguccagccgcucc

SEQ ID NO: 1409242 - RNA, 19 nt, Artificial Sequence
  Description of Artificial Sequence: Synthetic oligonucleotide
ucccucuugaaagggugau

SEQ ID NO: 1409243 - RNA, 19 nt, Artificial Sequence
  Description of Artificial Sequence: Synthetic oligonucleotide
gaaggccguagaccccaug

SEQ ID NO: 1409244 - RNA, 19 nt, Artificial Sequence
  Description of Artificial Sequence: Synthetic oligonucleotide
uacggcgcacaaggucucg

SEQ ID NO: 1409245 - RNA, 19 nt, Artificial Sequence
  Description of Artificial Sequence: Synthetic oligonucleotide
gccguagaccccaugccgg

SEQ ID NO: 1409246 - RNA, 19 nt, Artificial Sequence
  Description of Artificial Sequence: Synthetic oligonucleotide
gccccgaccuuguugauca

SEQ ID NO: 1409247 - RNA, 19 nt, Artificial Sequence
  Description of Artificial Sequence: Synthetic oligonucleotide
uugcgccguggucucugag

SEQ ID NO: 1409248 - RNA, 19 nt, Artificial Sequence
  Description of Artificial Sequence: Synthetic oligonucleotide
agccccgggauugccacag

SEQ ID NO: 1409249 - RNA, 19 nt, Artificial Sequence
  Description of Artificial Sequence: Synthetic oligonucleotide
cucuaacggccccucucac

SEQ ID NO: 1409250 - RNA, 19 nt, Artificial Sequence
  Description of Artificial Sequence: Synthetic oligonucleotide
cccgggauugccacagagg

SEQ ID NO: 1409251 - RNA, 19 nt, Artificial Sequence
  Description of Artificial Sequence: Synthetic oligonucleotide
ggucuggucagugcaggcc

SEQ ID NO: 1409252 - RNA, 19 nt, Artificial Sequence
  Description of Artificial Sequence: Synthetic oligonucleotide
caccagcuuagaggaaacc

SEQ ID NO: 1409253 - RNA, 19 nt, Artificial Sequence
  Description of Artificial Sequence: Synthetic oligonucleotide
gcgccguggucucugagcc

SEQ ID NO: 1409254 - RNA, 19 nt, Artificial Sequence
  Description of Artificial Sequence: Synthetic oligonucleotide
uggcuauuuccagacgcuu

SEQ ID NO: 1409255 - RNA, 19 nt, Artificial Sequence
  Description of Artificial Sequence: Synthetic oligonucleotide
cucucccucuaacggcccc

SEQ ID NO: 1409256 - RNA, 19 nt, Artificial Sequence
  Description of Artificial Sequence: Synthetic oligonucleotide
uuggcgcucuagugccugc

SEQ ID NO: 1409257 - RNA, 19 nt, Artificial Sequence
  Description of Artificial Sequence: Synthetic oligonucleotide
agcuuagaggaaaccucca

SEQ ID NO: 1409258 - RNA, 19 nt, Artificial Sequence
  Description of Artificial Sequence: Synthetic oligonucleotide
ccaucugcgugaucacugc

SEQ ID NO: 1409259 - RNA, 19 nt, Artificial Sequence
  Description of Artificial Sequence: Synthetic oligonucleotide
uggagugcaguggccggga

SEQ ID NO: 1409260 - RNA, 19 nt, Artificial Sequence
  Description of Artificial Sequence: Synthetic oligonucleotide
acucccuguucagagccgu

SEQ ID NO: 1409261 - RNA, 19 nt, Artificial Sequence
  Description of Artificial Sequence: Synthetic oligonucleotide
agccgucuccacaaacuug

SEQ ID NO: 1409262 - RNA, 19 nt, Artificial Sequence
  Description of Artificial Sequence: Synthetic oligonucleotide
cagcaugccuugccucccg

SEQ ID NO: 1409263 - RNA, 19 nt, Artificial Sequence
  Description of Artificial Sequence: Synthetic oligonucleotide
agcuggguugcgccguggu

SEQ ID NO: 1409264 - RNA, 19 nt, Artificial Sequence
  Description of Artificial Sequence: Synthetic oligonucleotide
uguggagccccgggauugc

SEQ ID NO: 1409265 - RNA, 19 nt, Artificial Sequence
  Description of Artificial Sequence: Synthetic oligonucleotide
ggcaauagauguuaaucuu

SEQ ID NO: 1409266 - RNA, 19 nt, Artificial Sequence
  Description of Artificial Sequence: Synthetic oligonucleotide
cacacggucauugccugca

SEQ ID NO: 1409267 - RNA, 19 nt, Artificial Sequence
  Description of Artificial Sequence: Synthetic oligonucleotide
guuccgcugaaggccguag

SEQ ID NO: 1409268 - RNA, 19 nt, Artificial Sequence
  Description of Artificial Sequence: Synthetic oligonucleotide
cuucgacauugccccgacc

SEQ ID NO: 1409269 - RNA, 19 nt, Artificial Sequence
  Description of Artificial Sequence: Synthetic oligonucleotide
gucuccguacugacggaug

SEQ ID NO: 1409270 - RNA, 19 nt, Artificial Sequence
  Description of Artificial Sequence: Synthetic oligonucleotide
cacggugaaguucaucccu

SEQ ID NO: 1409271 - RNA, 19 nt, Artificial Sequence
  Description of Artificial Sequence: Synthetic oligonucleotide
ggauugaauggcggacucc

SEQ ID NO: 1409272 - RNA, 19 nt, Artificial Sequence
  Description of Artificial Sequence: Synthetic oligonucleotide
gguccgcagcauuucggcc

SEQ ID NO: 1409273 - RNA, 19 nt, Artificial Sequence
  Description of Artificial Sequence: Synthetic oligonucleotide
gcggaaacgaccuccugaa

SEQ ID NO: 1409274 - RNA, 19 nt, Artificial Sequence
  Description of Artificial Sequence: Synthetic oligonucleotide
acugacggaugaggccccg

SEQ ID NO: 1409275 - RNA, 19 nt, Artificial Sequence
  Description of Artificial Sequence: Synthetic oligonucleotide
cuucgugcuccucacacau

SEQ ID NO: 1409276 - RNA, 19 nt, Artificial Sequence
  Description of Artificial Sequence: Synthetic oligonucleotide
caccuucgacauugccccg

SEQ ID NO: 1409277 - RNA, 19 nt, Artificial Sequence
  Description of Artificial Sequence: Synthetic oligonucleotide
gaugggcagcggaaacgac

SEQ ID NO: 1409278 - RNA, 19 nt, Artificial Sequence
  Description of Artificial Sequence: Synthetic oligonucleotide
cuccguacugacggaugag

SEQ ID NO: 1409279 - RNA, 19 nt, Artificial Sequence
  Description of Artificial Sequence: Synthetic oligonucleotide
uagaugccuggaagacguc

SEQ ID NO: 1409280 - RNA, 19 nt, Artificial Sequence
  Description of Artificial Sequence: Synthetic oligonucleotide
accuucgacauugccccga

SEQ ID NO: 1409281 - RNA, 19 nt, Artificial Sequence
  Description of Artificial Sequence: Synthetic oligonucleotide
auguugugugcauccccua

SEQ ID NO: 1409282 - RNA, 19 nt, Artificial Sequence
  Description of Artificial Sequence: Synthetic oligonucleotide
aucugcgugaucacugcuu

SEQ ID NO: 1409283 - RNA, 19 nt, Artificial Sequence
  Description of Artificial Sequence: Synthetic oligonucleotide
ccacggugaaguucauccc

SEQ ID NO: 1409284 - RNA, 19 nt, Artificial Sequence
  Description of Artificial Sequence: Synthetic oligonucleotide
uugccucccguugcgggcu

SEQ ID NO: 1409285 - RNA, 19 nt, Artificial Sequence
  Description of Artificial Sequence: Synthetic oligonucleotide
ugcgcuccuccaguacggc

SEQ ID NO: 1409286 - RNA, 19 nt, Artificial Sequence
  Description of Artificial Sequence: Synthetic oligonucleotide
cuggcuauuuccagacgcu

SEQ ID NO: 1409287 - RNA, 19 nt, Artificial Sequence
  Description of Artificial Sequence: Synthetic oligonucleotide
uggcgcucuagugccugcc

SEQ ID NO: 1409288 - RNA, 19 nt, Artificial Sequence
  Description of Artificial Sequence: Synthetic oligonucleotide
cagcggcuugaaacccacg

SEQ ID NO: 1409289 - RNA, 19 nt, Artificial Sequence
  Description of Artificial Sequence: Synthetic oligonucleotide
gucuguggauucuuaggau

SEQ ID NO: 1409290 - RNA, 19 nt, Artificial Sequence
  Description of Artificial Sequence: Synthetic oligonucleotide
uauucuccacuagcagguu

SEQ ID NO: 1409291 - RNA, 19 nt, Artificial Sequence
  Description of Artificial Sequence: Synthetic oligonucleotide
gcucgcacucugaaucagg

SEQ ID NO: 1409292 - RNA, 19 nt, Artificial Sequence
  Description of Artificial Sequence: Synthetic oligonucleotide
ggcgcacaaggucucgaac

SEQ ID NO: 1409293 - RNA, 19 nt, Artificial Sequence
  Description of Artificial Sequence: Synthetic oligonucleotide
gcggacuccaccagcuuag

SEQ ID NO: 1409294 - RNA, 19 nt, Artificial Sequence
  Description of Artificial Sequence: Synthetic oligonucleotide
cgcuccuccaguacggcgc

SEQ ID NO: 1409295 - RNA, 19 nt, Artificial Sequence
  Description of Artificial Sequence: Synthetic oligonucleotide
gccuagcuggguugcgccg

SEQ ID NO: 1409296 - RNA, 19 nt, Artificial Sequence
  Description of Artificial Sequence: Synthetic oligonucleotide
uagcuggguugcgccgugg

SEQ ID NO: 1409297 - RNA, 19 nt, Artificial Sequence
  Description of Artificial Sequence: Synthetic oligonucleotide
ggcgggaugccuagcuggg

SEQ ID NO: 1409298 - RNA, 19 nt, Artificial Sequence
  Description of Artificial Sequence: Synthetic oligonucleotide
ucgcugccugugcacacuu

SEQ ID NO: 1409299 - RNA, 19 nt, Artificial Sequence
  Description of Artificial Sequence: Synthetic oligonucleotide
gcuuguagaugucaauaau

SEQ ID NO: 1409300 - RNA, 19 nt, Artificial Sequence
  Description of Artificial Sequence: Synthetic oligonucleotide
cagacgcuucugucugcac

SEQ ID NO: 1409301 - RNA, 19 nt, Artificial Sequence
  Description of Artificial Sequence: Synthetic oligonucleotide
uaacggccccucucacccu

SEQ ID NO: 1409302 - RNA, 19 nt, Artificial Sequence
  Description of Artificial Sequence: Synthetic oligonucleotide
caguugcuucugccugcgg

SEQ ID NO: 1409303 - RNA, 19 nt, Artificial Sequence
  Description of Artificial Sequence: Synthetic oligonucleotide
cuggguugcgccguggucu

SEQ ID NO: 1409304 - RNA, 19 nt, Artificial Sequence
  Description of Artificial Sequence: Synthetic oligonucleotide
agcagcggcuugaaaccca

SEQ ID NO: 1409305 - RNA, 19 nt, Artificial Sequence
  Description of Artificial Sequence: Synthetic oligonucleotide
ugaaggccguagaccccau

SEQ ID NO: 1409306 - RNA, 19 nt, Artificial Sequence
  Description of Artificial Sequence: Synthetic oligonucleotide
ugccccgaccuuguugauc

SEQ ID NO: 1409307 - RNA, 19 nt, Artificial Sequence
  Description of Artificial Sequence: Synthetic oligonucleotide
ccaaguggucuccguacug

SEQ ID NO: 1409308 - RNA, 19 nt, Artificial Sequence
  Description of Artificial Sequence: Synthetic oligonucleotide
acggugaaguucaucccuu

SEQ ID NO: 1409309 - RNA, 19 nt, Artificial Sequence
  Description of Artificial Sequence: Synthetic oligonucleotide
cuccaugcucucauagccu

SEQ ID NO: 1409310 - RNA, 19 nt, Artificial Sequence
  Description of Artificial Sequence: Synthetic oligonucleotide
caucugcggcuccuccaug

SEQ ID NO: 1409311 - RNA, 19 nt, Artificial Sequence
  Description of Artificial Sequence: Synthetic oligonucleotide
gcuccacguucacagaaaa

SEQ ID NO: 1409312 - RNA, 19 nt, Artificial Sequence
  Description of Artificial Sequence: Synthetic oligonucleotide
gacauugccccgaccuugu

SEQ ID NO: 1409313 - RNA, 19 nt, Artificial Sequence
  Description of Artificial Sequence: Synthetic oligonucleotide
ugccugcggcuguuguccu

SEQ ID NO: 1409314 - RNA, 19 nt, Artificial Sequence
  Description of Artificial Sequence: Synthetic oligonucleotide
ggaaaccuccaaguggucu

SEQ ID NO: 1409315 - RNA, 19 nt, Artificial Sequence
  Description of Artificial Sequence: Synthetic oligonucleotide
caucccuuggcgcucuagu

SEQ ID NO: 1409316 - RNA, 19 nt, Artificial Sequence
  Description of Artificial Sequence: Synthetic oligonucleotide
ggaugaggccccgcacgcg

SEQ ID NO: 1409317 - RNA, 19 nt, Artificial Sequence
  Description of Artificial Sequence: Synthetic oligonucleotide
ggaagacgucauuggcaca

SEQ ID NO: 1409318 - RNA, 19 nt, Artificial Sequence
  Description of Artificial Sequence: Synthetic oligonucleotide
gugcauccccuagcagcgg

SEQ ID NO: 1409319 - RNA, 19 nt, Artificial Sequence
  Description of Artificial Sequence: Synthetic oligonucleotide
gcgugaucacugcuugcac

SEQ ID NO: 1409320 - RNA, 19 nt, Artificial Sequence
  Description of Artificial Sequence: Synthetic oligonucleotide
ccucuugaaagggugaugu

SEQ ID NO: 1409321 - RNA, 19 nt, Artificial Sequence
  Description of Artificial Sequence: Synthetic oligonucleotide
ugccaucacucagcucgcu

SEQ ID NO: 1409322 - RNA, 19 nt, Artificial Sequence
  Description of Artificial Sequence: Synthetic oligonucleotide
ccucuaacggccccucuca

SEQ ID NO: 1409323 - RNA, 19 nt, Artificial Sequence
  Description of Artificial Sequence: Synthetic oligonucleotide
ccgggaggauuccugcuug

SEQ ID NO: 1409324 - RNA, 19 nt, Artificial Sequence
  Description of Artificial Sequence: Synthetic oligonucleotide
guggauucuuaggaucccu

SEQ ID NO: 1409325 - RNA, 19 nt, Artificial Sequence
  Description of Artificial Sequence: Synthetic oligonucleotide
ggcucgcacucugaaucag

SEQ ID NO: 1409326 - RNA, 19 nt, Artificial Sequence
  Description of Artificial Sequence: Synthetic oligonucleotide
gggcucgcacucugaauca

SEQ ID NO: 1409327 - RNA, 19 nt, Artificial Sequence
  Description of Artificial Sequence: Synthetic oligonucleotide
guugcgccguggucucuga

SEQ ID NO: 1409328 - RNA, 19 nt, Artificial Sequence
  Description of Artificial Sequence: Synthetic oligonucleotide
gccccucucacccuggcua

SEQ ID NO: 1409329 - RNA, 19 nt, Artificial Sequence
  Description of Artificial Sequence: Synthetic oligonucleotide
cccucuaacggccccucuc

SEQ ID NO: 1409330 - RNA, 19 nt, Artificial Sequence
  Description of Artificial Sequence: Synthetic oligonucleotide
cacgggcuuggagaacauc

SEQ ID NO: 1409331 - RNA, 19 nt, Artificial Sequence
  Description of Artificial Sequence: Synthetic oligonucleotide
ggucucgaaccucugguuu

SEQ ID NO: 1409332 - RNA, 19 nt, Artificial Sequence
  Description of Artificial Sequence: Synthetic oligonucleotide
acggcgcacaaggucucga

SEQ ID NO: 1409333 - RNA, 19 nt, Artificial Sequence
  Description of Artificial Sequence: Synthetic oligonucleotide
ccaucacucagcucgcucu

SEQ ID NO: 1409334 - RNA, 19 nt, Artificial Sequence
  Description of Artificial Sequence: Synthetic oligonucleotide
guacggcgcacaaggucuc

SEQ ID NO: 1409335 - RNA, 19 nt, Artificial Sequence
  Description of Artificial Sequence: Synthetic oligonucleotide
guggagccccgggauugcc

SEQ ID NO: 1409336 - RNA, 19 nt, Artificial Sequence
  Description of Artificial Sequence: Synthetic oligonucleotide
cucccucuaacggccccuc

SEQ ID NO: 1409337 - RNA, 19 nt, Artificial Sequence
  Description of Artificial Sequence: Synthetic oligonucleotide
caugccgguccaggacaac

SEQ ID NO: 1409338 - RNA, 19 nt, Artificial Sequence
  Description of Artificial Sequence: Synthetic oligonucleotide
uucaucccuuggcgcucua

SEQ ID NO: 1409339 - RNA, 19 nt, Artificial Sequence
  Description of Artificial Sequence: Synthetic oligonucleotide
gcuggguugcgccgugguc

SEQ ID NO: 1409340 - RNA, 19 nt, Artificial Sequence
  Description of Artificial Sequence: Synthetic oligonucleotide
cuccacguucacagaaaau

SEQ ID NO: 1409341 - RNA, 19 nt, Artificial Sequence
  Description of Artificial Sequence: Synthetic oligonucleotide
gagccccgggauugccaca

SEQ ID NO: 1409342 - RNA, 19 nt, Artificial Sequence
  Description of Artificial Sequence: Synthetic oligonucleotide
gguccucagcaugccuugc

SEQ ID NO: 1409343 - RNA, 19 nt, Artificial Sequence
  Description of Artificial Sequence: Synthetic oligonucleotide
guucagccuuggagugcag

SEQ ID NO: 1409344 - RNA, 19 nt, Artificial Sequence
  Description of Artificial Sequence: Synthetic oligonucleotide
ccccaugccgguccaggac

SEQ ID NO: 1409345 - RNA, 19 nt, Artificial Sequence
  Description of Artificial Sequence: Synthetic oligonucleotide
gcgaugccaucacucagcu

SEQ ID NO: 1409346 - RNA, 19 nt, Artificial Sequence
  Description of Artificial Sequence: Synthetic oligonucleotide
ggucagugcaggccucucu

SEQ ID NO: 1409347 - RNA, 19 nt, Artificial Sequence
  Description of Artificial Sequence: Synthetic oligonucleotide
cccucuugaaagggugaug

SEQ ID NO: 1409348 - RNA, 19 nt, Artificial Sequence
  Description of Artificial Sequence: Synthetic oligonucleotide
gcggcuugaaacccacggu

SEQ ID NO: 1409349 - RNA, 19 nt, Artificial Sequence
  Description of Artificial Sequence: Synthetic oligonucleotide
accucacagcucaggcaau

SEQ ID NO: 1409350 - RNA, 19 nt, Artificial Sequence
  Description of Artificial Sequence: Synthetic oligonucleotide
cuccaucugcgugaucacu

SEQ ID NO: 1409351 - RNA, 19 nt, Artificial Sequence
  Description of Artificial Sequence: Synthetic oligonucleotide
guucaucccuuggcgcucu

SEQ ID NO: 1409352 - RNA, 19 nt, Artificial Sequence
  Description of Artificial Sequence: Synthetic oligonucleotide
ccagacgcuucugucugca

SEQ ID NO: 1409353 - RNA, 19 nt, Artificial Sequence
  Description of Artificial Sequence: Synthetic oligonucleotide
ccgcacgcgcugcagcuuc

SEQ ID NO: 1409354 - RNA, 19 nt, Artificial Sequence
  Description of Artificial Sequence: Synthetic oligonucleotide
cccguccagccgcuccucc

SEQ ID NO: 1409355 - RNA, 19 nt, Artificial Sequence
  Description of Artificial Sequence: Synthetic oligonucleotide
agguuccgcugaaggccgu

SEQ ID NO: 1409356 - RNA, 19 nt, Artificial Sequence
  Description of Artificial Sequence: Synthetic oligonucleotide
cauugccugcaaccagcau

SEQ ID NO: 1409357 - RNA, 19 nt, Artificial Sequence
  Description of Artificial Sequence: Synthetic oligonucleotide
gggcaccgaagaccuugca

SEQ ID NO: 1409358 - RNA, 19 nt, Artificial Sequence
  Description of Artificial Sequence: Synthetic oligonucleotide
gcaucgcgaugccaucacu

SEQ ID NO: 1409359 - RNA, 19 nt, Artificial Sequence
  Description of Artificial Sequence: Synthetic oligonucleotide
cucgcugccugugcacacu

SEQ ID NO: 1409360 - RNA, 19 nt, Artificial Sequence
  Description of Artificial Sequence: Synthetic oligonucleotide
ggucuccguacugacggau

SEQ ID NO: 1409361 - RNA, 19 nt, Artificial Sequence
  Description of Artificial Sequence: Synthetic oligonucleotide
cccguugcgggcucgcacu

SEQ ID NO: 1409362 - RNA, 19 nt, Artificial Sequence
  Description of Artificial Sequence: Synthetic oligonucleotide
ggacaaccucaugccugca

SEQ ID NO: 1409363 - RNA, 19 nt, Artificial Sequence
  Description of Artificial Sequence: Synthetic oligonucleotide
ccguugcgggcucgcacuc

SEQ ID NO: 1409364 - RNA, 19 nt, Artificial Sequence
  Description of Artificial Sequence: Synthetic oligonucleotide
gccgggaggauuccugcuu

SEQ ID NO: 1409365 - RNA, 19 nt, Artificial Sequence
  Description of Artificial Sequence: Synthetic oligonucleotide
cucccguugcgggcucgca

SEQ ID NO: 1409366 - RNA, 19 nt, Artificial Sequence
  Description of Artificial Sequence: Synthetic oligonucleotide
gccugcggcuguuguccuc

SEQ ID NO: 1409367 - RNA, 19 nt, Artificial Sequence
  Description of Artificial Sequence: Synthetic oligonucleotide
ccucccguugcgggcucgc

SEQ ID NO: 1409368 - RNA, 19 nt, Artificial Sequence
  Description of Artificial Sequence: Synthetic oligonucleotide
ccaguacggcgcacaaggu

SEQ ID NO: 1409369 - RNA, 19 nt, Artificial Sequence
  Description of Artificial Sequence: Synthetic oligonucleotide
gguuccgcugaaggccgua

SEQ ID NO: 1409370 - RNA, 19 nt, Artificial Sequence
  Description of Artificial Sequence: Synthetic oligonucleotide
ccccgaccuuguugaucag

SEQ ID NO: 1409371 - RNA, 19 nt, Artificial Sequence
  Description of Artificial Sequence: Synthetic oligonucleotide
cauccccuagcagcggcuu

SEQ ID NO: 1409372 - RNA, 19 nt, Artificial Sequence
  Description of Artificial Sequence: Synthetic oligonucleotide
cgcucuuuuggcguuugua

SEQ ID NO: 1409373 - RNA, 19 nt, Artificial Sequence
  Description of Artificial Sequence: Synthetic oligonucleotide
ccgguccucagcaugccuu

SEQ ID NO: 1409374 - RNA, 19 nt, Artificial Sequence
  Description of Artificial Sequence: Synthetic oligonucleotide
cguagaccccaugccgguc

SEQ ID NO: 1409375 - RNA, 19 nt, Artificial Sequence
  Description of Artificial Sequence: Synthetic oligonucleotide
cuggcccguccagccgcuc

SEQ ID NO: 1409376 - RNA, 19 nt, Artificial Sequence
  Description of Artificial Sequence: Synthetic oligonucleotide
gccgguccucagcaugccu

SEQ ID NO: 1409377 - RNA, 19 nt, Artificial Sequence
  Description of Artificial Sequence: Synthetic oligonucleotide
ccuagcuggguugcgccgu

SEQ ID NO: 1409378 - RNA, 19 nt, Artificial Sequence
  Description of Artificial Sequence: Synthetic oligonucleotide
ccguagaccccaugccggu

SEQ ID NO: 1409379 - RNA, 19 nt, Artificial Sequence
  Description of Artificial Sequence: Synthetic oligonucleotide
cguggucucugagccgguc

SEQ ID NO: 1409380 - RNA, 19 nt, Artificial Sequence
  Description of Artificial Sequence: Synthetic oligonucleotide
gcgcucuagugccugccuu

SEQ ID NO: 1409381 - RNA, 19 nt, Artificial Sequence
  Description of Artificial Sequence: Synthetic oligonucleotide
gcauccccuagcagcggcu

SEQ ID NO: 1409382 - RNA, 19 nt, Artificial Sequence
  Description of Artificial Sequence: Synthetic oligonucleotide
cccuugcgcuccuccagua

SEQ ID NO: 1409383 - RNA, 19 nt, Artificial Sequence
  Description of Artificial Sequence: Synthetic oligonucleotide
gcaugccuugccucccguu

SEQ ID NO: 1409384 - RNA, 19 nt, Artificial Sequence
  Description of Artificial Sequence: Synthetic oligonucleotide
cggcgcacaaggucucgaa

SEQ ID NO: 1409385 - RNA, 19 nt, Artificial Sequence
  Description of Artificial Sequence: Synthetic oligonucleotide
cccuagcagcggcuugaaa

SEQ ID NO: 1409386 - RNA, 19 nt, Artificial Sequence
  Description of Artificial Sequence: Synthetic oligonucleotide
gccccgggauugccacaga

SEQ ID NO: 1409387 - RNA, 19 nt, Artificial Sequence
  Description of Artificial Sequence: Synthetic oligonucleotide
gcgggaugccuagcugggu

SEQ ID NO: 1409388 - RNA, 19 nt, Artificial Sequence
  Description of Artificial Sequence: Synthetic oligonucleotide
gcucgcucuuuuggcguuu

SEQ ID NO: 1409389 - RNA, 19 nt, Artificial Sequence
  Description of Artificial Sequence: Synthetic oligonucleotide
ccccuagcagcggcuugaa

SEQ ID NO: 1409390 - RNA, 19 nt, Artificial Sequence
  Description of Artificial Sequence: Synthetic oligonucleotide
ccacgggcuuggagaacau

SEQ ID NO: 1409391 - RNA, 19 nt, Artificial Sequence
  Description of Artificial Sequence: Synthetic oligonucleotide
ccguggucucugagccggu

SEQ ID NO: 1409392 - RNA, 19 nt, Artificial Sequence
  Description of Artificial Sequence: Synthetic oligonucleotide
cgcacgcgcugcagcuucu

SEQ ID NO: 1409393 - RNA, 19 nt, Artificial Sequence
  Description of Artificial Sequence: Synthetic oligonucleotide
cguugcgggcucgcacucu

SEQ ID NO: 1409394 - RNA, 19 nt, Artificial Sequence
  Description of Artificial Sequence: Synthetic oligonucleotide
cccucucacccuggcuauu

SEQ ID NO: 1409395 - RNA, 19 nt, Artificial Sequence
  Description of Artificial Sequence: Synthetic oligonucleotide
uuucaagaaacaguuaugg

SEQ ID NO: 1409396 - RNA, 19 nt, Artificial Sequence
  Description of Artificial Sequence: Synthetic oligonucleotide
uguccauuaaacuugcggc

SEQ ID NO: 1409397 - RNA, 19 nt, Artificial Sequence
  Description of Artificial Sequence: Synthetic oligonucleotide
aucacauagucguugacgg

SEQ ID NO: 1409398 - RNA, 19 nt, Artificial Sequence
  Description of Artificial Sequence: Synthetic oligonucleotide
aggguuaucacauagucgu

SEQ ID NO: 1409399 - RNA, 19 nt, Artificial Sequence
  Description of Artificial Sequence: Synthetic oligonucleotide
agcaaaggugugcagaggc

SEQ ID NO: 1409400 - RNA, 19 nt, Artificial Sequence
  Description of Artificial Sequence: Synthetic oligonucleotide
acaguuauggaugucauag

SEQ ID NO: 1409401 - RNA, 19 nt, Artificial Sequence
  Description of Artificial Sequence: Synthetic oligonucleotide
auagcagugucgaauaugc

SEQ ID NO: 1409402 - RNA, 19 nt, Artificial Sequence
  Description of Artificial Sequence: Synthetic oligonucleotide
uuuauucaggucuggaaga

SEQ ID NO: 1409403 - RNA, 19 nt, Artificial Sequence
  Description of Artificial Sequence: Synthetic oligonucleotide
ucgaccauggaaacugugg

SEQ ID NO: 1409404 - RNA, 19 nt, Artificial Sequence
  Description of Artificial Sequence: Synthetic oligonucleotide
ucacauguaacggaggcag

SEQ ID NO: 1409405 - RNA, 19 nt, Artificial Sequence
  Description of Artificial Sequence: Synthetic oligonucleotide
gaauaugcugguaauuucc

SEQ ID NO: 1409406 - RNA, 19 nt, Artificial Sequence
  Description of Artificial Sequence: Synthetic oligonucleotide
uaugcugguaauuuccaga

SEQ ID NO: 1409407 - RNA, 19 nt, Artificial Sequence
  Description of Artificial Sequence: Synthetic oligonucleotide
aucguggggaccugcaugc

SEQ ID NO: 1409408 - RNA, 19 nt, Artificial Sequence
  Description of Artificial Sequence: Synthetic oligonucleotide
auuguugggccucuucugg

SEQ ID NO: 1409409 - RNA, 19 nt, Artificial Sequence
  Description of Artificial Sequence: Synthetic oligonucleotide
aagaaacaguuauggaugu

SEQ ID NO: 1409410 - RNA, 19 nt, Artificial Sequence
  Description of Artificial Sequence: Synthetic oligonucleotide
auaggcugauccuaggcag

SEQ ID NO: 1409411 - RNA, 19 nt, Artificial Sequence
  Description of Artificial Sequence: Synthetic oligonucleotide
uaccuuucaagaaacaguu

SEQ ID NO: 1409412 - RNA, 19 nt, Artificial Sequence
  Description of Artificial Sequence: Synthetic oligonucleotide
gaggacucuucauacuugg

SEQ ID NO: 1409413 - RNA, 19 nt, Artificial Sequence
  Description of Artificial Sequence: Synthetic oligonucleotide
acaacugauagacuucaug

SEQ ID NO: 1409414 - RNA, 19 nt, Artificial Sequence
  Description of Artificial Sequence: Synthetic oligonucleotide
uguguuacagauguggguc

SEQ ID NO: 1409415 - RNA, 19 nt, Artificial Sequence
  Description of Artificial Sequence: Synthetic oligonucleotide
ugauuguugggccucuucu

SEQ ID NO: 1409416 - RNA, 19 nt, Artificial Sequence
  Description of Artificial Sequence: Synthetic oligonucleotide
agccccgaugcucauaggc

SEQ ID NO: 1409417 - RNA, 19 nt, Artificial Sequence
  Description of Artificial Sequence: Synthetic oligonucleotide
ugugucgcaaguugggacc

SEQ ID NO: 1409418 - RNA, 19 nt, Artificial Sequence
  Description of Artificial Sequence: Synthetic oligonucleotide
auuuugagcacugucuuug

SEQ ID NO: 1409419 - RNA, 19 nt, Artificial Sequence
  Description of Artificial Sequence: Synthetic oligonucleotide
cauguaccuuucaagaaac

SEQ ID NO: 1409420 - RNA, 19 nt, Artificial Sequence
  Description of Artificial Sequence: Synthetic oligonucleotide
uucaagaaacaguuaugga

SEQ ID NO: 1409421 - RNA, 19 nt, Artificial Sequence
  Description of Artificial Sequence: Synthetic oligonucleotide
ucguucuagggucuggccc

SEQ ID NO: 1409422 - RNA, 19 nt, Artificial Sequence
  Description of Artificial Sequence: Synthetic oligonucleotide
augacgagguacugggugg

SEQ ID NO: 1409423 - RNA, 19 nt, Artificial Sequence
  Description of Artificial Sequence: Synthetic oligonucleotide
accaccaauuucuggacag

SEQ ID NO: 1409424 - RNA, 19 nt, Artificial Sequence
  Description of Artificial Sequence: Synthetic oligonucleotide
ucacagggcuccauggucc

SEQ ID NO: 1409425 - RNA, 19 nt, Artificial Sequence
  Description of Artificial Sequence: Synthetic oligonucleotide
cuuagguuguucaguuccg

SEQ ID NO: 1409426 - RNA, 19 nt, Artificial Sequence
  Description of Artificial Sequence: Synthetic oligonucleotide
uguagcgccucacacugug

SEQ ID NO: 1409427 - RNA, 19 nt, Artificial Sequence
  Description of Artificial Sequence: Synthetic oligonucleotide
uauggaugucauagcagug

SEQ ID NO: 1409428 - RNA, 19 nt, Artificial Sequence
  Description of Artificial Sequence: Synthetic oligonucleotide
agaccaaccaccaauuucu

SEQ ID NO: 1409429 - RNA, 19 nt, Artificial Sequence
  Description of Artificial Sequence: Synthetic oligonucleotide
cuggugcagaacacgagcg

SEQ ID NO: 1409430 - RNA, 19 nt, Artificial Sequence
  Description of Artificial Sequence: Synthetic oligonucleotide
guccauuaaacuugcggcc

SEQ ID NO: 1409431 - RNA, 19 nt, Artificial Sequence
  Description of Artificial Sequence: Synthetic oligonucleotide
cacacagacgccugugucg

SEQ ID NO: 1409432 - RNA, 19 nt, Artificial Sequence
  Description of Artificial Sequence: Synthetic oligonucleotide
gauuguugggccucuucug

SEQ ID NO: 1409433 - RNA, 19 nt, Artificial Sequence
  Description of Artificial Sequence: Synthetic oligonucleotide
aauaugcugguaauuucca

SEQ ID NO: 1409434 - RNA, 19 nt, Artificial Sequence
  Description of Artificial Sequence: Synthetic oligonucleotide
acugugaccauguaccuuu

SEQ ID NO: 1409435 - RNA, 19 nt, Artificial Sequence
  Description of Artificial Sequence: Synthetic oligonucleotide
caggguaagcaguagcagc

SEQ ID NO: 1409436 - RNA, 19 nt, Artificial Sequence
  Description of Artificial Sequence: Synthetic oligonucleotide
acagauguggguccggagu

SEQ ID NO: 1409437 - RNA, 19 nt, Artificial Sequence
  Description of Artificial Sequence: Synthetic oligonucleotide
uggugcagaacacgagcgg

SEQ ID NO: 1409438 - RNA, 19 nt, Artificial Sequence
  Description of Artificial Sequence: Synthetic oligonucleotide
auaugcugguaauuuccag

SEQ ID NO: 1409439 - RNA, 19 nt, Artificial Sequence
  Description of Artificial Sequence: Synthetic oligonucleotide
acacagacgccugugucgc

SEQ ID NO: 1409440 - RNA, 19 nt, Artificial Sequence
  Description of Artificial Sequence: Synthetic oligonucleotide
gaccuucugagugucacag

SEQ ID NO: 1409441 - RNA, 19 nt, Artificial Sequence
  Description of Artificial Sequence: Synthetic oligonucleotide
agcauuuugagcacugucu

SEQ ID NO: 1409442 - RNA, 19 nt, Artificial Sequence
  Description of Artificial Sequence: Synthetic oligonucleotide
uguuacagauguggguccg

SEQ ID NO: 1409443 - RNA, 19 nt, Artificial Sequence
  Description of Artificial Sequence: Synthetic oligonucleotide
gcagugucgaauaugcugg

SEQ ID NO: 1409444 - RNA, 19 nt, Artificial Sequence
  Description of Artificial Sequence: Synthetic oligonucleotide
ugucuccuuagguuguuca

SEQ ID NO: 1409445 - RNA, 19 nt, Artificial Sequence
  Description of Artificial Sequence: Synthetic oligonucleotide
guagcugccacucaagugu

SEQ ID NO: 1409446 - RNA, 19 nt, Artificial Sequence
  Description of Artificial Sequence: Synthetic oligonucleotide
ugugggcgagaacuugggg

SEQ ID NO: 1409447 - RNA, 19 nt, Artificial Sequence
  Description of Artificial Sequence: Synthetic oligonucleotide
gaccauggaaacugugggc

SEQ ID NO: 1409448 - RNA, 19 nt, Artificial Sequence
  Description of Artificial Sequence: Synthetic oligonucleotide
uguccgucguucuaggguc

SEQ ID NO: 1409449 - RNA, 19 nt, Artificial Sequence
  Description of Artificial Sequence: Synthetic oligonucleotide
uguucacacggcugcagug

SEQ ID NO: 1409450 - RNA, 19 nt, Artificial Sequence
  Description of Artificial Sequence: Synthetic oligonucleotide
uagguuguucaguuccgcc

SEQ ID NO: 1409451 - RNA, 19 nt, Artificial Sequence
  Description of Artificial Sequence: Synthetic oligonucleotide
guucggguuccuuuggagc

SEQ ID NO: 1409452 - RNA, 19 nt, Artificial Sequence
  Description of Artificial Sequence: Synthetic oligonucleotide
agguuguucaguuccgcca

SEQ ID NO: 1409453 - RNA, 19 nt, Artificial Sequence
  Description of Artificial Sequence: Synthetic oligonucleotide
uuuacagggcaaggcgugg

SEQ ID NO: 1409454 - RNA, 19 nt, Artificial Sequence
  Description of Artificial Sequence: Synthetic oligonucleotide
auagucguugacggguucg

SEQ ID NO: 1409455 - RNA, 19 nt, Artificial Sequence
  Description of Artificial Sequence: Synthetic oligonucleotide
uggaugucauagcaguguc

SEQ ID NO: 1409456 - RNA, 19 nt, Artificial Sequence
  Description of Artificial Sequence: Synthetic oligonucleotide
aaguugggaccccucacau

SEQ ID NO: 1409457 - RNA, 19 nt, Artificial Sequence
  Description of Artificial Sequence: Synthetic oligonucleotide
uuuccucacaacugauaga

SEQ ID NO: 1409458 - RNA, 19 nt, Artificial Sequence
  Description of Artificial Sequence: Synthetic oligonucleotide
uuaaacuugcggccaccac

SEQ ID NO: 1409459 - RNA, 19 nt, Artificial Sequence
  Description of Artificial Sequence: Synthetic oligonucleotide
ccauuuacagggcaaggcg

SEQ ID NO: 1409460 - RNA, 19 nt, Artificial Sequence
  Description of Artificial Sequence: Synthetic oligonucleotide
acacgagcggcuucguguc

SEQ ID NO: 1409461 - RNA, 19 nt, Artificial Sequence
  Description of Artificial Sequence: Synthetic oligonucleotide
auguccgucguucuagggu

SEQ ID NO: 1409462 - RNA, 19 nt, Artificial Sequence
  Description of Artificial Sequence: Synthetic oligonucleotide
guaauuuccagaacaucuc

SEQ ID NO: 1409463 - RNA, 19 nt, Artificial Sequence
  Description of Artificial Sequence: Synthetic oligonucleotide
gauccugagcaggagcucc

SEQ ID NO: 1409464 - RNA, 19 nt, Artificial Sequence
  Description of Artificial Sequence: Synthetic oligonucleotide
cucacaacugauagacuuc

SEQ ID NO: 1409465 - RNA, 19 nt, Artificial Sequence
  Description of Artificial Sequence: Synthetic oligonucleotide
cagaccaaccaccaauuuc

SEQ ID NO: 1409466 - RNA, 19 nt, Artificial Sequence
  Description of Artificial Sequence: Synthetic oligonucleotide
ugauagacuucauguucac

SEQ ID NO: 1409467 - RNA, 19 nt, Artificial Sequence
  Description of Artificial Sequence: Synthetic oligonucleotide
gaccccucacauguaacgg

SEQ ID NO: 1409468 - RNA, 19 nt, Artificial Sequence
  Description of Artificial Sequence: Synthetic oligonucleotide
ugucgaauaugcugguaau

SEQ ID NO: 1409469 - RNA, 19 nt, Artificial Sequence
  Description of Artificial Sequence: Synthetic oligonucleotide
uuccacgcugacaucuccc

SEQ ID NO: 1409470 - RNA, 19 nt, Artificial Sequence
  Description of Artificial Sequence: Synthetic oligonucleotide
cuggguggucacauguccg

SEQ ID NO: 1409471 - RNA, 19 nt, Artificial Sequence
  Description of Artificial Sequence: Synthetic oligonucleotide
caguuauggaugucauagc

SEQ ID NO: 1409472 - RNA, 19 nt, Artificial Sequence
  Description of Artificial Sequence: Synthetic oligonucleotide
uuuaggguuucuccuccuc

SEQ ID NO: 1409473 - RNA, 19 nt, Artificial Sequence
  Description of Artificial Sequence: Synthetic oligonucleotide
uucgaccauggaaacugug

SEQ ID NO: 1409474 - RNA, 19 nt, Artificial Sequence
  Description of Artificial Sequence: Synthetic oligonucleotide
guugggaccccucacaugu

SEQ ID NO: 1409475 - RNA, 19 nt, Artificial Sequence
  Description of Artificial Sequence: Synthetic oligonucleotide
uuagguuguucaguuccgc

SEQ ID NO: 1409476 - RNA, 19 nt, Artificial Sequence
  Description of Artificial Sequence: Synthetic oligonucleotide
ggaccugcaugccugacag

SEQ ID NO: 1409477 - RNA, 19 nt, Artificial Sequence
  Description of Artificial Sequence: Synthetic oligonucleotide
uccggaguggcaucaccag

SEQ ID NO: 1409478 - RNA, 19 nt, Artificial Sequence
  Description of Artificial Sequence: Synthetic oligonucleotide
gguaauuuccagaacaucu

SEQ ID NO: 1409479 - RNA, 19 nt, Artificial Sequence
  Description of Artificial Sequence: Synthetic oligonucleotide
cauagcagugucgaauaug

SEQ ID NO: 1409480 - RNA, 19 nt, Artificial Sequence
  Description of Artificial Sequence: Synthetic oligonucleotide
uuugagcacugucuuuguc

SEQ ID NO: 1409481 - RNA, 19 nt, Artificial Sequence
  Description of Artificial Sequence: Synthetic oligonucleotide
acagagcaggggcucacag

SEQ ID NO: 1409482 - RNA, 19 nt, Artificial Sequence
  Description of Artificial Sequence: Synthetic oligonucleotide
cagaacacgagcggcuucg

SEQ ID NO: 1409483 - RNA, 19 nt, Artificial Sequence
  Description of Artificial Sequence: Synthetic oligonucleotide
uuuugagcacugucuuugu

SEQ ID NO: 1409484 - RNA, 19 nt, Artificial Sequence
  Description of Artificial Sequence: Synthetic oligonucleotide
guguuacagaugugggucc

SEQ ID NO: 1409485 - RNA, 19 nt, Artificial Sequence
  Description of Artificial Sequence: Synthetic oligonucleotide
uacagauguggguccggag

SEQ ID NO: 1409486 - RNA, 19 nt, Artificial Sequence
  Description of Artificial Sequence: Synthetic oligonucleotide
aacuccacugugaccaugu

SEQ ID NO: 1409487 - RNA, 19 nt, Artificial Sequence
  Description of Artificial Sequence: Synthetic oligonucleotide
cugugucgcaaguugggac

SEQ ID NO: 1409488 - RNA, 19 nt, Artificial Sequence
  Description of Artificial Sequence: Synthetic oligonucleotide
auuuacagggcaaggcgug

SEQ ID NO: 1409489 - RNA, 19 nt, Artificial Sequence
  Description of Artificial Sequence: Synthetic oligonucleotide
ccacuccccauuuacaggg

SEQ ID NO: 1409490 - RNA, 19 nt, Artificial Sequence
  Description of Artificial Sequence: Synthetic oligonucleotide
gugggcgagaacuugggga

SEQ ID NO: 1409491 - RNA, 19 nt, Artificial Sequence
  Description of Artificial Sequence: Synthetic oligonucleotide
ggaccccucacauguaacg

SEQ ID NO: 1409492 - RNA, 19 nt, Artificial Sequence
  Description of Artificial Sequence: Synthetic oligonucleotide
gugucgaauaugcugguaa

SEQ ID NO: 1409493 - RNA, 19 nt, Artificial Sequence
  Description of Artificial Sequence: Synthetic oligonucleotide
cugcaugccugacagggac

SEQ ID NO: 1409494 - RNA, 19 nt, Artificial Sequence
  Description of Artificial Sequence: Synthetic oligonucleotide
cagauguggguccggagug

SEQ ID NO: 1409495 - RNA, 19 nt, Artificial Sequence
  Description of Artificial Sequence: Synthetic oligonucleotide
uuccgccaaggcaggaucc

SEQ ID NO: 1409496 - RNA, 19 nt, Artificial Sequence
  Description of Artificial Sequence: Synthetic oligonucleotide
gguuaucacauagucguug

SEQ ID NO: 1409497 - RNA, 19 nt, Artificial Sequence
  Description of Artificial Sequence: Synthetic oligonucleotide
uagucguugacggguucgg

SEQ ID NO: 1409498 - RNA, 19 nt, Artificial Sequence
  Description of Artificial Sequence: Synthetic oligonucleotide
ugugaccauguaccuuuca

SEQ ID NO: 1409499 - RNA, 19 nt, Artificial Sequence
  Description of Artificial Sequence: Synthetic oligonucleotide
uucccacuccccauuuaca

SEQ ID NO: 1409500 - RNA, 19 nt, Artificial Sequence
  Description of Artificial Sequence: Synthetic oligonucleotide
uccccauuuacagggcaag

SEQ ID NO: 1409501 - RNA, 19 nt, Artificial Sequence
  Description of Artificial Sequence: Synthetic oligonucleotide
auuaaacuugcggccacca

SEQ ID NO: 1409502 - RNA, 19 nt, Artificial Sequence
  Description of Artificial Sequence: Synthetic oligonucleotide
uucacacggcugcagugac

SEQ ID NO: 1409503 - RNA, 19 nt, Artificial Sequence
  Description of Artificial Sequence: Synthetic oligonucleotide
acgccugugucgcaaguug

SEQ ID NO: 1409504 - RNA, 19 nt, Artificial Sequence
  Description of Artificial Sequence: Synthetic oligonucleotide
caggauccugagcaggagc

SEQ ID NO: 1409505 - RNA, 19 nt, Artificial Sequence
  Description of Artificial Sequence: Synthetic oligonucleotide
uuuuccccacucuucccac

SEQ ID NO: 1409506 - RNA, 19 nt, Artificial Sequence
  Description of Artificial Sequence: Synthetic oligonucleotide
caucguggggaccugcaug

SEQ ID NO: 1409507 - RNA, 19 nt, Artificial Sequence
  Description of Artificial Sequence: Synthetic oligonucleotide
gcuggugcagaacacgagc

SEQ ID NO: 1409508 - RNA, 19 nt, Artificial Sequence
  Description of Artificial Sequence: Synthetic oligonucleotide
cuccacugugaccauguac

SEQ ID NO: 1409509 - RNA, 19 nt, Artificial Sequence
  Description of Artificial Sequence: Synthetic oligonucleotide
cacauguaacggaggcagg

SEQ ID NO: 1409510 - RNA, 19 nt, Artificial Sequence
  Description of Artificial Sequence: Synthetic oligonucleotide
ugccugacagggaccacca

SEQ ID NO: 1409511 - RNA, 19 nt, Artificial Sequence
  Description of Artificial Sequence: Synthetic oligonucleotide
guagcgucggaggagcuug

SEQ ID NO: 1409512 - RNA, 19 nt, Artificial Sequence
  Description of Artificial Sequence: Synthetic oligonucleotide
ugcaugccugacagggacc

SEQ ID NO: 1409513 - RNA, 19 nt, Artificial Sequence
  Description of Artificial Sequence: Synthetic oligonucleotide
aaaggugugcagaggcgcu

SEQ ID NO: 1409514 - RNA, 19 nt, Artificial Sequence
  Description of Artificial Sequence: Synthetic oligonucleotide
cauguccgucguucuaggg

SEQ ID NO: 1409515 - RNA, 19 nt, Artificial Sequence
  Description of Artificial Sequence: Synthetic oligonucleotide
uuacagauguggguccgga

SEQ ID NO: 1409516 - RNA, 19 nt, Artificial Sequence
  Description of Artificial Sequence: Synthetic oligonucleotide
acggguucggguuccuuug

SEQ ID NO: 1409517 - RNA, 19 nt, Artificial Sequence
  Description of Artificial Sequence: Synthetic oligonucleotide
ucauagcagugucgaauau

SEQ ID NO: 1409518 - RNA, 19 nt, Artificial Sequence
  Description of Artificial Sequence: Synthetic oligonucleotide
gucauagcagugucgaaua

SEQ ID NO: 1409519 - RNA, 19 nt, Artificial Sequence
  Description of Artificial Sequence: Synthetic oligonucleotide
ccaaccaccaauuucugga

SEQ ID NO: 1409520 - RNA, 19 nt, Artificial Sequence
  Description of Artificial Sequence: Synthetic oligonucleotide
cagcauugagacagcaguc

SEQ ID NO: 1409521 - RNA, 19 nt, Artificial Sequence
  Description of Artificial Sequence: Synthetic oligonucleotide
aacugcccaccccugccca

SEQ ID NO: 1409522 - RNA, 19 nt, Artificial Sequence
  Description of Artificial Sequence: Synthetic oligonucleotide
cuucugccccuguagcgcc

SEQ ID NO: 1409523 - RNA, 19 nt, Artificial Sequence
  Description of Artificial Sequence: Synthetic oligonucleotide
gugaccauguaccuuucaa

SEQ ID NO: 1409524 - RNA, 19 nt, Artificial Sequence
  Description of Artificial Sequence: Synthetic oligonucleotide
gguuuauucaggucuggaa

SEQ ID NO: 1409525 - RNA, 19 nt, Artificial Sequence
  Description of Artificial Sequence: Synthetic oligonucleotide
aguugggaccccucacaug

SEQ ID NO: 1409526 - RNA, 19 nt, Artificial Sequence
  Description of Artificial Sequence: Synthetic oligonucleotide
cccacucagaccaaccacc

SEQ ID NO: 1409527 - RNA, 19 nt, Artificial Sequence
  Description of Artificial Sequence: Synthetic oligonucleotide
ucguugacggguucggguu

SEQ ID NO: 1409528 - RNA, 19 nt, Artificial Sequence
  Description of Artificial Sequence: Synthetic oligonucleotide
uacagggcaaggcguggcu

SEQ ID NO: 1409529 - RNA, 19 nt, Artificial Sequence
  Description of Artificial Sequence: Synthetic oligonucleotide
cauuaaacuugcggccacc

SEQ ID NO: 1409530 - RNA, 19 nt, Artificial Sequence
  Description of Artificial Sequence: Synthetic oligonucleotide
ucgugucuccuuagguugu

SEQ ID NO: 1409531 - RNA, 19 nt, Artificial Sequence
  Description of Artificial Sequence: Synthetic oligonucleotide
ccucacauguaacggaggc

SEQ ID NO: 1409532 - RNA, 19 nt, Artificial Sequence
  Description of Artificial Sequence: Synthetic oligonucleotide
ucagaccaaccaccaauuu

SEQ ID NO: 1409533 - RNA, 19 nt, Artificial Sequence
  Description of Artificial Sequence: Synthetic oligonucleotide
uuacagggcaaggcguggc

SEQ ID NO: 1409534 - RNA, 19 nt, Artificial Sequence
  Description of Artificial Sequence: Synthetic oligonucleotide
agcaguagcgucggaggag

SEQ ID NO: 1409535 - RNA, 19 nt, Artificial Sequence
  Description of Artificial Sequence: Synthetic oligonucleotide
agcagucuuccacgcugac

SEQ ID NO: 1409536 - RNA, 19 nt, Artificial Sequence
  Description of Artificial Sequence: Synthetic oligonucleotide
uccucacaacugauagacu

SEQ ID NO: 1409537 - RNA, 19 nt, Artificial Sequence
  Description of Artificial Sequence: Synthetic oligonucleotide
uccuugugcgugacugcug

SEQ ID NO: 1409538 - RNA, 19 nt, Artificial Sequence
  Description of Artificial Sequence: Synthetic oligonucleotide
cagaccuucugagugucac

SEQ ID NO: 1409539 - RNA, 19 nt, Artificial Sequence
  Description of Artificial Sequence: Synthetic oligonucleotide
ccuucgaccauggaaacug

SEQ ID NO: 1409540 - RNA, 19 nt, Artificial Sequence
  Description of Artificial Sequence: Synthetic oligonucleotide
gaccuucgaccauggaaac

SEQ ID NO: 1409541 - RNA, 19 nt, Artificial Sequence
  Description of Artificial Sequence: Synthetic oligonucleotide
guuacagauguggguccgg

SEQ ID NO: 1409542 - RNA, 19 nt, Artificial Sequence
  Description of Artificial Sequence: Synthetic oligonucleotide
uguggguccggaguggcau

SEQ ID NO: 1409543 - RNA, 19 nt, Artificial Sequence
  Description of Artificial Sequence: Synthetic oligonucleotide
acuccccauuuacagggca

SEQ ID NO: 1409544 - RNA, 19 nt, Artificial Sequence
  Description of Artificial Sequence: Synthetic oligonucleotide
gaacacgagcggcuucgug

SEQ ID NO: 1409545 - RNA, 19 nt, Artificial Sequence
  Description of Artificial Sequence: Synthetic oligonucleotide
gcagcauugagacagcagu

SEQ ID NO: 1409546 - RNA, 19 nt, Artificial Sequence
  Description of Artificial Sequence: Synthetic oligonucleotide
caaguugggaccccucaca

SEQ ID NO: 1409547 - RNA, 19 nt, Artificial Sequence
  Description of Artificial Sequence: Synthetic oligonucleotide
gucguucuagggucuggcc

SEQ ID NO: 1409548 - RNA, 19 nt, Artificial Sequence
  Description of Artificial Sequence: Synthetic oligonucleotide
cauuuacagggcaaggcgu

SEQ ID NO: 1409549 - RNA, 19 nt, Artificial Sequence
  Description of Artificial Sequence: Synthetic oligonucleotide
caccccugcccacacagac

SEQ ID NO: 1409550 - RNA, 19 nt, Artificial Sequence
  Description of Artificial Sequence: Synthetic oligonucleotide
ggugcagaacacgagcggc

SEQ ID NO: 1409551 - RNA, 19 nt, Artificial Sequence
  Description of Artificial Sequence: Synthetic oligonucleotide
cauguucacacggcugcag

SEQ ID NO: 1409552 - RNA, 19 nt, Artificial Sequence
  Description of Artificial Sequence: Synthetic oligonucleotide
guuccgccaaggcaggauc

SEQ ID NO: 1409553 - RNA, 19 nt, Artificial Sequence
  Description of Artificial Sequence: Synthetic oligonucleotide
agacauggccguuucucuu

SEQ ID NO: 1409554 - RNA, 19 nt, Artificial Sequence
  Description of Artificial Sequence: Synthetic oligonucleotide
cgaccauggaaacuguggg

SEQ ID NO: 1409555 - RNA, 19 nt, Artificial Sequence
  Description of Artificial Sequence: Synthetic oligonucleotide
ugcgugacugcuggcccgg

SEQ ID NO: 1409556 - RNA, 19 nt, Artificial Sequence
  Description of Artificial Sequence: Synthetic oligonucleotide
gguuggggccgcauggugg

SEQ ID NO: 1409557 - RNA, 19 nt, Artificial Sequence
  Description of Artificial Sequence: Synthetic oligonucleotide
aagggauuuuaggguuucu

SEQ ID NO: 1409558 - RNA, 19 nt, Artificial Sequence
  Description of Artificial Sequence: Synthetic oligonucleotide
agcuugcauuccagcaagc

SEQ ID NO: 1409559 - RNA, 19 nt, Artificial Sequence
  Description of Artificial Sequence: Synthetic oligonucleotide
agucguugacggguucggg

SEQ ID NO: 1409560 - RNA, 19 nt, Artificial Sequence
  Description of Artificial Sequence: Synthetic oligonucleotide
gccuuugcacuucccagag

SEQ ID NO: 1409561 - RNA, 19 nt, Artificial Sequence
  Description of Artificial Sequence: Synthetic oligonucleotide
cagcaagcauuuugagcac

SEQ ID NO: 1409562 - RNA, 19 nt, Artificial Sequence
  Description of Artificial Sequence: Synthetic oligonucleotide
cuuuguccucucuuacaga

SEQ ID NO: 1409563 - RNA, 19 nt, Artificial Sequence
  Description of Artificial Sequence: Synthetic oligonucleotide
guucacacggcugcaguga

SEQ ID NO: 1409564 - RNA, 19 nt, Artificial Sequence
  Description of Artificial Sequence: Synthetic oligonucleotide
ggcuucgugucuccuuagg

SEQ ID NO: 1409565 - RNA, 19 nt, Artificial Sequence
  Description of Artificial Sequence: Synthetic oligonucleotide
cccauuuacagggcaaggc

SEQ ID NO: 1409566 - RNA, 19 nt, Artificial Sequence
  Description of Artificial Sequence: Synthetic oligonucleotide
cuugugcgugacugcuggc

SEQ ID NO: 1409567 - RNA, 19 nt, Artificial Sequence
  Description of Artificial Sequence: Synthetic oligonucleotide
guugacggguucggguucc

SEQ ID NO: 1409568 - RNA, 19 nt, Artificial Sequence
  Description of Artificial Sequence: Synthetic oligonucleotide
acgagcggcuucgugucuc

SEQ ID NO: 1409569 - RNA, 19 nt, Artificial Sequence
  Description of Artificial Sequence: Synthetic oligonucleotide
cuggcguacacgggugggg

SEQ ID NO: 1409570 - RNA, 19 nt, Artificial Sequence
  Description of Artificial Sequence: Synthetic oligonucleotide
ggcauaggcagcauugaga

SEQ ID NO: 1409571 - RNA, 19 nt, Artificial Sequence
  Description of Artificial Sequence: Synthetic oligonucleotide
acgagguacugggugguca

SEQ ID NO: 1409572 - RNA, 19 nt, Artificial Sequence
  Description of Artificial Sequence: Synthetic oligonucleotide
cauagucguugacggguuc

SEQ ID NO: 1409573 - RNA, 19 nt, Artificial Sequence
  Description of Artificial Sequence: Synthetic oligonucleotide
caccaauuucuggacagca

SEQ ID NO: 1409574 - RNA, 19 nt, Artificial Sequence
  Description of Artificial Sequence: Synthetic oligonucleotide
gugugcagaggcgcuggcg

SEQ ID NO: 1409575 - RNA, 19 nt, Artificial Sequence
  Description of Artificial Sequence: Synthetic oligonucleotide
aaacugugggcgagaacuu

SEQ ID NO: 1409576 - RNA, 19 nt, Artificial Sequence
  Description of Artificial Sequence: Synthetic oligonucleotide
ucggaggagcuugcauucc

SEQ ID NO: 1409577 - RNA, 19 nt, Artificial Sequence
  Description of Artificial Sequence: Synthetic oligonucleotide
uggcguacacggguggggu

SEQ ID NO: 1409578 - RNA, 19 nt, Artificial Sequence
  Description of Artificial Sequence: Synthetic oligonucleotide
accaauuucuggacagcau

SEQ ID NO: 1409579 - RNA, 19 nt, Artificial Sequence
  Description of Artificial Sequence: Synthetic oligonucleotide
gugucgcaaguugggaccc

SEQ ID NO: 1409580 - RNA, 19 nt, Artificial Sequence
  Description of Artificial Sequence: Synthetic oligonucleotide
ccccucacauguaacggag

SEQ ID NO: 1409581 - RNA, 19 nt, Artificial Sequence
  Description of Artificial Sequence: Synthetic oligonucleotide
cacacuguggccguggagu

SEQ ID NO: 1409582 - RNA, 19 nt, Artificial Sequence
  Description of Artificial Sequence: Synthetic oligonucleotide
ugcagaacacgagcggcuu

SEQ ID NO: 1409583 - RNA, 19 nt, Artificial Sequence
  Description of Artificial Sequence: Synthetic oligonucleotide
cgaauaugcugguaauuuc

SEQ ID NO: 1409584 - RNA, 19 nt, Artificial Sequence
  Description of Artificial Sequence: Synthetic oligonucleotide
cucacauguaacggaggca

SEQ ID NO: 1409585 - RNA, 19 nt, Artificial Sequence
  Description of Artificial Sequence: Synthetic oligonucleotide
uagcgucggaggagcuugc

SEQ ID NO: 1409586 - RNA, 19 nt, Artificial Sequence
  Description of Artificial Sequence: Synthetic oligonucleotide
gcaguagcgucggaggagc

SEQ ID NO: 1409587 - RNA, 19 nt, Artificial Sequence
  Description of Artificial Sequence: Synthetic oligonucleotide
uggguccggaguggcauca

SEQ ID NO: 1409588 - RNA, 19 nt, Artificial Sequence
  Description of Artificial Sequence: Synthetic oligonucleotide
gugggguuggggccgcaug

SEQ ID NO: 1409589 - RNA, 19 nt, Artificial Sequence
  Description of Artificial Sequence: Synthetic oligonucleotide
gcgccucacacuguggccg

SEQ ID NO: 1409590 - RNA, 19 nt, Artificial Sequence
  Description of Artificial Sequence: Synthetic oligonucleotide
gcaaguugggaccccucac

SEQ ID NO: 1409591 - RNA, 19 nt, Artificial Sequence
  Description of Artificial Sequence: Synthetic oligonucleotide
auguaccuuucaagaaaca

SEQ ID NO: 1409592 - RNA, 19 nt, Artificial Sequence
  Description of Artificial Sequence: Synthetic oligonucleotide
agacgccugugucgcaagu

SEQ ID NO: 1409593 - RNA, 19 nt, Artificial Sequence
  Description of Artificial Sequence: Synthetic oligonucleotide
cgggauuuccucacaacug

SEQ ID NO: 1409594 - RNA, 19 nt, Artificial Sequence
  Description of Artificial Sequence: Synthetic oligonucleotide
ugacuccauuuuccccacu

SEQ ID NO: 1409595 - RNA, 19 nt, Artificial Sequence
  Description of Artificial Sequence: Synthetic oligonucleotide
uccgccaaggcaggauccu

SEQ ID NO: 1409596 - RNA, 19 nt, Artificial Sequence
  Description of Artificial Sequence: Synthetic oligonucleotide
cagacgccugugucgcaag

SEQ ID NO: 1409597 - RNA, 19 nt, Artificial Sequence
  Description of Artificial Sequence: Synthetic oligonucleotide
accuucgaccauggaaacu

SEQ ID NO: 1409598 - RNA, 19 nt, Artificial Sequence
  Description of Artificial Sequence: Synthetic oligonucleotide
ugcuggcccgggauuuccu

SEQ ID NO: 1409599 - RNA, 19 nt, Artificial Sequence
  Description of Artificial Sequence: Synthetic oligonucleotide
acagacgccugugucgcaa

SEQ ID NO: 1409600 - RNA, 19 nt, Artificial Sequence
  Description of Artificial Sequence: Synthetic oligonucleotide
ucgcaaguugggaccccuc

SEQ ID NO: 1409601 - RNA, 19 nt, Artificial Sequence
  Description of Artificial Sequence: Synthetic oligonucleotide
aguuccgccaaggcaggau

SEQ ID NO: 1409602 - RNA, 19 nt, Artificial Sequence
  Description of Artificial Sequence: Synthetic oligonucleotide
gccugugucgcaaguuggg

SEQ ID NO: 1409603 - RNA, 19 nt, Artificial Sequence
  Description of Artificial Sequence: Synthetic oligonucleotide
ccauuaaacuugcggccac

SEQ ID NO: 1409604 - RNA, 19 nt, Artificial Sequence
  Description of Artificial Sequence: Synthetic oligonucleotide
ugucgcaaguugggacccc

SEQ ID NO: 1409605 - RNA, 19 nt, Artificial Sequence
  Description of Artificial Sequence: Synthetic oligonucleotide
uccgucguucuagggucug

SEQ ID NO: 1409606 - RNA, 19 nt, Artificial Sequence
  Description of Artificial Sequence: Synthetic oligonucleotide
cugugaccauguaccuuuc

SEQ ID NO: 1409607 - RNA, 19 nt, Artificial Sequence
  Description of Artificial Sequence: Synthetic oligonucleotide
ccccgaugcucauaggcug

SEQ ID NO: 1409608 - RNA, 19 nt, Artificial Sequence
  Description of Artificial Sequence: Synthetic oligonucleotide
cagcaguagcgucggagga

SEQ ID NO: 1409609 - RNA, 19 nt, Artificial Sequence
  Description of Artificial Sequence: Synthetic oligonucleotide
cuccccauuuacagggcaa

SEQ ID NO: 1409610 - RNA, 19 nt, Artificial Sequence
  Description of Artificial Sequence: Synthetic oligonucleotide
cccucacauguaacggagg

SEQ ID NO: 1409611 - RNA, 19 nt, Artificial Sequence
  Description of Artificial Sequence: Synthetic oligonucleotide
agugucgaauaugcuggua

SEQ ID NO: 1409612 - RNA, 19 nt, Artificial Sequence
  Description of Artificial Sequence: Synthetic oligonucleotide
guucuagggucuggcccag

SEQ ID NO: 1409613 - RNA, 19 nt, Artificial Sequence
  Description of Artificial Sequence: Synthetic oligonucleotide
aggacucuucauacuuggu

SEQ ID NO: 1409614 - RNA, 19 nt, Artificial Sequence
  Description of Artificial Sequence: Synthetic oligonucleotide
gacggguucggguuccuuu

SEQ ID NO: 1409615 - RNA, 19 nt, Artificial Sequence
  Description of Artificial Sequence: Synthetic oligonucleotide
cagcagucuuccacgcuga

SEQ ID NO: 1409616 - RNA, 19 nt, Artificial Sequence
  Description of Artificial Sequence: Synthetic oligonucleotide
ccauguguggggcagaccu

SEQ ID NO: 1409617 - RNA, 19 nt, Artificial Sequence
  Description of Artificial Sequence: Synthetic oligonucleotide
acauagucguugacggguu

SEQ ID NO: 1409618 - RNA, 19 nt, Artificial Sequence
  Description of Artificial Sequence: Synthetic oligonucleotide
gcauuuugagcacugucuu

SEQ ID NO: 1409619 - RNA, 19 nt, Artificial Sequence
  Description of Artificial Sequence: Synthetic oligonucleotide
ugaccaucguggggaccug

SEQ ID NO: 1409620 - RNA, 19 nt, Artificial Sequence
  Description of Artificial Sequence: Synthetic oligonucleotide
gguaagcaguagcagcagu

SEQ ID NO: 1409621 - RNA, 19 nt, Artificial Sequence
  Description of Artificial Sequence: Synthetic oligonucleotide
ccggaguggcaucaccagc

SEQ ID NO: 1409622 - RNA, 19 nt, Artificial Sequence
  Description of Artificial Sequence: Synthetic oligonucleotide
ucguggggaccugcaugcc

SEQ ID NO: 1409623 - RNA, 19 nt, Artificial Sequence
  Description of Artificial Sequence: Synthetic oligonucleotide
agaacacgagcggcuucgu

SEQ ID NO: 1409624 - RNA, 19 nt, Artificial Sequence
  Description of Artificial Sequence: Synthetic oligonucleotide
gcguacacgggugggguug

SEQ ID NO: 1409625 - RNA, 19 nt, Artificial Sequence
  Description of Artificial Sequence: Synthetic oligonucleotide
ggguuggggccgcauggug

SEQ ID NO: 1409626 - RNA, 19 nt, Artificial Sequence
  Description of Artificial Sequence: Synthetic oligonucleotide
gcaugccugacagggacca

SEQ ID NO: 1409627 - RNA, 19 nt, Artificial Sequence
  Description of Artificial Sequence: Synthetic oligonucleotide
ggggucagaauggaagcaa

SEQ ID NO: 1409628 - RNA, 19 nt, Artificial Sequence
  Description of Artificial Sequence: Synthetic oligonucleotide
gacgagguacugggugguc

SEQ ID NO: 1409629 - RNA, 19 nt, Artificial Sequence
  Description of Artificial Sequence: Synthetic oligonucleotide
cgccugugucgcaaguugg

SEQ ID NO: 1409630 - RNA, 19 nt, Artificial Sequence
  Description of Artificial Sequence: Synthetic oligonucleotide
cguucuagggucuggccca

SEQ ID NO: 1409631 - RNA, 19 nt, Artificial Sequence
  Description of Artificial Sequence: Synthetic oligonucleotide
ccccaugacgagguacugg

SEQ ID NO: 1409632 - RNA, 19 nt, Artificial Sequence
  Description of Artificial Sequence: Synthetic oligonucleotide
cagccccgaugcucauagg

SEQ ID NO: 1409633 - RNA, 19 nt, Artificial Sequence
  Description of Artificial Sequence: Synthetic oligonucleotide
gucgaauaugcugguaauu

SEQ ID NO: 1409634 - RNA, 19 nt, Artificial Sequence
  Description of Artificial Sequence: Synthetic oligonucleotide
cccgggauuuccucacaac

SEQ ID NO: 1409635 - RNA, 19 nt, Artificial Sequence
  Description of Artificial Sequence: Synthetic oligonucleotide
guggguccggaguggcauc

SEQ ID NO: 1409636 - RNA, 19 nt, Artificial Sequence
  Description of Artificial Sequence: Synthetic oligonucleotide
cuucgaccauggaaacugu

SEQ ID NO: 1409637 - RNA, 19 nt, Artificial Sequence
  Description of Artificial Sequence: Synthetic oligonucleotide
gcagaacacgagcggcuuc

SEQ ID NO: 1409638 - RNA, 19 nt, Artificial Sequence
  Description of Artificial Sequence: Synthetic oligonucleotide
guacacgggugggguuggg

SEQ ID NO: 1409639 - RNA, 19 nt, Artificial Sequence
  Description of Artificial Sequence: Synthetic oligonucleotide
ggcgcuggcguacacgggu

SEQ ID NO: 1409640 - RNA, 19 nt, Artificial Sequence
  Description of Artificial Sequence: Synthetic oligonucleotide
gugcagaacacgagcggcu

SEQ ID NO: 1409641 - RNA, 19 nt, Artificial Sequence
  Description of Artificial Sequence: Synthetic oligonucleotide
ggguucggguuccuuugga

SEQ ID NO: 1409642 - RNA, 19 nt, Artificial Sequence
  Description of Artificial Sequence: Synthetic oligonucleotide
ccgggauuuccucacaacu

SEQ ID NO: 1409643 - RNA, 19 nt, Artificial Sequence
  Description of Artificial Sequence: Synthetic oligonucleotide
agcgucggaggagcuugca

SEQ ID NO: 1409644 - RNA, 19 nt, Artificial Sequence
  Description of Artificial Sequence: Synthetic oligonucleotide
gcugauccuaggcaggguu

SEQ ID NO: 1409645 - RNA, 19 nt, Artificial Sequence
  Description of Artificial Sequence: Synthetic oligonucleotide
caugccugacagggaccac

SEQ ID NO: 1409646 - RNA, 19 nt, Artificial Sequence
  Description of Artificial Sequence: Synthetic oligonucleotide
cugauccuaggcaggguuu

SEQ ID NO: 1409647 - RNA, 19 nt, Artificial Sequence
  Description of Artificial Sequence: Synthetic oligonucleotide
gcagucuuccacgcugaca

SEQ ID NO: 1409648 - RNA, 19 nt, Artificial Sequence
  Description of Artificial Sequence: Synthetic oligonucleotide
ccauggaaacugugggcga

SEQ ID NO: 1409649 - RNA, 19 nt, Artificial Sequence
  Description of Artificial Sequence: Synthetic oligonucleotide
cagaggcgcuggcguacac

SEQ ID NO: 1409650 - RNA, 19 nt, Artificial Sequence
  Description of Artificial Sequence: Synthetic oligonucleotide
uuggggccgcaugguggug

SEQ ID NO: 1409651 - RNA, 19 nt, Artificial Sequence
  Description of Artificial Sequence: Synthetic oligonucleotide
gggaccccucacauguaac

SEQ ID NO: 1409652 - RNA, 19 nt, Artificial Sequence
  Description of Artificial Sequence: Synthetic oligonucleotide
gcggcuucgugucuccuua

SEQ ID NO: 1409653 - RNA, 19 nt, Artificial Sequence
  Description of Artificial Sequence: Synthetic oligonucleotide
cagugucgaauaugcuggu

SEQ ID NO: 1409654 - RNA, 19 nt, Artificial Sequence
  Description of Artificial Sequence: Synthetic oligonucleotide
caugcagacauggccguuu

SEQ ID NO: 1409655 - RNA, 19 nt, Artificial Sequence
  Description of Artificial Sequence: Synthetic oligonucleotide
cccgaugcucauaggcuga

SEQ ID NO: 1409656 - RNA, 19 nt, Artificial Sequence
  Description of Artificial Sequence: Synthetic oligonucleotide
cugccacucaaguguccua

SEQ ID NO: 1409657 - RNA, 19 nt, Artificial Sequence
  Description of Artificial Sequence: Synthetic oligonucleotide
ugacggguucggguuccuu

SEQ ID NO: 1409658 - RNA, 19 nt, Artificial Sequence
  Description of Artificial Sequence: Synthetic oligonucleotide
gggcgagaacuuggggagc

SEQ ID NO: 1409659 - RNA, 19 nt, Artificial Sequence
  Description of Artificial Sequence: Synthetic oligonucleotide
gucgcaaguugggaccccu

SEQ ID NO: 1409660 - RNA, 19 nt, Artificial Sequence
  Description of Artificial Sequence: Synthetic oligonucleotide
gacgccugugucgcaaguu

SEQ ID NO: 1409661 - RNA, 19 nt, Artificial Sequence
  Description of Artificial Sequence: Synthetic oligonucleotide
ggguggucacauguccguc

SEQ ID NO: 1409662 - RNA, 19 nt, Artificial Sequence
  Description of Artificial Sequence: Synthetic oligonucleotide
ccugugucgcaaguuggga

SEQ ID NO: 1409663 - RNA, 19 nt, Artificial Sequence
  Description of Artificial Sequence: Synthetic oligonucleotide
cgcaaguugggaccccuca

SEQ ID NO: 1409664 - RNA, 19 nt, Artificial Sequence
  Description of Artificial Sequence: Synthetic oligonucleotide
cguugacggguucggguuc

SEQ ID NO: 1409665 - RNA, 19 nt, Artificial Sequence
  Description of Artificial Sequence: Synthetic oligonucleotide
ccgucguucuagggucugg

SEQ ID NO: 1409666 - RNA, 19 nt, Artificial Sequence
  Description of Artificial Sequence: Synthetic oligonucleotide
cguacacgggugggguugg

SEQ ID NO: 1409667 - RNA, 19 nt, Artificial Sequence
  Description of Artificial Sequence: Synthetic oligonucleotide
cacuuaggagcaggguuau

SEQ ID NO: 1409668 - RNA, 19 nt, Artificial Sequence
  Description of Artificial Sequence: Synthetic oligonucleotide
gccccgaugcucauaggcu

SEQ ID NO: 1409669 - RNA, 19 nt, Artificial Sequence
  Description of Artificial Sequence: Synthetic oligonucleotide
cacugugaccauguaccuu

SEQ ID NO: 1409670 - RNA, 19 nt, Artificial Sequence
  Description of Artificial Sequence: Synthetic oligonucleotide
guguccuaggagccaccuu

SEQ ID NO: 1409671 - RNA, 19 nt, Artificial Sequence
  Description of Artificial Sequence: Synthetic oligonucleotide
ccccauguguggggcagac

SEQ ID NO: 1409672 - RNA, 19 nt, Artificial Sequence
  Description of Artificial Sequence: Synthetic oligonucleotide
caguuccgccaaggcagga

SEQ ID NO: 1409673 - RNA, 19 nt, Artificial Sequence
  Description of Artificial Sequence: Synthetic oligonucleotide
caguagcgucggaggagcu

SEQ ID NO: 1409674 - RNA, 19 nt, Artificial Sequence
  Description of Artificial Sequence: Synthetic oligonucleotide
ggcccgggauuuccucaca

SEQ ID NO: 1409675 - RNA, 19 nt, Artificial Sequence
  Description of Artificial Sequence: Synthetic oligonucleotide
gcagaccuucugaguguca

SEQ ID NO: 1409676 - RNA, 19 nt, Artificial Sequence
  Description of Artificial Sequence: Synthetic oligonucleotide
ccgccaaggcaggauccug

SEQ ID NO: 1409677 - RNA, 19 nt, Artificial Sequence
  Description of Artificial Sequence: Synthetic oligonucleotide
guccgucguucuagggucu

SEQ ID NO: 1409678 - RNA, 19 nt, Artificial Sequence
  Description of Artificial Sequence: Synthetic oligonucleotide
cggcuucgugucuccuuag

SEQ ID NO: 1409679 - RNA, 19 nt, Artificial Sequence
  Description of Artificial Sequence: Synthetic oligonucleotide
cgucggaggagcuugcauu

SEQ ID NO: 1409680 - RNA, 19 nt, Artificial Sequence
  Description of Artificial Sequence: Synthetic oligonucleotide
cacgagcggcuucgugucu

SEQ ID NO: 1409681 - RNA, 19 nt, Artificial Sequence
  Description of Artificial Sequence: Synthetic oligonucleotide
gcgugacugcuggcccggg

SEQ ID NO: 1409682 - RNA, 19 nt, Artificial Sequence
  Description of Artificial Sequence: Synthetic oligonucleotide
cacccugaccuucgaccau

SEQ ID NO: 1409683 - RNA, 19 nt, Artificial Sequence
  Description of Artificial Sequence: Synthetic oligonucleotide
cgagaacuuggggagcaaa

SEQ ID NO: 1409684 - RNA, 19 nt, Artificial Sequence
  Description of Artificial Sequence: Synthetic oligonucleotide
gcgucggaggagcuugcau

SEQ ID NO: 1409685 - RNA, 19 nt, Artificial Sequence
  Description of Artificial Sequence: Synthetic oligonucleotide
ggguuaucacauagucguu

SEQ ID NO: 1409686 - RNA, 19 nt, Artificial Sequence
  Description of Artificial Sequence: Synthetic oligonucleotide
gcgagaacuuggggagcaa

SEQ ID NO: 1409687 - RNA, 19 nt, Artificial Sequence
  Description of Artificial Sequence: Synthetic oligonucleotide
ccacacuuaggagcagggu

SEQ ID NO: 1409688 - RNA, 19 nt, Artificial Sequence
  Description of Artificial Sequence: Synthetic oligonucleotide
ggcugauccuaggcagggu

SEQ ID NO: 1409689 - RNA, 19 nt, Artificial Sequence
  Description of Artificial Sequence: Synthetic oligonucleotide
ggcguacacgggugggguu

SEQ ID NO: 1409690 - RNA, 19 nt, Artificial Sequence
  Description of Artificial Sequence: Synthetic oligonucleotide
gccccauguguggggcaga

SEQ ID NO: 1409691 - RNA, 19 nt, Artificial Sequence
  Description of Artificial Sequence: Synthetic oligonucleotide
ccaucguggggaccugcau

SEQ ID NO: 1409692 - RNA, 19 nt, Artificial Sequence
  Description of Artificial Sequence: Synthetic oligonucleotide
cgccucacacuguggccgu

SEQ ID NO: 1409693 - RNA, 19 nt, Artificial Sequence
  Description of Artificial Sequence: Synthetic oligonucleotide
aaagcuauaagcuuaauca

SEQ ID NO: 1409694 - RNA, 19 nt, Artificial Sequence
  Description of Artificial Sequence: Synthetic oligonucleotide
ucaaaugaaacucagacca

SEQ ID NO: 1409695 - RNA, 19 nt, Artificial Sequence
  Description of Artificial Sequence: Synthetic oligonucleotide
aauuagaaaacaaacuggc

SEQ ID NO: 1409696 - RNA, 19 nt, Artificial Sequence
  Description of Artificial Sequence: Synthetic oligonucleotide
ugaaauuacugucaaauga

SEQ ID NO: 1409697 - RNA, 19 nt, Artificial Sequence
  Description of Artificial Sequence: Synthetic oligonucleotide
acauaacguaaauauaucc

SEQ ID NO: 1409698 - RNA, 19 nt, Artificial Sequence
  Description of Artificial Sequence: Synthetic oligonucleotide
aacaguuucauuaacugac

SEQ ID NO: 1409699 - RNA, 19 nt, Artificial Sequence
  Description of Artificial Sequence: Synthetic oligonucleotide
uaauuaaacgacaauuugc

SEQ ID NO: 1409700 - RNA, 19 nt, Artificial Sequence
  Description of Artificial Sequence: Synthetic oligonucleotide
aacguaaauauauccaauc

SEQ ID NO: 1409701 - RNA, 19 nt, Artificial Sequence
  Description of Artificial Sequence: Synthetic oligonucleotide
aaauuagaaaacaaacugg

SEQ ID NO: 1409702 - RNA, 19 nt, Artificial Sequence
  Description of Artificial Sequence: Synthetic oligonucleotide
uugggaauugcuaauaaag

SEQ ID NO: 1409703 - RNA, 19 nt, Artificial Sequence
  Description of Artificial Sequence: Synthetic oligonucleotide
aauaauucuaugccuaacu

SEQ ID NO: 1409704 - RNA, 19 nt, Artificial Sequence
  Description of Artificial Sequence: Synthetic oligonucleotide
uuaaacgacaauuugcucu

SEQ ID NO: 1409705 - RNA, 19 nt, Artificial Sequence
  Description of Artificial Sequence: Synthetic oligonucleotide
uauaagcuuaaucacaugu

SEQ ID NO: 1409706 - RNA, 19 nt, Artificial Sequence
  Description of Artificial Sequence: Synthetic oligonucleotide
aauccuugacgcuuaaagg

SEQ ID NO: 1409707 - RNA, 19 nt, Artificial Sequence
  Description of Artificial Sequence: Synthetic oligonucleotide
aaagggagcgauuuaauca

SEQ ID NO: 1409708 - RNA, 19 nt, Artificial Sequence
  Description of Artificial Sequence: Synthetic oligonucleotide
cuaugccuaacucagaucg

SEQ ID NO: 1409709 - RNA, 19 nt, Artificial Sequence
  Description of Artificial Sequence: Synthetic oligonucleotide
aaacaaacuggccaaagcu

SEQ ID NO: 1409710 - RNA, 19 nt, Artificial Sequence
  Description of Artificial Sequence: Synthetic oligonucleotide
aaaagggagcgauuuaauc

SEQ ID NO: 1409711 - RNA, 19 nt, Artificial Sequence
  Description of Artificial Sequence: Synthetic oligonucleotide
agucauccgauuuagaaag

SEQ ID NO: 1409712 - RNA, 19 nt, Artificial Sequence
  Description of Artificial Sequence: Synthetic oligonucleotide
aaacucagaccacauuagc

SEQ ID NO: 1409713 - RNA, 19 nt, Artificial Sequence
  Description of Artificial Sequence: Synthetic oligonucleotide
aaagcuacuacgugugauc

SEQ ID NO: 1409714 - RNA, 19 nt, Artificial Sequence
  Description of Artificial Sequence: Synthetic oligonucleotide
aucgauaacuuccuccucc

SEQ ID NO: 1409715 - RNA, 19 nt, Artificial Sequence
  Description of Artificial Sequence: Synthetic oligonucleotide
aauuaaacgacaauuugcu

SEQ ID NO: 1409716 - RNA, 19 nt, Artificial Sequence
  Description of Artificial Sequence: Synthetic oligonucleotide
uguuaaguagauuucaguc

SEQ ID NO: 1409717 - RNA, 19 nt, Artificial Sequence
  Description of Artificial Sequence: Synthetic oligonucleotide
cuaagaauaaaaguguagc

SEQ ID NO: 1409718 - RNA, 19 nt, Artificial Sequence
  Description of Artificial Sequence: Synthetic oligonucleotide
uauaauacaggguauuuaa

SEQ ID NO: 1409719 - RNA, 19 nt, Artificial Sequence
  Description of Artificial Sequence: Synthetic oligonucleotide
uuuuagacguguaaaagaa

SEQ ID NO: 1409720 - RNA, 19 nt, Artificial Sequence
  Description of Artificial Sequence: Synthetic oligonucleotide
uuagacguguaaaagaaaa

SEQ ID NO: 1409721 - RNA, 19 nt, Artificial Sequence
  Description of Artificial Sequence: Synthetic oligonucleotide
aaacauaacguaaauauau

SEQ ID NO: 1409722 - RNA, 19 nt, Artificial Sequence
  Description of Artificial Sequence: Synthetic oligonucleotide
uccucaaauaauucuaugc

SEQ ID NO: 1409723 - RNA, 19 nt, Artificial Sequence
  Description of Artificial Sequence: Synthetic oligonucleotide
uaaaggaucagaucuugag

SEQ ID NO: 1409724 - RNA, 19 nt, Artificial Sequence
  Description of Artificial Sequence: Synthetic oligonucleotide
agaauaaaaguguagcggu

SEQ ID NO: 1409725 - RNA, 19 nt, Artificial Sequence
  Description of Artificial Sequence: Synthetic oligonucleotide
aauaguauuuaaaagcuaa

SEQ ID NO: 1409726 - RNA, 19 nt, Artificial Sequence
  Description of Artificial Sequence: Synthetic oligonucleotide
guaaauuaggguuugguuc

SEQ ID NO: 1409727 - RNA, 19 nt, Artificial Sequence
  Description of Artificial Sequence: Synthetic oligonucleotide
uuaaccaagagcuuaguau

SEQ ID NO: 1409728 - RNA, 19 nt, Artificial Sequence
  Description of Artificial Sequence: Synthetic oligonucleotide
auaauucuaugccuaacuc

SEQ ID NO: 1409729 - RNA, 19 nt, Artificial Sequence
  Description of Artificial Sequence: Synthetic oligonucleotide
ucagagcagacuuucaucc

SEQ ID NO: 1409730 - RNA, 19 nt, Artificial Sequence
  Description of Artificial Sequence: Synthetic oligonucleotide
gaccugauaaauaagacac

SEQ ID NO: 1409731 - RNA, 19 nt, Artificial Sequence
  Description of Artificial Sequence: Synthetic oligonucleotide
acagaaguaaauuaggguu

SEQ ID NO: 1409732 - RNA, 19 nt, Artificial Sequence
  Description of Artificial Sequence: Synthetic oligonucleotide
uacaggguauuuaagaagu

SEQ ID NO: 1409733 - RNA, 19 nt, Artificial Sequence
  Description of Artificial Sequence: Synthetic oligonucleotide
agaacuuuuacucugcaaa

SEQ ID NO: 1409734 - RNA, 19 nt, Artificial Sequence
  Description of Artificial Sequence: Synthetic oligonucleotide
aauauauccaauccuucau

SEQ ID NO: 1409735 - RNA, 19 nt, Artificial Sequence
  Description of Artificial Sequence: Synthetic oligonucleotide
uggcacaacaucaagcugc

SEQ ID NO: 1409736 - RNA, 19 nt, Artificial Sequence
  Description of Artificial Sequence: Synthetic oligonucleotide
uccauccuaagaauaaaag

SEQ ID NO: 1409737 - RNA, 19 nt, Artificial Sequence
  Description of Artificial Sequence: Synthetic oligonucleotide
uguaggaccugauaaauaa

SEQ ID NO: 1409738 - RNA, 19 nt, Artificial Sequence
  Description of Artificial Sequence: Synthetic oligonucleotide
aagagcuuaguauucauua

SEQ ID NO: 1409739 - RNA, 19 nt, Artificial Sequence
  Description of Artificial Sequence: Synthetic oligonucleotide
ugggaauugcuaauaaagc

SEQ ID NO: 1409740 - RNA, 19 nt, Artificial Sequence
  Description of Artificial Sequence: Synthetic oligonucleotide
acugacaaacauuuaacca

SEQ ID NO: 1409741 - RNA, 19 nt, Artificial Sequence
  Description of Artificial Sequence: Synthetic oligonucleotide
ugcuaauaaagcuauaguu

SEQ ID NO: 1409742 - RNA, 19 nt, Artificial Sequence
  Description of Artificial Sequence: Synthetic oligonucleotide
gucacucaaagcuauaagc

SEQ ID NO: 1409743 - RNA, 19 nt, Artificial Sequence
  Description of Artificial Sequence: Synthetic oligonucleotide
aagcauuucagugucagca

SEQ ID NO: 1409744 - RNA, 19 nt, Artificial Sequence
  Description of Artificial Sequence: Synthetic oligonucleotide
guauuuaaaagcuaagcaa

SEQ ID NO: 1409745 - RNA, 19 nt, Artificial Sequence
  Description of Artificial Sequence: Synthetic oligonucleotide
uaauucuaugccuaacuca

SEQ ID NO: 1409746 - RNA, 19 nt, Artificial Sequence
  Description of Artificial Sequence: Synthetic oligonucleotide
aaagcuuccgcuucacaug

SEQ ID NO: 1409747 - RNA, 19 nt, Artificial Sequence
  Description of Artificial Sequence: Synthetic oligonucleotide
uguuuuguagaguaugcac

SEQ ID NO: 1409748 - RNA, 19 nt, Artificial Sequence
  Description of Artificial Sequence: Synthetic oligonucleotide
gaaaacaggcaacacggcc

SEQ ID NO: 1409749 - RNA, 19 nt, Artificial Sequence
  Description of Artificial Sequence: Synthetic oligonucleotide
auuggauccuguuuuguag

SEQ ID NO: 1409750 - RNA, 19 nt, Artificial Sequence
  Description of Artificial Sequence: Synthetic oligonucleotide
caauccuugacgcuuaaag

SEQ ID NO: 1409751 - RNA, 19 nt, Artificial Sequence
  Description of Artificial Sequence: Synthetic oligonucleotide
auaacguaaauauauccaa

SEQ ID NO: 1409752 - RNA, 19 nt, Artificial Sequence
  Description of Artificial Sequence: Synthetic oligonucleotide
aauugcagcauuugggaau

SEQ ID NO: 1409753 - RNA, 19 nt, Artificial Sequence
  Description of Artificial Sequence: Synthetic oligonucleotide
aacauaacguaaauauauc

SEQ ID NO: 1409754 - RNA, 19 nt, Artificial Sequence
  Description of Artificial Sequence: Synthetic oligonucleotide
ucagugucagcaaggauug

SEQ ID NO: 1409755 - RNA, 19 nt, Artificial Sequence
  Description of Artificial Sequence: Synthetic oligonucleotide
guagauuucagucauccga

SEQ ID NO: 1409756 - RNA, 19 nt, Artificial Sequence
  Description of Artificial Sequence: Synthetic oligonucleotide
aguguagcgguauuaagcu

SEQ ID NO: 1409757 - RNA, 19 nt, Artificial Sequence
  Description of Artificial Sequence: Synthetic oligonucleotide
ugcucauuaaggaauuugu

SEQ ID NO: 1409758 - RNA, 19 nt, Artificial Sequence
  Description of Artificial Sequence: Synthetic oligonucleotide
aucuuauacagugguaagc

SEQ ID NO: 1409759 - RNA, 19 nt, Artificial Sequence
  Description of Artificial Sequence: Synthetic oligonucleotide
auacaggguauuuaagaag

SEQ ID NO: 1409760 - RNA, 19 nt, Artificial Sequence
  Description of Artificial Sequence: Synthetic oligonucleotide
ucuuauacagugguaagcu

SEQ ID NO: 1409761 - RNA, 19 nt, Artificial Sequence
  Description of Artificial Sequence: Synthetic oligonucleotide
aacaucaagcugcauuucu

SEQ ID NO: 1409762 - RNA, 19 nt, Artificial Sequence
  Description of Artificial Sequence: Synthetic oligonucleotide
cauaacguaaauauaucca

SEQ ID NO: 1409763 - RNA, 19 nt, Artificial Sequence
  Description of Artificial Sequence: Synthetic oligonucleotide
aaaccacucucugaccugc

SEQ ID NO: 1409764 - RNA, 19 nt, Artificial Sequence
  Description of Artificial Sequence: Synthetic oligonucleotide
auccuugacgcuuaaagga

SEQ ID NO: 1409765 - RNA, 19 nt, Artificial Sequence
  Description of Artificial Sequence: Synthetic oligonucleotide
ugggaaaucauggaguucu

SEQ ID NO: 1409766 - RNA, 19 nt, Artificial Sequence
  Description of Artificial Sequence: Synthetic oligonucleotide
agcucuaguggucauuaac

SEQ ID NO: 1409767 - RNA, 19 nt, Artificial Sequence
  Description of Artificial Sequence: Synthetic oligonucleotide
auuaaacgacaauuugcuc

SEQ ID NO: 1409768 - RNA, 19 nt, Artificial Sequence
  Description of Artificial Sequence: Synthetic oligonucleotide
agcgcuuuauuuccauugc

SEQ ID NO: 1409769 - RNA, 19 nt, Artificial Sequence
  Description of Artificial Sequence: Synthetic oligonucleotide
uaucuuauacagugguaag

SEQ ID NO: 1409770 - RNA, 19 nt, Artificial Sequence
  Description of Artificial Sequence: Synthetic oligonucleotide
uuguagaguaugcacgccc

SEQ ID NO: 1409771 - RNA, 19 nt, Artificial Sequence
  Description of Artificial Sequence: Synthetic oligonucleotide
uuucauuaacugacaaaca

SEQ ID NO: 1409772 - RNA, 19 nt, Artificial Sequence
  Description of Artificial Sequence: Synthetic oligonucleotide
guuaacaguaguaugaaaa

SEQ ID NO: 1409773 - RNA, 19 nt, Artificial Sequence
  Description of Artificial Sequence: Synthetic oligonucleotide
aagggagcgauuuaaucau

SEQ ID NO: 1409774 - RNA, 19 nt, Artificial Sequence
  Description of Artificial Sequence: Synthetic oligonucleotide
aaaguuccauccuaagaau

SEQ ID NO: 1409775 - RNA, 19 nt, Artificial Sequence
  Description of Artificial Sequence: Synthetic oligonucleotide
agcgauuuaaucauuauaa

SEQ ID NO: 1409776 - RNA, 19 nt, Artificial Sequence
  Description of Artificial Sequence: Synthetic oligonucleotide
aaucagagcagacuuucau

SEQ ID NO: 1409777 - RNA, 19 nt, Artificial Sequence
  Description of Artificial Sequence: Synthetic oligonucleotide
aacuuacucuccuucagaa

SEQ ID NO: 1409778 - RNA, 19 nt, Artificial Sequence
  Description of Artificial Sequence: Synthetic oligonucleotide
ucuaguggucauuaacccc

SEQ ID NO: 1409779 - RNA, 19 nt, Artificial Sequence
  Description of Artificial Sequence: Synthetic oligonucleotide
uguagaguaugcacgcccc

SEQ ID NO: 1409780 - RNA, 19 nt, Artificial Sequence
  Description of Artificial Sequence: Synthetic oligonucleotide
auguuuggucacucaaagc

SEQ ID NO: 1409781 - RNA, 19 nt, Artificial Sequence
  Description of Artificial Sequence: Synthetic oligonucleotide
uccgauuuagaaagcuucc

SEQ ID NO: 1409782 - RNA, 19 nt, Artificial Sequence
  Description of Artificial Sequence: Synthetic oligonucleotide
uuuacucugcaaaauguuu

SEQ ID NO: 1409783 - RNA, 19 nt, Artificial Sequence
  Description of Artificial Sequence: Synthetic oligonucleotide
uaauucagacaucuugagu

SEQ ID NO: 1409784 - RNA, 19 nt, Artificial Sequence
  Description of Artificial Sequence: Synthetic oligonucleotide
cuaagaacuuuuacucugc

SEQ ID NO: 1409785 - RNA, 19 nt, Artificial Sequence
  Description of Artificial Sequence: Synthetic oligonucleotide
uguagcgguauuaagcuuu

SEQ ID NO: 1409786 - RNA, 19 nt, Artificial Sequence
  Description of Artificial Sequence: Synthetic oligonucleotide
aaagucaaagguucacaaa

SEQ ID NO: 1409787 - RNA, 19 nt, Artificial Sequence
  Description of Artificial Sequence: Synthetic oligonucleotide
acaaaggaaacauaacgua

SEQ ID NO: 1409788 - RNA, 19 nt, Artificial Sequence
  Description of Artificial Sequence: Synthetic oligonucleotide
guaauucagacaucuugag

SEQ ID NO: 1409789 - RNA, 19 nt, Artificial Sequence
  Description of Artificial Sequence: Synthetic oligonucleotide
uucagaauguuaaguagau

SEQ ID NO: 1409790 - RNA, 19 nt, Artificial Sequence
  Description of Artificial Sequence: Synthetic oligonucleotide
agaacuuacucuccuucag

SEQ ID NO: 1409791 - RNA, 19 nt, Artificial Sequence
  Description of Artificial Sequence: Synthetic oligonucleotide
agcuauacaaaguuagcau

SEQ ID NO: 1409792 - RNA, 19 nt, Artificial Sequence
  Description of Artificial Sequence: Synthetic oligonucleotide
gaagaacuuacucuccuuc

SEQ ID NO: 1409793 - RNA, 19 nt, Artificial Sequence
  Description of Artificial Sequence: Synthetic oligonucleotide
cgugugaucauucaaaacc

SEQ ID NO: 1409794 - RNA, 19 nt, Artificial Sequence
  Description of Artificial Sequence: Synthetic oligonucleotide
auaagcuuaaucacauguc

SEQ ID NO: 1409795 - RNA, 19 nt, Artificial Sequence
  Description of Artificial Sequence: Synthetic oligonucleotide
aaguaaauuaggguuuggu

SEQ ID NO: 1409796 - RNA, 19 nt, Artificial Sequence
  Description of Artificial Sequence: Synthetic oligonucleotide
cucuaguggucauuaaccc

SEQ ID NO: 1409797 - RNA, 19 nt, Artificial Sequence
  Description of Artificial Sequence: Synthetic oligonucleotide
ucugagugaaaagaucagc

SEQ ID NO: 1409798 - RNA, 19 nt, Artificial Sequence
  Description of Artificial Sequence: Synthetic oligonucleotide
aaggaaacauaacguaaau

SEQ ID NO: 1409799 - RNA, 19 nt, Artificial Sequence
  Description of Artificial Sequence: Synthetic oligonucleotide
cugacaaacauuuaaccaa

SEQ ID NO: 1409800 - RNA, 19 nt, Artificial Sequence
  Description of Artificial Sequence: Synthetic oligonucleotide
acacagaaguaaauuaggg

SEQ ID NO: 1409801 - RNA, 19 nt, Artificial Sequence
  Description of Artificial Sequence: Synthetic oligonucleotide
cuaagcaaacaaucagagc

SEQ ID NO: 1409802 - RNA, 19 nt, Artificial Sequence
  Description of Artificial Sequence: Synthetic oligonucleotide
uagauuucagucauccgau

SEQ ID NO: 1409803 - RNA, 19 nt, Artificial Sequence
  Description of Artificial Sequence: Synthetic oligonucleotide
uuuuacucugcaaaauguu

SEQ ID NO: 1409804 - RNA, 19 nt, Artificial Sequence
  Description of Artificial Sequence: Synthetic oligonucleotide
caagucgugucuaaccagc

SEQ ID NO: 1409805 - RNA, 19 nt, Artificial Sequence
  Description of Artificial Sequence: Synthetic oligonucleotide
ugugugaucuguugacaag

SEQ ID NO: 1409806 - RNA, 19 nt, Artificial Sequence
  Description of Artificial Sequence: Synthetic oligonucleotide
ggaaacauaacguaaauau

SEQ ID NO: 1409807 - RNA, 19 nt, Artificial Sequence
  Description of Artificial Sequence: Synthetic oligonucleotide
uuaaaggaucagaucuuga

SEQ ID NO: 1409808 - RNA, 19 nt, Artificial Sequence
  Description of Artificial Sequence: Synthetic oligonucleotide
agcuuagugcauucaauug

SEQ ID NO: 1409809 - RNA, 19 nt, Artificial Sequence
  Description of Artificial Sequence: Synthetic oligonucleotide
uuagaaagcuuccgcuuca

SEQ ID NO: 1409810 - RNA, 19 nt, Artificial Sequence
  Description of Artificial Sequence: Synthetic oligonucleotide
auccgauuuagaaagcuuc

SEQ ID NO: 1409811 - RNA, 19 nt, Artificial Sequence
  Description of Artificial Sequence: Synthetic oligonucleotide
uacagugguaagcuggagu

SEQ ID NO: 1409812 - RNA, 19 nt, Artificial Sequence
  Description of Artificial Sequence: Synthetic oligonucleotide
aaaaguguagcgguauuaa

SEQ ID NO: 1409813 - RNA, 19 nt, Artificial Sequence
  Description of Artificial Sequence: Synthetic oligonucleotide
uaacguaaauauauccaau

SEQ ID NO: 1409814 - RNA, 19 nt, Artificial Sequence
  Description of Artificial Sequence: Synthetic oligonucleotide
acucagaccacauuagcaa

SEQ ID NO: 1409815 - RNA, 19 nt, Artificial Sequence
  Description of Artificial Sequence: Synthetic oligonucleotide
uugaguugaagaacuuacu

SEQ ID NO: 1409816 - RNA, 19 nt, Artificial Sequence
  Description of Artificial Sequence: Synthetic oligonucleotide
uuucagucauccgauuuag

SEQ ID NO: 1409817 - RNA, 19 nt, Artificial Sequence
  Description of Artificial Sequence: Synthetic oligonucleotide
aagcaaacaaucagagcag

SEQ ID NO: 1409818 - RNA, 19 nt, Artificial Sequence
  Description of Artificial Sequence: Synthetic oligonucleotide
agucgugucuaaccagcgc

SEQ ID NO: 1409819 - RNA, 19 nt, Artificial Sequence
  Description of Artificial Sequence: Synthetic oligonucleotide
cuucagaauguuaaguaga

SEQ ID NO: 1409820 - RNA, 19 nt, Artificial Sequence
  Description of Artificial Sequence: Synthetic oligonucleotide
uauacaaaguuagcauagc

SEQ ID NO: 1409821 - RNA, 19 nt, Artificial Sequence
  Description of Artificial Sequence: Synthetic oligonucleotide
aacucagaccacauuagca

SEQ ID NO: 1409822 - RNA, 19 nt, Artificial Sequence
  Description of Artificial Sequence: Synthetic oligonucleotide
acucagaucgucucugucu

SEQ ID NO: 1409823 - RNA, 19 nt, Artificial Sequence
  Description of Artificial Sequence: Synthetic oligonucleotide
cauucacaguaauucagac

SEQ ID NO: 1409824 - RNA, 19 nt, Artificial Sequence
  Description of Artificial Sequence: Synthetic oligonucleotide
aacgacaauuugcucugug

SEQ ID NO: 1409825 - RNA, 19 nt, Artificial Sequence
  Description of Artificial Sequence: Synthetic oligonucleotide
uuuagacguguaaaagaaa

SEQ ID NO: 1409826 - RNA, 19 nt, Artificial Sequence
  Description of Artificial Sequence: Synthetic oligonucleotide
ugaguccagaucuaauuaa

SEQ ID NO: 1409827 - RNA, 19 nt, Artificial Sequence
  Description of Artificial Sequence: Synthetic oligonucleotide
gcagcaugcauauucgagg

SEQ ID NO: 1409828 - RNA, 19 nt, Artificial Sequence
  Description of Artificial Sequence: Synthetic oligonucleotide
acgugugaucauucaaaac

SEQ ID NO: 1409829 - RNA, 19 nt, Artificial Sequence
  Description of Artificial Sequence: Synthetic oligonucleotide
aagaacuuuuacucugcaa

SEQ ID NO: 1409830 - RNA, 19 nt, Artificial Sequence
  Description of Artificial Sequence: Synthetic oligonucleotide
uuccauccuaagaauaaaa

SEQ ID NO: 1409831 - RNA, 19 nt, Artificial Sequence
  Description of Artificial Sequence: Synthetic oligonucleotide
auuaggguuugguucccuc

SEQ ID NO: 1409832 - RNA, 19 nt, Artificial Sequence
  Description of Artificial Sequence: Synthetic oligonucleotide
guaugcacgccccaaagca

SEQ ID NO: 1409833 - RNA, 19 nt, Artificial Sequence
  Description of Artificial Sequence: Synthetic oligonucleotide
cagcaugcauauucgaggc

SEQ ID NO: 1409834 - RNA, 19 nt, Artificial Sequence
  Description of Artificial Sequence: Synthetic oligonucleotide
gguaagcuggaguaaagug

SEQ ID NO: 1409835 - RNA, 19 nt, Artificial Sequence
  Description of Artificial Sequence: Synthetic oligonucleotide
agcuuaaucacaugucaaa

SEQ ID NO: 1409836 - RNA, 19 nt, Artificial Sequence
  Description of Artificial Sequence: Synthetic oligonucleotide
auugcagagcuccccggcg

SEQ ID NO: 1409837 - RNA, 19 nt, Artificial Sequence
  Description of Artificial Sequence: Synthetic oligonucleotide
acagugguaagcuggagua

SEQ ID NO: 1409838 - RNA, 19 nt, Artificial Sequence
  Description of Artificial Sequence: Synthetic oligonucleotide
aggaccugauaaauaagac

SEQ ID NO: 1409839 - RNA, 19 nt, Artificial Sequence
  Description of Artificial Sequence: Synthetic oligonucleotide
auccuaagaauaaaagugu

SEQ ID NO: 1409840 - RNA, 19 nt, Artificial Sequence
  Description of Artificial Sequence: Synthetic oligonucleotide
uccgcuucacaugucgugg

SEQ ID NO: 1409841 - RNA, 19 nt, Artificial Sequence
  Description of Artificial Sequence: Synthetic oligonucleotide
acaagucgugucuaaccag

SEQ ID NO: 1409842 - RNA, 19 nt, Artificial Sequence
  Description of Artificial Sequence: Synthetic oligonucleotide
guaaagugaggacaagcuc

SEQ ID NO: 1409843 - RNA, 19 nt, Artificial Sequence
  Description of Artificial Sequence: Synthetic oligonucleotide
aguccagaucuaauuaaac

SEQ ID NO: 1409844 - RNA, 19 nt, Artificial Sequence
  Description of Artificial Sequence: Synthetic oligonucleotide
agaaagggcccuauuuugg

SEQ ID NO: 1409845 - RNA, 19 nt, Artificial Sequence
  Description of Artificial Sequence: Synthetic oligonucleotide
acgcuuaaaggaucagauc

SEQ ID NO: 1409846 - RNA, 19 nt, Artificial Sequence
  Description of Artificial Sequence: Synthetic oligonucleotide
gaguaugcacgccccaaag

SEQ ID NO: 1409847 - RNA, 19 nt, Artificial Sequence
  Description of Artificial Sequence: Synthetic oligonucleotide
aaaggugguccgaugacca

SEQ ID NO: 1409848 - RNA, 19 nt, Artificial Sequence
  Description of Artificial Sequence: Synthetic oligonucleotide
uugcucauuaaggaauuug

SEQ ID NO: 1409849 - RNA, 19 nt, Artificial Sequence
  Description of Artificial Sequence: Synthetic oligonucleotide
aaggugguccgaugaccac

SEQ ID NO: 1409850 - RNA, 19 nt, Artificial Sequence
  Description of Artificial Sequence: Synthetic oligonucleotide
agcauagcacaaaggaaac

SEQ ID NO: 1409851 - RNA, 19 nt, Artificial Sequence
  Description of Artificial Sequence: Synthetic oligonucleotide
uuucagcuauacaaaguua

SEQ ID NO: 1409852 - RNA, 19 nt, Artificial Sequence
  Description of Artificial Sequence: Synthetic oligonucleotide
aaguuaacaguaguaugaa

SEQ ID NO: 1409853 - RNA, 19 nt, Artificial Sequence
  Description of Artificial Sequence: Synthetic oligonucleotide
ugcucaucgauaacuuccu

SEQ ID NO: 1409854 - RNA, 19 nt, Artificial Sequence
  Description of Artificial Sequence: Synthetic oligonucleotide
gaaaggugguccgaugacc

SEQ ID NO: 1409855 - RNA, 19 nt, Artificial Sequence
  Description of Artificial Sequence: Synthetic oligonucleotide
ucgaggcuuuuccauaaca

SEQ ID NO: 1409856 - RNA, 19 nt, Artificial Sequence
  Description of Artificial Sequence: Synthetic oligonucleotide
uuuacaagucgugucuaac

SEQ ID NO: 1409857 - RNA, 19 nt, Artificial Sequence
  Description of Artificial Sequence: Synthetic oligonucleotide
uacauuggauccuguuuug

SEQ ID NO: 1409858 - RNA, 19 nt, Artificial Sequence
  Description of Artificial Sequence: Synthetic oligonucleotide
uccuugacgcuuaaaggau

SEQ ID NO: 1409859 - RNA, 19 nt, Artificial Sequence
  Description of Artificial Sequence: Synthetic oligonucleotide
cacggccuaucuuauacag

SEQ ID NO: 1409860 - RNA, 19 nt, Artificial Sequence
  Description of Artificial Sequence: Synthetic oligonucleotide
agaaaacaggcaacacggc

SEQ ID NO: 1409861 - RNA, 19 nt, Artificial Sequence
  Description of Artificial Sequence: Synthetic oligonucleotide
auugggcccauucacagua

SEQ ID NO: 1409862 - RNA, 19 nt, Artificial Sequence
  Description of Artificial Sequence: Synthetic oligonucleotide
ugguccgaugaccacaaaa

SEQ ID NO: 1409863 - RNA, 19 nt, Artificial Sequence
  Description of Artificial Sequence: Synthetic oligonucleotide
aagcuacuacgugugauca

SEQ ID NO: 1409864 - RNA, 19 nt, Artificial Sequence
  Description of Artificial Sequence: Synthetic oligonucleotide
auuugggaauugcuaauaa

SEQ ID NO: 1409865 - RNA, 19 nt, Artificial Sequence
  Description of Artificial Sequence: Synthetic oligonucleotide
gucacuaucaucuguuucu

SEQ ID NO: 1409866 - RNA, 19 nt, Artificial Sequence
  Description of Artificial Sequence: Synthetic oligonucleotide
ucuaaccagcgcuuuauuu

SEQ ID NO: 1409867 - RNA, 19 nt, Artificial Sequence
  Description of Artificial Sequence: Synthetic oligonucleotide
cuaucuuauacagugguaa

SEQ ID NO: 1409868 - RNA, 19 nt, Artificial Sequence
  Description of Artificial Sequence: Synthetic oligonucleotide
aaauguuuggucacucaaa

SEQ ID NO: 1409869 - RNA, 19 nt, Artificial Sequence
  Description of Artificial Sequence: Synthetic oligonucleotide
acgacaauuugcucuguga

SEQ ID NO: 1409870 - RNA, 19 nt, Artificial Sequence
  Description of Artificial Sequence: Synthetic oligonucleotide
uuggcacaacaucaagcug

SEQ ID NO: 1409871 - RNA, 19 nt, Artificial Sequence
  Description of Artificial Sequence: Synthetic oligonucleotide
cagcgcuuuauuuccauug

SEQ ID NO: 1409872 - RNA, 19 nt, Artificial Sequence
  Description of Artificial Sequence: Synthetic oligonucleotide
ucauccgauuuagaaagcu

SEQ ID NO: 1409873 - RNA, 19 nt, Artificial Sequence
  Description of Artificial Sequence: Synthetic oligonucleotide
caaaugaaacucagaccac

SEQ ID NO: 1409874 - RNA, 19 nt, Artificial Sequence
  Description of Artificial Sequence: Synthetic oligonucleotide
acuacgugugaucauucaa

SEQ ID NO: 1409875 - RNA, 19 nt, Artificial Sequence
  Description of Artificial Sequence: Synthetic oligonucleotide
agagcuuaguauucauuau

SEQ ID NO: 1409876 - RNA, 19 nt, Artificial Sequence
  Description of Artificial Sequence: Synthetic oligonucleotide
gguccgaugaccacaaaag

SEQ ID NO: 1409877 - RNA, 19 nt, Artificial Sequence
  Description of Artificial Sequence: Synthetic oligonucleotide
cauaacaguuucauuaacu

SEQ ID NO: 1409878 - RNA, 19 nt, Artificial Sequence
  Description of Artificial Sequence: Synthetic oligonucleotide
cacaaaggaaacauaacgu

SEQ ID NO: 1409879 - RNA, 19 nt, Artificial Sequence
  Description of Artificial Sequence: Synthetic oligonucleotide
cuuaguauucauuauucau

SEQ ID NO: 1409880 - RNA, 19 nt, Artificial Sequence
  Description of Artificial Sequence: Synthetic oligonucleotide
ccagaucuaauuaaacgac

SEQ ID NO: 1409881 - RNA, 19 nt, Artificial Sequence
  Description of Artificial Sequence: Synthetic oligonucleotide
cacaaaguuccauccuaag

SEQ ID NO: 1409882 - RNA, 19 nt, Artificial Sequence
  Description of Artificial Sequence: Synthetic oligonucleotide
agaucuaauuaaacgacaa

SEQ ID NO: 1409883 - RNA, 19 nt, Artificial Sequence
  Description of Artificial Sequence: Synthetic oligonucleotide
aagucgugucuaaccagcg

SEQ ID NO: 1409884 - RNA, 19 nt, Artificial Sequence
  Description of Artificial Sequence: Synthetic oligonucleotide
augccuaacucagaucguc

SEQ ID NO: 1409885 - RNA, 19 nt, Artificial Sequence
  Description of Artificial Sequence: Synthetic oligonucleotide
ucgauaacuuccuccuccu

SEQ ID NO: 1409886 - RNA, 19 nt, Artificial Sequence
  Description of Artificial Sequence: Synthetic oligonucleotide
cuaacucagaucgucucug

SEQ ID NO: 1409887 - RNA, 19 nt, Artificial Sequence
  Description of Artificial Sequence: Synthetic oligonucleotide
uuccgcuucacaugucgug

SEQ ID NO: 1409888 - RNA, 19 nt, Artificial Sequence
  Description of Artificial Sequence: Synthetic oligonucleotide
ugacgcuuaaaggaucaga

SEQ ID NO: 1409889 - RNA, 19 nt, Artificial Sequence
  Description of Artificial Sequence: Synthetic oligonucleotide
uacuacgugugaucauuca

SEQ ID NO: 1409890 - RNA, 19 nt, Artificial Sequence
  Description of Artificial Sequence: Synthetic oligonucleotide
agcagcaugcauauucgag

SEQ ID NO: 1409891 - RNA, 19 nt, Artificial Sequence
  Description of Artificial Sequence: Synthetic oligonucleotide
ggaccugauaaauaagaca

SEQ ID NO: 1409892 - RNA, 19 nt, Artificial Sequence
  Description of Artificial Sequence: Synthetic oligonucleotide
aguuaacaguaguaugaaa

SEQ ID NO: 1409893 - RNA, 19 nt, Artificial Sequence
  Description of Artificial Sequence: Synthetic oligonucleotide
cuauaagcuuaaucacaug

SEQ ID NO: 1409894 - RNA, 19 nt, Artificial Sequence
  Description of Artificial Sequence: Synthetic oligonucleotide
cuugacgcuuaaaggauca

SEQ ID NO: 1409895 - RNA, 19 nt, Artificial Sequence
  Description of Artificial Sequence: Synthetic oligonucleotide
ucuaugccuaacucagauc

SEQ ID NO: 1409896 - RNA, 19 nt, Artificial Sequence
  Description of Artificial Sequence: Synthetic oligonucleotide
aagcagcaugcauauucga

SEQ ID NO: 1409897 - RNA, 19 nt, Artificial Sequence
  Description of Artificial Sequence: Synthetic oligonucleotide
ucuugaguugaagaacuua

SEQ ID NO: 1409898 - RNA, 19 nt, Artificial Sequence
  Description of Artificial Sequence: Synthetic oligonucleotide
acacugaaauuacugucaa

SEQ ID NO: 1409899 - RNA, 19 nt, Artificial Sequence
  Description of Artificial Sequence: Synthetic oligonucleotide
gagcgauuuaaucauuaua

SEQ ID NO: 1409900 - RNA, 19 nt, Artificial Sequence
  Description of Artificial Sequence: Synthetic oligonucleotide
cuacgugugaucauucaaa

SEQ ID NO: 1409901 - RNA, 19 nt, Artificial Sequence
  Description of Artificial Sequence: Synthetic oligonucleotide
aagcuuaaucacaugucaa

SEQ ID NO: 1409902 - RNA, 19 nt, Artificial Sequence
  Description of Artificial Sequence: Synthetic oligonucleotide
ugccuaacucagaucgucu

SEQ ID NO: 1409903 - RNA, 19 nt, Artificial Sequence
  Description of Artificial Sequence: Synthetic oligonucleotide
uaugccuaacucagaucgu

SEQ ID NO: 1409904 - RNA, 19 nt, Artificial Sequence
  Description of Artificial Sequence: Synthetic oligonucleotide
gcuaauaaagcuauaguua

SEQ ID NO: 1409905 - RNA, 19 nt, Artificial Sequence
  Description of Artificial Sequence: Synthetic oligonucleotide
ggauugggcccauucacag

SEQ ID NO: 1409906 - RNA, 19 nt, Artificial Sequence
  Description of Artificial Sequence: Synthetic oligonucleotide
auucgaggcuuuuccauaa

SEQ ID NO: 1409907 - RNA, 19 nt, Artificial Sequence
  Description of Artificial Sequence: Synthetic oligonucleotide
auaaaaguguagcgguauu

SEQ ID NO: 1409908 - RNA, 19 nt, Artificial Sequence
  Description of Artificial Sequence: Synthetic oligonucleotide
ccuguuuuguagaguaugc

SEQ ID NO: 1409909 - RNA, 19 nt, Artificial Sequence
  Description of Artificial Sequence: Synthetic oligonucleotide
caaaguuagcauagcacaa

SEQ ID NO: 1409910 - RNA, 19 nt, Artificial Sequence
  Description of Artificial Sequence: Synthetic oligonucleotide
uuagugcauucaauuguua

SEQ ID NO: 1409911 - RNA, 19 nt, Artificial Sequence
  Description of Artificial Sequence: Synthetic oligonucleotide
ggucacucaaagcuauaag

SEQ ID NO: 1409912 - RNA, 19 nt, Artificial Sequence
  Description of Artificial Sequence: Synthetic oligonucleotide
aggguauuuaagaaguuuu

SEQ ID NO: 1409913 - RNA, 19 nt, Artificial Sequence
  Description of Artificial Sequence: Synthetic oligonucleotide
agaucgucucugucuuuuc

SEQ ID NO: 1409914 - RNA, 19 nt, Artificial Sequence
  Description of Artificial Sequence: Synthetic oligonucleotide
cauauucgaggcuuuucca

SEQ ID NO: 1409915 - RNA, 19 nt, Artificial Sequence
  Description of Artificial Sequence: Synthetic oligonucleotide
cucucugaccugcucguag

SEQ ID NO: 1409916 - RNA, 19 nt, Artificial Sequence
  Description of Artificial Sequence: Synthetic oligonucleotide
gcuuccgcuucacaugucg

SEQ ID NO: 1409917 - RNA, 19 nt, Artificial Sequence
  Description of Artificial Sequence: Synthetic oligonucleotide
ugucuaaccagcgcuuuau

SEQ ID NO: 1409918 - RNA, 19 nt, Artificial Sequence
  Description of Artificial Sequence: Synthetic oligonucleotide
gaguucuuuucagcuauac

SEQ ID NO: 1409919 - RNA, 19 nt, Artificial Sequence
  Description of Artificial Sequence: Synthetic oligonucleotide
uucagucauccgauuuaga

SEQ ID NO: 1409920 - RNA, 19 nt, Artificial Sequence
  Description of Artificial Sequence: Synthetic oligonucleotide
gggaauugcuaauaaagcu

SEQ ID NO: 1409921 - RNA, 19 nt, Artificial Sequence
  Description of Artificial Sequence: Synthetic oligonucleotide
agucaaagguucacaaagu

SEQ ID NO: 1409922 - RNA, 19 nt, Artificial Sequence
  Description of Artificial Sequence: Synthetic oligonucleotide
ggucauuaaccccuuaaaa

SEQ ID NO: 1409923 - RNA, 19 nt, Artificial Sequence
  Description of Artificial Sequence: Synthetic oligonucleotide
auuuugguguaggaccuga

SEQ ID NO: 1409924 - RNA, 19 nt, Artificial Sequence
  Description of Artificial Sequence: Synthetic oligonucleotide
uggucacucaaagcuauaa

SEQ ID NO: 1409925 - RNA, 19 nt, Artificial Sequence
  Description of Artificial Sequence: Synthetic oligonucleotide
aaagugaggacaagcucua

SEQ ID NO: 1409926 - RNA, 19 nt, Artificial Sequence
  Description of Artificial Sequence: Synthetic oligonucleotide
uaacucagaucgucucugu

SEQ ID NO: 1409927 - RNA, 19 nt, Artificial Sequence
  Description of Artificial Sequence: Synthetic oligonucleotide
cuacuacgugugaucauuc

SEQ ID NO: 1409928 - RNA, 19 nt, Artificial Sequence
  Description of Artificial Sequence: Synthetic oligonucleotide
aacauuuaaccaagagcuu

SEQ ID NO: 1409929 - RNA, 19 nt, Artificial Sequence
  Description of Artificial Sequence: Synthetic oligonucleotide
gaucuaauuaaacgacaau

SEQ ID NO: 1409930 - RNA, 19 nt, Artificial Sequence
  Description of Artificial Sequence: Synthetic oligonucleotide
ggaauugcuaauaaagcua

SEQ ID NO: 1409931 - RNA, 19 nt, Artificial Sequence
  Description of Artificial Sequence: Synthetic oligonucleotide
uagcccaugugugaucugu

SEQ ID NO: 1409932 - RNA, 19 nt, Artificial Sequence
  Description of Artificial Sequence: Synthetic oligonucleotide
ucauccagccugccagaga

SEQ ID NO: 1409933 - RNA, 19 nt, Artificial Sequence
  Description of Artificial Sequence: Synthetic oligonucleotide
aggaaacauaacguaaaua

SEQ ID NO: 1409934 - RNA, 19 nt, Artificial Sequence
  Description of Artificial Sequence: Synthetic oligonucleotide
gacgcuuaaaggaucagau

SEQ ID NO: 1409935 - RNA, 19 nt, Artificial Sequence
  Description of Artificial Sequence: Synthetic oligonucleotide
agaguaugcacgccccaaa

SEQ ID NO: 1409936 - RNA, 19 nt, Artificial Sequence
  Description of Artificial Sequence: Synthetic oligonucleotide
aauuaggguuugguucccu

SEQ ID NO: 1409937 - RNA, 19 nt, Artificial Sequence
  Description of Artificial Sequence: Synthetic oligonucleotide
gaauaaaaguguagcggua

SEQ ID NO: 1409938 - RNA, 19 nt, Artificial Sequence
  Description of Artificial Sequence: Synthetic oligonucleotide
ggcccauucacaguaauuc

SEQ ID NO: 1409939 - RNA, 19 nt, Artificial Sequence
  Description of Artificial Sequence: Synthetic oligonucleotide
augaaacucagaccacauu

SEQ ID NO: 1409940 - RNA, 19 nt, Artificial Sequence
  Description of Artificial Sequence: Synthetic oligonucleotide
auggaguucuuuucagcua

SEQ ID NO: 1409941 - RNA, 19 nt, Artificial Sequence
  Description of Artificial Sequence: Synthetic oligonucleotide
caaggauugggcccauuca

SEQ ID NO: 1409942 - RNA, 19 nt, Artificial Sequence
  Description of Artificial Sequence: Synthetic oligonucleotide
gucgugucuaaccagcgcu

SEQ ID NO: 1409943 - RNA, 19 nt, Artificial Sequence
  Description of Artificial Sequence: Synthetic oligonucleotide
uucgaggcuuuuccauaac

SEQ ID NO: 1409944 - RNA, 19 nt, Artificial Sequence
  Description of Artificial Sequence: Synthetic oligonucleotide
ggcaacacggccuaucuua

SEQ ID NO: 1409945 - RNA, 19 nt, Artificial Sequence
  Description of Artificial Sequence: Synthetic oligonucleotide
cucugaccugcucguagcc

SEQ ID NO: 1409946 - RNA, 19 nt, Artificial Sequence
  Description of Artificial Sequence: Synthetic oligonucleotide
agcaugcauauucgaggcu

SEQ ID NO: 1409947 - RNA, 19 nt, Artificial Sequence
  Description of Artificial Sequence: Synthetic oligonucleotide
uugacgcuuaaaggaucag

SEQ ID NO: 1409948 - RNA, 19 nt, Artificial Sequence
  Description of Artificial Sequence: Synthetic oligonucleotide
acacggccuaucuuauaca

SEQ ID NO: 1409949 - RNA, 19 nt, Artificial Sequence
  Description of Artificial Sequence: Synthetic oligonucleotide
cagucuuuacaucacuucu

SEQ ID NO: 1409950 - RNA, 19 nt, Artificial Sequence
  Description of Artificial Sequence: Synthetic oligonucleotide
cggccuaucuuauacagug

SEQ ID NO: 1409951 - RNA, 19 nt, Artificial Sequence
  Description of Artificial Sequence: Synthetic oligonucleotide
ccacucucugaccugcucg

SEQ ID NO: 1409952 - RNA, 19 nt, Artificial Sequence
  Description of Artificial Sequence: Synthetic oligonucleotide
ucgugucuaaccagcgcuu

SEQ ID NO: 1409953 - RNA, 19 nt, Artificial Sequence
  Description of Artificial Sequence: Synthetic oligonucleotide
agucuuuacaucacuucuu

SEQ ID NO: 1409954 - RNA, 19 nt, Artificial Sequence
  Description of Artificial Sequence: Synthetic oligonucleotide
ugccagagagaugggaaau

SEQ ID NO: 1409955 - RNA, 19 nt, Artificial Sequence
  Description of Artificial Sequence: Synthetic oligonucleotide
ucacuaucaucuguuucuu

SEQ ID NO: 1409956 - RNA, 19 nt, Artificial Sequence
  Description of Artificial Sequence: Synthetic oligonucleotide
gccaaagcuacuacgugug

SEQ ID NO: 1409957 - RNA, 19 nt, Artificial Sequence
  Description of Artificial Sequence: Synthetic oligonucleotide
acucugcaaaauguuuggu

SEQ ID NO: 1409958 - RNA, 19 nt, Artificial Sequence
  Description of Artificial Sequence: Synthetic oligonucleotide
cacuaucaucuguuucuuc

SEQ ID NO: 1409959 - RNA, 19 nt, Artificial Sequence
  Description of Artificial Sequence: Synthetic oligonucleotide
ccgauuuagaaagcuuccg

SEQ ID NO: 1409960 - RNA, 19 nt, Artificial Sequence
  Description of Artificial Sequence: Synthetic oligonucleotide
caguuucauuaacugacaa

SEQ ID NO: 1409961 - RNA, 19 nt, Artificial Sequence
  Description of Artificial Sequence: Synthetic oligonucleotide
ggcccuauuuugguguagg

SEQ ID NO: 1409962 - RNA, 19 nt, Artificial Sequence
  Description of Artificial Sequence: Synthetic oligonucleotide
aggauugggcccauucaca

SEQ ID NO: 1409963 - RNA, 19 nt, Artificial Sequence
  Description of Artificial Sequence: Synthetic oligonucleotide
guagaguaugcacgcccca

SEQ ID NO: 1409964 - RNA, 19 nt, Artificial Sequence
  Description of Artificial Sequence: Synthetic oligonucleotide
aaacgacaauuugcucugu

SEQ ID NO: 1409965 - RNA, 19 nt, Artificial Sequence
  Description of Artificial Sequence: Synthetic oligonucleotide
caucgauaacuuccuccuc

SEQ ID NO: 1409966 - RNA, 19 nt, Artificial Sequence
  Description of Artificial Sequence: Synthetic oligonucleotide
ugggcccauucacaguaau

SEQ ID NO: 1409967 - RNA, 19 nt, Artificial Sequence
  Description of Artificial Sequence: Synthetic oligonucleotide
uuggucacucaaagcuaua

SEQ ID NO: 1409968 - RNA, 19 nt, Artificial Sequence
  Description of Artificial Sequence: Synthetic oligonucleotide
guuuggucacucaaagcua

SEQ ID NO: 1409969 - RNA, 19 nt, Artificial Sequence
  Description of Artificial Sequence: Synthetic oligonucleotide
accagcgcuuuauuuccau

SEQ ID NO: 1409970 - RNA, 19 nt, Artificial Sequence
  Description of Artificial Sequence: Synthetic oligonucleotide
cacauuagcaaugguuuua

SEQ ID NO: 1409971 - RNA, 19 nt, Artificial Sequence
  Description of Artificial Sequence: Synthetic oligonucleotide
gcgguauuaagcuuucacu

SEQ ID NO: 1409972 - RNA, 19 nt, Artificial Sequence
  Description of Artificial Sequence: Synthetic oligonucleotide
guuccauccuaagaauaaa

SEQ ID NO: 1409973 - RNA, 19 nt, Artificial Sequence
  Description of Artificial Sequence: Synthetic oligonucleotide
agcuacuacgugugaucau

SEQ ID NO: 1409974 - RNA, 19 nt, Artificial Sequence
  Description of Artificial Sequence: Synthetic oligonucleotide
ccauaacaguuucauuaac

SEQ ID NO: 1409975 - RNA, 19 nt, Artificial Sequence
  Description of Artificial Sequence: Synthetic oligonucleotide
cauuugggaauugcuaaua

SEQ ID NO: 1409976 - RNA, 19 nt, Artificial Sequence
  Description of Artificial Sequence: Synthetic oligonucleotide
cgcuuaaaggaucagaucu

SEQ ID NO: 1409977 - RNA, 19 nt, Artificial Sequence
  Description of Artificial Sequence: Synthetic oligonucleotide
auucuaugccuaacucaga

SEQ ID NO: 1409978 - RNA, 19 nt, Artificial Sequence
  Description of Artificial Sequence: Synthetic oligonucleotide
ggccuaucuuauacagugg

SEQ ID NO: 1409979 - RNA, 19 nt, Artificial Sequence
  Description of Artificial Sequence: Synthetic oligonucleotide
guagcgguauuaagcuuuc

SEQ ID NO: 1409980 - RNA, 19 nt, Artificial Sequence
  Description of Artificial Sequence: Synthetic oligonucleotide
cccuauuuugguguaggac

SEQ ID NO: 1409981 - RNA, 19 nt, Artificial Sequence
  Description of Artificial Sequence: Synthetic oligonucleotide
gcuauaagcuuaaucacau

SEQ ID NO: 1409982 - RNA, 19 nt, Artificial Sequence
  Description of Artificial Sequence: Synthetic oligonucleotide
ucguagcccaugugugauc

SEQ ID NO: 1409983 - RNA, 19 nt, Artificial Sequence
  Description of Artificial Sequence: Synthetic oligonucleotide
aaccagcgcuuuauuucca

SEQ ID NO: 1409984 - RNA, 19 nt, Artificial Sequence
  Description of Artificial Sequence: Synthetic oligonucleotide
gccuaucuuauacaguggu

SEQ ID NO: 1409985 - RNA, 19 nt, Artificial Sequence
  Description of Artificial Sequence: Synthetic oligonucleotide
cguaaauauauccaauccu

SEQ ID NO: 1409986 - RNA, 19 nt, Artificial Sequence
  Description of Artificial Sequence: Synthetic oligonucleotide
ccuugacgcuuaaaggauc

SEQ ID NO: 1409987 - RNA, 19 nt, Artificial Sequence
  Description of Artificial Sequence: Synthetic oligonucleotide
acgccccaaagcauuucag

SEQ ID NO: 1409988 - RNA, 19 nt, Artificial Sequence
  Description of Artificial Sequence: Synthetic oligonucleotide
acggccuaucuuauacagu

SEQ ID NO: 1409989 - RNA, 19 nt, Artificial Sequence
  Description of Artificial Sequence: Synthetic oligonucleotide
guagcccaugugugaucug

SEQ ID NO: 1409990 - RNA, 19 nt, Artificial Sequence
  Description of Artificial Sequence: Synthetic oligonucleotide
guguaggaccugauaaaua

SEQ ID NO: 1409991 - RNA, 19 nt, Artificial Sequence
  Description of Artificial Sequence: Synthetic oligonucleotide
caagagcuuaguauucauu

SEQ ID NO: 1409992 - RNA, 19 nt, Artificial Sequence
  Description of Artificial Sequence: Synthetic oligonucleotide
cucagaucgucucugucuu

SEQ ID NO: 1409993 - RNA, 19 nt, Artificial Sequence
  Description of Artificial Sequence: Synthetic oligonucleotide
gcgcuuuauuuccauugca

SEQ ID NO: 1409994 - RNA, 19 nt, Artificial Sequence
  Description of Artificial Sequence: Synthetic oligonucleotide
gcgauuuaaucauuauaau

SEQ ID NO: 1409995 - RNA, 19 nt, Artificial Sequence
  Description of Artificial Sequence: Synthetic oligonucleotide
uagcgguauuaagcuuuca

SEQ ID NO: 1409996 - RNA, 19 nt, Artificial Sequence
  Description of Artificial Sequence: Synthetic oligonucleotide
cauccgauuuagaaagcuu

SEQ ID NO: 1409997 - RNA, 19 nt, Artificial Sequence
  Description of Artificial Sequence: Synthetic oligonucleotide
aggcaacacggccuaucuu

SEQ ID NO: 1409998 - RNA, 19 nt, Artificial Sequence
  Description of Artificial Sequence: Synthetic oligonucleotide
ccgcuucacaugucguggg

SEQ ID NO: 1409999 - RNA, 19 nt, Artificial Sequence
  Description of Artificial Sequence: Synthetic oligonucleotide
gugucuaaccagcgcuuua

SEQ ID NO: 1410000 - RNA, 19 nt, Artificial Sequence
  Description of Artificial Sequence: Synthetic oligonucleotide
cccaugugugaucuguuga

SEQ ID NO: 1410001 - RNA, 19 nt, Artificial Sequence
  Description of Artificial Sequence: Synthetic oligonucleotide
caaagcuacuacgugugau

SEQ ID NO: 1410002 - RNA, 19 nt, Artificial Sequence
  Description of Artificial Sequence: Synthetic oligonucleotide
agggcccuauuuuggugua

SEQ ID NO: 1410003 - RNA, 19 nt, Artificial Sequence
  Description of Artificial Sequence: Synthetic oligonucleotide
cagugucagcaaggauugg

SEQ ID NO: 1410004 - RNA, 19 nt, Artificial Sequence
  Description of Artificial Sequence: Synthetic oligonucleotide
cuccaauccuugacgcuua

SEQ ID NO: 1410005 - RNA, 19 nt, Artificial Sequence
  Description of Artificial Sequence: Synthetic oligonucleotide
gguguaggaccugauaaau

SEQ ID NO: 1410006 - RNA, 19 nt, Artificial Sequence
  Description of Artificial Sequence: Synthetic oligonucleotide
gcauagcacaaaggaaaca

SEQ ID NO: 1410007 - RNA, 19 nt, Artificial Sequence
  Description of Artificial Sequence: Synthetic oligonucleotide
caggcaacacggccuaucu

SEQ ID NO: 1410008 - RNA, 19 nt, Artificial Sequence
  Description of Artificial Sequence: Synthetic oligonucleotide
ggagcgauuuaaucauuau

SEQ ID NO: 1410009 - RNA, 19 nt, Artificial Sequence
  Description of Artificial Sequence: Synthetic oligonucleotide
ccuaucuuauacaguggua

SEQ ID NO: 1410010 - RNA, 19 nt, Artificial Sequence
  Description of Artificial Sequence: Synthetic oligonucleotide
cuuccgcuucacaugucgu

SEQ ID NO: 1410011 - RNA, 19 nt, Artificial Sequence
  Description of Artificial Sequence: Synthetic oligonucleotide
gggagcgauuuaaucauua

SEQ ID NO: 1410012 - RNA, 19 nt, Artificial Sequence
  Description of Artificial Sequence: Synthetic oligonucleotide
gaccugcucguagcccaug

SEQ ID NO: 1410013 - RNA, 19 nt, Artificial Sequence
  Description of Artificial Sequence: Synthetic oligonucleotide
gcauuugggaauugcuaau

SEQ ID NO: 1410014 - RNA, 19 nt, Artificial Sequence
  Description of Artificial Sequence: Synthetic oligonucleotide
caugcauauucgaggcuuu

SEQ ID NO: 1410015 - RNA, 19 nt, Artificial Sequence
  Description of Artificial Sequence: Synthetic oligonucleotide
ggugguccgaugaccacaa

SEQ ID NO: 1410016 - RNA, 19 nt, Artificial Sequence
  Description of Artificial Sequence: Synthetic oligonucleotide
gcuacuacgugugaucauu

SEQ ID NO: 1410017 - RNA, 19 nt, Artificial Sequence
  Description of Artificial Sequence: Synthetic oligonucleotide
cagugguaagcuggaguaa

SEQ ID NO: 1410018 - RNA, 19 nt, Artificial Sequence
  Description of Artificial Sequence: Synthetic oligonucleotide
gcaugcauauucgaggcuu

SEQ ID NO: 1410019 - RNA, 19 nt, Artificial Sequence
  Description of Artificial Sequence: Synthetic oligonucleotide
agggagcgauuuaaucauu

SEQ ID NO: 1410020 - RNA, 19 nt, Artificial Sequence
  Description of Artificial Sequence: Synthetic oligonucleotide
guguagcgguauuaagcuu

SEQ ID NO: 1410021 - RNA, 19 nt, Artificial Sequence
  Description of Artificial Sequence: Synthetic oligonucleotide
ccuaacucagaucgucucu

SEQ ID NO: 1410022 - RNA, 19 nt, Artificial Sequence
  Description of Artificial Sequence: Synthetic oligonucleotide
gucuaaccagcgcuuuauu

SEQ ID NO: 1410023 - RNA, 19 nt, Artificial Sequence
  Description of Artificial Sequence: Synthetic oligonucleotide
gcuuaaaggaucagaucuu

SEQ ID NO: 1410024 - RNA, 19 nt, Artificial Sequence
  Description of Artificial Sequence: Synthetic oligonucleotide
agcccaugugugaucuguu

SEQ ID NO: 1410025 - RNA, 19 nt, Artificial Sequence
  Description of Artificial Sequence: Synthetic oligonucleotide
ccaaagcuacuacguguga

SEQ ID NO: 1410026 - RNA, 19 nt, Artificial Sequence
  Description of Artificial Sequence: Synthetic oligonucleotide
gggcccuauuuugguguag

SEQ ID NO: 1410027 - RNA, 19 nt, Artificial Sequence
  Description of Artificial Sequence: Synthetic oligonucleotide
uccccggcggcagcaguuu

SEQ ID NO: 1410028 - RNA, 19 nt, Artificial Sequence
  Description of Artificial Sequence: Synthetic oligonucleotide
ggauccuguuuuguagagu

SEQ ID NO: 1410029 - RNA, 19 nt, Artificial Sequence
  Description of Artificial Sequence: Synthetic oligonucleotide
ccggcggcagcaguuugac

SEQ ID NO: 1410030 - RNA, 19 nt, Artificial Sequence
  Description of Artificial Sequence: Synthetic oligonucleotide
ggaguucuuuucagcuaua

SEQ ID NO: 1410031 - RNA, 19 nt, Artificial Sequence
  Description of Artificial Sequence: Synthetic oligonucleotide
gugguccgaugaccacaaa

SEQ ID NO: 1410032 - RNA, 19 nt, Artificial Sequence
  Description of Artificial Sequence: Synthetic oligonucleotide
gcaacacggccuaucuuau

SEQ ID NO: 1410033 - RNA, 19 nt, Artificial Sequence
  Description of Artificial Sequence: Synthetic oligonucleotide
cguagcccaugugugaucu

SEQ ID NO: 1410034 - RNA, 19 nt, Artificial Sequence
  Description of Artificial Sequence: Synthetic oligonucleotide
gcggcagcaguuugacuuu

SEQ ID NO: 1410035 - RNA, 19 nt, Artificial Sequence
  Description of Artificial Sequence: Synthetic oligonucleotide
cuccccggcggcagcaguu

SEQ ID NO: 1410036 - RNA, 19 nt, Artificial Sequence
  Description of Artificial Sequence: Synthetic oligonucleotide
ccaauccuugacgcuuaaa

SEQ ID NO: 1410037 - RNA, 19 nt, Artificial Sequence
  Description of Artificial Sequence: Synthetic oligonucleotide
gggcccauucacaguaauu

SEQ ID NO: 1410038 - RNA, 19 nt, Artificial Sequence
  Description of Artificial Sequence: Synthetic oligonucleotide
ccccggcggcagcaguuug

SEQ ID NO: 1410039 - RNA, 19 nt, Artificial Sequence
  Description of Artificial Sequence: Synthetic oligonucleotide
ccagcgcuuuauuuccauu

SEQ ID NO: 1410040 - RNA, 19 nt, Artificial Sequence
  Description of Artificial Sequence: Synthetic oligonucleotide
gcacaacaucaagcugcau

SEQ ID NO: 1410041 - RNA, 19 nt, Artificial Sequence
  Description of Artificial Sequence: Synthetic oligonucleotide
cgugucuaaccagcgcuuu

SEQ ID NO: 1410042 - RNA, 19 nt, Artificial Sequence
  Description of Artificial Sequence: Synthetic oligonucleotide
gacaaugggaaguagguag

SEQ ID NO: 1410043 - RNA, 19 nt, Artificial Sequence
  Description of Artificial Sequence: Synthetic oligonucleotide
aaggucuucaagaugaagg

SEQ ID NO: 1410044 - RNA, 19 nt, Artificial Sequence
  Description of Artificial Sequence: Synthetic oligonucleotide
aggcuauggagacagaacc

SEQ ID NO: 1410045 - RNA, 19 nt, Artificial Sequence
  Description of Artificial Sequence: Synthetic oligonucleotide
uggaaaggaaccucaaugg

SEQ ID NO: 1410046 - RNA, 19 nt, Artificial Sequence
  Description of Artificial Sequence: Synthetic oligonucleotide
gaaacuuuucuucccaggg

SEQ ID NO: 1410047 - RNA, 19 nt, Artificial Sequence
  Description of Artificial Sequence: Synthetic oligonucleotide
auagguaucggucucugcg

SEQ ID NO: 1410048 - RNA, 19 nt, Artificial Sequence
  Description of Artificial Sequence: Synthetic oligonucleotide
uugguauuuagcucgauga

SEQ ID NO: 1410049 - RNA, 19 nt, Artificial Sequence
  Description of Artificial Sequence: Synthetic oligonucleotide
uguuggauaagguaccgag

SEQ ID NO: 1410050 - RNA, 19 nt, Artificial Sequence
  Description of Artificial Sequence: Synthetic oligonucleotide
agagacagaagguacggcg

SEQ ID NO: 1410051 - RNA, 19 nt, Artificial Sequence
  Description of Artificial Sequence: Synthetic oligonucleotide
agaauaaagaugucaaaga

SEQ ID NO: 1410052 - RNA, 19 nt, Artificial Sequence
  Description of Artificial Sequence: Synthetic oligonucleotide
agcauguucaagcucgggc

SEQ ID NO: 1410053 - RNA, 19 nt, Artificial Sequence
  Description of Artificial Sequence: Synthetic oligonucleotide
aggaagcccaaauaguccc

SEQ ID NO: 1410054 - RNA, 19 nt, Artificial Sequence
  Description of Artificial Sequence: Synthetic oligonucleotide
aaugccagaugauagguau

SEQ ID NO: 1410055 - RNA, 19 nt, Artificial Sequence
  Description of Artificial Sequence: Synthetic oligonucleotide
aaguagguagccgaaugcc

SEQ ID NO: 1410056 - RNA, 19 nt, Artificial Sequence
  Description of Artificial Sequence: Synthetic oligonucleotide
gguguugguauuuagcucg

SEQ ID NO: 1410057 - RNA, 19 nt, Artificial Sequence
  Description of Artificial Sequence: Synthetic oligonucleotide
aaaagagacaaugggaagu

SEQ ID NO: 1410058 - RNA, 19 nt, Artificial Sequence
  Description of Artificial Sequence: Synthetic oligonucleotide
gaugacacaucauaggaga

SEQ ID NO: 1410059 - RNA, 19 nt, Artificial Sequence
  Description of Artificial Sequence: Synthetic oligonucleotide
aaagcuguaguggaugauc

SEQ ID NO: 1410060 - RNA, 19 nt, Artificial Sequence
  Description of Artificial Sequence: Synthetic oligonucleotide
aaggucuugccauggaaag

SEQ ID NO: 1410061 - RNA, 19 nt, Artificial Sequence
  Description of Artificial Sequence: Synthetic oligonucleotide
aggacuuugaaaucaagga

SEQ ID NO: 1410062 - RNA, 19 nt, Artificial Sequence
  Description of Artificial Sequence: Synthetic oligonucleotide
aaugguguacacagugucc

SEQ ID NO: 1410063 - RNA, 19 nt, Artificial Sequence
  Description of Artificial Sequence: Synthetic oligonucleotide
ucuguguuaagaauccaga

SEQ ID NO: 1410064 - RNA, 19 nt, Artificial Sequence
  Description of Artificial Sequence: Synthetic oligonucleotide
ucgaugauccagaggaggg

SEQ ID NO: 1410065 - RNA, 19 nt, Artificial Sequence
  Description of Artificial Sequence: Synthetic oligonucleotide
aauucgcugccgcagauga

SEQ ID NO: 1410066 - RNA, 19 nt, Artificial Sequence
  Description of Artificial Sequence: Synthetic oligonucleotide
cacaucauaggagacaagg

SEQ ID NO: 1410067 - RNA, 19 nt, Artificial Sequence
  Description of Artificial Sequence: Synthetic oligonucleotide
aaaggaaccucaauggugu

SEQ ID NO: 1410068 - RNA, 19 nt, Artificial Sequence
  Description of Artificial Sequence: Synthetic oligonucleotide
aacaucggaagaacagucc

SEQ ID NO: 1410069 - RNA, 19 nt, Artificial Sequence
  Description of Artificial Sequence: Synthetic oligonucleotide
aaauagucccucuuucagu

SEQ ID NO: 1410070 - RNA, 19 nt, Artificial Sequence
  Description of Artificial Sequence: Synthetic oligonucleotide
uuuagcucgaugauccaga

SEQ ID NO: 1410071 - RNA, 19 nt, Artificial Sequence
  Description of Artificial Sequence: Synthetic oligonucleotide
aaacuuuucuucccaggga

SEQ ID NO: 1410072 - RNA, 19 nt, Artificial Sequence
  Description of Artificial Sequence: Synthetic oligonucleotide
gaaguagguagccgaaugc

SEQ ID NO: 1410073 - RNA, 19 nt, Artificial Sequence
  Description of Artificial Sequence: Synthetic oligonucleotide
gaaaggaaccucaauggug

SEQ ID NO: 1410074 - RNA, 19 nt, Artificial Sequence
  Description of Artificial Sequence: Synthetic oligonucleotide
accgcaaucacccaccagu

SEQ ID NO: 1410075 - RNA, 19 nt, Artificial Sequence
  Description of Artificial Sequence: Synthetic oligonucleotide
cucacaacugcucaggguc

SEQ ID NO: 1410076 - RNA, 19 nt, Artificial Sequence
  Description of Artificial Sequence: Synthetic oligonucleotide
caagauaccaucucuccuc

SEQ ID NO: 1410077 - RNA, 19 nt, Artificial Sequence
  Description of Artificial Sequence: Synthetic oligonucleotide
ucacguucccggcaguacg

SEQ ID NO: 1410078 - RNA, 19 nt, Artificial Sequence
  Description of Artificial Sequence: Synthetic oligonucleotide
gagaucuguguuaagaauc

SEQ ID NO: 1410079 - RNA, 19 nt, Artificial Sequence
  Description of Artificial Sequence: Synthetic oligonucleotide
cagaugauagguaucgguc

SEQ ID NO: 1410080 - RNA, 19 nt, Artificial Sequence
  Description of Artificial Sequence: Synthetic oligonucleotide
ucauuacuccucucgaacu

SEQ ID NO: 1410081 - RNA, 19 nt, Artificial Sequence
  Description of Artificial Sequence: Synthetic oligonucleotide
aguagguagccgaaugccc

SEQ ID NO: 1410082 - RNA, 19 nt, Artificial Sequence
  Description of Artificial Sequence: Synthetic oligonucleotide
aucggaagaacaguccugg

SEQ ID NO: 1410083 - RNA, 19 nt, Artificial Sequence
  Description of Artificial Sequence: Synthetic oligonucleotide
uacucauuacuccucucga

SEQ ID NO: 1410084 - RNA, 19 nt, Artificial Sequence
  Description of Artificial Sequence: Synthetic oligonucleotide
ucaaugguguacacagugu

SEQ ID NO: 1410085 - RNA, 19 nt, Artificial Sequence
  Description of Artificial Sequence: Synthetic oligonucleotide
agcagcaagauaccaucuc

SEQ ID NO: 1410086 - RNA, 19 nt, Artificial Sequence
  Description of Artificial Sequence: Synthetic oligonucleotide
acaaugggaaguagguagc

SEQ ID NO: 1410087 - RNA, 19 nt, Artificial Sequence
  Description of Artificial Sequence: Synthetic oligonucleotide
agguaucggucucugcgcc

SEQ ID NO: 1410088 - RNA, 19 nt, Artificial Sequence
  Description of Artificial Sequence: Synthetic oligonucleotide
guugguauuuagcucgaug

SEQ ID NO: 1410089 - RNA, 19 nt, Artificial Sequence
  Description of Artificial Sequence: Synthetic oligonucleotide
cucauuacuccucucgaac

SEQ ID NO: 1410090 - RNA, 19 nt, Artificial Sequence
  Description of Artificial Sequence: Synthetic oligonucleotide
agaagcgaaagaaugccag

SEQ ID NO: 1410091 - RNA, 19 nt, Artificial Sequence
  Description of Artificial Sequence: Synthetic oligonucleotide
uccccugacguauuugugc

SEQ ID NO: 1410092 - RNA, 19 nt, Artificial Sequence
  Description of Artificial Sequence: Synthetic oligonucleotide
cucuguuggauaagguacc

SEQ ID NO: 1410093 - RNA, 19 nt, Artificial Sequence
  Description of Artificial Sequence: Synthetic oligonucleotide
gucaacaucggaagaacag

SEQ ID NO: 1410094 - RNA, 19 nt, Artificial Sequence
  Description of Artificial Sequence: Synthetic oligonucleotide
ucaacaucggaagaacagu

SEQ ID NO: 1410095 - RNA, 19 nt, Artificial Sequence
  Description of Artificial Sequence: Synthetic oligonucleotide
uaagguaccgaggcaggcg

SEQ ID NO: 1410096 - RNA, 19 nt, Artificial Sequence
  Description of Artificial Sequence: Synthetic oligonucleotide
ugccagaauaaagauguca

SEQ ID NO: 1410097 - RNA, 19 nt, Artificial Sequence
  Description of Artificial Sequence: Synthetic oligonucleotide
ucuguuggauaagguaccg

SEQ ID NO: 1410098 - RNA, 19 nt, Artificial Sequence
  Description of Artificial Sequence: Synthetic oligonucleotide
gaugauagguaucggucuc

SEQ ID NO: 1410099 - RNA, 19 nt, Artificial Sequence
  Description of Artificial Sequence: Synthetic oligonucleotide
uuagcucgaugauccagag

SEQ ID NO: 1410100 - RNA, 19 nt, Artificial Sequence
  Description of Artificial Sequence: Synthetic oligonucleotide
caaucacccaccaguggcg

SEQ ID NO: 1410101 - RNA, 19 nt, Artificial Sequence
  Description of Artificial Sequence: Synthetic oligonucleotide
caaugguguacacaguguc

SEQ ID NO: 1410102 - RNA, 19 nt, Artificial Sequence
  Description of Artificial Sequence: Synthetic oligonucleotide
ugacguauuugugcguggg

SEQ ID NO: 1410103 - RNA, 19 nt, Artificial Sequence
  Description of Artificial Sequence: Synthetic oligonucleotide
gacguauuugugcgugggg

SEQ ID NO: 1410104 - RNA, 19 nt, Artificial Sequence
  Description of Artificial Sequence: Synthetic oligonucleotide
aguguggugaccgcaauca

SEQ ID NO: 1410105 - RNA, 19 nt, Artificial Sequence
  Description of Artificial Sequence: Synthetic oligonucleotide
guuggauaagguaccgagg

SEQ ID NO: 1410106 - RNA, 19 nt, Artificial Sequence
  Description of Artificial Sequence: Synthetic oligonucleotide
aaagagacaaugggaagua

SEQ ID NO: 1410107 - RNA, 19 nt, Artificial Sequence
  Description of Artificial Sequence: Synthetic oligonucleotide
gggagcauguucaagcucg

SEQ ID NO: 1410108 - RNA, 19 nt, Artificial Sequence
  Description of Artificial Sequence: Synthetic oligonucleotide
ucuugccauggaaaggaac

SEQ ID NO: 1410109 - RNA, 19 nt, Artificial Sequence
  Description of Artificial Sequence: Synthetic oligonucleotide
uagguaucggucucugcgc

SEQ ID NO: 1410110 - RNA, 19 nt, Artificial Sequence
  Description of Artificial Sequence: Synthetic oligonucleotide
cucgaugauccagaggagg

SEQ ID NO: 1410111 - RNA, 19 nt, Artificial Sequence
  Description of Artificial Sequence: Synthetic oligonucleotide
cuugagaucuguguuaaga

SEQ ID NO: 1410112 - RNA, 19 nt, Artificial Sequence
  Description of Artificial Sequence: Synthetic oligonucleotide
acacaacgccaccugcagc

SEQ ID NO: 1410113 - RNA, 19 nt, Artificial Sequence
  Description of Artificial Sequence: Synthetic oligonucleotide
guacggcuggcucaguggg

SEQ ID NO: 1410114 - RNA, 19 nt, Artificial Sequence
  Description of Artificial Sequence: Synthetic oligonucleotide
aaucacccaccaguggcgg

SEQ ID NO: 1410115 - RNA, 19 nt, Artificial Sequence
  Description of Artificial Sequence: Synthetic oligonucleotide
aagcgaaagaaugccagaa

SEQ ID NO: 1410116 - RNA, 19 nt, Artificial Sequence
  Description of Artificial Sequence: Synthetic oligonucleotide
gaagguacggcggacguca

SEQ ID NO: 1410117 - RNA, 19 nt, Artificial Sequence
  Description of Artificial Sequence: Synthetic oligonucleotide
auuacuccucucgaacuuc

SEQ ID NO: 1410118 - RNA, 19 nt, Artificial Sequence
  Description of Artificial Sequence: Synthetic oligonucleotide
ucuacacgcugcaguaucu

SEQ ID NO: 1410119 - RNA, 19 nt, Artificial Sequence
  Description of Artificial Sequence: Synthetic oligonucleotide
uggauaagguaccgaggca

SEQ ID NO: 1410120 - RNA, 19 nt, Artificial Sequence
  Description of Artificial Sequence: Synthetic oligonucleotide
cucugcgccgcucaaugcg

SEQ ID NO: 1410121 - RNA, 19 nt, Artificial Sequence
  Description of Artificial Sequence: Synthetic oligonucleotide
gcaaucacccaccaguggc

SEQ ID NO: 1410122 - RNA, 19 nt, Artificial Sequence
  Description of Artificial Sequence: Synthetic oligonucleotide
ucgaacuuccaguucuccu

SEQ ID NO: 1410123 - RNA, 19 nt, Artificial Sequence
  Description of Artificial Sequence: Synthetic oligonucleotide
aagcuguaguggaugaucu

SEQ ID NO: 1410124 - RNA, 19 nt, Artificial Sequence
  Description of Artificial Sequence: Synthetic oligonucleotide
ucaaacaugguggcugcga

SEQ ID NO: 1410125 - RNA, 19 nt, Artificial Sequence
  Description of Artificial Sequence: Synthetic oligonucleotide
ucuagccaggccaggacaa

SEQ ID NO: 1410126 - RNA, 19 nt, Artificial Sequence
  Description of Artificial Sequence: Synthetic oligonucleotide
aagagacaaugggaaguag

SEQ ID NO: 1410127 - RNA, 19 nt, Artificial Sequence
  Description of Artificial Sequence: Synthetic oligonucleotide
gaagcgaaagaaugccaga

SEQ ID NO: 1410128 - RNA, 19 nt, Artificial Sequence
  Description of Artificial Sequence: Synthetic oligonucleotide
gauagguaucggucucugc

SEQ ID NO: 1410129 - RNA, 19 nt, Artificial Sequence
  Description of Artificial Sequence: Synthetic oligonucleotide
uacggcggacgucagagau

SEQ ID NO: 1410130 - RNA, 19 nt, Artificial Sequence
  Description of Artificial Sequence: Synthetic oligonucleotide
uagcucgaugauccagagg

SEQ ID NO: 1410131 - RNA, 19 nt, Artificial Sequence
  Description of Artificial Sequence: Synthetic oligonucleotide
uccaauucgcugccgcaga

SEQ ID NO: 1410132 - RNA, 19 nt, Artificial Sequence
  Description of Artificial Sequence: Synthetic oligonucleotide
aggaaccucaaugguguac

SEQ ID NO: 1410133 - RNA, 19 nt, Artificial Sequence
  Description of Artificial Sequence: Synthetic oligonucleotide
acagaagguacggcggacg

SEQ ID NO: 1410134 - RNA, 19 nt, Artificial Sequence
  Description of Artificial Sequence: Synthetic oligonucleotide
ggaaugaggugccaccugc

SEQ ID NO: 1410135 - RNA, 19 nt, Artificial Sequence
  Description of Artificial Sequence: Synthetic oligonucleotide
ucugcgccgcucaaugcgc

SEQ ID NO: 1410136 - RNA, 19 nt, Artificial Sequence
  Description of Artificial Sequence: Synthetic oligonucleotide
agggagcauguucaagcuc

SEQ ID NO: 1410137 - RNA, 19 nt, Artificial Sequence
  Description of Artificial Sequence: Synthetic oligonucleotide
uauuuagcucgaugaucca

SEQ ID NO: 1410138 - RNA, 19 nt, Artificial Sequence
  Description of Artificial Sequence: Synthetic oligonucleotide
caggucgaaggugacaaag

SEQ ID NO: 1410139 - RNA, 19 nt, Artificial Sequence
  Description of Artificial Sequence: Synthetic oligonucleotide
agcuguaguggaugaucuc

SEQ ID NO: 1410140 - RNA, 19 nt, Artificial Sequence
  Description of Artificial Sequence: Synthetic oligonucleotide
caggaucacuuccugguac

SEQ ID NO: 1410141 - RNA, 19 nt, Artificial Sequence
  Description of Artificial Sequence: Synthetic oligonucleotide
uagccgaaugccccuuugc

SEQ ID NO: 1410142 - RNA, 19 nt, Artificial Sequence
  Description of Artificial Sequence: Synthetic oligonucleotide
cugcucagggucacguucc

SEQ ID NO: 1410143 - RNA, 19 nt, Artificial Sequence
  Description of Artificial Sequence: Synthetic oligonucleotide
aggaucacuuccugguaca

SEQ ID NO: 1410144 - RNA, 19 nt, Artificial Sequence
  Description of Artificial Sequence: Synthetic oligonucleotide
ucuccaauucgcugccgca

SEQ ID NO: 1410145 - RNA, 19 nt, Artificial Sequence
  Description of Artificial Sequence: Synthetic oligonucleotide
aagcccaaauagucccucu

SEQ ID NO: 1410146 - RNA, 19 nt, Artificial Sequence
  Description of Artificial Sequence: Synthetic oligonucleotide
gauggcccugcguuucucc

SEQ ID NO: 1410147 - RNA, 19 nt, Artificial Sequence
  Description of Artificial Sequence: Synthetic oligonucleotide
uucgcugccgcagaugaaa

SEQ ID NO: 1410148 - RNA, 19 nt, Artificial Sequence
  Description of Artificial Sequence: Synthetic oligonucleotide
ugauagguaucggucucug

SEQ ID NO: 1410149 - RNA, 19 nt, Artificial Sequence
  Description of Artificial Sequence: Synthetic oligonucleotide
agccgaaugccccuuugcu

SEQ ID NO: 1410150 - RNA, 19 nt, Artificial Sequence
  Description of Artificial Sequence: Synthetic oligonucleotide
gucucugcgccgcucaaug

SEQ ID NO: 1410151 - RNA, 19 nt, Artificial Sequence
  Description of Artificial Sequence: Synthetic oligonucleotide
cucuacacgcugcaguauc

SEQ ID NO: 1410152 - RNA, 19 nt, Artificial Sequence
  Description of Artificial Sequence: Synthetic oligonucleotide
cugacguauuugugcgugg

SEQ ID NO: 1410153 - RNA, 19 nt, Artificial Sequence
  Description of Artificial Sequence: Synthetic oligonucleotide
agcgaaagaaugccagaau

SEQ ID NO: 1410154 - RNA, 19 nt, Artificial Sequence
  Description of Artificial Sequence: Synthetic oligonucleotide
ggcugcgaggcucuguugg

SEQ ID NO: 1410155 - RNA, 19 nt, Artificial Sequence
  Description of Artificial Sequence: Synthetic oligonucleotide
ccggacauucacaaagucc

SEQ ID NO: 1410156 - RNA, 19 nt, Artificial Sequence
  Description of Artificial Sequence: Synthetic oligonucleotide
cacguucccggcaguacgg

SEQ ID NO: 1410157 - RNA, 19 nt, Artificial Sequence
  Description of Artificial Sequence: Synthetic oligonucleotide
gcucuguuggauaagguac

SEQ ID NO: 1410158 - RNA, 19 nt, Artificial Sequence
  Description of Artificial Sequence: Synthetic oligonucleotide
ugccgcagaugaaaggcaa

SEQ ID NO: 1410159 - RNA, 19 nt, Artificial Sequence
  Description of Artificial Sequence: Synthetic oligonucleotide
ugggaaguagguagccgaa

SEQ ID NO: 1410160 - RNA, 19 nt, Artificial Sequence
  Description of Artificial Sequence: Synthetic oligonucleotide
uucaaacaugguggcugcg

SEQ ID NO: 1410161 - RNA, 19 nt, Artificial Sequence
  Description of Artificial Sequence: Synthetic oligonucleotide
aggucuugccauggaaagg

SEQ ID NO: 1410162 - RNA, 19 nt, Artificial Sequence
  Description of Artificial Sequence: Synthetic oligonucleotide
aaugcgccggacauucaca

SEQ ID NO: 1410163 - RNA, 19 nt, Artificial Sequence
  Description of Artificial Sequence: Synthetic oligonucleotide
gcgccggacauucacaaag

SEQ ID NO: 1410164 - RNA, 19 nt, Artificial Sequence
  Description of Artificial Sequence: Synthetic oligonucleotide
ucgcugccgcagaugaaag

SEQ ID NO: 1410165 - RNA, 19 nt, Artificial Sequence
  Description of Artificial Sequence: Synthetic oligonucleotide
gagaagcgaaagaaugcca

SEQ ID NO: 1410166 - RNA, 19 nt, Artificial Sequence
  Description of Artificial Sequence: Synthetic oligonucleotide
uggggcaccccagagucca

SEQ ID NO: 1410167 - RNA, 19 nt, Artificial Sequence
  Description of Artificial Sequence: Synthetic oligonucleotide
cuccaauucgcugccgcag

SEQ ID NO: 1410168 - RNA, 19 nt, Artificial Sequence
  Description of Artificial Sequence: Synthetic oligonucleotide
uggcggagccguagcacag

SEQ ID NO: 1410169 - RNA, 19 nt, Artificial Sequence
  Description of Artificial Sequence: Synthetic oligonucleotide
ucucugcgccgcucaaugc

SEQ ID NO: 1410170 - RNA, 19 nt, Artificial Sequence
  Description of Artificial Sequence: Synthetic oligonucleotide
ugaccgcaaucacccacca

SEQ ID NO: 1410171 - RNA, 19 nt, Artificial Sequence
  Description of Artificial Sequence: Synthetic oligonucleotide
cugcguuucuccagaggug

SEQ ID NO: 1410172 - RNA, 19 nt, Artificial Sequence
  Description of Artificial Sequence: Synthetic oligonucleotide
cucucaggcugcaggauca

SEQ ID NO: 1410173 - RNA, 19 nt, Artificial Sequence
  Description of Artificial Sequence: Synthetic oligonucleotide
ggucuugccauggaaagga

SEQ ID NO: 1410174 - RNA, 19 nt, Artificial Sequence
  Description of Artificial Sequence: Synthetic oligonucleotide
gagccguagcacagcauag

SEQ ID NO: 1410175 - RNA, 19 nt, Artificial Sequence
  Description of Artificial Sequence: Synthetic oligonucleotide
agaagguacggcggacguc

SEQ ID NO: 1410176 - RNA, 19 nt, Artificial Sequence
  Description of Artificial Sequence: Synthetic oligonucleotide
ugccgguguugguauuuag

SEQ ID NO: 1410177 - RNA, 19 nt, Artificial Sequence
  Description of Artificial Sequence: Synthetic oligonucleotide
gugaccgcaaucacccacc

SEQ ID NO: 1410178 - RNA, 19 nt, Artificial Sequence
  Description of Artificial Sequence: Synthetic oligonucleotide
gagcauguucaagcucggg

SEQ ID NO: 1410179 - RNA, 19 nt, Artificial Sequence
  Description of Artificial Sequence: Synthetic oligonucleotide
uacuccucucgaacuucca

SEQ ID NO: 1410180 - RNA, 19 nt, Artificial Sequence
  Description of Artificial Sequence: Synthetic oligonucleotide
ccccugacguauuugugcg

SEQ ID NO: 1410181 - RNA, 19 nt, Artificial Sequence
  Description of Artificial Sequence: Synthetic oligonucleotide
gcgaaagaaugccagaaua

SEQ ID NO: 1410182 - RNA, 19 nt, Artificial Sequence
  Description of Artificial Sequence: Synthetic oligonucleotide
uggcaggcggucacugucu

SEQ ID NO: 1410183 - RNA, 19 nt, Artificial Sequence
  Description of Artificial Sequence: Synthetic oligonucleotide
guaucggucucugcgccgc

SEQ ID NO: 1410184 - RNA, 19 nt, Artificial Sequence
  Description of Artificial Sequence: Synthetic oligonucleotide
guagccgaaugccccuuug

SEQ ID NO: 1410185 - RNA, 19 nt, Artificial Sequence
  Description of Artificial Sequence: Synthetic oligonucleotide
gacaagggugcucuccucu

SEQ ID NO: 1410186 - RNA, 19 nt, Artificial Sequence
  Description of Artificial Sequence: Synthetic oligonucleotide
cacugucuuguuccauagc

SEQ ID NO: 1410187 - RNA, 19 nt, Artificial Sequence
  Description of Artificial Sequence: Synthetic oligonucleotide
gaagcccaaauagucccuc

SEQ ID NO: 1410188 - RNA, 19 nt, Artificial Sequence
  Description of Artificial Sequence: Synthetic oligonucleotide
cuggcaggcggucacuguc

SEQ ID NO: 1410189 - RNA, 19 nt, Artificial Sequence
  Description of Artificial Sequence: Synthetic oligonucleotide
augauagguaucggucucu

SEQ ID NO: 1410190 - RNA, 19 nt, Artificial Sequence
  Description of Artificial Sequence: Synthetic oligonucleotide
uuucagucucuggaggcua

SEQ ID NO: 1410191 - RNA, 19 nt, Artificial Sequence
  Description of Artificial Sequence: Synthetic oligonucleotide
gccagaauaaagaugucaa

SEQ ID NO: 1410192 - RNA, 19 nt, Artificial Sequence
  Description of Artificial Sequence: Synthetic oligonucleotide
ggugaccgcaaucacccac

SEQ ID NO: 1410193 - RNA, 19 nt, Artificial Sequence
  Description of Artificial Sequence: Synthetic oligonucleotide
guucccggcaguacggcug

SEQ ID NO: 1410194 - RNA, 19 nt, Artificial Sequence
  Description of Artificial Sequence: Synthetic oligonucleotide
gguaucggucucugcgccg

SEQ ID NO: 1410195 - RNA, 19 nt, Artificial Sequence
  Description of Artificial Sequence: Synthetic oligonucleotide
caggugcucaaccucacaa

SEQ ID NO: 1410196 - RNA, 19 nt, Artificial Sequence
  Description of Artificial Sequence: Synthetic oligonucleotide
augcgccggacauucacaa

SEQ ID NO: 1410197 - RNA, 19 nt, Artificial Sequence
  Description of Artificial Sequence: Synthetic oligonucleotide
cuccagguuucuccggaug

SEQ ID NO: 1410198 - RNA, 19 nt, Artificial Sequence
  Description of Artificial Sequence: Synthetic oligonucleotide
uacucccgcuccugggcag

SEQ ID NO: 1410199 - RNA, 19 nt, Artificial Sequence
  Description of Artificial Sequence: Synthetic oligonucleotide
caguacggcuggcucagug

SEQ ID NO: 1410200 - RNA, 19 nt, Artificial Sequence
  Description of Artificial Sequence: Synthetic oligonucleotide
gugcucaaccucacaacug

SEQ ID NO: 1410201 - RNA, 19 nt, Artificial Sequence
  Description of Artificial Sequence: Synthetic oligonucleotide
cucuagccaggccaggaca

SEQ ID NO: 1410202 - RNA, 19 nt, Artificial Sequence
  Description of Artificial Sequence: Synthetic oligonucleotide
acaacugcucagggucacg

SEQ ID NO: 1410203 - RNA, 19 nt, Artificial Sequence
  Description of Artificial Sequence: Synthetic oligonucleotide
aggguggcgagggagcaug

SEQ ID NO: 1410204 - RNA, 19 nt, Artificial Sequence
  Description of Artificial Sequence: Synthetic oligonucleotide
acguucccggcaguacggc

SEQ ID NO: 1410205 - RNA, 19 nt, Artificial Sequence
  Description of Artificial Sequence: Synthetic oligonucleotide
uacggcuggcucaguggga

SEQ ID NO: 1410206 - RNA, 19 nt, Artificial Sequence
  Description of Artificial Sequence: Synthetic oligonucleotide
gccgaaugccccuuugcug

SEQ ID NO: 1410207 - RNA, 19 nt, Artificial Sequence
  Description of Artificial Sequence: Synthetic oligonucleotide
gcggacgucagagauggcc

SEQ ID NO: 1410208 - RNA, 19 nt, Artificial Sequence
  Description of Artificial Sequence: Synthetic oligonucleotide
ggugcucaaccucacaacu

SEQ ID NO: 1410209 - RNA, 19 nt, Artificial Sequence
  Description of Artificial Sequence: Synthetic oligonucleotide
cuacacgcugcaguaucug

SEQ ID NO: 1410210 - RNA, 19 nt, Artificial Sequence
  Description of Artificial Sequence: Synthetic oligonucleotide
cacggcaguggcuucccuc

SEQ ID NO: 1410211 - RNA, 19 nt, Artificial Sequence
  Description of Artificial Sequence: Synthetic oligonucleotide
gaccuugacgaugaggaau

SEQ ID NO: 1410212 - RNA, 19 nt, Artificial Sequence
  Description of Artificial Sequence: Synthetic oligonucleotide
ucuuccagucuggggcacc

SEQ ID NO: 1410213 - RNA, 19 nt, Artificial Sequence
  Description of Artificial Sequence: Synthetic oligonucleotide
accaguggcggagccguag

SEQ ID NO: 1410214 - RNA, 19 nt, Artificial Sequence
  Description of Artificial Sequence: Synthetic oligonucleotide
ccaaauagucccucuuuca

SEQ ID NO: 1410215 - RNA, 19 nt, Artificial Sequence
  Description of Artificial Sequence: Synthetic oligonucleotide
guaccgaggcaggcgaccc

SEQ ID NO: 1410216 - RNA, 19 nt, Artificial Sequence
  Description of Artificial Sequence: Synthetic oligonucleotide
ccgaaugccccuuugcuga

SEQ ID NO: 1410217 - RNA, 19 nt, Artificial Sequence
  Description of Artificial Sequence: Synthetic oligonucleotide
gggacacaacgccaccugc

SEQ ID NO: 1410218 - RNA, 19 nt, Artificial Sequence
  Description of Artificial Sequence: Synthetic oligonucleotide
agacccugcaaaggauucu

SEQ ID NO: 1410219 - RNA, 19 nt, Artificial Sequence
  Description of Artificial Sequence: Synthetic oligonucleotide
caacgccaccugcagcccc

SEQ ID NO: 1410220 - RNA, 19 nt, Artificial Sequence
  Description of Artificial Sequence: Synthetic oligonucleotide
caauucgcugccgcagaug

SEQ ID NO: 1410221 - RNA, 19 nt, Artificial Sequence
  Description of Artificial Sequence: Synthetic oligonucleotide
ccguagcacagcauagccc

SEQ ID NO: 1410222 - RNA, 19 nt, Artificial Sequence
  Description of Artificial Sequence: Synthetic oligonucleotide
augccagaauaaagauguc

SEQ ID NO: 1410223 - RNA, 19 nt, Artificial Sequence
  Description of Artificial Sequence: Synthetic oligonucleotide
gcagcaagauaccaucucu

SEQ ID NO: 1410224 - RNA, 19 nt, Artificial Sequence
  Description of Artificial Sequence: Synthetic oligonucleotide
cugguacaccagcucagca

SEQ ID NO: 1410225 - RNA, 19 nt, Artificial Sequence
  Description of Artificial Sequence: Synthetic oligonucleotide
ggaccauucucuccccuga

SEQ ID NO: 1410226 - RNA, 19 nt, Artificial Sequence
  Description of Artificial Sequence: Synthetic oligonucleotide
ccugacguauuugugcgug

SEQ ID NO: 1410227 - RNA, 19 nt, Artificial Sequence
  Description of Artificial Sequence: Synthetic oligonucleotide
gggaaugaggugccaccug

SEQ ID NO: 1410228 - RNA, 19 nt, Artificial Sequence
  Description of Artificial Sequence: Synthetic oligonucleotide
guacucccgcuccugggca

SEQ ID NO: 1410229 - RNA, 19 nt, Artificial Sequence
  Description of Artificial Sequence: Synthetic oligonucleotide
ucucuccccugacguauuu

SEQ ID NO: 1410230 - RNA, 19 nt, Artificial Sequence
  Description of Artificial Sequence: Synthetic oligonucleotide
gccgguguugguauuuagc

SEQ ID NO: 1410231 - RNA, 19 nt, Artificial Sequence
  Description of Artificial Sequence: Synthetic oligonucleotide
acacaucauaggagacaag

SEQ ID NO: 1410232 - RNA, 19 nt, Artificial Sequence
  Description of Artificial Sequence: Synthetic oligonucleotide
uaucuggcaggcggucacu

SEQ ID NO: 1410233 - RNA, 19 nt, Artificial Sequence
  Description of Artificial Sequence: Synthetic oligonucleotide
uucucuccccugacguauu

SEQ ID NO: 1410234 - RNA, 19 nt, Artificial Sequence
  Description of Artificial Sequence: Synthetic oligonucleotide
uguugguauuuagcucgau

SEQ ID NO: 1410235 - RNA, 19 nt, Artificial Sequence
  Description of Artificial Sequence: Synthetic oligonucleotide
ggagcauguucaagcucgg

SEQ ID NO: 1410236 - RNA, 19 nt, Artificial Sequence
  Description of Artificial Sequence: Synthetic oligonucleotide
ugcgccggacauucacaaa

SEQ ID NO: 1410237 - RNA, 19 nt, Artificial Sequence
  Description of Artificial Sequence: Synthetic oligonucleotide
cuggggcaccccagagucc

SEQ ID NO: 1410238 - RNA, 19 nt, Artificial Sequence
  Description of Artificial Sequence: Synthetic oligonucleotide
cuggcugacuugaguacaa

SEQ ID NO: 1410239 - RNA, 19 nt, Artificial Sequence
  Description of Artificial Sequence: Synthetic oligonucleotide
gcaagauaccaucucuccu

SEQ ID NO: 1410240 - RNA, 19 nt, Artificial Sequence
  Description of Artificial Sequence: Synthetic oligonucleotide
uaucggucucugcgccgcu

SEQ ID NO: 1410241 - RNA, 19 nt, Artificial Sequence
  Description of Artificial Sequence: Synthetic oligonucleotide
agcagagguccccgggcaa

SEQ ID NO: 1410242 - RNA, 19 nt, Artificial Sequence
  Description of Artificial Sequence: Synthetic oligonucleotide
acggcuggcucagugggaa

SEQ ID NO: 1410243 - RNA, 19 nt, Artificial Sequence
  Description of Artificial Sequence: Synthetic oligonucleotide
aagguacggcggacgucag

SEQ ID NO: 1410244 - RNA, 19 nt, Artificial Sequence
  Description of Artificial Sequence: Synthetic oligonucleotide
uggaggcuauggagacaga

SEQ ID NO: 1410245 - RNA, 19 nt, Artificial Sequence
  Description of Artificial Sequence: Synthetic oligonucleotide
gguaccgaggcaggcgacc

SEQ ID NO: 1410246 - RNA, 19 nt, Artificial Sequence
  Description of Artificial Sequence: Synthetic oligonucleotide
uucuccggaugccgguguu

SEQ ID NO: 1410247 - RNA, 19 nt, Artificial Sequence
  Description of Artificial Sequence: Synthetic oligonucleotide
agguacggcggacgucaga

SEQ ID NO: 1410248 - RNA, 19 nt, Artificial Sequence
  Description of Artificial Sequence: Synthetic oligonucleotide
gcuauggagacagaacccu

SEQ ID NO: 1410249 - RNA, 19 nt, Artificial Sequence
  Description of Artificial Sequence: Synthetic oligonucleotide
gccagaugauagguaucgg

SEQ ID NO: 1410250 - RNA, 19 nt, Artificial Sequence
  Description of Artificial Sequence: Synthetic oligonucleotide
agguaccgaggcaggcgac

SEQ ID NO: 1410251 - RNA, 19 nt, Artificial Sequence
  Description of Artificial Sequence: Synthetic oligonucleotide
accaguguggugaccgcaa

SEQ ID NO: 1410252 - RNA, 19 nt, Artificial Sequence
  Description of Artificial Sequence: Synthetic oligonucleotide
ggggcaggacuuugaaauc

SEQ ID NO: 1410253 - RNA, 19 nt, Artificial Sequence
  Description of Artificial Sequence: Synthetic oligonucleotide
cauucucuccccugacgua

SEQ ID NO: 1410254 - RNA, 19 nt, Artificial Sequence
  Description of Artificial Sequence: Synthetic oligonucleotide
cauuacuccucucgaacuu

SEQ ID NO: 1410255 - RNA, 19 nt, Artificial Sequence
  Description of Artificial Sequence: Synthetic oligonucleotide
ccgcaaucacccaccagug

SEQ ID NO: 1410256 - RNA, 19 nt, Artificial Sequence
  Description of Artificial Sequence: Synthetic oligonucleotide
cggcggacgucagagaugg

SEQ ID NO: 1410257 - RNA, 19 nt, Artificial Sequence
  Description of Artificial Sequence: Synthetic oligonucleotide
ggacacaacgccaccugca

SEQ ID NO: 1410258 - RNA, 19 nt, Artificial Sequence
  Description of Artificial Sequence: Synthetic oligonucleotide
cuguuggauaagguaccga

SEQ ID NO: 1410259 - RNA, 19 nt, Artificial Sequence
  Description of Artificial Sequence: Synthetic oligonucleotide
ccagaugauagguaucggu

SEQ ID NO: 1410260 - RNA, 19 nt, Artificial Sequence
  Description of Artificial Sequence: Synthetic oligonucleotide
ccgguguugguauuuagcu

SEQ ID NO: 1410261 - RNA, 19 nt, Artificial Sequence
  Description of Artificial Sequence: Synthetic oligonucleotide
uuccagucuggggcacccc

SEQ ID NO: 1410262 - RNA, 19 nt, Artificial Sequence
  Description of Artificial Sequence: Synthetic oligonucleotide
aggcucuguuggauaaggu

SEQ ID NO: 1410263 - RNA, 19 nt, Artificial Sequence
  Description of Artificial Sequence: Synthetic oligonucleotide
acggcggacgucagagaug

SEQ ID NO: 1410264 - RNA, 19 nt, Artificial Sequence
  Description of Artificial Sequence: Synthetic oligonucleotide
cagaagguacggcggacgu

SEQ ID NO: 1410265 - RNA, 19 nt, Artificial Sequence
  Description of Artificial Sequence: Synthetic oligonucleotide
cgcaaucacccaccagugg

SEQ ID NO: 1410266 - RNA, 19 nt, Artificial Sequence
  Description of Artificial Sequence: Synthetic oligonucleotide
ccaguggcggagccguagc

SEQ ID NO: 1410267 - RNA, 19 nt, Artificial Sequence
  Description of Artificial Sequence: Synthetic oligonucleotide
gcgaggcucuguuggauaa

SEQ ID NO: 1410268 - RNA, 19 nt, Artificial Sequence
  Description of Artificial Sequence: Synthetic oligonucleotide
caguggcggagccguagca

SEQ ID NO: 1410269 - RNA, 19 nt, Artificial Sequence
  Description of Artificial Sequence: Synthetic oligonucleotide
ggccaagaucugauccacc

SEQ ID NO: 1410270 - RNA, 19 nt, Artificial Sequence
  Description of Artificial Sequence: Synthetic oligonucleotide
cauaggagacaagggugcu

SEQ ID NO: 1410271 - RNA, 19 nt, Artificial Sequence
  Description of Artificial Sequence: Synthetic oligonucleotide
gcugcgaggcucuguugga

SEQ ID NO: 1410272 - RNA, 19 nt, Artificial Sequence
  Description of Artificial Sequence: Synthetic oligonucleotide
gggcaccccagaguccagg

SEQ ID NO: 1410273 - RNA, 19 nt, Artificial Sequence
  Description of Artificial Sequence: Synthetic oligonucleotide
ggcccucagacaaagcacu

SEQ ID NO: 1410274 - RNA, 19 nt, Artificial Sequence
  Description of Artificial Sequence: Synthetic oligonucleotide
ggcaggacuuugaaaucaa

SEQ ID NO: 1410275 - RNA, 19 nt, Artificial Sequence
  Description of Artificial Sequence: Synthetic oligonucleotide
cacuggacaccaguguggu

SEQ ID NO: 1410276 - RNA, 19 nt, Artificial Sequence
  Description of Artificial Sequence: Synthetic oligonucleotide
ccauacucauuacuccucu

SEQ ID NO: 1410277 - RNA, 19 nt, Artificial Sequence
  Description of Artificial Sequence: Synthetic oligonucleotide
gcggagccguagcacagca

SEQ ID NO: 1410278 - RNA, 19 nt, Artificial Sequence
  Description of Artificial Sequence: Synthetic oligonucleotide
gcccucagacaaagcacug

SEQ ID NO: 1410279 - RNA, 19 nt, Artificial Sequence
  Description of Artificial Sequence: Synthetic oligonucleotide
auucgcugccgcagaugaa

SEQ ID NO: 1410280 - RNA, 19 nt, Artificial Sequence
  Description of Artificial Sequence: Synthetic oligonucleotide
gcgccgcucaaugcgccgg

SEQ ID NO: 1410281 - RNA, 19 nt, Artificial Sequence
  Description of Artificial Sequence: Synthetic oligonucleotide
ggcggagccguagcacagc

SEQ ID NO: 1410282 - RNA, 19 nt, Artificial Sequence
  Description of Artificial Sequence: Synthetic oligonucleotide
gcgacccuugagaucugug

SEQ ID NO: 1410283 - RNA, 19 nt, Artificial Sequence
  Description of Artificial Sequence: Synthetic oligonucleotide
cccaccaguggcggagccg

SEQ ID NO: 1410284 - RNA, 19 nt, Artificial Sequence
  Description of Artificial Sequence: Synthetic oligonucleotide
gcccugcguuucuccagag

SEQ ID NO: 1410285 - RNA, 19 nt, Artificial Sequence
  Description of Artificial Sequence: Synthetic oligonucleotide
gcccaaauagucccucuuu

SEQ ID NO: 1410286 - RNA, 19 nt, Artificial Sequence
  Description of Artificial Sequence: Synthetic oligonucleotide
gaacccuggccagcagggu

SEQ ID NO: 1410287 - RNA, 19 nt, Artificial Sequence
  Description of Artificial Sequence: Synthetic oligonucleotide
gguccccgggcaacagcag

SEQ ID NO: 1410288 - RNA, 19 nt, Artificial Sequence
  Description of Artificial Sequence: Synthetic oligonucleotide
ccucacaacugcucagggu

SEQ ID NO: 1410289 - RNA, 19 nt, Artificial Sequence
  Description of Artificial Sequence: Synthetic oligonucleotide
gguggcaaugccagaugau

SEQ ID NO: 1410290 - RNA, 19 nt, Artificial Sequence
  Description of Artificial Sequence: Synthetic oligonucleotide
ucccggcaguacggcuggc

SEQ ID NO: 1410291 - RNA, 19 nt, Artificial Sequence
  Description of Artificial Sequence: Synthetic oligonucleotide
gccgcagaugaaaggcaaa

SEQ ID NO: 1410292 - RNA, 19 nt, Artificial Sequence
  Description of Artificial Sequence: Synthetic oligonucleotide
ccagaugaaggugcagacu

SEQ ID NO: 1410293 - RNA, 19 nt, Artificial Sequence
  Description of Artificial Sequence: Synthetic oligonucleotide
cgaggcucuguuggauaag

SEQ ID NO: 1410294 - RNA, 19 nt, Artificial Sequence
  Description of Artificial Sequence: Synthetic oligonucleotide
ccgaggcaggcgacccuug

SEQ ID NO: 1410295 - RNA, 19 nt, Artificial Sequence
  Description of Artificial Sequence: Synthetic oligonucleotide
cggcaguacggcuggcuca

SEQ ID NO: 1410296 - RNA, 19 nt, Artificial Sequence
  Description of Artificial Sequence: Synthetic oligonucleotide
aggcgacccuugagaucug

SEQ ID NO: 1410297 - RNA, 19 nt, Artificial Sequence
  Description of Artificial Sequence: Synthetic oligonucleotide
gguagccgaaugccccuuu

SEQ ID NO: 1410298 - RNA, 19 nt, Artificial Sequence
  Description of Artificial Sequence: Synthetic oligonucleotide
ccaccacggcaguggcuuc

SEQ ID NO: 1410299 - RNA, 19 nt, Artificial Sequence
  Description of Artificial Sequence: Synthetic oligonucleotide
ccgcagaugaaaggcaaau

SEQ ID NO: 1410300 - RNA, 19 nt, Artificial Sequence
  Description of Artificial Sequence: Synthetic oligonucleotide
ggggcaccccagaguccag

SEQ ID NO: 1410301 - RNA, 19 nt, Artificial Sequence
  Description of Artificial Sequence: Synthetic oligonucleotide
gguggcugcgaggcucugu

SEQ ID NO: 1410302 - RNA, 19 nt, Artificial Sequence
  Description of Artificial Sequence: Synthetic oligonucleotide
ccaauucgcugccgcagau

SEQ ID NO: 1410303 - RNA, 19 nt, Artificial Sequence
  Description of Artificial Sequence: Synthetic oligonucleotide
caccaguggcggagccgua

SEQ ID NO: 1410304 - RNA, 19 nt, Artificial Sequence
  Description of Artificial Sequence: Synthetic oligonucleotide
ggcaggcggucacugucuu

SEQ ID NO: 1410305 - RNA, 19 nt, Artificial Sequence
  Description of Artificial Sequence: Synthetic oligonucleotide
ggcgacccuugagaucugu

SEQ ID NO: 1410306 - RNA, 19 nt, Artificial Sequence
  Description of Artificial Sequence: Synthetic oligonucleotide
ggucucugcgccgcucaau

SEQ ID NO: 1410307 - RNA, 19 nt, Artificial Sequence
  Description of Artificial Sequence: Synthetic oligonucleotide
cccugacguauuugugcgu

SEQ ID NO: 1410308 - RNA, 19 nt, Artificial Sequence
  Description of Artificial Sequence: Synthetic oligonucleotide
cggaugccgguguugguau

SEQ ID NO: 1410309 - RNA, 19 nt, Artificial Sequence
  Description of Artificial Sequence: Synthetic oligonucleotide
gguggcgagggagcauguu

SEQ ID NO: 1410310 - RNA, 19 nt, Artificial Sequence
  Description of Artificial Sequence: Synthetic oligonucleotide
ccucuacacgcugcaguau

SEQ ID NO: 1410311 - RNA, 19 nt, Artificial Sequence
  Description of Artificial Sequence: Synthetic oligonucleotide
ggguggcgagggagcaugu

SEQ ID NO: 1410312 - RNA, 19 nt, Artificial Sequence
  Description of Artificial Sequence: Synthetic oligonucleotide
aauguauucauuuaggacu

SEQ ID NO: 1410313 - RNA, 19 nt, Artificial Sequence
  Description of Artificial Sequence: Synthetic oligonucleotide
auuaaguuaaaguauuagc

SEQ ID NO: 1410314 - RNA, 19 nt, Artificial Sequence
  Description of Artificial Sequence: Synthetic oligonucleotide
auaauaaacagccaaggac

SEQ ID NO: 1410315 - RNA, 19 nt, Artificial Sequence
  Description of Artificial Sequence: Synthetic oligonucleotide
aauagugucauggaaaugg

SEQ ID NO: 1410316 - RNA, 19 nt, Artificial Sequence
  Description of Artificial Sequence: Synthetic oligonucleotide
  modified_base (16)..(16): a, c, u, g, unknown or other
uauauauauauauaunugu

SEQ ID NO: 1410317 - RNA, 19 nt, Artificial Sequence
  Description of Artificial Sequence: Synthetic oligonucleotide
uauauauauauauauaaca

SEQ ID NO: 1410318 - RNA, 19 nt, Artificial Sequence
  Description of Artificial Sequence: Synthetic oligonucleotide
aauuuauauauauauauau

SEQ ID NO: 1410319 - RNA, 19 nt, Artificial Sequence
  Description of Artificial Sequence: Synthetic oligonucleotide
uuaaguuaaaguauuagca

SEQ ID NO: 1410320 - RNA, 19 nt, Artificial Sequence
  Description of Artificial Sequence: Synthetic oligonucleotide
ucauagauuauaaauaaug

SEQ ID NO: 1410321 - RNA, 19 nt, Artificial Sequence
  Description of Artificial Sequence: Synthetic oligonucleotide
uuauuaugaauucuuagag

SEQ ID NO: 1410322 - RNA, 19 nt, Artificial Sequence
  Description of Artificial Sequence: Synthetic oligonucleotide
uauauauauauauauauaa

SEQ ID NO: 1410323 - RNA, 19 nt, Artificial Sequence
  Description of Artificial Sequence: Synthetic oligonucleotide
uuaauuuauauauauauau

SEQ ID NO: 1410324 - RNA, 19 nt, Artificial Sequence
  Description of Artificial Sequence: Synthetic oligonucleotide
ucauuaaagauccucaacc

SEQ ID NO: 1410325 - RNA, 19 nt, Artificial Sequence
  Description of Artificial Sequence: Synthetic oligonucleotide
uuuauauauauauauauau

SEQ ID NO: 1410326 - RNA, 19 nt, Artificial Sequence
  Description of Artificial Sequence: Synthetic oligonucleotide
  modified_base (18)..(18): a, c, u, g, unknown or other
uauauauauauauauaunu

SEQ ID NO: 1410327 - RNA, 19 nt, Artificial Sequence
  Description of Artificial Sequence: Synthetic oligonucleotide
uauauauauauauauauau

SEQ ID NO: 1410328 - RNA, 19 nt, Artificial Sequence
  Description of Artificial Sequence: Synthetic oligonucleotide
uuaauacuuacuuauagca

SEQ ID NO: 1410329 - RNA, 19 nt, Artificial Sequence
  Description of Artificial Sequence: Synthetic oligonucleotide
auauauauauauaacacac

SEQ ID NO: 1410330 - RNA, 19 nt, Artificial Sequence
  Description of Artificial Sequence: Synthetic oligonucleotide
aaugccacaagcuuauuag

SEQ ID NO: 1410331 - RNA, 19 nt, Artificial Sequence
  Description of Artificial Sequence: Synthetic oligonucleotide
gacuaagaagacuagauag

SEQ ID NO: 1410332 - RNA, 19 nt, Artificial Sequence
  Description of Artificial Sequence: Synthetic oligonucleotide
  modified_base (14)..(14): a, c, u, g, unknown or other
uauauauauauaunugugu

SEQ ID NO: 1410333 - RNA, 19 nt, Artificial Sequence
  Description of Artificial Sequence: Synthetic oligonucleotide
uauagcaaucuaaagaacc

SEQ ID NO: 1410334 - RNA, 19 nt, Artificial Sequence
  Description of Artificial Sequence: Synthetic oligonucleotide
auuaacuggacauuaauug

SEQ ID NO: 1410335 - RNA, 19 nt, Artificial Sequence
  Description of Artificial Sequence: Synthetic oligonucleotide
aaaggucugauucugaugu

SEQ ID NO: 1410336 - RNA, 19 nt, Artificial Sequence
  Description of Artificial Sequence: Synthetic oligonucleotide
ugcauuuauauuccaaugg

SEQ ID NO: 1410337 - RNA, 19 nt, Artificial Sequence
  Description of Artificial Sequence: Synthetic oligonucleotide
auauauauauauauaacac

SEQ ID NO: 1410338 - RNA, 19 nt, Artificial Sequence
  Description of Artificial Sequence: Synthetic oligonucleotide
uauaguaugagauaguaua

SEQ ID NO: 1410339 - RNA, 19 nt, Artificial Sequence
  Description of Artificial Sequence: Synthetic oligonucleotide
uuaucuauuaguaaacagu

SEQ ID NO: 1410340 - RNA, 19 nt, Artificial Sequence
  Description of Artificial Sequence: Synthetic oligonucleotide
uauauauauauauaacaca

SEQ ID NO: 1410341 - RNA, 19 nt, Artificial Sequence
  Description of Artificial Sequence: Synthetic oligonucleotide
aaagccacauuuuacgguc

SEQ ID NO: 1410342 - RNA, 19 nt, Artificial Sequence
  Description of Artificial Sequence: Synthetic oligonucleotide
auaguauaugaguagcacc

SEQ ID NO: 1410343 - RNA, 19 nt, Artificial Sequence
  Description of Artificial Sequence: Synthetic oligonucleotide
aagcuuauuagaaaauugc

SEQ ID NO: 1410344 - RNA, 19 nt, Artificial Sequence
  Description of Artificial Sequence: Synthetic oligonucleotide
aauacuuacuuauagcaau

SEQ ID NO: 1410345 - RNA, 19 nt, Artificial Sequence
  Description of Artificial Sequence: Synthetic oligonucleotide
aguauuaauacuuacuuau

SEQ ID NO: 1410346 - RNA, 19 nt, Artificial Sequence
  Description of Artificial Sequence: Synthetic oligonucleotide
uuaacuggacauuaauugg

SEQ ID NO: 1410347 - RNA, 19 nt, Artificial Sequence
  Description of Artificial Sequence: Synthetic oligonucleotide
ugcuaaaugaacaugcuac

SEQ ID NO: 1410348 - RNA, 19 nt, Artificial Sequence
  Description of Artificial Sequence: Synthetic oligonucleotide
ucuaacauuucauaaugcc

SEQ ID NO: 1410349 - RNA, 19 nt, Artificial Sequence
  Description of Artificial Sequence: Synthetic oligonucleotide
uauaauagugucauggaaa

SEQ ID NO: 1410350 - RNA, 19 nt, Artificial Sequence
  Description of Artificial Sequence: Synthetic oligonucleotide
uuuauauuccaauggacca

SEQ ID NO: 1410351 - RNA, 19 nt, Artificial Sequence
  Description of Artificial Sequence: Synthetic oligonucleotide
ugagaaauugcucuagggc

SEQ ID NO: 1410352 - RNA, 19 nt, Artificial Sequence
  Description of Artificial Sequence: Synthetic oligonucleotide
uuuaucuauuaguaaacag

SEQ ID NO: 1410353 - RNA, 19 nt, Artificial Sequence
  Description of Artificial Sequence: Synthetic oligonucleotide
uucaaucagaacuagagaa

SEQ ID NO: 1410354 - RNA, 19 nt, Artificial Sequence
  Description of Artificial Sequence: Synthetic oligonucleotide
aauaaugucaguucacaau

SEQ ID NO: 1410355 - RNA, 19 nt, Artificial Sequence
  Description of Artificial Sequence: Synthetic oligonucleotide
ucaguucacaauaauaaac

SEQ ID NO: 1410356 - RNA, 19 nt, Artificial Sequence
  Description of Artificial Sequence: Synthetic oligonucleotide
  modified_base (5)..(5): a, c, u, g, unknown or other
auaunuguguguuauauau

SEQ ID NO: 1410357 - RNA, 19 nt, Artificial Sequence
  Description of Artificial Sequence: Synthetic oligonucleotide
auuacaacuggauuuuauc

SEQ ID NO: 1410358 - RNA, 19 nt, Artificial Sequence
  Description of Artificial Sequence: Synthetic oligonucleotide
auauauauauauauauaac

SEQ ID NO: 1410359 - RNA, 19 nt, Artificial Sequence
  Description of Artificial Sequence: Synthetic oligonucleotide
ucuuagagaguauuaauac

SEQ ID NO: 1410360 - RNA, 19 nt, Artificial Sequence
  Description of Artificial Sequence: Synthetic oligonucleotide
agaaauuacaacuggauuu

SEQ ID NO: 1410361 - RNA, 19 nt, Artificial Sequence
  Description of Artificial Sequence: Synthetic oligonucleotide
uaguauaugaguagcaccu

SEQ ID NO: 1410362 - RNA, 19 nt, Artificial Sequence
  Description of Artificial Sequence: Synthetic oligonucleotide
uugucuuauaguaugagau

SEQ ID NO: 1410363 - RNA, 19 nt, Artificial Sequence
  Description of Artificial Sequence: Synthetic oligonucleotide
uuagagaguauuaauacuu

SEQ ID NO: 1410364 - RNA, 19 nt, Artificial Sequence
  Description of Artificial Sequence: Synthetic oligonucleotide
aauagcaacauaaaucccu

SEQ ID NO: 1410365 - RNA, 19 nt, Artificial Sequence
  Description of Artificial Sequence: Synthetic oligonucleotide
caucacuuuacaaugguag

SEQ ID NO: 1410366 - RNA, 19 nt, Artificial Sequence
  Description of Artificial Sequence: Synthetic oligonucleotide
aagagauuaaauucauaga

SEQ ID NO: 1410367 - RNA, 19 nt, Artificial Sequence
  Description of Artificial Sequence: Synthetic oligonucleotide
uuauauauauauauauaua

SEQ ID NO: 1410368 - RNA, 19 nt, Artificial Sequence
  Description of Artificial Sequence: Synthetic oligonucleotide
guguauaauagugucaugg

SEQ ID NO: 1410369 - RNA, 19 nt, Artificial Sequence
  Description of Artificial Sequence: Synthetic oligonucleotide
aaacuugguaaaauaaauc

SEQ ID NO: 1410370 - RNA, 19 nt, Artificial Sequence
  Description of Artificial Sequence: Synthetic oligonucleotide
aaagggcucgcuuuuguuc

SEQ ID NO: 1410371 - RNA, 19 nt, Artificial Sequence
  Description of Artificial Sequence: Synthetic oligonucleotide
ucugacaguugucuuauag

SEQ ID NO: 1410372 - RNA, 19 nt, Artificial Sequence
  Description of Artificial Sequence: Synthetic oligonucleotide
uauauauauauaacacaca

SEQ ID NO: 1410373 - RNA, 19 nt, Artificial Sequence
  Description of Artificial Sequence: Synthetic oligonucleotide
agacuagauagucugacag

SEQ ID NO: 1410374 - RNA, 19 nt, Artificial Sequence
  Description of Artificial Sequence: Synthetic oligonucleotide
ugagauaguauaugaguag

SEQ ID NO: 1410375 - RNA, 19 nt, Artificial Sequence
  Description of Artificial Sequence: Synthetic oligonucleotide
gagaugauaugguaaaaug

SEQ ID NO: 1410376 - RNA, 19 nt, Artificial Sequence
  Description of Artificial Sequence: Synthetic oligonucleotide
  modified_base (13)..(13): a, c, u, g, unknown or other
auauauauauaunugugug

SEQ ID NO: 1410377 - RNA, 19 nt, Artificial Sequence
  Description of Artificial Sequence: Synthetic oligonucleotide
aacauugguucccggaagg

SEQ ID NO: 1410378 - RNA, 19 nt, Artificial Sequence
  Description of Artificial Sequence: Synthetic oligonucleotide
uauucauuuaggacuaaga

SEQ ID NO: 1410379 - RNA, 19 nt, Artificial Sequence
  Description of Artificial Sequence: Synthetic oligonucleotide
auucauagauuauaaauaa

SEQ ID NO: 1410380 - RNA, 19 nt, Artificial Sequence
  Description of Artificial Sequence: Synthetic oligonucleotide
  modified_base (3)..(3): a, c, u, g, unknown or other
aunuguguguuauauauau

SEQ ID NO: 1410381 - RNA, 19 nt, Artificial Sequence
  Description of Artificial Sequence: Synthetic oligonucleotide
aguaugagauaguauauga

SEQ ID NO: 1410382 - RNA, 19 nt, Artificial Sequence
  Description of Artificial Sequence: Synthetic oligonucleotide
uguuauauauauauauaua

SEQ ID NO: 1410383 - RNA, 19 nt, Artificial Sequence
  Description of Artificial Sequence: Synthetic oligonucleotide
agagugcucccuuucaacc

SEQ ID NO: 1410384 - RNA, 19 nt, Artificial Sequence
  Description of Artificial Sequence: Synthetic oligonucleotide
uaauuuauauauauauaua

SEQ ID NO: 1410385 - RNA, 19 nt, Artificial Sequence
  Description of Artificial Sequence: Synthetic oligonucleotide
agagaguauuaauacuuac

SEQ ID NO: 1410386 - RNA, 19 nt, Artificial Sequence
  Description of Artificial Sequence: Synthetic oligonucleotide
accaagaccaaauguacuc

SEQ ID NO: 1410387 - RNA, 19 nt, Artificial Sequence
  Description of Artificial Sequence: Synthetic oligonucleotide
uuacaacuggauuuuaucu

SEQ ID NO: 1410388 - RNA, 19 nt, Artificial Sequence
  Description of Artificial Sequence: Synthetic oligonucleotide
uggauuuuaucuauuagua

SEQ ID NO: 1410389 - RNA, 19 nt, Artificial Sequence
  Description of Artificial Sequence: Synthetic oligonucleotide
uuuguuaggucccuugugu

SEQ ID NO: 1410390 - RNA, 19 nt, Artificial Sequence
  Description of Artificial Sequence: Synthetic oligonucleotide
aaaguauuagcauguguau

SEQ ID NO: 1410391 - RNA, 19 nt, Artificial Sequence
  Description of Artificial Sequence: Synthetic oligonucleotide
uaaguuaaaguauuagcau

SEQ ID NO: 1410392 - RNA, 19 nt, Artificial Sequence
  Description of Artificial Sequence: Synthetic oligonucleotide
uuugcuaacaaaagagaaa

SEQ ID NO: 1410393 - RNA, 19 nt, Artificial Sequence
  Description of Artificial Sequence: Synthetic oligonucleotide
aagagugcucccuuucaac

SEQ ID NO: 1410394 - RNA, 19 nt, Artificial Sequence
  Description of Artificial Sequence: Synthetic oligonucleotide
aguauuagcauguguauaa

SEQ ID NO: 1410395 - RNA, 19 nt, Artificial Sequence
  Description of Artificial Sequence: Synthetic oligonucleotide
aaaagccacauuuuacggu

SEQ ID NO: 1410396 - RNA, 19 nt, Artificial Sequence
  Description of Artificial Sequence: Synthetic oligonucleotide
uaugaauucuuagagagua

SEQ ID NO: 1410397 - RNA, 19 nt, Artificial Sequence
  Description of Artificial Sequence: Synthetic oligonucleotide
uguguuauauauauauaua

SEQ ID NO: 1410398 - RNA, 19 nt, Artificial Sequence
  Description of Artificial Sequence: Synthetic oligonucleotide
guuauauauauauauauau

SEQ ID NO: 1410399 - RNA, 19 nt, Artificial Sequence
  Description of Artificial Sequence: Synthetic oligonucleotide
agaaaucacuucucugacc

SEQ ID NO: 1410400 - RNA, 19 nt, Artificial Sequence
  Description of Artificial Sequence: Synthetic oligonucleotide
ucuaaaacuugguaaaaua

SEQ ID NO: 1410401 - RNA, 19 nt, Artificial Sequence
  Description of Artificial Sequence: Synthetic oligonucleotide
  modified_base (15)..(15): a, c, u, g, unknown or other
auauauauauauaunugug

SEQ ID NO: 1410402 - RNA, 19 nt, Artificial Sequence
  Description of Artificial Sequence: Synthetic oligonucleotide
acacaugaaaucuugaguu

SEQ ID NO: 1410403 - RNA, 19 nt, Artificial Sequence
  Description of Artificial Sequence: Synthetic oligonucleotide
uguauaauagugucaugga

SEQ ID NO: 1410404 - RNA, 19 nt, Artificial Sequence
  Description of Artificial Sequence: Synthetic oligonucleotide
uucuuagagaguauuaaua

SEQ ID NO: 1410405 - RNA, 19 nt, Artificial Sequence
  Description of Artificial Sequence: Synthetic oligonucleotide
  modified_base (17)..(17): a, c, u, g, unknown or other
auauauauauauauaunug

SEQ ID NO: 1410406 - RNA, 19 nt, Artificial Sequence
  Description of Artificial Sequence: Synthetic oligonucleotide
agaaccuuugagaaauugc

SEQ ID NO: 1410407 - RNA, 19 nt, Artificial Sequence
  Description of Artificial Sequence: Synthetic oligonucleotide
  modified_base (7)..(7): a, c, u, g, unknown or other
auauaunuguguguuauau

SEQ ID NO: 1410408 - RNA, 19 nt, Artificial Sequence
  Description of Artificial Sequence: Synthetic oligonucleotide
ugggugcucagaaagagca

SEQ ID NO: 1410409 - RNA, 19 nt, Artificial Sequence
  Description of Artificial Sequence: Synthetic oligonucleotide
aaugauuuaacuacuuuua

SEQ ID NO: 1410410 - RNA, 19 nt, Artificial Sequence
  Description of Artificial Sequence: Synthetic oligonucleotide
gucuuauaguaugagauag

SEQ ID NO: 1410411 - RNA, 19 nt, Artificial Sequence
  Description of Artificial Sequence: Synthetic oligonucleotide
caaaagccacauuuuacgg

SEQ ID NO: 1410412 - RNA, 19 nt, Artificial Sequence
  Description of Artificial Sequence: Synthetic oligonucleotide
aauucuuagagaguauuaa

SEQ ID NO: 1410413 - RNA, 19 nt, Artificial Sequence
  Description of Artificial Sequence: Synthetic oligonucleotide
auaauagugucauggaaau

SEQ ID NO: 1410414 - RNA, 19 nt, Artificial Sequence
  Description of Artificial Sequence: Synthetic oligonucleotide
uccucagaaagaauguaca

SEQ ID NO: 1410415 - RNA, 19 nt, Artificial Sequence
  Description of Artificial Sequence: Synthetic oligonucleotide
acauuuuacggucuuaaaa

SEQ ID NO: 1410416 - RNA, 19 nt, Artificial Sequence
  Description of Artificial Sequence: Synthetic oligonucleotide
uucuaacauuucauaaugc

SEQ ID NO: 1410417 - RNA, 19 nt, Artificial Sequence
  Description of Artificial Sequence: Synthetic oligonucleotide
ccuaauagcaacauaaauc

SEQ ID NO: 1410418 - RNA, 19 nt, Artificial Sequence
  Description of Artificial Sequence: Synthetic oligonucleotide
aaggacuucauugcuagug

SEQ ID NO: 1410419 - RNA, 19 nt, Artificial Sequence
  Description of Artificial Sequence: Synthetic oligonucleotide
uacuuauagcaaucuaaag

SEQ ID NO: 1410420 - RNA, 19 nt, Artificial Sequence
  Description of Artificial Sequence: Synthetic oligonucleotide
auuauucuaacauuucaua

SEQ ID NO: 1410421 - RNA, 19 nt, Artificial Sequence
  Description of Artificial Sequence: Synthetic oligonucleotide
ugugcauuuauauuccaau

SEQ ID NO: 1410422 - RNA, 19 nt, Artificial Sequence
  Description of Artificial Sequence: Synthetic oligonucleotide
uaugaguagcaccuuauua

SEQ ID NO: 1410423 - RNA, 19 nt, Artificial Sequence
  Description of Artificial Sequence: Synthetic oligonucleotide
uggggauugacugccaugg

SEQ ID NO: 1410424 - RNA, 19 nt, Artificial Sequence
  Description of Artificial Sequence: Synthetic oligonucleotide
acuggauuuuaucuauuag

SEQ ID NO: 1410425 - RNA, 19 nt, Artificial Sequence
  Description of Artificial Sequence: Synthetic oligonucleotide
agcuuuagcucucucuaac

SEQ ID NO: 1410426 - RNA, 19 nt, Artificial Sequence
  Description of Artificial Sequence: Synthetic oligonucleotide
cuuacuuauagcaaucuaa

SEQ ID NO: 1410427 - RNA, 19 nt, Artificial Sequence
  Description of Artificial Sequence: Synthetic oligonucleotide
uaagaagacuagauagucu

SEQ ID NO: 1410428 - RNA, 19 nt, Artificial Sequence
  Description of Artificial Sequence: Synthetic oligonucleotide
ucuauucuaugacaaaauu

SEQ ID NO: 1410429 - RNA, 19 nt, Artificial Sequence
  Description of Artificial Sequence: Synthetic oligonucleotide
ucaaucagaacuagagaaa

SEQ ID NO: 1410430 - RNA, 19 nt, Artificial Sequence
  Description of Artificial Sequence: Synthetic oligonucleotide
gauaguauaugaguagcac

SEQ ID NO: 1410431 - RNA, 19 nt, Artificial Sequence
  Description of Artificial Sequence: Synthetic oligonucleotide
ugacaguugucuuauagua

SEQ ID NO: 1410432 - RNA, 19 nt, Artificial Sequence
  Description of Artificial Sequence: Synthetic oligonucleotide
agacugaccugcuaaauga

SEQ ID NO: 1410433 - RNA, 19 nt, Artificial Sequence
  Description of Artificial Sequence: Synthetic oligonucleotide
  modified_base (9)..(9): a, c, u, g, unknown or other
auauauaunuguguguuau

SEQ ID NO: 1410434 - RNA, 19 nt, Artificial Sequence
  Description of Artificial Sequence: Synthetic oligonucleotide
gagauaguauaugaguagc

SEQ ID NO: 1410435 - RNA, 19 nt, Artificial Sequence
  Description of Artificial Sequence: Synthetic oligonucleotide
uaaccugaaaugcauguau

SEQ ID NO: 1410436 - RNA, 19 nt, Artificial Sequence
  Description of Artificial Sequence: Synthetic oligonucleotide
aaucccuacucaccucugg

SEQ ID NO: 1410437 - RNA, 19 nt, Artificial Sequence
  Description of Artificial Sequence: Synthetic oligonucleotide
augaacaugcuacucucag

SEQ ID NO: 1410438 - RNA, 19 nt, Artificial Sequence
  Description of Artificial Sequence: Synthetic oligonucleotide
agcaacauaaaucccuacu

SEQ ID NO: 1410439 - RNA, 19 nt, Artificial Sequence
  Description of Artificial Sequence: Synthetic oligonucleotide
cucgcuuuuguucagagca

SEQ ID NO: 1410440 - RNA, 19 nt, Artificial Sequence
  Description of Artificial Sequence: Synthetic oligonucleotide
aaugucaguucacaauaau

SEQ ID NO: 1410441 - RNA, 19 nt, Artificial Sequence
  Description of Artificial Sequence: Synthetic oligonucleotide
ucuagcuuuagcucucucu

SEQ ID NO: 1410442 - RNA, 19 nt, Artificial Sequence
  Description of Artificial Sequence: Synthetic oligonucleotide
ucaacauugguucccggaa

SEQ ID NO: 1410443 - RNA, 19 nt, Artificial Sequence
  Description of Artificial Sequence: Synthetic oligonucleotide
agucuucuggaguuguggg

SEQ ID NO: 1410444 - RNA, 19 nt, Artificial Sequence
  Description of Artificial Sequence: Synthetic oligonucleotide
gagaaauugcucuagggcu

SEQ ID NO: 1410445 - RNA, 19 nt, Artificial Sequence
  Description of Artificial Sequence: Synthetic oligonucleotide
ugucugacuggcauucucc

SEQ ID NO: 1410446 - RNA, 19 nt, Artificial Sequence
  Description of Artificial Sequence: Synthetic oligonucleotide
gaccaaauguacucugugc

SEQ ID NO: 1410447 - RNA, 19 nt, Artificial Sequence
  Description of Artificial Sequence: Synthetic oligonucleotide
uuaugaauucuuagagagu

SEQ ID NO: 1410448 - RNA, 19 nt, Artificial Sequence
  Description of Artificial Sequence: Synthetic oligonucleotide
uauaugaguagcaccuuau

SEQ ID NO: 1410449 - RNA, 19 nt, Artificial Sequence
  Description of Artificial Sequence: Synthetic oligonucleotide
aagacuagauagucugaca

SEQ ID NO: 1410450 - RNA, 19 nt, Artificial Sequence
  Description of Artificial Sequence: Synthetic oligonucleotide
aagggcucgcuuuuguuca

SEQ ID NO: 1410451 - RNA, 19 nt, Artificial Sequence
  Description of Artificial Sequence: Synthetic oligonucleotide
agaugauaugguaaaaugu

SEQ ID NO: 1410452 - RNA, 19 nt, Artificial Sequence
  Description of Artificial Sequence: Synthetic oligonucleotide
auuaaagauccucaaccaa

SEQ ID NO: 1410453 - RNA, 19 nt, Artificial Sequence
  Description of Artificial Sequence: Synthetic oligonucleotide
ucuuauaguaugagauagu

SEQ ID NO: 1410454 - RNA, 19 nt, Artificial Sequence
  Description of Artificial Sequence: Synthetic oligonucleotide
cuuaauuuauauauauaua

SEQ ID NO: 1410455 - RNA, 19 nt, Artificial Sequence
  Description of Artificial Sequence: Synthetic oligonucleotide
aaauggucucugucaauca

SEQ ID NO: 1410456 - RNA, 19 nt, Artificial Sequence
  Description of Artificial Sequence: Synthetic oligonucleotide
  modified_base (4)..(4): a, c, u, g, unknown or other
uaunuguguguuauauaua

SEQ ID NO: 1410457 - RNA, 19 nt, Artificial Sequence
  Description of Artificial Sequence: Synthetic oligonucleotide
aguuuuguuaggucccuug

SEQ ID NO: 1410458 - RNA, 19 nt, Artificial Sequence
  Description of Artificial Sequence: Synthetic oligonucleotide
uucauagauuauaaauaau

SEQ ID NO: 1410459 - RNA, 19 nt, Artificial Sequence
  Description of Artificial Sequence: Synthetic oligonucleotide
agggaucucauuaaagauc

SEQ ID NO: 1410460 - RNA, 19 nt, Artificial Sequence
  Description of Artificial Sequence: Synthetic oligonucleotide
gagaaaucacuucucugac

SEQ ID NO: 1410461 - RNA, 19 nt, Artificial Sequence
  Description of Artificial Sequence: Synthetic oligonucleotide
uguguguuauauauauaua

SEQ ID NO: 1410462 - RNA, 19 nt, Artificial Sequence
  Description of Artificial Sequence: Synthetic oligonucleotide
aaauguacucugugcauuu

SEQ ID NO: 1410463 - RNA, 19 nt, Artificial Sequence
  Description of Artificial Sequence: Synthetic oligonucleotide
agcugcaucacuuuacaau

SEQ ID NO: 1410464 - RNA, 19 nt, Artificial Sequence
  Description of Artificial Sequence: Synthetic oligonucleotide
uacaacuggauuuuaucua

SEQ ID NO: 1410465 - RNA, 19 nt, Artificial Sequence
  Description of Artificial Sequence: Synthetic oligonucleotide
uaguaugagauaguauaug

SEQ ID NO: 1410466 - RNA, 19 nt, Artificial Sequence
  Description of Artificial Sequence: Synthetic oligonucleotide
auucuuagagaguauuaau

SEQ ID NO: 1410467 - RNA, 19 nt, Artificial Sequence
  Description of Artificial Sequence: Synthetic oligonucleotide
uggacauuaauuggguucu

SEQ ID NO: 1410468 - RNA, 19 nt, Artificial Sequence
  Description of Artificial Sequence: Synthetic oligonucleotide
cucauuaaagauccucaac

SEQ ID NO: 1410469 - RNA, 19 nt, Artificial Sequence
  Description of Artificial Sequence: Synthetic oligonucleotide
auaaaucccuacucaccuc

SEQ ID NO: 1410470 - RNA, 19 nt, Artificial Sequence
  Description of Artificial Sequence: Synthetic oligonucleotide
cauuaaagauccucaacca

SEQ ID NO: 1410471 - RNA, 19 nt, Artificial Sequence
  Description of Artificial Sequence: Synthetic oligonucleotide
agucgaggaaaucagggaa

SEQ ID NO: 1410472 - RNA, 19 nt, Artificial Sequence
  Description of Artificial Sequence: Synthetic oligonucleotide
auaugguaaaauguauuca

SEQ ID NO: 1410473 - RNA, 19 nt, Artificial Sequence
  Description of Artificial Sequence: Synthetic oligonucleotide
  modified_base (6)..(6): a, c, u, g, unknown or other
uauaunuguguguuauaua

SEQ ID NO: 1410474 - RNA, 19 nt, Artificial Sequence
  Description of Artificial Sequence: Synthetic oligonucleotide
auuuauauauauauauaua

SEQ ID NO: 1410475 - RNA, 19 nt, Artificial Sequence
  Description of Artificial Sequence: Synthetic oligonucleotide
acaugcuacucucaguccu

SEQ ID NO: 1410476 - RNA, 19 nt, Artificial Sequence
  Description of Artificial Sequence: Synthetic oligonucleotide
gaugucuagcuuuagcucu

SEQ ID NO: 1410477 - RNA, 19 nt, Artificial Sequence
  Description of Artificial Sequence: Synthetic oligonucleotide
  modified_base (19)..(19): a, c, u, g, unknown or other
auauauauauauauauaun

SEQ ID NO: 1410478 - RNA, 19 nt, Artificial Sequence
  Description of Artificial Sequence: Synthetic oligonucleotide
gaagacuagauagucugac

SEQ ID NO: 1410479 - RNA, 19 nt, Artificial Sequence
  Description of Artificial Sequence: Synthetic oligonucleotide
acagucaggggccauauuu

SEQ ID NO: 1410480 - RNA, 19 nt, Artificial Sequence
  Description of Artificial Sequence: Synthetic oligonucleotide
ugucuuauaguaugagaua

SEQ ID NO: 1410481 - RNA, 19 nt, Artificial Sequence
  Description of Artificial Sequence: Synthetic oligonucleotide
guguuauauauauauauau

SEQ ID NO: 1410482 - RNA, 19 nt, Artificial Sequence
  Description of Artificial Sequence: Synthetic oligonucleotide
aguagcaccuuauuaugaa

SEQ ID NO: 1410483 - RNA, 19 nt, Artificial Sequence
  Description of Artificial Sequence: Synthetic oligonucleotide
guugucuuauaguaugaga

SEQ ID NO: 1410484 - RNA, 19 nt, Artificial Sequence
  Description of Artificial Sequence: Synthetic oligonucleotide
agucccuaggucaacauug

SEQ ID NO: 1410485 - RNA, 19 nt, Artificial Sequence
  Description of Artificial Sequence: Synthetic oligonucleotide
auacuuacuuauagcaauc

SEQ ID NO: 1410486 - RNA, 19 nt, Artificial Sequence
  Description of Artificial Sequence: Synthetic oligonucleotide
uucacuugccucuucccac

SEQ ID NO: 1410487 - RNA, 19 nt, Artificial Sequence
  Description of Artificial Sequence: Synthetic oligonucleotide
uggaccaaaagggaucuca

SEQ ID NO: 1410488 - RNA, 19 nt, Artificial Sequence
  Description of Artificial Sequence: Synthetic oligonucleotide
aauggaagagugcucccuu

SEQ ID NO: 1410489 - RNA, 19 nt, Artificial Sequence
  Description of Artificial Sequence: Synthetic oligonucleotide
aaauggaagagugcucccu

SEQ ID NO: 1410490 - RNA, 19 nt, Artificial Sequence
  Description of Artificial Sequence: Synthetic oligonucleotide
acauuaauuggguucuuuu

SEQ ID NO: 1410491 - RNA, 19 nt, Artificial Sequence
  Description of Artificial Sequence: Synthetic oligonucleotide
uaaugucaguucacaauaa

SEQ ID NO: 1410492 - RNA, 19 nt, Artificial Sequence
  Description of Artificial Sequence: Synthetic oligonucleotide
aaggucugauucugauguc

SEQ ID NO: 1410493 - RNA, 19 nt, Artificial Sequence
  Description of Artificial Sequence: Synthetic oligonucleotide
cucucucuaacaaaagcca

SEQ ID NO: 1410494 - RNA, 19 nt, Artificial Sequence
  Description of Artificial Sequence: Synthetic oligonucleotide
guguguuauauauauauau

SEQ ID NO: 1410495 - RNA, 19 nt, Artificial Sequence
  Description of Artificial Sequence: Synthetic oligonucleotide
ugaauucuuagagaguauu

SEQ ID NO: 1410496 - RNA, 19 nt, Artificial Sequence
  Description of Artificial Sequence: Synthetic oligonucleotide
aucucauuaaagauccuca

SEQ ID NO: 1410497 - RNA, 19 nt, Artificial Sequence
  Description of Artificial Sequence: Synthetic oligonucleotide
agcuuauuagaaaauugcu

SEQ ID NO: 1410498 - RNA, 19 nt, Artificial Sequence
  Description of Artificial Sequence: Synthetic oligonucleotide
ucucuaacaaaagccacau

SEQ ID NO: 1410499 - RNA, 19 nt, Artificial Sequence
  Description of Artificial Sequence: Synthetic oligonucleotide
cagccaaggacuucauugc

SEQ ID NO: 1410500 - RNA, 19 nt, Artificial Sequence
  Description of Artificial Sequence: Synthetic oligonucleotide
gaguauuaauacuuacuua

SEQ ID NO: 1410501 - RNA, 19 nt, Artificial Sequence
  Description of Artificial Sequence: Synthetic oligonucleotide
acuagauagucugacaguu

SEQ ID NO: 1410502 - RNA, 19 nt, Artificial Sequence
  Description of Artificial Sequence: Synthetic oligonucleotide
cugaccugcuaaaugaaca

SEQ ID NO: 1410503 - RNA, 19 nt, Artificial Sequence
  Description of Artificial Sequence: Synthetic oligonucleotide
uguugaguuuuguuagguc

SEQ ID NO: 1410504 - RNA, 19 nt, Artificial Sequence
  Description of Artificial Sequence: Synthetic oligonucleotide
ucaaccuaauagcaacaua

SEQ ID NO: 1410505 - RNA, 19 nt, Artificial Sequence
  Description of Artificial Sequence: Synthetic oligonucleotide
  modified_base (8)..(8): a, c, u, g, unknown or other
uauauaunuguguguuaua

SEQ ID NO: 1410506 - RNA, 19 nt, Artificial Sequence
  Description of Artificial Sequence: Synthetic oligonucleotide
aaguauuagcauguguaua

SEQ ID NO: 1410507 - RNA, 19 nt, Artificial Sequence
  Description of Artificial Sequence: Synthetic oligonucleotide
agaaauugcucuagggcug

SEQ ID NO: 1410508 - RNA, 19 nt, Artificial Sequence
  Description of Artificial Sequence: Synthetic oligonucleotide
  modified_base (2)..(2): a, c, u, g, unknown or other
unuguguguuauauauaua

SEQ ID NO: 1410509 - RNA, 19 nt, Artificial Sequence
  Description of Artificial Sequence: Synthetic oligonucleotide
aaagaauguacaacucuuu

SEQ ID NO: 1410510 - RNA, 19 nt, Artificial Sequence
  Description of Artificial Sequence: Synthetic oligonucleotide
ucaguccuuaauuuauaua

SEQ ID NO: 1410511 - RNA, 19 nt, Artificial Sequence
  Description of Artificial Sequence: Synthetic oligonucleotide
cuagauagucugacaguug

SEQ ID NO: 1410512 - RNA, 19 nt, Artificial Sequence
  Description of Artificial Sequence: Synthetic oligonucleotide
accugaaaugcauguauaa

SEQ ID NO: 1410513 - RNA, 19 nt, Artificial Sequence
  Description of Artificial Sequence: Synthetic oligonucleotide
cauguguauaauaguguca

SEQ ID NO: 1410514 - RNA, 19 nt, Artificial Sequence
  Description of Artificial Sequence: Synthetic oligonucleotide
agaaagagcagggaauuaa

SEQ ID NO: 1410515 - RNA, 19 nt, Artificial Sequence
  Description of Artificial Sequence: Synthetic oligonucleotide
guauucauuuaggacuaag

SEQ ID NO: 1410516 - RNA, 19 nt, Artificial Sequence
  Description of Artificial Sequence: Synthetic oligonucleotide
acccauuuucuauucuaug

SEQ ID NO: 1410517 - RNA, 19 nt, Artificial Sequence
  Description of Artificial Sequence: Synthetic oligonucleotide
ucgcuuuuguucagagcag

SEQ ID NO: 1410518 - RNA, 19 nt, Artificial Sequence
  Description of Artificial Sequence: Synthetic oligonucleotide
uacuuacuuauagcaaucu

SEQ ID NO: 1410519 - RNA, 19 nt, Artificial Sequence
  Description of Artificial Sequence: Synthetic oligonucleotide
ucccuuguguuuugguuug

SEQ ID NO: 1410520 - RNA, 19 nt, Artificial Sequence
  Description of Artificial Sequence: Synthetic oligonucleotide
acauugguucccggaaggc

SEQ ID NO: 1410521 - RNA, 19 nt, Artificial Sequence
  Description of Artificial Sequence: Synthetic oligonucleotide
ucgaggaaaucagggaagc

SEQ ID NO: 1410522 - RNA, 19 nt, Artificial Sequence
  Description of Artificial Sequence: Synthetic oligonucleotide
cugaccuuucacuugccuc

SEQ ID NO: 1410523 - RNA, 19 nt, Artificial Sequence
  Description of Artificial Sequence: Synthetic oligonucleotide
uucccaccaagaccaaaug

SEQ ID NO: 1410524 - RNA, 19 nt, Artificial Sequence
  Description of Artificial Sequence: Synthetic oligonucleotide
ggugcucagaaagagcagg

SEQ ID NO: 1410525 - RNA, 19 nt, Artificial Sequence
  Description of Artificial Sequence: Synthetic oligonucleotide
uacucugugcauuuauauu

SEQ ID NO: 1410526 - RNA, 19 nt, Artificial Sequence
  Description of Artificial Sequence: Synthetic oligonucleotide
acaagcuuauuagaaaauu

SEQ ID NO: 1410527 - RNA, 19 nt, Artificial Sequence
  Description of Artificial Sequence: Synthetic oligonucleotide
cuuauaguaugagauagua

SEQ ID NO: 1410528 - RNA, 19 nt, Artificial Sequence
  Description of Artificial Sequence: Synthetic oligonucleotide
aggacuaagaagacuagau

SEQ ID NO: 1410529 - RNA, 19 nt, Artificial Sequence
  Description of Artificial Sequence: Synthetic oligonucleotide
gcucucucuaacaaaagcc

SEQ ID NO: 1410530 - RNA, 19 nt, Artificial Sequence
  Description of Artificial Sequence: Synthetic oligonucleotide
auaguaugagauaguauau

SEQ ID NO: 1410531 - RNA, 19 nt, Artificial Sequence
  Description of Artificial Sequence: Synthetic oligonucleotide
ugaaaccuuccucccagau

SEQ ID NO: 1410532 - RNA, 19 nt, Artificial Sequence
  Description of Artificial Sequence: Synthetic oligonucleotide
caacauugguucccggaag

SEQ ID NO: 1410533 - RNA, 19 nt, Artificial Sequence
  Description of Artificial Sequence: Synthetic oligonucleotide
acuuacuuauagcaaucua

SEQ ID NO: 1410534 - RNA, 19 nt, Artificial Sequence
  Description of Artificial Sequence: Synthetic oligonucleotide
aaaagagauuaaauucaua

SEQ ID NO: 1410535 - RNA, 19 nt, Artificial Sequence
  Description of Artificial Sequence: Synthetic oligonucleotide
agcagacucuacaucauug

SEQ ID NO: 1410536 - RNA, 19 nt, Artificial Sequence
  Description of Artificial Sequence: Synthetic oligonucleotide
cuuagagaguauuaauacu

SEQ ID NO: 1410537 - RNA, 19 nt, Artificial Sequence
  Description of Artificial Sequence: Synthetic oligonucleotide
agaaagggcucgcuuuugu

SEQ ID NO: 1410538 - RNA, 19 nt, Artificial Sequence
  Description of Artificial Sequence: Synthetic oligonucleotide
gagaguauuaauacuuacu

SEQ ID NO: 1410539 - RNA, 19 nt, Artificial Sequence
  Description of Artificial Sequence: Synthetic oligonucleotide
agauaguauaugaguagca

SEQ ID NO: 1410540 - RNA, 19 nt, Artificial Sequence
  Description of Artificial Sequence: Synthetic oligonucleotide
agcauguguauaauagugu

SEQ ID NO: 1410541 - RNA, 19 nt, Artificial Sequence
  Description of Artificial Sequence: Synthetic oligonucleotide
acuuuacaaugguagugau

SEQ ID NO: 1410542 - RNA, 19 nt, Artificial Sequence
  Description of Artificial Sequence: Synthetic oligonucleotide
uguuaggucccuuguguuu

SEQ ID NO: 1410543 - RNA, 19 nt, Artificial Sequence
  Description of Artificial Sequence: Synthetic oligonucleotide
cuagcuuuagcucucucua

SEQ ID NO: 1410544 - RNA, 19 nt, Artificial Sequence
  Description of Artificial Sequence: Synthetic oligonucleotide
gucgaggaaaucagggaag

SEQ ID NO: 1410545 - RNA, 19 nt, Artificial Sequence
  Description of Artificial Sequence: Synthetic oligonucleotide
gucaacauugguucccgga

SEQ ID NO: 1410546 - RNA, 19 nt, Artificial Sequence
  Description of Artificial Sequence: Synthetic oligonucleotide
guccuuaauuuauauauau

SEQ ID NO: 1410547 - RNA, 19 nt, Artificial Sequence
  Description of Artificial Sequence: Synthetic oligonucleotide
auaugaguagcaccuuauu

SEQ ID NO: 1410548 - RNA, 19 nt, Artificial Sequence
  Description of Artificial Sequence: Synthetic oligonucleotide
gagggaucaggucuucaga

SEQ ID NO: 1410549 - RNA, 19 nt, Artificial Sequence
  Description of Artificial Sequence: Synthetic oligonucleotide
caaugguagugaucacagc

SEQ ID NO: 1410550 - RNA, 19 nt, Artificial Sequence
  Description of Artificial Sequence: Synthetic oligonucleotide
cugggugcucagaaagagc

SEQ ID NO: 1410551 - RNA, 19 nt, Artificial Sequence
  Description of Artificial Sequence: Synthetic oligonucleotide
gaauucuuagagaguauua

SEQ ID NO: 1410552 - RNA, 19 nt, Artificial Sequence
  Description of Artificial Sequence: Synthetic oligonucleotide
acucucaguccuuaauuua

SEQ ID NO: 1410553 - RNA, 19 nt, Artificial Sequence
  Description of Artificial Sequence: Synthetic oligonucleotide
aggucaacauugguucccg

SEQ ID NO: 1410554 - RNA, 19 nt, Artificial Sequence
  Description of Artificial Sequence: Synthetic oligonucleotide
auagucugacaguugucuu

SEQ ID NO: 1410555 - RNA, 19 nt, Artificial Sequence
  Description of Artificial Sequence: Synthetic oligonucleotide
guagugaucacagccaggu

SEQ ID NO: 1410556 - RNA, 19 nt, Artificial Sequence
  Description of Artificial Sequence: Synthetic oligonucleotide
aaacagucaggggccauau

SEQ ID NO: 1410557 - RNA, 19 nt, Artificial Sequence
  Description of Artificial Sequence: Synthetic oligonucleotide
guauaugaguagcaccuua

SEQ ID NO: 1410558 - RNA, 19 nt, Artificial Sequence
  Description of Artificial Sequence: Synthetic oligonucleotide
cuacaucauugaagagagg

SEQ ID NO: 1410559 - RNA, 19 nt, Artificial Sequence
  Description of Artificial Sequence: Synthetic oligonucleotide
uuguuaggucccuuguguu

SEQ ID NO: 1410560 - RNA, 19 nt, Artificial Sequence
  Description of Artificial Sequence: Synthetic oligonucleotide
uuacaaugguagugaucac

SEQ ID NO: 1410561 - RNA, 19 nt, Artificial Sequence
  Description of Artificial Sequence: Synthetic oligonucleotide
uagcuuuagcucucucuaa

SEQ ID NO: 1410562 - RNA, 19 nt, Artificial Sequence
  Description of Artificial Sequence: Synthetic oligonucleotide
aaccugaaaugcauguaua

SEQ ID NO: 1410563 - RNA, 19 nt, Artificial Sequence
  Description of Artificial Sequence: Synthetic oligonucleotide
auagcaacauaaaucccua

SEQ ID NO: 1410564 - RNA, 19 nt, Artificial Sequence
  Description of Artificial Sequence: Synthetic oligonucleotide
ugacuggcauucuccugug

SEQ ID NO: 1410565 - RNA, 19 nt, Artificial Sequence
  Description of Artificial Sequence: Synthetic oligonucleotide
acauuucauaaugccacaa

SEQ ID NO: 1410566 - RNA, 19 nt, Artificial Sequence
  Description of Artificial Sequence: Synthetic oligonucleotide
gagcuccacacaugaaauc

SEQ ID NO: 1410567 - RNA, 19 nt, Artificial Sequence
  Description of Artificial Sequence: Synthetic oligonucleotide
auagugucauggaaauggu

SEQ ID NO: 1410568 - RNA, 19 nt, Artificial Sequence
  Description of Artificial Sequence: Synthetic oligonucleotide
uaaacagucaggggccaua

SEQ ID NO: 1410569 - RNA, 19 nt, Artificial Sequence
  Description of Artificial Sequence: Synthetic oligonucleotide
gcaaucuaaagaaccuuug

SEQ ID NO: 1410570 - RNA, 19 nt, Artificial Sequence
  Description of Artificial Sequence: Synthetic oligonucleotide
agucaggggccauauuuua

SEQ ID NO: 1410571 - RNA, 19 nt, Artificial Sequence
  Description of Artificial Sequence: Synthetic oligonucleotide
guauuaauacuuacuuaua

SEQ ID NO: 1410572 - RNA, 19 nt, Artificial Sequence
  Description of Artificial Sequence: Synthetic oligonucleotide
uucccggaaggcagucgag

SEQ ID NO: 1410573 - RNA, 19 nt, Artificial Sequence
  Description of Artificial Sequence: Synthetic oligonucleotide
guucccggaaggcagucga

SEQ ID NO: 1410574 - RNA, 19 nt, Artificial Sequence
  Description of Artificial Sequence: Synthetic oligonucleotide
auaaccugaaaugcaugua

SEQ ID NO: 1410575 - RNA, 19 nt, Artificial Sequence
  Description of Artificial Sequence: Synthetic oligonucleotide
aaaucccuacucaccucug

SEQ ID NO: 1410576 - RNA, 19 nt, Artificial Sequence
  Description of Artificial Sequence: Synthetic oligonucleotide
guuuuguuaggucccuugu

SEQ ID NO: 1410577 - RNA, 19 nt, Artificial Sequence
  Description of Artificial Sequence: Synthetic oligonucleotide
aauguacucugugcauuua

SEQ ID NO: 1410578 - RNA, 19 nt, Artificial Sequence
  Description of Artificial Sequence: Synthetic oligonucleotide
aggcagucgaggaaaucag

SEQ ID NO: 1410579 - RNA, 19 nt, Artificial Sequence
  Description of Artificial Sequence: Synthetic oligonucleotide
cugacaguugucuuauagu

SEQ ID NO: 1410580 - RNA, 19 nt, Artificial Sequence
  Description of Artificial Sequence: Synthetic oligonucleotide
caucucguccauguugcug

SEQ ID NO: 1410581 - RNA, 19 nt, Artificial Sequence
  Description of Artificial Sequence: Synthetic oligonucleotide
aguaaacagucaggggcca

SEQ ID NO: 1410582 - RNA, 19 nt, Artificial Sequence
  Description of Artificial Sequence: Synthetic oligonucleotide
aagcgggucugcuggggau

SEQ ID NO: 1410583 - RNA, 19 nt, Artificial Sequence
  Description of Artificial Sequence: Synthetic oligonucleotide
aguccuuaauuuauauaua

SEQ ID NO: 1410584 - RNA, 19 nt, Artificial Sequence
  Description of Artificial Sequence: Synthetic oligonucleotide
ggacuaagaagacuagaua

SEQ ID NO: 1410585 - RNA, 19 nt, Artificial Sequence
  Description of Artificial Sequence: Synthetic oligonucleotide
ccuacucaccucugggugc

SEQ ID NO: 1410586 - RNA, 19 nt, Artificial Sequence
  Description of Artificial Sequence: Synthetic oligonucleotide
uugcuagugcagguagacu

SEQ ID NO: 1410587 - RNA, 19 nt, Artificial Sequence
  Description of Artificial Sequence: Synthetic oligonucleotide
gugucugacuggcauucuc

SEQ ID NO: 1410588 - RNA, 19 nt, Artificial Sequence
  Description of Artificial Sequence: Synthetic oligonucleotide
ccacaagcuuauuagaaaa

SEQ ID NO: 1410589 - RNA, 19 nt, Artificial Sequence
  Description of Artificial Sequence: Synthetic oligonucleotide
gaguuguggggacacugua

SEQ ID NO: 1410590 - RNA, 19 nt, Artificial Sequence
  Description of Artificial Sequence: Synthetic oligonucleotide
gcuaaaugaacaugcuacu

SEQ ID NO: 1410591 - RNA, 19 nt, Artificial Sequence
  Description of Artificial Sequence: Synthetic oligonucleotide
gguagugaucacagccagg

SEQ ID NO: 1410592 - RNA, 19 nt, Artificial Sequence
  Description of Artificial Sequence: Synthetic oligonucleotide
aguauaugaguagcaccuu

SEQ ID NO: 1410593 - RNA, 19 nt, Artificial Sequence
  Description of Artificial Sequence: Synthetic oligonucleotide
ggaagagugcucccuuuca

SEQ ID NO: 1410594 - RNA, 19 nt, Artificial Sequence
  Description of Artificial Sequence: Synthetic oligonucleotide
agagagggaucaggucuuc

SEQ ID NO: 1410595 - RNA, 19 nt, Artificial Sequence
  Description of Artificial Sequence: Synthetic oligonucleotide
cauugguucccggaaggca

SEQ ID NO: 1410596 - RNA, 19 nt, Artificial Sequence
  Description of Artificial Sequence: Synthetic oligonucleotide
uguauucauuuaggacuaa

SEQ ID NO: 1410597 - RNA, 19 nt, Artificial Sequence
  Description of Artificial Sequence: Synthetic oligonucleotide
ggcucgcuuuuguucagag

SEQ ID NO: 1410598 - RNA, 19 nt, Artificial Sequence
  Description of Artificial Sequence: Synthetic oligonucleotide
cucugaccuuucacuugcc

SEQ ID NO: 1410599 - RNA, 19 nt, Artificial Sequence
  Description of Artificial Sequence: Synthetic oligonucleotide
auucugaugucuagcuuua

SEQ ID NO: 1410600 - RNA, 19 nt, Artificial Sequence
  Description of Artificial Sequence: Synthetic oligonucleotide
ugcuacucucaguccuuaa

SEQ ID NO: 1410601 - RNA, 19 nt, Artificial Sequence
  Description of Artificial Sequence: Synthetic oligonucleotide
ggggccauauuuuauucua

SEQ ID NO: 1410602 - RNA, 19 nt, Artificial Sequence
  Description of Artificial Sequence: Synthetic oligonucleotide
gguagacugaccugcuaaa

SEQ ID NO: 1410603 - RNA, 19 nt, Artificial Sequence
  Description of Artificial Sequence: Synthetic oligonucleotide
augaauucuuagagaguau

SEQ ID NO: 1410604 - RNA, 19 nt, Artificial Sequence
  Description of Artificial Sequence: Synthetic oligonucleotide
gacugaccugcuaaaugaa

SEQ ID NO: 1410605 - RNA, 19 nt, Artificial Sequence
  Description of Artificial Sequence: Synthetic oligonucleotide
cucaguccuuaauuuauau

SEQ ID NO: 1410606 - RNA, 19 nt, Artificial Sequence
  Description of Artificial Sequence: Synthetic oligonucleotide
guagcaccuuauuaugaau

SEQ ID NO: 1410607 - RNA, 19 nt, Artificial Sequence
  Description of Artificial Sequence: Synthetic oligonucleotide
cccuacucaccucugggug

SEQ ID NO: 1410608 - RNA, 19 nt, Artificial Sequence
  Description of Artificial Sequence: Synthetic oligonucleotide
cuacucucaguccuuaauu

SEQ ID NO: 1410609 - RNA, 19 nt, Artificial Sequence
  Description of Artificial Sequence: Synthetic oligonucleotide
cacaagcuuauuagaaaau

SEQ ID NO: 1410610 - RNA, 19 nt, Artificial Sequence
  Description of Artificial Sequence: Synthetic oligonucleotide
gcuuauuagaaaauugcuu

SEQ ID NO: 1410611 - RNA, 19 nt, Artificial Sequence
  Description of Artificial Sequence: Synthetic oligonucleotide
cucccagauucuugauguc

SEQ ID NO: 1410612 - RNA, 19 nt, Artificial Sequence
  Description of Artificial Sequence: Synthetic oligonucleotide
ggguucuuuucaggaaaag

SEQ ID NO: 1410613 - RNA, 19 nt, Artificial Sequence
  Description of Artificial Sequence: Synthetic oligonucleotide
gccaugggugucugacugg

SEQ ID NO: 1410614 - RNA, 19 nt, Artificial Sequence
  Description of Artificial Sequence: Synthetic oligonucleotide
caccaagaccaaauguacu

SEQ ID NO: 1410615 - RNA, 19 nt, Artificial Sequence
  Description of Artificial Sequence: Synthetic oligonucleotide
gcucgcuuuuguucagagc

SEQ ID NO: 1410616 - RNA, 19 nt, Artificial Sequence
  Description of Artificial Sequence: Synthetic oligonucleotide
auggaccaaaagggaucuc

SEQ ID NO: 1410617 - RNA, 19 nt, Artificial Sequence
  Description of Artificial Sequence: Synthetic oligonucleotide
acccucguggaaauugaaa

SEQ ID NO: 1410618 - RNA, 19 nt, Artificial Sequence
  Description of Artificial Sequence: Synthetic oligonucleotide
ccucagaaagaauguacaa

SEQ ID NO: 1410619 - RNA, 19 nt, Artificial Sequence
  Description of Artificial Sequence: Synthetic oligonucleotide
ccaugggugucugacuggc

SEQ ID NO: 1410620 - RNA, 19 nt, Artificial Sequence
  Description of Artificial Sequence: Synthetic oligonucleotide
aggugagaaagggcucgcu

SEQ ID NO: 1410621 - RNA, 19 nt, Artificial Sequence
  Description of Artificial Sequence: Synthetic oligonucleotide
gucuagcuuuagcucucuc

SEQ ID NO: 1410622 - RNA, 19 nt, Artificial Sequence
  Description of Artificial Sequence: Synthetic oligonucleotide
guauuagcauguguauaau

SEQ ID NO: 1410623 - RNA, 19 nt, Artificial Sequence
  Description of Artificial Sequence: Synthetic oligonucleotide
cuccuguguccaucucguc

SEQ ID NO: 1410624 - RNA, 19 nt, Artificial Sequence
  Description of Artificial Sequence: Synthetic oligonucleotide
guagacugaccugcuaaau

SEQ ID NO: 1410625 - RNA, 19 nt, Artificial Sequence
  Description of Artificial Sequence: Synthetic oligonucleotide
gggugcucagaaagagcag

SEQ ID NO: 1410626 - RNA, 19 nt, Artificial Sequence
  Description of Artificial Sequence: Synthetic oligonucleotide
gcuacucucaguccuuaau

SEQ ID NO: 1410627 - RNA, 19 nt, Artificial Sequence
  Description of Artificial Sequence: Synthetic oligonucleotide
ugguucccggaaggcaguc

SEQ ID NO: 1410628 - RNA, 19 nt, Artificial Sequence
  Description of Artificial Sequence: Synthetic oligonucleotide
augcuacucucaguccuua

SEQ ID NO: 1410629 - RNA, 19 nt, Artificial Sequence
  Description of Artificial Sequence: Synthetic oligonucleotide
cagucaggggccauauuuu

SEQ ID NO: 1410630 - RNA, 19 nt, Artificial Sequence
  Description of Artificial Sequence: Synthetic oligonucleotide
ggucccuuguguuuugguu

SEQ ID NO: 1410631 - RNA, 19 nt, Artificial Sequence
  Description of Artificial Sequence: Synthetic oligonucleotide
gcaucacuuuacaauggua

SEQ ID NO: 1410632 - RNA, 19 nt, Artificial Sequence
  Description of Artificial Sequence: Synthetic oligonucleotide
gcucccuuucaaccuaaua

SEQ ID NO: 1410633 - RNA, 19 nt, Artificial Sequence
  Description of Artificial Sequence: Synthetic oligonucleotide
agcgggucugcuggggauu

SEQ ID NO: 1410634 - RNA, 19 nt, Artificial Sequence
  Description of Artificial Sequence: Synthetic oligonucleotide
caaggacuucauugcuagu

SEQ ID NO: 1410635 - RNA, 19 nt, Artificial Sequence
  Description of Artificial Sequence: Synthetic oligonucleotide
ccaaagucccuaggucaac

SEQ ID NO: 1410636 - RNA, 19 nt, Artificial Sequence
  Description of Artificial Sequence: Synthetic oligonucleotide
cccuaggucaacauugguu

SEQ ID NO: 1410637 - RNA, 19 nt, Artificial Sequence
  Description of Artificial Sequence: Synthetic oligonucleotide
guaaacagucaggggccau

SEQ ID NO: 1410638 - RNA, 19 nt, Artificial Sequence
  Description of Artificial Sequence: Synthetic oligonucleotide
gcgggucugcuggggauug

SEQ ID NO: 1410639 - RNA, 19 nt, Artificial Sequence
  Description of Artificial Sequence: Synthetic oligonucleotide
gcccucacccucguggaaa

SEQ ID NO: 1410640 - RNA, 19 nt, Artificial Sequence
  Description of Artificial Sequence: Synthetic oligonucleotide
gggcucgcuuuuguucaga

SEQ ID NO: 1410641 - RNA, 19 nt, Artificial Sequence
  Description of Artificial Sequence: Synthetic oligonucleotide
gcagguagacugaccugcu

SEQ ID NO: 1410642 - RNA, 19 nt, Artificial Sequence
  Description of Artificial Sequence: Synthetic oligonucleotide
aaauaguccccucucaucc

SEQ ID NO: 1410643 - RNA, 19 nt, Artificial Sequence
  Description of Artificial Sequence: Synthetic oligonucleotide
cauaugaucauauucaacc

SEQ ID NO: 1410644 - RNA, 19 nt, Artificial Sequence
  Description of Artificial Sequence: Synthetic oligonucleotide
uaagauaagauuauuauaa

SEQ ID NO: 1410645 - RNA, 19 nt, Artificial Sequence
  Description of Artificial Sequence: Synthetic oligonucleotide
aauuuggugaaucaaagca

SEQ ID NO: 1410646 - RNA, 19 nt, Artificial Sequence
  Description of Artificial Sequence: Synthetic oligonucleotide
aauucuaucauauguaaga

SEQ ID NO: 1410647 - RNA, 19 nt, Artificial Sequence
  Description of Artificial Sequence: Synthetic oligonucleotide
auauucaaccauuaauugc

SEQ ID NO: 1410648 - RNA, 19 nt, Artificial Sequence
  Description of Artificial Sequence: Synthetic oligonucleotide
ucuaucauauguaagaaaa

SEQ ID NO: 1410649 - RNA, 19 nt, Artificial Sequence
  Description of Artificial Sequence: Synthetic oligonucleotide
uauucaaccauuaauugcu

SEQ ID NO: 1410650 - RNA, 19 nt, Artificial Sequence
  Description of Artificial Sequence: Synthetic oligonucleotide
agagauuacauuuauuuug

SEQ ID NO: 1410651 - RNA, 19 nt, Artificial Sequence
  Description of Artificial Sequence: Synthetic oligonucleotide
aaagcuuuuagaaaauagg

SEQ ID NO: 1410652 - RNA, 19 nt, Artificial Sequence
  Description of Artificial Sequence: Synthetic oligonucleotide
gacuacaacaaucagggag

SEQ ID NO: 1410653 - RNA, 19 nt, Artificial Sequence
  Description of Artificial Sequence: Synthetic oligonucleotide
uauguguaagauaagauua

SEQ ID NO: 1410654 - RNA, 19 nt, Artificial Sequence
  Description of Artificial Sequence: Synthetic oligonucleotide
gauucuacacuauaugagc

SEQ ID NO: 1410655 - RNA, 19 nt, Artificial Sequence
  Description of Artificial Sequence: Synthetic oligonucleotide
uaaauugcuucauagagaa

SEQ ID NO: 1410656 - RNA, 19 nt, Artificial Sequence
  Description of Artificial Sequence: Synthetic oligonucleotide
uguaagauaagauuauuau

SEQ ID NO: 1410657 - RNA, 19 nt, Artificial Sequence
  Description of Artificial Sequence: Synthetic oligonucleotide
cuugaaaagagucauauga

SEQ ID NO: 1410658 - RNA, 19 nt, Artificial Sequence
  Description of Artificial Sequence: Synthetic oligonucleotide
uaaaucaccgaguagagau

SEQ ID NO: 1410659 - RNA, 19 nt, Artificial Sequence
  Description of Artificial Sequence: Synthetic oligonucleotide
auuauaauguauuucacuu

SEQ ID NO: 1410660 - RNA, 19 nt, Artificial Sequence
  Description of Artificial Sequence: Synthetic oligonucleotide
augcacauaaccaagcucc

SEQ ID NO: 1410661 - RNA, 19 nt, Artificial Sequence
  Description of Artificial Sequence: Synthetic oligonucleotide
uuuugucuaauacucaacu

SEQ ID NO: 1410662 - RNA, 19 nt, Artificial Sequence
  Description of Artificial Sequence: Synthetic oligonucleotide
uugucuaauacucaacucu

SEQ ID NO: 1410663 - RNA, 19 nt, Artificial Sequence
  Description of Artificial Sequence: Synthetic oligonucleotide
ucuuagagacuacaucucg

SEQ ID NO: 1410664 - RNA, 19 nt, Artificial Sequence
  Description of Artificial Sequence: Synthetic oligonucleotide
ugaacuacagauucuacac

SEQ ID NO: 1410665 - RNA, 19 nt, Artificial Sequence
  Description of Artificial Sequence: Synthetic oligonucleotide
gaagacuacaacaaucagg

SEQ ID NO: 1410666 - RNA, 19 nt, Artificial Sequence
  Description of Artificial Sequence: Synthetic oligonucleotide
aacauccuauaucugggac

SEQ ID NO: 1410667 - RNA, 19 nt, Artificial Sequence
  Description of Artificial Sequence: Synthetic oligonucleotide
cauagagaaauccagugag

SEQ ID NO: 1410668 - RNA, 19 nt, Artificial Sequence
  Description of Artificial Sequence: Synthetic oligonucleotide
auauaaacugauuuugugu

SEQ ID NO: 1410669 - RNA, 19 nt, Artificial Sequence
  Description of Artificial Sequence: Synthetic oligonucleotide
cucuuuucgauucuuaagc

SEQ ID NO: 1410670 - RNA, 19 nt, Artificial Sequence
  Description of Artificial Sequence: Synthetic oligonucleotide
uuccuuucuacgcuuacgg

SEQ ID NO: 1410671 - RNA, 19 nt, Artificial Sequence
  Description of Artificial Sequence: Synthetic oligonucleotide
uguucaacgucauuagaag

SEQ ID NO: 1410672 - RNA, 19 nt, Artificial Sequence
  Description of Artificial Sequence: Synthetic oligonucleotide
acugauuuugugugaagac

SEQ ID NO: 1410673 - RNA, 19 nt, Artificial Sequence
  Description of Artificial Sequence: Synthetic oligonucleotide
ugaaacuuuuaaaacuaug

SEQ ID NO: 1410674 - RNA, 19 nt, Artificial Sequence
  Description of Artificial Sequence: Synthetic oligonucleotide
agcaaucacacuaaauucc

SEQ ID NO: 1410675 - RNA, 19 nt, Artificial Sequence
  Description of Artificial Sequence: Synthetic oligonucleotide
ggugaaucaaagcagagcc

SEQ ID NO: 1410676 - RNA, 19 nt, Artificial Sequence
  Description of Artificial Sequence: Synthetic oligonucleotide
uaagauuauuauaauguau

SEQ ID NO: 1410677 - RNA, 19 nt, Artificial Sequence
  Description of Artificial Sequence: Synthetic oligonucleotide
ugaucaaacauccuauauc

SEQ ID NO: 1410678 - RNA, 19 nt, Artificial Sequence
  Description of Artificial Sequence: Synthetic oligonucleotide
aggaaaguaaucuccaugu

SEQ ID NO: 1410679 - RNA, 19 nt, Artificial Sequence
  Description of Artificial Sequence: Synthetic oligonucleotide
aaacagauucguuaauccu

SEQ ID NO: 1410680 - RNA, 19 nt, Artificial Sequence
  Description of Artificial Sequence: Synthetic oligonucleotide
ucaaccauuaauugcuuca

SEQ ID NO: 1410681 - RNA, 19 nt, Artificial Sequence
  Description of Artificial Sequence: Synthetic oligonucleotide
gaagucgaaacuucugucc

SEQ ID NO: 1410682 - RNA, 19 nt, Artificial Sequence
  Description of Artificial Sequence: Synthetic oligonucleotide
acaaucagggagcuaaauc

SEQ ID NO: 1410683 - RNA, 19 nt, Artificial Sequence
  Description of Artificial Sequence: Synthetic oligonucleotide
cuuucuacgcuuacggucc

SEQ ID NO: 1410684 - RNA, 19 nt, Artificial Sequence
  Description of Artificial Sequence: Synthetic oligonucleotide
acuacugaaggaucguggg

SEQ ID NO: 1410685 - RNA, 19 nt, Artificial Sequence
  Description of Artificial Sequence: Synthetic oligonucleotide
ugaaacacgucuuuggcuc

SEQ ID NO: 1410686 - RNA, 19 nt, Artificial Sequence
  Description of Artificial Sequence: Synthetic oligonucleotide
gaaaagagucauaugauca

SEQ ID NO: 1410687 - RNA, 19 nt, Artificial Sequence
  Description of Artificial Sequence: Synthetic oligonucleotide
aagcuuuuagaaaauagga

SEQ ID NO: 1410688 - RNA, 19 nt, Artificial Sequence
  Description of Artificial Sequence: Synthetic oligonucleotide
ugacuaaggagcuucaaaa

SEQ ID NO: 1410689 - RNA, 19 nt, Artificial Sequence
  Description of Artificial Sequence: Synthetic oligonucleotide
uuuucgauucuuaagcuuu

SEQ ID NO: 1410690 - RNA, 19 nt, Artificial Sequence
  Description of Artificial Sequence: Synthetic oligonucleotide
auucuacacuauaugagcc

SEQ ID NO: 1410691 - RNA, 19 nt, Artificial Sequence
  Description of Artificial Sequence: Synthetic oligonucleotide
ucaacgucauuagaagucg

SEQ ID NO: 1410692 - RNA, 19 nt, Artificial Sequence
  Description of Artificial Sequence: Synthetic oligonucleotide
uuguuuaaauccauuuccu

SEQ ID NO: 1410693 - RNA, 19 nt, Artificial Sequence
  Description of Artificial Sequence: Synthetic oligonucleotide
cuuagagacuacaucucgg

SEQ ID NO: 1410694 - RNA, 19 nt, Artificial Sequence
  Description of Artificial Sequence: Synthetic oligonucleotide
aagacucugaaacuuuuaa

SEQ ID NO: 1410695 - RNA, 19 nt, Artificial Sequence
  Description of Artificial Sequence: Synthetic oligonucleotide
uuagaagucgaaacuucug

SEQ ID NO: 1410696 - RNA, 19 nt, Artificial Sequence
  Description of Artificial Sequence: Synthetic oligonucleotide
aagauaagauuauuauaau

SEQ ID NO: 1410697 - RNA, 19 nt, Artificial Sequence
  Description of Artificial Sequence: Synthetic oligonucleotide
aaagugaagacuacaacaa

SEQ ID NO: 1410698 - RNA, 19 nt, Artificial Sequence
  Description of Artificial Sequence: Synthetic oligonucleotide
ugguaaauugacaguagcu

SEQ ID NO: 1410699 - RNA, 19 nt, Artificial Sequence
  Description of Artificial Sequence: Synthetic oligonucleotide
agaaacagauucguuaauc

SEQ ID NO: 1410700 - RNA, 19 nt, Artificial Sequence
  Description of Artificial Sequence: Synthetic oligonucleotide
agcucagagagucuaaucu

SEQ ID NO: 1410701 - RNA, 19 nt, Artificial Sequence
  Description of Artificial Sequence: Synthetic oligonucleotide
aaauccaaggauagacugg

SEQ ID NO: 1410702 - RNA, 19 nt, Artificial Sequence
  Description of Artificial Sequence: Synthetic oligonucleotide
uauuucacuuuccaaccca

SEQ ID NO: 1410703 - RNA, 19 nt, Artificial Sequence
  Description of Artificial Sequence: Synthetic oligonucleotide
caaucagggagcuaaauca

SEQ ID NO: 1410704 - RNA, 19 nt, Artificial Sequence
  Description of Artificial Sequence: Synthetic oligonucleotide
ucuaaucucagcuuuccau

SEQ ID NO: 1410705 - RNA, 19 nt, Artificial Sequence
  Description of Artificial Sequence: Synthetic oligonucleotide
uugaaaagagucauaugau

SEQ ID NO: 1410706 - RNA, 19 nt, Artificial Sequence
  Description of Artificial Sequence: Synthetic oligonucleotide
uguacuguccuguacaguu

SEQ ID NO: 1410707 - RNA, 19 nt, Artificial Sequence
  Description of Artificial Sequence: Synthetic oligonucleotide
auagacuggucccaaagca

SEQ ID NO: 1410708 - RNA, 19 nt, Artificial Sequence
  Description of Artificial Sequence: Synthetic oligonucleotide
aacuacugaaggaucgugg

SEQ ID NO: 1410709 - RNA, 19 nt, Artificial Sequence
  Description of Artificial Sequence: Synthetic oligonucleotide
guaaauugacaguagcuca

SEQ ID NO: 1410710 - RNA, 19 nt, Artificial Sequence
  Description of Artificial Sequence: Synthetic oligonucleotide
aaagggaaauucuaucaua

SEQ ID NO: 1410711 - RNA, 19 nt, Artificial Sequence
  Description of Artificial Sequence: Synthetic oligonucleotide
aauccaaggauagacuggu

SEQ ID NO: 1410712 - RNA, 19 nt, Artificial Sequence
  Description of Artificial Sequence: Synthetic oligonucleotide
acauaggaaagugauauga

SEQ ID NO: 1410713 - RNA, 19 nt, Artificial Sequence
  Description of Artificial Sequence: Synthetic oligonucleotide
uaaucuccauguuggaaag

SEQ ID NO: 1410714 - RNA, 19 nt, Artificial Sequence
  Description of Artificial Sequence: Synthetic oligonucleotide
auaugaucauauucaacca

SEQ ID NO: 1410715 - RNA, 19 nt, Artificial Sequence
  Description of Artificial Sequence: Synthetic oligonucleotide
uacagauucuacacuauau

SEQ ID NO: 1410716 - RNA, 19 nt, Artificial Sequence
  Description of Artificial Sequence: Synthetic oligonucleotide
auaauuccacuaccacugc

SEQ ID NO: 1410717 - RNA, 19 nt, Artificial Sequence
  Description of Artificial Sequence: Synthetic oligonucleotide
uacacuauaugagccacag

SEQ ID NO: 1410718 - RNA, 19 nt, Artificial Sequence
  Description of Artificial Sequence: Synthetic oligonucleotide
uguauucuuguugacuaag

SEQ ID NO: 1410719 - RNA, 19 nt, Artificial Sequence
  Description of Artificial Sequence: Synthetic oligonucleotide
ugucugugaacuacugaag

SEQ ID NO: 1410720 - RNA, 19 nt, Artificial Sequence
  Description of Artificial Sequence: Synthetic oligonucleotide
agauucuacacuauaugag

SEQ ID NO: 1410721 - RNA, 19 nt, Artificial Sequence
  Description of Artificial Sequence: Synthetic oligonucleotide
ucauaugaucauauucaac

SEQ ID NO: 1410722 - RNA, 19 nt, Artificial Sequence
  Description of Artificial Sequence: Synthetic oligonucleotide
cuuucuuagagacuacauc

SEQ ID NO: 1410723 - RNA, 19 nt, Artificial Sequence
  Description of Artificial Sequence: Synthetic oligonucleotide
cauguuauuucaguugagc

SEQ ID NO: 1410724 - RNA, 19 nt, Artificial Sequence
  Description of Artificial Sequence: Synthetic oligonucleotide
uugaggaucaauggcacug

SEQ ID NO: 1410725 - RNA, 19 nt, Artificial Sequence
  Description of Artificial Sequence: Synthetic oligonucleotide
aaacugauuuugugugaag

SEQ ID NO: 1410726 - RNA, 19 nt, Artificial Sequence
  Description of Artificial Sequence: Synthetic oligonucleotide
auuuggugaaucaaagcag

SEQ ID NO: 1410727 - RNA, 19 nt, Artificial Sequence
  Description of Artificial Sequence: Synthetic oligonucleotide
aguagaggugcuugugaac

SEQ ID NO: 1410728 - RNA, 19 nt, Artificial Sequence
  Description of Artificial Sequence: Synthetic oligonucleotide
ugaguagaggugcuuguga

SEQ ID NO: 1410729 - RNA, 19 nt, Artificial Sequence
  Description of Artificial Sequence: Synthetic oligonucleotide
auaauguauuucacuuucc

SEQ ID NO: 1410730 - RNA, 19 nt, Artificial Sequence
  Description of Artificial Sequence: Synthetic oligonucleotide
cacauaaccaagcuccuug

SEQ ID NO: 1410731 - RNA, 19 nt, Artificial Sequence
  Description of Artificial Sequence: Synthetic oligonucleotide
cacaguuguauucuuguug

SEQ ID NO: 1410732 - RNA, 19 nt, Artificial Sequence
  Description of Artificial Sequence: Synthetic oligonucleotide
cugguaaauugacaguagc

SEQ ID NO: 1410733 - RNA, 19 nt, Artificial Sequence
  Description of Artificial Sequence: Synthetic oligonucleotide
uuggcucuaagccucuggc

SEQ ID NO: 1410734 - RNA, 19 nt, Artificial Sequence
  Description of Artificial Sequence: Synthetic oligonucleotide
guaaucuccauguuggaaa

SEQ ID NO: 1410735 - RNA, 19 nt, Artificial Sequence
  Description of Artificial Sequence: Synthetic oligonucleotide
ucacacuaaauuccucaug

SEQ ID NO: 1410736 - RNA, 19 nt, Artificial Sequence
  Description of Artificial Sequence: Synthetic oligonucleotide
ucguggguaccuaugguug

SEQ ID NO: 1410737 - RNA, 19 nt, Artificial Sequence
  Description of Artificial Sequence: Synthetic oligonucleotide
uuggugaaucaaagcagag

SEQ ID NO: 1410738 - RNA, 19 nt, Artificial Sequence
  Description of Artificial Sequence: Synthetic oligonucleotide
ugugaacuacugaaggauc

SEQ ID NO: 1410739 - RNA, 19 nt, Artificial Sequence
  Description of Artificial Sequence: Synthetic oligonucleotide
uaaucucagcuuuccauga

SEQ ID NO: 1410740 - RNA, 19 nt, Artificial Sequence
  Description of Artificial Sequence: Synthetic oligonucleotide
auuuugucuaauacucaac

SEQ ID NO: 1410741 - RNA, 19 nt, Artificial Sequence
  Description of Artificial Sequence: Synthetic oligonucleotide
uaaccacuggggcaagcgg

SEQ ID NO: 1410742 - RNA, 19 nt, Artificial Sequence
  Description of Artificial Sequence: Synthetic oligonucleotide
uccagaaguuaaaauacuu

SEQ ID NO: 1410743 - RNA, 19 nt, Artificial Sequence
  Description of Artificial Sequence: Synthetic oligonucleotide
guaagauaagauuauuaua

SEQ ID NO: 1410744 - RNA, 19 nt, Artificial Sequence
  Description of Artificial Sequence: Synthetic oligonucleotide
ucgauucuuaagcuuuucu

SEQ ID NO: 1410745 - RNA, 19 nt, Artificial Sequence
  Description of Artificial Sequence: Synthetic oligonucleotide
cauguuggaaagcaaucac

SEQ ID NO: 1410746 - RNA, 19 nt, Artificial Sequence
  Description of Artificial Sequence: Synthetic oligonucleotide
uuuccucucguguuugggc

SEQ ID NO: 1410747 - RNA, 19 nt, Artificial Sequence
  Description of Artificial Sequence: Synthetic oligonucleotide
uuuccuuucuacgcuuacg

SEQ ID NO: 1410748 - RNA, 19 nt, Artificial Sequence
  Description of Artificial Sequence: Synthetic oligonucleotide
ucguuaauccuccaauuuu

SEQ ID NO: 1410749 - RNA, 19 nt, Artificial Sequence
  Description of Artificial Sequence: Synthetic oligonucleotide
uagagauuacauuuauuuu

SEQ ID NO: 1410750 - RNA, 19 nt, Artificial Sequence
  Description of Artificial Sequence: Synthetic oligonucleotide
uucguuaauccuccaauuu

SEQ ID NO: 1410751 - RNA, 19 nt, Artificial Sequence
  Description of Artificial Sequence: Synthetic oligonucleotide
acgcuuacgguccucuuuc

SEQ ID NO: 1410752 - RNA, 19 nt, Artificial Sequence
  Description of Artificial Sequence: Synthetic oligonucleotide
uucuaucauauguaagaaa

SEQ ID NO: 1410753 - RNA, 19 nt, Artificial Sequence
  Description of Artificial Sequence: Synthetic oligonucleotide
acauccuauaucugggacu

SEQ ID NO: 1410754 - RNA, 19 nt, Artificial Sequence
  Description of Artificial Sequence: Synthetic oligonucleotide
agauuacauuuauuuuguc

SEQ ID NO: 1410755 - RNA, 19 nt, Artificial Sequence
  Description of Artificial Sequence: Synthetic oligonucleotide
agggagcuaaaucaccgag

SEQ ID NO: 1410756 - RNA, 19 nt, Artificial Sequence
  Description of Artificial Sequence: Synthetic oligonucleotide
uguguuuguuuaaauccau

SEQ ID NO: 1410757 - RNA, 19 nt, Artificial Sequence
  Description of Artificial Sequence: Synthetic oligonucleotide
aucuugaaaagagucauau

SEQ ID NO: 1410758 - RNA, 19 nt, Artificial Sequence
  Description of Artificial Sequence: Synthetic oligonucleotide
agucgaaacuucuguccac

SEQ ID NO: 1410759 - RNA, 19 nt, Artificial Sequence
  Description of Artificial Sequence: Synthetic oligonucleotide
ucuacacuauaugagccac

SEQ ID NO: 1410760 - RNA, 19 nt, Artificial Sequence
  Description of Artificial Sequence: Synthetic oligonucleotide
ugcuccacaaagugaagac

SEQ ID NO: 1410761 - RNA, 19 nt, Artificial Sequence
  Description of Artificial Sequence: Synthetic oligonucleotide
guauucuuguugacuaagg

SEQ ID NO: 1410762 - RNA, 19 nt, Artificial Sequence
  Description of Artificial Sequence: Synthetic oligonucleotide
guucaucuugaaaagaguc

SEQ ID NO: 1410763 - RNA, 19 nt, Artificial Sequence
  Description of Artificial Sequence: Synthetic oligonucleotide
agagucuaaucucagcuuu

SEQ ID NO: 1410764 - RNA, 19 nt, Artificial Sequence
  Description of Artificial Sequence: Synthetic oligonucleotide
uaaacugauuuugugugaa

SEQ ID NO: 1410765 - RNA, 19 nt, Artificial Sequence
  Description of Artificial Sequence: Synthetic oligonucleotide
uguccacauaggaaaguga

SEQ ID NO: 1410766 - RNA, 19 nt, Artificial Sequence
  Description of Artificial Sequence: Synthetic oligonucleotide
aacccaaccaagaaacaga

SEQ ID NO: 1410767 - RNA, 19 nt, Artificial Sequence
  Description of Artificial Sequence: Synthetic oligonucleotide
cucaggagaacugacuaag

SEQ ID NO: 1410768 - RNA, 19 nt, Artificial Sequence
  Description of Artificial Sequence: Synthetic oligonucleotide
ugugaacuacagauucuac

SEQ ID NO: 1410769 - RNA, 19 nt, Artificial Sequence
  Description of Artificial Sequence: Synthetic oligonucleotide
guauuucacuuuccaaccc

SEQ ID NO: 1410770 - RNA, 19 nt, Artificial Sequence
  Description of Artificial Sequence: Synthetic oligonucleotide
ucucccacaggaaaauaau

SEQ ID NO: 1410771 - RNA, 19 nt, Artificial Sequence
  Description of Artificial Sequence: Synthetic oligonucleotide
cauccuauaucugggacug

SEQ ID NO: 1410772 - RNA, 19 nt, Artificial Sequence
  Description of Artificial Sequence: Synthetic oligonucleotide
guuugggccguucuucucc

SEQ ID NO: 1410773 - RNA, 19 nt, Artificial Sequence
  Description of Artificial Sequence: Synthetic oligonucleotide
aggagcuucaaaauccaag

SEQ ID NO: 1410774 - RNA, 19 nt, Artificial Sequence
  Description of Artificial Sequence: Synthetic oligonucleotide
gguaaauugacaguagcuc

SEQ ID NO: 1410775 - RNA, 19 nt, Artificial Sequence
  Description of Artificial Sequence: Synthetic oligonucleotide
auuagaagucgaaacuucu

SEQ ID NO: 1410776 - RNA, 19 nt, Artificial Sequence
  Description of Artificial Sequence: Synthetic oligonucleotide
uagagacuacaucucggcu

SEQ ID NO: 1410777 - RNA, 19 nt, Artificial Sequence
  Description of Artificial Sequence: Synthetic oligonucleotide
aaauugacaguagcucaga

SEQ ID NO: 1410778 - RNA, 19 nt, Artificial Sequence
  Description of Artificial Sequence: Synthetic oligonucleotide
acuauaugagccacaguug

SEQ ID NO: 1410779 - RNA, 19 nt, Artificial Sequence
  Description of Artificial Sequence: Synthetic oligonucleotide
uccacaaagugaagacuac

SEQ ID NO: 1410780 - RNA, 19 nt, Artificial Sequence
  Description of Artificial Sequence: Synthetic oligonucleotide
uucaaaauccaaggauaga

SEQ ID NO: 1410781 - RNA, 19 nt, Artificial Sequence
  Description of Artificial Sequence: Synthetic oligonucleotide
aaagagucauaugaucaua

SEQ ID NO: 1410782 - RNA, 19 nt, Artificial Sequence
  Description of Artificial Sequence: Synthetic oligonucleotide
uccuauaucugggacugga

SEQ ID NO: 1410783 - RNA, 19 nt, Artificial Sequence
  Description of Artificial Sequence: Synthetic oligonucleotide
aaucaccgaguagagauua

SEQ ID NO: 1410784 - RNA, 19 nt, Artificial Sequence
  Description of Artificial Sequence: Synthetic oligonucleotide
guaaccacuggggcaagcg

SEQ ID NO: 1410785 - RNA, 19 nt, Artificial Sequence
  Description of Artificial Sequence: Synthetic oligonucleotide
gauucguuaauccuccaau

SEQ ID NO: 1410786 - RNA, 19 nt, Artificial Sequence
  Description of Artificial Sequence: Synthetic oligonucleotide
aaggguaucuaaauugcuu

SEQ ID NO: 1410787 - RNA, 19 nt, Artificial Sequence
  Description of Artificial Sequence: Synthetic oligonucleotide
uugagccucaggagaacug

SEQ ID NO: 1410788 - RNA, 19 nt, Artificial Sequence
  Description of Artificial Sequence: Synthetic oligonucleotide
auucguuaauccuccaauu

SEQ ID NO: 1410789 - RNA, 19 nt, Artificial Sequence
  Description of Artificial Sequence: Synthetic oligonucleotide
ugggagucuuugaucaaac

SEQ ID NO: 1410790 - RNA, 19 nt, Artificial Sequence
  Description of Artificial Sequence: Synthetic oligonucleotide
cucagagagucuaaucuca

SEQ ID NO: 1410791 - RNA, 19 nt, Artificial Sequence
  Description of Artificial Sequence: Synthetic oligonucleotide
uucaaccauuaauugcuuc

SEQ ID NO: 1410792 - RNA, 19 nt, Artificial Sequence
  Description of Artificial Sequence: Synthetic oligonucleotide
auguucaacgucauuagaa

SEQ ID NO: 1410793 - RNA, 19 nt, Artificial Sequence
  Description of Artificial Sequence: Synthetic oligonucleotide
caaccauuaauugcuucag

SEQ ID NO: 1410794 - RNA, 19 nt, Artificial Sequence
  Description of Artificial Sequence: Synthetic oligonucleotide
ggaucguggguaccuaugg

SEQ ID NO: 1410795 - RNA, 19 nt, Artificial Sequence
  Description of Artificial Sequence: Synthetic oligonucleotide
gguaccuaugguugguucc

SEQ ID NO: 1410796 - RNA, 19 nt, Artificial Sequence
  Description of Artificial Sequence: Synthetic oligonucleotide
uauaugagccacaguugua

SEQ ID NO: 1410797 - RNA, 19 nt, Artificial Sequence
  Description of Artificial Sequence: Synthetic oligonucleotide
cacacuaaauuccucaugu

SEQ ID NO: 1410798 - RNA, 19 nt, Artificial Sequence
  Description of Artificial Sequence: Synthetic oligonucleotide
cagagagucuaaucucagc

SEQ ID NO: 1410799 - RNA, 19 nt, Artificial Sequence
  Description of Artificial Sequence: Synthetic oligonucleotide
gagcuaaaucaccgaguag

SEQ ID NO: 1410800 - RNA, 19 nt, Artificial Sequence
  Description of Artificial Sequence: Synthetic oligonucleotide
acuguguccugaguagagg

SEQ ID NO: 1410801 - RNA, 19 nt, Artificial Sequence
  Description of Artificial Sequence: Synthetic oligonucleotide
auuugucuaugacuggcuu

SEQ ID NO: 1410802 - RNA, 19 nt, Artificial Sequence
  Description of Artificial Sequence: Synthetic oligonucleotide
ucaccgaguagagauuaca

SEQ ID NO: 1410803 - RNA, 19 nt, Artificial Sequence
  Description of Artificial Sequence: Synthetic oligonucleotide
uccugaguagaggugcuug

SEQ ID NO: 1410804 - RNA, 19 nt, Artificial Sequence
  Description of Artificial Sequence: Synthetic oligonucleotide
ugcacauaaccaagcuccu

SEQ ID NO: 1410805 - RNA, 19 nt, Artificial Sequence
  Description of Artificial Sequence: Synthetic oligonucleotide
uaaauccauuuccucugaa

SEQ ID NO: 1410806 - RNA, 19 nt, Artificial Sequence
  Description of Artificial Sequence: Synthetic oligonucleotide
agauucguuaauccuccaa

SEQ ID NO: 1410807 - RNA, 19 nt, Artificial Sequence
  Description of Artificial Sequence: Synthetic oligonucleotide
agcuuuccaaauagucccc

SEQ ID NO: 1410808 - RNA, 19 nt, Artificial Sequence
  Description of Artificial Sequence: Synthetic oligonucleotide
cuauguguaagauaagauu

SEQ ID NO: 1410809 - RNA, 19 nt, Artificial Sequence
  Description of Artificial Sequence: Synthetic oligonucleotide
gaguagaggugcuugugaa

SEQ ID NO: 1410810 - RNA, 19 nt, Artificial Sequence
  Description of Artificial Sequence: Synthetic oligonucleotide
uuauuucaguugagccuca

SEQ ID NO: 1410811 - RNA, 19 nt, Artificial Sequence
  Description of Artificial Sequence: Synthetic oligonucleotide
aacaaucagggagcuaaau

SEQ ID NO: 1410812 - RNA, 19 nt, Artificial Sequence
  Description of Artificial Sequence: Synthetic oligonucleotide
cuauaugagccacaguugu

SEQ ID NO: 1410813 - RNA, 19 nt, Artificial Sequence
  Description of Artificial Sequence: Synthetic oligonucleotide
ugcuugugaacuacagauu

SEQ ID NO: 1410814 - RNA, 19 nt, Artificial Sequence
  Description of Artificial Sequence: Synthetic oligonucleotide
cacauaggaaagugauaug

SEQ ID NO: 1410815 - RNA, 19 nt, Artificial Sequence
  Description of Artificial Sequence: Synthetic oligonucleotide
uuucgauucuuaagcuuuu

SEQ ID NO: 1410816 - RNA, 19 nt, Artificial Sequence
  Description of Artificial Sequence: Synthetic oligonucleotide
aaggaucguggguaccuau

SEQ ID NO: 1410817 - RNA, 19 nt, Artificial Sequence
  Description of Artificial Sequence: Synthetic oligonucleotide
accgaguagagauuacauu

SEQ ID NO: 1410818 - RNA, 19 nt, Artificial Sequence
  Description of Artificial Sequence: Synthetic oligonucleotide
uccuuucuacgcuuacggu

SEQ ID NO: 1410819 - RNA, 19 nt, Artificial Sequence
  Description of Artificial Sequence: Synthetic oligonucleotide
uuuggaugcuucuguguuu

SEQ ID NO: 1410820 - RNA, 19 nt, Artificial Sequence
  Description of Artificial Sequence: Synthetic oligonucleotide
ucuacgcuuacgguccucu

SEQ ID NO: 1410821 - RNA, 19 nt, Artificial Sequence
  Description of Artificial Sequence: Synthetic oligonucleotide
aacgucauuagaagucgaa

SEQ ID NO: 1410822 - RNA, 19 nt, Artificial Sequence
  Description of Artificial Sequence: Synthetic oligonucleotide
uacgcuuacgguccucuuu

SEQ ID NO: 1410823 - RNA, 19 nt, Artificial Sequence
  Description of Artificial Sequence: Synthetic oligonucleotide
augaucauauucaaccauu

SEQ ID NO: 1410824 - RNA, 19 nt, Artificial Sequence
  Description of Artificial Sequence: Synthetic oligonucleotide
acuucuguccacauaggaa

SEQ ID NO: 1410825 - RNA, 19 nt, Artificial Sequence
  Description of Artificial Sequence: Synthetic oligonucleotide
ggugcauuugucuaugacu

SEQ ID NO: 1410826 - RNA, 19 nt, Artificial Sequence
  Description of Artificial Sequence: Synthetic oligonucleotide
guguaagauaagauuauua

SEQ ID NO: 1410827 - RNA, 19 nt, Artificial Sequence
  Description of Artificial Sequence: Synthetic oligonucleotide
gaggaucaauggcacugug

SEQ ID NO: 1410828 - RNA, 19 nt, Artificial Sequence
  Description of Artificial Sequence: Synthetic oligonucleotide
caaucacacuaaauuccuc

SEQ ID NO: 1410829 - RNA, 19 nt, Artificial Sequence
  Description of Artificial Sequence: Synthetic oligonucleotide
ugaggaucaauggcacugu

SEQ ID NO: 1410830 - RNA, 19 nt, Artificial Sequence
  Description of Artificial Sequence: Synthetic oligonucleotide
agcaugaaugcuccacaaa

SEQ ID NO: 1410831 - RNA, 19 nt, Artificial Sequence
  Description of Artificial Sequence: Synthetic oligonucleotide
uauuucaguugagccucag

SEQ ID NO: 1410832 - RNA, 19 nt, Artificial Sequence
  Description of Artificial Sequence: Synthetic oligonucleotide
cugcaaguuagaucuaaaa

SEQ ID NO: 1410833 - RNA, 19 nt, Artificial Sequence
  Description of Artificial Sequence: Synthetic oligonucleotide
gagaagccaucccugguaa

SEQ ID NO: 1410834 - RNA, 19 nt, Artificial Sequence
  Description of Artificial Sequence: Synthetic oligonucleotide
aguugagccucaggagaac

SEQ ID NO: 1410835 - RNA, 19 nt, Artificial Sequence
  Description of Artificial Sequence: Synthetic oligonucleotide
uuugggccguucuucuccu

SEQ ID NO: 1410836 - RNA, 19 nt, Artificial Sequence
  Description of Artificial Sequence: Synthetic oligonucleotide
auguguaagauaagauuau

SEQ ID NO: 1410837 - RNA, 19 nt, Artificial Sequence
  Description of Artificial Sequence: Synthetic oligonucleotide
ggagcuaaaucaccgagua

SEQ ID NO: 1410838 - RNA, 19 nt, Artificial Sequence
  Description of Artificial Sequence: Synthetic oligonucleotide
ggaaauucuaucauaugua

SEQ ID NO: 1410839 - RNA, 19 nt, Artificial Sequence
  Description of Artificial Sequence: Synthetic oligonucleotide
gaacaugaaugcacauaac

SEQ ID NO: 1410840 - RNA, 19 nt, Artificial Sequence
  Description of Artificial Sequence: Synthetic oligonucleotide
gcauuugucuaugacuggc

SEQ ID NO: 1410841 - RNA, 19 nt, Artificial Sequence
  Description of Artificial Sequence: Synthetic oligonucleotide
ccaagaaacagauucguua

SEQ ID NO: 1410842 - RNA, 19 nt, Artificial Sequence
  Description of Artificial Sequence: Synthetic oligonucleotide
uggcucuaagccucuggcu

SEQ ID NO: 1410843 - RNA, 19 nt, Artificial Sequence
  Description of Artificial Sequence: Synthetic oligonucleotide
gcuaaaucaccgaguagag

SEQ ID NO: 1410844 - RNA, 19 nt, Artificial Sequence
  Description of Artificial Sequence: Synthetic oligonucleotide
ggaaagugauaugaacaug

SEQ ID NO: 1410845 - RNA, 19 nt, Artificial Sequence
  Description of Artificial Sequence: Synthetic oligonucleotide
caugaaugcuccacaaagu

SEQ ID NO: 1410846 - RNA, 19 nt, Artificial Sequence
  Description of Artificial Sequence: Synthetic oligonucleotide
uaugagccacaguuguauu

SEQ ID NO: 1410847 - RNA, 19 nt, Artificial Sequence
  Description of Artificial Sequence: Synthetic oligonucleotide
acgucauuagaagucgaaa

SEQ ID NO: 1410848 - RNA, 19 nt, Artificial Sequence
  Description of Artificial Sequence: Synthetic oligonucleotide
ccugguaaauugacaguag

SEQ ID NO: 1410849 - RNA, 19 nt, Artificial Sequence
  Description of Artificial Sequence: Synthetic oligonucleotide
aacugacuaaggagcuuca

SEQ ID NO: 1410850 - RNA, 19 nt, Artificial Sequence
  Description of Artificial Sequence: Synthetic oligonucleotide
uuucuacgcuuacgguccu

SEQ ID NO: 1410851 - RNA, 19 nt, Artificial Sequence
  Description of Artificial Sequence: Synthetic oligonucleotide
cacugcaauuuggugaauc

SEQ ID NO: 1410852 - RNA, 19 nt, Artificial Sequence
  Description of Artificial Sequence: Synthetic oligonucleotide
caguuguauucuuguugac

SEQ ID NO: 1410853 - RNA, 19 nt, Artificial Sequence
  Description of Artificial Sequence: Synthetic oligonucleotide
aggaucaauggcacugugu

SEQ ID NO: 1410854 - RNA, 19 nt, Artificial Sequence
  Description of Artificial Sequence: Synthetic oligonucleotide
uucgauucuuaagcuuuuc

SEQ ID NO: 1410855 - RNA, 19 nt, Artificial Sequence
  Description of Artificial Sequence: Synthetic oligonucleotide
ggguaucuaaauugcuuca

SEQ ID NO: 1410856 - RNA, 19 nt, Artificial Sequence
  Description of Artificial Sequence: Synthetic oligonucleotide
acacuauaugagccacagu

SEQ ID NO: 1410857 - RNA, 19 nt, Artificial Sequence
  Description of Artificial Sequence: Synthetic oligonucleotide
agacuacaacaaucaggga

SEQ ID NO: 1410858 - RNA, 19 nt, Artificial Sequence
  Description of Artificial Sequence: Synthetic oligonucleotide
acccaaccaagaaacagau

SEQ ID NO: 1410859 - RNA, 19 nt, Artificial Sequence
  Description of Artificial Sequence: Synthetic oligonucleotide
aguagagauuacauuuauu

SEQ ID NO: 1410860 - RNA, 19 nt, Artificial Sequence
  Description of Artificial Sequence: Synthetic oligonucleotide
auaguccccucucauccuu

SEQ ID NO: 1410861 - RNA, 19 nt, Artificial Sequence
  Description of Artificial Sequence: Synthetic oligonucleotide
gucgaaacuucuguccaca

SEQ ID NO: 1410862 - RNA, 19 nt, Artificial Sequence
  Description of Artificial Sequence: Synthetic oligonucleotide
aucaccgaguagagauuac

SEQ ID NO: 1410863 - RNA, 19 nt, Artificial Sequence
  Description of Artificial Sequence: Synthetic oligonucleotide
gcugguaaccacuggggca

SEQ ID NO: 1410864 - RNA, 19 nt, Artificial Sequence
  Description of Artificial Sequence: Synthetic oligonucleotide
gauuuugugugaagacucu

SEQ ID NO: 1410865 - RNA, 19 nt, Artificial Sequence
  Description of Artificial Sequence: Synthetic oligonucleotide
aagccaucccugguaaauu

SEQ ID NO: 1410866 - RNA, 19 nt, Artificial Sequence
  Description of Artificial Sequence: Synthetic oligonucleotide
acacgucuuuggcucuaag

SEQ ID NO: 1410867 - RNA, 19 nt, Artificial Sequence
  Description of Artificial Sequence: Synthetic oligonucleotide
aagcggucuucugucugug

SEQ ID NO: 1410868 - RNA, 19 nt, Artificial Sequence
  Description of Artificial Sequence: Synthetic oligonucleotide
cuauaucugggacuggaau

SEQ ID NO: 1410869 - RNA, 19 nt, Artificial Sequence
  Description of Artificial Sequence: Synthetic oligonucleotide
ucguguuugggccguucuu

SEQ ID NO: 1410870 - RNA, 19 nt, Artificial Sequence
  Description of Artificial Sequence: Synthetic oligonucleotide
cuacacuauaugagccaca

SEQ ID NO: 1410871 - RNA, 19 nt, Artificial Sequence
  Description of Artificial Sequence: Synthetic oligonucleotide
gaugggagucuuugaucaa

SEQ ID NO: 1410872 - RNA, 19 nt, Artificial Sequence
  Description of Artificial Sequence: Synthetic oligonucleotide
aggaucguggguaccuaug

SEQ ID NO: 1410873 - RNA, 19 nt, Artificial Sequence
  Description of Artificial Sequence: Synthetic oligonucleotide
gaaacacgucuuuggcucu

SEQ ID NO: 1410874 - RNA, 19 nt, Artificial Sequence
  Description of Artificial Sequence: Synthetic oligonucleotide
cuuuggaugcuucuguguu

SEQ ID NO: 1410875 - RNA, 19 nt, Artificial Sequence
  Description of Artificial Sequence: Synthetic oligonucleotide
guugguucccgaugggagu

SEQ ID NO: 1410876 - RNA, 19 nt, Artificial Sequence
  Description of Artificial Sequence: Synthetic oligonucleotide
cauuugucuaugacuggcu

SEQ ID NO: 1410877 - RNA, 19 nt, Artificial Sequence
  Description of Artificial Sequence: Synthetic oligonucleotide
gaucguggguaccuauggu

SEQ ID NO: 1410878 - RNA, 19 nt, Artificial Sequence
  Description of Artificial Sequence: Synthetic oligonucleotide
acugcaaguuagaucuaaa

SEQ ID NO: 1410879 - RNA, 19 nt, Artificial Sequence
  Description of Artificial Sequence: Synthetic oligonucleotide
caacgucauuagaagucga

SEQ ID NO: 1410880 - RNA, 19 nt, Artificial Sequence
  Description of Artificial Sequence: Synthetic oligonucleotide
cugaaacuuuuaaaacuau

SEQ ID NO: 1410881 - RNA, 19 nt, Artificial Sequence
  Description of Artificial Sequence: Synthetic oligonucleotide
gcaagcggucuucugucug

SEQ ID NO: 1410882 - RNA, 19 nt, Artificial Sequence
  Description of Artificial Sequence: Synthetic oligonucleotide
cagcaugaaugcuccacaa

SEQ ID NO: 1410883 - RNA, 19 nt, Artificial Sequence
  Description of Artificial Sequence: Synthetic oligonucleotide
acugacuaaggagcuucaa

SEQ ID NO: 1410884 - RNA, 19 nt, Artificial Sequence
  Description of Artificial Sequence: Synthetic oligonucleotide
aacacgucuuuggcucuaa

SEQ ID NO: 1410885 - RNA, 19 nt, Artificial Sequence
  Description of Artificial Sequence: Synthetic oligonucleotide
agccucaggagaacugacu

SEQ ID NO: 1410886 - RNA, 19 nt, Artificial Sequence
  Description of Artificial Sequence: Synthetic oligonucleotide
auccuauaucugggacugg

SEQ ID NO: 1410887 - RNA, 19 nt, Artificial Sequence
  Description of Artificial Sequence: Synthetic oligonucleotide
agcggucuucugucuguga

SEQ ID NO: 1410888 - RNA, 19 nt, Artificial Sequence
  Description of Artificial Sequence: Synthetic oligonucleotide
auucaaccauuaauugcuu

SEQ ID NO: 1410889 - RNA, 19 nt, Artificial Sequence
  Description of Artificial Sequence: Synthetic oligonucleotide
ccgaguagagauuacauuu

SEQ ID NO: 1410890 - RNA, 19 nt, Artificial Sequence
  Description of Artificial Sequence: Synthetic oligonucleotide
cguggguaccuaugguugg

SEQ ID NO: 1410891 - RNA, 19 nt, Artificial Sequence
  Description of Artificial Sequence: Synthetic oligonucleotide
ggguaccuaugguugguuc

SEQ ID NO: 1410892 - RNA, 19 nt, Artificial Sequence
  Description of Artificial Sequence: Synthetic oligonucleotide
uacaacaaucagggagcua

SEQ ID NO: 1410893 - RNA, 19 nt, Artificial Sequence
  Description of Artificial Sequence: Synthetic oligonucleotide
ccgaugggagucuuugauc

SEQ ID NO: 1410894 - RNA, 19 nt, Artificial Sequence
  Description of Artificial Sequence: Synthetic oligonucleotide
gggcaagcggucuucuguc

SEQ ID NO: 1410895 - RNA, 19 nt, Artificial Sequence
  Description of Artificial Sequence: Synthetic oligonucleotide
ccacauaggaaagugauau

SEQ ID NO: 1410896 - RNA, 19 nt, Artificial Sequence
  Description of Artificial Sequence: Synthetic oligonucleotide
cuugaggaucaauggcacu

SEQ ID NO: 1410897 - RNA, 19 nt, Artificial Sequence
  Description of Artificial Sequence: Synthetic oligonucleotide
acuuuccaacccagaaaau

SEQ ID NO: 1410898 - RNA, 19 nt, Artificial Sequence
  Description of Artificial Sequence: Synthetic oligonucleotide
caccgaguagagauuacau

SEQ ID NO: 1410899 - RNA, 19 nt, Artificial Sequence
  Description of Artificial Sequence: Synthetic oligonucleotide
cguuaauccuccaauuuua

SEQ ID NO: 1410900 - RNA, 19 nt, Artificial Sequence
  Description of Artificial Sequence: Synthetic oligonucleotide
guugagccucaggagaacu

SEQ ID NO: 1410901 - RNA, 19 nt, Artificial Sequence
  Description of Artificial Sequence: Synthetic oligonucleotide
gaaggaucguggguaccua

SEQ ID NO: 1410902 - RNA, 19 nt, Artificial Sequence
  Description of Artificial Sequence: Synthetic oligonucleotide
uggguaccuaugguugguu

SEQ ID NO: 1410903 - RNA, 19 nt, Artificial Sequence
  Description of Artificial Sequence: Synthetic oligonucleotide
gcggucuucugucugugaa

SEQ ID NO: 1410904 - RNA, 19 nt, Artificial Sequence
  Description of Artificial Sequence: Synthetic oligonucleotide
cuaugacuggcuugaggau

SEQ ID NO: 1410905 - RNA, 19 nt, Artificial Sequence
  Description of Artificial Sequence: Synthetic oligonucleotide
cagauucguuaauccucca

SEQ ID NO: 1410906 - RNA, 19 nt, Artificial Sequence
  Description of Artificial Sequence: Synthetic oligonucleotide
ccagaaguuaaaauacuuu

SEQ ID NO: 1410907 - RNA, 19 nt, Artificial Sequence
  Description of Artificial Sequence: Synthetic oligonucleotide
ugguucccgaugggagucu

SEQ ID NO: 1410908 - RNA, 19 nt, Artificial Sequence
  Description of Artificial Sequence: Synthetic oligonucleotide
ggggcaagcggucuucugu

SEQ ID NO: 1410909 - RNA, 19 nt, Artificial Sequence
  Description of Artificial Sequence: Synthetic oligonucleotide
gguaucuaaauugcuucau

SEQ ID NO: 1410910 - RNA, 19 nt, Artificial Sequence
  Description of Artificial Sequence: Synthetic oligonucleotide
guagcucagagagucuaau

SEQ ID NO: 1410911 - RNA, 19 nt, Artificial Sequence
  Description of Artificial Sequence: Synthetic oligonucleotide
uucuacgcuuacgguccuc

SEQ ID NO: 1410912 - RNA, 19 nt, Artificial Sequence
  Description of Artificial Sequence: Synthetic oligonucleotide
gguaaccacuggggcaagc

SEQ ID NO: 1410913 - RNA, 19 nt, Artificial Sequence
  Description of Artificial Sequence: Synthetic oligonucleotide
cuccguccuuucuucaccu

SEQ ID NO: 1410914 - RNA, 19 nt, Artificial Sequence
  Description of Artificial Sequence: Synthetic oligonucleotide
cucguguuugggccguucu

SEQ ID NO: 1410915 - RNA, 19 nt, Artificial Sequence
  Description of Artificial Sequence: Synthetic oligonucleotide
cguguuugggccguucuuc

SEQ ID NO: 1410916 - RNA, 19 nt, Artificial Sequence
  Description of Artificial Sequence: Synthetic oligonucleotide
ccacaaagugaagacuaca

SEQ ID NO: 1410917 - RNA, 19 nt, Artificial Sequence
  Description of Artificial Sequence: Synthetic oligonucleotide
guguuuguuuaaauccauu

SEQ ID NO: 1410918 - RNA, 19 nt, Artificial Sequence
  Description of Artificial Sequence: Synthetic oligonucleotide
cgaguagagauuacauuua

SEQ ID NO: 1410919 - RNA, 19 nt, Artificial Sequence
  Description of Artificial Sequence: Synthetic oligonucleotide
cuguacccacagcuuucca

SEQ ID NO: 1410920 - RNA, 19 nt, Artificial Sequence
  Description of Artificial Sequence: Synthetic oligonucleotide
gggagcuaaaucaccgagu

SEQ ID NO: 1410921 - RNA, 19 nt, Artificial Sequence
  Description of Artificial Sequence: Synthetic oligonucleotide
gccaucccugguaaauuga

SEQ ID NO: 1410922 - RNA, 19 nt, Artificial Sequence
  Description of Artificial Sequence: Synthetic oligonucleotide
ccaugagcugguaaccacu

SEQ ID NO: 1410923 - RNA, 19 nt, Artificial Sequence
  Description of Artificial Sequence: Synthetic oligonucleotide
uugggccguucuucuccuu

SEQ ID NO: 1410924 - RNA, 19 nt, Artificial Sequence
  Description of Artificial Sequence: Synthetic oligonucleotide
guacuguccuguacaguuu

SEQ ID NO: 1410925 - RNA, 19 nt, Artificial Sequence
  Description of Artificial Sequence: Synthetic oligonucleotide
ggcaagcggucuucugucu

SEQ ID NO: 1410926 - RNA, 19 nt, Artificial Sequence
  Description of Artificial Sequence: Synthetic oligonucleotide
cgucuuuggcucuaagccu

SEQ ID NO: 1410927 - RNA, 19 nt, Artificial Sequence
  Description of Artificial Sequence: Synthetic oligonucleotide
gacuggcuugaggaucaau

SEQ ID NO: 1410928 - RNA, 19 nt, Artificial Sequence
  Description of Artificial Sequence: Synthetic oligonucleotide
agacuacaucucggcuuuu

SEQ ID NO: 1410929 - RNA, 19 nt, Artificial Sequence
  Description of Artificial Sequence: Synthetic oligonucleotide
cccgaugggagucuuugau

SEQ ID NO: 1410930 - RNA, 19 nt, Artificial Sequence
  Description of Artificial Sequence: Synthetic oligonucleotide
gguucccgaugggagucuu

SEQ ID NO: 1410931 - RNA, 19 nt, Artificial Sequence
  Description of Artificial Sequence: Synthetic oligonucleotide
ccucucguguuugggccgu

SEQ ID NO: 1410932 - RNA, 19 nt, Artificial Sequence
  Description of Artificial Sequence: Synthetic oligonucleotide
cgcuuacgguccucuuucu

SEQ ID NO: 1410933 - RNA, 19 nt, Artificial Sequence
  Description of Artificial Sequence: Synthetic oligonucleotide
cucucguguuugggccguu

SEQ ID NO: 1410934 - RNA, 19 nt, Artificial Sequence
  Description of Artificial Sequence: Synthetic oligonucleotide
ugaauuauaggucacaugu

SEQ ID NO: 1410935 - RNA, 19 nt, Artificial Sequence
  Description of Artificial Sequence: Synthetic oligonucleotide
aggaccauaauuuuaauac

SEQ ID NO: 1410936 - RNA, 19 nt, Artificial Sequence
  Description of Artificial Sequence: Synthetic oligonucleotide
aaauuugcaucuuugauga

SEQ ID NO: 1410937 - RNA, 19 nt, Artificial Sequence
  Description of Artificial Sequence: Synthetic oligonucleotide
  modified_base (4)..(4): a, c, u, g, unknown or other
uacnuuuugacugaaaucc

SEQ ID NO: 1410938 - RNA, 19 nt, Artificial Sequence
  Description of Artificial Sequence: Synthetic oligonucleotide
aauauuaccuuaaauaaug

SEQ ID NO: 1410939 - RNA, 19 nt, Artificial Sequence
  Description of Artificial Sequence: Synthetic oligonucleotide
gacacaaugacacaacagg

SEQ ID NO: 1410940 - RNA, 19 nt, Artificial Sequence
  Description of Artificial Sequence: Synthetic oligonucleotide
auugcaaucauuccggagg

SEQ ID NO: 1410941 - RNA, 19 nt, Artificial Sequence
  Description of Artificial Sequence: Synthetic oligonucleotide
aaucucaucucccucauag

SEQ ID NO: 1410942 - RNA, 19 nt, Artificial Sequence
  Description of Artificial Sequence: Synthetic oligonucleotide
aguuccucaagucaugucc

SEQ ID NO: 1410943 - RNA, 19 nt, Artificial Sequence
  Description of Artificial Sequence: Synthetic oligonucleotide
aauaaugcuguaaagcgac

SEQ ID NO: 1410944 - RNA, 19 nt, Artificial Sequence
  Description of Artificial Sequence: Synthetic oligonucleotide
aaaugugcuuuauuacugc

SEQ ID NO: 1410945 - RNA, 19 nt, Artificial Sequence
  Description of Artificial Sequence: Synthetic oligonucleotide
aauugcaaacaaaaugugc

SEQ ID NO: 1410946 - RNA, 19 nt, Artificial Sequence
  Description of Artificial Sequence: Synthetic oligonucleotide
ucuagaacuugguagaugc

SEQ ID NO: 1410947 - RNA, 19 nt, Artificial Sequence
  Description of Artificial Sequence: Synthetic oligonucleotide
ucuucguuaaccucgauga

SEQ ID NO: 1410948 - RNA, 19 nt, Artificial Sequence
  Description of Artificial Sequence: Synthetic oligonucleotide
ucuuucaacagacuguuug

SEQ ID NO: 1410949 - RNA, 19 nt, Artificial Sequence
  Description of Artificial Sequence: Synthetic oligonucleotide
aacugugauuuccaauucc

SEQ ID NO: 1410950 - RNA, 19 nt, Artificial Sequence
  Description of Artificial Sequence: Synthetic oligonucleotide
cuaauugcaaucauuccgg

SEQ ID NO: 1410951 - RNA, 19 nt, Artificial Sequence
  Description of Artificial Sequence: Synthetic oligonucleotide
ucaaaguagauccuugagc

SEQ ID NO: 1410952 - RNA, 19 nt, Artificial Sequence
  Description of Artificial Sequence: Synthetic oligonucleotide
aauuauaggucacauguau

SEQ ID NO: 1410953 - RNA, 19 nt, Artificial Sequence
  Description of Artificial Sequence: Synthetic oligonucleotide
  modified_base (4)..(4): a, c, u, g, unknown or other
cuunuugauacaucauugg

SEQ ID NO: 1410954 - RNA, 19 nt, Artificial Sequence
  Description of Artificial Sequence: Synthetic oligonucleotide
uuaccuuaaauaaugcugu

SEQ ID NO: 1410955 - RNA, 19 nt, Artificial Sequence
  Description of Artificial Sequence: Synthetic oligonucleotide
uuaaccucgaugaaggacu

SEQ ID NO: 1410956 - RNA, 19 nt, Artificial Sequence
  Description of Artificial Sequence: Synthetic oligonucleotide
uugugaacaacuuuggaga

SEQ ID NO: 1410957 - RNA, 19 nt, Artificial Sequence
  Description of Artificial Sequence: Synthetic oligonucleotide
gauaccaaaucuuucaaca

SEQ ID NO: 1410958 - RNA, 19 nt, Artificial Sequence
  Description of Artificial Sequence: Synthetic oligonucleotide
cuugugaacaacuuuggag

SEQ ID NO: 1410959 - RNA, 19 nt, Artificial Sequence
  Description of Artificial Sequence: Synthetic oligonucleotide
agauccuugagccccaagc

SEQ ID NO: 1410960 - RNA, 19 nt, Artificial Sequence
  Description of Artificial Sequence: Synthetic oligonucleotide
  modified_base (3)..(3): a, c, u, g, unknown or other
uunuugauacaucauugga

SEQ ID NO: 1410961 - RNA, 19 nt, Artificial Sequence
  Description of Artificial Sequence: Synthetic oligonucleotide
aagaugguuauacauauuu

SEQ ID NO: 1410962 - RNA, 19 nt, Artificial Sequence
  Description of Artificial Sequence: Synthetic oligonucleotide
aaagcgacaauccuaacua

SEQ ID NO: 1410963 - RNA, 19 nt, Artificial Sequence
  Description of Artificial Sequence: Synthetic oligonucleotide
  modified_base (2)..(2): a, c, u, g, unknown or other
unuugauacaucauuggaa

SEQ ID NO: 1410964 - RNA, 19 nt, Artificial Sequence
  Description of Artificial Sequence: Synthetic oligonucleotide
auauuuacugaccacucag

SEQ ID NO: 1410965 - RNA, 19 nt, Artificial Sequence
  Description of Artificial Sequence: Synthetic oligonucleotide
auuaccuuaaauaaugcug

SEQ ID NO: 1410966 - RNA, 19 nt, Artificial Sequence
  Description of Artificial Sequence: Synthetic oligonucleotide
uuuuaacagaguuugucca

SEQ ID NO: 1410967 - RNA, 19 nt, Artificial Sequence
  Description of Artificial Sequence: Synthetic oligonucleotide
uguaaagcgacaauccuaa

SEQ ID NO: 1410968 - RNA, 19 nt, Artificial Sequence
  Description of Artificial Sequence: Synthetic oligonucleotide
aauagggugguccacaaua

SEQ ID NO: 1410969 - RNA, 19 nt, Artificial Sequence
  Description of Artificial Sequence: Synthetic oligonucleotide
caucguaucccauugaaug

SEQ ID NO: 1410970 - RNA, 19 nt, Artificial Sequence
  Description of Artificial Sequence: Synthetic oligonucleotide
uguauaauucuccacccac

SEQ ID NO: 1410971 - RNA, 19 nt, Artificial Sequence
  Description of Artificial Sequence: Synthetic oligonucleotide
uuacugaccacucagcuau

SEQ ID NO: 1410972 - RNA, 19 nt, Artificial Sequence
  Description of Artificial Sequence: Synthetic oligonucleotide
auguauuacuucuacucgg

SEQ ID NO: 1410973 - RNA, 19 nt, Artificial Sequence
  Description of Artificial Sequence: Synthetic oligonucleotide
uuauugauguaguuggcca

SEQ ID NO: 1410974 - RNA, 19 nt, Artificial Sequence
  Description of Artificial Sequence: Synthetic oligonucleotide
gauccauccacuaaauucc

SEQ ID NO: 1410975 - RNA, 19 nt, Artificial Sequence
  Description of Artificial Sequence: Synthetic oligonucleotide
gaacucaucauugauauga

SEQ ID NO: 1410976 - RNA, 19 nt, Artificial Sequence
  Description of Artificial Sequence: Synthetic oligonucleotide
aguucugguauuuucaggu

SEQ ID NO: 1410977 - RNA, 19 nt, Artificial Sequence
  Description of Artificial Sequence: Synthetic oligonucleotide
gcuaauugcaaucauuccg

SEQ ID NO: 1410978 - RNA, 19 nt, Artificial Sequence
  Description of Artificial Sequence: Synthetic oligonucleotide
  modified_base (8)..(8): a, c, u, g, unknown or other
ucuccuunuugauacauca

SEQ ID NO: 1410979 - RNA, 19 nt, Artificial Sequence
  Description of Artificial Sequence: Synthetic oligonucleotide
uugacaggcugaauuauag

SEQ ID NO: 1410980 - RNA, 19 nt, Artificial Sequence
  Description of Artificial Sequence: Synthetic oligonucleotide
uaaagcgacaauccuaacu

SEQ ID NO: 1410981 - RNA, 19 nt, Artificial Sequence
  Description of Artificial Sequence: Synthetic oligonucleotide
caaaucuuucaacagacug

SEQ ID NO: 1410982 - RNA, 19 nt, Artificial Sequence
  Description of Artificial Sequence: Synthetic oligonucleotide
uuugcaagaacucaucauu

SEQ ID NO: 1410983 - RNA, 19 nt, Artificial Sequence
  Description of Artificial Sequence: Synthetic oligonucleotide
auaggguauuucuagaacu

SEQ ID NO: 1410984 - RNA, 19 nt, Artificial Sequence
  Description of Artificial Sequence: Synthetic oligonucleotide
ucaucauugauaugaaauc

SEQ ID NO: 1410985 - RNA, 19 nt, Artificial Sequence
  Description of Artificial Sequence: Synthetic oligonucleotide
aauugcaaucauuccggag

SEQ ID NO: 1410986 - RNA, 19 nt, Artificial Sequence
  Description of Artificial Sequence: Synthetic oligonucleotide
uucaucguuucuagggugg

SEQ ID NO: 1410987 - RNA, 19 nt, Artificial Sequence
  Description of Artificial Sequence: Synthetic oligonucleotide
ugcuguaaagcgacaaucc

SEQ ID NO: 1410988 - RNA, 19 nt, Artificial Sequence
  Description of Artificial Sequence: Synthetic oligonucleotide
uguccauucuucaaucagc

SEQ ID NO: 1410989 - RNA, 19 nt, Artificial Sequence
  Description of Artificial Sequence: Synthetic oligonucleotide
uauuaccuuaaauaaugcu

SEQ ID NO: 1410990 - RNA, 19 nt, Artificial Sequence
  Description of Artificial Sequence: Synthetic oligonucleotide
cacguauugucuuucuucg

SEQ ID NO: 1410991 - RNA, 19 nt, Artificial Sequence
  Description of Artificial Sequence: Synthetic oligonucleotide
aauaaccugaggguacaac

SEQ ID NO: 1410992 - RNA, 19 nt, Artificial Sequence
  Description of Artificial Sequence: Synthetic oligonucleotide
ucugcauuaaaguacuuuu

SEQ ID NO: 1410993 - RNA, 19 nt, Artificial Sequence
  Description of Artificial Sequence: Synthetic oligonucleotide
auaaccugaggguacaaca

SEQ ID NO: 1410994 - RNA, 19 nt, Artificial Sequence
  Description of Artificial Sequence: Synthetic oligonucleotide
aucguaucccauugaaugg

SEQ ID NO: 1410995 - RNA, 19 nt, Artificial Sequence
  Description of Artificial Sequence: Synthetic oligonucleotide
uauuacuucuacucggaac

SEQ ID NO: 1410996 - RNA, 19 nt, Artificial Sequence
  Description of Artificial Sequence: Synthetic oligonucleotide
uguauuacuucuacucgga

SEQ ID NO: 1410997 - RNA, 19 nt, Artificial Sequence
  Description of Artificial Sequence: Synthetic oligonucleotide
uucuucguuaaccucgaug

SEQ ID NO: 1410998 - RNA, 19 nt, Artificial Sequence
  Description of Artificial Sequence: Synthetic oligonucleotide
accaaaucuuucaacagac

SEQ ID NO: 1410999 - RNA, 19 nt, Artificial Sequence
  Description of Artificial Sequence: Synthetic oligonucleotide
auauuaccuuaaauaaugc

SEQ ID NO: 1411000 - RNA, 19 nt, Artificial Sequence
  Description of Artificial Sequence: Synthetic oligonucleotide
ugugaacaacuuuggagag

SEQ ID NO: 1411001 - RNA, 19 nt, Artificial Sequence
  Description of Artificial Sequence: Synthetic oligonucleotide
ucuaggguggcaugacucg

SEQ ID NO: 1411002 - RNA, 19 nt, Artificial Sequence
  Description of Artificial Sequence: Synthetic oligonucleotide
aaugugcuuuauuacugcu

SEQ ID NO: 1411003 - RNA, 19 nt, Artificial Sequence
  Description of Artificial Sequence: Synthetic oligonucleotide
ugugcuuuauuacugcuuu

SEQ ID NO: 1411004 - RNA, 19 nt, Artificial Sequence
  Description of Artificial Sequence: Synthetic oligonucleotide
uaauuuuaauacugguaac

SEQ ID NO: 1411005 - RNA, 19 nt, Artificial Sequence
  Description of Artificial Sequence: Synthetic oligonucleotide
uauauaccaauugcaaaca

SEQ ID NO: 1411006 - RNA, 19 nt, Artificial Sequence
  Description of Artificial Sequence: Synthetic oligonucleotide
uagaacuugguagaugccc

SEQ ID NO: 1411007 - RNA, 19 nt, Artificial Sequence
  Description of Artificial Sequence: Synthetic oligonucleotide
acugaaauccacaugauua

SEQ ID NO: 1411008 - RNA, 19 nt, Artificial Sequence
  Description of Artificial Sequence: Synthetic oligonucleotide
ucauugauaugaaauccau

SEQ ID NO: 1411009 - RNA, 19 nt, Artificial Sequence
  Description of Artificial Sequence: Synthetic oligonucleotide
ucacauguauuacuucuac

SEQ ID NO: 1411010 - RNA, 19 nt, Artificial Sequence
  Description of Artificial Sequence: Synthetic oligonucleotide
uuuucaggucuaaacugug

SEQ ID NO: 1411011 - RNA, 19 nt, Artificial Sequence
  Description of Artificial Sequence: Synthetic oligonucleotide
ugucuggacaguaccagca

SEQ ID NO: 1411012 - RNA, 19 nt, Artificial Sequence
  Description of Artificial Sequence: Synthetic oligonucleotide
ucuuaucugacauggcagu

SEQ ID NO: 1411013 - RNA, 19 nt, Artificial Sequence
  Description of Artificial Sequence: Synthetic oligonucleotide
  modified_base (5)..(5): a, c, u, g, unknown or other
cuacnuuuugacugaaauc

SEQ ID NO: 1411014 - RNA, 19 nt, Artificial Sequence
  Description of Artificial Sequence: Synthetic oligonucleotide
ucacguauugucuuucuuc

SEQ ID NO: 1411015 - RNA, 19 nt, Artificial Sequence
  Description of Artificial Sequence: Synthetic oligonucleotide
  modified_base (2)..(2): a, c, u, g, unknown or other
cnuuuugacugaaauccac

SEQ ID NO: 1411016 - RNA, 19 nt, Artificial Sequence
  Description of Artificial Sequence: Synthetic oligonucleotide
cacaaugacacaacaggac

SEQ ID NO: 1411017 - RNA, 19 nt, Artificial Sequence
  Description of Artificial Sequence: Synthetic oligonucleotide
aacaagauuguaccaguuu

SEQ ID NO: 1411018 - RNA, 19 nt, Artificial Sequence
  Description of Artificial Sequence: Synthetic oligonucleotide
acaugauuaacuucugcau

SEQ ID NO: 1411019 - RNA, 19 nt, Artificial Sequence
  Description of Artificial Sequence: Synthetic oligonucleotide
aaugcuguaaagcgacaau

SEQ ID NO: 1411020 - RNA, 19 nt, Artificial Sequence
  Description of Artificial Sequence: Synthetic oligonucleotide
ucgaagaugguuauacaua

SEQ ID NO: 1411021 - RNA, 19 nt, Artificial Sequence
  Description of Artificial Sequence: Synthetic oligonucleotide
cugugcuuugagcagaggc

SEQ ID NO: 1411022 - RNA, 19 nt, Artificial Sequence
  Description of Artificial Sequence: Synthetic oligonucleotide
uguguucaucguuucuagg

SEQ ID NO: 1411023 - RNA, 19 nt, Artificial Sequence
  Description of Artificial Sequence: Synthetic oligonucleotide
ugcuaauugcaaucauucc

SEQ ID NO: 1411024 - RNA, 19 nt, Artificial Sequence
  Description of Artificial Sequence: Synthetic oligonucleotide
uuuugcacaaagagggaau

SEQ ID NO: 1411025 - RNA, 19 nt, Artificial Sequence
  Description of Artificial Sequence: Synthetic oligonucleotide
aacaggaccauaauuuuaa

SEQ ID NO: 1411026 - RNA, 19 nt, Artificial Sequence
  Description of Artificial Sequence: Synthetic oligonucleotide
uucaggucuaaacugugau

SEQ ID NO: 1411027 - RNA, 19 nt, Artificial Sequence
  Description of Artificial Sequence: Synthetic oligonucleotide
uugcaaucauuccggaggc

SEQ ID NO: 1411028 - RNA, 19 nt, Artificial Sequence
  Description of Artificial Sequence: Synthetic oligonucleotide
aguggaacuuccugucugg

SEQ ID NO: 1411029 - RNA, 19 nt, Artificial Sequence
  Description of Artificial Sequence: Synthetic oligonucleotide
agccucguuggauccaucc

SEQ ID NO: 1411030 - RNA, 19 nt, Artificial Sequence
  Description of Artificial Sequence: Synthetic oligonucleotide
uaaccugaggguacaacac

SEQ ID NO: 1411031 - RNA, 19 nt, Artificial Sequence
  Description of Artificial Sequence: Synthetic oligonucleotide
ucaacagacuguuuguaua

SEQ ID NO: 1411032 - RNA, 19 nt, Artificial Sequence
  Description of Artificial Sequence: Synthetic oligonucleotide
ccaugaacaagauuguacc

SEQ ID NO: 1411033 - RNA, 19 nt, Artificial Sequence
  Description of Artificial Sequence: Synthetic oligonucleotide
caauuuucaucacguauug

SEQ ID NO: 1411034 - RNA, 19 nt, Artificial Sequence
  Description of Artificial Sequence: Synthetic oligonucleotide
uauugauguaguuggccac

SEQ ID NO: 1411035 - RNA, 19 nt, Artificial Sequence
  Description of Artificial Sequence: Synthetic oligonucleotide
cuuucuucggcagagacca

SEQ ID NO: 1411036 - RNA, 19 nt, Artificial Sequence
  Description of Artificial Sequence: Synthetic oligonucleotide
uccuggaaugguuucaagu

SEQ ID NO: 1411037 - RNA, 19 nt, Artificial Sequence
  Description of Artificial Sequence: Synthetic oligonucleotide
ucauaggguauuucuagaa

SEQ ID NO: 1411038 - RNA, 19 nt, Artificial Sequence
  Description of Artificial Sequence: Synthetic oligonucleotide
ucaagucauguccacuugu

SEQ ID NO: 1411039 - RNA, 19 nt, Artificial Sequence
  Description of Artificial Sequence: Synthetic oligonucleotide
aaguuccucaagucauguc

SEQ ID NO: 1411040 - RNA, 19 nt, Artificial Sequence
  Description of Artificial Sequence: Synthetic oligonucleotide
ucaucugggaaaguagccc

SEQ ID NO: 1411041 - RNA, 19 nt, Artificial Sequence
  Description of Artificial Sequence: Synthetic oligonucleotide
ucggaacuacuuuaaauau

SEQ ID NO: 1411042 - RNA, 19 nt, Artificial Sequence
  Description of Artificial Sequence: Synthetic oligonucleotide
uuguauaauucuccaccca

SEQ ID NO: 1411043 - RNA, 19 nt, Artificial Sequence
  Description of Artificial Sequence: Synthetic oligonucleotide
aguuuguccauucuucaau

SEQ ID NO: 1411044 - RNA, 19 nt, Artificial Sequence
  Description of Artificial Sequence: Synthetic oligonucleotide
cuaaauuccccauaauaaa

SEQ ID NO: 1411045 - RNA, 19 nt, Artificial Sequence
  Description of Artificial Sequence: Synthetic oligonucleotide
aaaauagggugguccacaa

SEQ ID NO: 1411046 - RNA, 19 nt, Artificial Sequence
  Description of Artificial Sequence: Synthetic oligonucleotide
uuuaacagaguuuguccau

SEQ ID NO: 1411047 - RNA, 19 nt, Artificial Sequence
  Description of Artificial Sequence: Synthetic oligonucleotide
gguaacauuucuugacagg

SEQ ID NO: 1411048 - RNA, 19 nt, Artificial Sequence
  Description of Artificial Sequence: Synthetic oligonucleotide
aagucauguccacuugugu

SEQ ID NO: 1411049 - RNA, 19 nt, Artificial Sequence
  Description of Artificial Sequence: Synthetic oligonucleotide
ccuguucuuaauaaggaag

SEQ ID NO: 1411050 - RNA, 19 nt, Artificial Sequence
  Description of Artificial Sequence: Synthetic oligonucleotide
uuggaaucuguacuucacu

SEQ ID NO: 1411051 - RNA, 19 nt, Artificial Sequence
  Description of Artificial Sequence: Synthetic oligonucleotide
uaacauuucuugacaggcu

SEQ ID NO: 1411052 - RNA, 19 nt, Artificial Sequence
  Description of Artificial Sequence: Synthetic oligonucleotide
uuucaggucuaaacuguga

SEQ ID NO: 1411053 - RNA, 19 nt, Artificial Sequence
  Description of Artificial Sequence: Synthetic oligonucleotide
cauaggguauuucuagaac

SEQ ID NO: 1411054 - RNA, 19 nt, Artificial Sequence
  Description of Artificial Sequence: Synthetic oligonucleotide
aguaccagcaucaugcuaa

SEQ ID NO: 1411055 - RNA, 19 nt, Artificial Sequence
  Description of Artificial Sequence: Synthetic oligonucleotide
auccuaacuauauaccaau

SEQ ID NO: 1411056 - RNA, 19 nt, Artificial Sequence
  Description of Artificial Sequence: Synthetic oligonucleotide
aacagaguuuguccauucu

SEQ ID NO: 1411057 - RNA, 19 nt, Artificial Sequence
  Description of Artificial Sequence: Synthetic oligonucleotide
auuuuaauacugguaacau

SEQ ID NO: 1411058 - RNA, 19 nt, Artificial Sequence
  Description of Artificial Sequence: Synthetic oligonucleotide
caccacacuuuguauagcc

SEQ ID NO: 1411059 - RNA, 19 nt, Artificial Sequence
  Description of Artificial Sequence: Synthetic oligonucleotide
cacaauaaccugaggguac

SEQ ID NO: 1411060 - RNA, 19 nt, Artificial Sequence
  Description of Artificial Sequence: Synthetic oligonucleotide
aauccuaacuauauaccaa

SEQ ID NO: 1411061 - RNA, 19 nt, Artificial Sequence
  Description of Artificial Sequence: Synthetic oligonucleotide
uccaucacucccauugcga

SEQ ID NO: 1411062 - RNA, 19 nt, Artificial Sequence
  Description of Artificial Sequence: Synthetic oligonucleotide
uaucccauugaauggcgga

SEQ ID NO: 1411063 - RNA, 19 nt, Artificial Sequence
  Description of Artificial Sequence: Synthetic oligonucleotide
uggcagucaaauuugcauc

SEQ ID NO: 1411064 - RNA, 19 nt, Artificial Sequence
  Description of Artificial Sequence: Synthetic oligonucleotide
  modified_base (5)..(5): a, c, u, g, unknown or other
ccuunuugauacaucauug

SEQ ID NO: 1411065 - RNA, 19 nt, Artificial Sequence
  Description of Artificial Sequence: Synthetic oligonucleotide
  modified_base (9)..(9): a, c, u, g, unknown or other
acagcuacnuuuugacuga

SEQ ID NO: 1411066 - RNA, 19 nt, Artificial Sequence
  Description of Artificial Sequence: Synthetic oligonucleotide
caugacucgucccaugaac

SEQ ID NO: 1411067 - RNA, 19 nt, Artificial Sequence
  Description of Artificial Sequence: Synthetic oligonucleotide
ucuaaacugugauuuccaa

SEQ ID NO: 1411068 - RNA, 19 nt, Artificial Sequence
  Description of Artificial Sequence: Synthetic oligonucleotide
ggagauaccaaaucuuuca

SEQ ID NO: 1411069 - RNA, 19 nt, Artificial Sequence
  Description of Artificial Sequence: Synthetic oligonucleotide
aaaguuccucaagucaugu

SEQ ID NO: 1411070 - RNA, 19 nt, Artificial Sequence
  Description of Artificial Sequence: Synthetic oligonucleotide
uuucaggccaucguauccc

SEQ ID NO: 1411071 - RNA, 19 nt, Artificial Sequence
  Description of Artificial Sequence: Synthetic oligonucleotide
cucggaacuacuuuaaaua

SEQ ID NO: 1411072 - RNA, 19 nt, Artificial Sequence
  Description of Artificial Sequence: Synthetic oligonucleotide
uucaacagacuguuuguau

SEQ ID NO: 1411073 - RNA, 19 nt, Artificial Sequence
  Description of Artificial Sequence: Synthetic oligonucleotide
acuuauugauguaguuggc

SEQ ID NO: 1411074 - RNA, 19 nt, Artificial Sequence
  Description of Artificial Sequence: Synthetic oligonucleotide
uaucugacauggcagucaa

SEQ ID NO: 1411075 - RNA, 19 nt, Artificial Sequence
  Description of Artificial Sequence: Synthetic oligonucleotide
caucuuugaugaaaauuuc

SEQ ID NO: 1411076 - RNA, 19 nt, Artificial Sequence
  Description of Artificial Sequence: Synthetic oligonucleotide
uuuacugaccacucagcua

SEQ ID NO: 1411077 - RNA, 19 nt, Artificial Sequence
  Description of Artificial Sequence: Synthetic oligonucleotide
cugaauuauaggucacaug

SEQ ID NO: 1411078 - RNA, 19 nt, Artificial Sequence
  Description of Artificial Sequence: Synthetic oligonucleotide
guuggauccauccacuaaa

SEQ ID NO: 1411079 - RNA, 19 nt, Artificial Sequence
  Description of Artificial Sequence: Synthetic oligonucleotide
cauccugcuaauugcaauc

SEQ ID NO: 1411080 - RNA, 19 nt, Artificial Sequence
  Description of Artificial Sequence: Synthetic oligonucleotide
uauaggucacauguauuac

SEQ ID NO: 1411081 - RNA, 19 nt, Artificial Sequence
  Description of Artificial Sequence: Synthetic oligonucleotide
uucggcagagaccauguua

SEQ ID NO: 1411082 - RNA, 19 nt, Artificial Sequence
  Description of Artificial Sequence: Synthetic oligonucleotide
uucuugacaggcugaauua

SEQ ID NO: 1411083 - RNA, 19 nt, Artificial Sequence
  Description of Artificial Sequence: Synthetic oligonucleotide
augucagcauucaaaguuc

SEQ ID NO: 1411084 - RNA, 19 nt, Artificial Sequence
  Description of Artificial Sequence: Synthetic oligonucleotide
auuuccaauucccuuugaa

SEQ ID NO: 1411085 - RNA, 19 nt, Artificial Sequence
  Description of Artificial Sequence: Synthetic oligonucleotide
agaaaauucuucaccauuu

SEQ ID NO: 1411086 - RNA, 19 nt, Artificial Sequence
  Description of Artificial Sequence: Synthetic oligonucleotide
caaucauuccggaggcugc

SEQ ID NO: 1411087 - RNA, 19 nt, Artificial Sequence
  Description of Artificial Sequence: Synthetic oligonucleotide
agucaaauuugcaucuuug

SEQ ID NO: 1411088 - RNA, 19 nt, Artificial Sequence
  Description of Artificial Sequence: Synthetic oligonucleotide
ucguaucccauugaauggc

SEQ ID NO: 1411089 - RNA, 19 nt, Artificial Sequence
  Description of Artificial Sequence: Synthetic oligonucleotide
gacuguuuguauaauucuc

SEQ ID NO: 1411090 - RNA, 19 nt, Artificial Sequence
  Description of Artificial Sequence: Synthetic oligonucleotide
auugcgagggcaaugcuca

SEQ ID NO: 1411091 - RNA, 19 nt, Artificial Sequence
  Description of Artificial Sequence: Synthetic oligonucleotide
uaggguauuucuagaacuu

SEQ ID NO: 1411092 - RNA, 19 nt, Artificial Sequence
  Description of Artificial Sequence: Synthetic oligonucleotide
aggucuaaacugugauuuc

SEQ ID NO: 1411093 - RNA, 19 nt, Artificial Sequence
  Description of Artificial Sequence: Synthetic oligonucleotide
guucaucguuucuagggug

SEQ ID NO: 1411094 - RNA, 19 nt, Artificial Sequence
  Description of Artificial Sequence: Synthetic oligonucleotide
aauggcggauuucuuucaa

SEQ ID NO: 1411095 - RNA, 19 nt, Artificial Sequence
  Description of Artificial Sequence: Synthetic oligonucleotide
guuaaccucgaugaaggac

SEQ ID NO: 1411096 - RNA, 19 nt, Artificial Sequence
  Description of Artificial Sequence: Synthetic oligonucleotide
uaauugcaaucauuccgga

SEQ ID NO: 1411097 - RNA, 19 nt, Artificial Sequence
  Description of Artificial Sequence: Synthetic oligonucleotide
uccacuuguguucaucguu

SEQ ID NO: 1411098 - RNA, 19 nt, Artificial Sequence
  Description of Artificial Sequence: Synthetic oligonucleotide
aggucacauguauuacuuc

SEQ ID NO: 1411099 - RNA, 19 nt, Artificial Sequence
  Description of Artificial Sequence: Synthetic oligonucleotide
uuucuaggguggcaugacu

SEQ ID NO: 1411100 - RNA, 19 nt, Artificial Sequence
  Description of Artificial Sequence: Synthetic oligonucleotide
  modified_base (9)..(9): a, c, u, g, unknown or other
uucuccuunuugauacauc

SEQ ID NO: 1411101 - RNA, 19 nt, Artificial Sequence
  Description of Artificial Sequence: Synthetic oligonucleotide
acguauugucuuucuucgg

SEQ ID NO: 1411102 - RNA, 19 nt, Artificial Sequence
  Description of Artificial Sequence: Synthetic oligonucleotide
uaaugcuguaaagcgacaa

SEQ ID NO: 1411103 - RNA, 19 nt, Artificial Sequence
  Description of Artificial Sequence: Synthetic oligonucleotide
ccuaacuauauaccaauug

SEQ ID NO: 1411104 - RNA, 19 nt, Artificial Sequence
  Description of Artificial Sequence: Synthetic oligonucleotide
ucaguggagaaaagagaau

SEQ ID NO: 1411105 - RNA, 19 nt, Artificial Sequence
  Description of Artificial Sequence: Synthetic oligonucleotide
caaugacacaacaggacca

SEQ ID NO: 1411106 - RNA, 19 nt, Artificial Sequence
  Description of Artificial Sequence: Synthetic oligonucleotide
aaguagccccuaucaccac

SEQ ID NO: 1411107 - RNA, 19 nt, Artificial Sequence
  Description of Artificial Sequence: Synthetic oligonucleotide
auauaccaauugcaaacaa

SEQ ID NO: 1411108 - RNA, 19 nt, Artificial Sequence
  Description of Artificial Sequence: Synthetic oligonucleotide
cccuucuucguuaaccucg

SEQ ID NO: 1411109 - RNA, 19 nt, Artificial Sequence
  Description of Artificial Sequence: Synthetic oligonucleotide
cauugcgagggcaaugcuc

SEQ ID NO: 1411110 - RNA, 19 nt, Artificial Sequence
  Description of Artificial Sequence: Synthetic oligonucleotide
uucuagaacuugguagaug

SEQ ID NO: 1411111 - RNA, 19 nt, Artificial Sequence
  Description of Artificial Sequence: Synthetic oligonucleotide
acacaaugacacaacagga

SEQ ID NO: 1411112 - RNA, 19 nt, Artificial Sequence
  Description of Artificial Sequence: Synthetic oligonucleotide
ucuuucaaaguagauccuu

SEQ ID NO: 1411113 - RNA, 19 nt, Artificial Sequence
  Description of Artificial Sequence: Synthetic oligonucleotide
agagaacacuccaaaauaa

SEQ ID NO: 1411114 - RNA, 19 nt, Artificial Sequence
  Description of Artificial Sequence: Synthetic oligonucleotide
ugaaccugggaagguauac

SEQ ID NO: 1411115 - RNA, 19 nt, Artificial Sequence
  Description of Artificial Sequence: Synthetic oligonucleotide
caucacucccauugcgagg

SEQ ID NO: 1411116 - RNA, 19 nt, Artificial Sequence
  Description of Artificial Sequence: Synthetic oligonucleotide
cauuugcaagaacucauca

SEQ ID NO: 1411117 - RNA, 19 nt, Artificial Sequence
  Description of Artificial Sequence: Synthetic oligonucleotide
aaugcucaguggagaaaag

SEQ ID NO: 1411118 - RNA, 19 nt, Artificial Sequence
  Description of Artificial Sequence: Synthetic oligonucleotide
acagacuguuuguauaauu

SEQ ID NO: 1411119 - RNA, 19 nt, Artificial Sequence
  Description of Artificial Sequence: Synthetic oligonucleotide
cuccaucacucccauugcg

SEQ ID NO: 1411120 - RNA, 19 nt, Artificial Sequence
  Description of Artificial Sequence: Synthetic oligonucleotide
ugcuaaucucaucucccuc

SEQ ID NO: 1411121 - RNA, 19 nt, Artificial Sequence
  Description of Artificial Sequence: Synthetic oligonucleotide
cauauuuacugaccacuca

SEQ ID NO: 1411122 - RNA, 19 nt, Artificial Sequence
  Description of Artificial Sequence: Synthetic oligonucleotide
aaucuguacuucacuuuca

SEQ ID NO: 1411123 - RNA, 19 nt, Artificial Sequence
  Description of Artificial Sequence: Synthetic oligonucleotide
guucuuaauaaggaagaaa

SEQ ID NO: 1411124 - RNA, 19 nt, Artificial Sequence
  Description of Artificial Sequence: Synthetic oligonucleotide
cccaugaacaagauuguac

SEQ ID NO: 1411125 - RNA, 19 nt, Artificial Sequence
  Description of Artificial Sequence: Synthetic oligonucleotide
caacuuuggagaggaacag

SEQ ID NO: 1411126 - RNA, 19 nt, Artificial Sequence
  Description of Artificial Sequence: Synthetic oligonucleotide
aaauagggugguccacaau

SEQ ID NO: 1411127 - RNA, 19 nt, Artificial Sequence
  Description of Artificial Sequence: Synthetic oligonucleotide
ugggaaaguagccccuauc

SEQ ID NO: 1411128 - RNA, 19 nt, Artificial Sequence
  Description of Artificial Sequence: Synthetic oligonucleotide
uuggauccauccacuaaau

SEQ ID NO: 1411129 - RNA, 19 nt, Artificial Sequence
  Description of Artificial Sequence: Synthetic oligonucleotide
ucauguccacuuguguuca

SEQ ID NO: 1411130 - RNA, 19 nt, Artificial Sequence
  Description of Artificial Sequence: Synthetic oligonucleotide
uguggccaguggaacuucc

SEQ ID NO: 1411131 - RNA, 19 nt, Artificial Sequence
  Description of Artificial Sequence: Synthetic oligonucleotide
cauuggaaucuguacuuca

SEQ ID NO: 1411132 - RNA, 19 nt, Artificial Sequence
  Description of Artificial Sequence: Synthetic oligonucleotide
ggucuaaacugugauuucc

SEQ ID NO: 1411133 - RNA, 19 nt, Artificial Sequence
  Description of Artificial Sequence: Synthetic oligonucleotide
ucaggucuaaacugugauu

SEQ ID NO: 1411134 - RNA, 19 nt, Artificial Sequence
  Description of Artificial Sequence: Synthetic oligonucleotide
cucgaugaaggacuuguga

SEQ ID NO: 1411135 - RNA, 19 nt, Artificial Sequence
  Description of Artificial Sequence: Synthetic oligonucleotide
gacucgucccaugaacaag

SEQ ID NO: 1411136 - RNA, 19 nt, Artificial Sequence
  Description of Artificial Sequence: Synthetic oligonucleotide
aggccaucguaucccauug

SEQ ID NO: 1411137 - RNA, 19 nt, Artificial Sequence
  Description of Artificial Sequence: Synthetic oligonucleotide
uccuaacuauauaccaauu

SEQ ID NO: 1411138 - RNA, 19 nt, Artificial Sequence
  Description of Artificial Sequence: Synthetic oligonucleotide
uagggugguccacaauaac

SEQ ID NO: 1411139 - RNA, 19 nt, Artificial Sequence
  Description of Artificial Sequence: Synthetic oligonucleotide
aguagccccuaucaccaca

SEQ ID NO: 1411140 - RNA, 19 nt, Artificial Sequence
  Description of Artificial Sequence: Synthetic oligonucleotide
ugauuaacuucugcauuaa

SEQ ID NO: 1411141 - RNA, 19 nt, Artificial Sequence
  Description of Artificial Sequence: Synthetic oligonucleotide
uuugcacaaagagggaauu

SEQ ID NO: 1411142 - RNA, 19 nt, Artificial Sequence
  Description of Artificial Sequence: Synthetic oligonucleotide
acccuucuucguuaaccuc

SEQ ID NO: 1411143 - RNA, 19 nt, Artificial Sequence
  Description of Artificial Sequence: Synthetic oligonucleotide
caucauuugcaagaacuca

SEQ ID NO: 1411144 - RNA, 19 nt, Artificial Sequence
  Description of Artificial Sequence: Synthetic oligonucleotide
uauagccaguaaagagaac

SEQ ID NO: 1411145 - RNA, 19 nt, Artificial Sequence
  Description of Artificial Sequence: Synthetic oligonucleotide
ugacucgucccaugaacaa

SEQ ID NO: 1411146 - RNA, 19 nt, Artificial Sequence
  Description of Artificial Sequence: Synthetic oligonucleotide
ucauuggaaucuguacuuc

SEQ ID NO: 1411147 - RNA, 19 nt, Artificial Sequence
  Description of Artificial Sequence: Synthetic oligonucleotide
guauacuuccaccuuuugu

SEQ ID NO: 1411148 - RNA, 19 nt, Artificial Sequence
  Description of Artificial Sequence: Synthetic oligonucleotide
agcuaugguuucaucuggg

SEQ ID NO: 1411149 - RNA, 19 nt, Artificial Sequence
  Description of Artificial Sequence: Synthetic oligonucleotide
guaucccauugaauggcgg

SEQ ID NO: 1411150 - RNA, 19 nt, Artificial Sequence
  Description of Artificial Sequence: Synthetic oligonucleotide
cuguaaagcgacaauccua

SEQ ID NO: 1411151 - RNA, 19 nt, Artificial Sequence
  Description of Artificial Sequence: Synthetic oligonucleotide
  modified_base (3)..(3): a, c, u, g, unknown or other
acnuuuugacugaaaucca

SEQ ID NO: 1411152 - RNA, 19 nt, Artificial Sequence
  Description of Artificial Sequence: Synthetic oligonucleotide
accuuaaauaaugcuguaa

SEQ ID NO: 1411153 - RNA, 19 nt, Artificial Sequence
  Description of Artificial Sequence: Synthetic oligonucleotide
ucuugacaggcugaauuau

SEQ ID NO: 1411154 - RNA, 19 nt, Artificial Sequence
  Description of Artificial Sequence: Synthetic oligonucleotide
cuaugguuucaucugggaa

SEQ ID NO: 1411155 - RNA, 19 nt, Artificial Sequence
  Description of Artificial Sequence: Synthetic oligonucleotide
ggaaaguagccccuaucac

SEQ ID NO: 1411156 - RNA, 19 nt, Artificial Sequence
  Description of Artificial Sequence: Synthetic oligonucleotide
cucaagucauguccacuug

SEQ ID NO: 1411157 - RNA, 19 nt, Artificial Sequence
  Description of Artificial Sequence: Synthetic oligonucleotide
ugaugagggccagaugagu

SEQ ID NO: 1411158 - RNA, 19 nt, Artificial Sequence
  Description of Artificial Sequence: Synthetic oligonucleotide
augacucgucccaugaaca

SEQ ID NO: 1411159 - RNA, 19 nt, Artificial Sequence
  Description of Artificial Sequence: Synthetic oligonucleotide
uucaggccaucguauccca

SEQ ID NO: 1411160 - RNA, 19 nt, Artificial Sequence
  Description of Artificial Sequence: Synthetic oligonucleotide
ucaucguuucuaggguggc

SEQ ID NO: 1411161 - RNA, 19 nt, Artificial Sequence
  Description of Artificial Sequence: Synthetic oligonucleotide
cuuaucugacauggcaguc

SEQ ID NO: 1411162 - RNA, 19 nt, Artificial Sequence
  Description of Artificial Sequence: Synthetic oligonucleotide
ucaucacguauugucuuuc

SEQ ID NO: 1411163 - RNA, 19 nt, Artificial Sequence
  Description of Artificial Sequence: Synthetic oligonucleotide
ggucacauguauuacuucu

SEQ ID NO: 1411164 - RNA, 19 nt, Artificial Sequence
  Description of Artificial Sequence: Synthetic oligonucleotide
aucguuucuaggguggcau

SEQ ID NO: 1411165 - RNA, 19 nt, Artificial Sequence
  Description of Artificial Sequence: Synthetic oligonucleotide
gccaguaaagagaacacuc

SEQ ID NO: 1411166 - RNA, 19 nt, Artificial Sequence
  Description of Artificial Sequence: Synthetic oligonucleotide
ucugacccuucuucguuaa

SEQ ID NO: 1411167 - RNA, 19 nt, Artificial Sequence
  Description of Artificial Sequence: Synthetic oligonucleotide
ucguuucuaggguggcaug

SEQ ID NO: 1411168 - RNA, 19 nt, Artificial Sequence
  Description of Artificial Sequence: Synthetic oligonucleotide
gaauuauaggucacaugua

SEQ ID NO: 1411169 - RNA, 19 nt, Artificial Sequence
  Description of Artificial Sequence: Synthetic oligonucleotide
cucgaagaugguuauacau

SEQ ID NO: 1411170 - RNA, 19 nt, Artificial Sequence
  Description of Artificial Sequence: Synthetic oligonucleotide
ggaagguauacuuccaccu

SEQ ID NO: 1411171 - RNA, 19 nt, Artificial Sequence
  Description of Artificial Sequence: Synthetic oligonucleotide
cauuuugcacaaagaggga

SEQ ID NO: 1411172 - RNA, 19 nt, Artificial Sequence
  Description of Artificial Sequence: Synthetic oligonucleotide
gcggauuucuuucaaagua

SEQ ID NO: 1411173 - RNA, 19 nt, Artificial Sequence
  Description of Artificial Sequence: Synthetic oligonucleotide
gucuaaacugugauuucca

SEQ ID NO: 1411174 - RNA, 19 nt, Artificial Sequence
  Description of Artificial Sequence: Synthetic oligonucleotide
auuguaccaguuuccuguu

SEQ ID NO: 1411175 - RNA, 19 nt, Artificial Sequence
  Description of Artificial Sequence: Synthetic oligonucleotide
uggauccauccacuaaauu

SEQ ID NO: 1411176 - RNA, 19 nt, Artificial Sequence
  Description of Artificial Sequence: Synthetic oligonucleotide
  modified_base (6)..(6): a, c, u, g, unknown or other
gcuacnuuuugacugaaau

SEQ ID NO: 1411177 - RNA, 19 nt, Artificial Sequence
  Description of Artificial Sequence: Synthetic oligonucleotide
cauggcagucaaauuugca

SEQ ID NO: 1411178 - RNA, 19 nt, Artificial Sequence
  Description of Artificial Sequence: Synthetic oligonucleotide
cauugaugagggccagaug

SEQ ID NO: 1411179 - RNA, 19 nt, Artificial Sequence
  Description of Artificial Sequence: Synthetic oligonucleotide
gcaaucauuccggaggcug

SEQ ID NO: 1411180 - RNA, 19 nt, Artificial Sequence
  Description of Artificial Sequence: Synthetic oligonucleotide
cuuguguucaucguuucua

SEQ ID NO: 1411181 - RNA, 19 nt, Artificial Sequence
  Description of Artificial Sequence: Synthetic oligonucleotide
auccugcuaauugcaauca

SEQ ID NO: 1411182 - RNA, 19 nt, Artificial Sequence
  Description of Artificial Sequence: Synthetic oligonucleotide
uugagccccaagcuccauc

SEQ ID NO: 1411183 - RNA, 19 nt, Artificial Sequence
  Description of Artificial Sequence: Synthetic oligonucleotide
aucacguauugucuuucuu

SEQ ID NO: 1411184 - RNA, 19 nt, Artificial Sequence
  Description of Artificial Sequence: Synthetic oligonucleotide
agaugguuauacauauuua

SEQ ID NO: 1411185 - RNA, 19 nt, Artificial Sequence
  Description of Artificial Sequence: Synthetic oligonucleotide
caggaccauaauuuuaaua

SEQ ID NO: 1411186 - RNA, 19 nt, Artificial Sequence
  Description of Artificial Sequence: Synthetic oligonucleotide
ccacuuauugauguaguug

SEQ ID NO: 1411187 - RNA, 19 nt, Artificial Sequence
  Description of Artificial Sequence: Synthetic oligonucleotide
gacccuucuucguuaaccu

SEQ ID NO: 1411188 - RNA, 19 nt, Artificial Sequence
  Description of Artificial Sequence: Synthetic oligonucleotide
uccucaagucauguccacu

SEQ ID NO: 1411189 - RNA, 19 nt, Artificial Sequence
  Description of Artificial Sequence: Synthetic oligonucleotide
guuccucaagucaugucca

SEQ ID NO: 1411190 - RNA, 19 nt, Artificial Sequence
  Description of Artificial Sequence: Synthetic oligonucleotide
cauugaauggcggauuucu

SEQ ID NO: 1411191 - RNA, 19 nt, Artificial Sequence
  Description of Artificial Sequence: Synthetic oligonucleotide
acacuccaaaauaagccau

SEQ ID NO: 1411192 - RNA, 19 nt, Artificial Sequence
  Description of Artificial Sequence: Synthetic oligonucleotide
uuguaccaguuuccuguuc

SEQ ID NO: 1411193 - RNA, 19 nt, Artificial Sequence
  Description of Artificial Sequence: Synthetic oligonucleotide
gguggcaugacucguccca

SEQ ID NO: 1411194 - RNA, 19 nt, Artificial Sequence
  Description of Artificial Sequence: Synthetic oligonucleotide
cacuuguguucaucguuuc

SEQ ID NO: 1411195 - RNA, 19 nt, Artificial Sequence
  Description of Artificial Sequence: Synthetic oligonucleotide
cuugacaggcugaauuaua

SEQ ID NO: 1411196 - RNA, 19 nt, Artificial Sequence
  Description of Artificial Sequence: Synthetic oligonucleotide
guauuacuucuacucggaa

SEQ ID NO: 1411197 - RNA, 19 nt, Artificial Sequence
  Description of Artificial Sequence: Synthetic oligonucleotide
ccaucacucccauugcgag

SEQ ID NO: 1411198 - RNA, 19 nt, Artificial Sequence
  Description of Artificial Sequence: Synthetic oligonucleotide
uaaccucgaugaaggacuu

SEQ ID NO: 1411199 - RNA, 19 nt, Artificial Sequence
  Description of Artificial Sequence: Synthetic oligonucleotide
  modified_base (19)..(19): a, c, u, g, unknown or other
ccauaauaaauucuccuun

SEQ ID NO: 1411200 - RNA, 19 nt, Artificial Sequence
  Description of Artificial Sequence: Synthetic oligonucleotide
ggcaauuuucaucacguau

SEQ ID NO: 1411201 - RNA, 19 nt, Artificial Sequence
  Description of Artificial Sequence: Synthetic oligonucleotide
auggcggauuucuuucaaa

SEQ ID NO: 1411202 - RNA, 19 nt, Artificial Sequence
  Description of Artificial Sequence: Synthetic oligonucleotide
gaagguauacuuccaccuu

SEQ ID NO: 1411203 - RNA, 19 nt, Artificial Sequence
  Description of Artificial Sequence: Synthetic oligonucleotide
auagggugguccacaauaa

SEQ ID NO: 1411204 - RNA, 19 nt, Artificial Sequence
  Description of Artificial Sequence: Synthetic oligonucleotide
agccccuaucaccacacuu

SEQ ID NO: 1411205 - RNA, 19 nt, Artificial Sequence
  Description of Artificial Sequence: Synthetic oligonucleotide
guagccccuaucaccacac

SEQ ID NO: 1411206 - RNA, 19 nt, Artificial Sequence
  Description of Artificial Sequence: Synthetic oligonucleotide
guauaauucuccacccacu

SEQ ID NO: 1411207 - RNA, 19 nt, Artificial Sequence
  Description of Artificial Sequence: Synthetic oligonucleotide
caggucuaaacugugauuu

SEQ ID NO: 1411208 - RNA, 19 nt, Artificial Sequence
  Description of Artificial Sequence: Synthetic oligonucleotide
ggcagucaaauuugcaucu

SEQ ID NO: 1411209 - RNA, 19 nt, Artificial Sequence
  Description of Artificial Sequence: Synthetic oligonucleotide
cacauguauuacuucuacu

SEQ ID NO: 1411210 - RNA, 19 nt, Artificial Sequence
  Description of Artificial Sequence: Synthetic oligonucleotide
ugcgagggcaaugcucagu

SEQ ID NO: 1411211 - RNA, 19 nt, Artificial Sequence
  Description of Artificial Sequence: Synthetic oligonucleotide
gcuaugguuucaucuggga

SEQ ID NO: 1411212 - RNA, 19 nt, Artificial Sequence
  Description of Artificial Sequence: Synthetic oligonucleotide
augugcuuuauuacugcuu

SEQ ID NO: 1411213 - RNA, 19 nt, Artificial Sequence
  Description of Artificial Sequence: Synthetic oligonucleotide
cguaucccauugaauggcg

SEQ ID NO: 1411214 - RNA, 19 nt, Artificial Sequence
  Description of Artificial Sequence: Synthetic oligonucleotide
agccauccugcuaauugca

SEQ ID NO: 1411215 - RNA, 19 nt, Artificial Sequence
  Description of Artificial Sequence: Synthetic oligonucleotide
gaccacucagcuaugguuu

SEQ ID NO: 1411216 - RNA, 19 nt, Artificial Sequence
  Description of Artificial Sequence: Synthetic oligonucleotide
cauugauaugaaauccauu

SEQ ID NO: 1411217 - RNA, 19 nt, Artificial Sequence
  Description of Artificial Sequence: Synthetic oligonucleotide
auguaguuggccacagcua

SEQ ID NO: 1411218 - RNA, 19 nt, Artificial Sequence
  Description of Artificial Sequence: Synthetic oligonucleotide
ugcaaucauuccggaggcu

SEQ ID NO: 1411219 - RNA, 19 nt, Artificial Sequence
  Description of Artificial Sequence: Synthetic oligonucleotide
ucaggccaucguaucccau

SEQ ID NO: 1411220 - RNA, 19 nt, Artificial Sequence
  Description of Artificial Sequence: Synthetic oligonucleotide
cacacuuuguauagccagu

SEQ ID NO: 1411221 - RNA, 19 nt, Artificial Sequence
  Description of Artificial Sequence: Synthetic oligonucleotide
cccauugcgagggcaaugc

SEQ ID NO: 1411222 - RNA, 19 nt, Artificial Sequence
  Description of Artificial Sequence: Synthetic oligonucleotide
gcuguaaagcgacaauccu

SEQ ID NO: 1411223 - RNA, 19 nt, Artificial Sequence
  Description of Artificial Sequence: Synthetic oligonucleotide
gaaccugggaagguauacu

SEQ ID NO: 1411224 - RNA, 19 nt, Artificial Sequence
  Description of Artificial Sequence: Synthetic oligonucleotide
cacuuuguauagccaguaa

SEQ ID NO: 1411225 - RNA, 19 nt, Artificial Sequence
  Description of Artificial Sequence: Synthetic oligonucleotide
agagggaauuuggcaauuu

SEQ ID NO: 1411226 - RNA, 19 nt, Artificial Sequence
  Description of Artificial Sequence: Synthetic oligonucleotide
cuaucaccacacuuuguau

SEQ ID NO: 1411227 - RNA, 19 nt, Artificial Sequence
  Description of Artificial Sequence: Synthetic oligonucleotide
cuucaaucagcugugcuuu

SEQ ID NO: 1411228 - RNA, 19 nt, Artificial Sequence
  Description of Artificial Sequence: Synthetic oligonucleotide
cuucguuaaccucgaugaa

SEQ ID NO: 1411229 - RNA, 19 nt, Artificial Sequence
  Description of Artificial Sequence: Synthetic oligonucleotide
  modified_base (7)..(7): a, c, u, g, unknown or other
agcuacnuuuugacugaaa

SEQ ID NO: 1411230 - RNA, 19 nt, Artificial Sequence
  Description of Artificial Sequence: Synthetic oligonucleotide
gccaucguaucccauugaa

SEQ ID NO: 1411231 - RNA, 19 nt, Artificial Sequence
  Description of Artificial Sequence: Synthetic oligonucleotide
cucguuggauccauccacu

SEQ ID NO: 1411232 - RNA, 19 nt, Artificial Sequence
  Description of Artificial Sequence: Synthetic oligonucleotide
gcaagaacucaucauugau

SEQ ID NO: 1411233 - RNA, 19 nt, Artificial Sequence
  Description of Artificial Sequence: Synthetic oligonucleotide
gggugguccacaauaaccu

SEQ ID NO: 1411234 - RNA, 19 nt, Artificial Sequence
  Description of Artificial Sequence: Synthetic oligonucleotide
cugacccuucuucguuaac

SEQ ID NO: 1411235 - RNA, 19 nt, Artificial Sequence
  Description of Artificial Sequence: Synthetic oligonucleotide
gcucgaagaugguuauaca

SEQ ID NO: 1411236 - RNA, 19 nt, Artificial Sequence
  Description of Artificial Sequence: Synthetic oligonucleotide
ggcugaauuauaggucaca

SEQ ID NO: 1411237 - RNA, 19 nt, Artificial Sequence
  Description of Artificial Sequence: Synthetic oligonucleotide
cauccuggaaugguuucaa

SEQ ID NO: 1411238 - RNA, 19 nt, Artificial Sequence
  Description of Artificial Sequence: Synthetic oligonucleotide
ggcggauuucuuucaaagu

SEQ ID NO: 1411239 - RNA, 19 nt, Artificial Sequence
  Description of Artificial Sequence: Synthetic oligonucleotide
caucacguauugucuuucu

SEQ ID NO: 1411240 - RNA, 19 nt, Artificial Sequence
  Description of Artificial Sequence: Synthetic oligonucleotide
ccccauaauaaauucuccu

SEQ ID NO: 1411241 - RNA, 19 nt, Artificial Sequence
  Description of Artificial Sequence: Synthetic oligonucleotide
caucguuucuaggguggca

SEQ ID NO: 1411242 - RNA, 19 nt, Artificial Sequence
  Description of Artificial Sequence: Synthetic oligonucleotide
gcugaauuauaggucacau

SEQ ID NO: 1411243 - RNA, 19 nt, Artificial Sequence
  Description of Artificial Sequence: Synthetic oligonucleotide
uaccagcaucaugcuaauc

SEQ ID NO: 1411244 - RNA, 19 nt, Artificial Sequence
  Description of Artificial Sequence: Synthetic oligonucleotide
gaagaugguuauacauauu

SEQ ID NO: 1411245 - RNA, 19 nt, Artificial Sequence
  Description of Artificial Sequence: Synthetic oligonucleotide
ccuucuucguuaaccucga

SEQ ID NO: 1411246 - RNA, 19 nt, Artificial Sequence
  Description of Artificial Sequence: Synthetic oligonucleotide
cugugaaccugggaaggua

SEQ ID NO: 1411247 - RNA, 19 nt, Artificial Sequence
  Description of Artificial Sequence: Synthetic oligonucleotide
cagucaaauuugcaucuuu

SEQ ID NO: 1411248 - RNA, 19 nt, Artificial Sequence
  Description of Artificial Sequence: Synthetic oligonucleotide
ggguggcaugacucguccc

SEQ ID NO: 1411249 - RNA, 19 nt, Artificial Sequence
  Description of Artificial Sequence: Synthetic oligonucleotide
caguaccagcaucaugcua

SEQ ID NO: 1411250 - RNA, 19 nt, Artificial Sequence
  Description of Artificial Sequence: Synthetic oligonucleotide
guggcucgaagaugguuau

SEQ ID NO: 1411251 - RNA, 19 nt, Artificial Sequence
  Description of Artificial Sequence: Synthetic oligonucleotide
cugaccacucagcuauggu

SEQ ID NO: 1411252 - RNA, 19 nt, Artificial Sequence
  Description of Artificial Sequence: Synthetic oligonucleotide
gggcaaugcucaguggaga

SEQ ID NO: 1411253 - RNA, 19 nt, Artificial Sequence
  Description of Artificial Sequence: Synthetic oligonucleotide
cugacauggcagucaaauu

SEQ ID NO: 1411254 - RNA, 19 nt, Artificial Sequence
  Description of Artificial Sequence: Synthetic oligonucleotide
gagggccagaugagugaca

SEQ ID NO: 1411255 - RNA, 19 nt, Artificial Sequence
  Description of Artificial Sequence: Synthetic oligonucleotide
cacucccauugcgagggca

SEQ ID NO: 1411256 - RNA, 19 nt, Artificial Sequence
  Description of Artificial Sequence: Synthetic oligonucleotide
guaccagcaucaugcuaau

SEQ ID NO: 1411257 - RNA, 19 nt, Artificial Sequence
  Description of Artificial Sequence: Synthetic oligonucleotide
gugaaccugggaagguaua

SEQ ID NO: 1411258 - RNA, 19 nt, Artificial Sequence
  Description of Artificial Sequence: Synthetic oligonucleotide
caggccaucguaucccauu

SEQ ID NO: 1411259 - RNA, 19 nt, Artificial Sequence
  Description of Artificial Sequence: Synthetic oligonucleotide
cccucauaggguauuucua

SEQ ID NO: 1411260 - RNA, 19 nt, Artificial Sequence
  Description of Artificial Sequence: Synthetic oligonucleotide
ggccaucguaucccauuga

SEQ ID NO: 1411261 - RNA, 19 nt, Artificial Sequence
  Description of Artificial Sequence: Synthetic oligonucleotide
gcaugacucgucccaugaa

SEQ ID NO: 1411262 - RNA, 19 nt, Artificial Sequence
  Description of Artificial Sequence: Synthetic oligonucleotide
ccauugaauggcggauuuc

SEQ ID NO: 1411263 - RNA, 19 nt, Artificial Sequence
  Description of Artificial Sequence: Synthetic oligonucleotide
ccaaaucuuucaacagacu

SEQ ID NO: 1411264 - RNA, 19 nt, Artificial Sequence
  Description of Artificial Sequence: Synthetic oligonucleotide
gcaaugcucaguggagaaa

SEQ ID NO: 1411265 - RNA, 19 nt, Artificial Sequence
  Description of Artificial Sequence: Synthetic oligonucleotide
ccauccuggaaugguuuca

SEQ ID NO: 1411266 - RNA, 19 nt, Artificial Sequence
  Description of Artificial Sequence: Synthetic oligonucleotide
  modified_base (8)..(8): a, c, u, g, unknown or other
cagcuacnuuuugacugaa

SEQ ID NO: 1411267 - RNA, 19 nt, Artificial Sequence
  Description of Artificial Sequence: Synthetic oligonucleotide
ccacuuguguucaucguuu

SEQ ID NO: 1411268 - RNA, 19 nt, Artificial Sequence
  Description of Artificial Sequence: Synthetic oligonucleotide
guagauccuugagccccaa

SEQ ID NO: 1411269 - RNA, 19 nt, Artificial Sequence
  Description of Artificial Sequence: Synthetic oligonucleotide
gccccuaucaccacacuuu

SEQ ID NO: 1411270 - RNA, 19 nt, Artificial Sequence
  Description of Artificial Sequence: Synthetic oligonucleotide
gccauccugcuaauugcaa

SEQ ID NO: 1411271 - RNA, 19 nt, Artificial Sequence
  Description of Artificial Sequence: Synthetic oligonucleotide
cguuaaccucgaugaagga

SEQ ID NO: 1411272 - RNA, 19 nt, Artificial Sequence
  Description of Artificial Sequence: Synthetic oligonucleotide
ccaucguaucccauugaau

SEQ ID NO: 1411273 - RNA, 19 nt, Artificial Sequence
  Description of Artificial Sequence: Synthetic oligonucleotide
cccacuuauugauguaguu

SEQ ID NO: 1411274 - RNA, 19 nt, Artificial Sequence
  Description of Artificial Sequence: Synthetic oligonucleotide
cauguccacuuguguucau

SEQ ID NO: 1411275 - RNA, 19 nt, Artificial Sequence
  Description of Artificial Sequence: Synthetic oligonucleotide
cuucuucguuaaccucgau

SEQ ID NO: 1411276 - RNA, 19 nt, Artificial Sequence
  Description of Artificial Sequence: Synthetic oligonucleotide
cuucggcagagaccauguu

SEQ ID NO: 1411277 - RNA, 19 nt, Artificial Sequence
  Description of Artificial Sequence: Synthetic oligonucleotide
gcagucaaauuugcaucuu

SEQ ID NO: 1411278 - RNA, 19 nt, Artificial Sequence
  Description of Artificial Sequence: Synthetic oligonucleotide
cccuaucaccacacuuugu

SEQ ID NO: 1411279 - RNA, 19 nt, Artificial Sequence
  Description of Artificial Sequence: Synthetic oligonucleotide
ccauugcgagggcaaugcu

SEQ ID NO: 1411280 - RNA, 19 nt, Artificial Sequence
  Description of Artificial Sequence: Synthetic oligonucleotide
cuugagccccaagcuccau

SEQ ID NO: 1411281 - RNA, 19 nt, Artificial Sequence
  Description of Artificial Sequence: Synthetic oligonucleotide
cggcagagaccauguuaga

SEQ ID NO: 1411282 - RNA, 19 nt, Artificial Sequence
  Description of Artificial Sequence: Synthetic oligonucleotide
aagaaguagucuuuggcgc

SEQ ID NO: 1411283 - RNA, 19 nt, Artificial Sequence
  Description of Artificial Sequence: Synthetic oligonucleotide
cuuuugaacagcaagcuug

SEQ ID NO: 1411284 - RNA, 19 nt, Artificial Sequence
  Description of Artificial Sequence: Synthetic oligonucleotide
gaaagaagcagguguaggg

SEQ ID NO: 1411285 - RNA, 19 nt, Artificial Sequence
  Description of Artificial Sequence: Synthetic oligonucleotide
ucuauuuuggaugagcccc

SEQ ID NO: 1411286 - RNA, 19 nt, Artificial Sequence
  Description of Artificial Sequence: Synthetic oligonucleotide
auaaauggcagggugaggg

SEQ ID NO: 1411287 - RNA, 19 nt, Artificial Sequence
  Description of Artificial Sequence: Synthetic oligonucleotide
uuagcacacagcuaguaag

SEQ ID NO: 1411288 - RNA, 19 nt, Artificial Sequence
  Description of Artificial Sequence: Synthetic oligonucleotide
uaaauaaauggcaggguga

SEQ ID NO: 1411289 - RNA, 19 nt, Artificial Sequence
  Description of Artificial Sequence: Synthetic oligonucleotide
gagucauauuccuucaccg

SEQ ID NO: 1411290 - RNA, 19 nt, Artificial Sequence
  Description of Artificial Sequence: Synthetic oligonucleotide
gauugcucucaucagacag

SEQ ID NO: 1411291 - RNA, 19 nt, Artificial Sequence
  Description of Artificial Sequence: Synthetic oligonucleotide
gacaagguaggagagauag

SEQ ID NO: 1411292 - RNA, 19 nt, Artificial Sequence
  Description of Artificial Sequence: Synthetic oligonucleotide
aaauaaauggcagggugag

SEQ ID NO: 1411293 - RNA, 19 nt, Artificial Sequence
  Description of Artificial Sequence: Synthetic oligonucleotide
ugaacagcaagcuuggcgu

SEQ ID NO: 1411294 - RNA, 19 nt, Artificial Sequence
  Description of Artificial Sequence: Synthetic oligonucleotide
uggcauacaucucacacgc

SEQ ID NO: 1411295 - RNA, 19 nt, Artificial Sequence
  Description of Artificial Sequence: Synthetic oligonucleotide
ucuggcauacaucucacac

SEQ ID NO: 1411296 - RNA, 19 nt, Artificial Sequence
  Description of Artificial Sequence: Synthetic oligonucleotide
agaaguggcagagagccgc

SEQ ID NO: 1411297 - RNA, 19 nt, Artificial Sequence
  Description of Artificial Sequence: Synthetic oligonucleotide
cuaguaaggagaugggacc

SEQ ID NO: 1411298 - RNA, 19 nt, Artificial Sequence
  Description of Artificial Sequence: Synthetic oligonucleotide
cucgaauccgagaaggccg

SEQ ID NO: 1411299 - RNA, 19 nt, Artificial Sequence
  Description of Artificial Sequence: Synthetic oligonucleotide
uguguuaucucugcugggg

SEQ ID NO: 1411300 - RNA, 19 nt, Artificial Sequence
  Description of Artificial Sequence: Synthetic oligonucleotide
uauagaucucgauugcucu

SEQ ID NO: 1411301 - RNA, 19 nt, Artificial Sequence
  Description of Artificial Sequence: Synthetic oligonucleotide
agggguagaggucaccacc

SEQ ID NO: 1411302 - RNA, 19 nt, Artificial Sequence
  Description of Artificial Sequence: Synthetic oligonucleotide
cuugcauucccucgaaucc

SEQ ID NO: 1411303 - RNA, 19 nt, Artificial Sequence
  Description of Artificial Sequence: Synthetic oligonucleotide
ugguccagccuugagaugg

SEQ ID NO: 1411304 - RNA, 19 nt, Artificial Sequence
  Description of Artificial Sequence: Synthetic oligonucleotide
gcuuaaauaaauggcaggg

SEQ ID NO: 1411305 - RNA, 19 nt, Artificial Sequence
  Description of Artificial Sequence: Synthetic oligonucleotide
uccucgucacccuggaucg

SEQ ID NO: 1411306 - RNA, 19 nt, Artificial Sequence
  Description of Artificial Sequence: Synthetic oligonucleotide
aacauguucgccgcucugg

SEQ ID NO: 1411307 - RNA, 19 nt, Artificial Sequence
  Description of Artificial Sequence: Synthetic oligonucleotide
uucuauuuuggaugagccc

SEQ ID NO: 1411308 - RNA, 19 nt, Artificial Sequence
  Description of Artificial Sequence: Synthetic oligonucleotide
aauggccucuugugggucg

SEQ ID NO: 1411309 - RNA, 19 nt, Artificial Sequence
  Description of Artificial Sequence: Synthetic oligonucleotide
uugagcaugucgaugcaga

SEQ ID NO: 1411310 - RNA, 19 nt, Artificial Sequence
  Description of Artificial Sequence: Synthetic oligonucleotide
ucgauugcucucaucagac

SEQ ID NO: 1411311 - RNA, 19 nt, Artificial Sequence
  Description of Artificial Sequence: Synthetic oligonucleotide
uuguuggcugagcuguugg

SEQ ID NO: 1411312 - RNA, 19 nt, Artificial Sequence
  Description of Artificial Sequence: Synthetic oligonucleotide
cuggcauacaucucacacg

SEQ ID NO: 1411313 - RNA, 19 nt, Artificial Sequence
  Description of Artificial Sequence: Synthetic oligonucleotide
cuuggcguugagcaugucg

SEQ ID NO: 1411314 - RNA, 19 nt, Artificial Sequence
  Description of Artificial Sequence: Synthetic oligonucleotide
uuggcugcaaucgugaauc

SEQ ID NO: 1411315 - RNA, 19 nt, Artificial Sequence
  Description of Artificial Sequence: Synthetic oligonucleotide
auagaucucgauugcucuc

SEQ ID NO: 1411316 - RNA, 19 nt, Artificial Sequence
  Description of Artificial Sequence: Synthetic oligonucleotide
acauguucgccgcucuggc

SEQ ID NO: 1411317 - RNA, 19 nt, Artificial Sequence
  Description of Artificial Sequence: Synthetic oligonucleotide
gaaagcguugccugcgucc

SEQ ID NO: 1411318 - RNA, 19 nt, Artificial Sequence
  Description of Artificial Sequence: Synthetic oligonucleotide
cacgcuucuucuauuuugg

SEQ ID NO: 1411319 - RNA, 19 nt, Artificial Sequence
  Description of Artificial Sequence: Synthetic oligonucleotide
uaguaaggagaugggaccg

SEQ ID NO: 1411320 - RNA, 19 nt, Artificial Sequence
  Description of Artificial Sequence: Synthetic oligonucleotide
ucugacugacagaugggug

SEQ ID NO: 1411321 - RNA, 19 nt, Artificial Sequence
  Description of Artificial Sequence: Synthetic oligonucleotide
caugucuguauagaucucg

SEQ ID NO: 1411322 - RNA, 19 nt, Artificial Sequence
  Description of Artificial Sequence: Synthetic oligonucleotide
aagaaggacugugaguucu

SEQ ID NO: 1411323 - RNA, 19 nt, Artificial Sequence
  Description of Artificial Sequence: Synthetic oligonucleotide
ucauagugggcgauggccu

SEQ ID NO: 1411324 - RNA, 19 nt, Artificial Sequence
  Description of Artificial Sequence: Synthetic oligonucleotide
ucgaauccgagaaggccgg

SEQ ID NO: 1411325 - RNA, 19 nt, Artificial Sequence
  Description of Artificial Sequence: Synthetic oligonucleotide
gacguauccaugaugucgc

SEQ ID NO: 1411326 - RNA, 19 nt, Artificial Sequence
  Description of Artificial Sequence: Synthetic oligonucleotide
auucccucgaauccgagaa

SEQ ID NO: 1411327 - RNA, 19 nt, Artificial Sequence
  Description of Artificial Sequence: Synthetic oligonucleotide
cagguguagggcaaggccc

SEQ ID NO: 1411328 - RNA, 19 nt, Artificial Sequence
  Description of Artificial Sequence: Synthetic oligonucleotide
aucucagcgauggagaugu

SEQ ID NO: 1411329 - RNA, 19 nt, Artificial Sequence
  Description of Artificial Sequence: Synthetic oligonucleotide
ggcuuaaauaaauggcagg

SEQ ID NO: 1411330 - RNA, 19 nt, Artificial Sequence
  Description of Artificial Sequence: Synthetic oligonucleotide
augucgauggccuucuggu

SEQ ID NO: 1411331 - RNA, 19 nt, Artificial Sequence
  Description of Artificial Sequence: Synthetic oligonucleotide
ucuugaaagcguugccugc

SEQ ID NO: 1411332 - RNA, 19 nt, Artificial Sequence
  Description of Artificial Sequence: Synthetic oligonucleotide
ucccucgaauccgagaagg

SEQ ID NO: 1411333 - RNA, 19 nt, Artificial Sequence
  Description of Artificial Sequence: Synthetic oligonucleotide
guugccugcguccacgaag

SEQ ID NO: 1411334 - RNA, 19 nt, Artificial Sequence
  Description of Artificial Sequence: Synthetic oligonucleotide
ucggcuuucuugaaagcgu

SEQ ID NO: 1411335 - RNA, 19 nt, Artificial Sequence
  Description of Artificial Sequence: Synthetic oligonucleotide
aaagcguucccggcagcgc

SEQ ID NO: 1411336 - RNA, 19 nt, Artificial Sequence
  Description of Artificial Sequence: Synthetic oligonucleotide
cacucgaccuucauauucc

SEQ ID NO: 1411337 - RNA, 19 nt, Artificial Sequence
  Description of Artificial Sequence: Synthetic oligonucleotide
uuggcgcuguacuugagga

SEQ ID NO: 1411338 - RNA, 19 nt, Artificial Sequence
  Description of Artificial Sequence: Synthetic oligonucleotide
guauccaugaugucgcgca

SEQ ID NO: 1411339 - RNA, 19 nt, Artificial Sequence
  Description of Artificial Sequence: Synthetic oligonucleotide
auagaugucgauggccuuc

SEQ ID NO: 1411340 - RNA, 19 nt, Artificial Sequence
  Description of Artificial Sequence: Synthetic oligonucleotide
uugccugcguccacgaagc

SEQ ID NO: 1411341 - RNA, 19 nt, Artificial Sequence
  Description of Artificial Sequence: Synthetic oligonucleotide
ucgccuuuguaguagucug

SEQ ID NO: 1411342 - RNA, 19 nt, Artificial Sequence
  Description of Artificial Sequence: Synthetic oligonucleotide
cagagagccgccuugaaga

SEQ ID NO: 1411343 - RNA, 19 nt, Artificial Sequence
  Description of Artificial Sequence: Synthetic oligonucleotide
uugcauucccucgaauccg

SEQ ID NO: 1411344 - RNA, 19 nt, Artificial Sequence
  Description of Artificial Sequence: Synthetic oligonucleotide
agucauauuccuucaccga

SEQ ID NO: 1411345 - RNA, 19 nt, Artificial Sequence
  Description of Artificial Sequence: Synthetic oligonucleotide
aagauguggcccgcauugc

SEQ ID NO: 1411346 - RNA, 19 nt, Artificial Sequence
  Description of Artificial Sequence: Synthetic oligonucleotide
agaaguagucuuuggcgcu

SEQ ID NO: 1411347 - RNA, 19 nt, Artificial Sequence
  Description of Artificial Sequence: Synthetic oligonucleotide
cuugaaagcguugccugcg

SEQ ID NO: 1411348 - RNA, 19 nt, Artificial Sequence
  Description of Artificial Sequence: Synthetic oligonucleotide
ggacguauccaugaugucg

SEQ ID NO: 1411349 - RNA, 19 nt, Artificial Sequence
  Description of Artificial Sequence: Synthetic oligonucleotide
ucaugcaaaaguggcaggu

SEQ ID NO: 1411350 - RNA, 19 nt, Artificial Sequence
  Description of Artificial Sequence: Synthetic oligonucleotide
uguauagaucucgauugcu

SEQ ID NO: 1411351 - RNA, 19 nt, Artificial Sequence
  Description of Artificial Sequence: Synthetic oligonucleotide
gucggcuuucuugaaagcg

SEQ ID NO: 1411352 - RNA, 19 nt, Artificial Sequence
  Description of Artificial Sequence: Synthetic oligonucleotide
ggagaagaaggacugugag

SEQ ID NO: 1411353 - RNA, 19 nt, Artificial Sequence
  Description of Artificial Sequence: Synthetic oligonucleotide
uuaauggccucuugugggu

SEQ ID NO: 1411354 - RNA, 19 nt, Artificial Sequence
  Description of Artificial Sequence: Synthetic oligonucleotide
accccuguguguuccaggg

SEQ ID NO: 1411355 - RNA, 19 nt, Artificial Sequence
  Description of Artificial Sequence: Synthetic oligonucleotide
cauacaucucacacgcuuc

SEQ ID NO: 1411356 - RNA, 19 nt, Artificial Sequence
  Description of Artificial Sequence: Synthetic oligonucleotide
aagcuuggcguugagcaug

SEQ ID NO: 1411357 - RNA, 19 nt, Artificial Sequence
  Description of Artificial Sequence: Synthetic oligonucleotide
cuguauagaucucgauugc

SEQ ID NO: 1411358 - RNA, 19 nt, Artificial Sequence
  Description of Artificial Sequence: Synthetic oligonucleotide
ugucgaugcagaaguggca

SEQ ID NO: 1411359 - RNA, 19 nt, Artificial Sequence
  Description of Artificial Sequence: Synthetic oligonucleotide
acguccaccaguucugucu

SEQ ID NO: 1411360 - RNA, 19 nt, Artificial Sequence
  Description of Artificial Sequence: Synthetic oligonucleotide
ugaacauguucgccgcucu

SEQ ID NO: 1411361 - RNA, 19 nt, Artificial Sequence
  Description of Artificial Sequence: Synthetic oligonucleotide
cuguacuugaggaggggac

SEQ ID NO: 1411362 - RNA, 19 nt, Artificial Sequence
  Description of Artificial Sequence: Synthetic oligonucleotide
aaagcguugccugcgucca

SEQ ID NO: 1411363 - RNA, 19 nt, Artificial Sequence
  Description of Artificial Sequence: Synthetic oligonucleotide
ccugcguccacgaagcagg

SEQ ID NO: 1411364 - RNA, 19 nt, Artificial Sequence
  Description of Artificial Sequence: Synthetic oligonucleotide
gcaaucgugaaucugccca

SEQ ID NO: 1411365 - RNA, 19 nt, Artificial Sequence
  Description of Artificial Sequence: Synthetic oligonucleotide
caggucaacagacagaccu

SEQ ID NO: 1411366 - RNA, 19 nt, Artificial Sequence
  Description of Artificial Sequence: Synthetic oligonucleotide
aagcguucccggcagcgcu

SEQ ID NO: 1411367 - RNA, 19 nt, Artificial Sequence
  Description of Artificial Sequence: Synthetic oligonucleotide
uaaauggcagggugaggga

SEQ ID NO: 1411368 - RNA, 19 nt, Artificial Sequence
  Description of Artificial Sequence: Synthetic oligonucleotide
uucccggacguauccauga

SEQ ID NO: 1411369 - RNA, 19 nt, Artificial Sequence
  Description of Artificial Sequence: Synthetic oligonucleotide
agaaagcguucccggcagc

SEQ ID NO: 1411370 - RNA, 19 nt, Artificial Sequence
  Description of Artificial Sequence: Synthetic oligonucleotide
cugcaaucgugaaucugcc

SEQ ID NO: 1411371 - RNA, 19 nt, Artificial Sequence
  Description of Artificial Sequence: Synthetic oligonucleotide
uucgccuuuguaguagucu

SEQ ID NO: 1411372 - RNA, 19 nt, Artificial Sequence
  Description of Artificial Sequence: Synthetic oligonucleotide
uccgagaaggccgggaaga

SEQ ID NO: 1411373 - RNA, 19 nt, Artificial Sequence
  Description of Artificial Sequence: Synthetic oligonucleotide
guauagaucucgauugcuc

SEQ ID NO: 1411374 - RNA, 19 nt, Artificial Sequence
  Description of Artificial Sequence: Synthetic oligonucleotide
cuagcgcagguccuccucg

SEQ ID NO: 1411375 - RNA, 19 nt, Artificial Sequence
  Description of Artificial Sequence: Synthetic oligonucleotide
ugcauucccucgaauccga

SEQ ID NO: 1411376 - RNA, 19 nt, Artificial Sequence
  Description of Artificial Sequence: Synthetic oligonucleotide
ugaaucugcccaugucugu

SEQ ID NO: 1411377 - RNA, 19 nt, Artificial Sequence
  Description of Artificial Sequence: Synthetic oligonucleotide
aacagcaagcuuggcguug

SEQ ID NO: 1411378 - RNA, 19 nt, Artificial Sequence
  Description of Artificial Sequence: Synthetic oligonucleotide
gaugggaccggaugcugac

SEQ ID NO: 1411379 - RNA, 19 nt, Artificial Sequence
  Description of Artificial Sequence: Synthetic oligonucleotide
ugcaaucgugaaucugccc

SEQ ID NO: 1411380 - RNA, 19 nt, Artificial Sequence
  Description of Artificial Sequence: Synthetic oligonucleotide
gcuaguaaggagaugggac

SEQ ID NO: 1411381 - RNA, 19 nt, Artificial Sequence
  Description of Artificial Sequence: Synthetic oligonucleotide
caucuugaacauguucgcc

SEQ ID NO: 1411382 - RNA, 19 nt, Artificial Sequence
  Description of Artificial Sequence: Synthetic oligonucleotide
auguucgccgcucuggcau

SEQ ID NO: 1411383 - RNA, 19 nt, Artificial Sequence
  Description of Artificial Sequence: Synthetic oligonucleotide
gcucucaucagacaguuaa

SEQ ID NO: 1411384 - RNA, 19 nt, Artificial Sequence
  Description of Artificial Sequence: Synthetic oligonucleotide
gcguugagcaugucgaugc

SEQ ID NO: 1411385 - RNA, 19 nt, Artificial Sequence
  Description of Artificial Sequence: Synthetic oligonucleotide
cagaaagcguucccggcag

SEQ ID NO: 1411386 - RNA, 19 nt, Artificial Sequence
  Description of Artificial Sequence: Synthetic oligonucleotide
aggggacuguccauggcgc

SEQ ID NO: 1411387 - RNA, 19 nt, Artificial Sequence
  Description of Artificial Sequence: Synthetic oligonucleotide
gugaaucugcccaugucug

SEQ ID NO: 1411388 - RNA, 19 nt, Artificial Sequence
  Description of Artificial Sequence: Synthetic oligonucleotide
ggcgcuguacuugaggagg

SEQ ID NO: 1411389 - RNA, 19 nt, Artificial Sequence
  Description of Artificial Sequence: Synthetic oligonucleotide
ucccuaccugcucauagau

SEQ ID NO: 1411390 - RNA, 19 nt, Artificial Sequence
  Description of Artificial Sequence: Synthetic oligonucleotide
aaucgugaaucugcccaug

SEQ ID NO: 1411391 - RNA, 19 nt, Artificial Sequence
  Description of Artificial Sequence: Synthetic oligonucleotide
cuguguuaucucugcuggg

SEQ ID NO: 1411392 - RNA, 19 nt, Artificial Sequence
  Description of Artificial Sequence: Synthetic oligonucleotide
uucccucgaauccgagaag

SEQ ID NO: 1411393 - RNA, 19 nt, Artificial Sequence
  Description of Artificial Sequence: Synthetic oligonucleotide
agagccgccuugaagaagu

SEQ ID NO: 1411394 - RNA, 19 nt, Artificial Sequence
  Description of Artificial Sequence: Synthetic oligonucleotide
uugaaagcguugccugcgu

SEQ ID NO: 1411395 - RNA, 19 nt, Artificial Sequence
  Description of Artificial Sequence: Synthetic oligonucleotide
ugucuguauagaucucgau

SEQ ID NO: 1411396 - RNA, 19 nt, Artificial Sequence
  Description of Artificial Sequence: Synthetic oligonucleotide
ucgucuucuugaugcgcag

SEQ ID NO: 1411397 - RNA, 19 nt, Artificial Sequence
  Description of Artificial Sequence: Synthetic oligonucleotide
gcagguagcugcaucaugc

SEQ ID NO: 1411398 - RNA, 19 nt, Artificial Sequence
  Description of Artificial Sequence: Synthetic oligonucleotide
agcgccauugccuccgccu

SEQ ID NO: 1411399 - RNA, 19 nt, Artificial Sequence
  Description of Artificial Sequence: Synthetic oligonucleotide
gaucgucuucuugaugcgc

SEQ ID NO: 1411400 - RNA, 19 nt, Artificial Sequence
  Description of Artificial Sequence: Synthetic oligonucleotide
cagacugcucauagugggc

SEQ ID NO: 1411401 - RNA, 19 nt, Artificial Sequence
  Description of Artificial Sequence: Synthetic oligonucleotide
ucgugaaucugcccauguc

SEQ ID NO: 1411402 - RNA, 19 nt, Artificial Sequence
  Description of Artificial Sequence: Synthetic oligonucleotide
agaucucagcgauggagau

SEQ ID NO: 1411403 - RNA, 19 nt, Artificial Sequence
  Description of Artificial Sequence: Synthetic oligonucleotide
gaagaaggacugugaguuc

SEQ ID NO: 1411404 - RNA, 19 nt, Artificial Sequence
  Description of Artificial Sequence: Synthetic oligonucleotide
ucuucgccuuuguaguagu

SEQ ID NO: 1411405 - RNA, 19 nt, Artificial Sequence
  Description of Artificial Sequence: Synthetic oligonucleotide
agcuaguaaggagauggga

SEQ ID NO: 1411406 - RNA, 19 nt, Artificial Sequence
  Description of Artificial Sequence: Synthetic oligonucleotide
gaacauguucgccgcucug

SEQ ID NO: 1411407 - RNA, 19 nt, Artificial Sequence
  Description of Artificial Sequence: Synthetic oligonucleotide
agguguugggccccaccuc

SEQ ID NO: 1411408 - RNA, 19 nt, Artificial Sequence
  Description of Artificial Sequence: Synthetic oligonucleotide
ugaaagcguugccugcguc

SEQ ID NO: 1411409 - RNA, 19 nt, Artificial Sequence
  Description of Artificial Sequence: Synthetic oligonucleotide
ggucccuaccugcucauag

SEQ ID NO: 1411410 - RNA, 19 nt, Artificial Sequence
  Description of Artificial Sequence: Synthetic oligonucleotide
uggcgcuguacuugaggag

SEQ ID NO: 1411411 - RNA, 19 nt, Artificial Sequence
  Description of Artificial Sequence: Synthetic oligonucleotide
gcuugcauucccucgaauc

SEQ ID NO: 1411412 - RNA, 19 nt, Artificial Sequence
  Description of Artificial Sequence: Synthetic oligonucleotide
uguugggccccaccucuga

SEQ ID NO: 1411413 - RNA, 19 nt, Artificial Sequence
  Description of Artificial Sequence: Synthetic oligonucleotide
ugcggcguagccagccacc

SEQ ID NO: 1411414 - RNA, 19 nt, Artificial Sequence
  Description of Artificial Sequence: Synthetic oligonucleotide
gaucucagcgauggagaug

SEQ ID NO: 1411415 - RNA, 19 nt, Artificial Sequence
  Description of Artificial Sequence: Synthetic oligonucleotide
acguauccaugaugucgcg

SEQ ID NO: 1411416 - RNA, 19 nt, Artificial Sequence
  Description of Artificial Sequence: Synthetic oligonucleotide
cucuucgccuuuguaguag

SEQ ID NO: 1411417 - RNA, 19 nt, Artificial Sequence
  Description of Artificial Sequence: Synthetic oligonucleotide
uagaugucgauggccuucu

SEQ ID NO: 1411418 - RNA, 19 nt, Artificial Sequence
  Description of Artificial Sequence: Synthetic oligonucleotide
uuugaacagcaagcuuggc

SEQ ID NO: 1411419 - RNA, 19 nt, Artificial Sequence
  Description of Artificial Sequence: Synthetic oligonucleotide
gguagaggucaccaccagc

SEQ ID NO: 1411420 - RNA, 19 nt, Artificial Sequence
  Description of Artificial Sequence: Synthetic oligonucleotide
agcguugccugcguccacg

SEQ ID NO: 1411421 - RNA, 19 nt, Artificial Sequence
  Description of Artificial Sequence: Synthetic oligonucleotide
ugggucggcuuucuugaaa

SEQ ID NO: 1411422 - RNA, 19 nt, Artificial Sequence
  Description of Artificial Sequence: Synthetic oligonucleotide
cauugcacccacucgaccu

SEQ ID NO: 1411423 - RNA, 19 nt, Artificial Sequence
  Description of Artificial Sequence: Synthetic oligonucleotide
acucgaccuucauauuccu

SEQ ID NO: 1411424 - RNA, 19 nt, Artificial Sequence
  Description of Artificial Sequence: Synthetic oligonucleotide
cagacagaccuggaugcag

SEQ ID NO: 1411425 - RNA, 19 nt, Artificial Sequence
  Description of Artificial Sequence: Synthetic oligonucleotide
gcagagagccgccuugaag

SEQ ID NO: 1411426 - RNA, 19 nt, Artificial Sequence
  Description of Artificial Sequence: Synthetic oligonucleotide
auagugggcgauggccuuc

SEQ ID NO: 1411427 - RNA, 19 nt, Artificial Sequence
  Description of Artificial Sequence: Synthetic oligonucleotide
cuucccggacguauccaug

SEQ ID NO: 1411428 - RNA, 19 nt, Artificial Sequence
  Description of Artificial Sequence: Synthetic oligonucleotide
uggacucuucgccuuugua

SEQ ID NO: 1411429 - RNA, 19 nt, Artificial Sequence
  Description of Artificial Sequence: Synthetic oligonucleotide
cacugguccagccuugaga

SEQ ID NO: 1411430 - RNA, 19 nt, Artificial Sequence
  Description of Artificial Sequence: Synthetic oligonucleotide
ugugcggcguagccagcca

SEQ ID NO: 1411431 - RNA, 19 nt, Artificial Sequence
  Description of Artificial Sequence: Synthetic oligonucleotide
augucgcgcagcugcucgg

SEQ ID NO: 1411432 - RNA, 19 nt, Artificial Sequence
  Description of Artificial Sequence: Synthetic oligonucleotide
augucuguauagaucucga

SEQ ID NO: 1411433 - RNA, 19 nt, Artificial Sequence
  Description of Artificial Sequence: Synthetic oligonucleotide
ggcguagccagccaccuuc

SEQ ID NO: 1411434 - RNA, 19 nt, Artificial Sequence
  Description of Artificial Sequence: Synthetic oligonucleotide
ucgucacccuggaucgucu

SEQ ID NO: 1411435 - RNA, 19 nt, Artificial Sequence
  Description of Artificial Sequence: Synthetic oligonucleotide
auugcacccacucgaccuu

SEQ ID NO: 1411436 - RNA, 19 nt, Artificial Sequence
  Description of Artificial Sequence: Synthetic oligonucleotide
ggcagaaagcguucccggc

SEQ ID NO: 1411437 - RNA, 19 nt, Artificial Sequence
  Description of Artificial Sequence: Synthetic oligonucleotide
gaaguggcagagagccgcc

SEQ ID NO: 1411438 - RNA, 19 nt, Artificial Sequence
  Description of Artificial Sequence: Synthetic oligonucleotide
uggagauguggugcuuggc

SEQ ID NO: 1411439 - RNA, 19 nt, Artificial Sequence
  Description of Artificial Sequence: Synthetic oligonucleotide
gaucucgauugcucucauc

SEQ ID NO: 1411440 - RNA, 19 nt, Artificial Sequence
  Description of Artificial Sequence: Synthetic oligonucleotide
gaaucugcccaugucugua

SEQ ID NO: 1411441 - RNA, 19 nt, Artificial Sequence
  Description of Artificial Sequence: Synthetic oligonucleotide
agcaagucucagggcuacc

SEQ ID NO: 1411442 - RNA, 19 nt, Artificial Sequence
  Description of Artificial Sequence: Synthetic oligonucleotide
gagcaagucucagggcuac

SEQ ID NO: 1411443 - RNA, 19 nt, Artificial Sequence
  Description of Artificial Sequence: Synthetic oligonucleotide
cauucccucgaauccgaga

SEQ ID NO: 1411444 - RNA, 19 nt, Artificial Sequence
  Description of Artificial Sequence: Synthetic oligonucleotide
gggaaagaagcagguguag

SEQ ID NO: 1411445 - RNA, 19 nt, Artificial Sequence
  Description of Artificial Sequence: Synthetic oligonucleotide
gacugcucauagugggcga

SEQ ID NO: 1411446 - RNA, 19 nt, Artificial Sequence
  Description of Artificial Sequence: Synthetic oligonucleotide
gaauccgagaaggccggga

SEQ ID NO: 1411447 - RNA, 19 nt, Artificial Sequence
  Description of Artificial Sequence: Synthetic oligonucleotide
ggcgcuggucccuaccugc

SEQ ID NO: 1411448 - RNA, 19 nt, Artificial Sequence
  Description of Artificial Sequence: Synthetic oligonucleotide
cgggugaccauccagccag

SEQ ID NO: 1411449 - RNA, 19 nt, Artificial Sequence
  Description of Artificial Sequence: Synthetic oligonucleotide
agggaaagaagcaggugua

SEQ ID NO: 1411450 - RNA, 19 nt, Artificial Sequence
  Description of Artificial Sequence: Synthetic oligonucleotide
uggcgcuggucccuaccug

SEQ ID NO: 1411451 - RNA, 19 nt, Artificial Sequence
  Description of Artificial Sequence: Synthetic oligonucleotide
cuuuggcgcuguacuugag

SEQ ID NO: 1411452 - RNA, 19 nt, Artificial Sequence
  Description of Artificial Sequence: Synthetic oligonucleotide
ccacucgaccuucauauuc

SEQ ID NO: 1411453 - RNA, 19 nt, Artificial Sequence
  Description of Artificial Sequence: Synthetic oligonucleotide
augcagcgggugaccaucc

SEQ ID NO: 1411454 - RNA, 19 nt, Artificial Sequence
  Description of Artificial Sequence: Synthetic oligonucleotide
caucucacacgcuucuucu

SEQ ID NO: 1411455 - RNA, 19 nt, Artificial Sequence
  Description of Artificial Sequence: Synthetic oligonucleotide
ccucgaauccgagaaggcc

SEQ ID NO: 1411456 - RNA, 19 nt, Artificial Sequence
  Description of Artificial Sequence: Synthetic oligonucleotide
gucccuaccugcucauaga

SEQ ID NO: 1411457 - RNA, 19 nt, Artificial Sequence
  Description of Artificial Sequence: Synthetic oligonucleotide
cuucgccuuuguaguaguc

SEQ ID NO: 1411458 - RNA, 19 nt, Artificial Sequence
  Description of Artificial Sequence: Synthetic oligonucleotide
uaauggccucuuguggguc

SEQ ID NO: 1411459 - RNA, 19 nt, Artificial Sequence
  Description of Artificial Sequence: Synthetic oligonucleotide
cacuuguuggcugagcugu

SEQ ID NO: 1411460 - RNA, 19 nt, Artificial Sequence
  Description of Artificial Sequence: Synthetic oligonucleotide
aucucacacgcuucuucua

SEQ ID NO: 1411461 - RNA, 19 nt, Artificial Sequence
  Description of Artificial Sequence: Synthetic oligonucleotide
guaaggagaugggaccgga

SEQ ID NO: 1411462 - RNA, 19 nt, Artificial Sequence
  Description of Artificial Sequence: Synthetic oligonucleotide
agaucucgauugcucucau

SEQ ID NO: 1411463 - RNA, 19 nt, Artificial Sequence
  Description of Artificial Sequence: Synthetic oligonucleotide
caccgauuccguguagcug

SEQ ID NO: 1411464 - RNA, 19 nt, Artificial Sequence
  Description of Artificial Sequence: Synthetic oligonucleotide
gauguggugcuuggcugca

SEQ ID NO: 1411465 - RNA, 19 nt, Artificial Sequence
  Description of Artificial Sequence: Synthetic oligonucleotide
ugcagcgggugaccaucca

SEQ ID NO: 1411466 - RNA, 19 nt, Artificial Sequence
  Description of Artificial Sequence: Synthetic oligonucleotide
acucuucgccuuuguagua

SEQ ID NO: 1411467 - RNA, 19 nt, Artificial Sequence
  Description of Artificial Sequence: Synthetic oligonucleotide
cacgaagcagguagcugca

SEQ ID NO: 1411468 - RNA, 19 nt, Artificial Sequence
  Description of Artificial Sequence: Synthetic oligonucleotide
guuccucgugggcuuccag

SEQ ID NO: 1411469 - RNA, 19 nt, Artificial Sequence
  Description of Artificial Sequence: Synthetic oligonucleotide
cuucaccgauuccguguag

SEQ ID NO: 1411470 - RNA, 19 nt, Artificial Sequence
  Description of Artificial Sequence: Synthetic oligonucleotide
gccgcucuggcauacaucu

SEQ ID NO: 1411471 - RNA, 19 nt, Artificial Sequence
  Description of Artificial Sequence: Synthetic oligonucleotide
ucgccgcucuggcauacau

SEQ ID NO: 1411472 - RNA, 19 nt, Artificial Sequence
  Description of Artificial Sequence: Synthetic oligonucleotide
cugcaucaugcuugcucug

SEQ ID NO: 1411473 - RNA, 19 nt, Artificial Sequence
  Description of Artificial Sequence: Synthetic oligonucleotide
cugugcggcguagccagcc

SEQ ID NO: 1411474 - RNA, 19 nt, Artificial Sequence
  Description of Artificial Sequence: Synthetic oligonucleotide
gugagggaugcagcgggug

SEQ ID NO: 1411475 - RNA, 19 nt, Artificial Sequence
  Description of Artificial Sequence: Synthetic oligonucleotide
ugcuucccggacguaucca

SEQ ID NO: 1411476 - RNA, 19 nt, Artificial Sequence
  Description of Artificial Sequence: Synthetic oligonucleotide
ucccggacguauccaugau

SEQ ID NO: 1411477 - RNA, 19 nt, Artificial Sequence
  Description of Artificial Sequence: Synthetic oligonucleotide
cucgucacccuggaucguc

SEQ ID NO: 1411478 - RNA, 19 nt, Artificial Sequence
  Description of Artificial Sequence: Synthetic oligonucleotide
gcauugcacccacucgacc

SEQ ID NO: 1411479 - RNA, 19 nt, Artificial Sequence
  Description of Artificial Sequence: Synthetic oligonucleotide
uagugggcgauggccuucu

SEQ ID NO: 1411480 - RNA, 19 nt, Artificial Sequence
  Description of Artificial Sequence: Synthetic oligonucleotide
aaggccgggaagagcuccu

SEQ ID NO: 1411481 - RNA, 19 nt, Artificial Sequence
  Description of Artificial Sequence: Synthetic oligonucleotide
cauguucgccgcucuggca

SEQ ID NO: 1411482 - RNA, 19 nt, Artificial Sequence
  Description of Artificial Sequence: Synthetic oligonucleotide
cccgcauugcacccacucg

SEQ ID NO: 1411483 - RNA, 19 nt, Artificial Sequence
  Description of Artificial Sequence: Synthetic oligonucleotide
ucgugggcuuccagcaguu

SEQ ID NO: 1411484 - RNA, 19 nt, Artificial Sequence
  Description of Artificial Sequence: Synthetic oligonucleotide
agaugucgauggccuucug

SEQ ID NO: 1411485 - RNA, 19 nt, Artificial Sequence
  Description of Artificial Sequence: Synthetic oligonucleotide
ugcucucaucagacaguua

SEQ ID NO: 1411486 - RNA, 19 nt, Artificial Sequence
  Description of Artificial Sequence: Synthetic oligonucleotide
ggucugaccugagagaggu

SEQ ID NO: 1411487 - RNA, 19 nt, Artificial Sequence
  Description of Artificial Sequence: Synthetic oligonucleotide
cacagcuaguaaggagaug

SEQ ID NO: 1411488 - RNA, 19 nt, Artificial Sequence
  Description of Artificial Sequence: Synthetic oligonucleotide
gcauacaucucacacgcuu

SEQ ID NO: 1411489 - RNA, 19 nt, Artificial Sequence
  Description of Artificial Sequence: Synthetic oligonucleotide
uacaucucacacgcuucuu

SEQ ID NO: 1411490 - RNA, 19 nt, Artificial Sequence
  Description of Artificial Sequence: Synthetic oligonucleotide
gguguugggccccaccucu

SEQ ID NO: 1411491 - RNA, 19 nt, Artificial Sequence
  Description of Artificial Sequence: Synthetic oligonucleotide
cagacaccccuguguguuc

SEQ ID NO: 1411492 - RNA, 19 nt, Artificial Sequence
  Description of Artificial Sequence: Synthetic oligonucleotide
ccggacguauccaugaugu

SEQ ID NO: 1411493 - RNA, 19 nt, Artificial Sequence
  Description of Artificial Sequence: Synthetic oligonucleotide
gcucauagugggcgauggc

SEQ ID NO: 1411494 - RNA, 19 nt, Artificial Sequence
  Description of Artificial Sequence: Synthetic oligonucleotide
cccucgaauccgagaaggc

SEQ ID NO: 1411495 - RNA, 19 nt, Artificial Sequence
  Description of Artificial Sequence: Synthetic oligonucleotide
gugcggcguagccagccac

SEQ ID NO: 1411496 - RNA, 19 nt, Artificial Sequence
  Description of Artificial Sequence: Synthetic oligonucleotide
agcuuggcguugagcaugu

SEQ ID NO: 1411497 - RNA, 19 nt, Artificial Sequence
  Description of Artificial Sequence: Synthetic oligonucleotide
cuuggcugcaaucgugaau

SEQ ID NO: 1411498 - RNA, 19 nt, Artificial Sequence
  Description of Artificial Sequence: Synthetic oligonucleotide
caaucgugaaucugcccau

SEQ ID NO: 1411499 - RNA, 19 nt, Artificial Sequence
  Description of Artificial Sequence: Synthetic oligonucleotide
agaccuggaugcagggaaa

SEQ ID NO: 1411500 - RNA, 19 nt, Artificial Sequence
  Description of Artificial Sequence: Synthetic oligonucleotide
cagacaguuaauggccucu

SEQ ID NO: 1411501 - RNA, 19 nt, Artificial Sequence
  Description of Artificial Sequence: Synthetic oligonucleotide
gcccaugucuguauagauc

SEQ ID NO: 1411502 - RNA, 19 nt, Artificial Sequence
  Description of Artificial Sequence: Synthetic oligonucleotide
cuccagggguagaggucac

SEQ ID NO: 1411503 - RNA, 19 nt, Artificial Sequence
  Description of Artificial Sequence: Synthetic oligonucleotide
gggucugaccugagagagg

SEQ ID NO: 1411504 - RNA, 19 nt, Artificial Sequence
  Description of Artificial Sequence: Synthetic oligonucleotide
agaaggacugugaguucuu

SEQ ID NO: 1411505 - RNA, 19 nt, Artificial Sequence
  Description of Artificial Sequence: Synthetic oligonucleotide
gagagucuguccagguggu

SEQ ID NO: 1411506 - RNA, 19 nt, Artificial Sequence
  Description of Artificial Sequence: Synthetic oligonucleotide
gggacaagguaggagagau

SEQ ID NO: 1411507 - RNA, 19 nt, Artificial Sequence
  Description of Artificial Sequence: Synthetic oligonucleotide
ccgcauugcacccacucga

SEQ ID NO: 1411508 - RNA, 19 nt, Artificial Sequence
  Description of Artificial Sequence: Synthetic oligonucleotide
gaacagcaagcuuggcguu

SEQ ID NO: 1411509 - RNA, 19 nt, Artificial Sequence
  Description of Artificial Sequence: Synthetic oligonucleotide
cucgugggcuuccagcagu

SEQ ID NO: 1411510 - RNA, 19 nt, Artificial Sequence
  Description of Artificial Sequence: Synthetic oligonucleotide
gcgccauugccuccgccug

SEQ ID NO: 1411511 - RNA, 19 nt, Artificial Sequence
  Description of Artificial Sequence: Synthetic oligonucleotide
cgccuuuguaguagucugc

SEQ ID NO: 1411512 - RNA, 19 nt, Artificial Sequence
  Description of Artificial Sequence: Synthetic oligonucleotide
gccgccuugaagaaguagu

SEQ ID NO: 1411513 - RNA, 19 nt, Artificial Sequence
  Description of Artificial Sequence: Synthetic oligonucleotide
cccggacguauccaugaug

SEQ ID NO: 1411514 - RNA, 19 nt, Artificial Sequence
  Description of Artificial Sequence: Synthetic oligonucleotide
cgugaaucugcccaugucu

SEQ ID NO: 1411515 - RNA, 19 nt, Artificial Sequence
  Description of Artificial Sequence: Synthetic oligonucleotide
gcccgcauugcacccacuc

SEQ ID NO: 1411516 - RNA, 19 nt, Artificial Sequence
  Description of Artificial Sequence: Synthetic oligonucleotide
uucgccgcucuggcauaca

SEQ ID NO: 1411517 - RNA, 19 nt, Artificial Sequence
  Description of Artificial Sequence: Synthetic oligonucleotide
gacugacagauggguggaa

SEQ ID NO: 1411518 - RNA, 19 nt, Artificial Sequence
  Description of Artificial Sequence: Synthetic oligonucleotide
cgcauugcacccacucgac

SEQ ID NO: 1411519 - RNA, 19 nt, Artificial Sequence
  Description of Artificial Sequence: Synthetic oligonucleotide
ggaccggaugcugacccca

SEQ ID NO: 1411520 - RNA, 19 nt, Artificial Sequence
  Description of Artificial Sequence: Synthetic oligonucleotide
cggagaagaaggacuguga

SEQ ID NO: 1411521 - RNA, 19 nt, Artificial Sequence
  Description of Artificial Sequence: Synthetic oligonucleotide
acgaagcagguagcugcau

SEQ ID NO: 1411522 - RNA, 19 nt, Artificial Sequence
  Description of Artificial Sequence: Synthetic oligonucleotide
ggcccagacaccccugugu

SEQ ID NO: 1411523 - RNA, 19 nt, Artificial Sequence
  Description of Artificial Sequence: Synthetic oligonucleotide
ugcguccacgaagcaggua

SEQ ID NO: 1411524 - RNA, 19 nt, Artificial Sequence
  Description of Artificial Sequence: Synthetic oligonucleotide
gcaugguggugagccacug

SEQ ID NO: 1411525 - RNA, 19 nt, Artificial Sequence
  Description of Artificial Sequence: Synthetic oligonucleotide
gcgauggagauguggugcu

SEQ ID NO: 1411526 - RNA, 19 nt, Artificial Sequence
  Description of Artificial Sequence: Synthetic oligonucleotide
gcauucccucgaauccgag

SEQ ID NO: 1411527 - RNA, 19 nt, Artificial Sequence
  Description of Artificial Sequence: Synthetic oligonucleotide
cagcuugcauucccucgaa

SEQ ID NO: 1411528 - RNA, 19 nt, Artificial Sequence
  Description of Artificial Sequence: Synthetic oligonucleotide
cagcugugcggcguagcca

SEQ ID NO: 1411529 - RNA, 19 nt, Artificial Sequence
  Description of Artificial Sequence: Synthetic oligonucleotide
acuuguuggcugagcuguu

SEQ ID NO: 1411530 - RNA, 19 nt, Artificial Sequence
  Description of Artificial Sequence: Synthetic oligonucleotide
ccucgugggcuuccagcag

SEQ ID NO: 1411531 - RNA, 19 nt, Artificial Sequence
  Description of Artificial Sequence: Synthetic oligonucleotide
gaggccuagcgcagguccu

SEQ ID NO: 1411532 - RNA, 19 nt, Artificial Sequence
  Description of Artificial Sequence: Synthetic oligonucleotide
cucacacgcuucuucuauu

SEQ ID NO: 1411533 - RNA, 19 nt, Artificial Sequence
  Description of Artificial Sequence: Synthetic oligonucleotide
ccgagaaggccgggaagag

SEQ ID NO: 1411534 - RNA, 19 nt, Artificial Sequence
  Description of Artificial Sequence: Synthetic oligonucleotide
ucccggcagcgcuccaguu

SEQ ID NO: 1411535 - RNA, 19 nt, Artificial Sequence
  Description of Artificial Sequence: Synthetic oligonucleotide
ggccgggaagagcuccuca

SEQ ID NO: 1411536 - RNA, 19 nt, Artificial Sequence
  Description of Artificial Sequence: Synthetic oligonucleotide
uggucccuaccugcucaua

SEQ ID NO: 1411537 - RNA, 19 nt, Artificial Sequence
  Description of Artificial Sequence: Synthetic oligonucleotide
ggaagauguggcccgcauu

SEQ ID NO: 1411538 - RNA, 19 nt, Artificial Sequence
  Description of Artificial Sequence: Synthetic oligonucleotide
ccacugguccagccuugag

SEQ ID NO: 1411539 - RNA, 19 nt, Artificial Sequence
  Description of Artificial Sequence: Synthetic oligonucleotide
ccccuguguguuccagggc

SEQ ID NO: 1411540 - RNA, 19 nt, Artificial Sequence
  Description of Artificial Sequence: Synthetic oligonucleotide
gggcuaccuguguuaucuc

SEQ ID NO: 1411541 - RNA, 19 nt, Artificial Sequence
  Description of Artificial Sequence: Synthetic oligonucleotide
auguggugcuuggcugcaa

SEQ ID NO: 1411542 - RNA, 19 nt, Artificial Sequence
  Description of Artificial Sequence: Synthetic oligonucleotide
ugcucggcucaggcccgac

SEQ ID NO: 1411543 - RNA, 19 nt, Artificial Sequence
  Description of Artificial Sequence: Synthetic oligonucleotide
gcuucccggacguauccau

SEQ ID NO: 1411544 - RNA, 19 nt, Artificial Sequence
  Description of Artificial Sequence: Synthetic oligonucleotide
ccuuagcacacagcuagua

SEQ ID NO: 1411545 - RNA, 19 nt, Artificial Sequence
  Description of Artificial Sequence: Synthetic oligonucleotide
cgauugcucucaucagaca

SEQ ID NO: 1411546 - RNA, 19 nt, Artificial Sequence
  Description of Artificial Sequence: Synthetic oligonucleotide
gcguugccugcguccacga

SEQ ID NO: 1411547 - RNA, 19 nt, Artificial Sequence
  Description of Artificial Sequence: Synthetic oligonucleotide
cguagccagccaccuucag

SEQ ID NO: 1411548 - RNA, 19 nt, Artificial Sequence
  Description of Artificial Sequence: Synthetic oligonucleotide
cggacguauccaugauguc

SEQ ID NO: 1411549 - RNA, 19 nt, Artificial Sequence
  Description of Artificial Sequence: Synthetic oligonucleotide
ccggcagcgcuccaguucu

SEQ ID NO: 1411550 - RNA, 19 nt, Artificial Sequence
  Description of Artificial Sequence: Synthetic oligonucleotide
ccuggaucgucuucuugau

SEQ ID NO: 1411551 - RNA, 19 nt, Artificial Sequence
  Description of Artificial Sequence: Synthetic oligonucleotide
ccggaugcugaccccaggu

SEQ ID NO: 1411552 - RNA, 19 nt, Artificial Sequence
  Description of Artificial Sequence: Synthetic oligonucleotide
cguugagcaugucgaugca

SEQ ID NO: 1411553 - RNA, 19 nt, Artificial Sequence
  Description of Artificial Sequence: Synthetic oligonucleotide
gcguagccagccaccuuca

SEQ ID NO: 1411554 - RNA, 19 nt, Artificial Sequence
  Description of Artificial Sequence: Synthetic oligonucleotide
cgaauccgagaaggccggg

SEQ ID NO: 1411555 - RNA, 19 nt, Artificial Sequence
  Description of Artificial Sequence: Synthetic oligonucleotide
ccgcucuggcauacaucuc

SEQ ID NO: 1411556 - RNA, 19 nt, Artificial Sequence
  Description of Artificial Sequence: Synthetic oligonucleotide
ccucuugugggucggcuuu

SEQ ID NO: 1411557 - RNA, 19 nt, Artificial Sequence
  Description of Artificial Sequence: Synthetic oligonucleotide
gcugugcggcguagccagc

SEQ ID NO: 1411558 - RNA, 19 nt, Artificial Sequence
  Description of Artificial Sequence: Synthetic oligonucleotide
ggcauacaucucacacgcu

SEQ ID NO: 1411559 - RNA, 19 nt, Artificial Sequence
  Description of Artificial Sequence: Synthetic oligonucleotide
ggccucuugugggucggcu

SEQ ID NO: 1411560 - RNA, 19 nt, Artificial Sequence
  Description of Artificial Sequence: Synthetic oligonucleotide
cgcuggucccuaccugcuc

SEQ ID NO: 1411561 - RNA, 19 nt, Artificial Sequence
  Description of Artificial Sequence: Synthetic oligonucleotide
cugcucggcucaggcccga

SEQ ID NO: 1411562 - RNA, 19 nt, Artificial Sequence
  Description of Artificial Sequence: Synthetic oligonucleotide
gcggcguagccagccaccu

SEQ ID NO: 1411563 - RNA, 19 nt, Artificial Sequence
  Description of Artificial Sequence: Synthetic oligonucleotide
gcgcuggucccuaccugcu

SEQ ID NO: 1411564 - RNA, 19 nt, Artificial Sequence
  Description of Artificial Sequence: Synthetic oligonucleotide
gcuuggcguugagcauguc

SEQ ID NO: 1411565 - RNA, 19 nt, Artificial Sequence
  Description of Artificial Sequence: Synthetic oligonucleotide
cccacucgaccuucauauu

SEQ ID NO: 1411566 - RNA, 19 nt, Artificial Sequence
  Description of Artificial Sequence: Synthetic oligonucleotide
cguugccugcguccacgaa

SEQ ID NO: 1411567 - RNA, 19 nt, Artificial Sequence
  Description of Artificial Sequence: Synthetic oligonucleotide
ccucgucacccuggaucgu

SEQ ID NO: 1411568 - RNA, 19 nt, Artificial Sequence
  Description of Artificial Sequence: Synthetic oligonucleotide
cggcguagccagccaccuu

SEQ ID NO: 1411569 - RNA, 19 nt, Artificial Sequence
  Description of Artificial Sequence: Synthetic oligonucleotide
aaauauggcauucacaugc

SEQ ID NO: 1411570 - RNA, 19 nt, Artificial Sequence
  Description of Artificial Sequence: Synthetic oligonucleotide
aauauaaagauuccuuugg

SEQ ID NO: 1411571 - RNA, 19 nt, Artificial Sequence
  Description of Artificial Sequence: Synthetic oligonucleotide
aaacuugcaauuuuagacc

SEQ ID NO: 1411572 - RNA, 19 nt, Artificial Sequence
  Description of Artificial Sequence: Synthetic oligonucleotide
aauguuacgacuguuacac

SEQ ID NO: 1411573 - RNA, 19 nt, Artificial Sequence
  Description of Artificial Sequence: Synthetic oligonucleotide
auauugauuauauaugagg

SEQ ID NO: 1411574 - RNA, 19 nt, Artificial Sequence
  Description of Artificial Sequence: Synthetic oligonucleotide
uauugauuauauaugaggc

SEQ ID NO: 1411575 - RNA, 19 nt, Artificial Sequence
  Description of Artificial Sequence: Synthetic oligonucleotide
auaaagauuccuuugggac

SEQ ID NO: 1411576 - RNA, 19 nt, Artificial Sequence
  Description of Artificial Sequence: Synthetic oligonucleotide
uagcaauauauaaauaugg

SEQ ID NO: 1411577 - RNA, 19 nt, Artificial Sequence
  Description of Artificial Sequence: Synthetic oligonucleotide
agaagauuaaaaugagucc

SEQ ID NO: 1411578 - RNA, 19 nt, Artificial Sequence
  Description of Artificial Sequence: Synthetic oligonucleotide
uuauuuaugguuauuuccc

SEQ ID NO: 1411579 - RNA, 19 nt, Artificial Sequence
  Description of Artificial Sequence: Synthetic oligonucleotide
aauuacuaccucuacauga

SEQ ID NO: 1411580 - RNA, 19 nt, Artificial Sequence
  Description of Artificial Sequence: Synthetic oligonucleotide
acgacuguuacacaaaugg

SEQ ID NO: 1411581 - RNA, 19 nt, Artificial Sequence
  Description of Artificial Sequence: Synthetic oligonucleotide
auaaauauggcauucacau

SEQ ID NO: 1411582 - RNA, 19 nt, Artificial Sequence
  Description of Artificial Sequence: Synthetic oligonucleotide
uauaaugguaagaaaagcu

SEQ ID NO: 1411583 - RNA, 19 nt, Artificial Sequence
  Description of Artificial Sequence: Synthetic oligonucleotide
aauaguauuauaaugguaa

SEQ ID NO: 1411584 - RNA, 19 nt, Artificial Sequence
  Description of Artificial Sequence: Synthetic oligonucleotide
aauaagcgaaaccagacgu

SEQ ID NO: 1411585 - RNA, 19 nt, Artificial Sequence
  Description of Artificial Sequence: Synthetic oligonucleotide
uuuaguacccauuuuagcu

SEQ ID NO: 1411586 - RNA, 19 nt, Artificial Sequence
  Description of Artificial Sequence: Synthetic oligonucleotide
uuuuggaugucauaaauga

SEQ ID NO: 1411587 - RNA, 19 nt, Artificial Sequence
  Description of Artificial Sequence: Synthetic oligonucleotide
uauuacuauaauuacuacc

SEQ ID NO: 1411588 - RNA, 19 nt, Artificial Sequence
  Description of Artificial Sequence: Synthetic oligonucleotide
cuuuuauggggaaagagcc

SEQ ID NO: 1411589 - RNA, 19 nt, Artificial Sequence
  Description of Artificial Sequence: Synthetic oligonucleotide
ucaauuagagcugaaauug

SEQ ID NO: 1411590 - RNA, 19 nt, Artificial Sequence
  Description of Artificial Sequence: Synthetic oligonucleotide
ugagagaucuguuugauac

SEQ ID NO: 1411591 - RNA, 19 nt, Artificial Sequence
  Description of Artificial Sequence: Synthetic oligonucleotide
uuggaugucauaaaugagc

SEQ ID NO: 1411592 - RNA, 19 nt, Artificial Sequence
  Description of Artificial Sequence: Synthetic oligonucleotide
agaauccugaaauauaaag

SEQ ID NO: 1411593 - RNA, 19 nt, Artificial Sequence
  Description of Artificial Sequence: Synthetic oligonucleotide
aauagaacgauuaauagua

SEQ ID NO: 1411594 - RNA, 19 nt, Artificial Sequence
  Description of Artificial Sequence: Synthetic oligonucleotide
uccucuauuaauacagugg

SEQ ID NO: 1411595 - RNA, 19 nt, Artificial Sequence
  Description of Artificial Sequence: Synthetic oligonucleotide
cuuuuaaggcuaauaaugg

SEQ ID NO: 1411596 - RNA, 19 nt, Artificial Sequence
  Description of Artificial Sequence: Synthetic oligonucleotide
cacaucaaagcuuuuaagg

SEQ ID NO: 1411597 - RNA, 19 nt, Artificial Sequence
  Description of Artificial Sequence: Synthetic oligonucleotide
ugaguaauaagcgaaacca

SEQ ID NO: 1411598 - RNA, 19 nt, Artificial Sequence
  Description of Artificial Sequence: Synthetic oligonucleotide
ucggcauacagaaagcugg

SEQ ID NO: 1411599 - RNA, 19 nt, Artificial Sequence
  Description of Artificial Sequence: Synthetic oligonucleotide
uaucucggcauacagaaag

SEQ ID NO: 1411600 - RNA, 19 nt, Artificial Sequence
  Description of Artificial Sequence: Synthetic oligonucleotide
acagaaacaucguugagag

SEQ ID NO: 1411601 - RNA, 19 nt, Artificial Sequence
  Description of Artificial Sequence: Synthetic oligonucleotide
cauaaaugagcuuuguaag

SEQ ID NO: 1411602 - RNA, 19 nt, Artificial Sequence
  Description of Artificial Sequence: Synthetic oligonucleotide
ugaacaaauuuucugacuc

SEQ ID NO: 1411603 - RNA, 19 nt, Artificial Sequence
  Description of Artificial Sequence: Synthetic oligonucleotide
ugcaacauaguucagucca

SEQ ID NO: 1411604 - RNA, 19 nt, Artificial Sequence
  Description of Artificial Sequence: Synthetic oligonucleotide
cagaagauuaaaaugaguc

SEQ ID NO: 1411605 - RNA, 19 nt, Artificial Sequence
  Description of Artificial Sequence: Synthetic oligonucleotide
uaauaagcgaaaccagacg

SEQ ID NO: 1411606 - RNA, 19 nt, Artificial Sequence
  Description of Artificial Sequence: Synthetic oligonucleotide
aaaugaguccuaucucggc

SEQ ID NO: 1411607 - RNA, 19 nt, Artificial Sequence
  Description of Artificial Sequence: Synthetic oligonucleotide
auaauuacuaccucuacau

SEQ ID NO: 1411608 - RNA, 19 nt, Artificial Sequence
  Description of Artificial Sequence: Synthetic oligonucleotide
aauaaugguuucaugcaac

SEQ ID NO: 1411609 - RNA, 19 nt, Artificial Sequence
  Description of Artificial Sequence: Synthetic oligonucleotide
uugauuauauaugaggcug

SEQ ID NO: 1411610 - RNA, 19 nt, Artificial Sequence
  Description of Artificial Sequence: Synthetic oligonucleotide
agagcugaaauugacacgg

SEQ ID NO: 1411611 - RNA, 19 nt, Artificial Sequence
  Description of Artificial Sequence: Synthetic oligonucleotide
acuagaugaacuugcaaag

SEQ ID NO: 1411612 - RNA, 19 nt, Artificial Sequence
  Description of Artificial Sequence: Synthetic oligonucleotide
uugauauuuccuuugccag

SEQ ID NO: 1411613 - RNA, 19 nt, Artificial Sequence
  Description of Artificial Sequence: Synthetic oligonucleotide
agggauaaagggcagacag

SEQ ID NO: 1411614 - RNA, 19 nt, Artificial Sequence
  Description of Artificial Sequence: Synthetic oligonucleotide
gcuaauaaugguuucaugc

SEQ ID NO: 1411615 - RNA, 19 nt, Artificial Sequence
  Description of Artificial Sequence: Synthetic oligonucleotide
ugagaauccugaaauauaa

SEQ ID NO: 1411616 - RNA, 19 nt, Artificial Sequence
  Description of Artificial Sequence: Synthetic oligonucleotide
uauauaccaaugcuauuag

SEQ ID NO: 1411617 - RNA, 19 nt, Artificial Sequence
  Description of Artificial Sequence: Synthetic oligonucleotide
uuccaaacgguucugaagu

SEQ ID NO: 1411618 - RNA, 19 nt, Artificial Sequence
  Description of Artificial Sequence: Synthetic oligonucleotide
aauuagagcugaaauugac

SEQ ID NO: 1411619 - RNA, 19 nt, Artificial Sequence
  Description of Artificial Sequence: Synthetic oligonucleotide
acugauuauuacugaaaac

SEQ ID NO: 1411620 - RNA, 19 nt, Artificial Sequence
  Description of Artificial Sequence: Synthetic oligonucleotide
uggacauaaauucuauuac

SEQ ID NO: 1411621 - RNA, 19 nt, Artificial Sequence
  Description of Artificial Sequence: Synthetic oligonucleotide
aagcuuuuaaggcuaauaa

SEQ ID NO: 1411622 - RNA, 19 nt, Artificial Sequence
  Description of Artificial Sequence: Synthetic oligonucleotide
cuaauugugguuauuuaug

SEQ ID NO: 1411623 - RNA, 19 nt, Artificial Sequence
  Description of Artificial Sequence: Synthetic oligonucleotide
uaaagauuccuuugggacc

SEQ ID NO: 1411624 - RNA, 19 nt, Artificial Sequence
  Description of Artificial Sequence: Synthetic oligonucleotide
aauauugauuauauaugag

SEQ ID NO: 1411625 - RNA, 19 nt, Artificial Sequence
  Description of Artificial Sequence: Synthetic oligonucleotide
agaaacaucguugagagau

SEQ ID NO: 1411626 - RNA, 19 nt, Artificial Sequence
  Description of Artificial Sequence: Synthetic oligonucleotide
aguauuauaaugguaagaa

SEQ ID NO: 1411627 - RNA, 19 nt, Artificial Sequence
  Description of Artificial Sequence: Synthetic oligonucleotide
agugcauguauacugaggu

SEQ ID NO: 1411628 - RNA, 19 nt, Artificial Sequence
  Description of Artificial Sequence: Synthetic oligonucleotide
uuuaaggcuaauaaugguu

SEQ ID NO: 1411629 - RNA, 19 nt, Artificial Sequence
  Description of Artificial Sequence: Synthetic oligonucleotide
aggaauacuuccuuacuuc

SEQ ID NO: 1411630 - RNA, 19 nt, Artificial Sequence
  Description of Artificial Sequence: Synthetic oligonucleotide
ucuguuugauaccagugca

SEQ ID NO: 1411631 - RNA, 19 nt, Artificial Sequence
  Description of Artificial Sequence: Synthetic oligonucleotide
aacuugcaauuuuagacca

SEQ ID NO: 1411632 - RNA, 19 nt, Artificial Sequence
  Description of Artificial Sequence: Synthetic oligonucleotide
ugcuauuagcaauauauaa

SEQ ID NO: 1411633 - RNA, 19 nt, Artificial Sequence
  Description of Artificial Sequence: Synthetic oligonucleotide
aaugaguccuaucucggca

SEQ ID NO: 1411634 - RNA, 19 nt, Artificial Sequence
  Description of Artificial Sequence: Synthetic oligonucleotide
aaugagaauccugaaauau

SEQ ID NO: 1411635 - RNA, 19 nt, Artificial Sequence
  Description of Artificial Sequence: Synthetic oligonucleotide
uucacaguuaaacauugaa

SEQ ID NO: 1411636 - RNA, 19 nt, Artificial Sequence
  Description of Artificial Sequence: Synthetic oligonucleotide
ucuacaugaauauuugcau

SEQ ID NO: 1411637 - RNA, 19 nt, Artificial Sequence
  Description of Artificial Sequence: Synthetic oligonucleotide
uuuuaguacccauuuuagc

SEQ ID NO: 1411638 - RNA, 19 nt, Artificial Sequence
  Description of Artificial Sequence: Synthetic oligonucleotide
agcauaagaaacaugaccu

SEQ ID NO: 1411639 - RNA, 19 nt, Artificial Sequence
  Description of Artificial Sequence: Synthetic oligonucleotide
ucuauuaauacaguggcua

SEQ ID NO: 1411640 - RNA, 19 nt, Artificial Sequence
  Description of Artificial Sequence: Synthetic oligonucleotide
cugauuauuacugaaaaca

SEQ ID NO: 1411641 - RNA, 19 nt, Artificial Sequence
  Description of Artificial Sequence: Synthetic oligonucleotide
auauaccaaugcuauuagc

SEQ ID NO: 1411642 - RNA, 19 nt, Artificial Sequence
  Description of Artificial Sequence: Synthetic oligonucleotide
aaagagccacuauauacca

SEQ ID NO: 1411643 - RNA, 19 nt, Artificial Sequence
  Description of Artificial Sequence: Synthetic oligonucleotide
uggagaauuccacagugca

SEQ ID NO: 1411644 - RNA, 19 nt, Artificial Sequence
  Description of Artificial Sequence: Synthetic oligonucleotide
uuuaugguuauuucccugu

SEQ ID NO: 1411645 - RNA, 19 nt, Artificial Sequence
  Description of Artificial Sequence: Synthetic oligonucleotide
auaguauuauaaugguaag

SEQ ID NO: 1411646 - RNA, 19 nt, Artificial Sequence
  Description of Artificial Sequence: Synthetic oligonucleotide
gacaaguggcuuuucacag

SEQ ID NO: 1411647 - RNA, 19 nt, Artificial Sequence
  Description of Artificial Sequence: Synthetic oligonucleotide
agacagaagauuaaaauga

SEQ ID NO: 1411648 - RNA, 19 nt, Artificial Sequence
  Description of Artificial Sequence: Synthetic oligonucleotide
auugauuauauaugaggcu

SEQ ID NO: 1411649 - RNA, 19 nt, Artificial Sequence
  Description of Artificial Sequence: Synthetic oligonucleotide
agccacuauauaccaaugc

SEQ ID NO: 1411650 - RNA, 19 nt, Artificial Sequence
  Description of Artificial Sequence: Synthetic oligonucleotide
aaugguaagaaaagcuuug

SEQ ID NO: 1411651 - RNA, 19 nt, Artificial Sequence
  Description of Artificial Sequence: Synthetic oligonucleotide
uguaaguggagaauuccac

SEQ ID NO: 1411652 - RNA, 19 nt, Artificial Sequence
  Description of Artificial Sequence: Synthetic oligonucleotide
uuuccaaacgguucugaag

SEQ ID NO: 1411653 - RNA, 19 nt, Artificial Sequence
  Description of Artificial Sequence: Synthetic oligonucleotide
ugaauuuuaagcacugcuu

SEQ ID NO: 1411654 - RNA, 19 nt, Artificial Sequence
  Description of Artificial Sequence: Synthetic oligonucleotide
ucuauuacuagaugaacuu

SEQ ID NO: 1411655 - RNA, 19 nt, Artificial Sequence
  Description of Artificial Sequence: Synthetic oligonucleotide
gauaccagugcauguauac

SEQ ID NO: 1411656 - RNA, 19 nt, Artificial Sequence
  Description of Artificial Sequence: Synthetic oligonucleotide
auaaaugagcuuuguaagu

SEQ ID NO: 1411657 - RNA, 19 nt, Artificial Sequence
  Description of Artificial Sequence: Synthetic oligonucleotide
uaauacaguggcuaauugu

SEQ ID NO: 1411658 - RNA, 19 nt, Artificial Sequence
  Description of Artificial Sequence: Synthetic oligonucleotide
uuucaugcaacuucagaac

SEQ ID NO: 1411659 - RNA, 19 nt, Artificial Sequence
  Description of Artificial Sequence: Synthetic oligonucleotide
uuaaggcuaauaaugguuu

SEQ ID NO: 1411660 - RNA, 19 nt, Artificial Sequence
  Description of Artificial Sequence: Synthetic oligonucleotide
aguuuccaaaauuuguucu

SEQ ID NO: 1411661 - RNA, 19 nt, Artificial Sequence
  Description of Artificial Sequence: Synthetic oligonucleotide
auggacauaaauucuauua

SEQ ID NO: 1411662 - RNA, 19 nt, Artificial Sequence
  Description of Artificial Sequence: Synthetic oligonucleotide
acggccauuguuuucauug

SEQ ID NO: 1411663 - RNA, 19 nt, Artificial Sequence
  Description of Artificial Sequence: Synthetic oligonucleotide
auugacacgguguaugaca

SEQ ID NO: 1411664 - RNA, 19 nt, Artificial Sequence
  Description of Artificial Sequence: Synthetic oligonucleotide
ugaacuugcaaagaauaga

SEQ ID NO: 1411665 - RNA, 19 nt, Artificial Sequence
  Description of Artificial Sequence: Synthetic oligonucleotide
acagaaagcuggcaaccgc

SEQ ID NO: 1411666 - RNA, 19 nt, Artificial Sequence
  Description of Artificial Sequence: Synthetic oligonucleotide
aguggagaauuccacagug

SEQ ID NO: 1411667 - RNA, 19 nt, Artificial Sequence
  Description of Artificial Sequence: Synthetic oligonucleotide
uuuguaaguggagaauucc

SEQ ID NO: 1411668 - RNA, 19 nt, Artificial Sequence
  Description of Artificial Sequence: Synthetic oligonucleotide
uucaugcaacuucagaacu

SEQ ID NO: 1411669 - RNA, 19 nt, Artificial Sequence
  Description of Artificial Sequence: Synthetic oligonucleotide
uguuacgacuguuacacaa

SEQ ID NO: 1411670 - RNA, 19 nt, Artificial Sequence
  Description of Artificial Sequence: Synthetic oligonucleotide
uucaauuagagcugaaauu

SEQ ID NO: 1411671 - RNA, 19 nt, Artificial Sequence
  Description of Artificial Sequence: Synthetic oligonucleotide
uacagaaacaucguugaga

SEQ ID NO: 1411672 - RNA, 19 nt, Artificial Sequence
  Description of Artificial Sequence: Synthetic oligonucleotide
ugugcucauaggcacuagg

SEQ ID NO: 1411673 - RNA, 19 nt, Artificial Sequence
  Description of Artificial Sequence: Synthetic oligonucleotide
ucguugagagaucuguuug

SEQ ID NO: 1411674 - RNA, 19 nt, Artificial Sequence
  Description of Artificial Sequence: Synthetic oligonucleotide
uuguaaguggagaauucca

SEQ ID NO: 1411675 - RNA, 19 nt, Artificial Sequence
  Description of Artificial Sequence: Synthetic oligonucleotide
gaauccugaaauauaaaga

SEQ ID NO: 1411676 - RNA, 19 nt, Artificial Sequence
  Description of Artificial Sequence: Synthetic oligonucleotide
gacuguuacacaaauggac

SEQ ID NO: 1411677 - RNA, 19 nt, Artificial Sequence
  Description of Artificial Sequence: Synthetic oligonucleotide
ugauauuuccuuugccagc

SEQ ID NO: 1411678 - RNA, 19 nt, Artificial Sequence
  Description of Artificial Sequence: Synthetic oligonucleotide
cuaauaaugguuucaugca

SEQ ID NO: 1411679 - RNA, 19 nt, Artificial Sequence
  Description of Artificial Sequence: Synthetic oligonucleotide
uucauaguuaccacaucgu

SEQ ID NO: 1411680 - RNA, 19 nt, Artificial Sequence
  Description of Artificial Sequence: Synthetic oligonucleotide
cugaguaauaagcgaaacc

SEQ ID NO: 1411681 - RNA, 19 nt, Artificial Sequence
  Description of Artificial Sequence: Synthetic oligonucleotide
gcuuuuaaggcuaauaaug

SEQ ID NO: 1411682 - RNA, 19 nt, Artificial Sequence
  Description of Artificial Sequence: Synthetic oligonucleotide
uaauaguauuauaauggua

SEQ ID NO: 1411683 - RNA, 19 nt, Artificial Sequence
  Description of Artificial Sequence: Synthetic oligonucleotide
acgauuaauaguauuauaa

SEQ ID NO: 1411684 - RNA, 19 nt, Artificial Sequence
  Description of Artificial Sequence: Synthetic oligonucleotide
aauugacacgguguaugac

SEQ ID NO: 1411685 - RNA, 19 nt, Artificial Sequence
  Description of Artificial Sequence: Synthetic oligonucleotide
uauuuaugguuauuucccu

SEQ ID NO: 1411686 - RNA, 19 nt, Artificial Sequence
  Description of Artificial Sequence: Synthetic oligonucleotide
ugcauguauacugagguaa

SEQ ID NO: 1411687 - RNA, 19 nt, Artificial Sequence
  Description of Artificial Sequence: Synthetic oligonucleotide
auuuaugguuauuucccug

SEQ ID NO: 1411688 - RNA, 19 nt, Artificial Sequence
  Description of Artificial Sequence: Synthetic oligonucleotide
uggcuuuucacaguuaaac

SEQ ID NO: 1411689 - RNA, 19 nt, Artificial Sequence
  Description of Artificial Sequence: Synthetic oligonucleotide
uguuugauaccagugcaug

SEQ ID NO: 1411690 - RNA, 19 nt, Artificial Sequence
  Description of Artificial Sequence: Synthetic oligonucleotide
aacgauuaauaguauuaua

SEQ ID NO: 1411691 - RNA, 19 nt, Artificial Sequence
  Description of Artificial Sequence: Synthetic oligonucleotide
uaaauauggcauucacaug

SEQ ID NO: 1411692 - RNA, 19 nt, Artificial Sequence
  Description of Artificial Sequence: Synthetic oligonucleotide
gauuauuacugaaaacaca

SEQ ID NO: 1411693 - RNA, 19 nt, Artificial Sequence
  Description of Artificial Sequence: Synthetic oligonucleotide
aaccagacgucucaacacu

SEQ ID NO: 1411694 - RNA, 19 nt, Artificial Sequence
  Description of Artificial Sequence: Synthetic oligonucleotide
auaaugguuucaugcaacu

SEQ ID NO: 1411695 - RNA, 19 nt, Artificial Sequence
  Description of Artificial Sequence: Synthetic oligonucleotide
agacgucucaacacuagcc

SEQ ID NO: 1411696 - RNA, 19 nt, Artificial Sequence
  Description of Artificial Sequence: Synthetic oligonucleotide
uaccucuacaugaauauuu

SEQ ID NO: 1411697 - RNA, 19 nt, Artificial Sequence
  Description of Artificial Sequence: Synthetic oligonucleotide
uuucauuguucucucugac

SEQ ID NO: 1411698 - RNA, 19 nt, Artificial Sequence
  Description of Artificial Sequence: Synthetic oligonucleotide
uaguauuauaaugguaaga

SEQ ID NO: 1411699 - RNA, 19 nt, Artificial Sequence
  Description of Artificial Sequence: Synthetic oligonucleotide
uugugguuauuuaugguua

SEQ ID NO: 1411700 - RNA, 19 nt, Artificial Sequence
  Description of Artificial Sequence: Synthetic oligonucleotide
uccuuuuauggggaaagag

SEQ ID NO: 1411701 - RNA, 19 nt, Artificial Sequence
  Description of Artificial Sequence: Synthetic oligonucleotide
guaauaagcgaaaccagac

SEQ ID NO: 1411702 - RNA, 19 nt, Artificial Sequence
  Description of Artificial Sequence: Synthetic oligonucleotide
uguugccuuuaaaagggca

SEQ ID NO: 1411703 - RNA, 19 nt, Artificial Sequence
  Description of Artificial Sequence: Synthetic oligonucleotide
gaguaauaagcgaaaccag

SEQ ID NO: 1411704 - RNA, 19 nt, Artificial Sequence
  Description of Artificial Sequence: Synthetic oligonucleotide
aguaauaagcgaaaccaga

SEQ ID NO: 1411705 - RNA, 19 nt, Artificial Sequence
  Description of Artificial Sequence: Synthetic oligonucleotide
aauggacauaaauucuauu

SEQ ID NO: 1411706 - RNA, 19 nt, Artificial Sequence
  Description of Artificial Sequence: Synthetic oligonucleotide
uuaugguuauuucccugug

SEQ ID NO: 1411707 - RNA, 19 nt, Artificial Sequence
  Description of Artificial Sequence: Synthetic oligonucleotide
uuuagaccagacacuaaau

SEQ ID NO: 1411708 - RNA, 19 nt, Artificial Sequence
  Description of Artificial Sequence: Synthetic oligonucleotide
augguuauuucccugugaa

SEQ ID NO: 1411709 - RNA, 19 nt, Artificial Sequence
  Description of Artificial Sequence: Synthetic oligonucleotide
gauuaaaaugaguccuauc

SEQ ID NO: 1411710 - RNA, 19 nt, Artificial Sequence
  Description of Artificial Sequence: Synthetic oligonucleotide
ccucuauuaauacaguggc

SEQ ID NO: 1411711 - RNA, 19 nt, Artificial Sequence
  Description of Artificial Sequence: Synthetic oligonucleotide
uuacuucucucacagcauc

SEQ ID NO: 1411712 - RNA, 19 nt, Artificial Sequence
  Description of Artificial Sequence: Synthetic oligonucleotide
uuucccugugaacaaauuu

SEQ ID NO: 1411713 - RNA, 19 nt, Artificial Sequence
  Description of Artificial Sequence: Synthetic oligonucleotide
gaacuugcaaagaauagaa

SEQ ID NO: 1411714 - RNA, 19 nt, Artificial Sequence
  Description of Artificial Sequence: Synthetic oligonucleotide
aaacaucguugagagaucu

SEQ ID NO: 1411715 - RNA, 19 nt, Artificial Sequence
  Description of Artificial Sequence: Synthetic oligonucleotide
uuaguacccauuuuagcuu

SEQ ID NO: 1411716 - RNA, 19 nt, Artificial Sequence
  Description of Artificial Sequence: Synthetic oligonucleotide
uaagcgaaaccagacgucu

SEQ ID NO: 1411717 - RNA, 19 nt, Artificial Sequence
  Description of Artificial Sequence: Synthetic oligonucleotide
cuauaauuacuaccucuac

SEQ ID NO: 1411718 - RNA, 19 nt, Artificial Sequence
  Description of Artificial Sequence: Synthetic oligonucleotide
uuacuauaauuacuaccuc

SEQ ID NO: 1411719 - RNA, 19 nt, Artificial Sequence
  Description of Artificial Sequence: Synthetic oligonucleotide
uacagaaagcuggcaaccg

SEQ ID NO: 1411720 - RNA, 19 nt, Artificial Sequence
  Description of Artificial Sequence: Synthetic oligonucleotide
auaggcacuaggccugccg

SEQ ID NO: 1411721 - RNA, 19 nt, Artificial Sequence
  Description of Artificial Sequence: Synthetic oligonucleotide
gaucuguuugauaccagug

SEQ ID NO: 1411722 - RNA, 19 nt, Artificial Sequence
  Description of Artificial Sequence: Synthetic oligonucleotide
uacuaccucuacaugaaua

SEQ ID NO: 1411723 - RNA, 19 nt, Artificial Sequence
  Description of Artificial Sequence: Synthetic oligonucleotide
uuacuagaugaacuugcaa

SEQ ID NO: 1411724 - RNA, 19 nt, Artificial Sequence
  Description of Artificial Sequence: Synthetic oligonucleotide
uggggaaagagccacuaua

SEQ ID NO: 1411725 - RNA, 19 nt, Artificial Sequence
  Description of Artificial Sequence: Synthetic oligonucleotide
aguggcuuuucacaguuaa

SEQ ID NO: 1411726 - RNA, 19 nt, Artificial Sequence
  Description of Artificial Sequence: Synthetic oligonucleotide
agaacgauuaauaguauua

SEQ ID NO: 1411727 - RNA, 19 nt, Artificial Sequence
  Description of Artificial Sequence: Synthetic oligonucleotide
uuugauaccagugcaugua

SEQ ID NO: 1411728 - RNA, 19 nt, Artificial Sequence
  Description of Artificial Sequence: Synthetic oligonucleotide
gacgucucaacacuagcca

SEQ ID NO: 1411729 - RNA, 19 nt, Artificial Sequence
  Description of Artificial Sequence: Synthetic oligonucleotide
auaaugguaagaaaagcuu

SEQ ID NO: 1411730 - RNA, 19 nt, Artificial Sequence
  Description of Artificial Sequence: Synthetic oligonucleotide
uauuugcaugaaaaccagu

SEQ ID NO: 1411731 - RNA, 19 nt, Artificial Sequence
  Description of Artificial Sequence: Synthetic oligonucleotide
aaugagcuuuguaagugga

SEQ ID NO: 1411732 - RNA, 19 nt, Artificial Sequence
  Description of Artificial Sequence: Synthetic oligonucleotide
uugaguggaggaauacuuc

SEQ ID NO: 1411733 - RNA, 19 nt, Artificial Sequence
  Description of Artificial Sequence: Synthetic oligonucleotide
ucugacucuccucuauuaa

SEQ ID NO: 1411734 - RNA, 19 nt, Artificial Sequence
  Description of Artificial Sequence: Synthetic oligonucleotide
uuacgacuguuacacaaau

SEQ ID NO: 1411735 - RNA, 19 nt, Artificial Sequence
  Description of Artificial Sequence: Synthetic oligonucleotide
ugaaagucucucugacugc

SEQ ID NO: 1411736 - RNA, 19 nt, Artificial Sequence
  Description of Artificial Sequence: Synthetic oligonucleotide
uuugccagcugaguaauaa

SEQ ID NO: 1411737 - RNA, 19 nt, Artificial Sequence
  Description of Artificial Sequence: Synthetic oligonucleotide
cuauauaccaaugcuauua

SEQ ID NO: 1411738 - RNA, 19 nt, Artificial Sequence
  Description of Artificial Sequence: Synthetic oligonucleotide
accuaaagagcuucaucug

SEQ ID NO: 1411739 - RNA, 19 nt, Artificial Sequence
  Description of Artificial Sequence: Synthetic oligonucleotide
agcugaaauugacacggug

SEQ ID NO: 1411740 - RNA, 19 nt, Artificial Sequence
  Description of Artificial Sequence: Synthetic oligonucleotide
aaacccuacggccauuguu

SEQ ID NO: 1411741 - RNA, 19 nt, Artificial Sequence
  Description of Artificial Sequence: Synthetic oligonucleotide
aaauggacauaaauucuau

SEQ ID NO: 1411742 - RNA, 19 nt, Artificial Sequence
  Description of Artificial Sequence: Synthetic oligonucleotide
cugcuugaauuuuaagcac

SEQ ID NO: 1411743 - RNA, 19 nt, Artificial Sequence
  Description of Artificial Sequence: Synthetic oligonucleotide
cagugcauguauacugagg

SEQ ID NO: 1411744 - RNA, 19 nt, Artificial Sequence
  Description of Artificial Sequence: Synthetic oligonucleotide
acacaaauggacauaaauu

SEQ ID NO: 1411745 - RNA, 19 nt, Artificial Sequence
  Description of Artificial Sequence: Synthetic oligonucleotide
cuauuacuagaugaacuug

SEQ ID NO: 1411746 - RNA, 19 nt, Artificial Sequence
  Description of Artificial Sequence: Synthetic oligonucleotide
uacgacuguuacacaaaug

SEQ ID NO: 1411747 - RNA, 19 nt, Artificial Sequence
  Description of Artificial Sequence: Synthetic oligonucleotide
acaucguugagagaucugu

SEQ ID NO: 1411748 - RNA, 19 nt, Artificial Sequence
  Description of Artificial Sequence: Synthetic oligonucleotide
agagcuucaucugugugug

SEQ ID NO: 1411749 - RNA, 19 nt, Artificial Sequence
  Description of Artificial Sequence: Synthetic oligonucleotide
auuaauacaguggcuaauu

SEQ ID NO: 1411750 - RNA, 19 nt, Artificial Sequence
  Description of Artificial Sequence: Synthetic oligonucleotide
auuauauaugaggcugaag

SEQ ID NO: 1411751 - RNA, 19 nt, Artificial Sequence
  Description of Artificial Sequence: Synthetic oligonucleotide
uccaaaauuuguucuucau

SEQ ID NO: 1411752 - RNA, 19 nt, Artificial Sequence
  Description of Artificial Sequence: Synthetic oligonucleotide
uagaacgauuaauaguauu

SEQ ID NO: 1411753 - RNA, 19 nt, Artificial Sequence
  Description of Artificial Sequence: Synthetic oligonucleotide
auuagagcugaaauugaca

SEQ ID NO: 1411754 - RNA, 19 nt, Artificial Sequence
  Description of Artificial Sequence: Synthetic oligonucleotide
agcgaaaccagacgucuca

SEQ ID NO: 1411755 - RNA, 19 nt, Artificial Sequence
  Description of Artificial Sequence: Synthetic oligonucleotide
guucaguccaauguuacga

SEQ ID NO: 1411756 - RNA, 19 nt, Artificial Sequence
  Description of Artificial Sequence: Synthetic oligonucleotide
auaagcgaaaccagacguc

SEQ ID NO: 1411757 - RNA, 19 nt, Artificial Sequence
  Description of Artificial Sequence: Synthetic oligonucleotide
uugauaccagugcauguau

SEQ ID NO: 1411758 - RNA, 19 nt, Artificial Sequence
  Description of Artificial Sequence: Synthetic oligonucleotide
acuauaauuacuaccucua

SEQ ID NO: 1411759 - RNA, 19 nt, Artificial Sequence
  Description of Artificial Sequence: Synthetic oligonucleotide
uuucugacucugaguacca

SEQ ID NO: 1411760 - RNA, 19 nt, Artificial Sequence
  Description of Artificial Sequence: Synthetic oligonucleotide
agucgaucauauucuuuug

SEQ ID NO: 1411761 - RNA, 19 nt, Artificial Sequence
  Description of Artificial Sequence: Synthetic oligonucleotide
uauuaauacaguggcuaau

SEQ ID NO: 1411762 - RNA, 19 nt, Artificial Sequence
  Description of Artificial Sequence: Synthetic oligonucleotide
agaacuauuuugggaagca

SEQ ID NO: 1411763 - RNA, 19 nt, Artificial Sequence
  Description of Artificial Sequence: Synthetic oligonucleotide
aacgguucugaaguucuga

SEQ ID NO: 1411764 - RNA, 19 nt, Artificial Sequence
  Description of Artificial Sequence: Synthetic oligonucleotide
ugguaagaaaagcuuuguu

SEQ ID NO: 1411765 - RNA, 19 nt, Artificial Sequence
  Description of Artificial Sequence: Synthetic oligonucleotide
cacugauuauuacugaaaa

SEQ ID NO: 1411766 - RNA, 19 nt, Artificial Sequence
  Description of Artificial Sequence: Synthetic oligonucleotide
uuguugccuuuaaaagggc

SEQ ID NO: 1411767 - RNA, 19 nt, Artificial Sequence
  Description of Artificial Sequence: Synthetic oligonucleotide
ucuucauaguuaccacauc

SEQ ID NO: 1411768 - RNA, 19 nt, Artificial Sequence
  Description of Artificial Sequence: Synthetic oligonucleotide
aguaacuuucacaagcaua

SEQ ID NO: 1411769 - RNA, 19 nt, Artificial Sequence
  Description of Artificial Sequence: Synthetic oligonucleotide
aucguugagagaucuguuu

SEQ ID NO: 1411770 - RNA, 19 nt, Artificial Sequence
  Description of Artificial Sequence: Synthetic oligonucleotide
aacccuacggccauuguuu

SEQ ID NO: 1411771 - RNA, 19 nt, Artificial Sequence
  Description of Artificial Sequence: Synthetic oligonucleotide
auuacuagaugaacuugca

SEQ ID NO: 1411772 - RNA, 19 nt, Artificial Sequence
  Description of Artificial Sequence: Synthetic oligonucleotide
aguccaauguuacgacugu

SEQ ID NO: 1411773 - RNA, 19 nt, Artificial Sequence
  Description of Artificial Sequence: Synthetic oligonucleotide
gagucgaucauauucuuuu

SEQ ID NO: 1411774 - RNA, 19 nt, Artificial Sequence
  Description of Artificial Sequence: Synthetic oligonucleotide
cuuugggaccuaaagagcu

SEQ ID NO: 1411775 - RNA, 19 nt, Artificial Sequence
  Description of Artificial Sequence: Synthetic oligonucleotide
cagaacuauuuugggaagc

SEQ ID NO: 1411776 - RNA, 19 nt, Artificial Sequence
  Description of Artificial Sequence: Synthetic oligonucleotide
agccuuauugguauuuucu

SEQ ID NO: 1411777 - RNA, 19 nt, Artificial Sequence
  Description of Artificial Sequence: Synthetic oligonucleotide
ugguuauuucccugugaac

SEQ ID NO: 1411778 - RNA, 19 nt, Artificial Sequence
  Description of Artificial Sequence: Synthetic oligonucleotide
gucgaucauauucuuuuga

SEQ ID NO: 1411779 - RNA, 19 nt, Artificial Sequence
  Description of Artificial Sequence: Synthetic oligonucleotide
acagaagauuaaaaugagu

SEQ ID NO: 1411780 - RNA, 19 nt, Artificial Sequence
  Description of Artificial Sequence: Synthetic oligonucleotide
aggcacuaggccugccggc

SEQ ID NO: 1411781 - RNA, 19 nt, Artificial Sequence
  Description of Artificial Sequence: Synthetic oligonucleotide
acgguguaugacaaucuuc

SEQ ID NO: 1411782 - RNA, 19 nt, Artificial Sequence
  Description of Artificial Sequence: Synthetic oligonucleotide
auaagaaacaugaccuuuu

SEQ ID NO: 1411783 - RNA, 19 nt, Artificial Sequence
  Description of Artificial Sequence: Synthetic oligonucleotide
augguuucaugcaacuuca

SEQ ID NO: 1411784 - RNA, 19 nt, Artificial Sequence
  Description of Artificial Sequence: Synthetic oligonucleotide
ugccuuuaaaagggcaucu

SEQ ID NO: 1411785 - RNA, 19 nt, Artificial Sequence
  Description of Artificial Sequence: Synthetic oligonucleotide
ucucggcauacagaaagcu

SEQ ID NO: 1411786 - RNA, 19 nt, Artificial Sequence
  Description of Artificial Sequence: Synthetic oligonucleotide
cagacgucucaacacuagc

SEQ ID NO: 1411787 - RNA, 19 nt, Artificial Sequence
  Description of Artificial Sequence: Synthetic oligonucleotide
cacuauauaccaaugcuau

SEQ ID NO: 1411788 - RNA, 19 nt, Artificial Sequence
  Description of Artificial Sequence: Synthetic oligonucleotide
uuauggggaaagagccacu

SEQ ID NO: 1411789 - RNA, 19 nt, Artificial Sequence
  Description of Artificial Sequence: Synthetic oligonucleotide
aguuaccacaucguuuugu

SEQ ID NO: 1411790 - RNA, 19 nt, Artificial Sequence
  Description of Artificial Sequence: Synthetic oligonucleotide
caauguuacgacuguuaca

SEQ ID NO: 1411791 - RNA, 19 nt, Artificial Sequence
  Description of Artificial Sequence: Synthetic oligonucleotide
acuauauaccaaugcuauu

SEQ ID NO: 1411792 - RNA, 19 nt, Artificial Sequence
  Description of Artificial Sequence: Synthetic oligonucleotide
gccuuauugguauuuucug

SEQ ID NO: 1411793 - RNA, 19 nt, Artificial Sequence
  Description of Artificial Sequence: Synthetic oligonucleotide
augguaagaaaagcuuugu

SEQ ID NO: 1411794 - RNA, 19 nt, Artificial Sequence
  Description of Artificial Sequence: Synthetic oligonucleotide
ugauaccagugcauguaua

SEQ ID NO: 1411795 - RNA, 19 nt, Artificial Sequence
  Description of Artificial Sequence: Synthetic oligonucleotide
uaguacccauuuuagcuuu

SEQ ID NO: 1411796 - RNA, 19 nt, Artificial Sequence
  Description of Artificial Sequence: Synthetic oligonucleotide
gauuauauaugaggcugaa

SEQ ID NO: 1411797 - RNA, 19 nt, Artificial Sequence
  Description of Artificial Sequence: Synthetic oligonucleotide
gugcucauaggcacuaggc

SEQ ID NO: 1411798 - RNA, 19 nt, Artificial Sequence
  Description of Artificial Sequence: Synthetic oligonucleotide
gcaaagaauagaauauuga

SEQ ID NO: 1411799 - RNA, 19 nt, Artificial Sequence
  Description of Artificial Sequence: Synthetic oligonucleotide
augaguccuaucucggcau

SEQ ID NO: 1411800 - RNA, 19 nt, Artificial Sequence
  Description of Artificial Sequence: Synthetic oligonucleotide
ucguuuuguugccuuuaaa

SEQ ID NO: 1411801 - RNA, 19 nt, Artificial Sequence
  Description of Artificial Sequence: Synthetic oligonucleotide
ugaaauugacacgguguau

SEQ ID NO: 1411802 - RNA, 19 nt, Artificial Sequence
  Description of Artificial Sequence: Synthetic oligonucleotide
aagcgaaaccagacgucuc

SEQ ID NO: 1411803 - RNA, 19 nt, Artificial Sequence
  Description of Artificial Sequence: Synthetic oligonucleotide
ccuuacuucucucacagca

SEQ ID NO: 1411804 - RNA, 19 nt, Artificial Sequence
  Description of Artificial Sequence: Synthetic oligonucleotide
agaugaacuugcaaagaau

SEQ ID NO: 1411805 - RNA, 19 nt, Artificial Sequence
  Description of Artificial Sequence: Synthetic oligonucleotide
ccaauguuacgacuguuac

SEQ ID NO: 1411806 - RNA, 19 nt, Artificial Sequence
  Description of Artificial Sequence: Synthetic oligonucleotide
uggcuaauugugguuauuu

SEQ ID NO: 1411807 - RNA, 19 nt, Artificial Sequence
  Description of Artificial Sequence: Synthetic oligonucleotide
ugggaccuaaagagcuuca

SEQ ID NO: 1411808 - RNA, 19 nt, Artificial Sequence
  Description of Artificial Sequence: Synthetic oligonucleotide
agaaacccuacggccauug

SEQ ID NO: 1411809 - RNA, 19 nt, Artificial Sequence
  Description of Artificial Sequence: Synthetic oligonucleotide
ggacauaaauucuauuacu

SEQ ID NO: 1411810 - RNA, 19 nt, Artificial Sequence
  Description of Artificial Sequence: Synthetic oligonucleotide
auaccagugcauguauacu

SEQ ID NO: 1411811 - RNA, 19 nt, Artificial Sequence
  Description of Artificial Sequence: Synthetic oligonucleotide
gaacgauuaauaguauuau

SEQ ID NO: 1411812 - RNA, 19 nt, Artificial Sequence
  Description of Artificial Sequence: Synthetic oligonucleotide
aucguuuuguugccuuuaa

SEQ ID NO: 1411813 - RNA, 19 nt, Artificial Sequence
  Description of Artificial Sequence: Synthetic oligonucleotide
gaggaauacuuccuuacuu

SEQ ID NO: 1411814 - RNA, 19 nt, Artificial Sequence
  Description of Artificial Sequence: Synthetic oligonucleotide
aacaucguugagagaucug

SEQ ID NO: 1411815 - RNA, 19 nt, Artificial Sequence
  Description of Artificial Sequence: Synthetic oligonucleotide
gaaacaucguugagagauc

SEQ ID NO: 1411816 - RNA, 19 nt, Artificial Sequence
  Description of Artificial Sequence: Synthetic oligonucleotide
acgucucaacacuagccaa

SEQ ID NO: 1411817 - RNA, 19 nt, Artificial Sequence
  Description of Artificial Sequence: Synthetic oligonucleotide
uuccuuuuauggggaaaga

SEQ ID NO: 1411818 - RNA, 19 nt, Artificial Sequence
  Description of Artificial Sequence: Synthetic oligonucleotide
gugaacaaauuuucugacu

SEQ ID NO: 1411819 - RNA, 19 nt, Artificial Sequence
  Description of Artificial Sequence: Synthetic oligonucleotide
auaguucaguccaauguua

SEQ ID NO: 1411820 - RNA, 19 nt, Artificial Sequence
  Description of Artificial Sequence: Synthetic oligonucleotide
ucucugacucuccucuauu

SEQ ID NO: 1411821 - RNA, 19 nt, Artificial Sequence
  Description of Artificial Sequence: Synthetic oligonucleotide
guggagaauuccacagugc
